United States Patent Application Publication US 2022/0090207 A1 - sequence listing, part 7

SEQ ID NO: 82390 - DNA, 30 bp, Homo sapiens
  chr11:64616875-64616905
  hypo
ctgaaggagcacgggcggcaatgtgattgg

SEQ ID NO: 82391 - DNA, 30 bp, Homo sapiens
  chr11:64617572-64617602
  hypo
caaggctgccctccacgtgctgccagacct

SEQ ID NO: 82392 - DNA, 115 bp, Homo sapiens
  chr11:64620326-64620441
  hypo
acctaatactgtatggagtgacgggctaaggagaacaaggccagttcctgcagactccgagcagcgctggggagaagctccctgagacccccgcgggaaagcctggtgggaagcc

SEQ ID NO: 82393 - DNA, 401 bp, Homo sapiens
  chr11:64621796-64622197
  hypo
gggcgccatcactcatgtctgcgcttggagggcggcaccaggtgcgggggcaggtcggcaggcagctcgtggccctccagcttgaccttgatgaggtggttggccagcgcgaactcctcgtcgtccagcagcccgtccttgtccacgtcggccagcttccagatcttccctagcacggtgttggggagcttggacttcaccatctccttcttggcgttggcgcccgtgatcttgccgttgacaggggacagcgtgtagaagatctcgtcgtaggtgggcttgtccttgcccaccacccactccacgtcgtcgatgccctcgccggccccctcgccgtagccgtgcccgaacggcccgttcatggtgccgtcaaaggcgccgcccttgaccacctgggaagg

SEQ ID NO: 82394 - DNA, 87 bp, Homo sapiens; identical to SEQ ID NO: 25383
  chr11:64624926-64625013
  hypo

SEQ ID NO: 82395 - DNA, 30 bp, Homo sapiens
  chr11:64630856-64630886
  hypo
ggacagggtcgcccacggtgatgggagggc

SEQ ID NO: 82396 - DNA, 78 bp, Homo sapiens
  chr11:64631089-64631167
  hypo
gataaacactcctgccgcctgccccggccccaggcccaagcgtgcttggcgccatctgtgagcccaaagccacagggg

SEQ ID NO: 82397 - DNA, 30 bp, Homo sapiens
  chr11:64631193-64631223
  hypo
ctcccagaaggaactcgggccactaactaa

SEQ ID NO: 82398 - DNA, 332 bp, Homo sapiens
  chr11:64635185-64635517
  hypo
ctccatctccgtacccccacctccaaaaaaaagattaaaatggtaaatattatatgttaggtgtattttatcacaatttttaaaaagtgaaaacgaaaagtcctggggctgtgggatgaaagaacagagtggctccgggcaaccaggctgagccaggcatggcacctcagggtagcgtgcacgcaggtgcctctcatggcgacccgcgtcccacccagcctcctccaggccactgcggctctggggcgcccctctccaggcgctggccttacagggtctgccttcctgagaacagctggaccatgtttcccgccagcacagaaggggaagag

SEQ ID NO: 82399 - DNA, 102 bp, Homo sapiens
  chr11:64653029-64653131
  hypo
acagcagagaattaccctgcccgaaatgccaatagggcagaagctgaggcatcctgatgagcgcgcgcacgccacacgcacgtggctggccattattgagaa

SEQ ID NO: 82400 - DNA, 30 bp, Homo sapiens; identical to SEQ ID NO: 25385
  chr11:64659114-64659144
  hypo

SEQ ID NO: 82401 - DNA, 30 bp, Homo sapiens
  chr11:64662732-64662762
  hypo
ggactggggcagggcgggggcctggtcacc

SEQ ID NO: 82402 - DNA, 52 bp, Homo sapiens
  chr11:64668132-64668184
  hypo
agaggaaccccattccctccccgtcctcagcgggccttttagcctgggacaa

SEQ ID NO: 82403 - DNA, 73 bp, Homo sapiens; identical to SEQ ID NO: 25386
  chr11:64672164-64672237
  hypo

SEQ ID NO: 82404 - DNA, 30 bp, Homo sapiens
  chr11:64678431-64678461
  hypo
gggaagaggacaggcgtcagaaggtgcact

SEQ ID NO: 82405 - DNA, 199 bp, Homo sapiens; identical to SEQ ID NO: 48603
  chr11:64698944-64699143
  hypo

SEQ ID NO: 82406 - DNA, 30 bp, Homo sapiens; identical to SEQ ID NO: 25387
  chr11:64707138-64707168
  hypo

SEQ ID NO: 82407 - DNA, 497 bp, Homo sapiens; identical to SEQ ID NO: 48604
  chr11:64739231-64739728
  hypo

SEQ ID NO: 82408 - DNA, 31 bp, Homo sapiens; identical to SEQ ID NO: 8168
  chr11:64759021-64759052
  hypo

SEQ ID NO: 82409 - DNA, 29 bp, Homo sapiens
  chr11:64784668-64784697
  hypo
ctttttttttttttaatcagacggggtct

SEQ ID NO: 82410 - DNA, 28 bp, Homo sapiens
  chr11:64799348-64799376
  hypo
acagagcgagactccatctcaaaaaaaa

SEQ ID NO: 82411 - DNA, 35 bp, Homo sapiens
  chr11:64804456-64804491
  hypo
ttcttgttctgcctcctcccgttcctgctcctgcc

SEQ ID NO: 82412 - DNA, 166 bp, Homo sapiens
  chr11:64809833-64809999
  hypo
tgggattacaggcgtgagccaccgcgcccggctgattttcaaactcttttaacctccccgcccagtcagggttaccaagcaaacaagaacacatatgcccacgaatatacctgagacagaagtttaaggcattagagatactttctatgggcgatgcattccaata

SEQ ID NO: 82413 - DNA, 30 bp, Homo sapiens
  chr11:64845661-64845691
  hypo
gggccaagtagactcggtgtaacttatttt

SEQ ID NO: 82414 - DNA, 936 bp, Homo sapiens
  chr11:64875425-64876361
  hypo
ccgcgccatccaggacgactgccaggtcatcacggcccgcctggcccagcagctgcggcagcgctttaggtgtggcccctctgccctgaccccagcgctcccgccagccccgagccccatctgtgcccggctcctgggccctcctggagctgtccccctgccctgtgtgtgctttgctttcctgctcctgccccatccaccggcagccccggccctgcccttcactacctctccctcgtgcagggagggcggctcaggcgccccggagcaggcagagtgcgtggagctgctgctggccctgggcgagcctgcggaggagctgtgcgaggagttcctggcgcacgcccgcggccggctggagaaggagctgagaaacctggaggccgagctggggccctcacctccggctcccgacgtgttagagttcaccgaccatggaggcagtggcttcgtgggcggcctctgccaggtggcggcggcctaccaggagctgtttgcggcccagggcccagcaggtgccgagaagctggcggccttcgcccggcagctgggcagccgctattttgcgctggtggagcggcggctggcgcaggagcagggtggtggtgacaactcactgctggtgcgggcgctggaccgcttccaccggcgcttgcgggctcccggggccctgctggccgctgccgggctcgcagacgctgccacggagatcgtggaacgagtggcccgcgagcgcctgggccaccacctgcagggtctccgggcggccttcctgggctgcctgacagacgtccgccaggcgctggcagcacctcgcgtggctgggaaggagggccctggcctggccgagttgctggccaatgtggccagctccatcctgagccacattaaggcctctctggcagcagtgcaccttttcaccgccaaagaggtgtc

SEQ ID NO: 82415 - DNA, 30 bp, Homo sapiens
  chr11:64876973-64877003
  hypo
cactagctcctagccgggcagggaatggtg

SEQ ID NO: 82416 - DNA, 30 bp, Homo sapiens; identical to SEQ ID NO: 25393
  chr11:64877296-64877326
  hypo

SEQ ID NO: 82417 - DNA, 30 bp, Homo sapiens; identical to SEQ ID NO: 25394
  chr11:64883896-64883926
  hypo

SEQ ID NO: 82418 - DNA, 231 bp, Homo sapiens
  chr11:64898550-64898781
  hypo
cagagggacccaggaccgagcttgggacagcagccatgacaagcctacttacagggtgttcatgttgcggatggctcggcgagacatgatggcatctgtcacagctttcttgaactgtctgaaaggacagtcagtgaaagcaggagaagggacgggatcaggtcaggaggatcgggggacagggccgggctcacctcatggccaggtacatgggccggatggcaaagagtg

SEQ ID NO: 82419 - DNA, 190 bp, Homo sapiens
  chr11:64950869-64951059
  hypo
gattctccctagcacccgcttccccccccggggcaggttggtagagcaggctaatgtgcatccctcctgccccaggggactgctggctcttggcggccatcgcctccctcactctcaacgacaccctcctgcaccgagtggttccgcacggccagagcttccagaatggctatgccggcatcttccattt

SEQ ID NO: 82420 - DNA, 774 bp, Homo sapiens
  chr11:64951331-64952105
  hypo
aaattccactcctcccggaggtcggtctcagttgccccatctgagaaaggagtgttcgctggggaaaacagatcagcacgtgtggccttctccacgtgtcaagcctcctatcccccaactcctcctgcgctttggcaaggtctgactgagcccagcagaaaagaaagactcgggattaagtctacgtaaaccagcttttcctgacggtgtgcccagggcccatttttcaagtcacaccaatcaattctcaatgagctgcctttgggagggacatgcccagcaaccctggatgagactctccagccttggaggccccagccctgcccgaaggactcttgggtgttccctccttctgcctggttagagagccccttaccctactctgtccttgcccgccttgcgcgggtggaggtggccctcggaacccagggtgcggaacccacagtgcggatccactttggcccagcgccacacccacctgctccagtctgcaggggcgcagtctcgcccccttccctcgctcctccaatccgctcctccctggcctccgattggccagttcagtacccgccacccacactctccgcaacctgggctcctagggccgcctccaccccgccccgccccccgttgtcctggccccgacccctcagatggtacctcgagtccttggtcgcttctgaccccagacgccttcggccccgaccctgccctgggaaacgtggcctttgtggcatctcagaaacaaagcccgtgattgtgagaaccagtcct

SEQ ID NO: 82421 - DNA, 78 bp, Homo sapiens
  chr11:64955442-64955520
  hypo
ggtggtgagcctgatccggatgcggaacccctggggcgaggtggagtggacgggagcctggagcgacaggtgaggggc

SEQ ID NO: 82422 - DNA, 30 bp, Homo sapiens
  chr11:64955904-64955934
  hypo
tggacccatatgaacgggaccagctccggg

SEQ ID NO: 82423 - DNA, 30 bp, Homo sapiens; identical to SEQ ID NO: 25398
  chr11:64956177-64956207
  hypo

SEQ ID NO: 82424 - DNA, 219 bp, Homo sapiens
  chr11:64971911-64972130
  hypo
gcagttgctctgctcgctaacctaacggacttgctcagacttaagcctctagtttccaaatgcaggccgtgagggcatggaccgagcctggcccagcctgcccatcaccctgcatgttccaggtgctcaataatatttgttgaatgaatgaatgcgtgcacagggacgtgctgaggaggcttgggggccaattggctctgccccgccctgcctctgatc

SEQ ID NO: 82425 - DNA, 462 bp, Homo sapiens
  chr11:64975399-64975861
  hypo
gaaaagtgaggctcagagaagcgaagtgacttgtagcagatatgtgacctcagccctccctccagctgcctccacacgggcagggccggggcctctcttacctgctttctccccttctcggtccagcaagtgctctcagaagaggagattgacgagaacttcaaggccctcttcaggcagctggcaggggaggtaggttggggcatggcaggttgggaggggcctgtgaggggcagccctctcctggggcaggtgccacctcctctctctccccaggacatggagatcagcgtgaaggagttgcggacaatcctcaataggatcatcagcaaacgtgagtccccgcggggctgtcccaccaccccaccatttcttccacatcagaatccaggctcctgctcacacattgagctgaacctcatcccttggtctgcatgagtcggggaatcctccagtttttct

SEQ ID NO: 82426 - DNA, 463 bp, Homo sapiens; identical to SEQ ID NO: 25400
  chr11:64977144-64977607
  hypo

SEQ ID NO: 82427 - DNA, 43 bp, Homo sapiens
  chr11:65023026-65023069
  hypo
ctgttacttacagcttcgtgacctccagcgaatcacctctctt

SEQ ID NO: 82428 - DNA, 108 bp, Homo sapiens
  chr11:65028519-65028627
  hypo
aatgctgggattacaggcgtgagtgaccgcacctggcctgggatggacattttaaaggttcctgatacatattgctaaattgttttctcgaaacgctctataccatcc

SEQ ID NO: 82429 - DNA, 26 bp, Homo sapiens
  chr11:65036097-65036123
  hypo
ctaccgtgcccagccattattgtttt

SEQ ID NO: 82430 - DNA, 30 bp, Homo sapiens
  chr11:65045442-65045472
  hypo
cataaaactggttcccgcagagtttcagtg

SEQ ID NO: 82431 - DNA, 30 bp, Homo sapiens
  chr11:65063420-65063450
  hypo
atgtcctcatcatcccgtcagagctgaggt

SEQ ID NO: 82432 - DNA, 196 bp, Homo sapiens; identical to SEQ ID NO: 48614
  chr11:65081962-65082158
  hypo

SEQ ID NO: 82433 - DNA, 30 bp, Homo sapiens
  chr11:65124379-65124409
  hypo
cggcaaaacgcccccgtcctcgcacaaaac

SEQ ID NO: 82434 - DNA, 30 bp, Homo sapiens; identical to SEQ ID NO: 25402
  chr11:65127662-65127692
  hypo

SEQ ID NO: 82435 - DNA, 60 bp, Homo sapiens
  chr11:65145404-65145464
  hypo
agccctggagatggctgatggcgacgggggctggcggtcgcctctggtggtgggtggtgg

SEQ ID NO: 82436 - DNA, 192 bp, Homo sapiens
  chr11:65168191-65168383
  hypo
cagcatgtcctgctgggcctgcgcttccaggagctgtcgtgggaccacacctcccccgaggaggaggagcccatcttgtggctggagttcgacggggacagcgagggcacacctgtcaacaagctcctcaagatctactccaagcaggtagcgcgggtggtgcctgcacacgggtggggaggctgggcccag

SEQ ID NO: 82437 - DNA, 99 bp, Homo sapiens; identical to SEQ ID NO: 8174
  chr11:65189905-65190004
  hypo

SEQ ID NO: 82438 - DNA, 26 bp, Homo sapiens
  chr11:65258596-65258622
  hypo
gtgagccaccacgcccagcctggctt

SEQ ID NO: 82439 - DNA, 29 bp, Homo sapiens
  chr11:65276909-65276938
  hypo
caggtgtgagccaccgatcccggcccaca

SEQ ID NO: 82440 - DNA, 30 bp, Homo sapiens; identical to SEQ ID NO: 25406
  chr11:65296779-65296809
  hypo

SEQ ID NO: 82441 - DNA, 30 bp, Homo sapiens; identical to SEQ ID NO: 25407
  chr11:65305560-65305590
  hypo

SEQ ID NO: 82442 - DNA, 994 bp, Homo sapiens; identical to SEQ ID NO: 48630
  chr11:65306212-65307206
  hypo

SEQ ID NO: 82443 - DNA, 43 bp, Homo sapiens
  chr11:65309091-65309134
  hypo
gggtgggagtgaagccctcatcgcagacacacacataggagcc

SEQ ID NO: 82444 - DNA, 30 bp, Homo sapiens; identical to SEQ ID NO: 25409
  chr11:65348379-65348409
  hypo

SEQ ID NO: 82445 - DNA, 225 bp, Homo sapiens; identical to SEQ ID NO: 25410
  chr11:65353077-65353302
  hypo

SEQ ID NO: 82446 - DNA, 282 bp, Homo sapiens
  chr11:65367042-65367324
  hypo
tgtcggggactccccgcgctcgcgtcctgggcctcccggcggctgcaggtcgcggccaaggcccagcgaggcgagcagggcggtgccgcgcagcagcgcccgctggatcagcttgggcgtcccagagctgctaccgcgctctgcggggacaggcctcttgggctcctcgggctccaggctaggccgcggggggttacctgcgggcagaggcggcacaggtgagggtgtggctggtgcatattccgggtgagggcccaagacctctccgtggtcttggaacaa

SEQ ID NO: 82447 - DNA, 31 bp, Homo sapiens
  chr11:65375090-65375121
  hypo
gggtcccttgattcctcgcaccttttccttg

SEQ ID NO: 82448 - DNA, 31 bp, Homo sapiens; identical to SEQ ID NO: 25412
  chr11:65385209-65385240
  hypo

SEQ ID NO: 82449 - DNA, 30 bp, Homo sapiens
  chr11:65386013-65386043
  hypo
ggcagccacccctgcgaagacactctccac

SEQ ID NO: 82450 - DNA, 442 bp, Homo sapiens
  chr11:65387058-65387500
  hypo
aggccattcggagacgccacaatgcaggcagcaaccccacccctccagcctctgtcatgggctcgccgcccaggtgagcaccttgccagctgtgccgaggggcaccgggggccggggagggcccgcaagctctagctggcgctgacctggggctgaccctctccagcagcctgcaggaagctcagcggggccgggctgcctcccactcccgggcgctgacgctgccctctgcgctgcatttcgcctcttcactgttgctcacccgggccggtgccaatgtgcatgaggcctgcacctttgatgacacttctgagggtgctgtgcactatttctacgatgagagcggtgagcctttcccaagcccggtggcccagtgcctccccgccttcccccaacagcctgagtcctcctagcagtggtgctcgctcggccctgtggcagg

SEQ ID NO: 82451 - DNA, 224 bp, Homo sapiens; identical to SEQ ID NO: 25415
  chr11:65388103-65388327
  hypo

SEQ ID NO: 82452 - DNA, 904 bp, Homo sapiens; identical to SEQ ID NO: 25416
  chr11:65397156-65398060
  hypo

SEQ ID NO: 82453 - DNA, 30 bp, Homo sapiens; identical to SEQ ID NO: 25417
  chr11:65412564-65412594
  hypo

SEQ ID NO: 82454 - DNA, 125 bp, Homo sapiens
  chr11:65413988-65414113
  hypo
gccccttcgcagccaacgccgacttccgggccttcctgctggccaaagcgctgaatggtgagcaggcggccggccacgcgcgccagttccacgccatggccacgcgcacccgccagcagtacctg

SEQ ID NO: 82455 - DNA, 50 bp, Homo sapiens; identical to SEQ ID NO: 8186
  chr11:65419933-65419983
  hypo

SEQ ID NO: 82456 - DNA, 50 bp, Homo sapiens
  chr11:65425913-65425963
  hypo
gcgaaaaggagcctcgggcctcccagcctggtcccgtgaaatacacctca

SEQ ID NO: 82457 - DNA, 33 bp, Homo sapiens
  chr11:65465491-65465524
  hypo
accaccgcgcccggccatggcttacctattctc

SEQ ID NO: 82458 - DNA, 17 bp, Homo sapiens
  chr11:65478547-65478564
  hypo
gccgttttgtcccatta

SEQ ID NO: 82459 - DNA, 30 bp, Homo sapiens
  chr11:65495234-65495264
  hypo
gagatcgcccactgcggccaggcaaggcta

SEQ ID NO: 82460 - DNA, 30 bp, Homo sapiens
  chr11:65511040-65511070
  hypo
acaggcgtgagccaccgcaccctcttggcc

SEQ ID NO: 82461 - DNA, 112 bp, Homo sapiens
  chr11:65511372-65511484
  hypo
ctgcagcgtgggagtcgcagaggaggaggcacagccggggctgtgtggcccaaggggccagcgggagctgggaacaggtgaaagcctcaccccctgccgagttggcagggca

SEQ ID NO: 82462 - DNA, 38 bp, Homo sapiens; identical to SEQ ID NO: 25420
  chr11:65524509-65524547
  hypo

SEQ ID NO: 82463 - DNA, 30 bp, Homo sapiens; identical to SEQ ID NO: 48643
  chr11:65548871-65548901
  hypo

SEQ ID NO: 82464 - DNA, 916 bp, Homo sapiens; identical to SEQ ID NO: 8189
  chr11:65554042-65554958
  hypo

SEQ ID NO: 82465 - DNA, 507 bp, Homo sapiens; identical to SEQ ID NO: 48645
  chr11:65555255-65555762
  hypo

SEQ ID NO: 82466 - DNA, 30 bp, Homo sapiens; identical to SEQ ID NO: 25422
  chr11:65557170-65557200
  hypo

SEQ ID NO: 82467 - DNA, 303 bp, Homo sapiens; identical to SEQ ID NO: 48646
  chr11:65582777-65583080
  hypo

SEQ ID NO: 82468 - DNA, 848 bp, Homo sapiens; identical to SEQ ID NO: 48648
  chr11:65600723-65601571
  hypo

SEQ ID NO: 82469 - DNA, 30 bp, Homo sapiens; identical to SEQ ID NO: 25426
  chr11:65629223-65629253
  hypo

SEQ ID NO: 82470 - DNA, 85 bp, Homo sapiens
  chr11:65629464-65629549
  hypo
tcggcactcaggagcccgagtgatactgctggtgctctaccgggagcacctggtgagcactgggctacaccgggaggcggaacca

SEQ ID NO: 82471 - DNA, 30 bp, Homo sapiens
  chr11:65633538-65633568
  hypo
cagcccccagcccccgtctgtcccccaacc

SEQ ID NO: 82472 - DNA, 93 bp, Homo sapiens
  chr11:65634005-65634098
  hypo
acccagggcctcctggcgctgtccagagtggagtttcttaggacccctgcaagccagccaagtccaaatctctgggccggggcctggagtccg

SEQ ID NO: 82473 - DNA, 30 bp, Homo sapiens; identical to SEQ ID NO: 25428
  chr11:65635934-65635964
  hypo

SEQ ID NO: 82474 - DNA, 100 bp, Homo sapiens; identical to SEQ ID NO: 25429
  chr11:65665114-65665214
  hypo

SEQ ID NO: 82475 - DNA, 361 bp, Homo sapiens; identical to SEQ ID NO: 25430
  chr11:65684984-65685345
  hypo

SEQ ID NO: 82476 - DNA, 183 bp, Homo sapiens
  chr11:65698331-65698514
  hypo
tccttggagaatgggtccaggcgattcagttgttctcatttgggctcgccttgacctctcagtggctcttgtcatagttggtcgcttgcctcctctttgaaacactttcttcacttggatgggggccctcactctcttggcaatctttttttttttttgagacggagtctcgcactctcaccc

SEQ ID NO: 82477 - DNA, 30 bp, Homo sapiens
  chr11:65706283-65706313
  hypo
accgcgcccggcccagactagacatttcaa

SEQ ID NO: 82478 - DNA, 37 bp, Homo sapiens
  chr11:65722777-65722814
  hypo
aaaagagttaggtactcggctgtacgccgtggctcac

SEQ ID NO: 82479 - DNA, 30 bp, Homo sapiens; identical to SEQ ID NO: 25433
  chr11:65733612-65733642
  hypo

SEQ ID NO: 82480 - DNA, 66 bp, Homo sapiens; identical to SEQ ID NO: 25434
  chr11:65733941-65734007
  hypo

SEQ ID NO: 82481 - DNA, 30 bp, Homo sapiens; identical to SEQ ID NO: 25435
  chr11:65744001-65744031
  hypo

SEQ ID NO: 82482 - DNA, 121 bp, Homo sapiens; identical to SEQ ID NO: 48657
  chr11:65746277-65746398
  hypo

SEQ ID NO: 82483 - DNA, 30 bp, Homo sapiens; identical to SEQ ID NO: 25436
  chr11:65746739-65746769
  hypo

SEQ ID NO: 82484 - DNA, 40 bp, Homo sapiens; identical to SEQ ID NO: 25437
  chr11:65754936-65754976
  hypo

SEQ ID NO: 82485 - DNA, 17 bp, Homo sapiens
  chr11:65760753-65760770
  hypo
gtgtataaacttgagcg

SEQ ID NO: 82486 - DNA, 241 bp, Homo sapiens
  chr11:65761069-65761310
  hypo
aaaaaaacttgagctttctacagaaaacatctgtaggagggaaagaaattaatcagccgggagcagagatgacagagataaatgagagagcctgaggaattcatgctgctggcattggttcatccctgcccgatgcgcaccactcagagacctcaggtcaatgagccttgcttacttctcctaatttgagttcaattttgtcatttataagaaagtcccgcatacgccaggatggtggctc

SEQ ID NO: 82487 - DNA, 30 bp, Homo sapiens
  chr11:65773964-65773994
  hypo
gctttgcagggctccggcctcaccacacct

SEQ ID NO: 82488 - DNA, 35 bp, Homo sapiens
  chr11:65787644-65787679
  hypo
cagcttctcttggatccgggcggccctctgggaag

SEQ ID NO: 82489 - DNA, 42 bp, Homo sapiens; identical to SEQ ID NO: 25439
  chr11:65810129-65810171
  hypo

SEQ ID NO: 82490 - DNA, 30 bp, Homo sapiens; identical to SEQ ID NO: 25440
  chr11:65810501-65810531
  hypo

SEQ ID NO: 82491 - DNA, 79 bp, Homo sapiens; identical to SEQ ID NO: 25441
  chr11:65817721-65817800
  hypo

SEQ ID NO: 82492 - DNA, 242 bp, Homo sapiens
  chr11:65935758-65936000
  hypo
tttggaggagaatcaacgtatcaatgctagagtgtctcttgtgcatgaacatggcatctcttttgtcttacaatgacatttgtatacgtacagtataacttacaactccatgcaggtcttgcacatcttatggagcgagacagtgtagagacagcgtagagtagtggttttaagagcaaaggcttcggaaccaggctgcctggtttcagtcctcacttagctgcttacggtgtcatcttggg

SEQ ID NO: 82493 - DNA, 61 bp, Homo sapiens
  chr11:65996091-65996152
  hypo
gttgagtgagtaaaaagaagccgaatgccaaaaaatgcacgccataggattccagttctgt

SEQ ID NO: 82494 - DNA, 30 bp, Homo sapiens
  chr11:65999341-65999371
  hypo
acaccgtttcccatccgcgaggcttgctgc

SEQ ID NO: 82495 - DNA, 22 bp, Homo sapiens
  chr11:66021656-66021678
  hypo
cgctcctgcctggggaacacag

SEQ ID NO: 82496 - DNA, 30 bp, Homo sapiens; identical to SEQ ID NO: 48665
  chr11:66045471-66045501
  hypo

SEQ ID NO: 82497 - DNA, 71 bp, Homo sapiens; identical to SEQ ID NO: 25442
  chr11:66047172-66047243
  hypo

SEQ ID NO: 82498 - DNA, 269 bp, Homo sapiens
  chr11:66052168-66052437
  hypo
agagtcaggtagagctggagacgctgccgggggacggggccccccatgctgtcggggcccagggctgctgtccgcaaagagcgcacctggaagaaaggagaactgaagcctggccaggagggggaggtttgccctcaagtgaaggcaggggaatgggggggtgcaccagactcacaatgaagtacatgagcgccgatgaggtccaggccagcgccacgtagtagccatcgctgccgaacagcagccccgtgagcacactgaggatcatt

SEQ ID NO: 82499 - DNA, 741 bp, Homo sapiens; identical to SEQ ID NO: 48668
  chr11:66079390-66080131
  hypo

SEQ ID NO: 82500 - DNA, 30 bp, Homo sapiens
  chr11:66099701-66099731
  hypo
ggctcagggtctcccgccccgaatgaccct

SEQ ID NO: 82501 - DNA, 200 bp, Homo sapiens
  chr11:66099977-66100177
  hypo
aggccactccgcccggcggtagacgaggtagccagtggtgggcagcctgtgggccagggccccagggggcaggcggtggtagccctgctccttgtacaggaagaggccaaaagtgttgggctgggtcactcggaacttggtggcacagagctggttcagggtggcaatcgaggcttctgggggcacggccagggtcttgg

SEQ ID NO: 82502 - DNA, 31 bp, Homo sapiens
  chr11:66101068-66101099
  hypo
tcacagtgggccaagacgaggctcagcagag

SEQ ID NO: 82503 - DNA, 214 bp, Homo sapiens
  chr11:66102040-66102254
  hypo
cgggcccggctcagcgcctgacggatgccctgcagctcctggggctcgggcccagcccgcacctgggtcagtaggtcctgcaccagctggcccgcggctgtgtgtcggtcctgcatcagtgctgccgcagcccggcccacctgccgctccggtgccagtagggagcagaaggcggcgctcatggaccgaagcagaggtcgtcggcggcccaggt

SEQ ID NO: 82504 - DNA, 31 bp, Homo sapiens; identical to SEQ ID NO: 8198
  chr11:66107464-66107495
  hypo

SEQ ID NO: 82505 - DNA, 30 bp, Homo sapiens
  chr11:66113651-66113681
  hypo
aaccaagaaaccttcgttcaggacctcaaa

SEQ ID NO: 82506 - DNA, 308 bp, Homo sapiens
  chr11:66113949-66114257
  hypo
cttatgagcacctggctgattcggttgaagccgtactgccgaaagcgctcgtcgaaggtgggcaccttgcctcctgccacgtagaatggctcccaggggtcctgccaaggtaccacgtaggcgggccgcagcaagctctcttccggcaggttgacccagcgggaatagttggtgggtgcctggcagggggtgcacaacccataatagaagggccgcacctcgccaacctggtagagctgcaccagctcgtttttgttcatgggcatgcggcgggctcttcggatttcgaaggcaggcaccaccagcgc

SEQ ID NO: 82507 - DNA, 31 bp, Homo sapiens; identical to SEQ ID NO: 25448
  chr11:66128652-66128683
  hypo

SEQ ID NO: 82508 - DNA, 352 bp, Homo sapiens; identical to SEQ ID NO: 48671
  chr11:66176317-66176669
  hypo

SEQ ID NO: 82509 - DNA, 21 bp, Homo sapiens
  chr11:66205042-66205063
  hypo
caagaaaaaaataaatcgggg

SEQ ID NO: 82510 - DNA, 30 bp, Homo sapiens
  chr11:66241269-66241299
  hypo
cctggtgatgcacccggcaggcggcttctc

SEQ ID NO: 82511 - DNA, 30 bp, Homo sapiens
  chr11:66243062-66243092
  hypo
tggcaggtggaaaacgagtccaacgtgctg

SEQ ID NO: 82512 - DNA, 31 bp, Homo sapiens; identical to SEQ ID NO: 25450
  chr11:66266000-66266031
  hypo

SEQ ID NO: 82513 - DNA, 30 bp, Homo sapiens
  chr11:66325273-66325303
  hypo
gcgtctgcacaagccgccccgcattcagga

SEQ ID NO: 82514 - DNA, 30 bp, Homo sapiens; identical to SEQ ID NO: 25451
  chr11:66331594-66331624
  hypo

SEQ ID NO: 82515 - DNA, 31 bp, Homo sapiens
  chr11:66333945-66333976
  hypo
caggcaggggtttccccggggagcaggtagg

SEQ ID NO: 82516 - DNA, 234 bp, Homo sapiens
  chr11:66373084-66373318
  hypo
aggaggctgtgctctgcggatggtgcatgaggaacccaggggtgggggccaaacaggtacccacccctgaccacacattcttctgcaggttggcctgtggcatcattgcacgctccgctggccttttccagaaccccaagcagatctgctcttgcgatggcctcaccatctgggaggagcgaggccggcccatcgctggcaagggccgaaaggagtcagcgcagccccctgccc

SEQ ID NO: 82517 - DNA, 30 bp, Homo sapiens
  chr11:66393926-66393956
  hypo
actaggtatggttccgaccggcgtttagcc

SEQ ID NO: 82518 - DNA, 715 bp, Homo sapiens; identical to SEQ ID NO: 25452
  chr11:66410883-66411598
  hypo

SEQ ID NO: 82519 - DNA, 30 bp, Homo sapiens; identical to SEQ ID NO: 25453
  chr11:66452952-66452982
  hypo

SEQ ID NO: 82520 - DNA, 30 bp, Homo sapiens; identical to SEQ ID NO: 25454
  chr11:66453725-66453755
  hypo

SEQ ID NO: 82521 - DNA, 279 bp, Homo sapiens
  chr11:66454423-66454702
  hypo
aactctcctcccatcccgagagcactgttccctgttcctaccccagcttgaagacatgtttgcgctttcggtaatcaaaggcgacgctgccctgggccctggccaggctgacaggcacttctccgtggtatggcactcccgcgctggctgccttggcatccttgtaaaagccgaggctcccacgccgcaggacacagtacacgttctgccaggacctgcgagggacgcggtgctgactggccggcctcagtggcgcccgcaacctggagccctcttggg

SEQ ID NO: 82522 - DNA, 266 bp, Homo sapiens
  chr11:66457264-66457530
  hypo
gcctcacccacctcctcggccgcatagtggctcctggccagcagctccttccccatgtcgatgcaggaggagaagcggtctgcccgggcctctatctctgccttgatgccttgctggttcttgatgactagatccgcggaggacacatccctggggggaggcagaaacagcatcacctgctgcccacagccccatcacagcccagccacacaacccgtggaggccctgagccctgggattctcaccggggacgctcctgggcatcc

SEQ ID NO: 82523 - DNA, 30 bp, Homo sapiens
  chr11:66458814-66458844
  hypo
ggcagcgttgaggtcgcggccagtcccgtc

SEQ ID NO: 82524 - DNA, 30 bp, Homo sapiens
  chr11:66459066-66459096
  hypo
tacgcgctcctgaccgatggtgcttgtgtc

SEQ ID NO: 82525 - DNA, 30 bp, Homo sapiens
  chr11:66468375-66468405
  hypo
cgcgcctcccccagcgactcttctcgacgc

SEQ ID NO: 82526 - DNA, 30 bp, Homo sapiens
  chr11:66473160-66473190
  hypo
ctgggttgcagaagcgcagggcagaggcgc

SEQ ID NO: 82527 - DNA, 30 bp, Homo sapiens
  chr11:66475223-66475253
  hypo
cgtctcaatggcttcgtgcttccgtactgc

SEQ ID NO: 82528 - DNA, 30 bp, Homo sapiens
  chr11:66475637-66475667
  hypo
tgagccaggtctcccgcatggcagccttgc

SEQ ID NO: 82529 - DNA, 30 bp, Homo sapiens
  chr11:66488706-66488736
  hypo
ctcatggtggtaggcggcttcctgctcctg

SEQ ID NO: 82530 - DNA, 30 bp, Homo sapiens; identical to SEQ ID NO: 25456
  chr11:66510766-66510796
  hypo

SEQ ID NO: 82531 - DNA, 141 bp, Homo sapiens
  chr11:66511193-66511334
  hypo
attcagtgcagtcaaacgtggaaaggggcctggatagggaggggtcgactcccaggtcccacctttgcgggggaagctggtccccctggattaggctgggagatgcttggggctggttgtaaggtaaaagacggggggtcg

SEQ ID NO: 82532 - DNA, 21 bp, Homo sapiens
  chr11:66511633-66511654
  hypo
gggcgtcgtttttaatttcag

SEQ ID NO: 82533 - DNA, 89 bp, Homo sapiens
  chr11:66513181-66513270
  hypo
aggctagaacccagggcgctgactcataggccagtgttcttttcccaactgcgctgtcataccgacatgagaatatctttagggtttgt

SEQ ID NO: 82534 - DNA, 84 bp, Homo sapiens; identical to SEQ ID NO: 25460
  chr11:66513569-66513653
  hypo

SEQ ID NO: 82535 - DNA, 30 bp, Homo sapiens
  chr11:66514957-66514987
  hypo
aggcatgagccactgcgctcagcgttgcac

SEQ ID NO: 82536 - DNA, 34 bp, Homo sapiens
  chr11:66515369-66515403
  hypo
cataagctaccgcgcagggcagcattagcactct

SEQ ID NO: 82537 - DNA, 84 bp, Homo sapiens; identical to SEQ ID NO: 25461
  chr11:66557366-66557450
  hypo

SEQ ID NO: 82538 - DNA, 89 bp, Homo sapiens
  chr11:66557749-66557838
  hypo
aagatatgttacttgatcccaaggaacctggaatataaatagaaagatcaagaagtaaacacgtaattacaatacggtgtgattcccag

SEQ ID NO: 82539 - DNA, 146 bp, Homo sapiens
  chr11:66600087-66600233
  hypo
catggctggctgtgccttctacgatgcacttcccaggaacgtgtccactgttcctttcagctgcttcaccgcaaatactcttgccagtttccctcggacttggaaagccgctgtccacgccttgcgcaaataaagctaaaatccat

SEQ ID NO: 82540 - DNA, 30 bp, Homo sapiens; identical to SEQ ID NO: 25462
  chr11:66620003-66620033
  hypo

SEQ ID NO: 82541 - DNA, 1046 bp, Homo sapiens
  chr11:66625239-66626285
  hypo
ctgctggccagtggagcggccgcctgcccgctgccctgcgtctgccagaacctgtccgagtcgctcagcaccctctgtgcccaccgaggcctgctgtttgtgccgcccaacgtggaccggcgcacagtggagctgcggctggctgacaacttcatccaggccctggggccccctgacttccgcaacatgacgggactggtggacctgacactgtctcgcaatgccatcacccgcattggggcccgcgcctttggggacctcgagagcctgcgttccctccaccttgacggcaacaggctggtggagctgggcaccgggagcctccggggccccgtcaatctgcagcacctcatcctcagcggcaaccagctgggccgcatcgcgccgggagccttcgacgacttcctagagagcctggaggacctggacctgtcctacaacaacctccggcaggtgccctgggccggcatcggcgccatgcctgccctgcacaccctcaacctggaccataaccttattgacgcactgcccccaggcgccttcgcccagctcggtcagctctcccgcctggacctcacctccaaccgcctggccacgctggctccggacccgcttttctctcgtgggcgtgatgcagaggcctctcccgcccccctggtgctgagctttagcgggaaccccctgcactgcaactgtgagctgctgtggctgcggcggctggcgcggccggacgacctggaaacgtgcgcctccccgcccggcctggccggccgctacttctgggcagtgcccgagggcgagttctcctgtgagccgcccctcattgcccgccacacgcagcgcctctgggtgctggaaggccagcgggccacgctgcggtgccgggccctgggtgaccccgcgcctaccatgcactgggtcggtcctgacgaccggttggttggcaactcctcccgagcccgggctttccccaacgggaccttagagattggggtgaccggcgctggggacgctgggggctacacctgcatcgccaccaaccctgc

SEQ ID NO: 82542 - DNA, 92 bp, Homo sapiens
  chr11:66626486-66626578
  hypo
tcccgggcggccagccgacccagtgtggatgttccaaatccagtacaacagcagcgaagatgagaccctcatctaccggtgaggatgcgtgc

SEQ ID NO: 82543 - DNA, 35 bp, Homo sapiens; identical to SEQ ID NO: 25465
  chr11:66628275-66628310
  hypo

SEQ ID NO: 82544 - DNA, 30 bp, Homo sapiens
  chr11:66628888-66628918
  hypo
caaggcgctgccaccgggcagccgaggtga

SEQ ID NO: 82545 - DNA, 84 bp, Homo sapiens
  chr11:66629458-66629542
  hypo
gagggagcagaggaaccgggcacaaccccaggagccagccaggaccacagagcaacgggcaggggcaggcgagggggatggcct

SEQ ID NO: 82546 - DNA, 350 bp, Homo sapiens
  chr11:66631164-66631514
  hypo
ggcccttggtggggaagtgaacggtcagggggccctccaagggccgggagcaaaggcaggcgggggctgcagcctctcaccttcacacctcggacgcggaactccgcaagggccctgctcatcttggtggcggccgtggggtggtctttgccgtgggcaatgactttgaccagcagggagtcgtagtggggcgagatgacggctccttggaaggcggaagcattatccaggcggatgcccatgccctctccgctccggaacacctgtgggaagggtgaggcgtgaggacctgcgccagaaactgcggtcaaaagtgccccacccaccccgaggctggccaggtgtgcacc

SEQ ID NO: 82547 - DNA, 31 bp, Homo sapiens; identical to SEQ ID NO: 25467
  chr11:66631858-66631889
  hypo

SEQ ID NO: 82548 - DNA, 85 bp, Homo sapiens
  chr11:66633698-66633783
  hypo
cctcggtggtgacccggcactggatggcacacccgttgatgcggatgttctcctgccgcaggcccaggtcgggtaggctcctgcc

SEQ ID NO: 82549 - DNA, 63 bp, Homo sapiens
  chr11:66637037-66637100
  hypo
gtaaataagacctgacttaaacgcgaccctggtcgatgcctcgcattagctgtggctgaggcc

SEQ ID NO: 82550 - DNA, 98 bp, Homo sapiens
  chr11:66637737-66637835
  hypo
ggctcctgtcccaacacgggaagcccacccttcacctgtttagcgagtttcacagagtcgctggtgagccgagtccgaagctgcgggtccaggtgggc

SEQ ID NO: 82551 - DNA, 30 bp, Homo sapiens; identical to SEQ ID NO: 25468
  chr11:66644008-66644038
  hypo

SEQ ID NO: 82552 - DNA, 30 bp, Homo sapiens; identical to SEQ ID NO: 25469
  chr11:66644471-66644501
  hypo

SEQ ID NO: 82553 - DNA, 30 bp, Homo sapiens; identical to SEQ ID NO: 25470
  chr11:66647155-66647185
  hypo

SEQ ID NO: 82554 - DNA, 139 bp, Homo sapiens
  chr11:66652535-66652674
  hypo
gaggccttggggacttcgggacctgtcaagctcaggacaagcgggtgtcacccggtgttagaggttgaattgtgtcccccaccaaaaaagatacactgaagtcctaacccctagcacctaggtcagaatgtgaccttat

SEQ ID NO: 82555 - DNA, 101 bp, Homo sapiens
  chr11:66654306-66654407
  hypo
gacctgggagtcatcccagcccgctccagagacgaaggcaggaaggcacgctgctaggatgtgtcagtgccacggtgcacgcccctggcttcagaacctag

SEQ ID NO: 82556 - DNA, 357 bp, Homo sapiens
  chr11:66655203-66655560
  hypo
ggaaaggtcttggagcgcctggagtgatgccaaaagtcccactcagaagaaagatcagtttgggatgccaaaagagacctcccactctctttcagtttgggaggtcaaaaatccaacatcactttcacaggccgaaaccaagtgagggcagggctgcgcccctccgagggcctgcaacgaatccctcccgagtcttttccagcctctatggctgccgggctcctttgctcgtggccacatcactcccacctctggctctgtctccacatcgccttctcctcagcataggtctctgtcctctaaggacacttgtgatggcattcggggcccacctggatgatccgggatcacctttcc

SEQ ID NO: 82557 - DNA, 31 bp, Homo sapiens; identical to SEQ ID NO: 25473
  chr11:66658266-66658297
  hypo

SEQ ID NO: 82558 - DNA, 39 bp, Homo sapiens
  chr11:66658550-66658589
  hypo
agagtctcgctctgtcgcccaagcttgagtgcagtggcg

SEQ ID NO: 82559 - DNA, 31 bp, Homo sapiens
  chr11:66664018-66664049
  hypo
tccctgggagagggcacgccaagggagcaga

SEQ ID NO: 82560 - DNA, 93 bp, Homo sapiens; identical to SEQ ID NO: 25474
  chr11:66665003-66665096
  hypo

SEQ ID NO: 82561 - DNA, 299 bp, Homo sapiens
  chr11:66676019-66676318
  hypo
ggtaccaccccaccatcgcaaggaagcaaaacaccaggctgagctctgaccagctccttggaggaggcacagtcaatagctcactgttagatcttttgcttggcctcccgaacccgaggctaattggtcggaggtcttgcatggttcggcgcgctcactgtgtgacagaagctggcatctgaagagagcgggtaggctgagcctgctacgggaacgtaagtgcgccctgatccaagccaggcagaggtctgaacaccccgatgtccccgagaacacgcgttaactgaaaagtcagggtg

SEQ ID NO: 82562 - DNA, 59 bp, Homo sapiens
  chr11:66676877-66676936
  hypo
tgcaggacatgatcttcggaacaggtgtccctgccgctcccccccgaagagaagctgcc

SEQ ID NO: 82563 - DNA, 148 bp, Homo sapiens
  chr11:66677519-66677667
  hypo
ccctgaaaccaacaattatgacgactttataggtgttttcttcatctgagaaaaacacaagcggggggagtaagtgtctggcttaaacggtagcaaggttatgcgctgctgccctggcgaacgagtcgctcacatgctcaacaacact

SEQ ID NO: 82564 - DNA, 31 bp, Homo sapiens
  chr11:66683035-66683066
  hypo
cagctgtggaccactccgtgccctgtgatcc

SEQ ID NO: 82565 - DNA, 40 bp, Homo sapiens
  chr11:66683677-66683717
  hypo
agacagcaagcctgtcctgctcgttgccaagcagttttat

SEQ ID NO: 82566 - DNA, 100 bp, Homo sapiens
  chr11:66683836-66683936
  hypo
gtgagccactgtgaccgacctgccaagcagttttgtatgtgcagtctgtgctctgaacagggttaaggaggacttcaccgtctaagcagatctggcttat

SEQ ID NO: 82567 - DNA, 26 bp, Homo sapiens
  chr11:66695177-66695203
  hypo
gagcgaaagtccgtctcaaaaaaaaa

SEQ ID NO: 82568 - DNA, 148 bp, Homo sapiens; identical to SEQ ID NO: 25478
  chr11:66695455-66695603
  hypo

SEQ ID NO: 82569 - DNA, 347 bp, Homo sapiens
  chr11:66701353-66701700
  hypo
gtctcaaatcccaacacgcagctggggttcacagaatgaacttccagccctaatgctcactacgccccaccagcacactccaacattgcttcccaagtgctaggccctgaggattccacagtgatcaatgcaggcacaacctccacccttgccggcttcccactgccttcctccacgccagcgaggctggggcatcaccctctgtctcatcacctggcctcactcccattgccactgtccgggggcacccgcctcctacgaactcaaatatcacacatgcgaggaccagctcctccacccacctgagagagtcccctcatcttgcagggcctcggattcacatattc

SEQ ID NO: 82570 - DNA, 34 bp, Homo sapiens
  chr11:66706996-66707030
  hypo
tggacacagtggttcacgcctgtaatcctaatac

SEQ ID NO: 82571 - DNA, 45 bp, Homo sapiens
  chr11:66710159-66710204
  hypo
ataccactgaactgtacgctggaaaatggttaagaaagtttcggc

SEQ ID NO: 82572 - DNA, 31 bp, Homo sapiens
  chr11:66718615-66718646
  hypo
ataatgggtggaaaaccgagaaaaactccta

SEQ ID NO: 82573 - DNA, 31 bp, Homo sapiens
  chr11:66744189-66744220
  hypo
tgatggtgggccagggcgcaggtctccctcc

SEQ ID NO: 82574 - DNA, 31 bp, Homo sapiens; identical to SEQ ID NO: 25481
  chr11:66749830-66749861
  hypo

SEQ ID NO: 82575 - DNA, 22 bp, Homo sapiens
  chr11:66752027-66752049
  hypo
gccacagcgcctggcagtcgag

SEQ ID NO: 82576 - DNA, 30 bp, Homo sapiens
  chr11:66807524-66807554
  hypo
gtgagcatggagtacgacactgcctcccac

SEQ ID NO: 82577 - DNA, 31 bp, Homo sapiens
  chr11:66817389-66817420
  hypo
ttgagttccctagaagcgaaatctgagaggg

SEQ ID NO: 82578 - DNA, 30 bp, Homo sapiens; identical to SEQ ID NO: 25483
  chr11:66834370-66834400
  hypo

SEQ ID NO: 82579 - DNA, 127 bp, Homo sapiens; identical to SEQ ID NO: 48692
  chr11:66886029-66886156
  hypo

SEQ ID NO: 82580 - DNA, 121 bp, Homo sapiens; identical to SEQ ID NO: 8214
  chr11:66897391-66897512
  hypo

SEQ ID NO: 82581 - DNA, 241 bp, Homo sapiens; identical to SEQ ID NO: 48695
  chr11:66897571-66897812
  hypo

SEQ ID NO: 82582 - DNA, 32 bp, Homo sapiens; identical to SEQ ID NO: 25486
  chr11:67002079-67002111
  hypo

SEQ ID NO: 82583 - DNA, 78 bp, Homo sapiens; identical to SEQ ID NO: 25487
  chr11:67051192-67051270
  hypo

SEQ ID NO: 82584 - DNA, 50 bp, Homo sapiens; identical to SEQ ID NO: 25488
  chr11:67059785-67059835
  hypo

SEQ ID NO: 82585 - DNA, 301 bp, Homo sapiens
  chr11:67072095-67072396
  hypo
aggcctccactctagacctatcgaccgcgtgggggcccatgaatccgtgtagacaagggctgcaggtgaatgtgatgcatgctagactttgagagcccctaccctaaggggaatgaggagccatgacagttgcccactgccctgccaggcagagctttgcggtgctccgtggggctgtcctgggactgcaggatggaggggacaatgatgatgcagcagaggccagttctgagccaacagagaaggccccgagtgaggaggagctccacggggaccagacagacttcgggcaaggatccca

SEQ ID NO: 82586 - DNA, 25 bp, Homo sapiens
  chr11:67072939-67072964
  hypo
tgagccaccgcgcccggcctgggca

SEQ ID NO: 82587 - DNA, 210 bp, Homo sapiens
  chr11:67073280-67073490
  hypo
gtggagacagctcgccgtcctcagcaagacgtggcaaacaagatgcagtgaatctttggtaaaactgaatttacaacagaagtatcatcccctatcgtgagattttgtccttaatatttctttggtgataaacatttctcaaatgaaatgatagcatttgcaagtgacagggtaaaaaaaaaacaacaaaaaaaaactggccgggcgcgg

SEQ ID NO: 82588 - DNA, 31 bp, Homo sapiens; identical to SEQ ID NO: 25490
  chr11:67074565-67074596
  hypo

SEQ ID NO: 82589 - DNA, 30 bp, Homo sapiens
  chr11:67075331-67075361
  hypo
gcagatggagcaggcgatccgtgctgagct

SEQ ID NO: 82590 - DNA, 100 bp, Homo sapiens
  chr11:67076904-67077004
  hypo
aacttctaccctgagcgcttcacctaccacaatgtgcgcctctgggatgaggagtcggcccagctgctgccgcactggaaggagacgcaccgcttcattg

SEQ ID NO: 82591 - DNA, 171 bp, Homo sapiens
  chr11:67077276-67077447
  hypo
gcgtcagccgctcagcggccacagtgctggcctatgccatgaagcagtacgaatgcagcctggagcaggccctgcgccacgtgcaggagctccggcccatcgcccgccccaaccctggcttcctgcgccagctgcagatctaccagggcatcctgacggccaggtatggga

SEQ ID NO: 82592 - DNA, 462 bp, Homo sapiens
  chr11:67077696-67078158
  hypo
gaagagcctgggccacggccacgtataaacctccgaggggtcatgaggtccatcagtcttctggagccctccttggagctggagagcacctcagagaccagtgacatgccagaggtgaggctggggctgggggagctcagcttgcaggggtgggggccataaggagggagatggggaaagaccaggatgggcgtttgactgtagacctgagcagggcgtacccgggctaagtctggcccgcccatgcagggtgtcctgggaggacccagggggcctggtcccagcctccttcacagtcagcccagtatctcttagcacccggcgtctccagcctgtcccatgaatacccctgaagatggggaccagccacgtcctgggcccctgagagcagctgagatccagtgagggcaggcggaggcactgtaggcacaggctggagaggggtcacgggggcagggcagg

SEQ ID NO: 82593 - DNA, 609 bp, Homo sapiens
  chr11:67078397-67079006
  hypo
gagtctgcgcactcacgccgcccaagtcctgcctaagtcagcacccttgatgctcagtgctgcgggcacaagcctaagcctgggagccaggccctgtctgggactcaaggccaaatggctgacttggaggaaggagcatccactgagggcaggaacatttgggagaggcttcctggaggaggtgtgggtggggaaggatagggaggcgtggtgggttgatgggcgggtgtgggcgttgctaaaggcaagaggtcctcacccagcaccggacgcacgcatccacccagcccagctcaggggctggtgccggcacgggtttcacctgccggctgcctacgcaaaggcagagaaagcataggaggggaggagggcagggaggcctgggtctccagggagctgaggagggcttctgggggccagaaggaagctacaagcaggtagggttcaaggagcggggcagcagggctggggtgttgtcctccctcccgaggaagcgtggctgtggacagcttggcttttggcgtgcgtgccacaaacattccggccctcgcctcctcctggctctgtgcttggcacccctgccccagatcttcccggctctgtgcttgg

SEQ ID NO: 82594 - DNA, 42 bp, Homo sapiens; identical to SEQ ID NO: 25494
  chr11:67091661-67091703
  hypo

SEQ ID NO: 82595 - DNA, 25 bp, Homo sapiens
  chr11:67110662-67110687
  hypo
tttttttttttttttttgagacgga

SEQ ID NO: 82596 - DNA, 29 bp, Homo sapiens
  chr11:67114347-67114376
  hypo
attttttttgagatggagcttcgctcttg

SEQ ID NO: 82597 - DNA, 58 bp, Homo sapiens; identical to SEQ ID NO: 48700
  chr11:67141092-67141150
  hypo

SEQ ID NO: 82598 - DNA, 42 bp, Homo sapiens; identical to SEQ ID NO: 25496
  chr11:67150725-67150767
  hypo

SEQ ID NO: 82599 - DNA, 30 bp, Homo sapiens; identical to SEQ ID NO: 25497
  chr11:67165692-67165722
  hypo

SEQ ID NO: 82600 - DNA, 184 bp, Homo sapiens; identical to SEQ ID NO: 25498
  chr11:67166352-67166536
  hypo

SEQ ID NO: 82601 - DNA, 401 bp, Homo sapiens
  chr11:67186972-67187373
  hypo
agtggctggcgctggcgggggcggcaggcatggcgtctgcacccgcgggcagagctgggtgcagtggtggacacagtgctggcgctgctggagaagctggaggaggaggagagtgtcctggtggaggctgtgtacccacctgcccagctgccctgctcaggtgagagccacctgggctgaccagggatgggagtttggtgtggccttctggccactctgtgctggccttagacctccccgtcttcccccagatggtccttcacccggccccggcctggccgtgcgaatctgtgctgtggtgtgtcggacacagggtgataggccactgctgagcaaggtgagcgtggcccaggcccaggctgtgaccctgcctgccacacgccagcccagtcccagtagtg

SEQ ID NO: 82602 - DNA, 64 bp, Homo sapiens; identical to SEQ ID NO: 25499
  chr11:67203569-67203633
  hypo

SEQ ID NO: 82603 - DNA, 202 bp, Homo sapiens
  chr11:67205681-67205883
  hypo
gctgggcgctggcttcggcctgggcctgggacgggtgggggtgggaactgacccctgcgctgcctcagaggctctgggcagccagctagcccggtgcgacccgctggcagaagctgagtgggaagggggcggcggaggagatgaaggtggcgtgtggctgtggccctacgcatccccgttctccatgcggcccagctgctcc

SEQ ID NO: 82604 - DNA, 214 bp, Homo sapiens
  chr11:67206218-67206432
  hypo
agcccggggccatggcgggccggctgtcagacaacacgttgcgccggctgatcttcaggtcccgctgcttgctgggcacgtaggcctcccgcagtgagatgaggatcgggtcggcatcccgcccgctcacccactcctcagcctccagggctgcctcgggcccggctgtgtcggggtacagatcatcctggaagaggtccgactgggcaggggg

SEQ ID NO: 82605 - DNA, 35 bp, Homo sapiens; identical to SEQ ID NO: 25500
  chr11:67208821-67208856
  hypo

SEQ ID NO: 82606 - DNA, 30 bp, Homo sapiens
  chr11:67209536-67209566
  hypo
taggccttgtcaatgcggcccgtctgtggg

SEQ ID NO: 82607 - DNA, 220 bp, Homo sapiens; identical to SEQ ID NO: 25501
  chr11:67209931-67210151
  hypo

SEQ ID NO: 82608 - DNA, 154 bp, Homo sapiens; identical to SEQ ID NO: 8220
  chr11:67210850-67211004
  hypo

SEQ ID NO: 82609 - DNA, 62 bp, Homo sapiens
  chr11:67221669-67221731
  hypo
aagaggcctgcagccccacctcgcccttccccgctggcagcggggagggagtttccctttga

SEQ ID NO: 82610 - DNA, 30 bp, Homo sapiens
  chr11:67223159-67223189
  hypo
ggccggcctcttctcgccagtcccaccgac

SEQ ID NO: 82611 - DNA, 202 bp, Homo sapiens; identical to SEQ ID NO: 25503
  chr11:67230824-67231026
  hypo

SEQ ID NO: 82612 - DNA, 21 bp, Homo sapiens
  chr11:67231145-67231166
  hypo
agccaccgtgcccggccatcc

SEQ ID NO: 82613 - DNA, 417 bp, Homo sapiens
  chr11:67259308-67259725
  hypo
cctcctccctccccccggcgctgggtcccctcatatgaaagggaagtaacaccgaggagcacacggagatatagggtgtggggctgggggggccagcgctggggccaaaagtctgggtccccagcctcccacacgcagcccctcgggccccttgggtgtgtcaataaataacccaggtccaggctggtgtgggcctcactcctcgctgtccagcttcaggctgatgctccgtgctttgccccgtgccagggtggtgggtggtgttcccgggccctcacgctccgcctggctggggcccctcgagcgaagcagctggctctgtttgcgcaggaagtccacgggggcagccacaccatagctgctcttgcccaaggcagctctcgggggtcccgaggaggcatgcgagtgcgagcccgc

SEQ ID NO: 82614 - DNA, 216 bp, Homo sapiens
  chr11:67260760-67260976
  hypo
agtcaggcagggcccgggccgatccagttgggaacagatgggcctccgccgatccgggggtggagggtaagggggagcgggggcggggtcaggacccggagcctcccccagccgccgcacctcctgcaccaggctctgcagaaacattgccttctggcgtagtgggtcgtgggtgaggccgtcgcagaaggagacgacgccgtgggggaagttgtg

SEQ ID NO: 82615 - DNA, 30 bp, Homo sapiens
  chr11:67287552-67287582
  hypo
ccgatcatgtctgccgtctctgccagcagc

SEQ ID NO: 82616 - DNA, 36 bp, Homo sapiens
  chr11:67291005-67291041
  hypo
ggattatctttgagcgtctccgctgctgaggggagc

SEQ ID NO: 82617 - DNA, 148 bp, Homo sapiens
  chr11:67353107-67353255
  hypo
ggaccagttcagcagaggcagcgtgtgtgcgcgtgcgtgtgcatgtgtgtgcgtgtgtgtgtgtacgcttgcatttgtgtcgggtgggtaaggagatagagatgggcgggcagtaggcccaggtcccgaaggccttgaacccactggt

SEQ ID NO: 82618 - DNA, 259 bp, Homo sapiens
  chr11:67378801-67379060
  hypo
ctcaggactaggcaggtgtgccggccccagccctgaccatgcatccctttggggaccgacttggggccccagggggtgtcacgggcggctgggacaacctccttgctgtgatccctggcggctcgtctaccccactgatccccaagtctgtgtgtgagacggtgctgatggacttcgatgcgctggtgcaggcacagacaggcctgggcacagctgcggtgatcgtcatggaccgctcggtaagggttcacacaccagc

SEQ ID NO: 82619 - DNA, 30 bp, Homo sapiens; identical to SEQ ID NO: 25507
  chr11:67394579-67394609
  hypo

SEQ ID NO: 82620 - DNA, 30 bp, Homo sapiens
  chr11:67401518-67401548
  hypo
tgagctcgccaccccggctccccgccctgc

SEQ ID NO: 82621 - DNA, 30 bp, Homo sapiens; identical to SEQ ID NO: 25508
  chr11:67402398-67402428
  hypo

SEQ ID NO: 82622 - DNA, 31 bp, Homo sapiens
  chr11:67406910-67406941
  hypo
cacctctgcttcagaacgtagcctacctgcc

SEQ ID NO: 82623 - DNA, 185 bp, Homo sapiens
  chr11:67430154-67430339
  hypo
gggtgagtgcagggtgcggtgtgaaccagaggggtggtgcagagaccagtgtgggatgtgagaggatccctgggggaggcagtgctggtgcagttgggatggggcagagatggaagtgcgcgtgtgcctagaggggagagcaaaggcctggagggctccacgctctcaaccgttcagggctgatg

SEQ ID NO: 82624 - DNA, 31 bp, Homo sapiens
  chr11:67431647-67431678
  hypo
ggacagaggatggacccgctaagtgtctggt

SEQ ID NO: 82625 - DNA, 268 bp, Homo sapiens
  chr11:67432664-67432932
  hypo
ggtgcgagtccagactcgtggcccagccgtgggccctccattgagaaagggtcttggcccaggtgggctgcggtagggcagcaggactcaccgatgtagcgatcgctctcgttgctctggcccccaatggccacgcggctgcagcccagcaatgcccgcagccgctggaactgtttctggttgatgatgtggcccaggtttggggagctctgggggtcgtcgccatagaaacgggtgatggtgctctgcagggcgggcagcagcctct

SEQ ID NO: 82626 - DNA, 653 bp, Homo sapiens; identical to SEQ ID NO: 25510
  chr11:67462526-67463179
  hypo

SEQ ID NO: 82627 - DNA, 314 bp, Homo sapiens
  chr11:67764061-67764375
  hypo
gctgtacttaccaaggcgataccagtgcaggcaaagagcacctcgaagccgctgtagataaagaaaggcacgaggtggcgcaggcggtagtcacgcacgtgcttgaagggcagctggaagatgttgccccagcccacgctgcgcagatcgatctcctccgtgggccggtaagcggctccgcacaaacccagcacctgcgaacccattacttgaaggggcggccagccaggcccaggcctggcctccaggcttcagccccgcccttcagatgcaccacgtgcctgggccttgccccagctcggccccgcctccca

SEQ ID NO: 82628 - DNA, 30 bp, Homo sapiens
  chr11:67775286-67775316
  hypo
cccacagatgcccccgggactgtagtcagc

SEQ ID NO: 82629 - DNA, 96 bp, Homo sapiens; identical to SEQ ID NO: 8227
  chr11:67777601-67777697
  hypo

SEQ ID NO: 82630 - DNA, 553 bp, Homo sapiens
  chr11:67781063-67781616
  hypo
aacagcaaatgttttatgcagcgtgatgtcatttaatcctcacaatgacaccaggtgccattagcatccccatttcacagatgaggaaaccgaggcagagaaggtgagtgatttgcccaaggtcccacaaccagtaagaggcagagcccggagacaggcctgatggtggctcgagaggctcgttcttggctcctgggtctcagtcctgctcccgtgacgagccatcccctatggggaccatggtgcctgtcctgtgtgcgggccactgcccagcttctcccaatcagagcaggaagatggtgggttcagcctggccccacaatcactccagctgagggctggcctggggctcctgaccaggctctcagtagcacactggtccagcagggccatcctgcagaccggagcaggtcccgccctcaaggtggccacttaacaatcacccacagccttgcgctcaccgatgctgggccctgggctcagaaccgactgtgtggtctcatcattagctggcaggtgccatcattacaccggtaacatgagaggcttcaag

SEQ ID NO: 82631 - DNA, 181 bp, Homo sapiens
  chr11:67785445-67785626
  hypo
gctaaacaggagcagagcaagcgcacagccacctcggggcctttgcagccgccagggcctctgcccaaagtatgccgcctcccagtacccacgacttgcttgttccttgacttcaggtcactgctccaatgtgaccgccgcctggagacctgcactgaccgctttgtaaaaacagcacaca

SEQ ID NO: 82632 - DNA, 48 bp, Homo sapiens
  chr11:67797237-67797285
  hypo
acatgcaggcagcctcggggcctctgcgggtccctctaccacagcatt

SEQ ID NO: 82633 - DNA, 639 bp, Homo sapiens
  chr11:67808653-67809292
  hypo
gagtgaaggtgcacaggtgcccgtggttgggaactgtctgtggtctgcccctgactggcccccatccgtgtccacccacaggaccatgggctccatgttccggagcgaggaggtggccctggtccagctctttctgcccacagcggctgcctacacctgcgtgagtcggctgggcgagctgggcctcgtggagttcagagacgtgagttgggtgggcaggcgtgggaagggggctactgccaaggttagcccggaggccggtccaggatggggactgccccccctccgccatagggccctggccccatttgaaccccagcggcccctgccatgggcactgctcatgggaagcccgcagctgaggcccctgagctggctcctccccataccctcctggggcatggggtctggtctgtgctctgatctgcgtcttgtggctcccagggcactccacacctttctggaggaggcagctaaggcctggggagagtcaggcctgggctctagggtgaggagctccctgacccccttcccgggacactcacccctccgtgtggcacccacagctcaacgcctcggtgagcgccttccagagacgctttgtggttgatgttcggcgctgtgaggagctggagaaga

SEQ ID NO: 82634 - DNA, 30 bp, Homo sapiens
  chr11:67809965-67809995
  hypo
gatgaaagtttggccgggattttctggcca

SEQ ID NO: 82635 - DNA, 65 bp, Homo sapiens; identical to SEQ ID NO: 25515
  chr11:67810253-67810318
  hypo

SEQ ID NO: 82636 - DNA, 30 bp, Homo sapiens; identical to SEQ ID NO: 25516
  chr11:67811626-67811656
  hypo

SEQ ID NO: 82637 - DNA, 30 bp, Homo sapiens; identical to SEQ ID NO: 25517
  chr11:67813259-67813289
  hypo

SEQ ID NO: 82638 - DNA, 101 bp, Homo sapiens
  chr11:67815194-67815295
  hypo
gagtgcttcagtcgcgccaccagcatcttcccctcgggctggagtgtggccgccatggccaaccagtctggctggaggtgaggcccgggccccagcccggc

SEQ ID NO: 82639 - DNA, 30 bp, Homo sapiens
  chr11:67816831-67816861
  hypo
agctgcaagatcctcgtccgagaaacgggg

SEQ ID NO: 82640 - DNA, 730 bp, Homo sapiens
  chr11:67817079-67817809
  hypo
tgcaggtgtgcacagcagggacgccctgactctcgccctctccctggcaggaggtggtccaggccacgctggtggtcctggccttggccatggtgcccatcctgctgcttggcacacccctgcacctgctgcaccgccaccgccgccgcctgcggaggaggcccgctgaccgacaggtgggaccggggcctaaggtgtggggggctgcttgcggggagaggccactgtccggtgtgtccctgactcctcgcttcctgacagactcctgagtggccaggagcaggcctggcgggtggtgggggacctcctggggctggagtgctgccaacactgcctgctcatgccccaggaggaaaacaaggccgggttgctggacctgcctgacgcatctgtgaatggctggagctccgatgaggaaaaggcagggggcctggatgatgaagaggaggccgaggtgggtgcagtgccttcctgggggtgggacggctgaggccctgccggccctcactgcacccgccccgcagctcgtcccctccgaggtgctcatgcaccaggccatccacaccatcgagttctgcctgggctgcgtctccaacaccgcctcctacctgcgcctgtgggccctgagcctggcccacgcccgtgagtgacctggccaccgacggctggccccagctcctggcttctcacataccgctgctggctgggcgggttgcttctctctgggcct

SEQ ID NO: 82641 - DNA, 30 bp, Homo sapiens
  chr11:67820554-67820584
  hypo
aagggccgggaaaccgggcccttggagaac

SEQ ID NO: 82642 - DNA, 211 bp, Homo sapiens
  chr11:67850479-67850690
  hypo
aaacactctcgtggccgcatcgttccttagactctgctttgcgggtcgcctcttccaagcagtctgtaaattcctaatgaatagggactgcgtcttttattgatgttagtcttctcccagagcaccaagcaaatctcgatgcccactacactttttaggctgcatgaataaatgaacactccggagtggtatagcacgaggcaagtgagcc

SEQ ID NO: 82643 - DNA, 30 bp, Homo sapiens
  chr11:67864510-67864540
  hypo
cgcaggagcactttccgaggctcatcacca

SEQ ID NO: 82644 - DNA, 78 bp, Homo sapiens
  chr11:67864776-67864854
  hypo
tctgcagtagaggtggggaagcgtttttgaaattgcccgtgtgggccgggcacggtggctcacgcctgtaatcccagc

SEQ ID NO: 82645 - DNA, 18 bp, Homo sapiens
  chr11:67865093-67865111
  hypo
ctccgtctcaaaaaaaaa

SEQ ID NO: 82646 - DNA, 31 bp, Homo sapiens
  chr11:67887225-67887256
  hypo
cgcccggcccgggaacacatctttaaaggtc

SEQ ID NO: 82647 - DNA, 30 bp, Homo sapiens; identical to SEQ ID NO: 8229
  chr11:67895827-67895857
  hypo

SEQ ID NO: 82648 - DNA, 173 bp, Homo sapiens
  chr11:67926118-67926291
  hypo
ttatagccattcaacgtatttggttcaagcttgatgtcagaggcctccttcagatttgttcttgtcctcactgaccgccgagttatgtaggtgcagggcgagctctccccctgcgaatgagcacctctcacaggattctgtctgtgttctctcgccgcgtgtctagtcaagca

SEQ ID NO: 82649 - DNA, 321 bp, Homo sapiens
  chr11:67931310-67931631
  hypo
cagggcaggagtgaggagcagcgccccagcctctgcatctaggacaggtgctccatagttaagatcaacttctccctctggccgattcttctggggcttgtcctgacttgtggcacctgcagagacccgtgtccgcatcttcacagaccgctcgcgagcctctctctggtctcaccttccctatcacagcactaacttcagagggggcagcccagtcagcgaggcataagaggcctgaaaaaccagaatcctccagtcctggcattctaattcagacctgtggactggatttgtgaaaacggattccttgttgtctctact

SEQ ID NO: 82650 - DNA, 156 bp, Homo sapiens
  chr11:67949301-67949457
  hypo
acacaagagtgtaaaagcacacgtaaacggaacactctggtgggaagtaggcaggccgtcccctgcactcccacaccggcctgaagtgctggcattgctaggaacccaggctgctctaaccagggcaacagaatcgtctgtacttccacaggttat

SEQ ID NO: 82651 - DNA, 51 bp, Homo sapiens
  chr11:67970706-67970757
  hypo
ctgggattacaggcgtgaggcaccgcacccggccccatacactttcatatc

SEQ ID NO: 82652 - DNA, 313 bp, Homo sapiens
  chr11:67984075-67984388
  hypo
tctcgctccctttcctcgagtgccaggttcactcagtgacaggatggcagggattcacttgctttgatcctgtgcttactgggatggcccacaggtcacgttgaccccagaattccaggctggaggcaggttgcttttcattgtaaagcgatatgttggctttcgtgctccgcacatgcgtctgccccagtccccaccccgcccggaagctaggactcctctgatgggagcaggtgtctgaaaccggagggagagtggggcgtacccggctttcccagtggcccctctgggcggctggcgggtttcctggtca

SEQ ID NO: 82653 - DNA, 30 bp, Homo sapiens
  chr11:68033704-68033734
  hypo
aaggacccagcatggcgcctggcttagcca

SEQ ID NO: 82654 - DNA, 111 bp, Homo sapiens; identical to SEQ ID NO: 48722
  chr11:68080103-68080214
  hypo

SEQ ID NO: 82655 - DNA, 131 bp, Homo sapiens; identical to SEQ ID NO: 48723
  chr11:68080740-68080871
  hypo

SEQ ID NO: 82656 - DNA, 31 bp, Homo sapiens
  chr11:68086448-68086479
  hypo
cctgaggcctctggatcgctagagattgggg

SEQ ID NO: 82657 - DNA, 31 bp, Homo sapiens
  chr11:68093171-68093202
  hypo
gcaggcccccctcacccgttcctgcctgacc

SEQ ID NO: 82658 - DNA, 31 bp, Homo sapiens
  chr11:68118342-68118373
  hypo
agtgggaggatgtgagcgtgtgtgtgtgtgt

SEQ ID NO: 82659 - DNA, 180 bp, Homo sapiens
  chr11:68119116-68119296
  hypo
catttgtgagcccttgcgcctggtcctgctccccacgcagcgggtatagcccagtctctggccctttcagtgagtgggaggagatggtaaatgaatagtatttgaaagggacgtgtgcgtagggggataaagcagtgcttgggtgctgtggcgaggggcttccgtcggagctcaggtgct

SEQ ID NO: 82660 - DNA, 31 bp, Homo sapiens
  chr11:68119795-68119826
  hypo
cttgtctgtacagaggcgtgaccatgctgca

SEQ ID NO: 82661 - DNA, 31 bp, Homo sapiens
  chr11:68121252-68121283
  hypo
tccacctcagtgtgcacgtggccaaaaggat

SEQ ID NO: 82662 - DNA, 31 bp, Homo sapiens; identical to SEQ ID NO: 25526
  chr11:68131492-68131523
  hypo

SEQ ID NO: 82663 - DNA, 263 bp, Homo sapiens
  chr11:68133045-68133308
  hypo
tcgctgtgaggaggacaatggcggctgctcccacctgtgcctgctgtccccaagcgagcctttctacacatgcgcctgccccacgggtgtgcagctgcaggacaacggcaggacgtgtaaggcaggtgaggcggtgggacgggacggggcgggcgggcggggcggggcctggcgggaatgggttgcggccgccgggggtgccccagaaggaacctcggcaaacccgttcgaaatgatccacttggcgggtgtggtgattcaag

SEQ ID NO: 82664 - DNA, 248 bp, Homo sapiens
  chr11:68133367-68133615
  hypo
aatcctgttttgttttgttttatttttgccccagatattttccacttttttactctccgccttggtcctcaggcacttggtgcttcctgggactgtgttgcagtgaggcatggctcttctcctctggggcaccggctgaggatctttctttccaggtgtcggttcggggcgggcccttcgggaaatcacacacgttcaggatgcagctcgccttcggggatgctcccgggcctgggatagccagtctg

SEQ ID NO: 82665 - DNA, 193 bp, Homo sapiens
  chr11:68142590-68142783
  hypo
acagaacccttgtgcggctgcgggcactccttgccctttccgcatttggtgatgactccttgtttcgtttcactgaccgtgccctgtgcctctgctctccctccccagttccgtgtgccctggggtcagtgatagaagacacggcccctgggccccaagtctgctgagctgacacctcgggctgccgctcacc

SEQ ID NO: 82666 - DNA, 31 bp, Homo sapiens
  chr11:68143934-68143965
  hypo
agccaccatgcctggccggccctacttctta

SEQ ID NO: 82667 - DNA, 77 bp, Homo sapiens
  chr11:68153339-68153416
  hypo
gtgggcatgctggggacgctgagcagcatggccagcagctgggtctgcagcctggtacccggcgggacttgtggttg

SEQ ID NO: 82668 - DNA, 95 bp, Homo sapiens; identical to SEQ ID NO: 25529
  chr11:68158723-68158818
  hypo

SEQ ID NO: 82669 - DNA, 30 bp, Homo sapiens
  chr11:68159208-68159238
  hypo
atgatttgccttcacgcatccccgctaccc

SEQ ID NO: 82670 - DNA, 394 bp, Homo sapiens
  chr11:68161250-68161644
  hypo
aataaaacaaaaataaaaataaataaaaatttattaaaacattcatcacagccagcctagtgggtgtcccatgtggctttgcctcgcatttccctgataactaggatgctgagcgtcttgtcccaggcttgccacacctcagcactttgagatacgtcgcacagtccccatttgcgaacgagaaatgaggtttagggaacagcagctgtgtcatgtcacacagcgagcagggggtctctgagccgtctgaccccacagccgaccaagctccaatccttaccgcctcctagtgttgtggatgtagcccagggtgctcccacatttttcagatgagaacaccgaagctcaaaacaggagcgttttgtccacattggatacacgatgtctgtggttt

SEQ ID NO: 82671 - DNA, 146 bp, Homo sapiens; identical to SEQ ID NO: 25530
  chr11:68162350-68162496
  hypo

SEQ ID NO: 82672 - DNA, 34 bp, Homo sapiens
  chr11:68165098-68165132
  hypo
cccgagttcccatcaccgtcgtcatcatcaccat

SEQ ID NO: 82673 - DNA, 100 bp, Homo sapiens; identical to SEQ ID NO: 25531
  chr11:68172055-68172155
  hypo

SEQ ID NO: 82674 - DNA, 30 bp, Homo sapiens; identical to SEQ ID NO: 25532
  chr11:68176205-68176235
  hypo

SEQ ID NO: 82675 - DNA, 129 bp, Homo sapiens
  chr11:68177517-68177646
  hypo
aagtggcgcggctggacgggcagttccggcaagtcctcgtgtggagggacttggacaacccgaggtcgctggccctggatcccaccaaggggtaagtgtttgcctgtcccgtgcgtccttgtgttcacc

SEQ ID NO: 82676 - DNA, 31 bp, Homo sapiens
  chr11:68178044-68178075
  hypo
ctgactttgaggtccccggacctcaggctcc

SEQ ID NO: 82677 - DNA, 30 bp, Homo sapiens
  chr11:68178991-68179021
  hypo
gtgggccgggccaacgacctcaccattgac

SEQ ID NO: 82678 - DNA, 69 bp, Homo sapiens
  chr11:68189964-68190033
  hypo
ctgtcctctcctcctacgtcagctcagtaagagcccttcgaagggatgctgtgtcggaggccccaaaag

SEQ ID NO: 82679 - DNA, 363 bp, Homo sapiens
  chr11:68190241-68190604
  hypo
acccccacatctgtaccgatccctttacccgcaccttccctacccaccctcacctcccctgtaccttcacctcccccactcacccgcccctgcaccctcacctgtcccccaccttcacctaacccccaccctcacctgccctcccctcacctggcctccttccgttggggaaggggttgtaaggggcggcccccaaactgtctgtcctggtgccctgcagagaaaacagtacgtgagggccgcagtccaaaagcttgagtcctggaaggtggaggagacagggatgtgttgggaagggccccatggtcttggatcccttctcgactgtcaatggggccttcatgggagcgccagtctagtgat

SEQ ID NO: 82680 - DNA, 389 bp, Homo sapiens
  chr11:68190853-68191242
  hypo
ggtctccaccagtgcccgggggtctccgccagtgccaggggtctccgccagtgcccaggggtctccgccagtgctcaggagtcttggtttctttgtcttacagccctttgttttgacctctctgagccaaggccaaaacccagacaggcagccccacgacctcagcatcgacatctacagccggacactgttctggacgtgcgaggccaccaataccatcaacgtccacaggctgagcggggaagccatgggggtggtgctgcgtggggaccgcgacaagcccagggccatcgtcgtcaacgcggagcgagggtaggaggccaacgggtgggtgggggtgctgcccgtccaggcgtgcccgccgtgtcttctgccgaatgccagcctct

SEQ ID NO: 82681 - DNA, 264 bp, Homo sapiens
  chr11:68191536-68191800
  hypo
tcctcccagaggcccccgacgctcccacctgttggtcgtcagagcttctggttggtgggaaggcacccaggaccttgaggtctccagagagaaaagccagggaaagagggagaccgaaacccatgtgacatgaaactcaggctccaaactgagcacgggaacgtttggggacaggagcgcgatggccttcctcagatagctggggggctggcatgaagacgggagctacagccagcacaggtcctgggccgggagcccagagat

SEQ ID NO: 82682 - DNA, 254 bp, Homo sapiens
  chr11:68192496-68192750
  hypo
ggtgccctgggctccgtgctgtccgaggagacgccatccccacacccgtccttcacccgccaccctcccgcaggtacctgtacttcaccaacatgcaggaccgggcagccaagatcgaacgcgcagccctggacggcaccgagcgcgaggtcctcttcaccaccggcctcatccgccctgtggccctggtggtggacaacacactgggcaagctgttctgggtggacgcggacctgaagcgcattgagagctgt

SEQ ID NO: 82683 - DNA, 137 bp, Homo sapiens
  chr11:68192959-68193096
  hypo
tctcagagagggtgagcgagctgcttggggccccacagcaggagatggagcaggactgcagcctagcctctgcccccagcacctgcgcaagaagctgctctgctctggactgtgttaggctgcgagggctggagaga

SEQ ID NO: 82684 - DNA, 252 bp, Homo sapiens
  chr11:68193463-68193715
  hypo
tggaggacgccaacatcgtgcagcctctgggcctgaccatccttggcaagcatctctactggatcgaccgccagcagcagatgatcgagcgtgtggagaagaccaccggggacaagcggactcgcatccagggccgtgtcgcccacctcactggcatccatgcagtggaggaagtcagcctggaggagttctgtacgtgggggctggcagtggggtgggcagggtggcctctaaacccgacccctggaggag

SEQ ID NO: 82685 - DNA, 31 bp, Homo sapiens
  chr11:68194429-68194460
  hypo
ccacaggtccttgccccgtggccctctctgc

SEQ ID NO: 82686 - DNA, 42 bp, Homo sapiens
  chr11:68196104-68196146
  hypo
gcccacccaaatcatccgagatgacctcgtcttgagatcctt

SEQ ID NO: 82687 - DNA, 78 bp, Homo sapiens
  chr11:68199349-68199427
  hypo
cctggccctcctggctcgggaactccaggccccttcctcacggctcgagagacgtgtatttaccgcacaggtgcttgt

SEQ ID NO: 82688 - DNA, 30 bp, Homo sapiens; identical to SEQ ID NO: 25542
  chr11:68200720-68200750
  hypo

SEQ ID NO: 82689 - DNA, 101 bp, Homo sapiens
  chr11:68201208-68201309
  hypo
ccagttcccctgcgcgcggggtcagtgtgtggacctgcgcctgcgctgcgacggcgaggcagactgtcaggaccgctcagacgaggcggactgtgacggtg

SEQ ID NO: 82690 - DNA, 141 bp, Homo sapiens
  chr11:68203448-68203589
  hypo
ctcccaaagtgccatgattacagatgtgagtcactgcgcccagtgagggtcacatttccgttgagatttggaggggcagacgttggagccatctgagccccctcgtcccgctctagcttctcctcccgtgtgccccgcggt

SEQ ID NO: 82691 - DNA, 442 bp, Homo sapiens
  chr11:68204358-68204800
  hypo
atctgcctgcccaaccagttccggtgtgcgagcggccagtgtgtcctcatcaaacagcagtgcgactccttccccgactgtatcgacggctccgacgagctcatgtgtggtgagccagcttctggcacggggaaggggcgtccgggctgggttcccccaggaacgtggagtttaggggaggagacgtgcctttccagcggggctgggggctgtgtgggagactcaggcggctgggaggctccttgcgggaggcagggaagcctttcccagggcagcggccaggaggacagactgtgagctgtgggctcggcggctacagagtctgcctcagtgggcggggctgatggtgtccaggtgcctgcagcacgcacccacccacgggaccttgctgagcagcgtctgtcaggcagcaagattacccgagggctgcagtggtcctgtt

SEQ ID NO: 82692 - DNA, 30 bp, Homo sapiens
  chr11:68205546-68205576
  hypo
tgcctggctttgctcgttcaccaacatcac

SEQ ID NO: 82693 - DNA, 63 bp, Homo sapiens
  chr11:68206025-68206088
  hypo
gcgcgtggtgtgccagcgctatgcgggggccaacgggcccttcccgcacgagtatgtcagcgg

SEQ ID NO: 82694 - DNA, 129 bp, Homo sapiens
  chr11:68207213-68207342
  hypo
cacctgacctcccccgtcccttccctgccaggcatcgcatgcggaaagtccatgatgagctccgtgagcctgatggggggccggggcggggtgcccctctacgaccggaaccacgtcacaggggcctcg

SEQ ID NO: 82695 - DNA, 195 bp, Homo sapiens; identical to SEQ ID NO: 25548
  chr11:68207879-68208074
  hypo

SEQ ID NO: 82696 - DNA, 197 bp, Homo sapiens
  chr11:68210029-68210226
  hypo
cactgcgcctgggctgacatatgtgttttcgtaagcccgaaagatagcatctgaagagtcaacattgagccttgccttttgctgctaacgatgtataaaagctgctgttctgagcatttcggaggctcccagctgccgtgtgcaccctgcctagagctctaccgtaacccatctccgggaggaggtgctattgtttt

SEQ ID NO: 82697 - DNA, 30 bp, Homo sapiens
  chr11:68216313-68216343
  hypo
ccctgcagcaccgacgtgtgtgacagcgac

SEQ ID NO: 82698 - DNA, 128 bp, Homo sapiens
  chr11:68216739-68216867
  hypo
agaactgccattctttcgtgccctgtgtgcatttgagttgtgtgtccccgtggagggaatgccgacccccggaccaccatgagagtcctcctgcacccgggcgtccctctgtccggctcctgcaggga

SEQ ID NO: 82699 - DNA, 31 bp, Homo sapiens; identical to SEQ ID NO: 25550
  chr11:68223648-68223679
  hypo

SEQ ID NO: 82700 - DNA, 243 bp, Homo sapiens; identical to SEQ ID NO: 25551
  chr11:68226725-68226968
  hypo

SEQ ID NO: 82701 - DNA, 30 bp, Homo sapiens
  chr11:68310137-68310167
  hypo
tggtgtgcgccaccgcgctcggccttgaga

SEQ ID NO: 82702 - DNA, 29 bp, Homo sapiens
  chr11:68328642-68328671
  hypo
ccacgcccggccacttataccttatacaa

SEQ ID NO: 82703 - DNA, 30 bp, Homo sapiens
  chr11:68330121-68330151
  hypo
gcggagaaaggacagcgttttcagtaaatc

SEQ ID NO: 82704 - DNA, 157 bp, Homo sapiens
  chr11:68341482-68341639
  hypo
taaaatgattgtttaaaagtccgcagtatttaccgagtgtttcatcacttcatcctatcaggaatctgagtatttgtcctttacctcttgtcagggctgagggaggaagacggcatggttacatgggacacctaacgaggatagctaactgtatcgt

SEQ ID NO: 82705 - DNA, 31 bp, Homo sapiens; identical to SEQ ID NO: 25553
  chr11:68356341-68356372
  hypo

SEQ ID NO: 82706 - DNA, 100 bp, Homo sapiens
  chr11:68385167-68385267
  hypo
cgttaagcaaaagaagtaagatatgtaagcatctatacgaagctctaaaaccgaccaaacgaattgatgggagaaattcgaatagtgttttctcctggca

SEQ ID NO: 82707 - DNA, 230 bp, Homo sapiens
  chr11:68385503-68385733
  hypo
cccccatggcatgcaccgtggccccgggactgcctttcctaccccgccaaggaggagagaccgaggagcagggcatgctctgggctccagcctggatttgcccgcccatggagaggacacgttccggatcgtcctcttccacacagtagactctgtcctgccgaagggagaagtctgcatccctgggttagacacgtctcatggagtcctctgcccgtgaccaggggggg

SEQ ID NO: 82708 - DNA, 34 bp, Homo sapiens
  chr11:68408312-68408346
  hypo
ggaatgtcctgttcatcggcgtagaagggctcac

SEQ ID NO: 82709 - DNA, 30 bp, Homo sapiens; identical to SEQ ID NO: 25555
  chr11:68433120-68433150
  hypo

SEQ ID NO: 82710 - DNA, 30 bp, Homo sapiens
  chr11:68437828-68437858
  hypo
cgaggggccctgggcgtggggaccaccccg

SEQ ID NO: 82711 - DNA, 245 bp, Homo sapiens
  chr11:68472883-68473128
  hypo
aagggataggagcatccaagccgagatgaaaaatacaccaagccttctgctgaccttccgccgccaacagcaccttctctcctaaggatgctccctggccgccagactttctgtgcagtgcgcagcctgtgttcactgacaggaaagagcgatttcagcgcgtgtcattctaaacaatgatttcttctccgtgtctatgaaaaaacaaggtttttttttctttcggataaacaaaacaaaaaccc

SEQ ID NO: 82712 - DNA, 38 bp, Homo sapiens
  chr11:68505094-68505132
  hypo
actcctgcaggcaggccgggcacgcctgtaatcccagc

SEQ ID NO: 82713 - DNA, 114 bp, Homo sapiens
  chr11:68549944-68550058
  hypo
tattttgaggcagagtcggaacccaggccatcagcccccaggtgcattccacagatgcccatgtgacccctccacaaggaggtctccgtgcccgtcttatttgaatacacagaa

SEQ ID NO: 82714 - DNA, 30 bp, Homo sapiens; identical to SEQ ID NO: 25558
  chr11:68550519-68550549
  hypo

SEQ ID NO: 82715 - DNA, 30 bp, Homo sapiens
  chr11:68550967-68550997
  hypo
ctgcggcccctccacgcagcacagaacctc

SEQ ID NO: 82716 - DNA, 30 bp, Homo sapiens
  chr11:68553406-68553436
  hypo
aatgtgatgaagtacgttcactccacgaat

SEQ ID NO: 82717 - DNA, 105 bp, Homo sapiens
  chr11:68564277-68564382
  hypo
cgccccaccgtcctcgtcagacagcagcccgggcgggtggactcaccatggcataatagttgctgttcaccatgagcggccctcgtcctcggaggtagatgtact

SEQ ID NO: 82718 - DNA, 30 bp, Homo sapiens; identical to SEQ ID NO: 25559
  chr11:68565729-68565759
  hypo

SEQ ID NO: 82719 - DNA, 30 bp, Homo sapiens
  chr11:68575370-68575400
  hypo
aggtcccttcagcccgatctgctcgggtgg

SEQ ID NO: 82720 - DNA, 30 bp, Homo sapiens
  chr11:68579955-68579985
  hypo
atcttggcgtacatcgttgtcatcacgccc

SEQ ID NO: 82721 - DNA, 786 bp, Homo sapiens; identical to SEQ ID NO: 8232
  chr11:68606632-68607418
  hypo

SEQ ID NO: 82722 - DNA, 162 bp, Homo sapiens
  chr11:68657682-68657844
  hypo
gcctgactctctgggttctcacgtctccaaattcaggatgcccgggatgggcgggaccaggagcgctcagcccactgggctggcgccccctgctgcacgcggagaacacgatgggggagctgggccagcacctaccagggcgctgggcacctgaggggtttt

SEQ ID NO: 82723 - DNA, 247 bp, Homo sapiens
  chr11:68664616-68664863
  hypo
cccctggggcaggacgcgttccccctgcacgcctgtgcccagaggggctccgtgctcagttcctgttatctctgctctgacccaggtcacagtcccctctcttctgcaccgtttactctgaacaagcatttaatgggcaccgaccccccggcctgaccgagggcgagacacacagaagggacgacagagtgcctgccctggaaacactgtcaacaccagaagcaccagcaccgagggtgaaactctt

SEQ ID NO: 82724 - DNA, 30 bp, Homo sapiens
  chr11:68679315-68679345
  hypo
ggcagccttcgtgtcggccaggccctgggt

SEQ ID NO: 82725 - DNA, 30 bp, Homo sapiens; identical to SEQ ID NO: 25561
  chr11:68682418-68682448
  hypo

SEQ ID NO: 82726 - DNA, 30 bp, Homo sapiens
  chr11:68699682-68699712
  hypo
aggacgttgggtgacgttgcgctgagtgtt

SEQ ID NO: 82727 - DNA, 30 bp, Homo sapiens
  chr11:68700806-68700836
  hypo
ctggctgaggagtacggcgcgagggtggtg

SEQ ID NO: 82728 - DNA, 204 bp, Homo sapiens
  chr11:68701351-68701555
  hypo
aggaggacgaacagtcgaaagggaaccctggtgagcttgcttgcagatggccagcttttttgtttaaacatacctccagctctttaaaaataaaaggcactttaattgcctaattccgggaggagctgagagcagttgttgatggccgtgaaaaaacggagccccacactgcaagaggctgagcagcatcgttttctccagggt

SEQ ID NO: 82729 - DNA, 30 bp, Homo sapiens
  chr11:68718470-68718500
  hypo
gtcacttgggtcagccggacaggggccgag

SEQ ID NO: 82730 - DNA, 88 bp, Homo sapiens
  chr11:68727155-68727243
  hypo
ggcgagggtgacctgacggaccactgggtgtgcaagtgcgcggagagccgtcggaccccacacgagggagcgccgttcttactccatc

SEQ ID NO: 82731 - DNA, 30 bp, Homo sapiens
  chr11:68727512-68727542
  hypo
ctcgacctgtctccccggctgccattcaag

SEQ ID NO: 82732 - DNA, 31 bp, Homo sapiens; identical to SEQ ID NO: 25563
  chr11:68728005-68728036
  hypo

SEQ ID NO: 82733 - DNA, 49 bp, Homo sapiens
  chr11:68728253-68728302
  hypo
ccccgcctggcagatccgggcccccaggggctcccgcagcctctgcctc

SEQ ID NO: 82734 - DNA, 31 bp, Homo sapiens; identical to SEQ ID NO: 25564
  chr11:68747918-68747949
  hypo

SEQ ID NO: 82735 - DNA, 30 bp, Homo sapiens
  chr11:68772793-68772823
  hypo
gggcgtgctgcccccggcctcccccagctc

SEQ ID NO: 82736 - DNA, 31 bp, Homo sapiens
  chr11:68785782-68785813
  hypo
cggatccgtgatgtcccgtcattagaccttc

SEQ ID NO: 82737 - DNA, 64 bp, Homo sapiens
  chr11:68830512-68830576
  hypo
gggccacgtggttgcgggtggggcccaccggagtctcatcttggactgcgtgctccgcatccct

SEQ ID NO: 82738 - DNA, 177 bp, Homo sapiens; identical to SEQ ID NO: 25565
  chr11:68838711-68838888
  hypo

SEQ ID NO: 82739 - DNA, 72 bp, Homo sapiens
  chr11:68853900-68853972
  hypo
agctgtcctggccacgcagcagtggtgtttgtatcgagtgctcttgctttgctcatcgtggttcacagggtg

SEQ ID NO: 82740 - DNA, 43 bp, Homo sapiens
  chr11:68856643-68856686
  hypo
tatcgagattggggagaggagcgagtccaaggagaaggtcatg

SEQ ID NO: 82741 - DNA, 197 bp, Homo sapiens
  chr11:68968787-68968984
  hypo
tgtgtggctatacatgcgtgcacacacacatacactgcaaatgtgttcatgttgtgtgtgcgtttgtgtgcacacacgtgtgtctgggcaggtgtacatacctgcatgtgtacacaagtgtatttgtgtgtgcatgcccatgtctgtcccatgtctgtgcacatgtgtgcatacgtgtttggcggggtgcatacttg

SEQ ID NO: 82742 - DNA, 31 bp, Homo sapiens
  chr11:68970084-68970115
  hypo
tggcatttcaccaaaccgagggttccctctc

SEQ ID NO: 82743 - DNA, 175 bp, Homo sapiens
  chr11:68972047-68972222
  hypo
gtcctcatggccttggcgggctcgggtggcaggggggacctccatctccaccctgctctgtttgacctgggctgcttactggagggtggagggagagcagcagggccttggagggacttagtgaatgaccagcagaaggagtggcttccgatggcacaggcgtccagggcagatg

SEQ ID NO: 82744 - DNA, 30 bp, Homo sapiens
  chr11:68973600-68973630
  hypo
aaggccccagggagcgggcgacagaggctc

SEQ ID NO: 82745 - DNA, 161 bp, Homo sapiens
  chr11:69056078-69056239
  hypo
ctcatgctgagcagccgaagctccctgacttgccgtgtctgctccggcctctgcatccacctgttgcctctgcctgggctgcttcctcttgcctgcgcagcctggaaagcttctgctagctctgcagcactgacagcaaagccccccgccctccctggccc

SEQ ID NO: 82746 - DNA, 30 bp, Homo sapiens
  chr11:69191918-69191948
  hypo
acctgtgaacgcacacgcccacccgtgaat

SEQ ID NO: 82747 - DNA, 30 bp, Homo sapiens
  chr11:69192162-69192192
  hypo
gtgaacgcagacgcccgcccaggaatgcac

SEQ ID NO: 82748 - DNA, 176 bp, Homo sapiens; identical to SEQ ID NO: 25567
  chr11:69192608-69192784
  hypo

SEQ ID NO: 82749 - DNA, 224 bp, Homo sapiens; identical to SEQ ID NO: 25568
  chr11:69193142-69193366
  hypo

SEQ ID NO: 82750 - DNA, 437 bp, Homo sapiens; identical to SEQ ID NO: 25569
  chr11:69206297-69206734
  hypo

SEQ ID NO: 82751 - DNA, 30 bp, Homo sapiens; identical to SEQ ID NO: 25570
  chr11:69279629-69279659
  hypo

SEQ ID NO: 82752 - DNA, 180 bp, Homo sapiens
  chr11:69280486-69280666
  hypo
aatctgtccggggtgcggtctgggcatgaaaagtttttcaggctctccaggtgattctcgtgtgcagccaagttagagaacactgactcccggggaggtggattacctgtcctcccggcaaagcgcaggactcgcagtttggcaagcttccagcagcagcgagttcgggtggctccgtgg

SEQ ID NO: 82753 - DNA, 30 bp, Homo sapiens
  chr11:69300859-69300889
  hypo
agagtgatgcagcccgggacctcccaggac

SEQ ID NO: 82754 - DNA, 254 bp, Homo sapiens; identical to SEQ ID NO: 48732
  chr11:69331402-69331656
  hypo

SEQ ID NO: 82755 - DNA, 222 bp, Homo sapiens
  chr11:69357101-69357323
  hypo
gacggggggaggtgaggtgggcgatggctcctgggggacttgttaagaaatattttggatgattcaatgactctccggactagaagccttttgattttgattaaccacgaaaaaaactccaccggcaacagtgagatcattgcgtgagtggggctgcttcgtattgtcatgagagttccatgaaggccccgagggcactccgaaatatcacagtggcttcca

SEQ ID NO: 82756 - DNA, 96 bp, Homo sapiens
  chr11:69367213-69367309
  hypo
ccggagttaggactgcggcatcaggggtttcaggcctaggatttggggtatggggtgtgtcaggcctaggatttggggcatcgtgggtttcaggcc

SEQ ID NO: 82757 - DNA, 30 bp, Homo sapiens; identical to SEQ ID NO: 48733
  chr11:69379145-69379175
  hypo

SEQ ID NO: 82758 - DNA, 30 bp, Homo sapiens; identical to SEQ ID NO: 25573
  chr11:69384772-69384802
  hypo

SEQ ID NO: 82759 - DNA, 30 bp, Homo sapiens; identical to SEQ ID NO: 25574
  chr11:69407848-69407878
  hypo

SEQ ID NO: 82760 - DNA, 193 bp, Homo sapiens
  chr11:69431526-69431719
  hypo
aggtgttgatccactcgacaaactggcagagagccacttccgtgagcacctgcagggtgcacagctgagcccaaacccaggccctgcctcacagggtgcacggtctactgcaaggatttacacaataaataccatacattacagagcatgctgggaaagcaatgcataccacagagcaaaagaaaatgggctg

SEQ ID NO: 82761 - DNA, 53 bp, Homo sapiens
  chr11:69458858-69458911
  hypo
atgtccccagaccccctcctgcgctggagagcgctcttccagctctggtgagc

SEQ ID NO: 82762 - DNA, 30 bp, Homo sapiens
  chr11:69460920-69460950
  hypo
ccagctagaacctgtcgctccctgcagaag

SEQ ID NO: 82763 - DNA, 31 bp, Homo sapiens
  chr11:69464228-69464259
  hypo
atcagctagtgaccaacgtagctgagcccag

SEQ ID NO: 82764 - DNA, 664 bp, Homo sapiens
  chr11:69468276-69468940
  hypo
acttagccatggtggacccagcgggcaggttctgcctgctttggcgggcagacacgcgggcgcgatcccacacaggctggcgggggccggccccgaggccgcgtgcgtgagaaccgcgccggtgtccccagagaccaggctgtgtccctcttctcttccctgcgcctgtgatgctgggcacttcatctgatcgggggcgtagcatcatagtagtttttacagctgtgttattctttgcgtgtagctatggaagttgcataattattattattattattataacaagtgtgtcttacgtgccaccacggcgttgtacctgtaggactctcattcgggatgattggaatagcttctggaatttgttcaagttttgggtatgtttaatctgttatgtactagtgttctgtttgttattgttttgttaattacaccataatgctaatttaaagagactccaaatctcaatgaagccagctcacagtgctgtgtgccccggtcacctagcaagctgccgaaccaaaagaatttgcaccccgctgcgggcccacgtggttggggccctgccctggcagggtcatcctgtgctcggaggccatctcgggcacaggcccaccccgccccacccctccagaacacggctcacgcttacctcaaccatcctggc

SEQ ID NO: 82765 - DNA, 30 bp, Homo sapiens; identical to SEQ ID NO: 48737
  chr11:69472531-69472561
  hypo

SEQ ID NO: 82766 - DNA, 17 bp, Homo sapiens
  chr11:69475471-69475488
  hypo
ggcgtgagccaccgcac

SEQ ID NO: 82767 - DNA, 32 bp, Homo sapiens; identical to SEQ ID NO: 8239
  chr11:69477504-69477536
  hypo

SEQ ID NO: 82768 - DNA, 30 bp, Homo sapiens
  chr11:69480943-69480973
  hypo
acaaagcgagccaccgtggagatccacctg

SEQ ID NO: 82769 - DNA, 128 bp, Homo sapiens
  chr11:69481787-69481915
  hypo
ctgaagggattaaataacacacgggaggcacgtcccgcaccgcctggcacacaatcggcctcgacatgcggcacagcacccgtccaaacctcccatgagcctcattcggggccaaccatctctctcat

SEQ ID NO: 82770 - DNA, 4 bp, Homo sapiens
  chr11:69525573-69525577
  hypo
attt

SEQ ID NO: 82771 - DNA, 92 bp, Homo sapiens
  chr11:69593279-69593371
  hypo
tagttgtataaccttacgctatttcacttcttagcattctcagtttccccatctgtaaaatgggcatgagctgatgtcggccttagcaagac

SEQ ID NO: 82772 - DNA, 309 bp, Homo sapiens; identical to SEQ ID NO: 25578
  chr11:69931074-69931383
  hypo

SEQ ID NO: 82773 - DNA, 31 bp, Homo sapiens
  chr11:69944883-69944914
  hypo
tgagggtctaggccctcgggccacgggggct

SEQ ID NO: 82774 - DNA, 62 bp, Homo sapiens
  chr11:69946371-69946433
  hypo
atgctcctggagcctgcgaacgtggccttgtttggaagaagggtcttcgcagagggaatgaa

SEQ ID NO: 82775 - DNA, 264 bp, Homo sapiens; identical to SEQ ID NO: 25580
  chr11:69946944-69947208
  hypo

SEQ ID NO: 82776 - DNA, 31 bp, Homo sapiens
  chr11:69960316-69960347
  hypo
accacttgcccaggggcgcacagcccagaag

SEQ ID NO: 82777 - DNA, 313 bp, Homo sapiens; identical to SEQ ID NO: 25581
  chr11:69962487-69962800
  hypo

SEQ ID NO: 82778 - DNA, 250 bp, Homo sapiens
  chr11:69970395-69970645
  hypo
tccggggagcaacctcggagtgccacattgtcaccaaccccactgcttcctccccctcagctcctgtacgaagagtgggcacgctatggagttttctataagtaccagcccatcgacctggtcaggtaagaacgcgccacagcctgcgggaatcaagtccctactccgatggcagtcggataacatccctgtgggtttcaaccgctctgaatgttcagtacccgggaacgtgtttgaactcaaagagctt

SEQ ID NO: 82779 - DNA, 19 bp, Homo sapiens
  chr11:69971154-69971173
  hypo
cagagaagtggggaccggg

SEQ ID NO: 82780 - DNA, 78 bp, Homo sapiens
  chr11:69971957-69972035
  hypo
acaaaaaaagagagaagaggggagggcttcagaaaagcagagagcacccccaacctgatggggcggcccaggacccca

SEQ ID NO: 82781 - DNA, 30 bp, Homo sapiens
  chr11:69972836-69972866
  hypo
cttgcgggaggtgagcgtgaatgccagact

SEQ ID NO: 82782 - DNA, 42 bp, Homo sapiens
  chr11:69973232-69973274
  hypo
gaggtgagacgtgaacgctagaggcttcggtgcaggctggtg

SEQ ID NO: 82783 - DNA, 363 bp, Homo sapiens
  chr11:69977942-69978305
  hypo
ttctcccaggccagctcggcacccaggaggtgctccatcatggcccaacaaggtgactccagggctgccccctctcttgcagcatggagatgtgtgaccagagacacaatatcaccatgtgcccgctttgcgacaagacctgcagctactggaagatgagctcagcctgcgccacggcccgcgccagccacctcttcgacaaccccgccacggtcttcttctctgtcttcatggccctctggggtaagcagggctccagagcactgggtttttgggcagtggtgagtctgagtggtacctaggctgcttctgtctgtctttgcgaaatcatcctcaggcaggggttgtcgggaaaaaacatag

SEQ ID NO: 82784 - DNA, 31 bp, Homo sapiens
  chr11:69979712-69979743
  hypo
ctgtccctacacagctcggcagcctcctccc

SEQ ID NO: 82785 - DNA, 108 bp, Homo sapiens
  chr11:69982980-69983088
  hypo
tgggagccgtgggtccgtagcttggtgtagggcgtgagttccagtggtgagcagtgagacacgctgagctgggctggccagggagggggtgagcgccccgtgctggga

SEQ ID NO: 82786 - DNA, 30 bp, Homo sapiens
  chr11:69983319-69983349
  hypo
ttatcacactgtatccgaacagcggagaac

SEQ ID NO: 82787 - DNA, 30 bp, Homo sapiens
  chr11:69983711-69983741
  hypo
tggcagcccacttgacggtcactggattac

SEQ ID NO: 82788 - DNA, 43 bp, Homo sapiens
  chr11:69986054-69986097
  hypo
tctcacctagagtagtttccccgtctgactccacaaaaataca

SEQ ID NO: 82789 - DNA, 31 bp, Homo sapiens; identical to SEQ ID NO: 25583
  chr11:69995207-69995238
  hypo

SEQ ID NO: 82790 - DNA, 131 bp, Homo sapiens
  chr11:70002185-70002316
  hypo
tttttttttaacattcacatccgtgtttctctgtcttccttcggcacccagtgagcccagcatgttgcgatggcactgcatggctatggtgggtctgcggtggcggggacgggggtggggctctggcttga

SEQ ID NO: 82791 - DNA, 31 bp, Homo sapiens; identical to SEQ ID NO: 8244
  chr11:70016124-70016155
  hypo

SEQ ID NO: 82792 - DNA, 219 bp, Homo sapiens; identical to SEQ ID NO: 25585
  chr11:70016987-70017206
  hypo

SEQ ID NO: 82793 - DNA, 48 bp, Homo sapiens
  chr11:70020577-70020625
  hypo
gccgtctttgcacacccgctctcaagagcaaggcgagattgcacccca

SEQ ID NO: 82794 - DNA, 30 bp, Homo sapiens
  chr11:70020926-70020956
  hypo
ctccctgcagtcctcggaaattctggagct

SEQ ID NO: 82795 - DNA, 553 bp, Homo sapiens
  chr11:70022875-70023428
  hypo
cccattcaaatggttcgggggacccttagaattttatttttggtttacagagatccttagagcagtgagtgtcaccctggaatgtgcgtcagaataactcggggctcccagccccaccccaggagaggcggatcccgtgggctggggctggggtgccggttcagcatttctctaacacaccccgcggatgtgcagggccacacggagagccatccgcctggacgtagatatcctgcagacctgtcaggacaggctccatcggggcccggaagcgaggaagaccccgctcccggctccatctcatccccgcctcatccctcccatttcctgttgtctctctgggccggttgggcgatcacctgggcggacccccttgcctgcctgagtcctgcacttcgacggccctgaactcaggagccacgtccctcgggagccccaaagacttcaacctccaccccaggcccaccgcacctcagcaccccacttcggaggtctcaaactcagcgccccaagggccaggtgggccacacgcgcaagtgagactaagtcctgg

SEQ ID NO: 82796 - DNA, 220 bp, Homo sapiens
  chr11:70028533-70028753
  hypo
ggtcaccccctgttgcggccggcccttctgcgcccaggctgggggtccccctcactgccatgtcccctgcacaggccttcgtgatctccttcacgtctgacttcatcccgcgcctggtgtacctctacatgtacagtaagaacgggaccatgcacggcttcgtcaaccacaccctctcctccttcaacgtcagtgacttccagaacggcacggcccccaa

SEQ ID NO: 82797 - DNA, 339 bp, Homo sapiens
  chr11:70031508-70031847
  hypo
ctccactgtggagagagactccgtgggtgcggggccatgggctgctcgcccaagagagggctgccctcccggaggcagccgcacaccaagctgagcctctcccaggcgtccctcgagctgcctgactccagccagagcctgagccccaccgaagtcccaccctcgactccaccacggtcttttgcaggtataaagactaccgagagccgccgtggtcggaaaacaagtacgacatctccaaggacttctgggccgtcctggcagcccggctggcgtttgtcatcgtcttccaggtgcggtgggtccctctttgtttccggtttgaagatgggagcattt

SEQ ID NO: 82798 - DNA, 183 bp, Homo sapiens
  chr11:70080114-70080297
  hypo
cctactcattgcccatctctgcgtagatgccccagcggatcaccgttcagtcgacatttaccaggcactccctgttcgggggtgagtgttggctatggagttagccgccaggagcctgcctcctgctgactgggcgatctgggcaagttatttagcttctccgcctcagtccttcctatctgt

SEQ ID NO: 82799 - DNA, 30 bp, Homo sapiens
  chr11:70129795-70129825
  hypo
aaagaacaacctggcggaattgtgtaggac

SEQ ID NO: 82800 - DNA, 30 bp, Homo sapiens
  chr11:70139261-70139291
  hypo
aacgggatcttttaacggttacctacctgt

SEQ ID NO: 82801 - DNA, 30 bp, Homo sapiens
  chr11:70139603-70139633
  hypo
gaaacataatagagtcgcggtggcaaggcc

SEQ ID NO: 82802 - DNA, 30 bp, Homo sapiens
  chr11:70165502-70165532
  hypo
acgggtgaagggcacggctcatgagaatcc

SEQ ID NO: 82803 - DNA, 96 bp, Homo sapiens
  chr11:70177349-70177445
  hypo
aaaaaggcagtgaagtctgtagtaagaaattgggtctcctgtggtttcgtaaaccatacttattcttgtaattacgagtatcactgtattccagcc

SEQ ID NO: 82804 - DNA, 30 bp, Homo sapiens
  chr11:70178151-70178181
  hypo
cccggaggtggaggcggagctggcccagag

SEQ ID NO: 82805 - DNA, 30 bp, Homo sapiens
  chr11:70185263-70185293
  hypo
tttcatgtttcagccgaccccacttgggca

SEQ ID NO: 82806 - DNA, 30 bp, Homo sapiens
  chr11:70263201-70263231
  hypo
aagacggagaagcacgagtcacagagaggt

SEQ ID NO: 82807 - DNA, 31 bp, Homo sapiens; identical to SEQ ID NO: 25588
  chr11:70269021-70269052
  hypo

SEQ ID NO: 82808 - DNA, 8 bp, Homo sapiens
  chr11:70270219-70270227
  hypo
ggccgggt

SEQ ID NO: 82809 - DNA, 78 bp, Homo sapiens
  chr11:70281166-70281244
  hypo
atcatcaccaacatcgagatgattgacgacggctggtggcgcggggtgtgcaagggccggtacgggctcttcccagcc

SEQ ID NO: 82810 - DNA, 69 bp, Homo sapiens
  chr11:70282720-70282789
  hypo
cagtggaagctgcgtcgacactctcggtgtcctgcgccccggacctgggctggcggaggctctcctgcc

SEQ ID NO: 82811 - DNA, 90 bp, Homo sapiens
  chr11:71178321-71178411
  hypo
tgtagcacccgcaggcgctgggcacaggcaaacagacgtctctctggagaaattcaccttcaatccaggctgctccgaatttctagacgt

SEQ ID NO: 82812 - DNA, 34 bp, Homo sapiens; identical to SEQ ID NO: 25592
  chr11:71184881-71184915
  hypo

SEQ ID NO: 82813 - DNA, 217 bp, Homo sapiens
  chr11:71185634-71185851
  hypo
tctcccctgtaagccgggtgcttagtgagggcccctgtggagaagcccccgggggtcccgcctgctcctggctctcccctgtaagccgggcgcttagtgagggcccctgtggagaagcccccgggggtcccgcctgctcctggctctcccctgtaagccgggtgcttagtgagggcccctgtggagaagcccccaggggtcccgcctgctctgatgg

SEQ ID NO: 82814 - DNA, 30 bp, Homo sapiens
  chr11:71187875-71187905
  hypo
caaatcggagtcctcgggggtctgtatatt

SEQ ID NO: 82815 - DNA, 30 bp, Homo sapiens
  chr11:71188701-71188731
  hypo
acccctaccatagccgggttcaaaggcagg

SEQ ID NO: 82816 - DNA, 918 bp, Homo sapiens
  chr11:71192112-71193030
  hypo
gccctgctgcttccccgtgctgtgaccttgggccccaaggtgctgtccgtccattctgtggttcagtgtccccattttaaaatgaggacgatgataatacccacgtcctgggtctgtcttcagaatcacatgtgtcccttctcacgaggtgcctaaagcagagacgggcgtcctgagagcccagcgttgactctggcactgcagcctcctggggcctgcttgggtgggttgttgggtgctgtgggcaggggccaccgcctccgggctccatgttctgattgccctgcagccttggacctgcctgctggctctgggattttttaagacgaagtcaacaggtaagacttccagtttctagtgagcccactttgcttgttctgctggttggtctggttttattctggggcagggtagggatttttttttttttttttagtgcaaacaacaaaaagcatttcatcactctgcctccatggggagcttagtctgtgctagccagaggcaaggtgggcacagtggctggtgggtcagctccacctttggaggctcagcggaacccagcccatcagcattcagggtcacgctcaccatcttgccagcattgtaatcatgcgtatctgcagttcgtcggtggagtcagcctctgacacgccccgcagtgaagtgtcttttttccctctgaaaaatccattcatcctgccacgtgcgggtatttgtcctgaccccatggaaagtgctaacacccacgtgcatttctgtggacgcctccttgaggtctatgggtggagcttggctgatccatgggcatgctgcttctccgaggctctgctcacgctgtctgattggtccattccaggcagggtttttgctgcccttgagtggcggggtggacagcgcagccaccgcctgcctcatcta

SEQ ID NO: 82817 - DNA, 154 bp, Homo sapiens
  chr11:71193407-71193561
  hypo
tatgcagcagaacagcggtgatgatgcccgatggatggggctgtgggccatagcctgggctggcgctgcacaggcacctgggggtgtagaccggggtgcagccgtacgggcacctgagggctgtagaccggggtgcagccgcacaggcacctgg

SEQ ID NO: 82818 - DNA, 845 bp, Homo sapiens
  chr11:71229610-71230455
  hypo
agaagcgcccttgcccgctttacctgcttggcggcgcctcctgcggccagttcctcggagcatccacctgtgcagggcccgcgtcctcccctccccgcgccagcctgaagcccccgggcagcctcggtttctccttttcttctggatctccagggactgcgcggcacctggggtcctctggtggggaatgaatgagtgagtgaatgaatgaatgaggaacagggtggccatctgggtctcagtgtctgtctgggggcggggtggggggcgtcccctgatgggtccggcttgtcagcgccactcctgggggcttcccgtgggggtggcacagggcagggcccccccatctcagggctgcttcctgtggggagggtccccgagaagcggagcgtgggctggtttttagggggtaacccacgaaggttccgccagcccccggtcggttctgggaacccccgggcttgaggaacctgcccggcaccgccctggaacccgggcctgcagcctcctcggggcctcgtctccttcctcccagggaagctgtggggcagggacctggtggacggcgggtgggacccgactccctcccatcccctcacggtggggtcgcggctctgggggctcctggggccgctgccggaccctcagctctgtcgccggggggccgcagtctcggggcggcacagatggggcggctccaaggcttcagccacagacattggtttcctctgttgggggcgcggaggcccaaggtcagggagtctcagggtttgcttccttcccaggcccctcctgggctgggggcgggtgtctcctgcgccccctcgggccgccctctgcgggtc

SEQ ID NO: 82819 - DNA, 30 bp, Homo sapiens
  chr11:71258377-71258407
  hypo
accctgcagacagccggaactgaggtccca

SEQ ID NO: 82820 - DNA, 31 bp, Homo sapiens; identical to SEQ ID NO: 25598
  chr11:71282210-71282241
  hypo

SEQ ID NO: 82821 - DNA, 30 bp, Homo sapiens
  chr11:71288241-71288271
  hypo
ctgaaaagcctacacgcacgtgcccgtgcc

SEQ ID NO: 82822 - DNA, 30 bp, Homo sapiens; identical to SEQ ID NO: 25599
  chr11:71288499-71288529
  hypo

SEQ ID NO: 82823 - DNA, 121 bp, Homo sapiens
  chr11:71296338-71296459
  hypo
cttccctccaggatcatgggaacgatatccttggcggcgtccactttctaccatatatgtagtcatatcacctcctccgatttggaatatttttgaggaccatctcacacgggggtgtaca

SEQ ID NO: 82824 - DNA, 83 bp, Homo sapiens; identical to SEQ ID NO: 25600
  chr11:71321042-71321125
  hypo

SEQ ID NO: 82825 - DNA, 29 bp, Homo sapiens
  chr11:71647183-71647212
  hypo
ggcgtaaactgctgcgcctggcctataat

SEQ ID NO: 82826 - DNA, 37 bp, Homo sapiens
  chr11:71647444-71647481
  hypo
tttattttttagacagagtctcgctctgtcacccagg

SEQ ID NO: 82827 - DNA, 36 bp, Homo sapiens
  chr11:71647720-71647756
  hypo
tgagccactgcgcccggcctttttcaggtcactttt

SEQ ID NO: 82828 - DNA, 32 bp, Homo sapiens; identical to SEQ ID NO: 25603
  chr11:71673294-71673326
  hypo

SEQ ID NO: 82829 - DNA, 30 bp, Homo sapiens; identical to SEQ ID NO: 25604
  chr11:71708567-71708597
  hypo

SEQ ID NO: 82830 - DNA, 30 bp, Homo sapiens
  chr11:71715153-71715183
  hypo
aagggctgtcagaccgggagacccaatgct

SEQ ID NO: 82831 - DNA, 762 bp, Homo sapiens; identical to SEQ ID NO: 25605
  chr11:71724331-71725093
  hypo

SEQ ID NO: 82832 - DNA, 158 bp, Homo sapiens
  chr11:71725579-71725737
  hypo
tccatcagcgcggcccgcagccgttccagctcattgcccatctgctctgcctcccgctccatagcctgcagcgctgcctgtgtgctgcagaactggcgtccctgttgctcttccagccactcgggctgtctgtctcctgccctcgcaggctccttgac

SEQ ID NO: 82833 - DNA, 126 bp, Homo sapiens
  chr11:71725996-71726122
  hypo
tcctgcagctcctggcgggccttctcacattcctccttcaaagtcatcagctgttcctggaacatggcgccatactgtgcctcctcttgctggctatcctcataccgctcacgccaggcagctact

SEQ ID NO: 82834 - DNA, 30 bp, Homo sapiens
  chr11:71789665-71789695
  hypo
gcttttggaatgtaccgcttttcgctgtga

SEQ ID NO: 82835 - DNA, 44 bp, Homo sapiens
  chr11:71792520-71792564
  hypo
ccccaacgcaaacataaagctcccaaaatcggatgcttcaagtt

SEQ ID NO: 82836 - DNA, 30 bp, Homo sapiens
  chr11:71806560-71806590
  hypo
ctttgaggctcccacgaccctagtagtcct

SEQ ID NO: 82837 - DNA, 31 bp, Homo sapiens; identical to SEQ ID NO: 25607
  chr11:71888415-71888446
  hypo

SEQ ID NO: 82838 - DNA, 55 bp, Homo sapiens; identical to SEQ ID NO: 25608
  chr11:71948503-71948558
  hypo

SEQ ID NO: 82839 - DNA, 118 bp, Homo sapiens; identical to SEQ ID NO: 48760
  chr11:71955006-71955124
  hypo

SEQ ID NO: 82840 - DNA, 329 bp, Homo sapiens; identical to SEQ ID NO: 48761
  chr11:71955189-71955518
  hypo

SEQ ID NO: 82841 - DNA, 65 bp, Homo sapiens; identical to SEQ ID NO: 48762
  chr11:71955549-71955614
  hypo

SEQ ID NO: 82842 - DNA, 50 bp, Homo sapiens; identical to SEQ ID NO: 25610
  chr11:72006578-72006628
  hypo

SEQ ID NO: 82843 - DNA, 30 bp, Homo sapiens; identical to SEQ ID NO: 25611
  chr11:72084018-72084048
  hypo

SEQ ID NO: 82844 - DNA, 180 bp, Homo sapiens; identical to SEQ ID NO: 25612
  chr11:72109412-72109592
  hypo

SEQ ID NO: 82845 - DNA, 26 bp, Homo sapiens
  chr11:72126248-72126274
  hypo
actccgtctcaaaaaaaaagaaaaag

SEQ ID NO: 82846 - DNA, 31 bp, Homo sapiens
  chr11:72355681-72355712
  hypo
gaccctggcctggcaccgccaccatctcttg

SEQ ID NO: 82847 - DNA, 30 bp, Homo sapiens; identical to SEQ ID NO: 25613
  chr11:72396361-72396391
  hypo

SEQ ID NO: 82848 - DNA, 30 bp, Homo sapiens
  chr11:72406670-72406700
  hypo
cacctgggaaggggcgagaggcagggacag

SEQ ID NO: 82849 - DNA, 30 bp, Homo sapiens
  chr11:72407673-72407703
  hypo
gaccttctcctcctcgtcctcaatctctgg

SEQ ID NO: 82850 - DNA, 582 bp, Homo sapiens
  chr11:72407945-72408527
  hypo
gcaagtgccacaagggaagggcgcaggagtccggagggatgggtggaggaggaggaggctgggcacgggctgcagggcccacctgaggcctccagccaggttaggcgctgggcgcgagtgaagagcccatcaggcaggtcgcgcaggaagcgcttgagcgccgaggaaacatcatccacgtgctgctcgccctccttgaggtgcacagagcgcgcatcctgccgcaggctctccagcagccgctgtgtcttcgatgtctgcccacacttgcggtagatgccctcggaggtcaggcctagggaggggcggggccaagcgttcggggcctgaggcatagagtcatggggcggggccgcgcagctctggggcgggaggcggctctccgggaggggcggggctggcaccctaggggcagggctcaccgcactgcgtgatgtagtccacacagcggtacacgatcaccgggatatccgagtccccaagctgctgctccgacagcgtgtcccccatgctggcggctgctttctggatggcccccagccaacccatgaagtccagccgccgctcgccctgtatgtacag

SEQ ID NO: 82851 - DNA, 30 bp, Homo sapiens
  chr11:72413222-72413252
  hypo
cagccctgttccccacggtcagcgccgtgg

SEQ ID NO: 82852 - DNA, 323 bp, Homo sapiens
  chr11:72413649-72413972
  hypo
ccagaaacacaaatccggggggctcagaggcgcacaaacaccagcacagctgccagccatcctgaggggcccacactgcaagtcagggaagtcatcaacagtcacagagacacagacacagaggaacatgcatacgtagtacaaatacacactgacatgcaaacccaagcacaccccagctcacacatgatttatcacaggcccttgaggagctgcgatcacggcctgagagcagcaggtaaatcaaaccccaccaggcactgcacagcctggtggacccccaccctctgccacgctcacctgtggtccggttgttccgaagg

SEQ ID NO: 82853 - DNA, 108 bp, Homo sapiens; identical to SEQ ID NO: 25615
  chr11:72437782-72437890
  hypo

SEQ ID NO: 82854 - DNA, 538 bp, Homo sapiens
  chr11:72465691-72466229
  hypo
cttaacaaaattaagggcagacgcaggggaccgcggcagcggccatgaggcaggtgggaagcaggcacagtgatgagccggctgaggctgtgggatcgtttattggggctctgtccagccaggctgcagcacccgcctgggcctggcccggtgccaccaggtgccgggtgggggaggggagaaagtgcaggagcggccgccgccccagggctcgcccggtcctgtctccgtccctgaagcggtgcggcgctcaggtgagcgaggtgtcgtcgtcgctgccctcgccgcccgcgccgcccatccgctcctctctgctctcggccaccgcgctctcgtcgatgttctccagtgagtccgcatgctgcaccgacagctccgacagcgccaggctcggcaacgggctctgctccgggtgcagccacggcttgaagtgaggcaggtgcttctgtttccactcggggtacttgaggcacgccttgtacatcttcttcatggcctgtgggcccgccgccccgccgggtcagggggtggctagggg

SEQ ID NO: 82855 - DNA, 524 bp, Homo sapiens
  chr11:72475518-72476042
  hypo
taagaacctttgctgtggcagcgcaggtgaagaaactgaggcaggccgggtcgtgggggtcaggtaagtgtccacaggcctccctagcctggcctggctcgtgccctttccatagcccccagcaggcagcactgctgcgctaagcagaagaaattacacccatctttgttcctgcgggcggcggtggccacgccccaaaggtgtaattctaagaggcttggggagggacaggtggcggggtagggctgagtctctggagagcaccaggtgggcgggccggtaccaggaacccccagctattaggccctggctgagtgagtgtccacaccagatgttgccgtcaggtgttgcctggtaggccatcttggctgcccccggagaaactccccctggaaacaggaacccaaggggtgttgctccaccaaggagccatgctgggcttgagtacgtttaaagcctggtgacagcagggaccccgacatgcagtggtattacatttgagaaaacaggccagccaggtgcgg

SEQ ID NO: 82856 - DNA, 105 bp, Homo sapiens
  chr11:72532273-72532378
  hypo
gtgaggatggaaggagcgtgtagcctgctgggaacatcatggcgcccgagggccggatgggcatttggcagcctctgcgcgaggagtcctcgcagtggttatgca

SEQ ID NO: 82857 - DNA, 31 bp, Homo sapiens
  chr11:72532612-72532643
  hypo
cgggcaggtgagcagccgactcccttagcgc

SEQ ID NO: 82858 - DNA, 30 bp, Homo sapiens
  chr11:72534623-72534653
  hypo
ggcagtgaagaaaccgtggggaggggcatg

SEQ ID NO: 82859 - DNA, 30 bp, Homo sapiens
  chr11:72614709-72614739
  hypo
ttttgctaccatatcgcttaccccttactt

SEQ ID NO: 82860 - DNA, 20 bp, Homo sapiens
  chr11:72844826-72844846
  hypo
aactccgtctcaaaaaaaaa

SEQ ID NO: 82861 - DNA, 30 bp, Homo sapiens
  chr11:73008010-73008040
  hypo
gccgtgtggctggccgtgacaacccagtgc

SEQ ID NO: 82862 - DNA, 39 bp, Homo sapiens
  chr11:73057917-73057956
  hypo
gtccccacaggacatgcggaagcacgtggccatgaccct

SEQ ID NO: 82863 - DNA, 31 bp, Homo sapiens
  chr11:73068913-73068944
  hypo
gcttcctcataactcccgtgatcagacccag

SEQ ID NO: 82864 - DNA, 175 bp, Homo sapiens; identical to SEQ ID NO: 25619
  chr11:73072993-73073168
  hypo

SEQ ID NO: 82865 - DNA, 30 bp, Homo sapiens
  chr11:73073637-73073667
  hypo
atgacgccgggcctcggcgagggtgacccc

SEQ ID NO: 82866 - DNA, 30 bp, Homo sapiens; identical to SEQ ID NO: 25620
  chr11:73075680-73075710
  hypo

SEQ ID NO: 82867 - DNA, 218 bp, Homo sapiens; identical to SEQ ID NO: 8257
  chr11:73087924-73088142
  hypo

SEQ ID NO: 82868 - DNA, 93 bp, Homo sapiens; identical to SEQ ID NO: 25622
  chr11:73093211-73093304
  hypo

SEQ ID NO: 82869 - DNA, 149 bp, Homo sapiens
  chr11:73310291-73310440
  hypo
tttcaggaaagaggttcgccaaaatattagcaatgattatcttgggggaaagggtgtcagattgcacgtaggttttttttgttttttgagacggagtctggatctatagccaggctggagtaaagtgggggcgatcgcaggtcactgca

SEQ ID NO: 82870 - DNA, 43 bp, Homo sapiens; identical to SEQ ID NO: 25623
  chr11:73464044-73464087
  hypo

SEQ ID NO: 82871 - DNA, 158 bp, Homo sapiens
  chr11:73476966-73477124
  hypo
tgggattataggcgtgagccaccgcacccggccgaacattaatatataattctaatgaaaaaagccaatcattgatgacggctaagcagaaagctaaaaggcatcattgagccgctgtaccagccctggaactggccgcctagatttctttttagtaa

SEQ ID NO: 82872 - DNA, 102 bp, Homo sapiens
  chr11:73491526-73491628
  hypo
cgagcgaaacaccatttcaaaaataaataaataaataaaaataaaaaataaactttgagtggatagcctcttggagatggggcaggtcgggaaggagagaca

SEQ ID NO: 82873 - DNA, 39 bp, Homo sapiens; identical to SEQ ID NO: 25624
  chr11:73643143-73643182
  hypo

SEQ ID NO: 82874 - DNA, 156 bp, Homo sapiens
  chr11:73662972-73663128
  hypo
gagtcaccgcacctggccaaaaacatgtttttttttttaacaaatatttattgagcgtctaccacaagggttgagagggtacttcactcctgctgcagtggtagcagctggagataaatgtcggaatccgacatcgacactcccttacctcatgca

SEQ ID NO: 82875 - DNA, 417 bp, Homo sapiens
  chr11:73685692-73686109
  hypo
agctacaagagagggaggagacgccaaggttgagcttgctttatggatgacaagtgggctaggctgggctgtcgggggcaggacgaagattctggctgaactttccaagggacgggacgcttgggatcctggctggtacgaggcctcccacactgtcaaatgtcaactccaccagcactgagacaatgagtagatgagaatgtagaaagagggaaggtggtaggtaaaggagcggaaggaagaggtggggaaagagggaaggagagaagggaaggagggaagagaaagaaggaagaaaaggaaagcatggcccggctagagacaaagccagaggtgatcaggtcagcagcaggagaggctcagaagggagcctctcgggaagtgcaggcagccatgagggctcgtttcagctgctca

SEQ ID NO: 82876 - DNA, 180 bp, Homo sapiens
  chr11:73688954-73689134
  hypo
gtttgacagaatcatacaggccgatgcggacagaggcaaagctcatttggcgctgcaggccggcaaccagcccattgtagaggcttcgggggccctcagtacgcaccatggtcagaatggtgcccatcacaccgcggtactgggcgctggctgtagcgcgcactggcccctgactttctc

SEQ ID NO: 82877 - DNA, 30 bp, Homo sapiens
  chr11:73714785-73714815
  hypo
cccaggttgacccacggtagccacattcga

SEQ ID NO: 82878 - DNA, 21 bp, Homo sapiens
  chr11:73779853-73779874
  hypo
atttattttttgagacggagt

SEQ ID NO: 82879 - DNA, 30 bp, Homo sapiens
  chr11:73858461-73858491
  hypo
aaataacaacagcaacgaccacaacaacga

SEQ ID NO: 82880 - DNA, 30 bp, Homo sapiens
  chr11:73965250-73965280
  hypo
ccaggggcctcctgcgccctcacctgccac

SEQ ID NO: 82881 - DNA, 114 bp, Homo sapiens; identical to SEQ ID NO: 48781
  chr11:74022543-74022657
  hypo

SEQ ID NO: 82882 - DNA, 121 bp, Homo sapiens
  chr11:74107338-74107459
  hypo
gactcattaggaaaagtacagttaaaactggcacctaaagagaacaaaaagtcttgctactccaagtgtggtccacagaccagcagcattagtatcacctgaaaattcattcttttttttt

SEQ ID NO: 82883 - DNA, 21 bp, Homo sapiens
  chr11:74107758-74107779
  hypo
ggaaattcattcttaggcaga

SEQ ID NO: 82884 - DNA, 31 bp, Homo sapiens
  chr11:74136875-74136906
  hypo
ggcccatttaaaggaacgaaatagttagaca

SEQ ID NO: 82885 - DNA, 45 bp, Homo sapiens; identical to SEQ ID NO: 25628
  chr11:74168143-74168188
  hypo

SEQ ID NO: 82886 - DNA, 94 bp, Homo sapiens; identical to SEQ ID NO: 25629
  chr11:74168434-74168528
  hypo

SEQ ID NO: 82887 - DNA, 19 bp, Homo sapiens
  chr11:74246624-74246643
  hypo
attacgggtatgagccacg

SEQ ID NO: 82888 - DNA, 65 bp, Homo sapiens
  chr11:74264049-74264114
  hypo
aactggaaccacgttcggctgcttgctgctcaaaagccaaacaggagagacgagggttggtggga

SEQ ID NO: 82889 - DNA, 30 bp, Homo sapiens; identical to SEQ ID NO: 48787
  chr11:74345534-74345564
  hypo

SEQ ID NO: 82890 - DNA, 198 bp, Homo sapiens
  chr11:74424485-74424683
  hypo
aggcggacagtggaggcggtaacaactcacatgggcgccctgaaggggacacaagggtcagccctggttcaaagaaccatcgtcttccacctgtacctgtcctttcccaaaactcccaccccaactgcagaagtctgaacttgtcgtaagcctgtgattggactgaaaacaattaagtgtgcccggttcctccccatt

SEQ ID NO: 82891 - DNA, 30 bp, Homo sapiens; identical to SEQ ID NO: 48789
  chr11:74441973-74442003
  hypo

SEQ ID NO: 82892 - DNA, 30 bp, Homo sapiens; identical to SEQ ID NO: 25631
  chr11:74560679-74560709
  hypo

SEQ ID NO: 82893 - DNA, 18 bp, Homo sapiens
  chr11:74664268-74664286
  hypo
tttttttttgagacagag

SEQ ID NO: 82894 - DNA, 17 bp, Homo sapiens
  chr11:74664525-74664542
  hypo
ccacacccagcctaata

SEQ ID NO: 82895 - DNA, 388 bp, Homo sapiens; identical to SEQ ID NO: 48794
  chr11:74952948-74953336
  hypo

SEQ ID NO: 82896 - DNA, 30 bp, Homo sapiens
  chr11:74978418-74978448
  hypo
gcgctgtggatggacgaacggactgacgga

SEQ ID NO: 82897 - DNA, 31 bp, Homo sapiens; identical to SEQ ID NO: 25634
  chr11:74988583-74988614
  hypo

SEQ ID NO: 82898 - DNA, 248 bp, Homo sapiens; identical to SEQ ID NO: 25635
  chr11:74994375-74994623
  hypo

SEQ ID NO: 82899 - DNA, 75 bp, Homo sapiens
  chr11:74998667-74998742
  hypo
tgaggacactgaggcccggagagatcttcatgccaagcaccactgccagtggagcagcagcggcagagaagctgg

SEQ ID NO: 82900 - DNA, 68 bp, Homo sapiens
  chr11:75001249-75001317
  hypo
cactggtaagcctccacgatagccattagagctctcctgggctacgcaacagccgccttgcagtcagg

SEQ ID NO: 82901 - DNA, 31 bp, Homo sapiens
  chr11:75021190-75021221
  hypo
atggggaatggggtctcgctctctcccctgg

SEQ ID NO: 82902 - DNA, 96 bp, Homo sapiens
  chr11:75026126-75026222
  hypo
gatgggggagatcacccgctgtagtgaattttaacaatttcatgttgcttgggcacccactctgagtatgtcagactttctcgtaccagaagcagg

SEQ ID NO: 82903 - DNA, 17 bp, Homo sapiens
  chr11:75034362-75034379
  hypo
ttgaaatgtacctagag

SEQ ID NO: 82904 - DNA, 453 bp, Homo sapiens
  chr11:75035340-75035793
  hypo
cttcctttactgctgggacagcgcctagcacacagcaggctggctgagcacttcctggtgaatgaatgaatgaatggtctttatctgcccgtgcgaagctcctctgagtccacagcagccgccctcgtcagcctcaggtagggatgaggtctggccccactccatgtcctcagggttcagaacagggcctggcaccgaggaggcactagcaagggccgtgaatgaacgaagggctgaataaatgaacatcctacccaaagaagccctccctgatcaccgttgccgagccctggaggcctggggagtgtgcgtgtgggtgtgggtgtggaatagggggcagcaagaatggaaacatacctgggtcttctgagaacccagagagcctgtgcacctgactccaactccacctgcctcctcgggccccttccctttctgctgcgactttgcctgttt

SEQ ID NO: 82905 - DNA, 45 bp, Homo sapiens
  chr11:75053730-75053775
  hypo
ggatgaggatgaagaatggagcgcgccctccagaggccgggagag

SEQ ID NO: 82906 - DNA, 715 bp, Homo sapiens; identical to SEQ ID NO: 48795
  chr11:75062272-75062987
  hypo

SEQ ID NO: 82907 - DNA, 30 bp, Homo sapiens
  chr11:75064704-75064734
  hypo
gccactgctcccggtcgatttaatttactt

SEQ ID NO: 82908 - DNA, 30 bp, Homo sapiens
  chr11:75065540-75065570
  hypo
gcggaaaagaatcagcgatgtgaggggaca

SEQ ID NO: 82909 - DNA, 22 bp, Homo sapiens
  chr11:75085063-75085085
  hypo
ttttgagacaaagtctcgctct

SEQ ID NO: 82910 - DNA, 41 bp, Homo sapiens
  chr11:75088629-75088670
  hypo
ttaaaattagctgtatcggctgggcacggtggctcacacct

SEQ ID NO: 82911 - DNA, 15 bp, Homo sapiens
  chr11:75095705-75095720
  hypo
cgccccctagcggcg

SEQ ID NO: 82912 - DNA, 88 bp, Homo sapiens
  chr11:75101268-75101356
  hypo
cctcacagtgggtatcgacacctagggagagatctggaaacttgtgcccccgtagtttacactgccttaccagaacagtgtcattttt

SEQ ID NO: 82913 - DNA, 30 bp, Homo sapiens; identical to SEQ ID NO: 25639
  chr11:75115361-75115391
  hypo

SEQ ID NO: 82914 - DNA, 111 bp, Homo sapiens
  chr11:75136559-75136670
  hypo
agaaggggtcgtagcgctccacgctgtgcaggcgcctcaggccgtcgaagccacccaccgcgaacagctgcaagtgaggacatgggccggggagccgggtgccagggcctt

SEQ ID NO: 82915 - DNA, 930 bp, Homo sapiens; identical to SEQ ID NO: 48799
  chr11:75140939-75141869
  hypo

SEQ ID NO: 82916 - DNA, 251 bp, Homo sapiens
  chr11:75146456-75146707
  hypo
ctcccagagcactccgagttcagacacacttccaccagctctcctaggctccccagcttctgtgtcaggtacaggtgggacagacatgtcttcagctaacgcccactccgctctatgagggtcttggtgtggctgccaccccctcgggggcccacaggggtggcggtgctgttggcatatgtgtcataactgttgtctgaacatacggagagcacatcggagacctctacaccatcgctgatctctgctgg

SEQ ID NO: 82917 - DNA, 31 bp, Homo sapiens
  chr11:75147837-75147868
  hypo
ccggtgggtttatgtacgtctgtgcccttgt

SEQ ID NO: 82918 - DNA, 238 bp, Homo sapiens
  chr11:75152293-75152531
  hypo
agaagagccacggtgcgttgactgtgtagaggttcacactcaggttccaggacgcgtagtccctgtggggcaggggagaggcaggtcagcatgcggaccctggcagctccaggcccagtgtcggggctggtaaagcacgtcctgttcacgacctcacagccatgcccggggcaaggaacattggctccagagggccaagctccgggacaagcccgggtctgcccgacacgctcaccct

SEQ ID NO: 82919 - DNA, 76 bp, Homo sapiens
  chr11:75162090-75162166
  hypo
cccagaggcagcagcggccagggccctctgatgccgagcagggacagtggcatttctagacgatgagggtggggcg

SEQ ID NO: 82920 - DNA, 30 bp, Homo sapiens; identical to SEQ ID NO: 25643
  chr11:75167012-75167042
  hypo

SEQ ID NO: 82921 - DNA, 31 bp, Homo sapiens; identical to SEQ ID NO: 8270
  chr11:75237128-75237159
  hypo

SEQ ID NO: 82922 - DNA, 128 bp, Homo sapiens; identical to SEQ ID NO: 25645
  chr11:75242018-75242146
  hypo

SEQ ID NO: 82923 - DNA, 203 bp, Homo sapiens
  chr11:75285549-75285752
  hypo
tacagtcagtgggggccgagctgggactagatcctagtcggttgggtagttgcttcgccacataggaagggcaggagaggcccctaacacagtgcctggaacccagcactgagcacagattctagtaatgaaggcatgttaacttgcatacgatctgtatccatctctcttaatccttgcaatagccccgttaggtgggaagt

SEQ ID NO: 82924 - DNA, 194 bp, Homo sapiens; identical to SEQ ID NO: 25646
  chr11:75303122-75303316
  hypo

SEQ ID NO: 82925 - DNA, 142 bp, Homo sapiens
  chr11:75315460-75315602
  hypo
tgtaaaagaagagcaagcctgcgccggggcttgacaccggacggcagcccagtgtgtcagaatgccggggacaagaggattttaaggacaggagatacagagtgtgctgagcaatatacacgtcatattggcaaatattatt

SEQ ID NO: 82926 - DNA, 31 bp, Homo sapiens; identical to SEQ ID NO: 25647
  chr11:75338638-75338669
  hypo

SEQ ID NO: 82927 - DNA, 935 bp, Homo sapiens; identical to SEQ ID NO: 48805
  chr11:75379282-75380217
  hypo

SEQ ID NO: 82928 - DNA, 31 bp, Homo sapiens
  chr11:75414896-75414927
  hypo
caggcctgagccaccacgcccagtctccagg

SEQ ID NO: 82929 - DNA, 18 bp, Homo sapiens
  chr11:75438021-75438039
  hypo
accgcgcctggctggaac

SEQ ID NO: 82930 - DNA, 89 bp, Homo sapiens
  chr11:75459485-75459574
  hypo
aggcgttaggttggtgcgaaagtcattgaggtttttgccaatagcatccctacaatggactattatttgatcgtaaaaagtaatgaaat

SEQ ID NO: 82931 - DNA, 30 bp, Homo sapiens; identical to SEQ ID NO: 25649
  chr11:75529839-75529869
  hypo

SEQ ID NO: 82932 - DNA, 59 bp, Homo sapiens; identical to SEQ ID NO: 25650
  chr11:75536156-75536215
  hypo

SEQ ID NO: 82933 - DNA, 30 bp, Homo sapiens
  chr11:75557285-75557315
  hypo
tattaagacttaccgcgtttcagtcattag

SEQ ID NO: 82934 - DNA, 31 bp, Homo sapiens; identical to SEQ ID NO: 25651
  chr11:75681481-75681512
  hypo

SEQ ID NO: 82935 - DNA, 37 bp, Homo sapiens
  chr11:75799382-75799419
  hypo
tttataatgagaaaaacgaggacgaggggtgggaagt

SEQ ID NO: 82936 - DNA, 50 bp, Homo sapiens; identical to SEQ ID NO: 25652
  chr11:75852054-75852104
  hypo

SEQ ID NO: 82937 - DNA, 169 bp, Homo sapiens; identical to SEQ ID NO: 25653
  chr11:75858210-75858379
  hypo

SEQ ID NO: 82938 - DNA, 18 bp, Homo sapiens
  chr11:75859222-75859240
  hypo
aaaaaaaaaaaatttttt

SEQ ID NO: 82939 - DNA, 30 bp, Homo sapiens
  chr11:75859521-75859551
  hypo
ctgaggtgtgcgtgtcggtatggggcgggg

SEQ ID NO: 82940 - DNA, 30 bp, Homo sapiens
  chr11:75876120-75876150
  hypo
atgcacaaggggaacgcacgcacagggagg

SEQ ID NO: 82941 - DNA, 30 bp, Homo sapiens; identical to SEQ ID NO: 25655
  chr11:75878112-75878142
  hypo

SEQ ID NO: 82942 - DNA, 168 bp, Homo sapiens; identical to SEQ ID NO: 25656
  chr11:75882507-75882675
  hypo

SEQ ID NO: 82943 - DNA, 30 bp, Homo sapiens; identical to SEQ ID NO: 25657
  chr11:75904169-75904199
  hypo

SEQ ID NO: 82944 - DNA, 30 bp, Homo sapiens
  chr11:75905902-75905932
  hypo
ggaaggtcagccgacgctgatccagggcta

SEQ ID NO: 82945 - DNA, 30 bp, Homo sapiens; identical to SEQ ID NO: 25658
  chr11:75907190-75907220
  hypo

SEQ ID NO: 82946 - DNA, 87 bp, Homo sapiens
  chr11:75993074-75993161
  hypo
tacccacttcctcccccgggctccccacctccgaatctgcctcactcattccagggggatgcagacatcacccgcaaacaaacaggg

SEQ ID NO: 82947 - DNA, 31 bp, Homo sapiens
  chr11:76001208-76001239
  hypo
taccaatgcaatgccccggaacgcagagttg

SEQ ID NO: 82948 - DNA, 31 bp, Homo sapiens; identical to SEQ ID NO: 25659
  chr11:76010247-76010278
  hypo

SEQ ID NO: 82949 - DNA, 36 bp, Homo sapiens; identical to SEQ ID NO: 25660
  chr11:76077427-76077463
  hypo

SEQ ID NO: 82950 - DNA, 31 bp, Homo sapiens; identical to SEQ ID NO: 25661
  chr11:76101585-76101616
  hypo

SEQ ID NO: 82951 - DNA, 56 bp, Homo sapiens; identical to SEQ ID NO: 25662
  chr11:76164361-76164417
  hypo

SEQ ID NO: 82952 - DNA, 192 bp, Homo sapiens
  chr11:76315099-76315291
  hypo
gccccttggtccaggacggaggcctgaaggagggtgtcctcgagccaggtgtgcaggtctgggtccctgctccgggaggaggcagctgaggctggccaggccagtgggcaagagctaaccgttctggtatgaccatggctgccccaggaccactgctatggtggggaccacctgggccgagactccccctgt

SEQ ID NO: 82953 - DNA, 184 bp, Homo sapiens; identical to SEQ ID NO: 25663
  chr11:76339358-76339542
  hypo

SEQ ID NO: 82954 - DNA, 629 bp, Homo sapiens
  chr11:76371680-76372309
  hypo
ttcaagagctgggaaagggggcggccgctggcattcccgctgggggctgagaggggcagggctgaccagccctcggaaggtgcgtggatgcccttgctgtcctggggtggccctgtggggagccggatgaggttgttggacaagttcaggtagatgagtctcgggagcgcggccaggtcggggaaatggagcagtttgttctcccgcaggtcaagccaggtgagctggaactcagcctggggctgggaggccgtctgaaaggcctcgatgctgttgcagctcaggtctagcacccgcagctgctggaggctgaagtcggagatgcaggtgagggaattcctggagaggttgagatgggtcaggcggggcagaccctcgaaggcgccatcctcgatgtccatcagcacgttgctatgcaggtcaagctgctccagcgcaggcatgtcccggaaggtgtggcgggtgaggcgagtcagactgttctccgccagtgagagggtatgcaggctgggtgcctcccccagcagccgctccagcaggccgctgtacaggctgttcccagacaggtccagggaggtcacgcgtggcagggggcccaggccaccagcactcagcgcagtggccatcgc

SEQ ID NO: 82955 - DNA, 718 bp, Homo sapiens; identical to SEQ ID NO: 48810
  chr11:76381597-76382315
  hypo

SEQ ID NO: 82956 - DNA, 437 bp, Homo sapiens
  chr11:76407634-76408071
  hypo
gtaaggaaaaagaaacgtaaaatgtttttactatagagttttgaatctcagacatccagaagcatgccactggaggcgtcccagccagcgccccagggaagattgggagatggatgtggccccctcaccctggaggcccctagcccatacctgaatgcaggccagccctgatgcaaatgggcacgttgggtgcatgcctcttccggaagtcacccacagagccaaggatatccagagccatgttattgatctcggccgcatgctgactgccattgcactgaggcagcccccacaccaccatgtaggcgtccccaatggtctccacctagaaaccacagccttcacaatccagcgtgagaacatatcctcgctggcccaccacacattctgctacacatggctgcttctcgggagtcccaacccgccccgtgggtctc

SEQ ID NO: 82957 - DNA, 193 bp, Homo sapiens
  chr11:76408272-76408465
  hypo
ttaatttggagaggaccgtatatatttagaggacgcctccaattttccaaaccctgctggccttccaaaggtttactggaaagaatgtaggttttggaatgagacagatgtaggttcaagccctggccctgccatttacctggacgacttcacctgggcgagcctcagtttcctcttacgtggaatgaatgtt

SEQ ID NO: 82958 - DNA, 31 bp, Homo sapiens; identical to SEQ ID NO: 25668
  chr11:76450420-76450451
  hypo

SEQ ID NO: 82959 - DNA, 56 bp, Homo sapiens
  chr11:76463184-76463240
  hypo
ctctgccttgccctctcgtgcctgggttctcttatatccctcgggctgggttctgg

SEQ ID NO: 82960 - DNA, 31 bp, Homo sapiens; identical to SEQ ID NO: 48811
  chr11:76466226-76466257
  hypo

SEQ ID NO: 82961 - DNA, 144 bp, Homo sapiens
  chr11:76506254-76506398
  hypo
gctggagaggccagcccgagaaaccgtctagtctggtgggtttcaaactgggtttcctaacaccctaggcagggatggtgggcagaagtcgagggcttcaggtccccctcacttcagccagaccaggcccgccttcatctgctg

SEQ ID NO: 82962 - DNA, 31 bp, Homo sapiens
  chr11:76507126-76507157
  hypo
agggccgggcactacacgtggacctctccca

SEQ ID NO: 82963 - DNA, 31 bp, Homo sapiens
  chr11:76516214-76516245
  hypo
actgtcctgtttccatcggaccaagggactc

SEQ ID NO: 82964 - DNA, 105 bp, Homo sapiens
  chr11:76674833-76674938
  hypo
aaagtaagccacattatgctgcgttaagaaaagaaacctggtcaagtagccaagatggccaaataggaacagctccagtctacaactctcggcgttagcgacaca

SEQ ID NO: 82965 - DNA, 31 bp, Homo sapiens; identical to SEQ ID NO: 48816
  chr11:76682667-76682698
  hypo

SEQ ID NO: 82966 - DNA, 30 bp, Homo sapiens; identical to SEQ ID NO: 25671
  chr11:76901147-76901177
  hypo

SEQ ID NO: 82967 - DNA, 167 bp, Homo sapiens
  chr11:76905509-76905676
  hypo
atcacgcccctgaagacgctggagaagtgggcccagctggccatcgccgcccacaagaaggtagaagggctgagaggagtcctagagaagggatgtggacctgaacaaccaaggaggtcccaggcctcatctgaacctctctgttggggctgcgggggatgggatgg

SEQ ID NO: 82968 - DNA, 31 bp, Homo sapiens
  chr11:76910510-76910541
  hypo
tgtctgagctgggccacgtctcccactggtt

SEQ ID NO: 82969 - DNA, 31 bp, Homo sapiens
  chr11:76912236-76912267
  hypo
aggagtctgggaggcccgctcacaacaggcc

SEQ ID NO: 82970 - DNA, 108 bp, Homo sapiens
  chr11:76924553-76924661
  hypo
gcctgctcctgtacaccgtgtttcccaaggttctgccctgtcttcttcttggctccctcctcaaactctccctggaccatctcattcaggccacggtgtcagttccct

SEQ ID NO: 82971 - DNA, 36 bp, Homo sapiens
  chr11:76955353-76955389
  hypo
ggcgtgagccaccgcgcccagccctgggctagtatc

SEQ ID NO: 82972 - DNA, 1394 bp, Homo sapiens; identical to SEQ ID NO: 48817
  chr11:77184260-77185654
  hypo

SEQ ID NO: 82973 - DNA, 135 bp, Homo sapiens
  chr11:77383109-77383244
  hypo
cttcgcttgtgtactcgccttatttctttaccacgtcgcaaactcttctgggaaccgtcactttctgagtcttctttgtagttaatttgtcttttctgatttctccttgaccgccttcgccgagtttctacaaaa

SEQ ID NO: 82974 - DNA, 16 bp, Homo sapiens
  chr11:77533444-77533460
  hypo
agcaagactccacctc

SEQ ID NO: 82975 - DNA, 22 bp, Homo sapiens
  chr11:77534247-77534269
  hypo
aagactccgtctcaaaaaaaaa

SEQ ID NO: 82976 - DNA, 30 bp, Homo sapiens; identical to SEQ ID NO: 25674
  chr11:77589957-77589987
  hypo

SEQ ID NO: 82977 - DNA, 30 bp, Homo sapiens; identical to SEQ ID NO: 25675
  chr11:77595018-77595048
  hypo

SEQ ID NO: 82978 - DNA, 31 bp, Homo sapiens
  chr11:77728163-77728194
  hypo
gcggtcgatgaagaagcggccctccgcgtcc

SEQ ID NO: 82979 - DNA, 31 bp, Homo sapiens
  chr11:77883308-77883339
  hypo
gactgcaggggaaggccgccttcctgagggc

SEQ ID NO: 82980 - DNA, 30 bp, Homo sapiens; identical to SEQ ID NO: 25676
  chr11:77920641-77920671
  hypo

SEQ ID NO: 82981 - DNA, 22 bp, Homo sapiens
  chr11:78002202-78002224
  hypo
aaagagtagatcaaggctgggc

SEQ ID NO: 82982 - DNA, 82 bp, Homo sapiens
  chr11:78021124-78021206
  hypo
accatgcataggataaaatctcgcataacaaagaattgtcccacctacaatttcaatacacgcctctgagaaatgtgggggt

SEQ ID NO: 82983 - DNA, 26 bp, Homo sapiens
  chr11:78130945-78130971
  hypo
ttttttttttttagacggagtctcgc

SEQ ID NO: 82984 - DNA, 25 bp, Homo sapiens
  chr11:78131210-78131235
  hypo
ggattacaggcgtgagcccggccga

SEQ ID NO: 82985 - DNA, 30 bp, Homo sapiens
  chr11:78253913-78253943
  hypo
gcactcccaacagggcgacagagcgagacc

SEQ ID NO: 82986 - DNA, 20 bp, Homo sapiens
  chr11:78255540-78255560
  hypo
atcaagaatgagttaccggc

SEQ ID NO: 82987 - DNA, 162 bp, Homo sapiens; identical to SEQ ID NO: 25678
  chr11:78380770-78380932
  hypo

SEQ ID NO: 82988 - DNA, 30 bp, Homo sapiens
  chr11:78498020-78498050
  hypo
gcgggtggcaggcccgctggtcgcaggctg

SEQ ID NO: 82989 - DNA, 408 bp, Homo sapiens; identical to SEQ ID NO: 25679
  chr11:78534088-78534496
  hypo

SEQ ID NO: 82990 - DNA, 30 bp, Homo sapiens; identical to SEQ ID NO: 48829
  chr11:78789409-78789439
  hypo

SEQ ID NO: 82991 - DNA, 43 bp, Homo sapiens
  chr11:78982380-78982423
  hypo
ctttctaaagggctttagagacggcaaagccacttgctcctct

SEQ ID NO: 82992 - DNA, 31 bp, Homo sapiens; identical to SEQ ID NO: 25680
  chr11:78984744-78984775
  hypo

SEQ ID NO: 82993 - DNA, 935 bp, Homo sapiens; identical to SEQ ID NO: 48834
  chr11:79150891-79151826
  hypo

SEQ ID NO: 82994 - DNA, 195 bp, Homo sapiens; identical to SEQ ID NO: 8285
  chr11:82443373-82443568
  hypo

SEQ ID NO: 82995 - DNA, 285 bp, Homo sapiens; identical to SEQ ID NO: 8286
  chr11:82443651-82443936
  hypo

SEQ ID NO: 82996 - DNA, 1099 bp, Homo sapiens; identical to SEQ ID NO: 48837
  chr11:82443948-82445047
  hypo

SEQ ID NO: 82997 - DNA, 30 bp, Homo sapiens
  chr11:82693039-82693069
  hypo
tgctggcctgtggtcgaggcccttggcctg

SEQ ID NO: 82998 - DNA, 104 bp, Homo sapiens
  chr11:82843542-82843646
  hypo
caatgaaaatctagttcgtatgattgaacactcacagaaagaacttcagaaggtaagaaaacatattcaaggctctccctctccctctccctctccctctccct

SEQ ID NO: 82999 - DNA, 29 bp, Homo sapiens
  chr11:82998000-82998029
  hypo
cactgggatggctgggcgtggtggctcat

SEQ ID NO: 83000 - DNA, 137 bp, Homo sapiens
  chr11:85247647-85247784
  hypo
cacagggaagtgtgaagagagaggcgcaggcaggagctggggctgcgtgcggtgctcacaggccagtgcgggttccaggtgagcgcaggcttggcaagccccgcactcagggcagcgggctgatgcctgctgggctt

SEQ ID NO: 83001 - DNA, 43 bp, Homo sapiens
  chr11:85319010-85319053
  hypo
tacattggatttttctcggtcctctttgtggtctaggaggaca

SEQ ID NO: 83002 - DNA, 20 bp, Homo sapiens
  chr11:85359988-85360008
  hypo
tttttttttgtagaccgagt

SEQ ID NO: 83003 - DNA, 31 bp, Homo sapiens; identical to SEQ ID NO: 25687
  chr11:85379742-85379773
  hypo

SEQ ID NO: 83004 - DNA, 203 bp, Homo sapiens
  chr11:85564730-85564933
  hypo
agggccccaaagtgacgtcagccccatctcaaattcaaaccccatagtaaacgaacaagatagaccttaactactgactaattctccaaagcaaaaagtcaggaaaataaaaaaatctcgttaagctgtaaaaaataaaaataaaaataaaaatacatatccaggtacatactctttctttctttgagacagaggctcgctct

SEQ ID NO: 83005 - DNA, 30 bp, Homo sapiens
  chr11:85565187-85565217
  hypo
aagcatgagccaccgcgccctgctatatta

SEQ ID NO: 83006 - DNA, 30 bp, Homo sapiens
  chr11:85646445-85646475
  hypo
ggcttcggagccatcgtgtgcacagccagc

SEQ ID NO: 83007 - DNA, 170 bp, Homo sapiens; identical to SEQ ID NO: 25688
  chr11:85692739-85692909
  hypo

SEQ ID NO: 83008 - DNA, 30 bp, Homo sapiens; identical to SEQ ID NO: 25689
  chr11:85719839-85719869
  hypo

SEQ ID NO: 83009 - DNA, 18 bp, Homo sapiens
  chr11:85749524-85749542
  hypo
aaagtaagtcaaagtcct

SEQ ID NO: 83010 - DNA, 232 bp, Homo sapiens; identical to SEQ ID NO: 25690
  chr11:85906158-85906390
  hypo

SEQ ID NO: 83011 - DNA, 280 bp, Homo sapiens
  chr11:85989382-85989662
  hypo
ggtagacactgacaacgttatgtgtggtctttaacctgttgtcatgttttttccctagatgtacaacactgactcatcataaatgtggtgctgctattcgacaaaccagttttagcagggatagcagcattcttatagctgtttgtgatgatgccagtatttggcgctgggatcgacttcgataaaatacttttgcctaatcaaaattagagtgtgtttgttgtctgtgtaaaatagaattaatgtatcttgctagtaagggcacgtagagcatttagag

SEQ ID NO: 83012 - DNA, 30 bp, Homo sapiens; identical to SEQ ID NO: 48855
  chr11:86014098-86014128
  hypo

SEQ ID NO: 83013 - DNA, 19 bp, Homo sapiens
  chr11:86120513-86120532
  hypo
agatggagtcttgctccgt

SEQ ID NO: 83014 - DNA, 30 bp, Homo sapiens; identical to SEQ ID NO: 25691
  chr11:86208307-86208337
  hypo

SEQ ID NO: 83015 - DNA, 31 bp, Homo sapiens; identical to SEQ ID NO: 25692
  chr11:86218735-86218766
  hypo

SEQ ID NO: 83016 - DNA, 30 bp, Homo sapiens; identical to SEQ ID NO: 48856
  chr11:86382375-86382405
  hypo

SEQ ID NO: 83017 - DNA, 30 bp, Homo sapiens; identical to SEQ ID NO: 48858
  chr11:86391915-86391945
  hypo

SEQ ID NO: 83018 - DNA, 175 bp, Homo sapiens
  chr11:86408235-86408410
  hypo
tctagttgacctgaagcggcagggatctgcagtaaaaacttcggagcatagttccgtagctgttgttccaatgcagctggttagatccgactatcctaagctgaggcaaagagtagaaatccaggaaggtctacaagcagacttcaaggacagacagttacgcacagggagttgt

SEQ ID NO: 83019 - DNA, 32 bp, Homo sapiens
  chr11:86464894-86464926
  hypo
ataagcactttttggtcgtccttccattctct

SEQ ID NO: 83020 - DNA, 30 bp, Homo sapiens; identical to SEQ ID NO: 48859
  chr11:86503647-86503677
  hypo

SEQ ID NO: 83021 - DNA, 1142 bp, Homo sapiens; identical to SEQ ID NO: 48860
  chr11:86510899-86512041
  hypo

SEQ ID NO: 83022 - DNA, 30 bp, Homo sapiens; identical to SEQ ID NO: 8297
  chr11:86512316-86512346
  hypo

SEQ ID NO: 83023 - DNA, 30 bp, Homo sapiens; identical to SEQ ID NO: 48862
  chr11:86512761-86512791
  hypo

SEQ ID NO: 83024 - DNA, 284 bp, Homo sapiens; identical to SEQ ID NO: 48863
  chr11:86513413-86513697
  hypo

SEQ ID NO: 83025 - DNA, 30 bp, Homo sapiens; identical to SEQ ID NO: 8299
  chr11:86514121-86514151
  hypo

SEQ ID NO: 83026 - DNA, 30 bp, Homo sapiens
  chr11:86617353-86617383
  hypo
catgggctcggctgcggcctctcaaaggcc

SEQ ID NO: 83027 - DNA, 650 bp, Homo sapiens; identical to SEQ ID NO: 48865
  chr11:86665885-86666535
  hypo

SEQ ID NO: 83028 - DNA, 32 bp, Homo sapiens
  chr11:87434383-87434415
  hypo
ttacaaccatatatacatatgcgtatacatac

SEQ ID NO: 83029 - DNA, 92 bp, Homo sapiens
  chr11:87434774-87434866
  hypo
cacaacccatgtattataatcactgtttcaaggatgagaaaatcgaaaggttaaacatttagcttagagtcgcttatcaaataccaaaatta

SEQ ID NO: 83030 - DNA, 29 bp, Homo sapiens
  chr11:88094140-88094169
  hypo
ccttttgaacaagtacgtattctttacta

SEQ ID NO: 83031 - DNA, 186 bp, Homo sapiens; identical to SEQ ID NO: 25698
  chr11:91435728-91435914
  hypo

SEQ ID NO: 83032 - DNA, 482 bp, Homo sapiens
  chr11:92648641-92649123
  hypo
ccccagctttacaatgggattcggaacctcccaaagtcagtccgatgccccctcccgcaacccggtgtgtttgtgtatccccgcggtgcaggccgactgcgcggtgctcttcgtggcaggcggctgggcggaggccggcatcttcaagaacccgcagacccacgagctcgcgctgctggccaactggcgggacgtcacgcagctcatcgtgatcttcaacgaaattgactccaccgagcccgcctacagcggctcgcgcctccaggtgatcaccaaggaagtaagcgcctgcatcaagaagatcggctacaactggctgcctggccttcagtccatctcgagctggcacggcgacagcatgctggagcccagcactgacgcgagtgtggcgcgggtcggcagggacagccggggtggaggcgagcggaccacaccccggactcacctcccctcgacatcccgaagatgccctggttcaagtg

SEQ ID NO: 83033 - DNA, 644 bp, Homo sapiens; identical to SEQ ID NO: 48882
  chr11:92930674-92931318
  hypo

SEQ ID NO: 83034 - DNA, 30 bp, Homo sapiens
  chr11:93062737-93062767
  hypo
atatcccaggtgaccgtatacaattcatct

SEQ ID NO: 83035 - DNA, 366 bp, Homo sapiens; identical to SEQ ID NO: 48883
  chr11:93063613-93063979
  hypo

SEQ ID NO: 83036 - DNA, 102 bp, Homo sapiens
  chr11:93065698-93065800
  hypo
ctaagggtggtggatgcggaggcaggcctcgtgtgctcttctgttaccacaatgcaacctttcttcgccagcttgctccttttttgccgcattgagtatctc

SEQ ID NO: 83037 - DNA, 130 bp, Homo sapiens
  chr11:93212117-93212247
  hypo
gcgtccccctcccgcgcctcctctccctgccgatggggtccgcagccggctgcggggctcactcggtgatggtggggcgcgtggccacgtacacaaacaccacgatcaagagcacgaccacggccagcgt

SEQ ID NO: 83038 - DNA, 51 bp, Homo sapiens
  chr11:93214578-93214629
  hypo
gccttgagtgatgcccaccttcgcgggaccgtggtgaggatggagtaggaa

SEQ ID NO: 83039 - DNA, 77 bp, Homo sapiens; identical to SEQ ID NO: 25700
  chr11:93425625-93425702
  hypo

SEQ ID NO: 83040 - DNA, 334 bp, Homo sapiens
  chr11:93476507-93476841
  hypo
tgctctgccacccaggctggagtgcagttgaagcaggatattcctctgaccccttcgtgggtcttgcggctgcggtgcctcacttacttagcccacggctctcaactcctcgcgggagggggggcgcgagtgaatgaggcgggaactggagtgctggaagccacgaactccagtcacccaggcctgctgcgctccaccctttatgggagggtgcgtgggggtgagcagatgctggagccggagcgagcgcttttggtcgccggtaggagcgaactccatgcaggccctgcggctgtgtctaggggatgcccgcgacccctgaagacccacagcc

SEQ ID NO: 83041 - DNA, 30 bp, Homo sapiens; identical to SEQ ID NO: 25702
  chr11:93822725-93822755
  hypo

SEQ ID NO: 83042 - DNA, 21 bp, Homo sapiens
  chr11:94165674-94165695
  hypo
tttcaaaccccttatctggga

SEQ ID NO: 83043 - DNA, 20 bp, Homo sapiens
  chr11:94165994-94166014
  hypo
aaacaaaacaaaacaaaaac

SEQ ID NO: 83044 - DNA, 17 bp, Homo sapiens
  chr11:94272328-94272345
  hypo
ttaagtgcagtgacatg

SEQ ID NO: 83045 - DNA, 17 bp, Homo sapiens
  chr11:94272584-94272601
  hypo
cagcagttttatttttc

SEQ ID NO: 83046 - DNA, 43 bp, Homo sapiens
  chr11:94276062-94276105
  hypo
gagtataggcgtgagccaccgcgcctggcctatacttgatttt

SEQ ID NO: 83047 - DNA, 30 bp, Homo sapiens
  chr11:94300663-94300693
  hypo
cactctgggctcaccgggaacatgagtgga

SEQ ID NO: 83048 - DNA, 247 bp, Homo sapiens
  chr11:94532869-94533116
  hypo
atggagaaacaggtccggtccacgcagcctcagcagaacaacgaggaactgcccacttacgaggaggccaaagcacagtcgcagttcttcagggggcagcagcagcagcaacagcagcagggggcggtgggccatggttactacatggcagggggcaccagtcagaagtcccgaactgaggggaggcccactgtgaaccgtgccaacagtggacaggcgcataaggacgaggcgctgaaggaactga

SEQ ID NO: 83049 - DNA, 30 bp, Homo sapiens
  chr11:94533427-94533457
  hypo
gatgtggccgtcctgcggtaccagccaccc

SEQ ID NO: 83050 - DNA, 31 bp, Homo sapiens
  chr11:94554946-94554977
  hypo
aacttcagggttactacgacaatgccgacaa

SEQ ID NO: 83051 - DNA, 30 bp, Homo sapiens
  chr11:94864223-94864253
  hypo
atgagaaacatgagcgtagcaagagttaca

SEQ ID NO: 83052 - DNA, 38 bp, Homo sapiens
  chr11:94885452-94885490
  hypo
tttgaaagtaggataaaaggccgggcgcggtggctcac

SEQ ID NO: 83053 - DNA, 17 bp, Homo sapiens
  chr11:94895731-94895748
  hypo
caaaaaaaaaaaaaaaa

SEQ ID NO: 83054 - DNA, 35 bp, Homo sapiens; identical to SEQ ID NO: 25706
  chr11:94952097-94952132
  hypo

SEQ ID NO: 83055 - DNA, 30 bp, Homo sapiens; identical to SEQ ID NO: 48899
  chr11:95522931-95522961
  hypo

SEQ ID NO: 83056 - DNA, 34 bp, Homo sapiens; identical to SEQ ID NO: 8325
  chr11:95523018-95523052
  hypo

SEQ ID NO: 83057 - DNA, 114 bp, Homo sapiens
  chr11:95631020-95631134
  hypo
cgttcaacaaggttacgtttacaagtcttcttagtctgtgattcacaaacttactctaactttgtgacctcggcacactagagctggttattcgcttcagtggcctgcctgact

SEQ ID NO: 83058 - DNA, 168 bp, Homo sapiens
  chr11:95658583-95658751
  hypo
ccagacagatcttcatcggaatcccggttctgtctctacacttgctctgtgctgtggttaagttgtttcacatctctaaaatgggaataaaatgggaataaaaatatctacgtaataggttgtttttctctgtgcagagtcggttgcacagtacggtctcactaagta

SEQ ID NO: 83059 - DNA, 30 bp, Homo sapiens; identical to SEQ ID NO: 8326
  chr11:95831955-95831985
  hypo

SEQ ID NO: 83060 - DNA, 31 bp, Homo sapiens; identical to SEQ ID NO: 25710
  chr11:95999750-95999781
  hypo

SEQ ID NO: 83061 - DNA, 31 bp, Homo sapiens; identical to SEQ ID NO: 25711
  chr11:96109568-96109599
  hypo

SEQ ID NO: 83062 - DNA, 145 bp, Homo sapiens
  chr11:96117186-96117331
  hypo
ttctgaagtttttctcgcttttgtgcagctaatgttttttcaggagtcttttgctccatttccactgaagaaccttcatcttcaaccactctacggggacgtttaacacctacttttctaactaggatatcgctgtcatcactct

SEQ ID NO: 83063 - DNA, 1331 bp, Homo sapiens; identical to SEQ ID NO: 8327
  chr11:96122354-96123685
  hypo

SEQ ID NO: 83064 - DNA, 52 bp, Homo sapiens
  chr11:97332187-97332239
  hypo
tggccaaagttgcctactccacggaactgtcggaagctggcaacaggtggaa

SEQ ID NO: 83065 - DNA, 181 bp, Homo sapiens; identical to SEQ ID NO: 25713
  chr11:97588955-97589136
  hypo

SEQ ID NO: 83066 - DNA, 31 bp, Homo sapiens; identical to SEQ ID NO: 25714
  chr11:98233109-98233140
  hypo

SEQ ID NO: 83067 - DNA, 21 bp, Homo sapiens
  chr11:100681708-100681729
  hypo
cagagtctcactgtgttaccc

SEQ ID NO: 83068 - DNA, 596 bp, Homo sapiens; identical to SEQ ID NO: 48905
  chr11:100997694-100998290
  hypo

SEQ ID NO: 83069 - DNA, 389 bp, Homo sapiens; identical to SEQ ID NO: 8330
  chr11:100998355-100998744
  hypo

SEQ ID NO: 83070 - DNA, 31 bp, Homo sapiens
  chr11:101951409-101951440
  hypo
catgagccaccgcgaccggcccacaaatagt

SEQ ID NO: 83071 - DNA, 31 bp, Homo sapiens
  chr11:101952328-101952359
  hypo
agaatgccacaaatgtcgccgggcccggtgg

SEQ ID NO: 83072 - DNA, 31 bp, Homo sapiens; identical to SEQ ID NO: 25717
  chr11:101977377-101977408
  hypo

SEQ ID NO: 83073 - DNA, 44 bp, Homo sapiens; identical to SEQ ID NO: 25718
  chr11:102245880-102245924
  hypo

SEQ ID NO: 83074 - DNA, 31 bp, Homo sapiens
  chr11:102325404-102325435
  hypo
aagatgtgaggctttccggaggtgatttggt

SEQ ID NO: 83075 - DNA, 31 bp, Homo sapiens
  chr11:102367129-102367160
  hypo
acttacagaatcccacgccgggcgcggtggc

SEQ ID NO: 83076 - DNA, 706 bp, Homo sapiens; identical to SEQ ID NO: 25720
  chr11:103907384-103908090
  hypo

SEQ ID NO: 83077 - DNA, 851 bp, Homo sapiens; identical to SEQ ID NO: 48923
  chr11:104034315-104035166
  hypo

SEQ ID NO: 83078 - DNA, 202 bp, Homo sapiens; identical to SEQ ID NO: 25722
  chr11:105850437-105850639
  hypo

SEQ ID NO: 83079 - DNA, 1039 bp, Homo sapiens; identical to SEQ ID NO: 48928
  chr11:106888277-106889316
  hypo

SEQ ID NO: 83080 - DNA, 860 bp, Homo sapiens; identical to SEQ ID NO: 48934
  chr11:107799192-107800052
  hypo

SEQ ID NO: 83081 - DNA, 88 bp, Homo sapiens; identical to SEQ ID NO: 25726
  chr11:107931200-107931288
  hypo

SEQ ID NO: 83082 - DNA, 35 bp, Homo sapiens
  chr11:108031056-108031091
  hypo
atggaaaaacatacgtaaatttgatttttccactg

SEQ ID NO: 83083 - DNA, 82 bp, Homo sapiens
  chr11:108031643-108031725
  hypo
gtaagatttttactagaaggacgagagtttcgctcacgttcatctaattcctcaattttccgcttttttgtggtgctccttg

SEQ ID NO: 83084 - DNA, 15 bp, Homo sapiens
  chr11:108189614-108189629
  hypo
attattggccgagcg

SEQ ID NO: 83085 - DNA, 30 bp, Homo sapiens; identical to SEQ ID NO: 48939
  chr11:108345500-108345530
  hypo

SEQ ID NO: 83086 - DNA, 30 bp, Homo sapiens; identical to SEQ ID NO: 48940
  chr11:108357121-108357151
  hypo

SEQ ID NO: 83087 - DNA, 643 bp, Homo sapiens; identical to SEQ ID NO: 48941
  chr11:108368606-108369249
  hypo

SEQ ID NO: 83088 - DNA, 178 bp, Homo sapiens
  chr11:108603171-108603349
  hypo
ttttgggctactcattgtgtgcgcacacttggagtataaaatgaatgtttgcctttagacttcggcgtaaatggagacgagaggtactgagtgccaggtgcaagcaaggccttctggaatgctgccttgtcacaatccttttctgtttgacgagatcgatgcagtgaaggacaacaag

SEQ ID NO: 83089 - DNA, 35 bp, Homo sapiens
  chr11:108674026-108674061
  hypo
ctttgtttttcaggccagccacggcggctcacgcc

SEQ ID NO: 83090 - DNA, 30 bp, Homo sapiens; identical to SEQ ID NO: 25729
  chr11:108680108-108680138
  hypo

SEQ ID NO: 83091 - DNA, 40 bp, Homo sapiens; identical to SEQ ID NO: 25730
  chr11:109963224-109963264
  hypo

SEQ ID NO: 83092 - DNA, 32 bp, Homo sapiens; identical to SEQ ID NO: 25731
  chr11:109963348-109963380
  hypo

SEQ ID NO: 83093 - DNA, 30 bp, Homo sapiens
  chr11:110108722-110108752
  hypo
aaaggctacaagcacgtaactattttattt

SEQ ID NO: 83094 - DNA, 201 bp, Homo sapiens; identical to SEQ ID NO: 25732
  chr11:110144180-110144381
  hypo

SEQ ID NO: 83095 - DNA, 1204 bp, Homo sapiens; identical to SEQ ID NO: 8360
  chr11:110581824-110583028
  hypo

SEQ ID NO: 83096 - DNA, 1035 bp, Homo sapiens; identical to SEQ ID NO: 48951
  chr11:110583043-110584078
  hypo

SEQ ID NO: 83097 - DNA, 41 bp, Homo sapiens
  chr11:111154501-111154542
  hypo
tgtcttcctagcacagcgccggtcaccgggaaggtactcag

SEQ ID NO: 83098 - DNA, 30 bp, Homo sapiens; identical to SEQ ID NO: 48953
  chr11:111171693-111171723
  hypo

SEQ ID NO: 83099 - DNA, 427 bp, Homo sapiens; identical to SEQ ID NO: 48957
  chr11:111411154-111411581
  hypo

SEQ ID NO: 83100 - DNA, 660 bp, Homo sapiens; identical to SEQ ID NO: 48958
  chr11:111411821-111412481
  hypo

SEQ ID NO: 83101 - DNA, 31 bp, Homo sapiens; identical to SEQ ID NO: 25737
  chr11:111484752-111484783
  hypo

SEQ ID NO: 83102 - DNA, 221 bp, Homo sapiens
  chr11:111500768-111500989
  hypo
acagtcacgcaaagtcggatcaacccaaatgtccatcagtgggaaaatgtatccagaacaaatcgtagtatagtaatacaaaggcagatgattcaaaaaggaaatgaactatttatgcatgcaacaacatgcatacatcttacagacatgtgctaagtaaaagaagctggacacaaaagagtacagattatatatggttctatttacgtgaaattctataa

SEQ ID NO: 83103 - DNA, 147 bp, Homo sapiens
  chr11:111574774-111574921
  hypo
acaagaaagaatatcaaatgccgccttgtttgctgtgaaagaccaaggctccgggctgtgctgcctttcccccgccacgtagccataagtgaaaccaaactgattctcctgctttgctcactttgcgcccagtgatgtttttctgta

SEQ ID NO: 83104 - DNA, 30 bp, Homo sapiens
  chr11:111595084-111595114
  hypo
tcctgcccttcggtcgagtggagcaagctc

SEQ ID NO: 83105 - DNA, 31 bp, Homo sapiens; identical to SEQ ID NO: 8367
  chr11:111945412-111945443
  hypo

SEQ ID NO: 83106 - DNA, 44 bp, Homo sapiens
  chr11:112066435-112066479
  hypo
ggatttcaggcgcgagccactgcgcctggtctgaattacatatt

SEQ ID NO: 83107 - DNA, 30 bp, Homo sapiens
  chr11:112108679-112108709
  hypo
ggtaggaactaccagcgagttataaaaata

SEQ ID NO: 83108 - DNA, 20 bp, Homo sapiens
  chr11:112152181-112152201
  hypo
gcaataaccagatgccttca

SEQ ID NO: 83109 - DNA, 129 bp, Homo sapiens
  chr11:113552770-113552899
  hypo
gtgggctcaaccactcgaagccagcacctataacatgctgagcccgcaccgggctctaggaaccagaaatcagagtgaccaggggaaactgggacatcgatatgcatggcttgccggagtaacactaca

SEQ ID NO: 83110 - DNA, 30 bp, Homo sapiens
  chr11:113560577-113560607
  hypo
accacccccactaggcgccatgtgtcccca

SEQ ID NO: 83111 - DNA, 236 bp, Homo sapiens
  chr11:113560951-113561187
  hypo
cctggcatgcatcagcccttccgtccaggtagccagcgcaaagcatgcggggggtgagggctccgctgtacacgcaagagctgttgcagagctgagtgctgaacaagggcaccaccgtgtcctggagcatatccgagctgtaagctatgagagacaccgagaaaaactgcagggcacaaagcaaggcccaggcaggcagagcagcaagaggggaggtaattcgaagtcccagagac

SEQ ID NO: 83112 - DNA, 31 bp, Homo sapiens; identical to SEQ ID NO: 25740
  chr11:113712909-113712940
  hypo

SEQ ID NO: 83113 - DNA, 35 bp, Homo sapiens; identical to SEQ ID NO: 25741
  chr11:113747596-113747631
  hypo

SEQ ID NO: 83114 - DNA, 30 bp, Homo sapiens
  chr11:113752457-113752487
  hypo
aggcatgagccactgcgcccagcctataag

SEQ ID NO: 83115 - DNA, 29 bp, Homo sapiens
  chr11:113790259-113790288
  hypo
caaggtttaggcagggcgctgtggctcac

SEQ ID NO: 83116 - DNA, 200 bp, Homo sapiens; identical to SEQ ID NO: 25742
  chr11:113921421-113921621
  hypo

SEQ ID NO: 83117 - DNA, 161 bp, Homo sapiens
  chr11:114070064-114070225
  hypo
gctgggccccgggacggggctgctggacatggatgccgctgggccccgggacggggatgctggacatggatgctgggccccgggatggggatgccagccatggatgccgctgggcagtgggcaggacacagaccttgcccttccccggcctcccaccctag

SEQ ID NO: 83118 - DNA, 93 bp, Homo sapiens
  chr11:114082515-114082608
  hypo
agcgctttataagctcgcgatgaaagctgtaaaacgagatggtcaaggatctggccaggcctggttcgggattatggccggcccctggaatgc

SEQ ID NO: 83119 - DNA, 30 bp, Homo sapiens; identical to SEQ ID NO: 25744
  chr11:114112625-114112655
  hypo

SEQ ID NO: 83120 - DNA, 382 bp, Homo sapiens; identical to SEQ ID NO: 25745
  chr11:114112880-114113262
  hypo

SEQ ID NO: 83121 - DNA, 80 bp, Homo sapiens
  chr11:114115568-114115648
  hypo
cttcccccccaccgccgccttcacccccacccggctgggtggctgccgatgtacgttttaattaccggctccagctgaag

SEQ ID NO: 83122 - DNA, 66 bp, Homo sapiens; identical to SEQ ID NO: 25746
  chr11:114127909-114127975
  hypo

SEQ ID NO: 83123 - DNA, 30 bp, Homo sapiens
  chr11:114314868-114314898
  hypo
acattcagtctgtcgcgaacgcattgtgga

SEQ ID NO: 83124 - DNA, 30 bp, Homo sapiens
  chr11:115060642-115060672
  hypo
tgcactttgaaaaatcgagtagtactatct

SEQ ID NO: 83125 - DNA, 3093 bp, Homo sapiens; identical to SEQ ID NO: 48973
  chr11:115373104-115376197
  hypo

SEQ ID NO: 83126 - DNA, 554 bp, Homo sapiens; identical to SEQ ID NO: 48976
  chr11:115630577-115631131
  hypo

SEQ ID NO: 83127 - DNA, 30 bp, Homo sapiens; identical to SEQ ID NO: 8383
  chr11:115791602-115791632
  hypo

SEQ ID NO: 83128 - DNA, 88 bp, Homo sapiens
  chr11:115939371-115939459
  hypo
ctcaaaaaaaaaaaaaaagattttgggaggcgacacaattcggcccataataatccctagccctcacgccacccctcactgaaggtgg

SEQ ID NO: 83129 - DNA, 125 bp, Homo sapiens
  chr11:116132011-116132136
  hypo
atcaatgcattttaattcatacgaagatatttgtctgctgctccattccttcgaggcgcagagacacgttgaacaaaacaagtcagcctcgcgtggagacaaacgctccagcttctccctgaaat

SEQ ID NO: 83130 - DNA, 32 bp, Homo sapiens
  chr11:116256382-116256414
  hypo
agcgagactccgtctcaaaaaaaaataaaaat

SEQ ID NO: 83131 - DNA, 38 bp, Homo sapiens
  chr11:116365359-116365397
  hypo
ggttaatgccttccaacgtttttccttctaaaaccttc

SEQ ID NO: 83132 - DNA, 171 bp, Homo sapiens; identical to SEQ ID NO: 25750
  chr11:116591712-116591883
  hypo

SEQ ID NO: 83133 - DNA, 30 bp, Homo sapiens
  chr11:116612892-116612922
  hypo
ctggatgtgatatgcggagggaaagactga

SEQ ID NO: 83134 - DNA, 34 bp, Homo sapiens
  chr11:116613906-116613940
  hypo
aaaataaataatacattcctgcgcatgcctgtaa

SEQ ID NO: 83135 - DNA, 22 bp, Homo sapiens
  chr11:116666252-116666274
  hypo
gacggagcgggactccatttca

SEQ ID NO: 83136 - DNA, 37 bp, Homo sapiens
  chr11:116672909-116672946
  hypo
ggatattgaccaggcacggtggctcatgcctgtaatc

SEQ ID NO: 83137 - DNA, 339 bp, Homo sapiens
  chr11:116691760-116692099
  hypo
ccttccacgtcccccgcatgggggcccagtttctgcctgagctgttccatctgctgcaccagggctttgttgaagttttccccgtagggctccacccggcgtcggaactcctccacctgctggtccaggtgcccacccagctctgccagtgacttctgcagcccctcggtgttgcccctcaggttgccacgcacgtcctcggccaagggcgccagcctctgccgcagctcctcggcactggccgagatcctggccttgagctcctcggcgttcttcttcatctggaaggtcaggccctcaagctggtggttgagcttctcctgcgtgtcctgagcatag

SEQ ID NO: 83138 - DNA, 30 bp, Homo sapiens
  chr11:116692344-116692374
  hypo
gcgcagctggtccgcgtagggctccaggcg

SEQ ID NO: 83139 - DNA, 30 bp, Homo sapiens; identical to SEQ ID NO: 25751
  chr11:116693400-116693430
  hypo

SEQ ID NO: 83140 - DNA, 613 bp, Homo sapiens; identical to SEQ ID NO: 48983
  chr11:116706357-116706970
  hypo

SEQ ID NO: 83141 - DNA, 106 bp, Homo sapiens
  chr11:116821479-116821585
  hypo
ttttgacagaaggaagccctgcgttcttggctgcagtagcctggacgggaatttccaccttgctgaccagactttgtttcttaccgaatttgcacagatgttcttg

SEQ ID NO: 83142 - DNA, 20 bp, Homo sapiens
  chr11:116862121-116862141
  hypo
cactgcgctccagtatgggc

SEQ ID NO: 83143 - DNA, 27 bp, Homo sapiens
  chr11:116890017-116890044
  hypo
agccaccgcacacggtctttattgtaa

SEQ ID NO: 83144 - DNA, 22 bp, Homo sapiens
  chr11:116934572-116934594
  hypo
cgcctggcctgaagtttcttaa

SEQ ID NO: 83145 - DNA, 34 bp, Homo sapiens; identical to SEQ ID NO: 25754
  chr11:116959821-116959855
  hypo

SEQ ID NO: 83146 - DNA, 37 bp, Homo sapiens; identical to SEQ ID NO: 25755
  chr11:117047302-117047339
  hypo

SEQ ID NO: 83147 - DNA, 2 bp, Homo sapiens
  chr11:117056078-117056080
  hypo
ca

SEQ ID NO: 83148 - DNA, 193 bp, Homo sapiens
  chr11:117062555-117062748
  hypo
gccatttctgcagctcccttccgtgtccctcatcctagacacatcgttcatgtacatgatcgccggactctgcatgctgaagctctaccagaagcggcacccggacatcaacgccagcgcctacagtgcctacgcctgcctggccattgtcatcttcttctctgtgctgggcgtggtgagggcctgacctgct

SEQ ID NO: 83149 - DNA, 336 bp, Homo sapiens; identical to SEQ ID NO: 25757
  chr11:117073747-117074083
  hypo

SEQ ID NO: 83150 - DNA, 71 bp, Homo sapiens; identical to SEQ ID NO: 25758
  chr11:117074287-117074358
  hypo

SEQ ID NO: 83151 - DNA, 116 bp, Homo sapiens
  chr11:117075032-117075148
  hypo
cggcatgacaggctacggacgacctcggcagatcatcagttagagcggagagggctagccctgagcccggccctcccccagctccttggctgcagccatcccgcttagcctgcctc

SEQ ID NO: 83152 - DNA, 235 bp, Homo sapiens
  chr11:117076077-117076312
  hypo
gctctgcagtcctgccgcaggattccctagtgaagcagctcaggcctgggggagccgtgtgtatcccagctgtgccggcagcatcataccaatcgtgggggtggtgaaggagccaggggttcattcatggttggtttctgatcaggcatcttgggaatggataatggaggcagccgctttcaggacaggcatgtccaggggctcctcccagcctctaccccgaagtcctcttccc

SEQ ID NO: 83153 - DNA, 30 bp, Homo sapiens
  chr11:117097587-117097617
  hypo
ggctgccaccatagacgtatcggatcatag

SEQ ID NO: 83154 - DNA, 116 bp, Homo sapiens; identical to SEQ ID NO: 25761
  chr11:117097880-117097996
  hypo

SEQ ID NO: 83155 - DNA, 21 bp, Homo sapiens
  chr11:117129695-117129716
  hypo
tgagtttcactctgtcgtcca

SEQ ID NO: 83156 - DNA, 21 bp, Homo sapiens
  chr11:117129955-117129976
  hypo
agctaccgtgcccggctttat

SEQ ID NO: 83157 - DNA, 489 bp, Homo sapiens; identical to SEQ ID NO: 8386
  chr11:117186648-117187137
  hypo

SEQ ID NO: 83158 - DNA, 121 bp, Homo sapiens; identical to SEQ ID NO: 25765
  chr11:117188181-117188302
  hypo

SEQ ID NO: 83159 - DNA, 49 bp, Homo sapiens; identical to SEQ ID NO: 25766
  chr11:117188541-117188590
  hypo

SEQ ID NO: 83160 - DNA, 151 bp, Homo sapiens; identical to SEQ ID NO: 25767
  chr11:117267875-117268026
  hypo

SEQ ID NO: 83161 - DNA, 30 bp, Homo sapiens
  chr11:117283752-117283782
  hypo
ctgccctgattccacggctgcctcaggcag

SEQ ID NO: 83162 - DNA, 232 bp, Homo sapiens; identical to SEQ ID NO: 25768
  chr11:117335663-117335895
  hypo

SEQ ID NO: 83163 - DNA, 147 bp, Homo sapiens; identical to SEQ ID NO: 48990
  chr11:117352807-117352954
  hypo

SEQ ID NO: 83164 - DNA, 199 bp, Homo sapiens; identical to SEQ ID NO: 25769
  chr11:117380435-117380634
  hypo

SEQ ID NO: 83165 - DNA, 382 bp, Homo sapiens; identical to SEQ ID NO: 25770
  chr11:117389165-117389547
  hypo

SEQ ID NO: 83166 - DNA, 30 bp, Homo sapiens
  chr11:117391938-117391968
  hypo
gatgagcagcgtctcgttgctgagcccgcg

SEQ ID NO: 83167 - DNA, 30 bp, Homo sapiens; identical to SEQ ID NO: 25771
  chr11:117459974-117460004
  hypo

SEQ ID NO: 83168 - DNA, 294 bp, Homo sapiens; identical to SEQ ID NO: 48991
  chr11:117667149-117667443
  hypo

SEQ ID NO: 83169 - DNA, 30 bp, Homo sapiens
  chr11:117772843-117772873
  hypo
agtccgatggtgcccggtggccattagccc

SEQ ID NO: 83170 - DNA, 30 bp, Homo sapiens; identical to SEQ ID NO: 8387
  chr11:117789330-117789360
  hypo

SEQ ID NO: 83171 - DNA, 109 bp, Homo sapiens; identical to SEQ ID NO: 48995
  chr11:117856817-117856926
  hypo

SEQ ID NO: 83172 - DNA, 31 bp, Homo sapiens; identical to SEQ ID NO: 25773
  chr11:117860108-117860139
  hypo

SEQ ID NO: 83173 - DNA, 31 bp, Homo sapiens
  chr11:117941634-117941665
  hypo
gcatcctgggttacaccgacctggatctcaa

SEQ ID NO: 83174 - DNA, 126 bp, Homo sapiens; identical to SEQ ID NO: 25774
  chr11:117957554-117957680
  hypo

SEQ ID NO: 83175 - DNA, 24 bp, Homo sapiens
  chr11:117973128-117973152
  hypo
gttgcacagtaaggccgagtgcgg

SEQ ID NO: 83176 - DNA, 33 bp, Homo sapiens; identical to SEQ ID NO: 25775
  chr11:117977481-117977514
  hypo

SEQ ID NO: 83177 - DNA, 40 bp, Homo sapiens; identical to SEQ ID NO: 25776
  chr11:117994508-117994548
  hypo

SEQ ID NO: 83178 - DNA, 88 bp, Homo sapiens
  chr11:118088741-118088829
  hypo
ttaaatatcatttcctcgggaaacctctcttcaaccactcatcccaggacaggtccccaagccacatgtctttttttttattttgaga

SEQ ID NO: 83179 - DNA, 123 bp, Homo sapiens
  chr11:118133218-118133341
  hypo
ggcaggtgtatgtcccattgtcgtcgaactgcagtttccagagaaggatggaggcatcgtaccgctcaggattcccatcccaagacacccggtccttaaaccgcccactcatgggttggaagg

SEQ ID NO: 83180 - DNA, 31 bp, Homo sapiens
  chr11:118193731-118193762
  hypo
gcctcaagtggccagccgatccctgacccat

SEQ ID NO: 83181 - DNA, 30 bp, Homo sapiens; identical to SEQ ID NO: 49000
  chr11:118662876-118662906
  hypo

SEQ ID NO: 83182 - DNA, 30 bp, Homo sapiens
  chr11:118747225-118747255
  hypo
cctacccagcgcatgcgcccacagcactta

SEQ ID NO: 83183 - DNA, 45 bp, Homo sapiens
  chr11:118772065-118772110
  hypo
tcagcatctgctgctgcggggtcatctgcacgttcaggttcatgt

SEQ ID NO: 83184 - DNA, 30 bp, Homo sapiens
  chr11:118773642-118773672
  hypo
gacaggtaaggggacgttccacccagtcct

SEQ ID NO: 83185 - DNA, 232 bp, Homo sapiens
  chr11:118773922-118774154
  hypo
ggcctgcccaccaggcacttacgtgttggccaggtgggtggtgaagacatatacgaactgcgagggaggctttccggggacgcccccgcccccgcccccgcccccaggggcatcaggccgaaggccaggaggagggccgtgcggggcgcctggcacgctgctctcgctgaggggcagttgggtggtttggccgggacccagctgtggggccgccatggctgggtctgctaca

SEQ ID NO: 83186 - DNA, 30 bp, Homo sapiens
  chr11:118779002-118779032
  hypo
gggtcccagcctctcgctgctctccagagt

SEQ ID NO: 83187 - DNA, 31 bp, Homo sapiens
  chr11:118983356-118983387
  hypo
ggggatgggcagtctccgaggctctgtctct

SEQ ID NO: 83188 - DNA, 41 bp, Homo sapiens; identical to SEQ ID NO: 25777
  chr11:119019635-119019676
  hypo

SEQ ID NO: 83189 - DNA, 31 bp, Homo sapiens
  chr11:119029537-119029568
  hypo
gtccccttagagatggcggtcttcatgaggg

SEQ ID NO: 83190 - DNA, 31 bp, Homo sapiens; identical to SEQ ID NO: 25778
  chr11:119032604-119032635
  hypo

SEQ ID NO: 83191 - DNA, 196 bp, Homo sapiens; identical to SEQ ID NO: 49008
  chr11:119039917-119040113
  hypo

SEQ ID NO: 83192 - DNA, 30 bp, Homo sapiens
  chr11:119040420-119040450
  hypo
ccgagtggtggctcgcgcctgcagtccccg

SEQ ID NO: 83193 - DNA, 262 bp, Homo sapiens; identical to SEQ ID NO: 25779
  chr11:119044182-119044444
  hypo

SEQ ID NO: 83194 - DNA, 31 bp, Homo sapiens
  chr11:119058471-119058502
  hypo
cgcctccttccccatgcgcctaacctcctta

SEQ ID NO: 83195 - DNA, 31 bp, Homo sapiens
  chr11:119058917-119058948
  hypo
acacctttcagtgcaccgaagaggtgtccct

SEQ ID NO: 83196 - DNA, 30 bp, Homo sapiens; identical to SEQ ID NO: 8392
  chr11:119077264-119077294
  hypo

SEQ ID NO: 83197 - DNA, 237 bp, Homo sapiens; identical to SEQ ID NO: 8393
  chr11:119103175-119103412
  hypo

SEQ ID NO: 83198 - DNA, 84 bp, Homo sapiens; identical to SEQ ID NO: 8394
  chr11:119142430-119142514
  hypo

SEQ ID NO: 83199 - DNA, 107 bp, Homo sapiens; identical to SEQ ID NO: 8395
  chr11:119144574-119144681
  hypo

SEQ ID NO: 83200 - DNA, 131 bp, Homo sapiens; identical to SEQ ID NO: 8396
  chr11:119145546-119145677
  hypo

SEQ ID NO: 83201 - DNA, 143 bp, Homo sapiens; identical to SEQ ID NO: 8397
  chr11:119146701-119146844
  hypo

SEQ ID NO: 83202 - DNA, 103 bp, Homo sapiens; identical to SEQ ID NO: 8398
  chr11:119148461-119148564
  hypo

SEQ ID NO: 83203 - DNA, 563 bp, Homo sapiens; identical to SEQ ID NO: 8399
  chr11:119148860-119149423
  hypo

SEQ ID NO: 83204 - DNA, 493 bp, Homo sapiens; identical to SEQ ID NO: 8400
  chr11:119155747-119156240
  hypo

SEQ ID NO: 83205 - DNA, 127 bp, Homo sapiens; identical to SEQ ID NO: 8401
  chr11:119167630-119167757
  hypo

SEQ ID NO: 83206 - DNA, 87 bp, Homo sapiens; identical to SEQ ID NO: 8402
  chr11:119168097-119168184
  hypo

SEQ ID NO: 83207 - DNA, 176 bp, Homo sapiens; identical to SEQ ID NO: 8403
  chr11:119169060-119169236
  hypo

SEQ ID NO: 83208 - DNA, 101 bp, Homo sapiens; identical to SEQ ID NO: 8404
  chr11:119170360-119170461
  hypo

SEQ ID NO: 83209 - DNA, 31 bp, Homo sapiens; identical to SEQ ID NO: 8405
  chr11:119187862-119187893
  hypo

SEQ ID NO: 83210 - DNA, 31 bp, Homo sapiens
  chr11:119216683-119216714
  hypo
tgggaggctgggagagcggctcatggagttt

SEQ ID NO: 83211 - DNA, 309 bp, Homo sapiens
  chr11:119243047-119243356
  hypo
gtggtctgggcccccccgcatccagcccaggttggggcaaggcctgcaggagacactggcatgtcacatagaaaaggagaaggtgagaagagtggttcattgggcgcagcagagcattcctgagaacactactggactatcctcgagtgcgcgggccctgagtgggctttctaggcagagtgggaaggcccctcccctcggcacggagccccaggggcaccagatgtgccaggatgacttctcttgtttgtctccaccaggagcagcctgtcagtcatcagtcaggttgggagtcgagccctcagcctg

SEQ ID NO: 83212 - DNA, 191 bp, Homo sapiens
  chr11:119244099-119244290
  hypo
tgtaggcaccatagcccgacttggcatagtgggcatctgtgtagcgggccgattctgtgtagcgcttcagggtggaggagagctgggacatccttcagggtggcactcagtggggactgggagcctcatgggctgaaagacaaggagtgtagttgtcagagggccctgccaggtgtcgggctcccacagac

SEQ ID NO: 83213 - DNA, 31 bp, Homo sapiens
  chr11:119286647-119286678
  hypo
agacaccttcacagcacgaaagctgcagatt

SEQ ID NO: 83214 - DNA, 31 bp, Homo sapiens
  chr11:119287463-119287494
  hypo
tctctgggtaggtttgcgttgtgaggcctga

SEQ ID NO: 83215 - DNA, 299 bp, Homo sapiens; identical to SEQ ID NO: 25795
  chr11:119290803-119291102
  hypo

SEQ ID NO: 83216 - DNA, 56 bp, Homo sapiens
  chr11:119352935-119352991
  hypo
gctgggcgttggggtccgacccaaggggctgccccaggccccgcatgttcatgcat

SEQ ID NO: 83217 - DNA, 91 bp, Homo sapiens
  chr11:119405811-119405902
  hypo
acaggcgtgagccaccgcgcctggcccagactgggtatattaataggctgctaatgtctctggcatccccgagcagtggtcctggcttttc

SEQ ID NO: 83218 - DNA, 86 bp, Homo sapiens
  chr11:119493219-119493305
  hypo
caccgtgtctggcctgacaggagatttattctacctgggactgaaattttcctgagctgtcctgagggtgccggctcctgtcccca

SEQ ID NO: 83219 - DNA, 68 bp, Homo sapiens
  chr11:119493692-119493760
  hypo
agggactcggcccagcggagacgtccgaagctctgagtgcccagaagaggttacgttctggtctgagt

SEQ ID NO: 83220 - DNA, 183 bp, Homo sapiens; identical to SEQ ID NO: 25799
  chr11:119505166-119505349
  hypo

SEQ ID NO: 83221 - DNA, 278 bp, Homo sapiens
  chr11:119506101-119506379
  hypo
catcgccaacgaatccgagttctggggataaatccttttctcgcccggtaattgctctgtaagccaaaaggaattacactttttggcaaccacaacagagcctccccaggacgccagagcttcccttccgctggtgacttccacacaccaccccgcaggccgttcacaagcctctgtccatccagacgccctaaccacggcccctgggctcaggacatagggtgtaggtgctctcttcgccccctcaacctgccgctcctgcccgtggctggtgggtg

SEQ ID NO: 83222 - DNA, 69 bp, Homo sapiens
  chr11:119506661-119506730
  hypo
agcaagaccgagaagcgtcagtggggattagggccagctgcagctgttccattccgtcacagagatttt

SEQ ID NO: 83223 - DNA, 156 bp, Homo sapiens
  chr11:119506966-119507122
  hypo
aaatagtggtctccccgctcccctacctcccttgctttcgggcctgggatgatgtgctctctctctcctgaggcaggcgtgagctggtgtctgcaggtgggagattctcgccctgcttggtgcttagaatgccctggcccccgacgcaggactctg

SEQ ID NO: 83224 - DNA, 123 bp, Homo sapiens
  chr11:119524139-119524262
  hypo
ggagggtggcccggcgcggggatcccaacccagccctgccctgagggacacatccccgttcctccagacccgcgcccctccaacaggctggtgggtcgtggtgcgagacgacgtcaatcagag

SEQ ID NO: 83225 - DNA, 30 bp, Homo sapiens
  chr11:119529816-119529846
  hypo
cctgtgctaccccagcgctttacacacagc

SEQ ID NO: 83226 - DNA, 31 bp, Homo sapiens
  chr11:119532000-119532031
  hypo
agaagagcagcagcaccgagtgggacagggg

SEQ ID NO: 83227 - DNA, 169 bp, Homo sapiens
  chr11:119532427-119532596
  hypo
aggctctcttgcagcccgggcactgggaaattcgtttctccttaatggctttcagcaggatcagaccattccctctgccacatctgtgctgagtggccatctggctgtgcatgcatgcgtgtgtacatgcgtgtacacatgcctgcgcgtgggtgtgttggaggtgtga

SEQ ID NO: 83228 - DNA, 678 bp, Homo sapiens
  chr11:119535380-119536058
  hypo
aggtggggggtgggcagggggcgtgcggggaggggctggggaggagcggtcacagacagaggctctggaaggggggctacacgtaccactccttcttggaaatgaaagacccgtcgttctgagaaaccatgttctcagccaagtccagctgctcagggtcgtactggtagcccagagtccggtccccgtagccgtcctgacgggcctcggcctcatccacggtgaagtagggccgcttggcgtcctcgtcatatttggggtgggggccgcccaccttgcgctcgccccctccaccgccctcctcctcctcctcctcctcctcatagctgcttccacccagtgggccggccttcttctcgtcgtctgagtcgtcggggtactgcaggttctgtgccattggtgggtggtgctgggggatgcctgccttgctgtagccgttgccatacacgtgcttcttggtgctgtagtcacccttgaaggtgtgccggcgccgacgcagggcgaccacgatcccgccgaccacaatcaacaccagcaggatgctccccgccacgcccccaatgatggccgtgggcaccggcccggcgcgccgcccatgttcgggaggagacggggtgtaggggaattctgggtgaggaaaagagatggaggggacagcatcagcgtgtgctcctgggg

SEQ ID NO: 83229 - DNA, 136 bp, Homo sapiens
  chr11:119536816-119536952
  hypo
ggcacaagcacagggcaaggacggcagaaatgggggtgaaagcatgtgcgtgtgtgcgtgcgtggcaatgtcgagtacacacaagtgggcacatgcacaggcatacacgcttgccgtcatagcaagcctgccaccc

SEQ ID NO: 83230 - DNA, 30 bp, Homo sapiens
  chr11:119538338-119538368
  hypo
cccatacaagattccgtggttctcggcttt

SEQ ID NO: 83231 - DNA, 160 bp, Homo sapiens
  chr11:119540984-119541144
  hypo
aatgtattttatctattgtctttcctcctatgcgaaaacgtaagctccacaaggatagggactttttgtctgttttgctcatggatttataccaagcacctagaccgcttgtcatgtggtcaatgttcaagaagtatctgttggacgacagaatgaattc

SEQ ID NO: 83232 - DNA, 100 bp, Homo sapiens; identical to SEQ ID NO: 25803
  chr11:119541629-119541729
  hypo

SEQ ID NO: 83233 - DNA, 31 bp, Homo sapiens; identical to SEQ ID NO: 25804
  chr11:119547317-119547348
  hypo

SEQ ID NO: 83234 - DNA, 638 bp, Homo sapiens
  chr11:119548208-119548846
  hypo
ggaggagggacagtggcgcccaccccaggaggcccctggcagccagccctgctcacactgcacgttgagagtgaggctttccttgaagcggtccatgtggtagttgacgatgcaggccaaggactgctggtgggcttccctgctgggcaccaggcggtagcggctgatgaccgtcactgtgccattggggttccggatctcctggtactctgcctcaccttttaaccgagtttcccaggataccacactgggaggcttcccattggctgaggtgcaggtggccaccaggaccttgtcatcctgccccttcttggctcgaagcactgcctgggtaccctctatccaattggtgggtttggctgcgaggaagcagagagagtgatgggactagccctgttgacttgtccaagatgcaccggccaaaagggcgtggcatccgtcaggccttgtcttcaggtccccttggccatccctgcctctcagctgtgctgcaccaaagactgtcccagaacctcttgcaggaagttcatcatgtctaacgttatgtcctccctgccctactagtcatatccctgtcatcgagcttaggcctcctggagtcccagcatgtctaaggcaagcagcgcaggtggctcctt

SEQ ID NO: 83235 - DNA, 384 bp, Homo sapiens; identical to SEQ ID NO: 25806
  chr11:119549110-119549494
  hypo

SEQ ID NO: 83236 - DNA, 31 bp, Homo sapiens
  chr11:119549861-119549892
  hypo
atttttggttgcttttcgagcagagccccag

SEQ ID NO: 83237 - DNA, 30 bp, Homo sapiens
  chr11:119560674-119560704
  hypo
ctggacccaatgagcgatactgcattcaaa

SEQ ID NO: 83238 - DNA, 179 bp, Homo sapiens
  chr11:119574676-119574855
  hypo
tttcacactcggagtacgtgttagtgtgcctttttgccacctcttctccaagacaatggttcctcctggcaaatctccccagctttacccaggaacacggttctccgggcaagaagctgcctcaaaaggctcacccaaggtcacacagctgggtgcacccctcacgccccaccatcatt

SEQ ID NO: 83239 - DNA, 74 bp, Homo sapiens
  chr11:119576249-119576323
  hypo
gcaggtgcaaaggccccgtggcgggagagcgtctggtaactgtggccggtgtagctagacggaggagactgatg

SEQ ID NO: 83240 - DNA, 501 bp, Homo sapiens
  chr11:119579304-119579805
  hypo
agtggttgtcaggggccgggggagggaaaatggggagtgactgctaatgaataccgaggttctttccgaggtgatgaaaatgctgtggattaggcagtggtgacggcctattgtgaatatactaaagccactgactcgtatacttcaggagggcgaattttgtggtttgcgaattatatctcaacaaagacaaaagaagaaaagaggcacatgaagaaggatggatgatggcagggctaggctggagacaagcaggctaccagaagacctctgcaagcctgcagcacccccaagcgtgggggccctggggtcccacggctcagcgcagctgctaagagcaccggtcttctgaagtccaagactcagcttccctcctcaggactgcccaggactgattctgcccaggactgattttgctgggggagggggcaccggagagatcctgagacactctaccccccacgcccgcccacatagccaacatatcgcacatatcctgca

SEQ ID NO: 83241 - DNA, 30 bp, Homo sapiens
  chr11:119587349-119587379
  hypo
agactgaccttcgccggttctctaactggc

SEQ ID NO: 83242 - DNA, 313 bp, Homo sapiens; identical to SEQ ID NO: 49034
  chr11:119587837-119588150
  hypo

SEQ ID NO: 83243 - DNA, 159 bp, Homo sapiens; identical to SEQ ID NO: 25811
  chr11:119588397-119588556
  hypo

SEQ ID NO: 83244 - DNA, 31 bp, Homo sapiens; identical to SEQ ID NO: 25812
  chr11:119590697-119590728
  hypo

SEQ ID NO: 83245 - DNA, 261 bp, Homo sapiens; identical to SEQ ID NO: 49035
  chr11:119598251-119598512
  hypo

SEQ ID NO: 83246 - DNA, 30 bp, Homo sapiens
  chr11:119598756-119598786
  hypo
ccaaacccgcagctccgagactgacgccct

SEQ ID NO: 83247 - DNA, 314 bp, Homo sapiens; identical to SEQ ID NO: 8414
  chr11:119599011-119599325
  hypo

SEQ ID NO: 83248 - DNA, 58 bp, Homo sapiens; identical to SEQ ID NO: 8415
  chr11:119600031-119600089
  hypo

SEQ ID NO: 83249 - DNA, 41 bp, Homo sapiens
  chr11:119602211-119602252
  hypo
ggattacaggcatgagccactgtacccggctgcactctctc

SEQ ID NO: 83250 - DNA, 103 bp, Homo sapiens; identical to SEQ ID NO: 25816
  chr11:119606538-119606641
  hypo

SEQ ID NO: 83251 - DNA, 30 bp, Homo sapiens; identical to SEQ ID NO: 25817
  chr11:119607029-119607059
  hypo

SEQ ID NO: 83252 - DNA, 31 bp, Homo sapiens; identical to SEQ ID NO: 25818
  chr11:119617498-119617529
  hypo

SEQ ID NO: 83253 - DNA, 30 bp, Homo sapiens
  chr11:119681394-119681424
  hypo
gtccccggagaacaacggcgctgtcctatt

SEQ ID NO: 83254 - DNA, 31 bp, Homo sapiens
  chr11:119683416-119683447
  hypo
tgcatgtgtgtgtatgcgtgtgtgtatgtgt

SEQ ID NO: 83255 - DNA, 131 bp, Homo sapiens
  chr11:119757772-119757903
  hypo
agaactccagctgggccgagtgaccttgtaggttttgaggaacacgggcagctgggaaacagaggaatggactggccaaatttgtaccatcttcccagctggagggaggtgggagccgggcctcttctgag

SEQ ID NO: 83256 - DNA, 192 bp, Homo sapiens; identical to SEQ ID NO: 25819
  chr11:119970360-119970552
  hypo

SEQ ID NO: 83257 - DNA, 136 bp, Homo sapiens; identical to SEQ ID NO: 25820
  chr11:119994995-119995131
  hypo

SEQ ID NO: 83258 - DNA, 30 bp, Homo sapiens
  chr11:120007198-120007228
  hypo
tccaaacttccccaacggtgtccgcctgca

SEQ ID NO: 83259 - DNA, 576 bp, Homo sapiens; identical to SEQ ID NO: 25821
  chr11:120008003-120008579
  hypo

SEQ ID NO: 83260 - DNA, 78 bp, Homo sapiens
  chr11:120041662-120041740
  hypo
gactcactgactccaccgaggcagcactggctgcagctgggattggcccagacatttaagagccgaggactaagcaat

SEQ ID NO: 83261 - DNA, 154 bp, Homo sapiens
  chr11:120043748-120043902
  hypo
ccactcagtaagtcagcggtggccataggatcctgatcccaatctagcgattctcccaagaaatcacacttgactttggggtggcctcctctgtgtgaacctagtccagggcgttgaaagggcacagaacagagatcctcgggaggaggaggaa

SEQ ID NO: 83262 - DNA, 30 bp, Homo sapiens
  chr11:120099853-120099883
  hypo
tgggagcaacctggcgggtggctgctctgg

SEQ ID NO: 83263 - DNA, 354 bp, Homo sapiens; identical to SEQ ID NO: 49043
  chr11:120110686-120111040
  hypo

SEQ ID NO: 83264 - DNA, 31 bp, Homo sapiens
  chr11:120178423-120178454
  hypo
cacctgctctgggacacgatcagaaaacaca

SEQ ID NO: 83265 - DNA, 164 bp, Homo sapiens; identical to SEQ ID NO: 8418
  chr11:120196356-120196520
  hypo

SEQ ID NO: 83266 - DNA, 102 bp, Homo sapiens; identical to SEQ ID NO: 49045
  chr11:120206446-120206548
  hypo

SEQ ID NO: 83267 - DNA, 30 bp, Homo sapiens; identical to SEQ ID NO: 8420
  chr11:120207924-120207954
  hypo

SEQ ID NO: 83268 - DNA, 41 bp, Homo sapiens
  chr11:120221758-120221799
  hypo
ttaaaaatgggtgaaattggccgggtgcggtgactcacgcc

SEQ ID NO: 83269 - DNA, 31 bp, Homo sapiens; identical to SEQ ID NO: 25825
  chr11:120298674-120298705
  hypo

SEQ ID NO: 83270 - DNA, 181 bp, Homo sapiens
  chr11:120338502-120338683
  hypo
attagtagctttagtacggggtatatcaaactatgaatcatagaccaagtcatgctcactgtctgtttttgtaaataaagttttattggagcacagccgtgctcgtctgtttatgtactgtccctgattgcttttacattataacagcagagtcgagtagttttatcggtgcccatttggc

SEQ ID NO: 83271 - DNA, 226 bp, Homo sapiens; identical to SEQ ID NO: 25826
  chr11:120367535-120367761
  hypo

SEQ ID NO: 83272 - DNA, 73 bp, Homo sapiens
  chr11:120446083-120446156
  hypo
gctcttcatggaacttgtctgcgtcgttttacttctcttccctctggcgcacgggtcctctcaccatctatct

SEQ ID NO: 83273 - DNA, 113 bp, Homo sapiens
  chr11:120772900-120773013
  hypo
agcaaacatggaattggctgccgctcccattccctgaacaccttttctgtatcagaccccgtgttcagcggtttgccacattctcacctcgcgttcacagcacccctgctcca

SEQ ID NO: 83274 - DNA, 30 bp, Homo sapiens; identical to SEQ ID NO: 25827
  chr11:120911589-120911619
  hypo

SEQ ID NO: 83275 - DNA, 36 bp, Homo sapiens; identical to SEQ ID NO: 25828
  chr11:120950503-120950539
  hypo

SEQ ID NO: 83276 - DNA, 30 bp, Homo sapiens; identical to SEQ ID NO: 25829
  chr11:120973182-120973212
  hypo

SEQ ID NO: 83277 - DNA, 537 bp, Homo sapiens
  chr11:120998440-120998977
  hypo
tcttcctttccccgcgtcagtgtccacagtgcagtgcccgagcttcagccactactccgtgtgcacaagcagctgccccgacacatgctccgacctgacggcctcgcggaactgcgccacgccgtgcacagagggctgcgagtgcaaccagggcttcgtcctcagcaccagccagtgcgtccctctgcacaagtgcggctgcgacttcgacggccactactacaccatgggggagttcttctgggccacggccaactgcactgtgcaatgcctgtgcgaggagggcggggacgtctactgcttcaacaagacctgcggcagcggggaggtgtgcgccgtggaggacggctaccagggctgcttccccaagcgggagaccgtgtgcctgctcagccagaaccaggtgctgcacacctttgacggcgcctcctacgccttcccctccgagttctcctacaccctcctgaagacctgccctgagcgcccagagtacttggaaatcgacatcaacaagaagaagcccgatgcaggacctgc

SEQ ID NO: 83278 - DNA, 222 bp, Homo sapiens
  chr11:121000712-121000934
  hypo
tgcggcatcatcaacgacccctccaacagctccttcctggagtgccatggggtggtgaacgtcactgcctattaccgcacctgccttttccgcctgtgccagagtgggggcaatgagtcagagctctgtgactctgtggcccggtatgcaagcgcctgcaagaatgcggacgtggaggtggggccctggcggacctatgacttctgccgtaagttggggttg

SEQ ID NO: 83279 - DNA, 306 bp, Homo sapiens; identical to SEQ ID NO: 25832
  chr11:121023521-121023827
  hypo

SEQ ID NO: 83280 - DNA, 30 bp, Homo sapiens
  chr11:121233742-121233772
  hypo
cggaccccagggaacgcatcctccagccct

SEQ ID NO: 83281 - DNA, 354 bp, Homo sapiens
  chr11:121349213-121349567
  hypo
caactcttgtaataccttgcccgacttgcagatggcaaaaatgtttcccaggtacactgagaataaccttgcaatcaaattcatgttttctaggatactatcagtgtgtctgcttgcgtgcttatgcgtgcttgtatgcgtgtgtgtgcatgtacgtgcttgtgtgcgtgtgagtacctgtgtgcgtgtgggtacctgtgtgtgtgtgcttgtgtgcatgtgggtaactgtgtgtgtgcttgtgtgcgtgtgagtacttgtgtggatgtgcatgcttgtgtgcgcgtgagtacctttgtgtgtgtgcttgtgtgcgtgtagttacttgtgtgcgtatgggtacctgcgtgtgtg

SEQ ID NO: 83282 - DNA, 104 bp, Homo sapiens
  chr11:121516993-121517097
  hypo
ttgagaccaggagatggactgataccctgcctcaaaaataataaaataaaataaatcacactggaggattcatcagggaatcaactttccgattacagagagcc

SEQ ID NO: 83283 - DNA, 241 bp, Homo sapiens; identical to SEQ ID NO: 25833
  chr11:121665533-121665774
  hypo

SEQ ID NO: 83284 - DNA, 30 bp, Homo sapiens
  chr11:122156442-122156472
  hypo
ctgtttgtgtgcttcgctggggaaaagggt

SEQ ID NO: 83285 - DNA, 148 bp, Homo sapiens
  chr11:122621689-122621837
  hypo
gattattgagatagagttgagcgaacatcagcatttcagtgcctgacaagacggatgtgtacctgcaggtaggcggaaagaaccgtaccacgcgcctgggttttgggccatgttgtttacgcttcccggcctctcatgttttgggaaa

SEQ ID NO: 83286 - DNA, 261 bp, Homo sapiens
  chr11:122628719-122628980
  hypo
accttctttaaacactcaaccactccttttgagtcgaagcttcctgggggcccttcgtctggcaagggcttaggtgtctttaccaagtgccaaattgccagattccctgagcgctgggaactgaggcccagaaggaaggcgaagatgtggccgggggtggggccggtctggggggtatcgtagttgggccagcagacacacggctggctagagagttttggacccctctcacttcctggcgtgtttggtcaagtcccattt

SEQ ID NO: 83287 - DNA, 105 bp, Homo sapiens; identical to SEQ ID NO: 25835
  chr11:122632801-122632906
  hypo

SEQ ID NO: 83288 - DNA, 30 bp, Homo sapiens; identical to SEQ ID NO: 25836
  chr11:122643974-122644004
  hypo

SEQ ID NO: 83289 - DNA, 31 bp, Homo sapiens; identical to SEQ ID NO: 25837
  chr11:122933146-122933177
  hypo

SEQ ID NO: 83290 - DNA, 121 bp, Homo sapiens
  chr11:122945969-122946090
  hypo
ttatatctatcttcctgagtagtactgcattactctctcttattgtatgaccaaccctcttgatatatttgcagttgtagttactgaatcacagacttcgccagcaagtggccagggtttt

SEQ ID NO: 83291 - DNA, 20 bp, Homo sapiens
  chr11:122946389-122946409
  hypo
caaccaagtggttatgtttt

SEQ ID NO: 83292 - DNA, 40 bp, Homo sapiens
  chr11:123027336-123027376
  hypo
agctggaagaaggaagcgtcatttgcgagtctttacctgt

SEQ ID NO: 83293 - DNA, 31 bp, Homo sapiens; identical to SEQ ID NO: 8436
  chr11:123084067-123084098
  hypo

SEQ ID NO: 83294 - DNA, 460 bp, Homo sapiens; identical to SEQ ID NO: 49070
  chr11:123228946-123229406
  hypo

SEQ ID NO: 83295 - DNA, 31 bp, Homo sapiens; identical to SEQ ID NO: 49071
  chr11:123229461-123229492
  hypo

SEQ ID NO: 83296 - DNA, 205 bp, Homo sapiens; identical to SEQ ID NO: 8440
  chr11:123300823-123301028
  hypo

SEQ ID NO: 83297 - DNA, 1044 bp, Homo sapiens; identical to SEQ ID NO: 49073
  chr11:123301082-123302126
  hypo

SEQ ID NO: 83298 - DNA, 31 bp, Homo sapiens; identical to SEQ ID NO: 8442
  chr11:123326582-123326613
  hypo

SEQ ID NO: 83299 - DNA, 30 bp, Homo sapiens
  chr11:123596900-123596930
  hypo
aagtgcttggcgaacgctgcgctgtgggtg

SEQ ID NO: 83300 - DNA, 181 bp, Homo sapiens; identical to SEQ ID NO: 25843
  chr11:124071494-124071675
  hypo

SEQ ID NO: 83301 - DNA, 30 bp, Homo sapiens
  chr11:124387060-124387090
  hypo
ggggacctggagtcccggctggtggattaa

SEQ ID NO: 83302 - DNA, 100 bp, Homo sapiens
  chr11:124387387-124387487
  hypo
ccctccaaccctcgccgtggccctccccgctgtgtacttcattccctctacagcccttgatcaagtcggtaaaaccggcggcccttctctggagaggtgg

SEQ ID NO: 83303 - DNA, 30 bp, Homo sapiens
  chr11:124481295-124481325
  hypo
atttagagaaccatcgcctgctcccagcag

SEQ ID NO: 83304 - DNA, 30 bp, Homo sapiens
  chr11:124526756-124526786
  hypo
agaggcacaggaggccgggtacgttccatt

SEQ ID NO: 83305 - DNA, 185 bp, Homo sapiens; identical to SEQ ID NO: 25845
  chr11:124638959-124639144
  hypo

SEQ ID NO: 83306 - DNA, 833 bp, Homo sapiens; identical to SEQ ID NO: 49085
  chr11:124709233-124710066
  hypo

SEQ ID NO: 83307 - DNA, 96 bp, Homo sapiens; identical to SEQ ID NO: 49088
  chr11:124735737-124735833
  hypo

SEQ ID NO: 83308 - DNA, 473 bp, Homo sapiens; identical to SEQ ID NO: 49089
  chr11:124736032-124736505
  hypo

SEQ ID NO: 83309 - DNA, 30 bp, Homo sapiens; identical to SEQ ID NO: 25848
  chr11:124743268-124743298
  hypo

SEQ ID NO: 83310 - DNA, 30 bp, Homo sapiens; identical to SEQ ID NO: 25849
  chr11:124744053-124744083
  hypo

SEQ ID NO: 83311 - DNA, 310 bp, Homo sapiens; identical to SEQ ID NO: 25850
  chr11:124794644-124794954
  hypo

SEQ ID NO: 83312 - DNA, 271 bp, Homo sapiens
  chr11:124948905-124949176
  hypo
ttggccagagccacttcctagcgtggtgggggcagaaacatggtagggagttgaggtggacacagaggagcttaaccgcagatccaactttctcttccccagtggggtttttggggagcggcttccgctccgttactacctctcagctggaatgctgctcagtggccttttcacctcgctctttggcctgggatatttctggaacatccacgagctctggtactttgtggtcatccaggtatgaatcaccgtcttgcacttgggcctgtgt

SEQ ID NO: 83313 - DNA, 30 bp, Homo sapiens
  chr11:125065384-125065414
  hypo
ggtcttggggacggtcgagggtcctggttt

SEQ ID NO: 83314 - DNA, 30 bp, Homo sapiens
  chr11:125066173-125066203
  hypo
tcactgactcttgtgcgtgctgactgtgtc

SEQ ID NO: 83315 - DNA, 30 bp, Homo sapiens; identical to SEQ ID NO: 25851
  chr11:125763707-125763737
  hypo

SEQ ID NO: 83316 - DNA, 108 bp, Homo sapiens; identical to SEQ ID NO: 49108
  chr11:125773952-125774060
  hypo

SEQ ID NO: 83317 - DNA, 326 bp, Homo sapiens; identical to SEQ ID NO: 49109
  chr11:125774122-125774448
  hypo

SEQ ID NO: 83318 - DNA, 18 bp, Homo sapiens
  chr11:125804572-125804590
  hypo
ggccgcatttctacacat

SEQ ID NO: 83319 - DNA, 31 bp, Homo sapiens
  chr11:125817157-125817188
  hypo
agggtcaccatcgtcacgggactgatcatca

SEQ ID NO: 83320 - DNA, 430 bp, Homo sapiens
  chr11:125817623-125818053
  hypo
gtctgtccagggagtgcgaggtggctccgtggagctggcctgtggctcagggcctgccccgctgctggtcctctggagcttcacccccctgggctccctggttccccggcctgtggccgtcaccgatggagccatgtccaaggtggaggccatcgcctcggctctgggagtcgtgagtctgaggaacagcagcctggtgctgggggagcttcacgagggtgcccgtggccacttcctatgccaggttctgcacgtggctggcggccagctccacgctgcctactcccacctcacgctggctgtgctgggtgagggcctggccccagctgcagctggtccgcgggctgctttggatttctctggaagtgtgctgcccattccctttgtgtgtgtgcgggacccaggttctaaagggcgccccactccaggg

SEQ ID NO: 83321 - DNA, 30 bp, Homo sapiens
  chr11:125818253-125818283
  hypo
cctccgtggtggccacgtgtgcagtgcggg

SEQ ID NO: 83322 - DNA, 179 bp, Homo sapiens
  chr11:125824156-125824335
  hypo
catcgagccagagagccgaggacggcggctggggggcttggaccccggggtcctttatgccttccgcatcctggctctgaatcaccacactgcaggacatccctctgaggtgaagataccaggtgccagctaatgccagggagggacccaccttttctccaaagcgctggcccctggtt

SEQ ID NO: 83323 - DNA, 32 bp, Homo sapiens
  chr11:125836033-125836065
  hypo
aaaaaaaaaaaaaaattcgataaaaagtactg

SEQ ID NO: 83324 - DNA, 31 bp, Homo sapiens
  chr11:125836293-125836324
  hypo
agaggattgctgaccacgaagcacatcagtt

SEQ ID NO: 83325 - DNA, 23 bp, Homo sapiens
  chr11:125840354-125840377
  hypo
accgcacccggccagtagtttat

SEQ ID NO: 83326 - DNA, 31 bp, Homo sapiens
  chr11:125843433-125843464
  hypo
aaaacaaaaacaaaaacgaattcctgcttaa

SEQ ID NO: 83327 - DNA, 179 bp, Homo sapiens; identical to SEQ ID NO: 25856
  chr11:125902448-125902627
  hypo

SEQ ID NO: 83328 - DNA, 56 bp, Homo sapiens; identical to SEQ ID NO: 8455
  chr11:125932493-125932549
  hypo

SEQ ID NO: 83329 - DNA, 436 bp, Homo sapiens; identical to SEQ ID NO: 8456
  chr11:125932556-125932992
  hypo

SEQ ID NO: 83330 - DNA, 128 bp, Homo sapiens; identical to SEQ ID NO: 49112
  chr11:125933200-125933328
  hypo

SEQ ID NO: 83331 - DNA, 41 bp, Homo sapiens
  chr11:125945775-125945816
  hypo
aaagttgttacccacccgccaggtgcggtggctcacgcctg

SEQ ID NO: 83332 - DNA, 157 bp, Homo sapiens
  chr11:125954977-125955134
  hypo
agccgaggctgcttcttgacctataggtcagcgcctgtgataaggcaaacttggggagaacagccctgtccggtgggtagacagcctgcagcagtgagcgccccctttcctgggtggcggcagaacagctccgtgcgcagctgctgtccccagcact

SEQ ID NO: 83333 - DNA, 198 bp, Homo sapiens
  chr11:125971128-125971326
  hypo
tcaccccatcatcactcgagggccacagcggggcagttgggcacagacagcttggggatgtgcggctcccccaaggcggggctgggatatcaaagttggaagcgcgggggcatgtcagcctggctttgtgagtggggctcccatcagtgcatgaaagccttgctctacaaactgcattcgctgcgctcccaacctgca

SEQ ID NO: 83334 - DNA, 125 bp, Homo sapiens
  chr11:125988688-125988813
  hypo
ggaggcagtctcgcccggactcctggagacccgcatagccctcgctgggagacactatgggccttttctacatgtcccctcacctctctgtcttctctggctgtctggcccgagctgccgtccat

SEQ ID NO: 83335 - DNA, 182 bp, Homo sapiens
  chr11:126030295-126030477
  hypo
gcccccgcccactgcgccccacgccccacctgctgtgtttgtgcaggggtggagggaacataatgagaggctgatgttcctgcagctgggctgtgtttggagtctggtggagtgaggggagggcagcagggcaggtcggggcagcaggacggagggccaggcagggccgcagagcctcaggg

SEQ ID NO: 83336 - DNA, 251 bp, Homo sapiens
  chr11:126055288-126055539
  hypo
ccgtcggagcacagcggctgctcataaagctcccgatgaaaggcacgctggacaggagaggtcaaggttcacacaagcagctccgccttctgtttcatttacaagtggcagtcacctcattaaacccggtccccctccacccctaccccaccctcacccccagcccaccgcacgcatccccacacccggtccctcccgctcagccctggccggcacagagaggctgggttggagatcgagtggtccagaga

SEQ ID NO: 83337 - DNA, 79 bp, Homo sapiens; identical to SEQ ID NO: 25864
  chr11:126083886-126083965
  hypo

SEQ ID NO: 83338 - DNA, 45 bp, Homo sapiens
  chr11:126085297-126085342
  hypo
cttttaagatttctggccaggcgcggtggcttacgcctgtaaccc

SEQ ID NO: 83339 - DNA, 30 bp, Homo sapiens; identical to SEQ ID NO: 25865
  chr11:126136098-126136128
  hypo

SEQ ID NO: 83340 - DNA, 102 bp, Homo sapiens; identical to SEQ ID NO: 8459
  chr11:126225981-126226083
  hypo

SEQ ID NO: 83341 - DNA, 31 bp, Homo sapiens
  chr11:126273048-126273079
  hypo
aggggagggcgtggctcgtgaaattcctgat

SEQ ID NO: 83342 - DNA, 30 bp, Homo sapiens; identical to SEQ ID NO: 49119
  chr11:126322262-126322292
  hypo

SEQ ID NO: 83343 - DNA, 207 bp, Homo sapiens; identical to SEQ ID NO: 25867
  chr11:126619094-126619301
  hypo

SEQ ID NO: 83344 - DNA, 30 bp, Homo sapiens
  chr11:127323964-127323994
  hypo
tggcatcatgcacgtcgctgacactggttc

SEQ ID NO: 83345 - DNA, 30 bp, Homo sapiens; identical to SEQ ID NO: 8461
  chr11:127423281-127423311
  hypo

SEQ ID NO: 83346 - DNA, 30 bp, Homo sapiens
  chr11:128327650-128327680
  hypo
gtgtgctgtttattcgggagaagagttcaa

SEQ ID NO: 83347 - DNA, 30 bp, Homo sapiens
  chr11:128356683-128356713
  hypo
ggagaggaagggagacgaagtgcacctgcg

SEQ ID NO: 83348 - DNA, 852 bp, Homo sapiens; identical to SEQ ID NO: 49125
  chr11:128391893-128392745
  hypo

SEQ ID NO: 83349 - DNA, 571 bp, Homo sapiens; identical to SEQ ID NO: 49127
  chr11:128562614-128563185
  hypo

SEQ ID NO: 83350 - DNA, 499 bp, Homo sapiens; identical to SEQ ID NO: 49128
  chr11:128563336-128563835
  hypo

SEQ ID NO: 83351 - DNA, 687 bp, Homo sapiens; identical to SEQ ID NO: 49129
  chr11:128563856-128564543
  hypo

SEQ ID NO: 83352 - DNA, 274 bp, Homo sapiens; identical to SEQ ID NO: 8466
  chr11:128564602-128564876
  hypo

SEQ ID NO: 83353 - DNA, 543 bp, Homo sapiens; identical to SEQ ID NO: 49131
  chr11:128564991-128565534
  hypo

SEQ ID NO: 83354 - DNA, 31 bp, Homo sapiens
  chr11:128634800-128634831
  hypo
tctccctaaggacacccgcctgcaggtccta

SEQ ID NO: 83355 - DNA, 30 bp, Homo sapiens
  chr11:128680318-128680348
  hypo
gttctgttctctcccgtttgcctcacggcg

SEQ ID NO: 83356 - DNA, 161 bp, Homo sapiens
  chr11:128737283-128737444
  hypo
tagtttactttataaccggatccaacaagagtaggcgtggcagttaagtgagtgagataccaaaggtgttgagctaccaaggctaactaagaaggatttgtttatggaaccctggcttggaaccagaaggccggtatgctcatgtcgatgtgtctaagtca

SEQ ID NO: 83357 - DNA, 31 bp, Homo sapiens
  chr11:128781365-128781396
  hypo
cgtccaggagacctaccggtacctgagtgac

SEQ ID NO: 83358 - DNA, 541 bp, Homo sapiens; identical to SEQ ID NO: 8470
  chr11:129148498-129149039
  hypo

SEQ ID NO: 83359 - DNA, 835 bp, Homo sapiens; identical to SEQ ID NO: 49138
  chr11:129149096-129149931
  hypo

SEQ ID NO: 83360 - DNA, 80 bp, Homo sapiens; identical to SEQ ID NO: 25878
  chr11:129207797-129207877
  hypo

SEQ ID NO: 83361 - DNA, 19 bp, Homo sapiens
  chr11:129207936-129207955
  hypo
tggcgcgatcttggctctt

SEQ ID NO: 83362 - DNA, 160 bp, Homo sapiens
  chr11:129315218-129315378
  hypo
attggttatcagcaatcttttcgtgagtcagatgattaaggaatcgacaggcagcctcctctgccagcaccgcccagtgcccgtgggccaatgcgtgtgccttcgtctctgacgtcacttgtttttcaccagcaacagcgttgctggcatggttgtgggc

SEQ ID NO: 83363 - DNA, 31 bp, Homo sapiens
  chr11:129324012-129324043
  hypo
ctctccctcctcccaccgtcctccctctggt

SEQ ID NO: 83364 - DNA, 21 bp, Homo sapiens
  chr11:129445105-129445126
  hypo
tataggcgtgagccaccgcac

SEQ ID NO: 83365 - DNA, 30 bp, Homo sapiens; identical to SEQ ID NO: 49145
  chr11:129461155-129461185
  hypo

SEQ ID NO: 83366 - DNA, 185 bp, Homo sapiens
  chr11:129575146-129575331
  hypo
cagtgtattgtgtttgatgctcggttcattttttaatattgcgaaggaatttataaatacaaaacaaatatcgcttgatggtgcacacctttgagaggcaaggatctgaccgatgagtacttgcctgtgcagaccacagccttaataatcttctaacccatggcgaaatccttctgggatgtcta

SEQ ID NO: 83367 - DNA, 95 bp, Homo sapiens
  chr11:129686909-129687004
  hypo
ggattacaggcgtgaaccaccgcgcccagctagaaatggccacttctttcacgttctcttcgaccgctttctgcggtgtctgcccttttcctcct

SEQ ID NO: 83368 - DNA, 217 bp, Homo sapiens; identical to SEQ ID NO: 49146
  chr11:129765559-129765776
  hypo

SEQ ID NO: 83369 - DNA, 289 bp, Homo sapiens; identical to SEQ ID NO: 25881
  chr11:129775500-129775789
  hypo

SEQ ID NO: 83370 - DNA, 126 bp, Homo sapiens
  chr11:129785493-129785619
  hypo
tccttaagagattcctcgcatggcggttttgaccttagctttagtcagaaactccccctaccttgctgctgtactgcttggagcagtggggacagcagacgggaggggtggcgatggtgcccgtca

SEQ ID NO: 83371 - DNA, 30 bp, Homo sapiens
  chr11:129788435-129788465
  hypo
gcatgccgcgccgccggaagcccatcatgc

SEQ ID NO: 83372 - DNA, 53 bp, Homo sapiens; identical to SEQ ID NO: 25883
  chr11:129802031-129802084
  hypo

SEQ ID NO: 83373 - DNA, 148 bp, Homo sapiens; identical to SEQ ID NO: 25884
  chr11:129803838-129803986
  hypo

SEQ ID NO: 83374 - DNA, 31 bp, Homo sapiens
  chr11:129849604-129849635
  hypo
catcccttcccagcctcggattctgcccctc

SEQ ID NO: 83375 - DNA, 99 bp, Homo sapiens; identical to SEQ ID NO: 25885
  chr11:129859712-129859811
  hypo

SEQ ID NO: 83376 - DNA, 42 bp, Homo sapiens
  chr11:129897978-129898020
  hypo
gtgtatccaagagatgaaaagttacagcgctcaccactattt

SEQ ID NO: 83377 - DNA, 191 bp, Homo sapiens
  chr11:129902830-129903021
  hypo
gctggagaacggctcgatgcacagggcctcaaaggcgtcgtgtgcccggaaggccagccccactgtggctggggcctgcggccgtgccgtttggctggtgaagccacactcgcccagtgtcttgccatcatccaagagttggtagtccttgtacagccgctgctcgtcgggcggccgcttgaggattccct

SEQ ID NO: 83378 - DNA, 30 bp, Homo sapiens
  chr11:129910309-129910339
  hypo
ccgggagacctcggcgttgccacgggctgc

SEQ ID NO: 83379 - DNA, 17 bp, Homo sapiens
  chr11:129932610-129932627
  hypo
ctgggtgtgatggtacg

SEQ ID NO: 83380 - DNA, 29 bp, Homo sapiens
  chr11:129975900-129975929
  hypo
gcctgtgcttttctcgtgcatgtctgcag

SEQ ID NO: 83381 - DNA, 606 bp, Homo sapiens
  chr11:129993350-129993956
  hypo
gctggcctgagctggagctttcggccaccgggcctccaggctccgtccagtctcaggcctcccccagcccatcccccagctcgccagcctgtagcattttgaagcatttgacgtcactgcctctgtcctgctgacactctgaccattttcacacagctgtctgctcccaggaggcgatgacggggccctgccgggccgtgatgcctcgttggtacttcgacctctccaagggaaagtgcgtgcgctttatatatggtggctgcggcggcaacaggaacaattttgagtctgaggattattgtatggctgtgtgtaaagcgatgagtaagtcctgcctcgcgctggtcccgtgcggcagcaccgtcctgtctggcgtccgtctccctgccgtcttcgtggctgcatctgtgtggtgtccctgcccactcgggtgtttgctgtcggtcgtcttcccctcatctttgtgctttctagatctaggctttgctctcctgccggcagtggtaagctcagttctcgtgtcctgtgctcaccgtgtgtctggtggtgcttggtggtgatggtgcgtacccaccttggtatagcgggcagcacagccaggggctt

SEQ ID NO: 83382 - DNA, 31 bp, Homo sapiens
  chr11:129994925-129994956
  hypo
tggatgagatttgcctcggagaagctttgtg

SEQ ID NO: 83383 - DNA, 31 bp, Homo sapiens
  chr11:130005549-130005580
  hypo
agtgaggagatcccaccgttccaccccttcc

SEQ ID NO: 83384 - DNA, 36 bp, Homo sapiens
  chr11:130013385-130013421
  hypo
gccggaagatcccacgattccgatcgactgccaagc

SEQ ID NO: 83385 - DNA, 121 bp, Homo sapiens; identical to SEQ ID NO: 25888
  chr11:130017430-130017551
  hypo

SEQ ID NO: 83386 - DNA, 19 bp, Homo sapiens
  chr11:130019585-130019604
  hypo
ttttgtttgtttgttttga

SEQ ID NO: 83387 - DNA, 248 bp, Homo sapiens
  chr11:130059522-130059770
  hypo
atggcaggcccaggtgtgccccgagccgcccatgtgtcctggagtcgctctgggcgcacgtgggggaaatggggcccagagctccgcctcaggctcccgctctctccccagcgagggcagcgtcatcgcctactactggtctgagttcagcatcccgcagcacctggtggaggaggccgagcgcgtcatggccgaggagcgcgtagtcatgctgcccccgcgggcgcgctccctgaagtcctttgtgg

SEQ ID NO: 83388 - DNA, 186 bp, Homo sapiens
  chr11:130060355-130060541
  hypo
cagctttggcctgcacgcccgcggtgtggagctgatgcgcttcaccacgcccggcttccctgacagcccctaccccgctcatgcccgctgccagtgggccctgcggggggacgccgactcagtgctgagcctcaccttccgcagctttgaccttgcgtcctgcgacgagcgcggcagcgacctggt

SEQ ID NO: 83389 - DNA, 30 bp, Homo sapiens; identical to SEQ ID NO: 25891
  chr11:130068160-130068190
  hypo

SEQ ID NO: 83390 - DNA, 85 bp, Homo sapiens
  chr11:130074708-130074793
  hypo
aagaaaaaagaaaggccagaaggtgatggacgctggggcagtgagagtggaccagggctcgggtgggcacgcgagtgatgtggag

SEQ ID NO: 83391 - DNA, 43 bp, Homo sapiens
  chr11:130075917-130075960
  hypo
ctaggatgcagtcaagggtcacgccttgtatttagtcattagg

SEQ ID NO: 83392 - DNA, 30 bp, Homo sapiens
  chr11:130078221-130078251
  hypo
atcctctgggaacgcgcggggccgcgaggc

SEQ ID NO: 83393 - DNA, 30 bp, Homo sapiens
  chr11:130078634-130078664
  hypo
ccgtgtttcctctgcgtgtccggtctcggg

SEQ ID NO: 83394 - DNA, 661 bp, Homo sapiens; identical to SEQ ID NO: 25892
  chr11:130079178-130079839
  hypo

SEQ ID NO: 83395 - DNA, 31 bp, Homo sapiens
  chr11:130082174-130082205
  hypo
tgaggttggagagcaccgttttagcagtggg

SEQ ID NO: 83396 - DNA, 242 bp, Homo sapiens
  chr11:130089772-130090014
  hypo
catctagagggtactcactggcgtctgtttgccaggccttgttctaggaaccaggagtaccgctgggatcctccgaataacgcctggagggcagcgaggtgcagggaggggaagggacgcgcatggcaagctcctgcctcgcatccccacgcaccgagagccctcctgcctgcacgtctaccacaggcggaaggagggaaccttccagaggcagagggtacgggctgagtggtttgtaaaca

SEQ ID NO: 83397 - DNA, 21 bp, Homo sapiens
  chr11:130109950-130109971
  hypo
ttttgagactgagtctcgctc

SEQ ID NO: 83398 - DNA, 174 bp, Homo sapiens
  chr11:130250619-130250793
  hypo
tcagtgaggtgggtgccggagcagcgcactggagcagcacactggagcaccgcaccagtgtttgtggggctcagaggagggcaccaatgggtgcagccatgcgaagagcagtgtcctgggggcccttggagagaggctccagcacccttccagagcacccgtggggtgcctggg

SEQ ID NO: 83399 - DNA, 45 bp, Homo sapiens; identical to SEQ ID NO: 25894
  chr11:130264260-130264305
  hypo

SEQ ID NO: 83400 - DNA, 31 bp, Homo sapiens
  chr11:130275555-130275586
  hypo
gttcgcctctgccagccggccccgcaggtgc

SEQ ID NO: 83401 - DNA, 1475 bp, Homo sapiens; identical to SEQ ID NO: 49155
  chr11:130318282-130319757
  hypo

SEQ ID NO: 83402 - DNA, 30 bp, Homo sapiens
  chr11:130343062-130343092
  hypo
aagtacctgctcaacgggcatttcgtggtg

SEQ ID NO: 83403 - DNA, 30 bp, Homo sapiens
  chr11:130343518-130343548
  hypo
gagacacaagcctgcggggagccctgcccc

SEQ ID NO: 83404 - DNA, 82 bp, Homo sapiens; identical to SEQ ID NO: 25896
  chr11:130356097-130356179
  hypo

SEQ ID NO: 83405 - DNA, 30 bp, Homo sapiens
  chr11:130731446-130731476
  hypo
ctgcctagaatcaccgggaaggcttcgctg

SEQ ID NO: 83406 - DNA, 375 bp, Homo sapiens; identical to SEQ ID NO: 25897
  chr11:130781406-130781781
  hypo

SEQ ID NO: 83407 - DNA, 246 bp, Homo sapiens
  chr11:130785376-130785622
  hypo
gcatgactgtccatcacgctcatccttctccgaagctcctggaccaaccctttcatggctgcctccatttcttcctcaaaggctggctcctggctcacggaacggtaccaagataacacaaaatctcgaataatcatctggatggtgcggttgatctcccgttccagctgcctttctgcctcagggcatggaggacaggtggccaacgggatgaagcgttccagatgcagtcgacctgaagccact

SEQ ID NO: 83408 - DNA, 30 bp, Homo sapiens; identical to SEQ ID NO: 25898
  chr11:131085431-131085461
  hypo

SEQ ID NO: 83409 - DNA, 201 bp, Homo sapiens; identical to SEQ ID NO: 25899
  chr11:131648917-131649118
  hypo

SEQ ID NO: 83410 - DNA, 31 bp, Homo sapiens; identical to SEQ ID NO: 25900
  chr11:131794182-131794213
  hypo

SEQ ID NO: 83411 - DNA, 30 bp, Homo sapiens
  chr11:132206346-132206376
  hypo
caccccaggtggccccgctttctccattct

SEQ ID NO: 83412 - DNA, 30 bp, Homo sapiens; identical to SEQ ID NO: 49164
  chr11:132864098-132864128
  hypo

SEQ ID NO: 83413 - DNA, 423 bp, Homo sapiens; identical to SEQ ID NO: 49167
  chr11:132952577-132953000
  hypo

SEQ ID NO: 83414 - DNA, 95 bp, Homo sapiens; identical to SEQ ID NO: 8491
  chr11:132953232-132953327
  hypo

SEQ ID NO: 83415 - DNA, 30 bp, Homo sapiens
  chr11:133050636-133050666
  hypo
ggctgctttacggtacgcatcacacgcagt

SEQ ID NO: 83416 - DNA, 213 bp, Homo sapiens
  chr11:133076713-133076926
  hypo
ccctccacactctcacgatgtccacacagctacggtgacctattcatgtcttaggacgggtaggtggagggagcctgggatcaccaatgactgagaagcgaggcccggatcacgtaatccagatgttgctcctgaaatgcactcacgtgatctctcagaggaacgccatagaaaatctccttctaagagccgggcgcggtggctcacgcctgt

SEQ ID NO: 83417 - DNA, 71 bp, Homo sapiens; identical to SEQ ID NO: 25903
  chr11:133703492-133703563
  hypo

SEQ ID NO: 83418 - DNA, 923 bp, Homo sapiens
  chr11:133734500-133735423
  hypo
cgcctgatcccacgccgccactcacagacccttcgttgaccggcagcattgaacaggaaaaaaaaaaaaagatgaaaacacagaaaaccccaaaaacccagacggggagacgatgtggggaagagaacgtgctgggagcctcagtagccagtctcctcctcgtagtaagcggaatattcaggggcctctccagggccaggacggtcgcctgcacccgagggagccccatcggccactgggccttgcgggcagtacttggggtcgtatatctgccggcccaggccaaagacctggccgctctggttggcgccctgcgcgtagcccatctgcagggacatgaaagagttgttacacttgtcggttcccagcttggtgtcatagatgtaccgccgggtcccgggagccgtcgtgcccacctggctggcacacttgtttgcacccatctggaggctgatggtcgagcggtccatggggggcaatacgtggttcttggggtcatagagatgcctcctcgtgctgtacgcggtcatgcgggactggctggtgcatttgtgggtgcccatctgcagcccgatgacgcactggcgggcattcatggtggcgtcctcaaagtcccactcctgcttctccgagtgcgtgtcaccgatgtccgcccctctctgcggccccttagtcttggccttccctgccagggcgagaagagacacctgcacctgcatcgtgttcccactctcagacaggtcgttggcctcaaacaggtccacggggttcatgccgtaggttttctagctggtgccagttctgcacggagcggttgatcttggggtctgagcccggctgcagcttgttcatgagtgtgcgtaagataatccaatccttcaggccctaatggaagtcgggacgatggagaggccagtgagtcc

SEQ ID NO: 83419 - DNA, 406 bp, Homo sapiens; identical to SEQ ID NO: 25905
  chr11:133777733-133778139
  hypo

SEQ ID NO: 83420 - DNA, 1045 bp, Homo sapiens; identical to SEQ ID NO: 25906
  chr11:133790243-133791288
  hypo

SEQ ID NO: 83421 - DNA, 55 bp, Homo sapiens
  chr11:133795667-133795722
  hypo
gtgccggggatgccatcgtcgagcaactcccagcgctctgcgacacggaactcca

SEQ ID NO: 83422 - DNA, 184 bp, Homo sapiens; identical to SEQ ID NO: 25907
  chr11:133799602-133799786
  hypo

SEQ ID NO: 83423 - DNA, 36 bp, Homo sapiens
  chr11:133800384-133800420
  hypo
aaggtcctgggacacgcgcttcgggcaatcggaaac

SEQ ID NO: 83424 - DNA, 101 bp, Homo sapiens; identical to SEQ ID NO: 25909
  chr11:133804994-133805095
  hypo

SEQ ID NO: 83425 - DNA, 72 bp, Homo sapiens
  chr11:133805839-133805911
  hypo
ccagctccaagagccacgggcagcctgcccgtgcaatttctgctcaggggccctgcccgtgggggctggggt

SEQ ID NO: 83426 - DNA, 30 bp, Homo sapiens
  chr11:133808077-133808107
  hypo
tattcccaggtcaccgatgttaactgagca

SEQ ID NO: 83427 - DNA, 1320 bp, Homo sapiens; identical to SEQ ID NO: 8493
  chr11:133825338-133826658
  hypo

SEQ ID NO: 83428 - DNA, 769 bp, Homo sapiens; identical to SEQ ID NO: 49171
  chr11:133826702-133827471
  hypo

SEQ ID NO: 83429 - DNA, 30 bp, Homo sapiens
  chr11:133845231-133845261
  hypo
cataaagctgcggggcgtgttttttaccct

SEQ ID NO: 83430 - DNA, 30 bp, Homo sapiens
  chr11:133855186-133855216
  hypo
agacctgggccttggcggtagaagaggtgg

SEQ ID NO: 83431 - DNA, 877 bp, Homo sapiens; identical to SEQ ID NO: 49175
  chr11:133938735-133939612
  hypo

SEQ ID NO: 83432 - DNA, 167 bp, Homo sapiens
  chr11:134011306-134011473
  hypo
gttccccactgttgccggtacatggacagggagagagggaggagaggggggagaggggctggagaggttgcctggccaggcagactgcactgaatgccaggcgagcatgggcggtatctgagggcccgctgtgaggctctcaggggaggtgccgtggctgcatctat

SEQ ID NO: 83433 - DNA, 30 bp, Homo sapiens
  chr11:134011744-134011774
  hypo
ggctcgtgcatgagtcggagcctgtggagt

SEQ ID NO: 83434 - DNA, 119 bp, Homo sapiens
  chr11:134015795-134015914
  hypo
gccccatgatgggtccgattatttacttgtcattccctgaaacaggtgttcactgctgttcacaaggacgactctgggcagtactactgcattgcttccaatgacgcaggctcagccag

SEQ ID NO: 83435 - DNA, 30 bp, Homo sapiens
  chr11:134019425-134019455
  hypo
tgttcaccactggtcgttcagcagccacga

SEQ ID NO: 83436 - DNA, 30 bp, Homo sapiens; identical to SEQ ID NO: 25915
  chr11:134022769-134022799
  hypo

SEQ ID NO: 83437 - DNA, 139 bp, Homo sapiens
  chr11:134023319-134023458
  hypo
agttgtccgtgggacgtaggcagggtgtccacatcagtgtcccagcggcggccctcagacctccactggaccctgtcccagggcctggcagtgttgagggcccctcctggggatgctcctttccgtctctctgaccccc

SEQ ID NO: 83438 - DNA, 30 bp, Homo sapiens
  chr11:134026846-134026876
  hypo
tagcaaacacatcacgaatgcaggagagac

SEQ ID NO: 83439 - DNA, 24 bp, Homo sapiens
  chr11:134071201-134071225
  hypo
gagccaccacgcctggcccagaat

SEQ ID NO: 83440 - DNA, 36 bp, Homo sapiens; identical to SEQ ID NO: 25918
  chr11:134071992-134072028
  hypo

SEQ ID NO: 83441 - DNA, 95 bp, Homo sapiens
  chr11:134075570-134075665
  hypo
ctcaagaagaaatttctacaatgcccagacttgatccatttttagtgatgtttatctgtaacattacatgaagactattgcgactggcatatgag

SEQ ID NO: 83442 - DNA, 98 bp, Homo sapiens; identical to SEQ ID NO: 25919
  chr11:134083474-134083572
  hypo

SEQ ID NO: 83443 - DNA, 31 bp, Homo sapiens; identical to SEQ ID NO: 25920
  chr11:134085636-134085667
  hypo

SEQ ID NO: 83444 - DNA, 179 bp, Homo sapiens; identical to SEQ ID NO: 25921
  chr11:134088870-134089049
  hypo

SEQ ID NO: 83445 - DNA, 25 bp, Homo sapiens
  chr11:134089976-134090001
  hypo
catgcctggtcgcagattttcttaa

SEQ ID NO: 83446 - DNA, 958 bp, Homo sapiens; identical to SEQ ID NO: 8498
  chr11:134145468-134146426
  hypo

SEQ ID NO: 83447 - DNA, 155 bp, Homo sapiens; identical to SEQ ID NO: 8499
  chr11:134146444-134146599
  hypo

SEQ ID NO: 83448 - DNA, 304 bp, Homo sapiens; identical to SEQ ID NO: 49181
  chr11:134146621-134146925
  hypo

SEQ ID NO: 83449 - DNA, 38 bp, Homo sapiens
  chr11:134152956-134152994
  hypo
aagaattttttttttttaagacggagtcttgctctcgt

SEQ ID NO: 83450 - DNA, 37 bp, Homo sapiens
  chr11:134153233-134153270
  hypo
aggcatgaatcaccgcgcctgaccaaaaaatgttttc

SEQ ID NO: 83451 - DNA, 387 bp, Homo sapiens
  chr11:134212672-134213059
  hypo
ctgcggctccgccatcgacagctggggctgcaggccaagggctggaacttcatgctggaggattccaccttctggatcttcgggggctccatccactatttccgtgtgcccagggagtactggagggaccgcctgctgaagatgaaggcctgtggcttgaacaccctcaccacgtaggtgctgcccctgtccccccggagcctggttcctaagcagggcgcctggtgtctgcatgcgaaaaaatataagaggaaccggcccaggtcctctgcccagggcgagagagccagggtctccctcctcctccccaccacagagctcctgactcatgggcgccaagggacatgaaatggatgtgaggtctagaggaaccgcagtagcaatgtc

SEQ ID NO: 83452 - DNA, 30 bp, Homo sapiens
  chr11:134216061-134216091
  hypo
acccgcccttccctcgggggcatagcttct

SEQ ID NO: 83453 - DNA, 33 bp, Homo sapiens
  chr11:134222549-134222582
  hypo
tttttttttgagatggagtctcgctcttgtcgc

SEQ ID NO: 83454 - DNA, 33 bp, Homo sapiens
  chr11:134222821-134222854
  hypo
gtgagccactgcgcctggcctcaatatattttc

SEQ ID NO: 83455 - DNA, 169 bp, Homo sapiens
  chr11:134227490-134227659
  hypo
ctgcagagaaggagagccccacgagaggagagtgcagctccctcagggacgtcctgctccactcatgcttccctggtgtcggggcggaggcgcccatgtgtgactcaggtgggcaaagagaagcagcagcgtccagcctctgtggtccggaagctcttgggagaattca

SEQ ID NO: 83456 - DNA, 238 bp, Homo sapiens; identical to SEQ ID NO: 25927
  chr11:134228153-134228391
  hypo

SEQ ID NO: 83457 - DNA, 234 bp, Homo sapiens
  chr11:134232149-134232383
  hypo
actacctttcttatttctctccgagggtagtttgctttttacaaaagcgctgcccgcgttcccttccccggcgctgcccgcgttccttccccggcgctgcccgcgtgtttttctgctggctgttccactccatctcctgcgcgaggggatgctctggatcagccgctacccagcagcttaggaaagaggctctcggctgccactcggagcgccgggtgtgggagaggctgttga

SEQ ID NO: 83458 - DNA, 421 bp, Homo sapiens; identical to SEQ ID NO: 25928
  chr11:134252614-134253035
  hypo

SEQ ID NO: 83459 - DNA, 30 bp, Homo sapiens
  chr11:134253594-134253624
  hypo
gtaggtgttgtcgtcgtcggcgaagtagac

SEQ ID NO: 83460 - DNA, 31 bp, Homo sapiens
  chr11:134260004-134260035
  hypo
cgtgtgtgtctgtgtccgcccgtaaactcct

SEQ ID NO: 83461 - DNA, 163 bp, Homo sapiens; identical to SEQ ID NO: 49184
  chr11:134281376-134281539
  hypo

SEQ ID NO: 83462 - DNA, 47 bp, Homo sapiens; identical to SEQ ID NO: 49185
  chr11:134281595-134281642
  hypo

SEQ ID NO: 83463 - DNA, 174 bp, Homo sapiens; identical to SEQ ID NO: 49186
  chr11:134281706-134281880
  hypo

SEQ ID NO: 83464 - DNA, 30 bp, Homo sapiens; identical to SEQ ID NO: 49188
  chr11:134282903-134282933
  hypo

SEQ ID NO: 83465 - DNA, 217 bp, Homo sapiens
  chr11:134317567-134317784
  hypo
aagcagtcttcaggttctctgcgtgcgagctgacgcagcttactttgggccaggtgcactggatgcgccctcgctccctccgtggggccctggctggtgtcggagccctagcgcagccatctcacaggtagaaacgcccgcgcggggcgctcactgcctcggactcggcccttccgctgcgaggccctgctgtctcgggttcccccatcagttttgg

SEQ ID NO: 83466 - DNA, 197 bp, Homo sapiens
  chr11:134378731-134378928
  hypo
tgggaggtgcatgtgccgcacgggtgcgggaagtgtgtgaaaagtggttgtgtgggggcagggtgaaggcctaagaggcagctgccattcaccaatctccttgttggtgttcagtcttgtatggcagcttcctttagcttccctcttctcagaaatattcatggttctgagcccacgctttccgtaatgtggattca

SEQ ID NO: 83467 - DNA, 330 bp, Homo sapiens
  chr11:134401568-134401898
  hypo
cacctccagtgcagccacctgcgggggagtggccttgctaagtcccatctgacgcctacagcggcctcactcagcaagacccatctgacgcctacagcggcctcactcagcaagacccatctgacgcctacagcggcctcactcagggcccttctctggcccccattgctcccgggaccaagtacaccctcctcggctgctgtgagagtccacacccctgagcccctcctcggtgaccggcactgtctgtcccagtctcccaggtctgccggaccctcttcctgccctcctgtgctgacacccctgaccgctgcaggcccagctcaggtg

SEQ ID NO: 83468 - DNA, 215 bp, Homo sapiens; identical to SEQ ID NO: 25930
  chr11:134458378-134458593
  hypo

SEQ ID NO: 83469 - DNA, 34 bp, Homo sapiens
  chr11:134534371-134534405
  hypo
gggcaggtcgcccactcgccgtccaccgagggca

SEQ ID NO: 83470 - DNA, 403 bp, Homo sapiens; identical to SEQ ID NO: 25931
  chr11:134608534-134608937
  hypo

SEQ ID NO: 83471 - DNA, 186 bp, Homo sapiens
  chr12:287239-287425
  hypo
tgaagcaagctctaccagcagcgtgtcctggaagcctgcctgcctgcctgcccgtctgcacaggtgtcttgatccagccctgcgtcttcgagcccctgtgccaccggtccccacggcccgccaggagtctctttgtacccactaggcttccctgatgaccatctgtctgtccgtccctgtttttgc

SEQ ID NO: 83472 - DNA, 41 bp, Homo sapiens
  chr12:287643-287684
  hypo
cttttgctctcccagcggggggggctcgccttaaatcagag

SEQ ID NO: 83473 - DNA, 30 bp, Homo sapiens
  chr12:299634-299664
  hypo
ctgcaagaacagtgcggaactagggcagga

SEQ ID NO: 83474 - DNA, 30 bp, Homo sapiens; identical to SEQ ID NO: 25933
  chr12:316441-316471
  hypo

SEQ ID NO: 83475 - DNA, 30 bp, Homo sapiens; identical to SEQ ID NO: 25934
  chr12:328212-328242
  hypo

SEQ ID NO: 83476 - DNA, 30 bp, Homo sapiens
  chr12:334114-334144
  hypo
ccgttgtatttgtacggaatgtagatggta

SEQ ID NO: 83477 - DNA, 181 bp, Homo sapiens
  chr12:417477-417658
  hypo
tatggggtacaagtttcagaacgtccgttttctgaaaaatgagaatactaccaaccgtattttgctgttttacggattaaataagataacatatgaaagtgcctaacctggtaccttgcacaaggtaaacactcttaaagtattagtttcctatcacctcgtaattcattccctggggcaa

SEQ ID NO: 83478 - DNA, 30 bp, Homo sapiens
  chr12:543194-543224
  hypo
ttgtgtctacacacacgcaggacgtagaac

SEQ ID NO: 83479 - DNA, 30 bp, Homo sapiens; identical to SEQ ID NO: 25936
  chr12:551031-551061
  hypo

SEQ ID NO: 83480 - DNA, 145 bp, Homo sapiens
  chr12:563168-563313
  hypo
gttaatacggccgtgcgctccactcggccgggctgcctgcagcgctccccgctgtggattcaaccgtgttcaaggcaagggaagaacatccacgccccctttctcttttctttttctttttctttttgagacggagtctcgctct

SEQ ID NO: 83481 - DNA, 28 bp, Homo sapiens
  chr12:563552-563580
  hypo
ggcgcccggcatgaccatttctgttttc

SEQ ID NO: 83482 - DNA, 110 bp, Homo sapiens; identical to SEQ ID NO: 49193
  chr12:570023-570133
  hypo

SEQ ID NO: 83483 - DNA, 31 bp, Homo sapiens
  chr12:631679-631710
  hypo
agggaaagtggcagttcgtgtttaatgggta

SEQ ID NO: 83484 - DNA, 188 bp, Homo sapiens; identical to SEQ ID NO: 25937
  chr12:646783-646971
  hypo

SEQ ID NO: 83485 - DNA, 18 bp, Homo sapiens
  chr12:658056-658074
  hypo
agacgctgcctcaaaagc

SEQ ID NO: 83486 - DNA, 109 bp, Homo sapiens
  chr12:658732-658841
  hypo
ggctggcagagggggccgaaggcagatgaatcgtgaagccaccgctgtggcgggggccagagggagtgtggctgcgcacatcctacaccgtcgccgctggagtcaggag

SEQ ID NO: 83487 - DNA, 64 bp, Homo sapiens
  chr12:665814-665878
  hypo
cgtggtgcggctctcggagtatgtgtctgcacgaggctggcagggcatcgatccagctggtggg

SEQ ID NO: 83488 - DNA, 31 bp, Homo sapiens; identical to SEQ ID NO: 25939
  chr12:667261-667292
  hypo

SEQ ID NO: 83489 - DNA, 113 bp, Homo sapiens
  chr12:670557-670670
  hypo
ttccatcatttccattccaagcgaggcatgtggagccgtcgccagatgaagacgctgtagccggagggtgtccgcggggcccagcactccccgctctggactagcagtggctc

SEQ ID NO: 83490 - DNA, 31 bp, Homo sapiens
  chr12:674437-674468
  hypo
cctgttttatgtgccccgaaggctgtaatga

SEQ ID NO: 83491 - DNA, 30 bp, Homo sapiens
  chr12:675207-675237
  hypo
ccctgctccagcaccgccttcagccgcatg

SEQ ID NO: 83492 - DNA, 210 bp, Homo sapiens; identical to SEQ ID NO: 8506
  chr12:694939-695149
  hypo

SEQ ID NO: 83493 - DNA, 381 bp, Homo sapiens; identical to SEQ ID NO: 49195
  chr12:708873-709254
  hypo

SEQ ID NO: 83494 - DNA, 49 bp, Homo sapiens
  chr12:718309-718358
  hypo
acgctaggggctgtacgcgcacgcacggcgccacgcgctaggtgctgaa

SEQ ID NO: 83495 - DNA, 51 bp, Homo sapiens
  chr12:724181-724232
  hypo
cccatggtctctctgaagagtcgggagagcggtttgtgtgaatgtgtaagg

SEQ ID NO: 83496 - DNA, 26 bp, Homo sapiens
  chr12:747868-747894
  hypo
ccgcgcccggccgacacttagtttta

SEQ ID NO: 83497 - DNA, 39 bp, Homo sapiens
  chr12:750706-750745
  hypo
gctaaagaaacaggctagggccgggcgcggtggctcaca

SEQ ID NO: 83498 - DNA, 158 bp, Homo sapiens
  chr12:751044-751202
  hypo
gtctcttctaacactgccctggagctaggacatttcctagactggctcagaaaagacctgtctttgaggacaatgccgctttagggtagaatctagcggaacaccacctttcgacatggtcccggcatggcctccccttggggcgtggaaggcgggaa

SEQ ID NO: 83499 - DNA, 23 bp, Homo sapiens
  chr12:854667-854690
  hypo
ttgttttttgagacagagtcccg

SEQ ID NO: 83500 - DNA, 207 bp, Homo sapiens; identical to SEQ ID NO: 25944
  chr12:934132-934339
  hypo

SEQ ID NO: 83501 - DNA, 238 bp, Homo sapiens; identical to SEQ ID NO: 25945
  chr12:939092-939330
  hypo

SEQ ID NO: 83502 - DNA, 55 bp, Homo sapiens
  chr12:974464-974519
  hypo
cctatgcactctgcctctcagcgcaagcaccgacgctccagcctgccttccctct

SEQ ID NO: 83503 - DNA, 21 bp, Homo sapiens
  chr12:1007361-1007382
  hypo
agtcattggttaggcacggtg

SEQ ID NO: 83504 - DNA, 134 bp, Homo sapiens
  chr12:1026273-1026407
  hypo
ttgtcctttttccacggaaatgagcacacacagtctctgtggaggtctgtaccttcccaaccctttctgccagggccacccctgcaaatcgcgctcgtcactgagggagcctcgggcacgctgtggcatcacga

SEQ ID NO: 83505 - DNA, 30 bp, Homo sapiens
  chr12:1036287-1036317
  hypo
tagactcccagccccgcgctcacctgaggg

SEQ ID NO: 83506 - DNA, 30 bp, Homo sapiens; identical to SEQ ID NO: 25948
  chr12:1041932-1041962
  hypo

SEQ ID NO: 83507 - DNA, 30 bp, Homo sapiens
  chr12:1073029-1073059
  hypo
gagtgacgagggcagcggtactctttcaaa

SEQ ID NO: 83508 - DNA, 20 bp, Homo sapiens
  chr12:1079178-1079198
  hypo
gtgatataatttagggctgg

SEQ ID NO: 83509 - DNA, 30 bp, Homo sapiens; identical to SEQ ID NO: 25949
  chr12:1104437-1104467
  hypo

SEQ ID NO: 83510 - DNA, 100 bp, Homo sapiens; identical to SEQ ID NO: 25950
  chr12:1411785-1411885
  hypo

SEQ ID NO: 83511 - DNA, 29 bp, Homo sapiens
  chr12:1463860-1463889
  hypo
ggctggagtgccgaagcgcagtgtcggct

SEQ ID NO: 83512 - DNA, 30 bp, Homo sapiens
  chr12:1602297-1602327
  hypo
atacctctaacccccggtactcattgaatc

SEQ ID NO: 83513 - DNA, 253 bp, Homo sapiens
  chr12:1605197-1605450
  hypo
caactccaatggcaggcagcccgagggccaggggtcccaggatttacggtgggtgtgggagtcatcacagccctgacgggcatgagcctcctttcccttcccgcctgatctccgggtttgcagcttttaaagtcaattcccggttccctttttccttctttctaccctcagccccgggccaggttatccgtatcaggtctcactgttccagagcttagagtaggtgcccagcgctgagggatggtgctgctgt

SEQ ID NO: 83514 - DNA, 84 bp, Homo sapiens; identical to SEQ ID NO: 25952
  chr12:1607424-1607508
  hypo

SEQ ID NO: 83515 - DNA, 31 bp, Homo sapiens; identical to SEQ ID NO: 25953
  chr12:1608813-1608844
  hypo

SEQ ID NO: 83516 - DNA, 31 bp, Homo sapiens; identical to SEQ ID NO: 25954
  chr12:1609724-1609755
  hypo

SEQ ID NO: 83517 - DNA, 30 bp, Homo sapiens
  chr12:1612657-1612687
  hypo
gctccacgactccccgcaagtgccctgcca

SEQ ID NO: 83518 - DNA, 373 bp, Homo sapiens; identical to SEQ ID NO: 8509
  chr12:1640390-1640763
  hypo

SEQ ID NO: 83519 - DNA, 30 bp, Homo sapiens
  chr12:1649998-1650028
  hypo
gtgctttatacccaacggtaagaacaacga

SEQ ID NO: 83520 - DNA, 94 bp, Homo sapiens
  chr12:1656405-1656499
  hypo
tcacagagaccctgaacactgcggtggagaggagactcgggtgtccgacactggatctgagcctctgccgtccgccctctgtcctctggtgcac

SEQ ID NO: 83521 - DNA, 219 bp, Homo sapiens
  chr12:1711557-1711776
  hypo
gaaacataacaaaagcgtaggcgcataagagaatgatctttcaggtagagccagccatgtgtttgcatcttatcttctcctctgtaagtcaggaagggtagcatgttccattcatgcgcaaagaaatagtccagaactcctcttctgccagacatccatccgtcctgtggccttggacctatggtttcactaccaactcttactctttcttttttctga

SEQ ID NO: 83522 - DNA, 141 bp, Homo sapiens; identical to SEQ ID NO: 25956
  chr12:1716711-1716852
  hypo

SEQ ID NO: 83523 - DNA, 55 bp, Homo sapiens; identical to SEQ ID NO: 25957
  chr12:1738020-1738075
  hypo

SEQ ID NO: 83524 - DNA, 30 bp, Homo sapiens
  chr12:1755053-1755083
  hypo
gcaaggtcggggaccggctgaaggagaagt

SEQ ID NO: 83525 - DNA, 218 bp, Homo sapiens
  chr12:1766123-1766341
  hypo
ggagagatgcacaagaggctacgtgcatccaaacagcctcgcaatcagaccgcacgagatcatgcagctcacaaatctggacagacctgaaagatcgtatctcgaacgaagccactgaatgtcgctggctcccatgcaggcccgagcagggaacagccggcaaccacacagttgcacacaggctgctggctgtgccctaggaccggcccggaatccag

SEQ ID NO: 83526 - DNA, 17 bp, Homo sapiens
  chr12:1840272-1840289
  hypo
ctggagtgcagtgatgc

SEQ ID NO: 83527 - DNA, 121 bp, Homo sapiens; identical to SEQ ID NO: 25959
  chr12:1840408-1840529
  hypo

SEQ ID NO: 83528 - DNA, 181 bp, Homo sapiens; identical to SEQ ID NO: 25960
  chr12:1840588-1840769
  hypo

SEQ ID NO: 83529 - DNA, 30 bp, Homo sapiens; identical to SEQ ID NO: 25961
  chr12:1908288-1908318
  hypo

SEQ ID NO: 83530 - DNA, 496 bp, Homo sapiens; identical to SEQ ID NO: 25962
  chr12:1943595-1944091
  hypo

SEQ ID NO: 83531 - DNA, 30 bp, Homo sapiens; identical to SEQ ID NO: 25963
  chr12:1946942-1946972
  hypo

SEQ ID NO: 83532 - DNA, 71 bp, Homo sapiens
  chr12:1973181-1973252
  hypo
ccagccgtgagtggccgggcccatcccgtccaaagacaaatgtctggagtgcttccgctcatctttaaaag

SEQ ID NO: 83533 - DNA, 30 bp, Homo sapiens; identical to SEQ ID NO: 25964
  chr12:1974799-1974829
  hypo

SEQ ID NO: 83534 - DNA, 170 bp, Homo sapiens
  chr12:1980145-1980315
  hypo
ttcaagggcactggaggaacacgaggcaaagctgctctgaatgccagccgctggtgtgtgtgtgtatacgtgtgtgttgctggtggtgtgtacgcacgtgttgctggtgtgtgtgtacgtgtgtgctgctgttgtgtgcatatgtacacgtgtgttgctggtgtgtgtgt

SEQ ID NO: 83535 - DNA, 31 bp, Homo sapiens; identical to SEQ ID NO: 25965
  chr12:1980942-1980973
  hypo

SEQ ID NO: 83536 - DNA, 197 bp, Homo sapiens; identical to SEQ ID NO: 25966
  chr12:1992046-1992243
  hypo

SEQ ID NO: 83537 - DNA, 452 bp, Homo sapiens
  chr12:2017678-2018130
  hypo
acgcggtgttggagggcgtgctaggattgcctccggtggagccccggccccgtttcctccacacgaccgggttcacacctgaacaccccccaggactgcgtcacggacatccccacgccaactcccacgccggactgcctcacggacatccccacgccaactcccacgccggactgcgtcacggacatccccacgccaactcccacgccggactgcgtcacggacatccccacgccaactcccacgccggactgcctcacggacatccccacgccaactcccacgccggacagcgttatggacatccccacgccaactcccacgccggactgcgtcacggacatccccacgccaactcccacgccggactgcgtcacggacatccccacgccaactcccacgccaggttcctgcaccccacacccggctcctcctcacgacactgtggcccg

SEQ ID NO: 83538 - DNA, 30 bp, Homo sapiens; identical to SEQ ID NO: 25968
  chr12:2018849-2018879
  hypo

SEQ ID NO: 83539 - DNA, 87 bp, Homo sapiens
  chr12:2023584-2023671
  hypo
tgggaggtctccctgcgcagaggccacagccctttcaccttctacggcccgagcagcttccagggccctgcacgtgccctccaagtc

SEQ ID NO: 83540 - DNA, 183 bp, Homo sapiens; identical to SEQ ID NO: 25969
  chr12:2023974-2024157
  hypo

SEQ ID NO: 83541 - DNA, 30 bp, Homo sapiens; identical to SEQ ID NO: 25970
  chr12:2024395-2024425
  hypo

SEQ ID NO: 83542 - DNA, 30 bp, Homo sapiens
  chr12:2040211-2040241
  hypo
cccccggccttcctgcgtggatacgggaat

SEQ ID NO: 83543 - DNA, 59 bp, Homo sapiens
  chr12:2040489-2040548
  hypo
ctgtgcgtccatccccgcggagctggtggcagagtggcggatgccgtggtggagcactg

SEQ ID NO: 83544 - DNA, 230 bp, Homo sapiens
  chr12:2046015-2046245
  hypo
ctgggcaggctccccagcctgcgcggccacgcacctttacaccacgccgcgctgccccagcctgcgtgctgcaaacgacgcatttgacctccaagatgactccacgttccaaagcctgcaaggcaggctgatttcttggagaagggaggaggcggcacatgtctgaatagagcaggccctgttagaaaacagaaggcttcattgctaataggagcgagcgaccaatctgt

SEQ ID NO: 83545 - DNA, 79 bp, Homo sapiens
  chr12:2088759-2088838
  hypo
gagccaccgtgcccagcccatttctcttaagtaaataactacgaacggaacttgttggatcatacgctagttatatgtt

SEQ ID NO: 83546 - DNA, 330 bp, Homo sapiens; identical to SEQ ID NO: 49206
  chr12:2144045-2144375
  hypo

SEQ ID NO: 83547 - DNA, 697 bp, Homo sapiens; identical to SEQ ID NO: 49207
  chr12:2161356-2162053
  hypo

SEQ ID NO: 83548 - DNA, 1199 bp, Homo sapiens; identical to SEQ ID NO: 8516
  chr12:2162067-2163266
  hypo

SEQ ID NO: 83549 - DNA, 231 bp, Homo sapiens; identical to SEQ ID NO: 49209
  chr12:2163279-2163510
  hypo

SEQ ID NO: 83550 - DNA, 117 bp, Homo sapiens
  chr12:2222789-2222906
  hypo
gtcctcagatgccaacctcaccgcccacagtagcaccctcttatctgcggcttttcttgatcctgcggcacctggccaattgactagcggtaccacgtctcaaggtcatgcatgtgt

SEQ ID NO: 83551 - DNA, 156 bp, Homo sapiens
  chr12:2224503-2224659
  hypo
ccatcgacgcagcccggcaggctaagctgatgggcagcgctggcaatgcgaccatctccacagtcagctccacgcagcggaagcggcagcaatatgggaaacccaagaagcagggcagcaccacggccacacgcccgccccgagccctgctctgcc

SEQ ID NO: 83552 - DNA, 30 bp, Homo sapiens
  chr12:2255903-2255933
  hypo
tcacacaaccaaactcgcgtagccttcttc

SEQ ID NO: 83553 - DNA, 30 bp, Homo sapiens; identical to SEQ ID NO: 25977
  chr12:2483079-2483109
  hypo

SEQ ID NO: 83554 - DNA, 30 bp, Homo sapiens; identical to SEQ ID NO: 25978
  chr12:2493552-2493582
  hypo

SEQ ID NO: 83555 - DNA, 31 bp, Homo sapiens
  chr12:2516314-2516345
  hypo
atggtgaatgtcctggcgctcccttagacct

SEQ ID NO: 83556 - DNA, 109 bp, Homo sapiens
  chr12:2591270-2591379
  hypo
gtagagaggaggatgtctggccgcacgccttcacaagccagcctggctctgccaccccaggcaggccgcgaggaaagcagatggaagcgagagcctttcctggaccagc

SEQ ID NO: 83557 - DNA, 91 bp, Homo sapiens; identical to SEQ ID NO: 25979
  chr12:2595421-2595512
  hypo

SEQ ID NO: 83558 - DNA, 58 bp, Homo sapiens
  chr12:2597994-2598052
  hypo
atcaggagcttgctgtcccttcgttcccaaacctgccgtctgatcacaagccaggacc

SEQ ID NO: 83559 - DNA, 251 bp, Homo sapiens; identical to SEQ ID NO: 25980
  chr12:2602367-2602618
  hypo

SEQ ID NO: 83560 - DNA, 30 bp, Homo sapiens; identical to SEQ ID NO: 25981
  chr12:2603318-2603348
  hypo

SEQ ID NO: 83561 - DNA, 158 bp, Homo sapiens; identical to SEQ ID NO: 25982
  chr12:2613882-2614040
  hypo

SEQ ID NO: 83562 - DNA, 31 bp, Homo sapiens
  chr12:2632289-2632320
  hypo
aagagcggagatggggcgggagggcgggggc

SEQ ID NO: 83563 - DNA, 37 bp, Homo sapiens
  chr12:2654535-2654572
  hypo
ctctcaattggtcatcgtcaacttcccatggcctgcc

SEQ ID NO: 83564 - DNA, 191 bp, Homo sapiens
  chr12:2664307-2664498
  hypo
ctcctttcccagcacccccagcgccaatcctgcttcccagggtcatttcccttggagacgaacactcaggattaggtttccccagaggggagcttttcagagcccacttgcacttgtgacccgcttgcactgtgagcaagacaacgcctcatggcaaagggccggtggtcgtcatcaaggggcaccccaga

SEQ ID NO: 83565 - DNA, 30 bp, Homo sapiens
  chr12:2743146-2743176
  hypo
gtgcaggggacacaccgcccggctccccgg

SEQ ID NO: 83566 - DNA, 115 bp, Homo sapiens
  chr12:2777031-2777146
  hypo
tgagcatgcccttggcatggacgctgtggtgagcttcacaccgcgcttgctcgtcatgacccattgcatgctgaaggccccacaccagagctccgtgccagggaagcctgttctg

SEQ ID NO: 83567 - DNA, 149 bp, Homo sapiens; identical to SEQ ID NO: 25983
  chr12:2778006-2778155
  hypo

SEQ ID NO: 83568 - DNA, 369 bp, Homo sapiens; identical to SEQ ID NO: 25984
  chr12:2788593-2788962
  hypo

SEQ ID NO: 83569 - DNA, 30 bp, Homo sapiens
  chr12:2797730-2797760
  hypo
ccgtccccaccctgcggcttgagggggtcg

SEQ ID NO: 83570 - DNA, 83 bp, Homo sapiens
  chr12:2846931-2847014
  hypo
gcaaaatacatgcaaagcacccggcacagtgcccagcacacagtcagtgctcatgaagtgtcggttccctctgcccactgcag

SEQ ID NO: 83571 - DNA, 554 bp, Homo sapiens
  chr12:2964258-2964812
  hypo
gggaggggggatggggtgctccgtgggggggcatctgtgggcattggagtcggtcagccagcgccagacattgctatcgtagggcctgtcaggctgggtggggaaggtggcaggcagacggcacacatcgagccacgtgtgaaagccccaggtgtgctgggcgccacccttccaagggtggatgagccgctgacgcaccttggacttcatatctgtgcagggcggcagcttcagagccagctggtggtaggcttgccgggtgaagccagggaactcccaggactcgctggggaggaagaactcacgctgagcccacgtttgggagggtgggagggactcgctggcctggaccatctagggagagacaaaagggagcctggggaaggttgtgcagacaggggtgcagaaaggtgggtgaggcactccgctctccttcccaggcacgacctctgccagcccaggattctcatgaggacgcagaagtcctggcagggccgcatctccatccctctccttcccggcggaagttatggctgctgcgtatcatcttcaca

SEQ ID NO: 83572 - DNA, 207 bp, Homo sapiens
  chr12:2972287-2972494
  hypo
gcatttggattgccgcgcctgtggtgggtgctactggcgtctagtggggaaaacaagggatactgctaaacacccttcagtgcacaggacagtccctcccacgcccaacaaagaattctccagctgtcaacgtgaatagtacttgagaaaccctgagttagtctgacccagtcactttactactgccaggtacgaactgcatttccc

SEQ ID NO: 83573 - DNA, 30 bp, Homo sapiens; identical to SEQ ID NO: 25986
  chr12:2977818-2977848
  hypo

SEQ ID NO: 83574 - DNA, 90 bp, Homo sapiens; identical to SEQ ID NO: 25987
  chr12:2995015-2995105
  hypo

SEQ ID NO: 83575 - DNA, 16 bp, Homo sapiens
  chr12:3014650-3014666
  hypo
tataaaatgtctttat

SEQ ID NO: 83576 - DNA, 30 bp, Homo sapiens; identical to SEQ ID NO: 25989
  chr12:3030587-3030617
  hypo

SEQ ID NO: 83577 - DNA, 23 bp, Homo sapiens
  chr12:3073922-3073945
  hypo
ccaccgtgcgcctggccatgggg

SEQ ID NO: 83578 - DNA, 524 bp, Homo sapiens; identical to SEQ ID NO: 25991
  chr12:3103768-3104292
  hypo

SEQ ID NO: 83579 - DNA, 31 bp, Homo sapiens
  chr12:3116195-3116226
  hypo
aaaacaaaaaagaagacggctgagcttgcct

SEQ ID NO: 83580 - DNA, 197 bp, Homo sapiens
  chr12:3118650-3118847
  hypo
aagggaagagacttaccgtgctcccaaagctcattggtggagctgccaggctctagcctggctcaccagctcccaggtctgtggccctacttcattcacccaccggtgatgacttagacccgagatgctgcatgggtggctttagttagacctggggtagaactgtcgaccgttcactggaccgccaaagcctttcc

SEQ ID NO: 83581 - DNA, 31 bp, Homo sapiens
  chr12:3119177-3119208
  hypo
gttccgcagcacagggcgggctggcacctgc

SEQ ID NO: 83582 - DNA, 225 bp, Homo sapiens; identical to SEQ ID NO: 49220
  chr12:3129380-3129605
  hypo

SEQ ID NO: 83583 - DNA, 31 bp, Homo sapiens
  chr12:3131347-3131378
  hypo
gagccgaggagcggggcggtgatcccagaga

SEQ ID NO: 83584 - DNA, 37 bp, Homo sapiens
  chr12:3147029-3147066
  hypo
ttcccagccctagagccgggaccgggaccctgaggtc

SEQ ID NO: 83585 - DNA, 31 bp, Homo sapiens
  chr12:3181109-3181140
  hypo
agggttggagttcatccgcttgtggaggaag

SEQ ID NO: 83586 - DNA, 530 bp, Homo sapiens; identical to SEQ ID NO: 49222
  chr12:3186500-3187030
  hypo

SEQ ID NO: 83587 - DNA, 47 bp, Homo sapiens
  chr12:3215226-3215273
  hypo
acatagcatgcacactcgctcttgtgcgcgcacgcacacacacacat

SEQ ID NO: 83588 - DNA, 99 bp, Homo sapiens
  chr12:3266174-3266273
  hypo
agtacaaattctcccccgctgagcctcatagaaacaggccagagagggcagagcaggttttattatttccacttaattcaggctgaatgtggtgttttt

SEQ ID NO: 83589 - DNA, 31 bp, Homo sapiens
  chr12:3292083-3292114
  hypo
gagacagggtcagggccgcatggtcggagac

SEQ ID NO: 83590 - DNA, 179 bp, Homo sapiens; identical to SEQ ID NO: 25997
  chr12:3302734-3302913
  hypo

SEQ ID NO: 83591 - DNA, 184 bp, Homo sapiens
  chr12:3316790-3316974
  hypo
tacctcctctcctgtgcgccccagcaaactttgaggctcccgggagaactggagaagcccttgggcaggggaggctgcaggatttcaaatctcccttgcagtggctagctcactgcgtcaggaccacgcagagaggccctgttttagtggctggtggggggtgggtgaccggccaaggaggaga

SEQ ID NO: 83592 - DNA, 46 bp, Homo sapiens
  chr12:3333940-3333986
  hypo
cccctgacagatttcccggttctgtcagcttcgcttcagcagtgct

SEQ ID NO: 83593 - DNA, 27 bp, Homo sapiens
  chr12:3344031-3344058
  hypo
tataggtaagtgaggccgggcgtggtg

SEQ ID NO: 83594 - DNA, 31 bp, Homo sapiens
  chr12:3361965-3361996
  hypo
tgcagggctgagtgagcgggctgctgggggc

SEQ ID NO: 83595 - DNA, 45 bp, Homo sapiens
  chr12:3369200-3369245
  hypo
atttctgctgagaacctagtacgcgtgagatgcctgtgaggcatc

SEQ ID NO: 83596 - DNA, 110 bp, Homo sapiens
  chr12:3370678-3370788
  hypo
aatagatggagaactgcgtctccaaagtaggggacacaggcggagaagcatgttcaaaagactaggacagacactttgcctccgaagatgtgactcggggcatgcatgac

SEQ ID NO: 83597 - DNA, 283 bp, Homo sapiens
  chr12:3389521-3389804
  hypo
tctcactgtgtccctccgcctggcaggtgaacgagaacgccaagaaggacctgaaggaaggcctgctgctgtaccacaccgagaacaacgtggggctgaagaacgcctggaacatcatccaggctgaggtgcgggctgggccgccctggtggggccaggcagggaggaggggtggcggccggtacttctagctgccttccccggtgacctggccgggcacctgtgctttctggattttagccgggagtggagtggtacccacgggggcatttgcctgaactgc

SEQ ID NO: 83598 - DNA, 112 bp, Homo sapiens
  chr12:3390416-3390528
  hypo
gaacacggttcccgaccgctgctgcatggagaactcccagggctgcgggcgcaacgccaccacgcctttgtggagaacggtgaggctggggatggaccgcttgggtccaaga

SEQ ID NO: 83599 - DNA, 281 bp, Homo sapiens
  chr12:3392413-3392694
  hypo
taccctgcctcagcctcggacttctcagtgggtggagtgccagggaggaggaggcacacggagacctggggctcggggcccctggattcctgcatctgcatatgcgtatttgccaaagacgacagggtgggctggggtgcgctccggaggaacccccggcactgatgggcttctgcccctgcccttcctcacactgacactttgtccccacatggggtggggagcagagtgcccgccccgtggagataccgccccagcgggggctgcgacatccatggcca

SEQ ID NO: 83600 - DNA, 136 bp, Homo sapiens; identical to SEQ ID NO: 26002
  chr12:3409752-3409888
  hypo

SEQ ID NO: 83601 - DNA, 60 bp, Homo sapiens; identical to SEQ ID NO: 26003
  chr12:3414163-3414223
  hypo

SEQ ID NO: 83602 - DNA, 31 bp, Homo sapiens; identical to SEQ ID NO: 8527
  chr12:3474950-3474981
  hypo

SEQ ID NO: 83603 - DNA, 621 bp, Homo sapiens; identical to SEQ ID NO: 49224
  chr12:3474997-3475618
  hypo

SEQ ID NO: 83604 - DNA, 662 bp, Homo sapiens; identical to SEQ ID NO: 49225
  chr12:3600120-3600782
  hypo

SEQ ID NO: 83605 - DNA, 52 bp, Homo sapiens; identical to SEQ ID NO: 49226
  chr12:3600974-3601026
  hypo

SEQ ID NO: 83606 - DNA, 279 bp, Homo sapiens; identical to SEQ ID NO: 49227
  chr12:3601062-3601341
  hypo

SEQ ID NO: 83607 - DNA, 1339 bp, Homo sapiens; identical to SEQ ID NO: 49228
  chr12:3601377-3602716
  hypo

SEQ ID NO: 83608 - DNA, 139 bp, Homo sapiens; identical to SEQ ID NO: 49229
  chr12:3602864-3603003
  hypo

SEQ ID NO: 83609 - DNA, 31 bp, Homo sapiens; identical to SEQ ID NO: 26011
  chr12:3747307-3747338
  hypo

SEQ ID NO: 83610 - DNA, 30 bp, Homo sapiens; identical to SEQ ID NO: 26012
  chr12:3833981-3834011
  hypo

SEQ ID NO: 83611 - DNA, 30 bp, Homo sapiens; identical to SEQ ID NO: 26013
  chr12:3841524-3841554
  hypo

SEQ ID NO: 83612 - DNA, 116 bp, Homo sapiens; identical to SEQ ID NO: 26014
  chr12:3901111-3901227
  hypo

SEQ ID NO: 83613 - DNA, 30 bp, Homo sapiens; identical to SEQ ID NO: 26015
  chr12:3919423-3919453
  hypo

SEQ ID NO: 83614 - DNA, 29 bp, Homo sapiens
  chr12:4079022-4079051
  hypo
tttttttttttttttttgagacggagtct

SEQ ID NO: 83615 - DNA, 30 bp, Homo sapiens
  chr12:4234148-4234178
  hypo
acttataaaaatagttttggccgggcacgg

SEQ ID NO: 83616 - DNA, 78 bp, Homo sapiens
  chr12:4304032-4304110
  hypo
cactatttcctgtgcactcatcgagtgcggctgggacaccaactatgaccgagatgcgctccctgcccttggaaagcc

SEQ ID NO: 83617 - DNA, 172 bp, Homo sapiens
  chr12:4309609-4309781
  hypo
aagggtactcctgtcatcccacgtgctcattcatgagtgagggcagatgcggggagccgcactggacagcaaccaagatggagagccgtgcggtgcagcgtggtgccctcccgtaaattccacccgcgcactccaaggttccacggcacacgtaaaccatctgcccagccct

SEQ ID NO: 83618 - DNA, 66 bp, Homo sapiens
  chr12:4362283-4362349
  hypo
tcctcaaaagtgaagcatagacgctgccatagtaacaggttcagcgagacctggagctgctggggc

SEQ ID NO: 83619 - DNA, 30 bp, Homo sapiens; identical to SEQ ID NO: 49233
  chr12:4368336-4368366
  hypo

SEQ ID NO: 83620 - DNA, 3126 bp, Homo sapiens; identical to SEQ ID NO: 49234
  chr12:4377788-4380914
  hypo

SEQ ID NO: 83621 - DNA, 973 bp, Homo sapiens; identical to SEQ ID NO: 49235
  chr12:4381420-4382393
  hypo

SEQ ID NO: 83622 - DNA, 30 bp, Homo sapiens
  chr12:4405534-4405564
  hypo
ttccacaggaactgcgacttggaaagtatt

SEQ ID NO: 83623 - DNA, 30 bp, Homo sapiens; identical to SEQ ID NO: 26019
  chr12:4433844-4433874
  hypo

SEQ ID NO: 83624 - DNA, 30 bp, Homo sapiens; identical to SEQ ID NO: 49238
  chr12:4492593-4492623
  hypo

SEQ ID NO: 83625 - DNA, 30 bp, Homo sapiens
  chr12:4518026-4518056
  hypo
tgacctccgctttgacgtgtggacaccgat

SEQ ID NO: 83626 - DNA, 380 bp, Homo sapiens; identical to SEQ ID NO: 26020
  chr12:4554340-4554720
  hypo

SEQ ID NO: 83627 - DNA, 224 bp, Homo sapiens
  chr12:4672160-4672384
  hypo
cctctgacatgtcttaagcaacggacagcatcaccaatattaattcaagcttcactgtccaggcttaagtggagactcggcaaaagcaggaggccatttagtggaaaagttcaaaccgtggaaacaacaaatgaaaatgtcctttgtcttgcttgagcgatttgatcacctacatgtggtcggtatgtaaaacctaggagttcgaagaaattcttcaaacatgc

SEQ ID NO: 83628 - DNA, 170 bp, Homo sapiens
  chr12:4734866-4735036
  hypo
gagagagagagagagagcaagcgagcgagaaggcagagaggagagagaagagaaggttgtagggatggtctttttaattcccgcacttcagtgtgaagcatctggggtaagtgtgcgtgttctccagactcaaaccctccctttggcgcgcagttctgatgcttactggg

SEQ ID NO: 83629 - DNA, 43 bp, Homo sapiens
  chr12:4810315-4810358
  hypo
tggtggtaccattgaccaaggcgtggaacactggaaaagaagc

SEQ ID NO: 83630 - DNA, 102 bp, Homo sapiens
  chr12:4872383-4872485
  hypo
tcaaagcacagaaacacttggcgttttatttacagaactctggaatagattttggagacgtttcttccagaatggcactccgggaaaaactgaaatgtaaaa

SEQ ID NO: 83631 - DNA, 30 bp, Homo sapiens; identical to SEQ ID NO: 49241
  chr12:4918321-4918351
  hypo

SEQ ID NO: 83632 - DNA, 125 bp, Homo sapiens; identical to SEQ ID NO: 8545
  chr12:4918557-4918682
  hypo

SEQ ID NO: 83633 - DNA, 175 bp, Homo sapiens; identical to SEQ ID NO: 8546
  chr12:4918713-4918888
  hypo

SEQ ID NO: 83634 - DNA, 468 bp, Homo sapiens; identical to SEQ ID NO: 8547
  chr12:4920340-4920808
  hypo

SEQ ID NO: 83635 - DNA, 18 bp, Homo sapiens
  chr12:4991476-4991494
  hypo
ttttttttcctttttttg

SEQ ID NO: 83636 - DNA, 1017 bp, Homo sapiens; identical to SEQ ID NO: 8548
  chr12:5018017-5019034
  hypo

SEQ ID NO: 83637 - DNA, 658 bp, Homo sapiens; identical to SEQ ID NO: 8549
  chr12:5019084-5019742
  hypo

SEQ ID NO: 83638 - DNA, 520 bp, Homo sapiens; identical to SEQ ID NO: 49247
  chr12:5019793-5020313
  hypo

SEQ ID NO: 83639 - DNA, 45 bp, Homo sapiens
  chr12:5087445-5087490
  hypo
gggattacaggcgtgagccactgcgcccagccaatccagtctttt

SEQ ID NO: 83640 - DNA, 41 bp, Homo sapiens
  chr12:5231584-5231625
  hypo
tggctcctccgcctcagaggtattatcgcttcagttccaga

SEQ ID NO: 83641 - DNA, 361 bp, Homo sapiens
  chr12:5252232-5252593
  hypo
gagaaatccacatcatccgtaatccaatcacctccacatcatccgtaatccgatcacctccacatcatccgtaatccgatcacctccacatcatccgtaatccgatcacctccacatcatccgtaatccgatcacctccacatcatccgtaatccgatcacctccacatcatcggtaatccgatcacctccgcatcatccgtaatccgatcacctccacatcatccgtaatccgatcacctccacatcatccgtaatccgatcacctccacatcatccgtaatccgatcacctccacatcatccgtaatccgatcacctccacatcatccgtaatccgatcacctccacatcatccgtaat

SEQ ID NO: 83642 - DNA, 121 bp, Homo sapiens
  chr12:5252652-5252773
  hypo
ttgggcagagacaaatatgcaaacaatatcaccttcctcaaacagcatgctataacatgtatgcttgcataataaatatttaaaatataagattacccactttgggaggccgaggcgggtg

SEQ ID NO: 83643 - DNA, 43 bp, Homo sapiens
  chr12:5319954-5319997
  hypo
agccaaggcatttatgccccccggggctcccttctgtcatccc

SEQ ID NO: 83644 - DNA, 123 bp, Homo sapiens
  chr12:5323918-5324041
  hypo
tggcctggaaaatataatgtacgggagatgtaatggtgacccaccgacctggccgggatgccttgcttccccttcctcccacacctacacacacgtgcacacgttgagagagactgagtcaag

SEQ ID NO: 83645 - DNA, 154 bp, Homo sapiens
  chr12:5335902-5336056
  hypo
tgaggctgctgaaattgaaaacgcctgttaatagcacaagtgacacatcatagatcactcgctgacaggctgaactgggcgccatcttgaagaacgtaggctgcatgctaatgacgcccaggaggagctgcgcgctgcattgtggaggcacctc

SEQ ID NO: 83646 - DNA, 27 bp, Homo sapiens
  chr12:5370550-5370577
  hypo
gacctttcaaaaaacatttaccggctg

SEQ ID NO: 83647 - DNA, 43 bp, Homo sapiens
  chr12:5384589-5384632
  hypo
agccaaggccaggtcctgccccggctgtggatcccaaagtcct

SEQ ID NO: 83648 - DNA, 87 bp, Homo sapiens
  chr12:5435948-5436035
  hypo
tgagtagatatacactattatcgggcagctttaattattagaaattcttactttcggccggccgcggcggcttatgcctgtaatccc

SEQ ID NO: 83649 - DNA, 86 bp, Homo sapiens
  chr12:5437111-5437197
  hypo
cctgcaggctctgtgacagagcgagactccatctcttaaagaaaaaacaggccgaggcgggtggatcacaaggtcaggagatcgag

SEQ ID NO: 83650 - DNA, 31 bp, Homo sapiens
  chr12:5513315-5513346
  hypo
acaattctgcaggggagaagccgaagcgcaa

SEQ ID NO: 83651 - DNA, 2100 bp, Homo sapiens; identical to SEQ ID NO: 49252
  chr12:5540931-5543031
  hypo

SEQ ID NO: 83652 - DNA, 39 bp, Homo sapiens
  chr12:5579367-5579406
  hypo
gcgtgagccactgcgctcggcctcctgagctcattttaa

SEQ ID NO: 83653 - DNA, 27 bp, Homo sapiens
  chr12:5601169-5601196
  hypo
gtacccggcctttctcctcttctttaa

SEQ ID NO: 83654 - DNA, 30 bp, Homo sapiens
  chr12:5602378-5602408
  hypo
caccaggacgccaccggagtccggtgttaa

SEQ ID NO: 83655 - DNA, 30 bp, Homo sapiens
  chr12:5602717-5602747
  hypo
cagagcaccctggaacgtaggccctctcgc

SEQ ID NO: 83656 - DNA, 203 bp, Homo sapiens
  chr12:5603079-5603282
  hypo
cccacaagcagagaccgcaggataaagcagacatccaatgtaaatacaacccgtgcaaaaagcagagtcggcagacctggagtgcattcgcagtatctcccgggggtgggggaaagaaatcacctcttcagaatgtccagaggggagttgccttgcttacctggggggcggtaccctctctcgtgccctcacagggctactca

SEQ ID NO: 83657 - DNA, 444 bp, Homo sapiens; identical to SEQ ID NO: 26031
  chr12:5603566-5604010
  hypo

SEQ ID NO: 83658 - DNA, 120 bp, Homo sapiens
  chr12:5672754-5672874
  hypo
aggggctgagttggagaggcccggcctggggaggtggcggccctggagcagaatgcctctgtgtcaatcctggctttgcaacttaccagcccagtgatcgcaaccagtgagcataactct

SEQ ID NO: 83659 - DNA, 109 bp, Homo sapiens
  chr12:5674727-5674836
  hypo
aagattatgacaaaagccagacgggcggacagaataaaccagtactgtttcgaaaactcataagggttcggggcccatggcggctctcggtaatccttaaacctgccca

SEQ ID NO: 83660 - DNA, 129 bp, Homo sapiens; identical to SEQ ID NO: 26032
  chr12:5726938-5727067
  hypo

SEQ ID NO: 83661 - DNA, 162 bp, Homo sapiens; identical to SEQ ID NO: 26033
  chr12:6030342-6030504
  hypo

SEQ ID NO: 83662 - DNA, 21 bp, Homo sapiens
  chr12:6141391-6141412
  hypo
gaaaaacagagtgtgtcgctt

SEQ ID NO: 83663 - DNA, 41 bp, Homo sapiens; identical to SEQ ID NO: 26034
  chr12:6159829-6159870
  hypo

SEQ ID NO: 83664 - DNA, 31 bp, Homo sapiens
  chr12:6185879-6185910
  hypo
gaggaaagaaacgacccgttttgaggagagg

SEQ ID NO: 83665 - DNA, 121 bp, Homo sapiens
  chr12:6220746-6220867
  hypo
cccaggctggtcttgagctccttggtgcgagtaattacaggcatgagccaccccgctctggcctagcagtgctatttaaaatggtatcggtcgagtgcggtggctcacgcctgtaatccca

SEQ ID NO: 83666 - DNA, 31 bp, Homo sapiens
  chr12:6247504-6247535
  hypo
tcccacccttcacccccgcttttcctgcctt

SEQ ID NO: 83667 - DNA, 24 bp, Homo sapiens
  chr12:6272593-6272617
  hypo
cactgtgcccggcctgtttaatat

SEQ ID NO: 83668 - DNA, 84 bp, Homo sapiens
  chr12:6284863-6284947
  hypo
gctgccttcatccctacgtgaaaaaagcaagatggagaaagatgtgtgcaaaatgtttccacttatccacgaaaagaggggtaa

SEQ ID NO: 83669 - DNA, 86 bp, Homo sapiens
  chr12:6294431-6294517
  hypo
cccataaaaactgcagcgtgtatctctaagagatacggttttctcagaaacataaccatggccgggcgcagtggctcatgcctgta

SEQ ID NO: 83670 - DNA, 824 bp, Homo sapiens; identical to SEQ ID NO: 49254
  chr12:6309397-6310221
  hypo

SEQ ID NO: 83671 - DNA, 45 bp, Homo sapiens
  chr12:6336635-6336680
  hypo
tgacaggcgtgagccacctcgcccggctggaagacactaacattt

SEQ ID NO: 83672 - DNA, 30 bp, Homo sapiens
  chr12:6337293-6337323
  hypo
cagatcctttgcagcgacaccccattcggg

SEQ ID NO: 83673 - DNA, 302 bp, Homo sapiens
  chr12:6344302-6344604
  hypo
cttagagagaacaagatggaacgcataacatttgttcgtggaggaagatgtgaaaatgccgtctctgcccctctctcgtctgcccattgtaggtgattaaggaagtccaggagttttacaaggacacctacaacaagctgaaaaccaaggatgagccccagcgggaaacgctgaaagccatccactatgcggtatgtcgccttggcaaagacaccctcctgcgctttctccggattgtgtctgcacacagggtgctgactgcaccagaccagtgcaaacattctaatcgtcttcttacaatt

SEQ ID NO: 83674 - DNA, 31 bp, Homo sapiens
  chr12:6350370-6350401
  hypo
ctgaagggtaggttagcgtggaacagactgc

SEQ ID NO: 83675 - DNA, 22 bp, Homo sapiens
  chr12:6372615-6372637
  hypo
aagatttaaggctgggcgcagt

SEQ ID NO: 83676 - DNA, 43 bp, Homo sapiens
  chr12:6373885-6373928
  hypo
aacccatgctctctttaccaccgcttgagacacccaaacacac

SEQ ID NO: 83677 - DNA, 89 bp, Homo sapiens
  chr12:6375950-6376039
  hypo
atctgtctggctgacaataaccgctcaccgcctaggactagacaattcacaagacagtttcttaacacgtccttattccaacctcaaca

SEQ ID NO: 83678 - DNA, 36 bp, Homo sapiens
  chr12:6381466-6381502
  hypo
atgtcattctgactcgtgttgagcatagactgtggg

SEQ ID NO: 83679 - DNA, 30 bp, Homo sapiens; identical to SEQ ID NO: 49255
  chr12:6385711-6385741
  hypo

SEQ ID NO: 83680 - DNA, 185 bp, Homo sapiens; identical to SEQ ID NO: 8559
  chr12:6387949-6388134
  hypo

SEQ ID NO: 83681 - DNA, 18 bp, Homo sapiens
  chr12:6388450-6388468
  hypo
tctcggctcccaaagcgc

SEQ ID NO: 83682 - DNA, 188 bp, Homo sapiens
  chr12:6388700-6388888
  hypo
tcctctgtcttgctctccacccgatcctgacttgtaagccccgtttgcccgcatagtcccacaatgtacgaaatgaatggatggatgaggggctctggggtgcaagggagaaggaagcaggcagaaaagccttcctcatcggggggcttcctcctccactgtcatccgcaagggactaaggtcctgaa

SEQ ID NO: 83683 - DNA, 276 bp, Homo sapiens; identical to SEQ ID NO: 26041
  chr12:6391152-6391428
  hypo

SEQ ID NO: 83684 - DNA, 106 bp, Homo sapiens; identical to SEQ ID NO: 26042
  chr12:6421422-6421528
  hypo

SEQ ID NO: 83685 - DNA, 51 bp, Homo sapiens; identical to SEQ ID NO: 26043
  chr12:6422990-6423041
  hypo

SEQ ID NO: 83686 - DNA, 31 bp, Homo sapiens
  chr12:6425105-6425136
  hypo
ggaccctggcacagcccgacctctgagcctg

SEQ ID NO: 83687 - DNA, 246 bp, Homo sapiens
  chr12:6425446-6425692
  hypo
tgtccccagcctgattcgaacccaccggagcttttgggatgaggtgctggggcccaccctggaggagactcgggcctcgggccagcctctggaccccattggtctgcaaagtggcttcctgacggtgaggcctgtgaagggctgtgtctggatggggcaggactcggagccctcgggggtcctgtgtgtagggcatgcccacagtatgcaaatctctgtgatttgaggggccgcaggacacagccc

SEQ ID NO: 83688 - DNA, 30 bp, Homo sapiens
  chr12:6437893-6437923
  hypo
cccacctcccatcccgacagaccactgtct

SEQ ID NO: 83689 - DNA, 215 bp, Homo sapiens; identical to SEQ ID NO: 26045
  chr12:6438302-6438517
  hypo

SEQ ID NO: 83690 - DNA, 159 bp, Homo sapiens; identical to SEQ ID NO: 26046
  chr12:6464387-6464546
  hypo

SEQ ID NO: 83691 - DNA, 21 bp, Homo sapiens
  chr12:6473956-6473977
  hypo
gtctcaaaaagaaattaattg

SEQ ID NO: 83692 - DNA, 31 bp, Homo sapiens
  chr12:6475367-6475398
  hypo
agaatataaaatgatacgatcattttggaaa

SEQ ID NO: 83693 - DNA, 39 bp, Homo sapiens
  chr12:6481165-6481204
  hypo
gatggccaggctggtctcgaactcctggcctcaagtgag

SEQ ID NO: 83694 - DNA, 419 bp, Homo sapiens; identical to SEQ ID NO: 26047
  chr12:6483475-6483894
  hypo

SEQ ID NO: 83695 - DNA, 30 bp, Homo sapiens
  chr12:6484796-6484826
  hypo
gagccgggagttttccgaaggaaggagggc

SEQ ID NO: 83696 - DNA, 31 bp, Homo sapiens
  chr12:6490845-6490876
  hypo
aggaacattctggggccgggtgccgtggctc

SEQ ID NO: 83697 - DNA, 44 bp, Homo sapiens; identical to SEQ ID NO: 8565
  chr12:6493249-6493293
  hypo

SEQ ID NO: 83698 - DNA, 31 bp, Homo sapiens; identical to SEQ ID NO: 8566
  chr12:6493330-6493361
  hypo

SEQ ID NO: 83699 - DNA, 31 bp, Homo sapiens; identical to SEQ ID NO: 49267
  chr12:6493590-6493621
  hypo

SEQ ID NO: 83700 - DNA, 30 bp, Homo sapiens; identical to SEQ ID NO: 26050
  chr12:6500388-6500418
  hypo

SEQ ID NO: 83701 - DNA, 98 bp, Homo sapiens
  chr12:6514986-6515084
  hypo
ttatgagagtatttttaaaaacattcaaattgtcggtcacagctccttgcctatgcgcctaaaaagagatagcccaagacagacgggggaaagaaaag

SEQ ID NO: 83702 - DNA, 30 bp, Homo sapiens
  chr12:6516224-6516254
  hypo
tgctggcattataggcgtgagccaccacgc

SEQ ID NO: 83703 - DNA, 25 bp, Homo sapiens
  chr12:6532069-6532094
  hypo
ggattacaggcgtgagccaccacgc

SEQ ID NO: 83704 - DNA, 30 bp, Homo sapiens
  chr12:6566951-6566981
  hypo
atgtctactgggagcgtttccagattggga

SEQ ID NO: 83705 - DNA, 30 bp, Homo sapiens
  chr12:6586806-6586836
  hypo
agcccccagctctgcggcggcttcacccgc

SEQ ID NO: 83706 - DNA, 187 bp, Homo sapiens
  chr12:6587831-6588018
  hypo
cgtcggccaggcagcggcagggggaagtgggaatcttctcacccagagaagcactgactcccagctggggaatgcagacatggagatgactctggagcgagcagggagtatgctcgatgcagaccagatgccgccgtccaggatttctgccgcagccactttcatacagcacgagtgcttccagaaa

SEQ ID NO: 83707 - DNA, 31 bp, Homo sapiens; identical to SEQ ID NO: 26051
  chr12:6623436-6623467
  hypo

SEQ ID NO: 83708 - DNA, 6 bp, Homo sapiens
  chr12:6632862-6632868
  hypo
acaagt

SEQ ID NO: 83709 - DNA, 58 bp, Homo sapiens
  chr12:6636151-6636209
  hypo
gcagtgagtggagagctctgccggcgccgagttctccgggaagaacaggagcacaaga

SEQ ID NO: 83710 - DNA, 166 bp, Homo sapiens
  chr12:6636483-6636649
  hypo
gaggcagggtttgttagaacacgcacgtacccgccggccttttccatcagcttccattgctggcctggccccggatggggccctgtgttccctccactagaggcaatgatgtcttgcagacaaataagacacagagccttgcagcgctggagaaaagtctgacctc

SEQ ID NO: 83711 - DNA, 31 bp, Homo sapiens
  chr12:6637924-6637955
  hypo
tgaaggggcaggtcagcgagatggcggtgct

SEQ ID NO: 83712 - DNA, 29 bp, Homo sapiens
  chr12:6678399-6678428
  hypo
aaaaaaccgtggaattccatgccacttac

SEQ ID NO: 83713 - DNA, 476 bp, Homo sapiens
  chr12:6678911-6679387
  hypo
gtagtggttaggtgttaaaaccgttccatgtacttcactggtttaacttgacaaccgtatgaggtatacatgagatatctgcatcccaccaaagttaaacaacttgctcaaggtcacagagccattaagcggcggtgcccgcagttttgcagcctctcattttccacaggtggaagtcaacgttggcaaggcacatactgcacccacacacagaacccagttactcagtggggtatcaggacaccacgtagcccttaattttcaactatacaggtgccaggctcctgccgcacacactcatccacctgcacctacacccacactgaaccagagcactaaaatacaaggaaacttttattttcaattttcatcaagaaatttgctgtggttttttatgcttttggttttttcctttttttttttttccactttatttcatttagccgctcagtggctagagccgctgggttcctggt

SEQ ID NO: 83714 - DNA, 30 bp, Homo sapiens; identical to SEQ ID NO: 26054
  chr12:6691562-6691592
  hypo

SEQ ID NO: 83715 - DNA, 30 bp, Homo sapiens; identical to SEQ ID NO: 26055
  chr12:6692186-6692216
  hypo

SEQ ID NO: 83716 - DNA, 30 bp, Homo sapiens
  chr12:6696967-6696997
  hypo
agcccagcccaggccgcaccactagatgcg

SEQ ID NO: 83717 - DNA, 30 bp, Homo sapiens
  chr12:6729264-6729294
  hypo
tcgggcacggacagcgcaatggcatgtgtg

SEQ ID NO: 83718 - DNA, 39 bp, Homo sapiens
  chr12:6749346-6749385
  hypo
ccgtacaaatccagcccgtaaaagcggcctgattctggg

SEQ ID NO: 83719 - DNA, 31 bp, Homo sapiens; identical to SEQ ID NO: 26056
  chr12:6757458-6757489
  hypo

SEQ ID NO: 83720 - DNA, 30 bp, Homo sapiens
  chr12:6760067-6760097
  hypo
ctgaaatacagcaccgacctcagcatggag

SEQ ID NO: 83721 - DNA, 45 bp, Homo sapiens; identical to SEQ ID NO: 26057
  chr12:6831876-6831921
  hypo

SEQ ID NO: 83722 - DNA, 37 bp, Homo sapiens
  chr12:6848749-6848786
  hypo
gacagagcgagactccgactcaaaaaatgaagaaaaa

SEQ ID NO: 83723 - DNA, 240 bp, Homo sapiens
  chr12:6857749-6857989
  hypo
gaagaaaaaacttacgttaagagccaggagttggggtttaatcccctatgtcagtgagaacattgttctctttccatgtcaacttgtactaccaaaggcagctcctgcgggagcctgaactgagcctgccttgcagccgaggaccgtccgcaggtgcaccccaccctccttactcctgatacttacaagagaggctgagggcccggggccctcaccagtcatagcggcgggactgtcggg

SEQ ID NO: 83724 - DNA, 30 bp, Homo sapiens
  chr12:6859133-6859163
  hypo
cactgtctgaatcccgaacagtcctccgtg

SEQ ID NO: 83725 - DNA, 48 bp, Homo sapiens
  chr12:6868197-6868245
  hypo
gactgtttggaaactcgcgactgtgtggctatccgggataactgacct

SEQ ID NO: 83726 - DNA, 46 bp, Homo sapiens
  chr12:6871062-6871108
  hypo
aaaaaaaaaaggcaaaggcattcccgaaggagggcagggggaataa

SEQ ID NO: 83727 - DNA, 31 bp, Homo sapiens; identical to SEQ ID NO: 26059
  chr12:6876862-6876893
  hypo

SEQ ID NO: 83728 - DNA, 17 bp, Homo sapiens
  chr12:6900423-6900440
  hypo
tttgagacggagtctcg

SEQ ID NO: 83729 - DNA, 56 bp, Homo sapiens
  chr12:7249424-7249480
  hypo
gagggcgatgtccccgctaaagttatgggactcattctgacggtagtcggggtgca

SEQ ID NO: 83730 - DNA, 49 bp, Homo sapiens
  chr12:7351758-7351807
  hypo
tttcccagcctcctccatccacgttctcgaaccaacttactttattctt

SEQ ID NO: 83731 - DNA, 28 bp, Homo sapiens
  chr12:7368829-7368857
  hypo
ctgggattacaggcgtgagccaccgtgc

SEQ ID NO: 83732 - DNA, 27 bp, Homo sapiens
  chr12:7483436-7483463
  hypo
tacagctcccagcatgagtgacgcaga

SEQ ID NO: 83733 - DNA, 43 bp, Homo sapiens
  chr12:7826420-7826463
  hypo
gttttattttttattttttttcgttttgagacggagtctcgct

SEQ ID NO: 83734 - DNA, 30 bp, Homo sapiens; identical to SEQ ID NO: 26060
  chr12:7850947-7850977
  hypo

SEQ ID NO: 83735 - DNA, 26 bp, Homo sapiens
  chr12:7851215-7851241
  hypo
atcgtaggctgggcgcggtggctcac

SEQ ID NO: 83736 - DNA, 266 bp, Homo sapiens
  chr12:7858582-7858848
  hypo
ggggctgctcgactccgtcgtgcccccttgggcttccactgcaggaatgcaaggcgggtaaccttcaaagccaggtggaaacgtccggtttgaaccgcacatatgctagggtggagagtgagaacgaatgcaaagagaggctagcgttggggtggggctgccggggcaaagggacaggcccgggggaggcccgggccgccacggttagaaagcatggaaagagcttaagtaaaatagctgcgtgtcggcagggcgcggtggctcac

SEQ ID NO: 83737 - DNA, 30 bp, Homo sapiens
  chr12:7865836-7865866
  hypo
ctgggccgctggcgcgctgacgccctctgc

SEQ ID NO: 83738 - DNA, 38 bp, Homo sapiens
  chr12:7910483-7910521
  hypo
atgtgaaaatacattgtcagccgggctcggtggctcaa

SEQ ID NO: 83739 - DNA, 39 bp, Homo sapiens; identical to SEQ ID NO: 26063
  chr12:7963844-7963883
  hypo

SEQ ID NO: 83740 - DNA, 33 bp, Homo sapiens
  chr12:7968172-7968205
  hypo
tttgttttgttttttttgagacggagtttcgct

SEQ ID NO: 83741 - DNA, 33 bp, Homo sapiens; identical to SEQ ID NO: 26064
  chr12:8009569-8009602
  hypo

SEQ ID NO: 83742 - DNA, 33 bp, Homo sapiens; identical to SEQ ID NO: 26065
  chr12:8017217-8017250
  hypo

SEQ ID NO: 83743 - DNA, 30 bp, Homo sapiens
  chr12:8022093-8022123
  hypo
tatgttactcttcacgcgtatatagccatg

SEQ ID NO: 83744 - DNA, 30 bp, Homo sapiens
  chr12:8023661-8023691
  hypo
cagggcatgatgagcgaggccccagggccc

SEQ ID NO: 83745 - DNA, 39 bp, Homo sapiens
  chr12:8072018-8072057
  hypo
tgcatttttttttttttgagacggagtctcgccctgtgg

SEQ ID NO: 83746 - DNA, 39 bp, Homo sapiens
  chr12:8072296-8072335
  hypo
gcatccggcctcagctacgtgcatttttattcaaaggct

SEQ ID NO: 83747 - DNA, 447 bp, Homo sapiens; identical to SEQ ID NO: 49285
  chr12:8123150-8123597
  hypo

SEQ ID NO: 83748 - DNA, 32 bp, Homo sapiens; identical to SEQ ID NO: 26066
  chr12:8146996-8147028
  hypo

SEQ ID NO: 83749 - DNA, 32 bp, Homo sapiens; identical to SEQ ID NO: 26067
  chr12:8147087-8147119
  hypo

SEQ ID NO: 83750 - DNA, 522 bp, Homo sapiens; identical to SEQ ID NO: 8575
  chr12:8171288-8171810
  hypo

SEQ ID NO: 83751 - DNA, 99 bp, Homo sapiens
  chr12:8178280-8178379
  hypo
gttgactacctactatgtatccgacactgccgggcaccagagataagatgtagttctcagcaaggcgctgtggctcacgcctgtaatcccaacattttg

SEQ ID NO: 83752 - DNA, 1 bp, Homo sapiens
  chr12:8180935-8180936
  hypo
g

SEQ ID NO: 83753 - DNA, 37 bp, Homo sapiens
  chr12:8252175-8252212
  hypo
taaaagtggcacactgggggccgggcgcggtggctca

SEQ ID NO: 83754 - DNA, 31 bp, Homo sapiens
  chr12:8386002-8386033
  hypo
cagccagcctcctgtgcgaggttgtgcggga

SEQ ID NO: 83755 - DNA, 30 bp, Homo sapiens; identical to SEQ ID NO: 26070
  chr12:8398733-8398763
  hypo

SEQ ID NO: 83756 - DNA, 37 bp, Homo sapiens; identical to SEQ ID NO: 26071
  chr12:8423885-8423922
  hypo

SEQ ID NO: 83757 - DNA, 46 bp, Homo sapiens
  chr12:8601977-8602023
  hypo
ctccactttgaatcgcgtcactcagggtggccgcagtcgcccgcag

SEQ ID NO: 83758 - DNA, 490 bp, Homo sapiens; identical to SEQ ID NO: 26072
  chr12:8757659-8758149
  hypo

SEQ ID NO: 83759 - DNA, 275 bp, Homo sapiens; identical to SEQ ID NO: 26073
  chr12:8808408-8808683
  hypo

SEQ ID NO: 83760 - DNA, 34 bp, Homo sapiens
  chr12:8808922-8808956
  hypo
cgtgagccaccgcgcccagcccataattctgata

SEQ ID NO: 83761 - DNA, 33 bp, Homo sapiens; identical to SEQ ID NO: 26074
  chr12:8890589-8890622
  hypo

SEQ ID NO: 83762 - DNA, 5 bp, Homo sapiens
  chr12:8894124-8894129
  hypo
ccagc

SEQ ID NO: 83763 - DNA, 90 bp, Homo sapiens
  chr12:8906529-8906619
  hypo
ctaagccatcttattcgccatgaagcgccatacctgttccagaagtatgttaaagagtctcatggacgggatgtacgtgtcattgtcgtg

SEQ ID NO: 83764 - DNA, 43 bp, Homo sapiens
  chr12:8936108-8936151
  hypo
ctgtagacaattgcaacgcaatggcaactatcttattaaaatt

SEQ ID NO: 83765 - DNA, 121 bp, Homo sapiens
  chr12:8936630-8936751
  hypo
tactcaggaggctgaggcaggagaatcgcttgaaaagccttagctgggcatggtgcctcacgcctgtgatgccaacactggtaggttgaggtgggcggctcacttgagcccaggagttcaa

SEQ ID NO: 83766 - DNA, 32 bp, Homo sapiens; identical to SEQ ID NO: 26076
  chr12:8975181-8975213
  hypo

SEQ ID NO: 83767 - DNA, 22 bp, Homo sapiens
  chr12:8983842-8983864
  hypo
cggcctgagtgcttacttctta

SEQ ID NO: 83768 - DNA, 133 bp, Homo sapiens
  chr12:8995542-8995675
  hypo
gctgtacacagctacgtttatggattctttatccatccttggctggaccgctaatgaaatacccacatgccattctcaggcagtgaagatttgagagaaagagctctatttgaaaaccgtaacaagtccgtgg

SEQ ID NO: 83769 - DNA, 30 bp, Homo sapiens
  chr12:9025789-9025819
  hypo
tcccttccaattaggcgttaatagcgctat

SEQ ID NO: 83770 - DNA, 31 bp, Homo sapiens
  chr12:9071260-9071291
  hypo
tttgtttattttcacccgatctagtctttgc

SEQ ID NO: 83771 - DNA, 20 bp, Homo sapiens
  chr12:9084000-9084020
  hypo
aagactaatggagaggcggg

SEQ ID NO: 83772 - DNA, 222 bp, Homo sapiens
  chr12:9108767-9108989
  hypo
aaaagaacagcaggtgaaaggctgtagccctcctgccctctcctggcaccaggcggccaccccacgttatgggaagtggtggtggcgccaggccagcccaggagccgtgggctggtgggactgaacaagttgggacatgcccccgttcggcaaagcttgtggacagcaggaatgaatgaactgtaacacaaacgagctgagactcttcggggtgcagacctc

SEQ ID NO: 83773 - DNA, 60 bp, Homo sapiens
  chr12:9109307-9109367
  hypo
gtggggattaccggcatgagccactgcacctgacctttgaagttccgcagttgctggtgt

SEQ ID NO: 83774 - DNA, 43 bp, Homo sapiens
  chr12:9187310-9187353
  hypo
gggattacaggcgtgaggcaccgtgcctggccattatactttt

SEQ ID NO: 83775 - DNA, 30 bp, Homo sapiens; identical to SEQ ID NO: 26079
  chr12:9395289-9395319
  hypo

SEQ ID NO: 83776 - DNA, 31 bp, Homo sapiens; identical to SEQ ID NO: 26080
  chr12:9574344-9574375
  hypo

SEQ ID NO: 83777 - DNA, 200 bp, Homo sapiens; identical to SEQ ID NO: 26081
  chr12:9585207-9585407
  hypo

SEQ ID NO: 83778 - DNA, 30 bp, Homo sapiens; identical to SEQ ID NO: 8579
  chr12:9620959-9620989
  hypo

SEQ ID NO: 83779 - DNA, 37 bp, Homo sapiens
  chr12:9824088-9824125
  hypo
tacaggcgtgagccaccgcgcccggccgaggattaac

SEQ ID NO: 83780 - DNA, 30 bp, Homo sapiens
  chr12:9927548-9927578
  hypo
attattattttggaacgagagcgtaacaac

SEQ ID NO: 83781 - DNA, 193 bp, Homo sapiens
  chr12:10073247-10073440
  hypo
agttcctctctttgagagctgcgcactccagctacttctagtcggccatcttggccactctccaacccccagcttttctttaaaaactaatctattttcttactctgtgtccctagagtccacgtgtctccttctttgccctctttacttccattaattcactcgcgtcttcgaagtgcacatatttccttca

SEQ ID NO: 83782 - DNA, 30 bp, Homo sapiens
  chr12:10084921-10084951
  hypo
taatcatggcaaggcgctaaccgatggaga

SEQ ID NO: 83783 - DNA, 48 bp, Homo sapiens; identical to SEQ ID NO: 26083
  chr12:10264177-10264225
  hypo

SEQ ID NO: 83784 - DNA, 26 bp, Homo sapiens
  chr12:10267733-10267759
  hypo
aagaatcattcaggccgggcgcggtg

SEQ ID NO: 83785 - DNA, 146 bp, Homo sapiens
  chr12:10267998-10268144
  hypo
ccagcctaggccacagagcgagactccgtctcaaaaaaataaaaggatcattcaggtaaagcagataagaatcaccaataccttgaggtggaagcacgcctgacatggttgagaaacaacagagaagccggcgtcctgagtgcggt

SEQ ID NO: 83786 - DNA, 30 bp, Homo sapiens
  chr12:10268686-10268716
  hypo
aatcttactttacaccgtcactttcgtgat

SEQ ID NO: 83787 - DNA, 31 bp, Homo sapiens; identical to SEQ ID NO: 26085
  chr12:10317434-10317465
  hypo

SEQ ID NO: 83788 - DNA, 33 bp, Homo sapiens
  chr12:10767895-10767928
  hypo
aaagtgtgtaaaacatgccggtagtacagcaga

SEQ ID NO: 83789 - DNA, 30 bp, Homo sapiens; identical to SEQ ID NO: 8581
  chr12:11053581-11053611
  hypo

SEQ ID NO: 83790 - DNA, 31 bp, Homo sapiens; identical to SEQ ID NO: 26087
  chr12:11720902-11720933
  hypo

SEQ ID NO: 83791 - DNA, 45 bp, Homo sapiens; identical to SEQ ID NO: 8583
  chr12:11801642-11801687
  hypo

SEQ ID NO: 83792 - DNA, 308 bp, Homo sapiens; identical to SEQ ID NO: 8584
  chr12:11802786-11803094
  hypo

SEQ ID NO: 83793 - DNA, 199 bp, Homo sapiens; identical to SEQ ID NO: 49305
  chr12:11905382-11905581
  hypo

SEQ ID NO: 83794 - DNA, 30 bp, Homo sapiens; identical to SEQ ID NO: 26091
  chr12:11909578-11909608
  hypo

SEQ ID NO: 83795 - DNA, 166 bp, Homo sapiens; identical to SEQ ID NO: 8586
  chr12:11992072-11992238
  hypo

SEQ ID NO: 83796 - DNA, 383 bp, Homo sapiens; identical to SEQ ID NO: 8587
  chr12:12006112-12006495
  hypo

SEQ ID NO: 83797 - DNA, 30 bp, Homo sapiens; identical to SEQ ID NO: 49308
  chr12:12009725-12009755
  hypo

SEQ ID NO: 83798 - DNA, 547 bp, Homo sapiens; identical to SEQ ID NO: 8588
  chr12:12022356-12022903
  hypo

SEQ ID NO: 83799 - DNA, 148 bp, Homo sapiens; identical to SEQ ID NO: 8589
  chr12:12037377-12037525
  hypo

SEQ ID NO: 83800 - DNA, 102 bp, Homo sapiens; identical to SEQ ID NO: 8590
  chr12:12038858-12038960
  hypo

SEQ ID NO: 83801 - DNA, 2802 bp, Homo sapiens; identical to SEQ ID NO: 8591
  chr12:12043873-12046675
  hypo

SEQ ID NO: 83802 - DNA, 1482 bp, Homo sapiens; identical to SEQ ID NO: 8592
  chr12:12046854-12048336
  hypo

SEQ ID NO: 83803 - DNA, 189 bp, Homo sapiens; identical to SEQ ID NO: 26099
  chr12:12184632-12184821
  hypo

SEQ ID NO: 83804 - DNA, 31 bp, Homo sapiens
  chr12:12208458-12208489
  hypo
agccacctgcagtcctcggataccactcagt

SEQ ID NO: 83805 - DNA, 30 bp, Homo sapiens; identical to SEQ ID NO: 26100
  chr12:12240348-12240378
  hypo

SEQ ID NO: 83806 - DNA, 30 bp, Homo sapiens; identical to SEQ ID NO: 49316
  chr12:12503015-12503045
  hypo

SEQ ID NO: 83807 - DNA, 43 bp, Homo sapiens
  chr12:12504472-12504515
  hypo
ccattattagaaacttcgtattcggtgctttaatacaatgaac

SEQ ID NO: 83808 - DNA, 43 bp, Homo sapiens
  chr12:12504814-12504857
  hypo
acaggcgtgagccactgtgcccggcctgaacctgttttcattg

SEQ ID NO: 83809 - DNA, 30 bp, Homo sapiens; identical to SEQ ID NO: 26101
  chr12:12514213-12514243
  hypo

SEQ ID NO: 83810 - DNA, 30 bp, Homo sapiens
  chr12:12601957-12601987
  hypo
tgaagtggcaactccgcctaccttgcaggt

SEQ ID NO: 83811 - DNA, 41 bp, Homo sapiens
  chr12:12604521-12604562
  hypo
agcaacattgaactggctgggcgcagtggctcacgcctcta

SEQ ID NO: 83812 - DNA, 180 bp, Homo sapiens
  chr12:12605361-12605541
  hypo
gaacttggagagccgcggtttcccatgattgttaagattaggatcgccttgatcgtggctgggtcgggcccaccgggtaggcactgggggccagggtgcgggccggcgcgcaagcctcgcctcgtgatcttgccggcgatccttccccacccactccctcccgcacgccggcaagagttt

SEQ ID NO: 83813 - DNA, 446 bp, Homo sapiens
  chr12:12618402-12618848
  hypo
tcacaggctggacacccggccctgcggagaggacttgattaaacaaggtataatgtacttctctttcccatccacagatggatctgtctgtagaaactctgttcagcttcatgcaggagcgccagaaaagatacgccaagtatgccgagcagatccagaaagtgaacgagatgtccgccatcctccgccgcatacagatgggcatcgaccagactgtgcccctgctggacaggctcaacagcatgctgcccgagggcgagcggctggagcccttcagcatgaagcccgaccgcgagctcaggctgtagctgctgcccggcctgcctggggctgggagccccagacaccgacaccctgaggacgtgtggagctaaggtcatatcatctgaccaggtctggaggctggcgggaggctccctgaaagtgggtgcgaaggagtccggctg

SEQ ID NO: 83814 - DNA, 25 bp, Homo sapiens
  chr12:12685865-12685890
  hypo
gagcgaaactctgtctcaaaaaaaa

SEQ ID NO: 83815 - DNA, 31 bp, Homo sapiens
  chr12:12718323-12718354
  hypo
gaaacagccctctccctctcccgctcccgct

SEQ ID NO: 83816 - DNA, 31 bp, Homo sapiens
  chr12:12848512-12848543
  hypo
taccgcgactgttcttcgcaattccacctcg

SEQ ID NO: 83817 - DNA, 79 bp, Homo sapiens; identical to SEQ ID NO: 8596
  chr12:12877457-12877536
  hypo

SEQ ID NO: 83818 - DNA, 29 bp, Homo sapiens
  chr12:12900060-12900089
  hypo
ttctagagacagtctcgctttgtcaccca

SEQ ID NO: 83819 - DNA, 28 bp, Homo sapiens
  chr12:12900148-12900176
  hypo
aatcctcccacatcggcctcctaaagca

SEQ ID NO: 83820 - DNA, 21 bp, Homo sapiens
  chr12:12903028-12903049
  hypo
gggcgcggtggctcacgcctg

SEQ ID NO: 83821 - DNA, 30 bp, Homo sapiens
  chr12:12982491-12982521
  hypo
cttttatgaaggctcgagttctgctgttct

SEQ ID NO: 83822 - DNA, 141 bp, Homo sapiens
  chr12:12989484-12989625
  hypo
taatatcatacagggcccatacgcagtaaatgttcaatatctgtcattttctgaaacctaagatgtgtcaggcggcttgacctgtattatttctagttctttgaacaatcccgaacagtcgatattattgttcccaatatg

SEQ ID NO: 83823 - DNA, 141 bp, Homo sapiens
  chr12:12990566-12990707
  hypo
agtcaggaatactctttcccccgcctatcccaatacacgttgtttgtgagccaccgacccccctcactgcttccctctctcctcactgcgtatccatccagtaggcttggtccacagcccgtgctcctgtatcaaataagc

SEQ ID NO: 83824 - DNA, 27 bp, Homo sapiens
  chr12:13029903-13029930
  hypo
cgctccgtctcaaaaaacaaacaaaga

SEQ ID NO: 83825 - DNA, 62 bp, Homo sapiens; identical to SEQ ID NO: 26105
  chr12:13035977-13036039
  hypo

SEQ ID NO: 83826 - DNA, 30 bp, Homo sapiens
  chr12:13046178-13046208
  hypo
ctctccatctgcacacgtcgccttggaagt

SEQ ID NO: 83827 - DNA, 37 bp, Homo sapiens
  chr12:13050853-13050890
  hypo
ttttaacctcctttgcggactcctacctagatgagat

SEQ ID NO: 83828 - DNA, 87 bp, Homo sapiens
  chr12:13056217-13056304
  hypo
ttaattttttaaaaatagacacggtcttattctatctcccaggcagaattgcggtgacgtgatcacagctcactgcagcttcgaaat

SEQ ID NO: 83829 - DNA, 31 bp, Homo sapiens; identical to SEQ ID NO: 26106
  chr12:13057640-13057671
  hypo

SEQ ID NO: 83830 - DNA, 6 bp, Homo sapiens
  chr12:13069316-13069322
  hypo
cggcca

SEQ ID NO: 83831 - DNA, 189 bp, Homo sapiens
  chr12:13079829-13080018
  hypo
aaacagtactcagatgcgttccctctccccgtagggatcttgctggagatgcccagggttaacagtggaactccatatggagacagaggcatggggggagcttcgctggagatgggacagcctgctccaccgcgaagcctactgaggctctcttcttacgtaccccgcgcaatctcatctccctgaaca

SEQ ID NO: 83832 - DNA, 395 bp, Homo sapiens; identical to SEQ ID NO: 49323
  chr12:13152997-13153392
  hypo

SEQ ID NO: 83833 - DNA, 94 bp, Homo sapiens; identical to SEQ ID NO: 49324
  chr12:13154240-13154334
  hypo

SEQ ID NO: 83834 - DNA, 30 bp, Homo sapiens; identical to SEQ ID NO: 26109
  chr12:13155147-13155177
  hypo

SEQ ID NO: 83835 - DNA, 234 bp, Homo sapiens
  chr12:13173188-13173422
  hypo
agttaagcccaacattcgaatcatcctagcccaggtaccagacatgtcagtgaagaagacttcatccgcagacatttgagacatccccaactgcttaaacctttccagtggcatcgcccagacattgtgaagcagagacttgctatcctcactgcgctttgtcggaattcttgacccatagaatccttaggtataataaaatggctgttttatggcattcgtgtgaaggaggat

SEQ ID NO: 83836 - DNA, 12 bp, Homo sapiens
  chr12:13199074-13199086
  hypo
tgttcacttgcg

SEQ ID NO: 83837 - DNA, 17 bp, Homo sapiens
  chr12:13199145-13199162
  hypo
gtcgggcctggttagta

SEQ ID NO: 83838 - DNA, 30 bp, Homo sapiens
  chr12:13211454-13211484
  hypo
tgtgatgtcaaggaacgggagtgcagtagg

SEQ ID NO: 83839 - DNA, 107 bp, Homo sapiens; identical to SEQ ID NO: 26112
  chr12:13215210-13215317
  hypo

SEQ ID NO: 83840 - DNA, 30 bp, Homo sapiens; identical to SEQ ID NO: 26113
  chr12:13215624-13215654
  hypo

SEQ ID NO: 83841 - DNA, 175 bp, Homo sapiens; identical to SEQ ID NO: 26114
  chr12:13222375-13222550
  hypo

SEQ ID NO: 83842 - DNA, 192 bp, Homo sapiens
  chr12:13237736-13237928
  hypo
aaccatgctcaagagacggatgttggcttaagcacatgttgataatcagcagacgtgtaaggtagggctcaagcctactccccaaacccgcttaactcctaacactgctcttcctctacagatgacctaactgcttctttcagctcctggctggcccctctttgaaatcccttgttccgcagctcggagtag

SEQ ID NO: 83843 - DNA, 18 bp, Homo sapiens
  chr12:13249114-13249132
  hypo
ataagtactattgccggg

SEQ ID NO: 83844 - DNA, 647 bp, Homo sapiens; identical to SEQ ID NO: 26115
  chr12:13716428-13717075
  hypo

SEQ ID NO: 83845 - DNA, 1952 bp, Homo sapiens; identical to SEQ ID NO: 49327
  chr12:14133266-14135218
  hypo

SEQ ID NO: 83846 - DNA, 37 bp, Homo sapiens
  chr12:14469617-14469654
  hypo
caccatacctggcctcagtctgcgttttaaattgatt

SEQ ID NO: 83847 - DNA, 19 bp, Homo sapiens
  chr12:14719972-14719991
  hypo
gagccgagatcacaccatt

SEQ ID NO: 83848 - DNA, 37 bp, Homo sapiens; identical to SEQ ID NO: 26117
  chr12:14721512-14721549
  hypo

SEQ ID NO: 83849 - DNA, 37 bp, Homo sapiens; identical to SEQ ID NO: 26118
  chr12:14721788-14721825
  hypo

SEQ ID NO: 83850 - DNA, 90 bp, Homo sapiens
  chr12:14743915-14744005
  hypo
ttttctgaaatagttctctgtcgtgactagttattgtttctggattctcctggctttgcgagggtaagcgtctggaaacttttatggcag

SEQ ID NO: 83851 - DNA, 28 bp, Homo sapiens
  chr12:14817851-14817879
  hypo
taagaataagccctgagggggcgcggtg

SEQ ID NO: 83852 - DNA, 88 bp, Homo sapiens; identical to SEQ ID NO: 26119
  chr12:14818118-14818206
  hypo

SEQ ID NO: 83853 - DNA, 284 bp, Homo sapiens
  chr12:14818748-14819032
  hypo
gcaagttccagtcatgcatatcgtatttctatactatttcaaaggttgagttgctgaagcggcttcattgtctggggacatacccaaggttcgtcatcgcgtgacgagaagattaaggacacagacgcaaacacggagcgggtcaagtagcggaaagtttaataggcaggaaagaagagaacagctcaccggtagagaggtaggagggctctgaagggaaaaaaccatgcttgtggtgggaagcagtaggttatatagggaggcttcaggaggcggtgtctgat

SEQ ID NO: 83854 - DNA, 241 bp, Homo sapiens
  chr12:14819091-14819332
  hypo
ctggccctctcaccctaatcttttattatgcaaatgcggcctctacctggctggcgccatgacacccacacatgtggctttacccggccggcacaatgacacccccacacatggctacaaagaaaagggaggggaaatcgctatattgggtggacctggcttttagtacagctgcgggcattcatctacgcaagcttccagcttgcttatttatgcttgcagttcagcttttcaggctgct

SEQ ID NO: 83855 - DNA, 121 bp, Homo sapiens
  chr12:15095458-15095579
  hypo
ttctgtccactccttcttaatcgacaggttccactcccagctgaggtggtcttgcttgtcatcgtcggtgaagaaggacttgttgtggtacgtgcctcgcgccagcatgcccttgggagcc

SEQ ID NO: 83856 - DNA, 1019 bp, Homo sapiens; identical to SEQ ID NO: 8609
  chr12:15941608-15942627
  hypo

SEQ ID NO: 83857 - DNA, 24 bp, Homo sapiens
  chr12:15950001-15950025
  hypo
gggatttaaaaacagactccccgc

SEQ ID NO: 83858 - DNA, 59 bp, Homo sapiens
  chr12:16109904-16109963
  hypo
ccggcagttctgaggcgtgcggaacaaatccaggctcgcagaaccgtgaaaaaggagtg

SEQ ID NO: 83859 - DNA, 197 bp, Homo sapiens; identical to SEQ ID NO: 26123
  chr12:16150421-16150618
  hypo

SEQ ID NO: 83860 - DNA, 23 bp, Homo sapiens
  chr12:19230438-19230461
  hypo
accgcgcccggctaaaatatgtt

SEQ ID NO: 83861 - DNA, 113 bp, Homo sapiens
  chr12:19260899-19261012
  hypo
cggcaggcgtactccacggtgtagatggctccccggctctactcctcccaacgctgcatgtctgccttgcgctgggccagctccggggagggagtggcgcatgtgctcctgca

SEQ ID NO: 83862 - DNA, 31 bp, Homo sapiens
  chr12:19261247-19261278
  hypo
aaccatcactaccaaccgtttccagaagttt

SEQ ID NO: 83863 - DNA, 1777 bp, Homo sapiens; identical to SEQ ID NO: 49341
  chr12:19282246-19284023
  hypo

SEQ ID NO: 83864 - DNA, 21 bp, Homo sapiens
  chr12:19425383-19425404
  hypo
agctttaggctgagcacggtg

SEQ ID NO: 83865 - DNA, 312 bp, Homo sapiens
  chr12:19459335-19459647
  hypo
ggtagagaaaaggtggcgacggcgactggagcagcagaggctgtagcatcggatacccacctcccacgaaccggttcctcttccccctccttgctgtgtgtttgatgtgttgaagcaggagggagaacgccgcgagcagcgccgtgagcaacactaccatcgtccccagcactgcggatccgggccctagcggcgggcccagtagcggaggtggtggcggcggtggaggcggcggcatcgaggtaataggtgactgatctccccgggcgctagctctgagcagatgcggactctcttcggtttcctaggcaa

SEQ ID NO: 83866 - DNA, 26 bp, Homo sapiens
  chr12:19493203-19493229
  hypo
actcaaattactaacacgtgtttgaa

SEQ ID NO: 83867 - DNA, 31 bp, Homo sapiens
  chr12:19497743-19497774
  hypo
ttaaaatatgtgaaatcggccaggcgtggtt

SEQ ID NO: 83868 - DNA, 152 bp, Homo sapiens
  chr12:19512468-19512620
  hypo
ttcagcaaagaggtagcgagattattttatgaaaggtattccaaaggaatagatttgtgaagattaaatcaagtggtaaggttgaaaataaagtgtgtttctttcagtcacagagtccatagagctaaatgaaaaaataagctttctggccg

SEQ ID NO: 83869 - DNA, 37 bp, Homo sapiens; identical to SEQ ID NO: 26126
  chr12:19539886-19539923
  hypo

SEQ ID NO: 83870 - DNA, 30 bp, Homo sapiens; identical to SEQ ID NO: 26127
  chr12:20094235-20094265
  hypo

SEQ ID NO: 83871 - DNA, 30 bp, Homo sapiens; identical to SEQ ID NO: 8614
  chr12:20183925-20183955
  hypo

SEQ ID NO: 83872 - DNA, 30 bp, Homo sapiens; identical to SEQ ID NO: 26129
  chr12:20704789-20704819
  hypo

SEQ ID NO: 83873 - DNA, 20 bp, Homo sapiens
  chr12:21547964-21547984
  hypo
aaataggaacagctccggtg

SEQ ID NO: 83874 - DNA, 793 bp, Homo sapiens; identical to SEQ ID NO: 8621
  chr12:21680358-21681151
  hypo

SEQ ID NO: 83875 - DNA, 26 bp, Homo sapiens
  chr12:21811389-21811415
  hypo
cgcccggccagaaataaatttctatg

SEQ ID NO: 83876 - DNA, 24 bp, Homo sapiens
  chr12:21815668-21815692
  hypo
cccgggggacatgataaatctggg

SEQ ID NO: 83877 - DNA, 30 bp, Homo sapiens; identical to SEQ ID NO: 26133
  chr12:21833062-21833092
  hypo

SEQ ID NO: 83878 - DNA, 110 bp, Homo sapiens; identical to SEQ ID NO: 26134
  chr12:21847671-21847781
  hypo

SEQ ID NO: 83879 - DNA, 157 bp, Homo sapiens
  chr12:22161231-22161388
  hypo
tgtccagggctagagtaagtgcggtcctccggcccttgtggcccagagccatgctgaggagctgtgctgcgtgcctccgcatgctggggtccctgcgcccaccaccggtaggcctgcccctgctgggtagtgagccgtgacctgtgctgacccaaag

SEQ ID NO: 83880 - DNA, 31 bp, Homo sapiens; identical to SEQ ID NO: 8628
  chr12:22198510-22198541
  hypo

SEQ ID NO: 83881 - DNA, 27 bp, Homo sapiens
  chr12:22247464-22247491
  hypo
agccaccgcgcccggccaactaatata

SEQ ID NO: 83882 - DNA, 88 bp, Homo sapiens; identical to SEQ ID NO: 8629
  chr12:22486793-22486881
  hypo

SEQ ID NO: 83883 - DNA, 1133 bp, Homo sapiens; identical to SEQ ID NO: 8630
  chr12:22487133-22488266
  hypo

SEQ ID NO: 83884 - DNA, 505 bp, Homo sapiens; identical to SEQ ID NO: 49359
  chr12:22488339-22488844
  hypo

SEQ ID NO: 83885 - DNA, 31 bp, Homo sapiens
  chr12:22529505-22529536
  hypo
gacatagagaccttcacggggatggtgacaa

SEQ ID NO: 83886 - DNA, 30 bp, Homo sapiens
  chr12:22545252-22545282
  hypo
agaagactttacgttcggaatcttgggtca

SEQ ID NO: 83887 - DNA, 80 bp, Homo sapiens
  chr12:22698123-22698203
  hypo
ctctgtctccaaaaaaagaaaaaaaagaaagaaagaaatagagataccaggcacatctcgaatagtgaaataaatattta

SEQ ID NO: 83888 - DNA, 30 bp, Homo sapiens
  chr12:22740485-22740515
  hypo
tcgcccgagtgcgtgcgtgtttttaactat

SEQ ID NO: 83889 - DNA, 38 bp, Homo sapiens
  chr12:24617257-24617295
  hypo
tttttttttttttttttgagacggagtctcactctgtc

SEQ ID NO: 83890 - DNA, 26 bp, Homo sapiens
  chr12:24678770-24678796
  hypo
agagcgagactccatctcaaaaaaaa

SEQ ID NO: 83891 - DNA, 55 bp, Homo sapiens
  chr12:24679250-24679305
  hypo
aaggaaaatttgatgatgcagcggagagaagaacgtgggtggagtcctgtatgag

SEQ ID NO: 83892 - DNA, 1938 bp, Homo sapiens; identical to SEQ ID NO: 49363
  chr12:24714475-24716413
  hypo

SEQ ID NO: 83893 - DNA, 623 bp, Homo sapiens; identical to SEQ ID NO: 49366
  chr12:25101374-25101997
  hypo

SEQ ID NO: 83894 - DNA, 323 bp, Homo sapiens; identical to SEQ ID NO: 8636
  chr12:25102009-25102332
  hypo

SEQ ID NO: 83895 - DNA, 43 bp, Homo sapiens; identical to SEQ ID NO: 26142
  chr12:25344061-25344104
  hypo

SEQ ID NO: 83896 - DNA, 30 bp, Homo sapiens; identical to SEQ ID NO: 8639
  chr12:25368388-25368418
  hypo

SEQ ID NO: 83897 - DNA, 136 bp, Homo sapiens; identical to SEQ ID NO: 8640
  chr12:25378545-25378681
  hypo

SEQ ID NO: 83898 - DNA, 95 bp, Homo sapiens; identical to SEQ ID NO: 8641
  chr12:25380228-25380323
  hypo

SEQ ID NO: 83899 - DNA, 87 bp, Homo sapiens; identical to SEQ ID NO: 8642
  chr12:25398213-25398300
  hypo

SEQ ID NO: 83900 - DNA, 260 bp, Homo sapiens; identical to SEQ ID NO: 49374
  chr12:25404338-25404598
  hypo

SEQ ID NO: 83901 - DNA, 24 bp, Homo sapiens
  chr12:25428814-25428838
  hypo
agaaggatataatgaccgggcgtg

SEQ ID NO: 83902 - DNA, 30 bp, Homo sapiens
  chr12:25429183-25429213
  hypo
caggactagaattgcgctatagtcactaag

SEQ ID NO: 83903 - DNA, 221 bp, Homo sapiens
  chr12:25537193-25537414
  hypo
tagtttccctgtaggtttaatgaggagaaaagaatctgccattacccaatggcctgaactaggagtaaagtgcttatacaaagattaatcattaagcgactttattataggatactgttgcaaacacgaggcaatgagaaaatgagcttaagtatcttgggttttcctaaaaagtatctcttacatgaggacacacaaaaaaacatgtcacctgacacctt

SEQ ID NO: 83904 - DNA, 21 bp, Homo sapiens
  chr12:25537441-25537462
  hypo
gaagttgacaggatagcagga

SEQ ID NO: 83905 - DNA, 31 bp, Homo sapiens; identical to SEQ ID NO: 26150
  chr12:26178194-26178225
  hypo

SEQ ID NO: 83906 - DNA, 31 bp, Homo sapiens
  chr12:26265814-26265845
  hypo
agaagaaagaggagaccgtgagtaggaattg

SEQ ID NO: 83907 - DNA, 31 bp, Homo sapiens; identical to SEQ ID NO: 26151
  chr12:26278876-26278907
  hypo

SEQ ID NO: 83908 - DNA, 180 bp, Homo sapiens; identical to SEQ ID NO: 26152
  chr12:26398929-26399109
  hypo

SEQ ID NO: 83909 - DNA, 113 bp, Homo sapiens
  chr12:26492086-26492199
  hypo
cttcctgatgcattgcgaatgtgtgatgtacgctttctagcagatgcatttgaggttaggtcttcgcaaccatgaaaacacagttataaattgttctcggagctaacccactc

SEQ ID NO: 83910 - DNA, 30 bp, Homo sapiens
  chr12:26513248-26513278
  hypo
aagttcatctcttctcgctcctattctggc

SEQ ID NO: 83911 - DNA, 35 bp, Homo sapiens
  chr12:26949666-26949701
  hypo
agaagttatgactaggccaggcgtggcagctcaca

SEQ ID NO: 83912 - DNA, 200 bp, Homo sapiens; identical to SEQ ID NO: 26154
  chr12:26966973-26967173
  hypo

SEQ ID NO: 83913 - DNA, 30 bp, Homo sapiens; identical to SEQ ID NO: 26155
  chr12:27311416-27311446
  hypo

SEQ ID NO: 83914 - DNA, 31 bp, Homo sapiens; identical to SEQ ID NO: 8648
  chr12:27485803-27485834
  hypo

SEQ ID NO: 83915 - DNA, 30 bp, Homo sapiens; identical to SEQ ID NO: 49391
  chr12:27486765-27486795
  hypo

SEQ ID NO: 83916 - DNA, 40 bp, Homo sapiens
  chr12:27489587-27489627
  hypo
atatttttaaacctggctgggcgcggtggctcacgcctgt

SEQ ID NO: 83917 - DNA, 31 bp, Homo sapiens
  chr12:27523815-27523846
  hypo
cataagccaccgcacccggctggagagctgg

SEQ ID NO: 83918 - DNA, 30 bp, Homo sapiens
  chr12:27668688-27668718
  hypo
tctcgtttaaagtcacggcattccttaagc

SEQ ID NO: 83919 - DNA, 154 bp, Homo sapiens
  chr12:27671114-27671268
  hypo
attttgatcagtagtgagccacgacgtattattttaaaactgagccctatttaatattgtggcaggtggaaatcaaggggggacttactggttttgagtaatgctctgttgttactgggcgtgttcctaagacgttgaagaggccaatgcacag

SEQ ID NO: 83920 - DNA, 26 bp, Homo sapiens
  chr12:27673412-27673438
  hypo
ccacgcccaaccgagaaagatcttta

SEQ ID NO: 83921 - DNA, 80 bp, Homo sapiens
  chr12:27742241-27742321
  hypo
gtggccagttagacttggatccgtgcatcctcttgagccgtgaattttctggtctcaaagtcccaggctcaagcgatcct

SEQ ID NO: 83922 - DNA, 7 bp, Homo sapiens
  chr12:27742380-27742387
  hypo
aatgtat

SEQ ID NO: 83923 - DNA, 31 bp, Homo sapiens
  chr12:27749980-27750011
  hypo
atccgttgaggggaaccgcatgttctaaaag

SEQ ID NO: 83924 - DNA, 139 bp, Homo sapiens
  chr12:27842658-27842797
  hypo
ctcccttaactatagttggtgcgcatgcgtgggccgggtgttggctgcacttccacctaaaggctgcattgctcattcccgccgccccaggaaggttgtataccagtcaaatctatacgtactgtacctgcgtttctct

SEQ ID NO: 83925 - DNA, 115 bp, Homo sapiens
  chr12:27950700-27950815
  hypo
tttgaaacatgtgacgtccacattcgcaagcagcagatggtgtctgtggaagagaccatctacatcgtgggggggtgtctccacgagctggggcccaaccgcaggagcagccaga

SEQ ID NO: 83926 - DNA, 30 bp, Homo sapiens; identical to SEQ ID NO: 49395
  chr12:28155064-28155094
  hypo

SEQ ID NO: 83927 - DNA, 30 bp, Homo sapiens; identical to SEQ ID NO: 49396
  chr12:28174801-28174831
  hypo

SEQ ID NO: 83928 - DNA, 30 bp, Homo sapiens; identical to SEQ ID NO: 26159
  chr12:28721892-28721922
  hypo

SEQ ID NO: 83929 - DNA, 704 bp, Homo sapiens; identical to SEQ ID NO: 49397
  chr12:29302068-29302772
  hypo

SEQ ID NO: 83930 - DNA, 241 bp, Homo sapiens; identical to SEQ ID NO: 26161
  chr12:29373861-29374102
  hypo

SEQ ID NO: 83931 - DNA, 30 bp, Homo sapiens
  chr12:29565376-29565406
  hypo
ttcctattcggccatcttggctcctcccca

SEQ ID NO: 83932 - DNA, 46 bp, Homo sapiens
  chr12:29889830-29889876
  hypo
tctcagaaatgccacacgtaaagcagttccacgaagagcagcacaa

SEQ ID NO: 83933 - DNA, 35 bp, Homo sapiens
  chr12:29890151-29890186
  hypo
aacatgcaaaacaggggtggccgggcatggtggct

SEQ ID NO: 83934 - DNA, 160 bp, Homo sapiens
  chr12:29945370-29945530
  hypo
atgctacatgcatacatcatgcgagcagcatgtgcgcattttcacagcacacatagaacatgctgcaacacgcgtgaagcatgcatgcagcatgcacactacatgatgcaagtagggcacaatgggtatggtacaagtcgtggcctgtgtagagcatgca

SEQ ID NO: 83935 - DNA, 43 bp, Homo sapiens
  chr12:30473846-30473889
  hypo
agagaaaagggacagtagggccgtgtggtgtccaaaggtggac

SEQ ID NO: 83936 - DNA, 22 bp, Homo sapiens
  chr12:30851645-30851667
  hypo
tttctctctctcgcgcgcgcgc

SEQ ID NO: 83937 - DNA, 132 bp, Homo sapiens
  chr12:30861077-30861209
  hypo
gggtgggggaggggagcgggcatgttaattacccacacgtgtgttgactcaaagcttttgtcattaaatctgtactaaataaatacaaatattgctggcttattggggcttcactctcgctgtactctctcg

SEQ ID NO: 83938 - DNA, 36 bp, Homo sapiens
  chr12:30950606-30950642
  hypo
caccgcgcccggcccggtaaactttttatcctcttc

SEQ ID NO: 83939 - DNA, 30 bp, Homo sapiens
  chr12:30976852-30976882
  hypo
atgcatggaaacaccgtgcacgcacctgct

SEQ ID NO: 83940 - DNA, 176 bp, Homo sapiens
  chr12:31255792-31255968
  hypo
cggagcagctggtgacgtgggtgatgacccgggaggtcctgacgtccacctgctgggctcttgtctcccccgcccaggtgtgtggtgatggtgggcatgcccttccccaacatcaggtctgcagagctgcaggagaagatggcctacttggatcaaaccctcgtgagtgaccccag

SEQ ID NO: 83941 - DNA, 31 bp, Homo sapiens
  chr12:31381945-31381976
  hypo
cttgggcaggctgtgtcgcatgtctaggctg

SEQ ID NO: 83942 - DNA, 31 bp, Homo sapiens; identical to SEQ ID NO: 26164
  chr12:31382410-31382441
  hypo

SEQ ID NO: 83943 - DNA, 31 bp, Homo sapiens
  chr12:31385501-31385532
  hypo
gccagacacaagcaggcggggaaagatgcag

SEQ ID NO: 83944 - DNA, 30 bp, Homo sapiens; identical to SEQ ID NO: 26165
  chr12:31432478-31432508
  hypo

SEQ ID NO: 83945 - DNA, 31 bp, Homo sapiens; identical to SEQ ID NO: 26166
  chr12:31791719-31791750
  hypo

SEQ ID NO: 83946 - DNA, 37 bp, Homo sapiens
  chr12:31881030-31881067
  hypo
gcagttctcccacctcggcctcccaagtttaatgtaa

SEQ ID NO: 83947 - DNA, 30 bp, Homo sapiens
  chr12:31973860-31973890
  hypo
agatgtctctgcccacgtaagtccacttag

SEQ ID NO: 83948 - DNA, 37 bp, Homo sapiens; identical to SEQ ID NO: 26167
  chr12:31986809-31986846
  hypo

SEQ ID NO: 83949 - DNA, 40 bp, Homo sapiens; identical to SEQ ID NO: 26168
  chr12:32140932-32140972
  hypo

SEQ ID NO: 83950 - DNA, 224 bp, Homo sapiens
  chr12:32142772-32142996
  hypo
aaaactctgtctcaaaaaaaaagtcagttagcattgaaacatgcatatgggaaaaacttgcatcaatgaagaaatatactcttaatcagaacaggacaaataacctaaagaggagggaatgaagagcagtgagaggcctgacagtgggaaaacaatgcctctcgggttggaaggcagaaagccaaaaatgcgaaagatacaaatgggtacgaagattggagtaa

SEQ ID NO: 83951 - DNA, 31 bp, Homo sapiens; identical to SEQ ID NO: 26170
  chr12:32155350-32155381
  hypo

SEQ ID NO: 83952 - DNA, 16 bp, Homo sapiens
  chr12:32178264-32178280
  hypo
agcacttcacagggtg

SEQ ID NO: 83953 - DNA, 31 bp, Homo sapiens; identical to SEQ ID NO: 26171
  chr12:32490527-32490558
  hypo

SEQ ID NO: 83954 - DNA, 30 bp, Homo sapiens
  chr12:32554194-32554224
  hypo
aaattccttatttttgtgagacggagtctc

SEQ ID NO: 83955 - DNA, 43 bp, Homo sapiens
  chr12:32597608-32597651
  hypo
gattataggtgtgagccactgcgcatggcctaagcaatgattt

SEQ ID NO: 83956 - DNA, 80 bp, Homo sapiens
  chr12:32831134-32831214
  hypo
taagatttttttcatgaacaccgccccccgctgctccgacccctgcttttttatttatttatttatttatttggtagaga

SEQ ID NO: 83957 - DNA, 301 bp, Homo sapiens; identical to SEQ ID NO: 26173
  chr12:32831273-32831574
  hypo

SEQ ID NO: 83958 - DNA, 194 bp, Homo sapiens; identical to SEQ ID NO: 26174
  chr12:32864282-32864476
  hypo

SEQ ID NO: 83959 - DNA, 44 bp, Homo sapiens
  chr12:32995443-32995487
  hypo
ggattacaggcatgagccattgcctggcccgcctcattatcttt

SEQ ID NO: 83960 - DNA, 683 bp, Homo sapiens; identical to SEQ ID NO: 8672
  chr12:33049652-33050335
  hypo

SEQ ID NO: 83961 - DNA, 30 bp, Homo sapiens; identical to SEQ ID NO: 26176
  chr12:33205799-33205829
  hypo

SEQ ID NO: 83962 - DNA, 438 bp, Homo sapiens; identical to SEQ ID NO: 49427
  chr12:33591574-33592012
  hypo

SEQ ID NO: 83963 - DNA, 196 bp, Homo sapiens; identical to SEQ ID NO: 8674
  chr12:33592057-33592253
  hypo

SEQ ID NO: 83964 - DNA, 563 bp, Homo sapiens; identical to SEQ ID NO: 8675
  chr12:33592284-33592847
  hypo

SEQ ID NO: 83965 - DNA, 101 bp, Homo sapiens; identical to SEQ ID NO: 8676
  chr12:33592932-33593033
  hypo

SEQ ID NO: 83966 - DNA, 683 bp, Homo sapiens; identical to SEQ ID NO: 26181
  chr12:34319318-34320001
  hypo

SEQ ID NO: 83967 - DNA, 394 bp, Homo sapiens; identical to SEQ ID NO: 26182
  chr12:34358286-34358680
  hypo

SEQ ID NO: 83968 - DNA, 355 bp, Homo sapiens
  chr12:34364380-34364735
  hypo
tccatggaaggaccccagcctcgctgcttttatccggtgctgctcacccccccagtctcggcgcagaggctgccgggaaggcactgtggtccgtgggagtaccccggcccaccgctttttccccttgcagcctcaacgtcccctttcaagcctggcgtcatgtttccttcccccggaggccttcttgacgctttggggtgccccccgtgggcgtgacacgcaccctgggaggaagccagggactgcacgacactcccaggcccagcgcaggcgctgccgggaaggcactgtcgtccgtgggaggactccggccggccgcgttttgccccatgccgcctcaaggtcttctttcaaa

SEQ ID NO: 83969 - DNA, 73 bp, Homo sapiens
  chr12:37971168-37971241
  hypo
ccctcccacctggtccatacccggtgagccccgagacccaaccttgtgcaccgccagtcttgttatcaacaaa

SEQ ID NO: 83970 - DNA, 30 bp, Homo sapiens
  chr12:38493268-38493298
  hypo
cagcccaatcaggcacgcagttggagagga

SEQ ID NO: 83971 - DNA, 43 bp, Homo sapiens
  chr12:38543127-38543170
  hypo
tgcagaaacatgtttggggaacggtttctgtgaacttggggag

SEQ ID NO: 83972 - DNA, 30 bp, Homo sapiens
  chr12:38544474-38544504
  hypo
catggtgaatgaaaccgttcttctcgttct

SEQ ID NO: 83973 - DNA, 30 bp, Homo sapiens
  chr12:38544920-38544950
  hypo
caggcccctcccactcgataagagatgccg

SEQ ID NO: 83974 - DNA, 30 bp, Homo sapiens
  chr12:38548047-38548077
  hypo
caagggtgggtgtcacgcccacggggggca

SEQ ID NO: 83975 - DNA, 726 bp, Homo sapiens; identical to SEQ ID NO: 26183
  chr12:38548365-38549091
  hypo

SEQ ID NO: 83976 - DNA, 420 bp, Homo sapiens
  chr12:38550956-38551376
  hypo
aaaggggacattgaggcagcacggggaataaggctgtgggttgaagtccttctaacaatgacgctgccttcctggcagcctctacgccctgcccaatagggttgtggagtcgcttgcttgcacccagggtgcgtgtcgcaccccagggggcaccccaaagcgccaagaaggcctccgggggaagggagtagaacgccaggcgtgaaaggtgacgttgaggcagcacgagggaaaaagcagcaggcagcgatcgtcacacggacgacagtgccttcccggcagcccctgcgccagactcggggttgtcgtggagttcctgacttgaacccagggtgcgtgtcgcgcccacggggggacaccccaaagcggcaagaatgccccctgggaagggaacaggacgccaggcttgaaaggggactt

SEQ ID NO: 83977 - DNA, 217 bp, Homo sapiens
  chr12:38551793-38552010
  hypo
gggtcgtcccatggacgacagtgccttcccagcagcccctgcgtcaggcccggggtggtcgtggagtccctggcttgcaccgagggtgcgggtcgcacccatgggggcaccccaaagtggcaagaaggccgccgggcgaacgccacagaaggccaggctttaatggggatgctgaggcagcacagagagaaaagcggctagtcgggttcctcctacg

SEQ ID NO: 83978 - DNA, 1387 bp, Homo sapiens
  chr12:38553242-38554629
  hypo
ccctggtttacacccagggtgcgtgcctcgcccacgggtggcaccccaaagcagcaagaaagccccggggggggaagaacaggatgccagacttgaaaggggacgttgaggcagcccaggaaaaaaaggggcgaggctggggtcctttcacggatgacagtgccttccctacagcccctatgccagtcccgggagggtcgcggagtccctgtcttgcacacaatgtgcgtgtctcgcccacggggggcaccccaaagtggcaagaagtcccccgcgggaaggcaacaggacgccaggcttgaatggggacgtttaggtagcctggagaaaaaagcagcgaggctggggtgatcccacgaatgacagtgccttaccggcagcccctttgccgggcatgcgggggttgttgattccctggcttgcacccagggtgagtgtcttgcccacggcgggcaccacaaagcagcaagaaggttcccgggggaaagggacagcacgtcagtcttgaagggggaagttgaggcagccccggggaaaaaaagcggggatgctggggtcctctcacggacgacactgccttcccagcagcctctgcagtgggcccgggagcgtcctggagtccctgtcttgcaccccgggtgcgtgtctcacccacggggagcaccacaaagcggcaagaaggccactgggggaagggtacaggacgccagggttgaaggggatagtggagacagtccaaggaaaaaagtggcgggatggtgtcgtcccaaggatggccacccctgcgccgggccagggatggtcgcggagtccctggcttgcacccaggttgtgtgtctcgcccacagggggcaccccaaagcagcacgaaggcctccaggggaagggaagaggacgccaggcttggaaggtgacgttgaggcagcagggggtaaaaagtggcgggccgggccctcccacggatgacagtgccttcccggaagccgctgcgcagggcccggcgtgtttgtggagtctctggcttgcacccagaatcgtgcggcgcccacgacgggcaccccaaagcggcaagatatcccccgctggaagggaacaggatgccaggcttgaaaggagaagttgagccagtccggggaaaaaaatcccatggagaacagtgtcttcccggcagtctctttgccgggttcggtcgtggagtccctggcttgcacccagagtgcgtgtctttaaagcggggcatcctgttaccattctccgggggaattcttgccgccatggggtgccccctgagggcgagacacgcaccctgtgtgcaagacagggactccacgacccccccaaccacgagtctgccgcaggggctgccgggaaggcactgtcctccctg

SEQ ID NO: 83979 - DNA, 30 bp, Homo sapiens
  chr12:38555543-38555573
  hypo
aggctgccgcgctgcgccttccgccggcct

SEQ ID NO: 83980 - DNA, 205 bp, Homo sapiens; identical to SEQ ID NO: 26186
  chr12:38595390-38595595
  hypo

SEQ ID NO: 83981 - DNA, 30 bp, Homo sapiens
  chr12:39727015-39727045
  hypo
cttcagttttgcgacgtagaaccacttctt

SEQ ID NO: 83982 - DNA, 20 bp, Homo sapiens
  chr12:40341755-40341775
  hypo
ctggccgagaatttcttgaa

SEQ ID NO: 83983 - DNA, 781 bp, Homo sapiens; identical to SEQ ID NO: 49439
  chr12:40618267-40619048
  hypo

SEQ ID NO: 83984 - DNA, 44 bp, Homo sapiens; identical to SEQ ID NO: 49442
  chr12:41582162-41582206
  hypo

SEQ ID NO: 83985 - DNA, 597 bp, Homo sapiens; identical to SEQ ID NO: 49443
  chr12:41582398-41582995
  hypo

SEQ ID NO: 83986 - DNA, 30 bp, Homo sapiens; identical to SEQ ID NO: 8688
  chr12:41699787-41699817
  hypo

SEQ ID NO: 83987 - DNA, 22 bp, Homo sapiens
  chr12:42493376-42493398
  hypo
aggcacagcgactcacgcctgt

SEQ ID NO: 83988 - DNA, 33 bp, Homo sapiens
  chr12:42504944-42504977
  hypo
ccagggaggagccaagatggccgaataggaaca

SEQ ID NO: 83989 - DNA, 29 bp, Homo sapiens
  chr12:42608361-42608390
  hypo
ccatgcccggcctcctcttatccttctgc

SEQ ID NO: 83990 - DNA, 31 bp, Homo sapiens; identical to SEQ ID NO: 26193
  chr12:42633450-42633481
  hypo

SEQ ID NO: 83991 - DNA, 41 bp, Homo sapiens
  chr12:42758693-42758734
  hypo
gggcgacagagggagactccgccttaaaaaaacaaacaaag

SEQ ID NO: 83992 - DNA, 30 bp, Homo sapiens; identical to SEQ ID NO: 26194
  chr12:42842694-42842724
  hypo

SEQ ID NO: 83993 - DNA, 43 bp, Homo sapiens
  chr12:42847700-42847743
  hypo
aaacttggctgggtgtggtcacgcctgtaatcccagcactttg

SEQ ID NO: 83994 - DNA, 42 bp, Homo sapiens
  chr12:42848887-42848929
  hypo
aatagaaagcagagtataggccgggtgcggtggctcatgcct

SEQ ID NO: 83995 - DNA, 79 bp, Homo sapiens
  chr12:42854065-42854144
  hypo
actttctacttctccggcggcggtggtgatgagacctggatcccctctcttcaaaattgtagacgcgtctccgagtcct

SEQ ID NO: 83996 - DNA, 90 bp, Homo sapiens; identical to SEQ ID NO: 26195
  chr12:42857518-42857608
  hypo

SEQ ID NO: 83997 - DNA, 31 bp, Homo sapiens
  chr12:43834852-43834883
  hypo
gggagactccgtctccaaaaaaaaaaaacaa

SEQ ID NO: 83998 - DNA, 34 bp, Homo sapiens
  chr12:44214604-44214638
  hypo
ctataagaagcataaagtggccgggcgcgttggc

SEQ ID NO: 83999 - DNA, 28 bp, Homo sapiens
  chr12:44508030-44508058
  hypo
ctcctccgtaccaaatttaaataagttt

SEQ ID NO: 84000 - DNA, 79 bp, Homo sapiens
  chr12:45344681-45344760
  hypo
agaattgcaaggaatactaaacggttcataacagaattcagaccttattagaaatgtgtcggaggaggagccaagatgg

SEQ ID NO: 84001 - DNA, 569 bp, Homo sapiens; identical to SEQ ID NO: 8692
  chr12:45444112-45444681
  hypo

SEQ ID NO: 84002 - DNA, 692 bp, Homo sapiens; identical to SEQ ID NO: 8693
  chr12:45444714-45445406
  hypo

SEQ ID NO: 84003 - DNA, 30 bp, Homo sapiens
  chr12:45826929-45826959
  hypo
atcgcataggatacccgcttctagttagct

SEQ ID NO: 84004 - DNA, 134 bp, Homo sapiens
  chr12:45862283-45862417
  hypo
caaaaagcactgtcataaatccgaagtccaactgggcaagcaattccacgattcagtctgccccagcacacatcttcttaggttcttaagattcgagtccaggattcatcgccgatcatgttgcaggtgaatta

SEQ ID NO: 84005 - DNA, 30 bp, Homo sapiens
  chr12:46361139-46361169
  hypo
taatggccaggtgccggtggctcacgcaag

SEQ ID NO: 84006 - DNA, 37 bp, Homo sapiens
  chr12:46610345-46610382
  hypo
aatcctggccaggcgcggtggctcacacctgtaatcc

SEQ ID NO: 84007 - DNA, 37 bp, Homo sapiens
  chr12:46610621-46610658
  hypo
gacagagtgagatgccgtttcaaaaaaaaaaaatcct

SEQ ID NO: 84008 - DNA, 43 bp, Homo sapiens
  chr12:46634309-46634352
  hypo
agttattttaatgtgtcagatcgcagagcacacacatagctgg

SEQ ID NO: 84009 - DNA, 40 bp, Homo sapiens
  chr12:47603244-47603284
  hypo
ggcaacagagcaagatttcgtctcaaaaaaaaaggtaata

SEQ ID NO: 84010 - DNA, 22 bp, Homo sapiens
  chr12:47627206-47627228
  hypo
cgccacaatttttaaattaata

SEQ ID NO: 84011 - DNA, 1091 bp, Homo sapiens
  chr12:47628717-47629808
  hypo
ctacccccaacctgcactgggcgctccgcccagaggtgagtccctcccagcccttctctccttctgtcctagccatccgcagagccatcctgtgcaaaggaaggagctaggctgtgcgccctgggcgtcatgatccttctgcgggcctccgaagtgcggcagctgcttcacaataagttcgtggtcatcctgggggactctgtgcatagggcagtatacaaggacctggtgcttctgctgcagaaggaccgcctgctcactcccgggcagcttagagcaaggggggagctgaacttcgaacaagatgagctggtggacggaggccagcggggccacatgcacaacggccttaactaccgtgaggtccgcgagttccgctccgaccaccatctggtacgtttttacttcctcacccgcgtgtactccgattacctccagaccatcttgaaagagctgcagtcgggcgagcacgcccccgacctggtcatcatgaattcctgcctctgggacatctccaggtatggtccgaactcctggagaagctacctggagaacctggagaacctgttccagtgcctgggccaggtgctgcccgagtcttgcctcctggtgtggaacacggccatgcctgtgggcgaggaagtcaccgggggttttcttccgcccaagctccggcggcagaaggccaccttcctgaaaaacgaagtggtcaaagccaacttccacagcgccaccgaggcacgtaaacataacttcgatgtactggacttgcatttccacttccgccacgcgagggagaacctgcactgggacggggtgcactggaatggacgtgtgcaccgctgcctctcccagctgctgctggcccacgtggccgacgcctggggtgtggagctgccccaccgccaccccgtgggcgagtggatcaagaagaaaaaacctggcccgagagtcgaagggccgccccaggccaacagaaatcacccggccttacctctgtccccacccttaccttcccccacataccgccccctgcttgggttcccaccccagcgcttgccgctgctcccgctcctgtccccacagcctcc

SEQ ID NO: 84012 - DNA, 30 bp, Homo sapiens; identical to SEQ ID NO: 26199
  chr12:47671343-47671373
  hypo

SEQ ID NO: 84013 - DNA, 30 bp, Homo sapiens; identical to SEQ ID NO: 26200
  chr12:48174654-48174684
  hypo

SEQ ID NO: 84014 - DNA, 192 bp, Homo sapiens
  chr12:48191882-48192074
  hypo
ggtgttacctgtagggaatgccggggctgttgggatggactgttctttctagggccgcctgctgttttttcagaatcacctccgctagcttctgcttgaccacgctgctggctacagcacctgtaggggcagagtcaggagggggctggaggtgggtggacaggcggcctcgtggcactacctggccactgc

SEQ ID NO: 84015 - DNA, 29 bp, Homo sapiens
  chr12:48236541-48236570
  hypo
accgcgccgggcctgtcctggcccacttc

SEQ ID NO: 84016 - DNA, 30 bp, Homo sapiens
  chr12:48237737-48237767
  hypo
ggggaggacgaggtcggcaggtgcttttct

SEQ ID NO: 84017 - DNA, 127 bp, Homo sapiens; identical to SEQ ID NO: 49483
  chr12:48299274-48299401
  hypo

SEQ ID NO: 84018 - DNA, 132 bp, Homo sapiens
  chr12:48347938-48348070
  hypo
cacttctcataactgcgacggtgagacacgcctgggaagccaagcccaggtgagaagtgatggctgtctcctcaggaatgtgctgcccaattaacactgcctcccagatggctcctgcggaggctaggacta

SEQ ID NO: 84019 - DNA, 1199 bp, Homo sapiens; identical to SEQ ID NO: 49486
  chr12:48397546-48398745
  hypo

SEQ ID NO: 84020 - DNA, 1397 bp, Homo sapiens; identical to SEQ ID NO: 49489
  chr12:48576841-48578238
  hypo

SEQ ID NO: 84021 - DNA, 38 bp, Homo sapiens
  chr12:48590826-48590864
  hypo
agaaaagaaaactgaccgcaaaatgggctcttattttg

SEQ ID NO: 84022 - DNA, 30 bp, Homo sapiens
  chr12:48722685-48722715
  hypo
ttcatggactaccccgtgtactttctacag

SEQ ID NO: 84023 - DNA, 30 bp, Homo sapiens; identical to SEQ ID NO: 26204
  chr12:48722975-48723005
  hypo

SEQ ID NO: 84024 - DNA, 175 bp, Homo sapiens
  chr12:48745082-48745257
  hypo
gaccgaggccgagagcgatttctccagacaacagtctggaattcctcaaggagcgtaccctctagttttcacgataggataaagggcttgagagagcactgaggaggagtcacttattctgcctgaggggaagtcaggttgctatctgaagttggccttgcggctgctgtcccat

SEQ ID NO: 84025 - DNA, 77 bp, Homo sapiens
  chr12:48838929-48839006
  hypo
tgggcgacagagcgagactccgtctcttaaaaaaaaaaattaatacattgatgaacggatgagtatgtgaatgaata

SEQ ID NO: 84026 - DNA, 30 bp, Homo sapiens
  chr12:48921767-48921797
  hypo
ccttcaccgaaggccgcagggagcccggac

SEQ ID NO: 84027 - DNA, 30 bp, Homo sapiens
  chr12:49062841-49062871
  hypo
ataaataaagtgaacgtatataccttaaag

SEQ ID NO: 84028 - DNA, 139 bp, Homo sapiens; identical to SEQ ID NO: 26206
  chr12:49065583-49065722
  hypo

SEQ ID NO: 84029 - DNA, 31 bp, Homo sapiens
  chr12:49150047-49150078
  hypo
ttccaggaaatggcctcgttgctataacctg

SEQ ID NO: 84030 - DNA, 336 bp, Homo sapiens; identical to SEQ ID NO: 8711
  chr12:49182446-49182782
  hypo

SEQ ID NO: 84031 - DNA, 327 bp, Homo sapiens; identical to SEQ ID NO: 49494
  chr12:49183003-49183330
  hypo

SEQ ID NO: 84032 - DNA, 39 bp, Homo sapiens
  chr12:49191467-49191506
  hypo
gagccaccgtgcccggccgggtaatgttattttgacact

SEQ ID NO: 84033 - DNA, 482 bp, Homo sapiens; identical to SEQ ID NO: 49497
  chr12:49351241-49351723
  hypo

SEQ ID NO: 84034 - DNA, 473 bp, Homo sapiens; identical to SEQ ID NO: 49498
  chr12:49363693-49364166
  hypo

SEQ ID NO: 84035 - DNA, 201 bp, Homo sapiens; identical to SEQ ID NO: 49500
  chr12:49371613-49371814
  hypo

SEQ ID NO: 84036 - DNA, 965 bp, Homo sapiens; identical to SEQ ID NO: 49501
  chr12:49374061-49375026
  hypo

SEQ ID NO: 84037 - DNA, 455 bp, Homo sapiens; identical to SEQ ID NO: 8720
  chr12:49375115-49375570
  hypo

SEQ ID NO: 84038 - DNA, 177 bp, Homo sapiens; identical to SEQ ID NO: 26214
  chr12:49416382-49416559
  hypo

SEQ ID NO: 84039 - DNA, 251 bp, Homo sapiens; identical to SEQ ID NO: 26215
  chr12:49422760-49423011
  hypo

SEQ ID NO: 84040 - DNA, 49 bp, Homo sapiens; identical to SEQ ID NO: 26216
  chr12:49436024-49436073
  hypo

SEQ ID NO: 84041 - DNA, 232 bp, Homo sapiens
  chr12:49443422-49443654
  hypo
gggctaactctaatcacatcccgcagctagatagcccctcacctgtttgatgcgggaacgggctggggagctgcgccgccgccccttctccccctcagctttgcctccgctgatagctgtcccagcatcgcacaatagtgagtcatcagtctctggcagtgagtcagtacagagccgtagggagccctcatctcgggctggactaacatccgtagagacccccaactccatg

SEQ ID NO: 84042 - DNA, 30 bp, Homo sapiens; identical to SEQ ID NO: 26217
  chr12:49444142-49444172
  hypo

SEQ ID NO: 84043 - DNA, 45 bp, Homo sapiens
  chr12:49520523-49520568
  hypo
gggattacaggcatgagccactgcgcctggcctcttctttttaaa

SEQ ID NO: 84044 - DNA, 31 bp, Homo sapiens
  chr12:49566959-49566990
  hypo
agggttagctcctcttcgtcttattacattg

SEQ ID NO: 84045 - DNA, 19 bp, Homo sapiens
  chr12:49575837-49575856
  hypo
actccgtctcaaaaaaaaa

SEQ ID NO: 84046 - DNA, 15 bp, Homo sapiens
  chr12:49596189-49596204
  hypo
tcagacagccgggcg

SEQ ID NO: 84047 - DNA, 155 bp, Homo sapiens; identical to SEQ ID NO: 26218
  chr12:49620905-49621060
  hypo

SEQ ID NO: 84048 - DNA, 103 bp, Homo sapiens
  chr12:49657606-49657709
  hypo
gaagggtttaattcctcggagctctactttcctcatctgtaaactagggataataattcatagagtttgtcatatggatgaaatgtgatcatgtgatatgaaa

SEQ ID NO: 84049 - DNA, 302 bp, Homo sapiens; identical to SEQ ID NO: 8732
  chr12:49761540-49761842
  hypo

SEQ ID NO: 84050 - DNA, 461 bp, Homo sapiens; identical to SEQ ID NO: 49529
  chr12:49931602-49932063
  hypo

SEQ ID NO: 84051 - DNA, 94 bp, Homo sapiens; identical to SEQ ID NO: 49530
  chr12:49933164-49933258
  hypo

SEQ ID NO: 84052 - DNA, 215 bp, Homo sapiens; identical to SEQ ID NO: 49531
  chr12:49933289-49933504
  hypo

SEQ ID NO: 84053 - DNA, 30 bp, Homo sapiens; identical to SEQ ID NO: 26220
  chr12:49934891-49934921
  hypo

SEQ ID NO: 84054 - DNA, 248 bp, Homo sapiens
  chr12:49935482-49935730
  hypo
agtctctcacaaggacatcagcgaaaccaagaaccgagggggccccgacagatggaaggagacaggtaggtgcatgtaggtgctgtggtcggggtattgggtgccgcaggcccgggcggggccttggcacccagtctgagtacgggggtcccccatgcacctgcattcatttcactcccactcaggctgcctgagaggcctgtgctgctctcatctccacattcctcggtatgggaatattttttcca

SEQ ID NO: 84055 - DNA, 30 bp, Homo sapiens
  chr12:49943989-49944019
  hypo
ggcccgccttctgcacgccgggcgagtacc

SEQ ID NO: 84056 - DNA, 103 bp, Homo sapiens; identical to SEQ ID NO: 26222
  chr12:49989770-49989873
  hypo

SEQ ID NO: 84057 - DNA, 30 bp, Homo sapiens
  chr12:50024314-50024344
  hypo
tctccctcaacagtcggttcccgattctgg

SEQ ID NO: 84058 - DNA, 261 bp, Homo sapiens
  chr12:50037797-50038058
  hypo
ggggccctaggccagtcagcacgctggtcaagcttccacggcccttagtgcaggctaagggtgaactgtgcctttgctccaacagacaggctgggacacgtcagaaagtgagctgagtgagggtgagctggagaggcggcggcggacactcctacagcagctggatgatcaccagtgacccaatgagctgttctctgcctcgggtctgtgtgaggccatggctcctgggccaccctcaccgtctgcctcagacttcttcct

SEQ ID NO: 84059 - DNA, 30 bp, Homo sapiens
  chr12:50045903-50045933
  hypo
tccaaatgacatcgacgctgaaaggcctcc

SEQ ID NO: 84060 - DNA, 183 bp, Homo sapiens
  chr12:50185745-50185928
  hypo
ggggtgcggctacccccgaaaggtgggccctggggcgtaggggacgggcggctgggctcctggcttcgcttccggtccacgggcagggcctgggaaaggaggggcagctcgggaggaagctcctctccacctttcggcccagcctcagaggcactgagctctgaggggcgtctgtgcacctga

SEQ ID NO: 84061 - DNA, 30 bp, Homo sapiens
  chr12:50188838-50188868
  hypo
gtgcggcggttcagcgctggcagcttgctc

SEQ ID NO: 84062 - DNA, 43 bp, Homo sapiens
  chr12:50237427-50237470
  hypo
agctccttgagaggcaaggaccgtgccttaagagccagcactt

SEQ ID NO: 84063 - DNA, 39 bp, Homo sapiens
  chr12:50262262-50262301
  hypo
ggggtttcaggaaagacgggaggccgggtggcactgagg

SEQ ID NO: 84064 - DNA, 31 bp, Homo sapiens
  chr12:50262514-50262545
  hypo
acggacatgagcagagcgctgtctctggagg

SEQ ID NO: 84065 - DNA, 194 bp, Homo sapiens
  chr12:50269010-50269204
  hypo
tcaccataagcctctgcggcaggtgtcgcactatcagctccaccatttgctaaggacactgaggcagagacagtgtaagtgacttgcccgcatcacccagcccagggacagctagagggtgagcttgggctttggggagtctctggagaagagactaccagccatatgtccaggtgcgccgactgggctgcagg

SEQ ID NO: 84066 - DNA, 21 bp, Homo sapiens
  chr12:50270257-50270278
  hypo
aaagctgggctgggtgcggtg

SEQ ID NO: 84067 - DNA, 31 bp, Homo sapiens; identical to SEQ ID NO: 26224
  chr12:50290502-50290533
  hypo

SEQ ID NO: 84068 - DNA, 185 bp, Homo sapiens
  chr12:50296426-50296611
  hypo
gagttctccatgtttacggaactgaacactccccaggcctcccactgcctcccactccccagcccccctcatcacccggatctgaaggatcatgtccacctaaatcgagttcagcctccaccctgccactccgccccccagagcctcctggaccctaatgcccaggcccccgacacacatacggc

SEQ ID NO: 84069 - DNA, 98 bp, Homo sapiens; identical to SEQ ID NO: 26225
  chr12:50322850-50322948
  hypo

SEQ ID NO: 84070 - DNA, 308 bp, Homo sapiens
  chr12:50366184-50366492
  hypo
atggccttgtgtgatctgacgcggtttgagtcgctgtggaataaaccccttctccacccgcccctctgcaaccccacaggccacagtgtccacagcgtccttggtaaagtcgactgtattcacatctgcattctgtgagtgcgggtataggtgggagtggaggagggaacttactttctgggtttacgggcacggtgtggtgtcagcccatttggaagcaaagcctagatatggagggggccagacgaacaggacctgggaatgcacaggaccccctgaagcaggccggggatctgagtgatcttgct

SEQ ID NO: 84071 - DNA, 31 bp, Homo sapiens
  chr12:50370399-50370430
  hypo
aacattttctcaggctcgtagagaggtggga

SEQ ID NO: 84072 - DNA, 234 bp, Homo sapiens; identical to SEQ ID NO: 26227
  chr12:50400183-50400417
  hypo

SEQ ID NO: 84073 - DNA, 22 bp, Homo sapiens
  chr12:50422260-50422282
  hypo
tgcaattatggctgggcgaggt

SEQ ID NO: 84074 - DNA, 27 bp, Homo sapiens
  chr12:50432783-50432810
  hypo
tgagacagagtcttgctctgtcgccca

SEQ ID NO: 84075 - DNA, 31 bp, Homo sapiens; identical to SEQ ID NO: 26229
  chr12:50470988-50471019
  hypo

SEQ ID NO: 84076 - DNA, 31 bp, Homo sapiens
  chr12:50472154-50472185
  hypo
tttggggagaagtccccgcactcccccagct

SEQ ID NO: 84077 - DNA, 30 bp, Homo sapiens; identical to SEQ ID NO: 26230
  chr12:50476154-50476184
  hypo

SEQ ID NO: 84078 - DNA, 47 bp, Homo sapiens; identical to SEQ ID NO: 26231
  chr12:50484388-50484435
  hypo

SEQ ID NO: 84079 - DNA, 31 bp, Homo sapiens
  chr12:50499947-50499978
  hypo
atggggcaggacctgtcgggagggacacaga

SEQ ID NO: 84080 - DNA, 23 bp, Homo sapiens
  chr12:50558873-50558896
  hypo
ctccaggatgactaactacaacg

SEQ ID NO: 84081 - DNA, 22 bp, Homo sapiens
  chr12:50559195-50559217
  hypo
cgtctcaaaaaaaaaagaaaaa

SEQ ID NO: 84082 - DNA, 173 bp, Homo sapiens
  chr12:50602885-50603058
  hypo
gtgggccactgcatccggcctgattgggtctatttttaataaaaactaaaacaagctggaacaacactatccgtgctacatcacacacaggtcaggcatactttcatgaattattatacatccatatgactcacacagctcaacatactcttgctctaggagcagccgctatc

SEQ ID NO: 84083 - DNA, 19 bp, Homo sapiens
  chr12:50609261-50609280
  hypo
tatttttctttgaggcagt

SEQ ID NO: 84084 - DNA, 23 bp, Homo sapiens
  chr12:50672189-50672212
  hypo
gcgagactccatctcaaaaatca

SEQ ID NO: 84085 - DNA, 22 bp, Homo sapiens
  chr12:50676322-50676344
  hypo
tttttgtagagacaagggtctc

SEQ ID NO: 84086 - DNA, 43 bp, Homo sapiens; identical to SEQ ID NO: 49551
  chr12:50677370-50677413
  hypo

SEQ ID NO: 84087 - DNA, 11 bp, Homo sapiens
  chr12:50786061-50786072
  hypo
gtttgtttgtt

SEQ ID NO: 84088 - DNA, 30 bp, Homo sapiens; identical to SEQ ID NO: 26235
  chr12:50790623-50790653
  hypo

SEQ ID NO: 84089 - DNA, 31 bp, Homo sapiens
  chr12:51041858-51041889
  hypo
agcctaggcgacagatcgatgctccaacact

SEQ ID NO: 84090 - DNA, 30 bp, Homo sapiens; identical to SEQ ID NO: 49553
  chr12:51045433-51045463
  hypo

SEQ ID NO: 84091 - DNA, 137 bp, Homo sapiens; identical to SEQ ID NO: 26237
  chr12:51116976-51117113
  hypo

SEQ ID NO: 84092 - DNA, 41 bp, Homo sapiens; identical to SEQ ID NO: 26238
  chr12:51148429-51148470
  hypo

SEQ ID NO: 84093 - DNA, 30 bp, Homo sapiens; identical to SEQ ID NO: 49554
  chr12:51155647-51155677
  hypo

SEQ ID NO: 84094 - DNA, 21 bp, Homo sapiens
  chr12:51207583-51207604
  hypo
gagactccatctcaaaaaaga

SEQ ID NO: 84095 - DNA, 113 bp, Homo sapiens
  chr12:51346408-51346521
  hypo
cacaggtgcagcaacgtcacgtctttcccctgggcgcgtgtgcagctcgaggctttgcaggaggcgcacctgcgatggccttaccgccaggtgagcccggcgggctctcatcg

SEQ ID NO: 84096 - DNA, 182 bp, Homo sapiens
  chr12:51346932-51347114
  hypo
tggaaattgcacatcgtgtcctggccttacaacaaacacctgttctgatctacagcctcttgctgaaggaacaacaggagacagacagcaggtggcggggtgtgccacaggtattgtgcttcttacgcttaagttttctgatgaagtctcattcataggatgaagccgctgtatttgaattc

SEQ ID NO: 84097 - DNA, 30 bp, Homo sapiens; identical to SEQ ID NO: 26241
  chr12:51376078-51376108
  hypo

SEQ ID NO: 84098 - DNA, 121 bp, Homo sapiens
  chr12:51407527-51407648
  hypo
aagaaaaagaagacacagaaatgtctcgtctacatctgaggaagatttttatccagaataggcaaaacaggccttaaaagtttttatttttttttgagatggagtctcactccgtcactca

SEQ ID NO: 84099 - DNA, 30 bp, Homo sapiens
  chr12:51408356-51408386
  hypo
ggaggcggtggctcacgtctctaatcccac

SEQ ID NO: 84100 - DNA, 571 bp, Homo sapiens
  chr12:51421109-51421680
  hypo
aaaccctgtctcaaaaaaaaaggatagccacctggaaggaacatttcctcgcgcccccagagccacatcatagtatctgctgccccaccaagagcaccccacacctgggaggaaccgagaaacatcagctagtgcagccagtttgaccgccttaggtgtcctcccaagcctccgtagtgaattgttttcctcctcgcccagctgactcgattctccccagacttcatcctacctacccaaaagcaatcccactctatcgccagtttcagcctcacaccgtatcttttgctctgaagatgagactgccaaactggtgaagagggaataaatggcctaacaaattaccgtaattttctgcaatgtcgtttacagccaccaaaaacattagatcctcccgccaccctcactccccgacccctcgcactgcttacagcattaaaggtaattgagcttctttattcacgtaaaaacagctaggagaaaatttcattagtaagagagaccaagaaatgaggaaaggagcgtgaactgcaaagagaaaaatccaaataaagtgcgaagtaaaaacaaa

SEQ ID NO: 84101 - DNA, 18 bp, Homo sapiens
  chr12:51441350-51441368
  hypo
gggcgacagagcaaaact

SEQ ID NO: 84102 - DNA, 101 bp, Homo sapiens
  chr12:51478094-51478195
  hypo
agcgagactccgtctcaaaaaaaaaaaaaaaaaaatcttctcaactttgcaaactaatttatttatttaaatagaaaaggggttttcgccatgttgccccg

SEQ ID NO: 84103 - DNA, 152 bp, Homo sapiens; identical to SEQ ID NO: 26243
  chr12:51479054-51479206
  hypo

SEQ ID NO: 84104 - DNA, 30 bp, Homo sapiens
  chr12:51488901-51488931
  hypo
cacacacagtcagacgagtcaggttcttgc

SEQ ID NO: 84105 - DNA, 30 bp, Homo sapiens
  chr12:51518404-51518434
  hypo
ggtaggtcatgttccgagagcctccgcggc

SEQ ID NO: 84106 - DNA, 102 bp, Homo sapiens
  chr12:51565446-51565548
  hypo
caccgcacccggccgaaaggagatttttcatctgttatcaacaactggcttgatacataaagatccagaagcatcttaagttttcttcgtcactttttcatt

SEQ ID NO: 84107 - DNA, 30 bp, Homo sapiens
  chr12:51585364-51585394
  hypo
gcagccttactcaccggcagatggctgact

SEQ ID NO: 84108 - DNA, 112 bp, Homo sapiens
  chr12:51592044-51592156
  hypo
ccttcccaggaggccggtcatggggtgagttctggcgtggggggagaggggcagtctcagacagctggccgaagtacggcaggcctgcggggccagcgtggcgtcacggcct

SEQ ID NO: 84109 - DNA, 30 bp, Homo sapiens; identical to SEQ ID NO: 49560
  chr12:51610961-51610991
  hypo

SEQ ID NO: 84110 - DNA, 121 bp, Homo sapiens
  chr12:51615466-51615587
  hypo
caaaaacaaaaaacaaagtatattacttaaaaaatttttttttctttttttgcctgggcatgccaaagaccgcacctggcttttgttgttgttgttgttgagacagagtctcactctttag

SEQ ID NO: 84111 - DNA, 30 bp, Homo sapiens; identical to SEQ ID NO: 26245
  chr12:51756227-51756257
  hypo

SEQ ID NO: 84112 - DNA, 30 bp, Homo sapiens
  chr12:51795275-51795305
  hypo
ccgatggcgtgccagcgtgctggcatctgc

SEQ ID NO: 84113 - DNA, 470 bp, Homo sapiens; identical to SEQ ID NO: 49565
  chr12:51818411-51818881
  hypo

SEQ ID NO: 84114 - DNA, 9 bp, Homo sapiens
  chr12:51873771-51873780
  hypo
tcagatgga

SEQ ID NO: 84115 - DNA, 25 bp, Homo sapiens
  chr12:51894479-51894504
  hypo
tttttttttgagatggagtctcgct

SEQ ID NO: 84116 - DNA, 31 bp, Homo sapiens
  chr12:51919653-51919684
  hypo
cactggtttctatggccgtgtcatgtcatgg

SEQ ID NO: 84117 - DNA, 30 bp, Homo sapiens; identical to SEQ ID NO: 26247
  chr12:52231194-52231224
  hypo

SEQ ID NO: 84118 - DNA, 30 bp, Homo sapiens; identical to SEQ ID NO: 26248
  chr12:52283209-52283239
  hypo

SEQ ID NO: 84119 - DNA, 30 bp, Homo sapiens; identical to SEQ ID NO: 8750
  chr12:52294236-52294266
  hypo

SEQ ID NO: 84120 - DNA, 38 bp, Homo sapiens; identical to SEQ ID NO: 49573
  chr12:52345763-52345801
  hypo

SEQ ID NO: 84121 - DNA, 128 bp, Homo sapiens
  chr12:52387921-52388049
  hypo
tggcagcgagaactacgcacagctgccgcgttgagcgtacgatggaggcctacctctcgtttctgcccagccctctgtggccaggagccctggcccgcaagagggacagagcccgggagagactcgct

SEQ ID NO: 84122 - DNA, 107 bp, Homo sapiens
  chr12:52388408-52388515
  hypo
ggagacggaatctgccgctttgtctgtccagccgtgtgtgcatgtgccgaggtgcgtcccccgttgtgcctggttcgtgccatgcccttacacgtgcgtgtgagtgt

SEQ ID NO: 84123 - DNA, 105 bp, Homo sapiens; identical to SEQ ID NO: 49574
  chr12:52400383-52400488
  hypo

SEQ ID NO: 84124 - DNA, 1009 bp, Homo sapiens; identical to SEQ ID NO: 49575
  chr12:52400516-52401525
  hypo

SEQ ID NO: 84125 - DNA, 40 bp, Homo sapiens
  chr12:52462470-52462510
  hypo
accttaagaatgcctcctggccggtcgcggtggctcacgc

SEQ ID NO: 84126 - DNA, 30 bp, Homo sapiens
  chr12:52467433-52467463
  hypo
gatgaactgtcgctcggaggtgctggaggt

SEQ ID NO: 84127 - DNA, 57 bp, Homo sapiens
  chr12:52477807-52477864
  hypo
gtatttactgagtgaccgctctgtgccaggcatactctgggacgtggggatgaggag

SEQ ID NO: 84128 - DNA, 180 bp, Homo sapiens
  chr12:52490991-52491171
  hypo
cccagggggtgtatagtatcccgacctgtgataggctccgccacgatgcggggagtactatcacccccctctctttccctggatattacgatacacatcgcaggggggcgggcgacccccacgatgcggggagaaatatcacccccccccggatattacgagccacattgcaggggggtg

SEQ ID NO: 84129 - DNA, 31 bp, Homo sapiens; identical to SEQ ID NO: 26251
  chr12:52539825-52539856
  hypo

SEQ ID NO: 84130 - DNA, 30 bp, Homo sapiens
  chr12:52551206-52551236
  hypo
ggcctggacacgcaacgtcaccctggaggt

SEQ ID NO: 84131 - DNA, 31 bp, Homo sapiens
  chr12:52566972-52567003
  hypo
aggggcagctcagtgccgctcccagcacttg

SEQ ID NO: 84132 - DNA, 31 bp, Homo sapiens
  chr12:52567343-52567374
  hypo
tgtccaggctgcttctcgtgccctgtgtggt

SEQ ID NO: 84133 - DNA, 31 bp, Homo sapiens
  chr12:52567612-52567643
  hypo
acagtcactttgtccccggggtgagcggaga

SEQ ID NO: 84134 - DNA, 31 bp, Homo sapiens
  chr12:52635223-52635254
  hypo
ctaagtcctgatgtcccgtctggtccctaca

SEQ ID NO: 84135 - DNA, 31 bp, Homo sapiens
  chr12:52742300-52742331
  hypo
gggggcgccgagaccccgctccatacacctg

SEQ ID NO: 84136 - DNA, 60 bp, Homo sapiens
  chr12:52750115-52750175
  hypo
agggcgggacgcggggcgtctcgggcaggggtgaaggagggcagccggggcccaggcgtg

SEQ ID NO: 84137 - DNA, 30 bp, Homo sapiens
  chr12:52750493-52750523
  hypo
gcctcaacgggagacggggccaaagtgggg

SEQ ID NO: 84138 - DNA, 31 bp, Homo sapiens
  chr12:52793640-52793671
  hypo
tgtgtctgtggcatggcgtggctctcattag

SEQ ID NO: 84139 - DNA, 30 bp, Homo sapiens
  chr12:52867532-52867562
  hypo
atgagagggctgtggcgagcgttggaggct

SEQ ID NO: 84140 - DNA, 96 bp, Homo sapiens
  chr12:52906093-52906189
  hypo
gtggaagaagagcagttactacgtggcatgctgaagccacgctcctaaaaacagatggcagccaggcgcggtggctcacgcctgtaatcccagcac

SEQ ID NO: 84141 - DNA, 515 bp, Homo sapiens
  chr12:52913579-52914094
  hypo
ctcggtcctcaccctctggatgctggggtcgatttgcaggttgaggggagtcaggagactctggttgacagtgacctcttggatacctccaggagggcagacaggaaagccagggccaccgaagccacctccaaagccagctccgccaccgagcccaaagccaccaccagctccaccgccgaaaccaaatccactaccggcaccacctccaaagccatagccgcctccagcaccagcaccaaaccggttcctgaagctgccaccactagtgctgatggatatcctcttggagccccccaggttgtagaggctccggctgccatagccacccactccacaagcacccgcaaggctgaccctgccgaagccaccaccaccgccacccccggaccgggacacggaggtgaagctggtgcgggagacagacggggtgatggcagaggcggtgctgaagctacgactgcccccgctccggaaggacacacttgactggcgagacatggtggcttgttcct

SEQ ID NO: 84142 - DNA, 186 bp, Homo sapiens; identical to SEQ ID NO: 26253
  chr12:53007441-53007627
  hypo

SEQ ID NO: 84143 - DNA, 106 bp, Homo sapiens; identical to SEQ ID NO: 26254
  chr12:53040688-53040794
  hypo

SEQ ID NO: 84144 - DNA, 269 bp, Homo sapiens; identical to SEQ ID NO: 26255
  chr12:53045571-53045840
  hypo

SEQ ID NO: 84145 - DNA, 30 bp, Homo sapiens
  chr12:53068867-53068897
  hypo
atagctcttttctccggtaaggctgggaca

SEQ ID NO: 84146 - DNA, 31 bp, Homo sapiens; identical to SEQ ID NO: 26256
  chr12:53183639-53183670
  hypo

SEQ ID NO: 84147 - DNA, 176 bp, Homo sapiens; identical to SEQ ID NO: 26257
  chr12:53189554-53189730
  hypo

SEQ ID NO: 84148 - DNA, 204 bp, Homo sapiens
  chr12:53214327-53214531
  hypo
aggtgataccaagagacgcatggagggaggagcagtaagatttggcgagtgatggaggcaggagtaggacggaggtagcttctggggtgacaggacagagggcttgaaattgcagccctggacactactgacccacctccagccagctggatgactacagcatgagaggtcacttctgtgagcgtgaatcgcctcacctgtaaa

SEQ ID NO: 84149 - DNA, 31 bp, Homo sapiens
  chr12:53215666-53215697
  hypo
ggctggacgtcttgaccgtagtggtcttccg

SEQ ID NO: 84150 - DNA, 30 bp, Homo sapiens
  chr12:53227801-53227831
  hypo
caacaaggcccctccggccacactgacaga

SEQ ID NO: 84151 - DNA, 150 bp, Homo sapiens
  chr12:53241430-53241580
  hypo
tagctggggcatgtaggacaccggtctccctgcctttcctccaaggttctccagatctgcttggggactgcgggacacctcgtttacctgtagcaggtgggcacctgagagcctggggaatggggacgcggaggggtagaggggaggcca

SEQ ID NO: 84152 - DNA, 30 bp, Homo sapiens
  chr12:53261123-53261153
  hypo
agttatgtgtgagtgcgccaggcatcggtg

SEQ ID NO: 84153 - DNA, 186 bp, Homo sapiens; identical to SEQ ID NO: 49587
  chr12:53272442-53272628
  hypo

SEQ ID NO: 84154 - DNA, 31 bp, Homo sapiens
  chr12:53292655-53292686
  hypo
ctgcaatggcggcctccagggaagccctctg

SEQ ID NO: 84155 - DNA, 30 bp, Homo sapiens; identical to SEQ ID NO: 26259
  chr12:53293534-53293564
  hypo

SEQ ID NO: 84156 - DNA, 30 bp, Homo sapiens
  chr12:53307529-53307559
  hypo
tgtgcgtgtaccacccgtcagagtcccgtg

SEQ ID NO: 84157 - DNA, 30 bp, Homo sapiens; identical to SEQ ID NO: 26260
  chr12:53451966-53451996
  hypo

SEQ ID NO: 84158 - DNA, 161 bp, Homo sapiens
  chr12:53452998-53453159
  hypo
ctgagtcccctggccggccgccccctacagctgctgaacggcaggagctggatcgcctcctaggaggctgcggagtggccagtgggggccggggagctgggcgcgagacggccatcctagatgacgaagagcagcccactgtgggcggaggcccccacctc

SEQ ID NO: 84159 - DNA, 30 bp, Homo sapiens
  chr12:53453429-53453459
  hypo
cgcgccccaggctaccgggaggtggtcatc

SEQ ID NO: 84160 - DNA, 30 bp, Homo sapiens
  chr12:53454238-53454268
  hypo
ctgcctcggtctccccgagatgccccatgc

SEQ ID NO: 84161 - DNA, 87 bp, Homo sapiens
  chr12:53467252-53467339
  hypo
cacctgcagtggggggaaagacggagctgccacccggcctgcttttccatagctcacctaattctcacaagggtacttttaagatga

SEQ ID NO: 84162 - DNA, 76 bp, Homo sapiens
  chr12:53509320-53509396
  hypo
gggcctgggctgtgcgctgctagccgcccacgccgtggtgctctgcgcgctgccggtccacgtggccgtggagcat

SEQ ID NO: 84163 - DNA, 30 bp, Homo sapiens; identical to SEQ ID NO: 26262
  chr12:53517546-53517576
  hypo

SEQ ID NO: 84164 - DNA, 30 bp, Homo sapiens
  chr12:53546880-53546910
  hypo
accttcccaggtcccggccttcctccctgt

SEQ ID NO: 84165 - DNA, 59 bp, Homo sapiens
  chr12:53547965-53548024
  hypo
gagatatggaccaaaacgaacaagacgtgatcttgagggagtttcgttatggctctagc

SEQ ID NO: 84166 - DNA, 18 bp, Homo sapiens
  chr12:53572935-53572953
  hypo
gcaaaaagataactattt

SEQ ID NO: 84167 - DNA, 31 bp, Homo sapiens
  chr12:53641241-53641272
  hypo
cactaagaattcaggccgggtgcagtggctc

SEQ ID NO: 84168 - DNA, 30 bp, Homo sapiens; identical to SEQ ID NO: 26264
  chr12:53646914-53646944
  hypo

SEQ ID NO: 84169 - DNA, 197 bp, Homo sapiens
  chr12:53662983-53663180
  hypo
agtgtctaccccacagcgtcctcccctctacctggaacgaattctctttgtcttactgcggaatgctgctgcacaaggaagcccagaggccacactccgccttgctcagcccctccatgcctgcttggtgcagtgctctcgcgaggctgctccccaggactatgaggccgtggctcggggcagcttttctctgcttt

SEQ ID NO: 84170 - DNA, 30 bp, Homo sapiens
  chr12:53664497-53664527
  hypo
agttgtaaatctaccgttgtctggatgctg

SEQ ID NO: 84171 - DNA, 28 bp, Homo sapiens
  chr12:53672063-53672091
  hypo
gtctgggcaacacggcgaaaccccgtct

SEQ ID NO: 84172 - DNA, 308 bp, Homo sapiens; identical to SEQ ID NO: 26267
  chr12:53685892-53686200
  hypo

SEQ ID NO: 84173 - DNA, 30 bp, Homo sapiens; identical to SEQ ID NO: 26268
  chr12:53686638-53686668
  hypo

SEQ ID NO: 84174 - DNA, 25 bp, Homo sapiens
  chr12:53691195-53691220
  hypo
gagcgagactctgtctcagaaagca

SEQ ID NO: 84175 - DNA, 238 bp, Homo sapiens; identical to SEQ ID NO: 8767
  chr12:53719554-53719792
  hypo

SEQ ID NO: 84176 - DNA, 30 bp, Homo sapiens; identical to SEQ ID NO: 26271
  chr12:53746265-53746295
  hypo

SEQ ID NO: 84177 - DNA, 31 bp, Homo sapiens; identical to SEQ ID NO: 26272
  chr12:53761921-53761952
  hypo

SEQ ID NO: 84178 - DNA, 31 bp, Homo sapiens; identical to SEQ ID NO: 8768
  chr12:53765076-53765107
  hypo

SEQ ID NO: 84179 - DNA, 241 bp, Homo sapiens
  chr12:53778350-53778591
  hypo
tgagccactgcacccagccacattttctgttttgtatgttttttttccacacccctttaaaaatgtaaaaccattcttagctctaaggccttctttggcctgtaggccaactcctccataggataaaaattgattatgggccgggtgtggtggctcacgcctgtaatgcaggcactgagaagacgaggcaggtggatgggttgagttcaggagttcaagaccggctggggcaacatggcga

SEQ ID NO: 84180 - DNA, 17 bp, Homo sapiens
  chr12:53780780-53780797
  hypo
ctggagtgcagtggtgc

SEQ ID NO: 84181 - DNA, 88 bp, Homo sapiens
  chr12:53785409-53785497
  hypo
ttttaagtaatttcaacttttattttgtttgttatatgatcttgagatttgggatacaaatgatcttgttacccgggtccggtcatga

SEQ ID NO: 84182 - DNA, 93 bp, Homo sapiens
  chr12:53796832-53796925
  hypo
gaggtagaagaactgcttgaaccagggaggcggaggtggcagtggaccaagattctactgcactcccactccgtctcaagaaagaaaaaaaaa

SEQ ID NO: 84183 - DNA, 33 bp, Homo sapiens
  chr12:53810591-53810624
  hypo
tcaaaattaagaaactgacatcgtggccaggtg

SEQ ID NO: 84184 - DNA, 30 bp, Homo sapiens; identical to SEQ ID NO: 26274
  chr12:53818167-53818197
  hypo

SEQ ID NO: 84185 - DNA, 31 bp, Homo sapiens
  chr12:53822881-53822912
  hypo
aagagggaggaagagccgggcacggtggctc

SEQ ID NO: 84186 - DNA, 44 bp, Homo sapiens
  chr12:53823276-53823320
  hypo
ccagaatgtgctcattcgggaagatggatcgtgtgccattggag

SEQ ID NO: 84187 - DNA, 30 bp, Homo sapiens
  chr12:53825003-53825033
  hypo
cagacccagaagcacggctgacagctgagt

SEQ ID NO: 84188 - DNA, 121 bp, Homo sapiens
  chr12:53832349-53832470
  hypo
ccaagatcgtgccactgcactccagcctggacaacggggccagggcgagactccgtctcaaaaaaaaaaggggggggcaaaggacattaacagacatttctcaaaagaagatatgcagccg

SEQ ID NO: 84189 - DNA, 42 bp, Homo sapiens
  chr12:53836911-53836953
  hypo
attacaggcgtgagccaccgcgcctggactgaccagtgcttt

SEQ ID NO: 84190 - DNA, 27 bp, Homo sapiens
  chr12:53843449-53843476
  hypo
caccgcgcccagctaatgtttgaattt

SEQ ID NO: 84191 - DNA, 205 bp, Homo sapiens; identical to SEQ ID NO: 26275
  chr12:53899812-53900017
  hypo

SEQ ID NO: 84192 - DNA, 29 bp, Homo sapiens
  chr12:53966366-53966395
  hypo
gtagcctccccttacccgtggtttcactt

SEQ ID NO: 84193 - DNA, 176 bp, Homo sapiens
  chr12:53994620-53994796
  hypo
tctgattacctccagtgatcacgtaaaatactggctttaaactctttgccttagtgataaaacagccactttgattcacaacgagacattcacaataaagtatattgtaaacgtacctgtccacagcccggggcattgcacacaaacggtctgtcgtctcccatatttcatatagc

SEQ ID NO: 84194 - DNA, 31 bp, Homo sapiens
  chr12:54051790-54051821
  hypo
ttctgtctcagtctctcgagtagctgggatt

SEQ ID NO: 84195 - DNA, 156 bp, Homo sapiens
  chr12:54122157-54122313
  hypo
taggataacaatacatgttgacgttccggtttttatttaggagaggtgaaagattgacacgtctcccacaccccaagtcacgttatagacttgggcatcctgtcccccctctcgctattctccatccctgtagtcggaggcattcagaattacctc

SEQ ID NO: 84196 - DNA, 951 bp, Homo sapiens; identical to SEQ ID NO: 49620
  chr12:54144906-54145857
  hypo

SEQ ID NO: 84197 - DNA, 460 bp, Homo sapiens; identical to SEQ ID NO: 49632
  chr12:54332486-54332946
  hypo

SEQ ID NO: 84198 - DNA, 875 bp, Homo sapiens; identical to SEQ ID NO: 49633
  chr12:54332963-54333838
  hypo

SEQ ID NO: 84199 - DNA, 481 bp, Homo sapiens; identical to SEQ ID NO: 49667
  chr12:54393242-54393723
  hypo

SEQ ID NO: 84200 - DNA, 620 bp, Homo sapiens; identical to SEQ ID NO: 8801
  chr12:54393798-54394418
  hypo

SEQ ID NO: 84201 - DNA, 170 bp, Homo sapiens; identical to SEQ ID NO: 49669
  chr12:54394466-54394636
  hypo

SEQ ID NO: 84202 - DNA, 82 bp, Homo sapiens; identical to SEQ ID NO: 8803
  chr12:54398703-54398785
  hypo

SEQ ID NO: 84203 - DNA, 71 bp, Homo sapiens; identical to SEQ ID NO: 49671
  chr12:54398888-54398959
  hypo

SEQ ID NO: 84204 - DNA, 405 bp, Homo sapiens; identical to SEQ ID NO: 49672
  chr12:54399269-54399674
  hypo

SEQ ID NO: 84205 - DNA, 330 bp, Homo sapiens; identical to SEQ ID NO: 49673
  chr12:54400110-54400440
  hypo

SEQ ID NO: 84206 - DNA, 584 bp, Homo sapiens; identical to SEQ ID NO: 49683
  chr12:54426522-54427106
  hypo

SEQ ID NO: 84207 - DNA, 342 bp, Homo sapiens; identical to SEQ ID NO: 49684
  chr12:54427293-54427635
  hypo

SEQ ID NO: 84208 - DNA, 30 bp, Homo sapiens
  chr12:54576259-54576289
  hypo
aaaagccccagaatcgggcaccactcactt

SEQ ID NO: 84209 - DNA, 30 bp, Homo sapiens
  chr12:54577253-54577283
  hypo
attacgggcagagacgctgggagagggcct

SEQ ID NO: 84210 - DNA, 30 bp, Homo sapiens
  chr12:54622929-54622959
  hypo
gtgctcaggccaggcgctgtggctcacacc

SEQ ID NO: 84211 - DNA, 214 bp, Homo sapiens
  chr12:54651251-54651465
  hypo
tctatctctacagagtcccaacgcctgggggaaaaaaggaacttactcagaaaagcctttccacttcagtagatattccacttgtcccttaaccacgcgcctgtctagcaccttctccacaacatactcctcctcatcctctgaagaagaactgtcagctgtccgcttggttttctttcccatgtcgcacaccgttccacctgaaagactaagg

SEQ ID NO: 84212 - DNA, 42 bp, Homo sapiens; identical to SEQ ID NO: 8824
  chr12:54686413-54686455
  hypo

SEQ ID NO: 84213 - DNA, 39 bp, Homo sapiens
  chr12:54718114-54718153
  hypo
acaggcttgagccaccgcgcccaggcacaacggcttgtt

SEQ ID NO: 84214 - DNA, 34 bp, Homo sapiens; identical to SEQ ID NO: 26289
  chr12:54720205-54720239
  hypo

SEQ ID NO: 84215 - DNA, 30 bp, Homo sapiens
  chr12:54756575-54756605
  hypo
gcatgtggaccacccggggagcctggactc

SEQ ID NO: 84216 - DNA, 72 bp, Homo sapiens
  chr12:54767854-54767926
  hypo
gcagcctcaatgcctttgactcgtcgggcgtggcgattacctttgtagtgcgcctcagcctggctctttagg

SEQ ID NO: 84217 - DNA, 743 bp, Homo sapiens; identical to SEQ ID NO: 49698
  chr12:54811879-54812622
  hypo

SEQ ID NO: 84218 - DNA, 230 bp, Homo sapiens; identical to SEQ ID NO: 49699
  chr12:54812831-54813061
  hypo

SEQ ID NO: 84219 - DNA, 31 bp, Homo sapiens; identical to SEQ ID NO: 26290
  chr12:54813173-54813204
  hypo

SEQ ID NO: 84220 - DNA, 32 bp, Homo sapiens
  chr12:54890475-54890507
  hypo
atataaaaaagtattagaggccgggtgtggtg

SEQ ID NO: 84221 - DNA, 30 bp, Homo sapiens
  chr12:54963134-54963164
  hypo
ggatcttcgtggaacggtgaggctcgccca

SEQ ID NO: 84222 - DNA, 40 bp, Homo sapiens; identical to SEQ ID NO: 26291
  chr12:55481151-55481191
  hypo

SEQ ID NO: 84223 - DNA, 37 bp, Homo sapiens
  chr12:55511043-55511080
  hypo
gtgagccaccgcgcccggcctccatatgaatgctgta

SEQ ID NO: 84224 - DNA, 34 bp, Homo sapiens
  chr12:56108935-56108969
  hypo
cccggctaatcacggcatttttataagccttgtg

SEQ ID NO: 84225 - DNA, 270 bp, Homo sapiens; identical to SEQ ID NO: 26292
  chr12:56142455-56142725
  hypo

SEQ ID NO: 84226 - DNA, 30 bp, Homo sapiens
  chr12:56159688-56159718
  hypo
acccttctagcgtgacggtgttgcatggaa

SEQ ID NO: 84227 - DNA, 89 bp, Homo sapiens; identical to SEQ ID NO: 26293
  chr12:56182546-56182635
  hypo

SEQ ID NO: 84228 - DNA, 152 bp, Homo sapiens; identical to SEQ ID NO: 26294
  chr12:56183313-56183465
  hypo

SEQ ID NO: 84229 - DNA, 32 bp, Homo sapiens; identical to SEQ ID NO: 26295
  chr12:56183704-56183736
  hypo

SEQ ID NO: 84230 - DNA, 141 bp, Homo sapiens
  chr12:56230958-56231099
  hypo
ctgggatagcctttctctactcgaagctgctggttgaggcgccagtagactttgcccttgaagaagtagactcggccatcttgccaactcatagcagccgagggctggtttggcactcccgtaaacaaacccttgattggt

SEQ ID NO: 84231 - DNA, 30 bp, Homo sapiens; identical to SEQ ID NO: 49714
  chr12:56326150-56326180
  hypo

SEQ ID NO: 84232 - DNA, 30 bp, Homo sapiens
  chr12:56333298-56333328
  hypo
gactgagctgtaaccgtgagtaatgggagc

SEQ ID NO: 84233 - DNA, 30 bp, Homo sapiens; identical to SEQ ID NO: 26296
  chr12:56350370-56350400
  hypo

SEQ ID NO: 84234 - DNA, 30 bp, Homo sapiens; identical to SEQ ID NO: 26297
  chr12:56359143-56359173
  hypo

SEQ ID NO: 84235 - DNA, 30 bp, Homo sapiens; identical to SEQ ID NO: 26298
  chr12:56381232-56381262
  hypo

SEQ ID NO: 84236 - DNA, 152 bp, Homo sapiens; identical to SEQ ID NO: 8830
  chr12:56390555-56390707
  hypo

SEQ ID NO: 84237 - DNA, 20 bp, Homo sapiens
  chr12:56408877-56408897
  hypo
gagacagagtcttgctcttg

SEQ ID NO: 84238 - DNA, 33 bp, Homo sapiens
  chr12:56441276-56441309
  hypo
aacctgccagataggccgggcgcggtggctcac

SEQ ID NO: 84239 - DNA, 88 bp, Homo sapiens; identical to SEQ ID NO: 8831
  chr12:56472731-56472819
  hypo

SEQ ID NO: 84240 - DNA, 30 bp, Homo sapiens; identical to SEQ ID NO: 49719
  chr12:56474160-56474190
  hypo

SEQ ID NO: 84241 - DNA, 175 bp, Homo sapiens
  chr12:56480247-56480422
  hypo
ggtggagaggtaaggaagaggcgttccgctgcggcccttaaccctgtcacttctttccctacctcagagattctgtcagggggtgtttatattgagaagaacgataagctttgtcacatggacacaattgactggagggacatcgtgagggaccgagatgctgagatagtggtga

SEQ ID NO: 84242 - DNA, 441 bp, Homo sapiens; identical to SEQ ID NO: 26301
  chr12:56558006-56558447
  hypo

SEQ ID NO: 84243 - DNA, 24 bp, Homo sapiens
  chr12:56558811-56558835
  hypo
cacccatttcggcctcccaaagaa

SEQ ID NO: 84244 - DNA, 149 bp, Homo sapiens; identical to SEQ ID NO: 26303
  chr12:56601394-56601543
  hypo

SEQ ID NO: 84245 - DNA, 208 bp, Homo sapiens; identical to SEQ ID NO: 26304
  chr12:56604086-56604294
  hypo

SEQ ID NO: 84246 - DNA, 91 bp, Homo sapiens; identical to SEQ ID NO: 26305
  chr12:56610572-56610663
  hypo

SEQ ID NO: 84247 - DNA, 30 bp, Homo sapiens; identical to SEQ ID NO: 26306
  chr12:56610902-56610932
  hypo

SEQ ID NO: 84248 - DNA, 30 bp, Homo sapiens
  chr12:56622043-56622073
  hypo
aacattatcattatcgtacactcatacaca

SEQ ID NO: 84249 - DNA, 31 bp, Homo sapiens; identical to SEQ ID NO: 26307
  chr12:56649705-56649736
  hypo

SEQ ID NO: 84250 - DNA, 21 bp, Homo sapiens
  chr12:56841889-56841910
  hypo
tgtacaaagtactagtagggc

SEQ ID NO: 84251 - DNA, 27 bp, Homo sapiens
  chr12:56882540-56882567
  hypo
ccgaaggccaaaccagcgcccagtaac

SEQ ID NO: 84252 - DNA, 3 bp, Homo sapiens
  chr12:56882583-56882586
  hypo
cgc

SEQ ID NO: 84253 - DNA, 31 bp, Homo sapiens; identical to SEQ ID NO: 8838
  chr12:56958137-56958168
  hypo

SEQ ID NO: 84254 - DNA, 19 bp, Homo sapiens
  chr12:56976738-56976757
  hypo
gatctgggttttaacaagc

SEQ ID NO: 84255 - DNA, 30 bp, Homo sapiens
  chr12:56985185-56985215
  hypo
ggtaggatataaagcgtaaaggacaaattg

SEQ ID NO: 84256 - DNA, 30 bp, Homo sapiens
  chr12:56992940-56992970
  hypo
tccgcatagagagtcgccgccgcttggagg

SEQ ID NO: 84257 - DNA, 201 bp, Homo sapiens
  chr12:56993680-56993881
  hypo
gccagtgaccccaccccgcccctgctggctggcccctcagcctctccaggctctctcagcctcttaccactttgttgacagacttctcccaggcaatggacctctccagctggcccaggcacaagcacacctgggctgcgctccggcaccgctcgagggtctggcgccagacacgaatgcgaggggtgatctcatatgatc

SEQ ID NO: 84258 - DNA, 10 bp, Homo sapiens
  chr12:57054154-57054164
  hypo
gccaccgcac

SEQ ID NO: 84259 - DNA, 82 bp, Homo sapiens
  chr12:57054398-57054480
  hypo
ggtggcgatatacgacgctttttactagcaggaatagacattcaacatttaattgtggtcaatgtttaaatgaaacccacag

SEQ ID NO: 84260 - DNA, 17 bp, Homo sapiens
  chr12:57063685-57063702
  hypo
cccggccaaaagtttat

SEQ ID NO: 84261 - DNA, 26 bp, Homo sapiens
  chr12:57120638-57120664
  hypo
ctaccgcccctggcacttcttggata

SEQ ID NO: 84262 - DNA, 23 bp, Homo sapiens
  chr12:57142809-57142832
  hypo
ttagacagggtctcactctgtcg

SEQ ID NO: 84263 - DNA, 30 bp, Homo sapiens
  chr12:57146955-57146985
  hypo
gttgcgtgcgcctgtagtcccagctaccct

SEQ ID NO: 84264 - DNA, 31 bp, Homo sapiens
  chr12:57213866-57213897
  hypo
aaaattgtgatatagtcgtatggtggaaaat

SEQ ID NO: 84265 - DNA, 30 bp, Homo sapiens
  chr12:57323180-57323210
  hypo
gaaataatcctctccgtagctgtcccgggt

SEQ ID NO: 84266 - DNA, 30 bp, Homo sapiens
  chr12:57396719-57396749
  hypo
tacatgagggcccccgagtgtgtctttagg

SEQ ID NO: 84267 - DNA, 31 bp, Homo sapiens
  chr12:57403584-57403615
  hypo
taaatctgatactcatcgtgcaaagcactgt

SEQ ID NO: 84268 - DNA, 31 bp, Homo sapiens
  chr12:57422731-57422762
  hypo
tggcccccccatcatgcgagtcagaggactt

SEQ ID NO: 84269 - DNA, 109 bp, Homo sapiens
  chr12:57431636-57431745
  hypo
ccccatggggtcttaccggtctcccccattccagtgaggccaggtgctccggctcagcaatcggtacctttccaggaagggcccataaccctggcggtgggcatagcct

SEQ ID NO: 84270 - DNA, 33 bp, Homo sapiens; identical to SEQ ID NO: 26314
  chr12:57446183-57446216
  hypo

SEQ ID NO: 84271 - DNA, 23 bp, Homo sapiens
  chr12:57462656-57462679
  hypo
tttctttacgtctgaacaaaatg

SEQ ID NO: 84272 - DNA, 69 bp, Homo sapiens
  chr12:57489923-57489992
  hypo
gtctgtatgttcctgcctatccgtcctaggccctgggtcagaatgggcggagaagccttccatgcccta

SEQ ID NO: 84273 - DNA, 75 bp, Homo sapiens
  chr12:57499241-57499316
  hypo
ggggaatacctggtgacgagggttctcaggacttcatccagccggccagtcagcgatgcccgggtcttgggctca

SEQ ID NO: 84274 - DNA, 31 bp, Homo sapiens
  chr12:57539050-57539081
  hypo
cagaacatcttggccacgtacctgagtgggg

SEQ ID NO: 84275 - DNA, 30 bp, Homo sapiens; identical to SEQ ID NO: 26317
  chr12:57540572-57540602
  hypo

SEQ ID NO: 84276 - DNA, 31 bp, Homo sapiens
  chr12:57552057-57552088
  hypo
agcctcgcatccctaacgtctcctgacccat

SEQ ID NO: 84277 - DNA, 153 bp, Homo sapiens
  chr12:57559886-57560039
  hypo
gaccgattcaagtgcgagaacaaccggtgcatccccaaccgctggctctgcgacggggacaatgactgtgggaacagtgaagatgagtccaatgccacttgttcaggtgtggagcggggctcagatcacacgaggcacccctcagtcaaggag

SEQ ID NO: 84278 - DNA, 357 bp, Homo sapiens
  chr12:57570815-57571172
  hypo
ttctccagccctgactagtttcgaggtggtgattcagtatggcctggccacacccgagggcctggctgtagactggattgcaggcaacatctactgggtggagagtaacctggatcagatcgaggtggccaagctggatgggaccctccggaccaccctgctggccggtgacattgagcacccaagggcaatcgcactggatccccgggatgggtgaggaccttgcccagccttctcctggccccatggcccccctgaagtcccattcagcctggccagggacaccttactcctcagtgccatctgcctcctcccaccctctacctacgatcccaccacagtcgctccctgagggcc

SEQ ID NO: 84279 - DNA, 36 bp, Homo sapiens
  chr12:57572147-57572183
  hypo
tgccatttactcagcccgttacgacggctctggcca

SEQ ID NO: 84280 - DNA, 31 bp, Homo sapiens
  chr12:57572885-57572916
  hypo
aaggcagagtcccagtcgggagggtcccgat

SEQ ID NO: 84281 - DNA, 31 bp, Homo sapiens
  chr12:57574072-57574103
  hypo
cctgggccagactccccggcagtgactcccc

SEQ ID NO: 84282 - DNA, 31 bp, Homo sapiens
  chr12:57582407-57582438
  hypo
ccctcgtcccagaggacgtgaccccctggct

SEQ ID NO: 84283 - DNA, 183 bp, Homo sapiens
  chr12:57583523-57583706
  hypo
ttagggaactggagaacggagctggcttttgtgtggcttggtggtctcagactccactgtgcctaaggatcgcctaggagcaagagaatgtggagtcccctgccccgccctgggcctagctgagtgacaagctctgggaccgaggacccagggctcaccatccaatgccggtggtccaaggac

SEQ ID NO: 84284 - DNA, 30 bp, Homo sapiens; identical to SEQ ID NO: 26320
  chr12:57584956-57584986
  hypo

SEQ ID NO: 84285 - DNA, 30 bp, Homo sapiens; identical to SEQ ID NO: 26321
  chr12:57587758-57587788
  hypo

SEQ ID NO: 84286 - DNA, 31 bp, Homo sapiens
  chr12:57591466-57591497
  hypo
gcgaccaacactggcccgcctcagatgactg

SEQ ID NO: 84287 - DNA, 42 bp, Homo sapiens
  chr12:57593154-57593196
  hypo
tgtcttccatgccctgcgccagccagacggtgagcaggcaag

SEQ ID NO: 84288 - DNA, 68 bp, Homo sapiens
  chr12:57595539-57595607
  hypo
accccatgcccacccgcttgcagcccagatgacctgtggtgtggacgagttccgctgcaaggattcgg

SEQ ID NO: 84289 - DNA, 150 bp, Homo sapiens
  chr12:57596872-57597022
  hypo
ggatgggccttgggctcgggactgtggcactactgaggcctggagtccttgtgcccaccctcctgggcctgtctccccctgtccttcccagcccctcggccctgctccgagagtgagttctcctgtgccaacggccgctgcatcgcgggg

SEQ ID NO: 84290 - DNA, 30 bp, Homo sapiens
  chr12:57597223-57597253
  hypo
actgcatccccctgcgctggcgctgtgacg

SEQ ID NO: 84291 - DNA, 79 bp, Homo sapiens
  chr12:57601871-57601950
  hypo
aacgtgtactggaccgactcgggccgagatgtgattgaggtggcgcagatgaagggcgagaaccgcaagacgctcatct

SEQ ID NO: 84292 - DNA, 31 bp, Homo sapiens; identical to SEQ ID NO: 26323
  chr12:57605266-57605297
  hypo

SEQ ID NO: 84293 - DNA, 30 bp, Homo sapiens
  chr12:57640657-57640687
  hypo
acacaggatcattgcgattggcagcagcta

SEQ ID NO: 84294 - DNA, 81 bp, Homo sapiens
  chr12:57642437-57642518
  hypo
gagccaccacgcgtggccatgtcccctccttgctctccacagcctactcacgatcttgccgaagcatctctgcatttccac

SEQ ID NO: 84295 - DNA, 30 bp, Homo sapiens; identical to SEQ ID NO: 26324
  chr12:57863251-57863281
  hypo

SEQ ID NO: 84296 - DNA, 220 bp, Homo sapiens
  chr12:57881106-57881326
  hypo
cttccactttgtcactaattccgcacatggtaactccgaactctaaaactctgaccgttaagagcttgcatcgagagccactgcgagtagctgctgttatgacatggccatttcattctccacaacaagagaagcagccgcggcttcagtcaccgccctccagcagcgtaagaggataaaagtgcgacttgccctaaaacctaaacgtctcttctggatc

SEQ ID NO: 84297 - DNA, 83 bp, Homo sapiens
  chr12:57885676-57885759
  hypo
gacagacaggatctccgctgtcatgggactttctgtctggtaggatagacaggtattttaaaaactgtcacacaaatgtagaa

SEQ ID NO: 84298 - DNA, 106 bp, Homo sapiens
  chr12:57982778-57982884
  hypo
actgccaccaagacgcggagaccgatagtggcccctaatggctaggcgcactggtatttattgaatacaagacaaggggcagggtaaggaggggtgagttgtccaa

SEQ ID NO: 84299 - DNA, 43 bp, Homo sapiens
  chr12:57986073-57986116
  hypo
gcacagccattgcccatcttccgtcaggtctggagtgggagaa

SEQ ID NO: 84300 - DNA, 87 bp, Homo sapiens
  chr12:58068673-58068760
  hypo
cttgcgagccgggccgccccacgacagcagccagccaggccgcctaggacctgccgccaggtgttcggtggcgtcccaccgccccgt

SEQ ID NO: 84301 - DNA, 167 bp, Homo sapiens
  chr12:58152860-58153027
  hypo
cctggatgacatttcagtacccgctggcagctcctcccactcatccagagacggccggtgggcaggcggggagagcagctttccttccctggagagaaccgtctttacctcagctcctagggcctccagccccccagctccaccacggtgacttggtgaagggggac

SEQ ID NO: 84302 - DNA, 715 bp, Homo sapiens; identical to SEQ ID NO: 49775
  chr12:58158778-58159493
  hypo

SEQ ID NO: 84303 - DNA, 31 bp, Homo sapiens; identical to SEQ ID NO: 26328
  chr12:58190007-58190038
  hypo

SEQ ID NO: 84304 - DNA, 30 bp, Homo sapiens; identical to SEQ ID NO: 26329
  chr12:58218605-58218635
  hypo

SEQ ID NO: 84305 - DNA, 220 bp, Homo sapiens
  chr12:58241481-58241701
  hypo
gtctcaaaaaaaaaaaaaaaaaagtacaaccttcgaatcccgaaaggggtgtgtgcgtgtgggcggacctaggactccagagtataagagctggaactgacctcgggactgtgtcccccaaaacactgaaaatgagacctgaggtgctgggctttcctcacacccaccgacttactcccatttaggcggccccgactccgcccctcctccctacctccct

SEQ ID NO: 84306 - DNA, 78 bp, Homo sapiens; identical to SEQ ID NO: 8868
  chr12:58259122-58259200
  hypo

SEQ ID NO: 84307 - DNA, 213 bp, Homo sapiens
  chr12:58263122-58263335
  hypo
cttaaaaattgtcctctccaccgccccagcagtcctgccgctgcctctcccatctcctactggcttcaccgcccaagtgggtgacatcagacttggagagtgcagctcgccttcctctgctgggaacatggatcctccgctcctgtgggcttcggtgtgatctttaagcccactaggtcttcctgcccatccgggtgttctagacccaactct

SEQ ID NO: 84308 - DNA, 42 bp, Homo sapiens
  chr12:58274993-58275035
  hypo
attacaggcatgagtcacggcgcctggcctagtattaaattc

SEQ ID NO: 84309 - DNA, 227 bp, Homo sapiens
  chr12:58284084-58284311
  hypo
tcttttgacagtcaacatgcccgagtgctgtgaacgttatgagagggccttgttgggaacacgtgctcctgggaatcagcccttccctctgtcctgttcccactcctccccgacgatgctcctgctcagaacccactcctcacctcagtgaagcaacgcagcgggcaccctgtggacaaagctggatattggctctgaataaaagcgaatcatggggaaaatcagtg

SEQ ID NO: 84310 - DNA, 1072 bp, Homo sapiens; identical to SEQ ID NO: 49783
  chr12:59313473-59314545
  hypo

SEQ ID NO: 84311 - DNA, 1473 bp, Homo sapiens; identical to SEQ ID NO: 49784
  chr12:59989520-59990993
  hypo

SEQ ID NO: 84312 - DNA, 18 bp, Homo sapiens
  chr12:60384603-60384621
  hypo
taaaaagacgtgtccacg

SEQ ID NO: 84313 - DNA, 198 bp, Homo sapiens; identical to SEQ ID NO: 26336
  chr12:60507736-60507934
  hypo

SEQ ID NO: 84314 - DNA, 43 bp, Homo sapiens
  chr12:62266113-62266156
  hypo
tctttacattgatctaaataccggacaaacttggtgttaacta

SEQ ID NO: 84315 - DNA, 301 bp, Homo sapiens; identical to SEQ ID NO: 8873
  chr12:62584711-62585012
  hypo

SEQ ID NO: 84316 - DNA, 1483 bp, Homo sapiens; identical to SEQ ID NO: 8874
  chr12:62585030-62586513
  hypo

SEQ ID NO: 84317 - DNA, 29 bp, Homo sapiens
  chr12:62616289-62616318
  hypo
attattattattattttgagacggagtct

SEQ ID NO: 84318 - DNA, 30 bp, Homo sapiens; identical to SEQ ID NO: 49788
  chr12:62665265-62665295
  hypo

SEQ ID NO: 84319 - DNA, 23 bp, Homo sapiens
  chr12:62898313-62898336
  hypo
accgcacccggcctgtttttatg

SEQ ID NO: 84320 - DNA, 19 bp, Homo sapiens
  chr12:62913610-62913629
  hypo
cttgagacggagtctcgct

SEQ ID NO: 84321 - DNA, 41 bp, Homo sapiens
  chr12:63033700-63033741
  hypo
ccgtgcccggccaggccacattcttacgagttaattcttct

SEQ ID NO: 84322 - DNA, 30 bp, Homo sapiens; identical to SEQ ID NO: 26341
  chr12:63038405-63038435
  hypo

SEQ ID NO: 84323 - DNA, 43 bp, Homo sapiens
  chr12:63126531-63126574
  hypo
ttagtagggacggggtttcaccgtgttagccaggatggggacc

SEQ ID NO: 84324 - DNA, 30 bp, Homo sapiens; identical to SEQ ID NO: 8877
  chr12:63138854-63138884
  hypo

SEQ ID NO: 84325 - DNA, 30 bp, Homo sapiens; identical to SEQ ID NO: 26343
  chr12:63187177-63187207
  hypo

SEQ ID NO: 84326 - DNA, 30 bp, Homo sapiens; identical to SEQ ID NO: 26344
  chr12:63187506-63187536
  hypo

SEQ ID NO: 84327 - DNA, 396 bp, Homo sapiens
  chr12:63195598-63195994
  hypo
ttccttgaatgcactttcaagcgctccgatgaccaggcactcatggggaatcttcttctcggtaaagaagcgtgtggggggcgtgctgggggagcccggggcccccacccctccgcgcagggaggctgcccgggtcagagtccggctgttggcgggcgtgttctcaggctcctcccccaggcaggtagggggcaggacggcggagttcttcaggatgtccacgatgtcctgcagctgctccgtgatgtggtgctgcagcaggcgtgacgccaccaccgcggccccggaccccgcgtgcccgtcaaacagcgaccaatagtggcaggaaacaccctcggattcctgtgggagaggacgacagggaggagtgagaacggctgtggactttgcctcagg

SEQ ID NO: 84328 - DNA, 193 bp, Homo sapiens; identical to SEQ ID NO: 26346
  chr12:63271245-63271438
  hypo

SEQ ID NO: 84329 - DNA, 31 bp, Homo sapiens; identical to SEQ ID NO: 26347
  chr12:63318526-63318557
  hypo

SEQ ID NO: 84330 - DNA, 34 bp, Homo sapiens
  chr12:63397757-63397791
  hypo
tatcacagcaggtgcacgccgagaaaagggagaa

SEQ ID NO: 84331 - DNA, 41 bp, Homo sapiens
  chr12:63788039-63788080
  hypo
aaaaaaagaaaaaaaaaagcgggaggagtgagtaatattaa

SEQ ID NO: 84332 - DNA, 330 bp, Homo sapiens; identical to SEQ ID NO: 8882
  chr12:64237614-64237944
  hypo

SEQ ID NO: 84333 - DNA, 111 bp, Homo sapiens; identical to SEQ ID NO: 8883
  chr12:64238194-64238305
  hypo

SEQ ID NO: 84334 - DNA, 22 bp, Homo sapiens
  chr12:64317643-64317665
  hypo
tgggcatggtggctcacgcctg

SEQ ID NO: 84335 - DNA, 99 bp, Homo sapiens
  chr12:64373752-64373851
  hypo
tgcctctagctgcagccgcctgcggccccatggcaggattcatgcagtgtggggccgagtgcaccatgggcttccttgatttgttcttttttgtttgag

SEQ ID NO: 84336 - DNA, 31 bp, Homo sapiens
  chr12:64383904-64383935
  hypo
taaccaggactgagaacggtatctgaaaaat

SEQ ID NO: 84337 - DNA, 31 bp, Homo sapiens
  chr12:64458621-64458652
  hypo
gctccatcgcaggaaccgccccattcttacc

SEQ ID NO: 84338 - DNA, 276 bp, Homo sapiens; identical to SEQ ID NO: 26350
  chr12:64521628-64521904
  hypo

SEQ ID NO: 84339 - DNA, 30 bp, Homo sapiens
  chr12:64537052-64537082
  hypo
ccagcttaaagactcgatggaaggaggtag

SEQ ID NO: 84340 - DNA, 31 bp, Homo sapiens
  chr12:64543910-64543941
  hypo
cttgtgtgcatgtgcacgtgtgtgggtggga

SEQ ID NO: 84341 - DNA, 314 bp, Homo sapiens; identical to SEQ ID NO: 49803
  chr12:64782994-64783308
  hypo

SEQ ID NO: 84342 - DNA, 27 bp, Homo sapiens
  chr12:64783543-64783570
  hypo
aaggattataggcgtgatccacggcac

SEQ ID NO: 84343 - DNA, 110 bp, Homo sapiens
  chr12:64797362-64797472
  hypo
tgacatttagtagcatcgaaagatcccgtgagtaggacttcctaagaatgctctccttcttttcatggacaaaattttagtctgtttaaaataaattttggaccggacac

SEQ ID NO: 84344 - DNA, 396 bp, Homo sapiens; identical to SEQ ID NO: 8886
  chr12:64845174-64845570
  hypo

SEQ ID NO: 84345 - DNA, 28 bp, Homo sapiens
  chr12:65030355-65030383
  hypo
attaaagtagccgggcgcggtggctcac

SEQ ID NO: 84346 - DNA, 30 bp, Homo sapiens; identical to SEQ ID NO: 26352
  chr12:65128950-65128980
  hypo

SEQ ID NO: 84347 - DNA, 48 bp, Homo sapiens
  chr12:65516499-65516547
  hypo
ctcctgcctaattcctcggatgcacaaagaaaacggaagcaaaagggt

SEQ ID NO: 84348 - DNA, 33 bp, Homo sapiens; identical to SEQ ID NO: 26353
  chr12:65557256-65557289
  hypo

SEQ ID NO: 84349 - DNA, 33 bp, Homo sapiens
  chr12:65557468-65557501
  hypo
ccagcctgggcaacagagcgaagtgataacatc

SEQ ID NO: 84350 - DNA, 24 bp, Homo sapiens
  chr12:65562062-65562086
  hypo
tttgactaacgtttttctgtacag

SEQ ID NO: 84351 - DNA, 57 bp, Homo sapiens; identical to SEQ ID NO: 49820
  chr12:65564595-65564652
  hypo

SEQ ID NO: 84352 - DNA, 50 bp, Homo sapiens; identical to SEQ ID NO: 49821
  chr12:65564722-65564772
  hypo

SEQ ID NO: 84353 - DNA, 42 bp, Homo sapiens; identical to SEQ ID NO: 26355
  chr12:66213995-66214037
  hypo

SEQ ID NO: 84354 - DNA, 30 bp, Homo sapiens; identical to SEQ ID NO: 26356
  chr12:66284819-66284849
  hypo

SEQ ID NO: 84355 - DNA, 90 bp, Homo sapiens
  chr12:66343865-66343955
  hypo
ccagattcattgctggtgggacggactgcaaaatggtacagctgctttagaaagctgtctggcagctcctcaaaaagtgaaacaaagaat

SEQ ID NO: 84356 - DNA, 607 bp, Homo sapiens; identical to SEQ ID NO: 49831
  chr12:66582758-66583365
  hypo

SEQ ID NO: 84357 - DNA, 342 bp, Homo sapiens; identical to SEQ ID NO: 8904
  chr12:66629082-66629424
  hypo

SEQ ID NO: 84358 - DNA, 93 bp, Homo sapiens
  chr12:66843697-66843790
  hypo
tcacaatttgatacagattatcggactacttaattggagttaaaagctgtttcagaaactttaaggcagctgtttaccatcttcactaagaaa

SEQ ID NO: 84359 - DNA, 95 bp, Homo sapiens
  chr12:66889675-66889770
  hypo
cagtgaaagcaaaggagtcctcggcggcaggtgagcaatggtgatgaaccgaagcgcgccaggagaaggccggcgggatttcatatgagtgcagc

SEQ ID NO: 84360 - DNA, 30 bp, Homo sapiens
  chr12:67460019-67460049
  hypo
cctctttttgtatgcggcaataacacaaaa

SEQ ID NO: 84361 - DNA, 30 bp, Homo sapiens
  chr12:68052304-68052334
  hypo
ccaaagcctcccaccggggagaaaacgtca

SEQ ID NO: 84362 - DNA, 36 bp, Homo sapiens
  chr12:68433184-68433220
  hypo
tttaagattgtgttgtctgggcgcggtggctcctgc

SEQ ID NO: 84363 - DNA, 36 bp, Homo sapiens
  chr12:68433459-68433495
  hypo
aaagagcgagactccgtctcaaaaaaaagattgtgt

SEQ ID NO: 84364 - DNA, 31 bp, Homo sapiens; identical to SEQ ID NO: 26359
  chr12:68646672-68646703
  hypo

SEQ ID NO: 84365 - DNA, 30 bp, Homo sapiens; identical to SEQ ID NO: 26360
  chr12:68770814-68770844
  hypo

SEQ ID NO: 84366 - DNA, 85 bp, Homo sapiens; identical to SEQ ID NO: 26361
  chr12:68978213-68978298
  hypo

SEQ ID NO: 84367 - DNA, 24 bp, Homo sapiens
  chr12:68978597-68978621
  hypo
ctttttttccgttttcactagaaa

SEQ ID NO: 84368 - DNA, 30 bp, Homo sapiens; identical to SEQ ID NO: 49841
  chr12:69080620-69080650
  hypo

SEQ ID NO: 84369 - DNA, 30 bp, Homo sapiens; identical to SEQ ID NO: 49842
  chr12:69080878-69080908
  hypo

SEQ ID NO: 84370 - DNA, 44 bp, Homo sapiens; identical to SEQ ID NO: 26363
  chr12:69133794-69133838
  hypo

SEQ ID NO: 84371 - DNA, 30 bp, Homo sapiens
  chr12:69165486-69165516
  hypo
agtccggtctcagcccgggagctagtagca

SEQ ID NO: 84372 - DNA, 210 bp, Homo sapiens
  chr12:69190342-69190552
  hypo
tatacagctggcagcacaatagttttgtttacagcagcatcaccacaaatgtatgagtaatgcctttcgttacagtatcaagacagctacaatggcaacaggtgataggaattttcagctccattataatcttaccggaccgctgtcgtatgtgtggtctacattgactgaaccgttgttatgtggtgcgtgactgtatttgggccataa

SEQ ID NO: 84373 - DNA, 98 bp, Homo sapiens
  chr12:69203730-69203828
  hypo
tttgagtattacagatagtgccgctttgtacatgcatcccgtgtgactatttctgtaagaaagattttatagaattataggctggcctcggtggctca

SEQ ID NO: 84374 - DNA, 105 bp, Homo sapiens
  chr12:69218065-69218170
  hypo
gatagcatatctactgagtagcgccccgccgccccccgcccaccaccaagtttctgatcctttttcttttctctcagaatcatcggactcaggtacatctgtgag

SEQ ID NO: 84375 - DNA, 35 bp, Homo sapiens
  chr12:69225857-69225892
  hypo
aacaacaaaatctcgtttttcaggttaagtcccta

SEQ ID NO: 84376 - DNA, 40 bp, Homo sapiens; identical to SEQ ID NO: 49845
  chr12:69241506-69241546
  hypo

SEQ ID NO: 84377 - DNA, 115 bp, Homo sapiens
  chr12:69461742-69461857
  hypo
aaagaaaaaaaaaagtgctctcggatagttctcaggccaagtgaggtcccagcgtgtttggtcggcagctctgctgtccaccccaccaggacccgatatactgtattctattatt

SEQ ID NO: 84378 - DNA, 103 bp, Homo sapiens; identical to SEQ ID NO: 26365
  chr12:69644223-69644326
  hypo

SEQ ID NO: 84379 - DNA, 30 bp, Homo sapiens
  chr12:69656304-69656334
  hypo
agcgtgaccgagagcgcgaatatcgtcatc

SEQ ID NO: 84380 - DNA, 34 bp, Homo sapiens
  chr12:69820433-69820467
  hypo
agccaccgcatccggcctaaattctcctttaaac

SEQ ID NO: 84381 - DNA, 18 bp, Homo sapiens
  chr12:69896231-69896249
  hypo
tcaaactccgaggctcga

SEQ ID NO: 84382 - DNA, 127 bp, Homo sapiens; identical to SEQ ID NO: 26366
  chr12:69964170-69964297
  hypo

SEQ ID NO: 84383 - DNA, 30 bp, Homo sapiens; identical to SEQ ID NO: 26367
  chr12:69965239-69965269
  hypo

SEQ ID NO: 84384 - DNA, 30 bp, Homo sapiens
  chr12:69978363-69978393
  hypo
ggggtgagccaccgcgccctgccgaggagc

SEQ ID NO: 84385 - DNA, 154 bp, Homo sapiens
  chr12:69999218-69999372
  hypo
tgcattttcttgccagggctccgaataatagaagtcaacaaaatactctgtacaaaaccctttataaaagtctgctgtgtgccgtattagcatattagatcaatagaagatattaagagaacctttttaaaaatcacaattactggccgggcgc

SEQ ID NO: 84386 - DNA, 179 bp, Homo sapiens
  chr12:70004623-70004802
  hypo
ggctgggggcatggcgagccccagaggacagactcactgagcggggctggctcagctgactgctctggggcctatcctaccctcccattataacttggggattgcatgacaaaagccagtcactttgacagagaaaagtgctcctgatagcaacttgagtgtccggcgacagcgcaaca

SEQ ID NO: 84387 - DNA, 31 bp, Homo sapiens
  chr12:70023345-70023376
  hypo
agaactccaatggcttcgtactgcccctgga

SEQ ID NO: 84388 - DNA, 237 bp, Homo sapiens
  chr12:70087444-70087681
  hypo
tcatagtacctgcttcaaccacgtggtccattgtgggaaatcttttgtacacagcagtgctcaccgagcgaaagatgagcagggaggtgagattgacgtagcgcatcagcgtccttctaagcaggcgcccgtgctcgtcgcttccgtgaacactgctagagatgaggaacattagcctgtctggccagggcaaattcacaaactggttccaccatcggttcactaccagagtaacat

SEQ ID NO: 84389 - DNA, 30 bp, Homo sapiens
  chr12:70094285-70094315
  hypo
tgaggcaacgcacccggccagattcatcac

SEQ ID NO: 84390 - DNA, 31 bp, Homo sapiens
  chr12:70173244-70173275
  hypo
ttgaactccaattactcgaacattttctctt

SEQ ID NO: 84391 - DNA, 172 bp, Homo sapiens; identical to SEQ ID NO: 26371
  chr12:70648186-70648358
  hypo

SEQ ID NO: 84392 - DNA, 101 bp, Homo sapiens
  chr12:70651427-70651528
  hypo
tgagccaccgcgcccggccccaactacccttttcttaagtagactcttcttccctagcatctattgtaattagctattacgctaaaaaaattttgtctttc

SEQ ID NO: 84393 - DNA, 206 bp, Homo sapiens
  chr12:70765936-70766142
  hypo
tgaggaactatgagggcgaaagtgaggttggaccacagtgagcaaggtggacagtgggaaatgaggttagggtcctaaagaacacgatacggactttggattttattccaagcatgatgggaatctgtgacattaagcggggctgaaatatcatcagacttagacttttaaaaaatgcaaatgatccctctcgctgctgagttgaa

SEQ ID NO: 84394 - DNA, 195 bp, Homo sapiens
  chr12:70954497-70954692
  hypo
gttaccacccacagcacgtacttccttccaggaacaaggccttgaaaccgccactccgtcaggtccttgtctttccagttttccttctttgtgccattgggattatagagaatcagctcataaaagtcaaagtccccagaggctggactccagttgaaccaaaggctgtctgtcgtgttccgattggaccccctg

SEQ ID NO: 84395 - DNA, 19 bp, Homo sapiens
  chr12:71278351-71278370
  hypo
attaaaaatttttttgcca

SEQ ID NO: 84396 - DNA, 31 bp, Homo sapiens; identical to SEQ ID NO: 26372
  chr12:71925321-71925352
  hypo

SEQ ID NO: 84397 - DNA, 27 bp, Homo sapiens
  chr12:72042566-72042593
  hypo
acattagaaaataattcgagcagccag

SEQ ID NO: 84398 - DNA, 43 bp, Homo sapiens
  chr12:72098320-72098363
  hypo
ctttaaaaatgaaaacacagccggacgaggtggcttatgcctg

SEQ ID NO: 84399 - DNA, 121 bp, Homo sapiens
  chr12:72127144-72127265
  hypo
ctgtttccaaaaaaaaaaaagagagagagacagaaactgttttctaattttgatttccaaatgttgctattataaagaaatacaactgattttgttttgtttcgttttgttttttggagac

SEQ ID NO: 84400 - DNA, 31 bp, Homo sapiens
  chr12:72147562-72147593
  hypo
ttggaggcaggccgggcgtggtggctcacac

SEQ ID NO: 84401 - DNA, 29 bp, Homo sapiens
  chr12:72150915-72150944
  hypo
ttgagtcttgccctgtcgcccaggctgaa

SEQ ID NO: 84402 - DNA, 105 bp, Homo sapiens; identical to SEQ ID NO: 26376
  chr12:72165398-72165503
  hypo

SEQ ID NO: 84403 - DNA, 41 bp, Homo sapiens; identical to SEQ ID NO: 26377
  chr12:72642201-72642242
  hypo

SEQ ID NO: 84404 - DNA, 103 bp, Homo sapiens
  chr12:73130928-73131031
  hypo
atgtctcacaagctataagatcgtcaagcctccaggcttcagttttcttttccgtaaaatgggcttaaaaattatactcaagtcgggccgggcgcggtgactc

SEQ ID NO: 84405 - DNA, 17 bp, Homo sapiens
  chr12:73147747-73147764
  hypo
cactgaaatcccaggag

SEQ ID NO: 84406 - DNA, 17 bp, Homo sapiens
  chr12:73148063-73148080
  hypo
ttgtgattcttctggtc

SEQ ID NO: 84407 - DNA, 22 bp, Homo sapiens
  chr12:73732446-73732468
  hypo
gggattacgggcgtgagccact

SEQ ID NO: 84408 - DNA, 167 bp, Homo sapiens
  chr12:74564710-74564877
  hypo
gccctgttagggtcttgcctccggccaccacttgtcccatctcgtccccgcctgcgcctcccgccccccgttctccgtcatccctgctccagccgctccagggaagccagcctcggcagccaccgtgaagaggaagcggaagagccggtggaggccagaagagaata

SEQ ID NO: 84409 - DNA, 20 bp, Homo sapiens
  chr12:74691583-74691603
  hypo
ccaccgcgcccggcctactc

SEQ ID NO: 84410 - DNA, 20 bp, Homo sapiens
  chr12:74952274-74952294
  hypo
ttttttttttttgagacgga

SEQ ID NO: 84411 - DNA, 125 bp, Homo sapiens
  chr12:75699402-75699527
  hypo
tcagcagcaggccgcggagaagggcggcgcccaccaggcccctagcactgcccagtctggcccggcacagctgctgcagaaggcgcacgacgagctcgtgtggtacatgcgggtcaaggaccaga

SEQ ID NO: 84412 - DNA, 30 bp, Homo sapiens
  chr12:75890434-75890464
  hypo
tgaactcagagcagccgggctagagtaggg

SEQ ID NO: 84413 - DNA, 31 bp, Homo sapiens
  chr12:76417874-76417905
  hypo
actatactgttcttaccgttgaaaaagaagt

SEQ ID NO: 84414 - DNA, 30 bp, Homo sapiens; identical to SEQ ID NO: 26381
  chr12:76530992-76531022
  hypo

SEQ ID NO: 84415 - DNA, 32 bp, Homo sapiens
  chr12:76706640-76706672
  hypo
ctctttaaaaagagggagcagcgggctgggcg

SEQ ID NO: 84416 - DNA, 19 bp, Homo sapiens
  chr12:76848714-76848733
  hypo
ggataaaaaagcagcagag

SEQ ID NO: 84417 - DNA, 121 bp, Homo sapiens; identical to SEQ ID NO: 26382
  chr12:76878983-76879104
  hypo

SEQ ID NO: 84418 - DNA, 39 bp, Homo sapiens; identical to SEQ ID NO: 26383
  chr12:76879283-76879322
  hypo

SEQ ID NO: 84419 - DNA, 30 bp, Homo sapiens
  chr12:76891990-76892020
  hypo
cctggccaacatggcgaaaccctgtctacg

SEQ ID NO: 84420 - DNA, 30 bp, Homo sapiens
  chr12:77002047-77002077
  hypo
cccactctcccagtgcgcgggcggtccccc

SEQ ID NO: 84421 - DNA, 87 bp, Homo sapiens
  chr12:77085815-77085902
  hypo
gagataaggcatgtaaataaacgaccactgggtgaggcagaaaaagtgtactgagtgtgtaacgccaaaggttcttttgtttgtttg

SEQ ID NO: 84422 - DNA, 39 bp, Homo sapiens; identical to SEQ ID NO: 26384
  chr12:77216171-77216210
  hypo

SEQ ID NO: 84423 - DNA, 30 bp, Homo sapiens
  chr12:77244824-77244854
  hypo
gtctttctcacactcgaatccacatccttt

SEQ ID NO: 84424 - DNA, 43 bp, Homo sapiens; identical to SEQ ID NO: 8928
  chr12:77272815-77272858
  hypo

SEQ ID NO: 84425 - DNA, 28 bp, Homo sapiens
  chr12:77317341-77317369
  hypo
gtctctgttgcccacacgggagggcagt

SEQ ID NO: 84426 - DNA, 30 bp, Homo sapiens; identical to SEQ ID NO: 26386
  chr12:77378548-77378578
  hypo

SEQ ID NO: 84427 - DNA, 55 bp, Homo sapiens
  chr12:77424234-77424289
  hypo
gcacttgctgagcacgtgttagctcatcccagagttagacgcccaggtatggcct

SEQ ID NO: 84428 - DNA, 33 bp, Homo sapiens; identical to SEQ ID NO: 26387
  chr12:77453496-77453529
  hypo

SEQ ID NO: 84429 - DNA, 30 bp, Homo sapiens; identical to SEQ ID NO: 8932
  chr12:77928810-77928840
  hypo

SEQ ID NO: 84430 - DNA, 187 bp, Homo sapiens
  chr12:79842726-79842913
  hypo
ctatgacaagattggcaagaacgatgccatcggcaaagtctttgtgggctacaacagcaccggcgcggagctgcgacactggtcagacatgctggccaaccccaggcgacctattgcccagtggcacaccctgcaggtagaggaggaagttgatgccatgctggccgtcaagaagtaaaggaaagaa

SEQ ID NO: 84431 - DNA, 165 bp, Homo sapiens
  chr12:79926687-79926852
  hypo
gcgtgagccaccgcgcccgaccatagaccagcctttactcagctaacagtatgcaggcctgttagagtaaggagagctctgctccaagtgttgacaaatatccctccccctgtggctaaatcagcctgcccggtcatccgtgacgaaagtttgagctcaccagga

SEQ ID NO: 84432 - DNA, 31 bp, Homo sapiens; identical to SEQ ID NO: 8935
  chr12:80083437-80083468
  hypo

SEQ ID NO: 84433 - DNA, 433 bp, Homo sapiens; identical to SEQ ID NO: 8936
  chr12:80084656-80085089
  hypo

SEQ ID NO: 84434 - DNA, 20 bp, Homo sapiens
  chr12:80194519-80194539
  hypo
ttttttttttttgaaacgga

SEQ ID NO: 84435 - DNA, 42 bp, Homo sapiens
  chr12:80871261-80871303
  hypo
ttctgctccttacttacatttcgagaacaatgtttagaaatt

SEQ ID NO: 84436 - DNA, 1556 bp, Homo sapiens; identical to SEQ ID NO: 49884
  chr12:81330304-81331860
  hypo

SEQ ID NO: 84437 - DNA, 232 bp, Homo sapiens; identical to SEQ ID NO: 8944
  chr12:83080990-83081222
  hypo

SEQ ID NO: 84438 - DNA, 30 bp, Homo sapiens; identical to SEQ ID NO: 8954
  chr12:85918797-85918827
  hypo

SEQ ID NO: 84439 - DNA, 39 bp, Homo sapiens
  chr12:86216674-86216713
  hypo
ccaccacaaaatgtctactgccggccaggcacggtggct

SEQ ID NO: 84440 - DNA, 41 bp, Homo sapiens
  chr12:89020038-89020079
  hypo
aacaaatccggctgggcgaggtggctcacgcctgtaatgtc

SEQ ID NO: 84441 - DNA, 450 bp, Homo sapiens; identical to SEQ ID NO: 8957
  chr12:89747141-89747591
  hypo

SEQ ID NO: 84442 - DNA, 30 bp, Homo sapiens; identical to SEQ ID NO: 26398
  chr12:89785810-89785840
  hypo

SEQ ID NO: 84443 - DNA, 24 bp, Homo sapiens
  chr12:89789130-89789154
  hypo
tatggggagggtaggccgggcgcg

SEQ ID NO: 84444 - DNA, 95 bp, Homo sapiens; identical to SEQ ID NO: 26399
  chr12:89800519-89800614
  hypo

SEQ ID NO: 84445 - DNA, 17 bp, Homo sapiens
  chr12:89900851-89900868
  hypo
agctgggcaacgtctcg

SEQ ID NO: 84446 - DNA, 34 bp, Homo sapiens; identical to SEQ ID NO: 26400
  chr12:89915162-89915196
  hypo

SEQ ID NO: 84447 - DNA, 158 bp, Homo sapiens
  chr12:89916943-89917101
  hypo
attataatctaaacattcagacgagatccctctactgcgaatagccccatgccagcctggtctatcctctggaacatgtaaattaggaaaaacgtttttcaaataccagtcaaagctcttgcatctcaaccgctctcgtagtaattttctttcagaaa

SEQ ID NO: 84448 - DNA, 31 bp, Homo sapiens; identical to SEQ ID NO: 26401
  chr12:89919632-89919663
  hypo

SEQ ID NO: 84449 - DNA, 30 bp, Homo sapiens
  chr12:89986558-89986588
  hypo
taggtcacaagtatcgaggccagggcttct

SEQ ID NO: 84450 - DNA, 127 bp, Homo sapiens; identical to SEQ ID NO: 26402
  chr12:90049545-90049672
  hypo

SEQ ID NO: 84451 - DNA, 244 bp, Homo sapiens
  chr12:90313457-90313701
  hypo
ttctccaacacagacccggtgagaggtactgggcgatgaggaagtacagctccaactccatgagaggcaccgggcctcaggtggacaaggcctcctccttggccgggcgctgggcgggaggcgggagcgagcgtgctagccaagcatgtgggccgcgctgaggcttgacgaggccggcgtcccttttcctgaggcacgtgcgccgccgccgccatcatgccgtgcgcgccgccctaatgctttt

SEQ ID NO: 84452 - DNA, 30 bp, Homo sapiens; identical to SEQ ID NO: 26404
  chr12:91348062-91348092
  hypo

SEQ ID NO: 84453 - DNA, 76 bp, Homo sapiens
  chr12:93475465-93475541
  hypo
cgtgaggatagcccaccccaagggaagaatcaagggaggagaaacagaaacccaggaaccacgccaatggagaaaa

SEQ ID NO: 84454 - DNA, 185 bp, Homo sapiens
  chr12:93709061-93709246
  hypo
aaaaaaaatgcgcaccgccgggcccgcctccctcagcacccaatgctggtcggagccctcgggcaaacaaactacctcctgcatccgggaacttaccctccaggcggaaggaaagaatgcggggacagagacctgtcctgggagaagctccttaggagatgaaggagcaccgaaagatgcctgac

SEQ ID NO: 84455 - DNA, 171 bp, Homo sapiens
  chr12:93710943-93711114
  hypo
tcatgtcttctaacatcgacccaggactcccgcttctctttacaccatatactgttctttatgtgccgctgtttttctctttatagtttttctaggacaaaaaccaagctccatcagaaggttaaacctgtgtcaggtttacagtccaatgaccgccgtgggtcataatcc

SEQ ID NO: 84456 - DNA, 25 bp, Homo sapiens
  chr12:93720902-93720927
  hypo
agcaaaactccgtctcaaaaaaaaa

SEQ ID NO: 84457 - DNA, 97 bp, Homo sapiens
  chr12:93738882-93738979
  hypo
acatgacatatgccaccgcaagtacattcatccaatatgtgcatgttacagggctatgcactgcgaagtcttgtttgcttgttttttgagatgggag

SEQ ID NO: 84458 - DNA, 31 bp, Homo sapiens; identical to SEQ ID NO: 26405
  chr12:93797480-93797511
  hypo

SEQ ID NO: 84459 - DNA, 1186 bp, Homo sapiens; identical to SEQ ID NO: 8960
  chr12:93966029-93967215
  hypo

SEQ ID NO: 84460 - DNA, 529 bp, Homo sapiens; identical to SEQ ID NO: 8961
  chr12:93985155-93985684
  hypo

SEQ ID NO: 84461 - DNA, 30 bp, Homo sapiens; identical to SEQ ID NO: 26408
  chr12:94077129-94077159
  hypo

SEQ ID NO: 84462 - DNA, 43 bp, Homo sapiens; identical to SEQ ID NO: 26409
  chr12:94145344-94145387
  hypo

SEQ ID NO: 84463 - DNA, 263 bp, Homo sapiens
  chr12:94145626-94145889
  hypo
agactctgtttcaaaaacacaaacaaaaaatcctttatctttactttgctcctttcaggatagctctggaatttgaatctgctttccagagctttattctcaactgccagcctcatttttcatactgtagttacttaagggtggaggtagtcgggccggcaagtaactacctgcagtgtacttgagaacctttgaaagcatctgtacttgccaagggtggggcatgtatgcttgagagccctttaaagcgtctttacttgcta

SEQ ID NO: 84464 - DNA, 41 bp, Homo sapiens
  chr12:94203994-94204035
  hypo
gaagacaggaagagaaagaaccgatgtgccttaagaatagg

SEQ ID NO: 84465 - DNA, 30 bp, Homo sapiens
  chr12:94246127-94246157
  hypo
gcaaggaatctgtcacgcataaagacactc

SEQ ID NO: 84466 - DNA, 30 bp, Homo sapiens; identical to SEQ ID NO: 26410
  chr12:94533218-94533248
  hypo

SEQ ID NO: 84467 - DNA, 1324 bp, Homo sapiens; identical to SEQ ID NO: 49919
  chr12:94542796-94544120
  hypo

SEQ ID NO: 84468 - DNA, 30 bp, Homo sapiens; identical to SEQ ID NO: 8963
  chr12:94544421-94544451
  hypo

SEQ ID NO: 84469 - DNA, 208 bp, Homo sapiens
  chr12:94658438-94658646
  hypo
gcatttttttaaatgtcgtttatttctggcttgctaaagggtgattaaatacgaatgtaaacaaaggtacactctccacatctaactgttcctaggcattaacccactgatgagcattagtctgccatatgtaagtttaaacataaaataacaaggtatactgtgggtactgcacgtcgctgtgaatgtgcacgcgtgcgcgtgtgca

SEQ ID NO: 84470 - DNA, 30 bp, Homo sapiens
  chr12:94852075-94852105
  hypo
ctaaatacagtccgcgcacttcatctgatc

SEQ ID NO: 84471 - DNA, 23 bp, Homo sapiens
  chr12:94852490-94852513
  hypo
gcgacagagtgagactcagtcat

SEQ ID NO: 84472 - DNA, 30 bp, Homo sapiens
  chr12:94975746-94975776
  hypo
tgccaaacttattccggatcaggttggcaa

SEQ ID NO: 84473 - DNA, 78 bp, Homo sapiens
  chr12:95397955-95398033
  hypo
gtggcgcgtgcccgtagtcccagctactcggtaggctgaggcttagatgggagcatcgcttgagcctaaaaaatttca

SEQ ID NO: 84474 - DNA, 41 bp, Homo sapiens
  chr12:95467947-95467988
  hypo
ataatcactagagactgggcacggtagctcacgcctgtaat

SEQ ID NO: 84475 - DNA, 29 bp, Homo sapiens
  chr12:95492652-95492681
  hypo
tttttttttttgagacggagtctcgctct

SEQ ID NO: 84476 - DNA, 90 bp, Homo sapiens
  chr12:95492920-95493010
  hypo
gggattataggcgtgagccactgcacctgacttgacccttttaatttttaatccactgtgtcccgatgcgcagcacaatgcctggcccaa

SEQ ID NO: 84477 - DNA, 42 bp, Homo sapiens
  chr12:95562126-95562168
  hypo
cttgcttattttcataaaaatcgttaatagcagccaggcgcg

SEQ ID NO: 84478 - DNA, 153 bp, Homo sapiens
  chr12:95602735-95602888
  hypo
aactcttgagttttccgtatagccataataaatggcaagttctcgtactctggtatttcctcataatggcgtatattttcatactccggtgcacagaggcttgtaacagacttgtaaggtgcctgagatgatgactcccgggagagcatttgg

SEQ ID NO: 84479 - DNA, 210 bp, Homo sapiens
  chr12:95676256-95676466
  hypo
ttggaagagcttaagcgcagctatgagttctatcggtactttgaaactcagcaccagtcagtaccgcagtgtttatccaaaactcaacagaagtcaagagaactgaataatgttcacacagcagtgcgtagcttgcagctccatctgaaagcattactgaatgagtaagtttagaaattataccaagaaaggtctcggtaattagcaagc

SEQ ID NO: 84480 - DNA, 31 bp, Homo sapiens
  chr12:95802944-95802975
  hypo
aagtgcctgagttatacggctacgtggctac

SEQ ID NO: 84481 - DNA, 29 bp, Homo sapiens
  chr12:95823033-95823062
  hypo
ccgcgcccggccagtccttctctatctgg

SEQ ID NO: 84482 - DNA, 17 bp, Homo sapiens
  chr12:95863738-95863755
  hypo
tggagtgttgctctgtc

SEQ ID NO: 84483 - DNA, 38 bp, Homo sapiens
  chr12:95900347-95900385
  hypo
tacaggcatgagtcaccgtgcccagcctatatatgttt

SEQ ID NO: 84484 - DNA, 28 bp, Homo sapiens
  chr12:95901842-95901870
  hypo
caccgcacccagccgattcacatattct

SEQ ID NO: 84485 - DNA, 30 bp, Homo sapiens; identical to SEQ ID NO: 49928
  chr12:96027743-96027773
  hypo

SEQ ID NO: 84486 - DNA, 31 bp, Homo sapiens
  chr12:96043430-96043461
  hypo
aatgttttctgcaggccgggcatggtggctc

SEQ ID NO: 84487 - DNA, 83 bp, Homo sapiens
  chr12:96115681-96115764
  hypo
aagtgtgcatgtgcatgcacacgtgcgcgcacacacacactcacacacaaatttccaaatgcgaccccatctgtgtacattga

SEQ ID NO: 84488 - DNA, 43 bp, Homo sapiens
  chr12:96131870-96131913
  hypo
cactgtaagggttctctgtatcgtatggtggtgacaaagcttt

SEQ ID NO: 84489 - DNA, 30 bp, Homo sapiens; identical to SEQ ID NO: 8967
  chr12:96184005-96184035
  hypo

SEQ ID NO: 84490 - DNA, 376 bp, Homo sapiens; identical to SEQ ID NO: 8968
  chr12:96184964-96185340
  hypo

SEQ ID NO: 84491 - DNA, 175 bp, Homo sapiens
  chr12:96566282-96566457
  hypo
aagacaaataaaatgtgggggcggagatgggaagttgggttgcccataaaattcgcccacaatctcatgaccgagacaagagcagttgactaaccctaatagaaactctagaagaagtgttatggtcggaacaaaatgtgctacttttgactgcggagttgaaaatagttcacag

SEQ ID NO: 84492 - DNA, 74 bp, Homo sapiens; identical to SEQ ID NO: 49936
  chr12:96587651-96587725
  hypo

SEQ ID NO: 84493 - DNA, 34 bp, Homo sapiens; identical to SEQ ID NO: 49937
  chr12:96618051-96618085
  hypo

SEQ ID NO: 84494 - DNA, 30 bp, Homo sapiens
  chr12:96641020-96641050
  hypo
gaagacagcccccccgtggaagaagtcagg

SEQ ID NO: 84495 - DNA, 24 bp, Homo sapiens
  chr12:96881021-96881045
  hypo
cacgacacccagccaatttaattt

SEQ ID NO: 84496 - DNA, 63 bp, Homo sapiens
  chr12:97339535-97339598
  hypo
agcattggaaataaccggcaaaatgcaccattgacttccattcaaattcgttttattcagaac

SEQ ID NO: 84497 - DNA, 31 bp, Homo sapiens
  chr12:98815582-98815613
  hypo
caagccactgattgagcgatataatggactc

SEQ ID NO: 84498 - DNA, 19 bp, Homo sapiens
  chr12:98825880-98825899
  hypo
gaattccagctgggggcgg

SEQ ID NO: 84499 - DNA, 18 bp, Homo sapiens
  chr12:98826138-98826156
  hypo
agccggggtgacagagtg

SEQ ID NO: 84500 - DNA, 26 bp, Homo sapiens
  chr12:98947595-98947621
  hypo
gtcttttttttctttttgagacggag

SEQ ID NO: 84501 - DNA, 241 bp, Homo sapiens
  chr12:98947860-98948101
  hypo
gtgctaggattacaggcgtgagccaccgcgccgggccaatatctagcagtctttcatagatgtaatggtaataccaggggatgagagagtgcagggggaaaaataatttcttaagaaatggctgaaaatttactaagttcccagaaactatataagcccaagtatgggaagttcaagtgaccccaaaacaaagtcaaaccaaggcaactgtggccgggcgcggtggctcatgcctgtaatc

SEQ ID NO: 84502 - DNA, 85 bp, Homo sapiens
  chr12:98948340-98948425
  hypo
agtgagactccgtctcaaaaaaaaaaaaaaaaaaaaaacaaggcaactttagtgaagctattgcgtaccagtttatgataaaggg

SEQ ID NO: 84503 - DNA, 86 bp, Homo sapiens
  chr12:98983723-98983809
  hypo
tgaggtggttgcctggcgggatctgctgattcttcttaaaacctactgtccactttgggaggccgaggcaggtggatcacctgagg

SEQ ID NO: 84504 - DNA, 990 bp, Homo sapiens; identical to SEQ ID NO: 49948
  chr12:99287417-99288407
  hypo

SEQ ID NO: 84505 - DNA, 315 bp, Homo sapiens; identical to SEQ ID NO: 8974
  chr12:99288621-99288936
  hypo

SEQ ID NO: 84506 - DNA, 353 bp, Homo sapiens; identical to SEQ ID NO: 49950
  chr12:99289161-99289514
  hypo

SEQ ID NO: 84507 - DNA, 31 bp, Homo sapiens
  chr12:100352715-100352746
  hypo
atgttcaataggacaccggggataacatgtc

SEQ ID NO: 84508 - DNA, 31 bp, Homo sapiens
  chr12:100710890-100710921
  hypo
aagaaaaaatttcttccgaatattcttccct

SEQ ID NO: 84509 - DNA, 27 bp, Homo sapiens
  chr12:100712398-100712425
  hypo
tgggcgtggccacgtgtgcctttttct

SEQ ID NO: 84510 - DNA, 34 bp, Homo sapiens; identical to SEQ ID NO: 26426
  chr12:100969542-100969576
  hypo

SEQ ID NO: 84511 - DNA, 170 bp, Homo sapiens; identical to SEQ ID NO: 26427
  chr12:101711199-101711369
  hypo

SEQ ID NO: 84512 - DNA, 95 bp, Homo sapiens; identical to SEQ ID NO: 26428
  chr12:101718175-101718270
  hypo

SEQ ID NO: 84513 - DNA, 31 bp, Homo sapiens; identical to SEQ ID NO: 8980
  chr12:101762739-101762770
  hypo

SEQ ID NO: 84514 - DNA, 23 bp, Homo sapiens
  chr12:101861451-101861474
  hypo
aaaagctctcaaggccaggtgcg

SEQ ID NO: 84515 - DNA, 198 bp, Homo sapiens
  chr12:102132857-102133055
  hypo
ggagacgcgcggagcgaggtagggccctgcccggccccgccgcgtccctcctgtaagtggtcccagggtgtagcgatggggcccagccccagcccagcccgcccgctttccactaggccctatcctgctcaaggccctgtcctcaggttcgcggcctccgttttctcgtcagaggccccaggcgacgccaggaggtaa

SEQ ID NO: 84516 - DNA, 57 bp, Homo sapiens
  chr12:102133324-102133381
  hypo
cgtgaactgggtggcgaggctccgcccccatggggcgattgcgcgcccaaatagctg

SEQ ID NO: 84517 - DNA, 30 bp, Homo sapiens
  chr12:102267343-102267373
  hypo
tttcaaccaaaactcggtcaaggagtggaa

SEQ ID NO: 84518 - DNA, 34 bp, Homo sapiens
  chr12:102276170-102276204
  hypo
agccaccgcgcccggcccctgatggtctaatgtt

SEQ ID NO: 84519 - DNA, 31 bp, Homo sapiens; identical to SEQ ID NO: 26432
  chr12:102280965-102280996
  hypo

SEQ ID NO: 84520 - DNA, 30 bp, Homo sapiens; identical to SEQ ID NO: 26433
  chr12:102288360-102288390
  hypo

SEQ ID NO: 84521 - DNA, 261 bp, Homo sapiens; identical to SEQ ID NO: 26434
  chr12:102301885-102302146
  hypo

SEQ ID NO: 84522 - DNA, 32 bp, Homo sapiens
  chr12:102457127-102457159
  hypo
aaaggaagatttggcccgcaatcagtctgatt

SEQ ID NO: 84523 - DNA, 842 bp, Homo sapiens; identical to SEQ ID NO: 49971
  chr12:103351143-103351985
  hypo

SEQ ID NO: 84524 - DNA, 103 bp, Homo sapiens; identical to SEQ ID NO: 8987
  chr12:103352051-103352154
  hypo

SEQ ID NO: 84525 - DNA, 112 bp, Homo sapiens; identical to SEQ ID NO: 8988
  chr12:103352170-103352282
  hypo

SEQ ID NO: 84526 - DNA, 469 bp, Homo sapiens; identical to SEQ ID NO: 8989
  chr12:103352313-103352782
  hypo

SEQ ID NO: 84527 - DNA, 30 bp, Homo sapiens; identical to SEQ ID NO: 49978
  chr12:103481413-103481443
  hypo

SEQ ID NO: 84528 - DNA, 30 bp, Homo sapiens; identical to SEQ ID NO: 49979
  chr12:103602171-103602201
  hypo

SEQ ID NO: 84529 - DNA, 99 bp, Homo sapiens
  chr12:103970053-103970152
  hypo
cacaaaaaaaaaaaaaaaaaaagattgttgtgcctgccgatagaatcccttggtttaattttactaaaagtacaagacgaggaagaaaatataactttt

SEQ ID NO: 84530 - DNA, 30 bp, Homo sapiens; identical to SEQ ID NO: 49982
  chr12:104036483-104036513
  hypo

SEQ ID NO: 84531 - DNA, 40 bp, Homo sapiens; identical to SEQ ID NO: 26439
  chr12:104220731-104220771
  hypo

SEQ ID NO: 84532 - DNA, 797 bp, Homo sapiens; identical to SEQ ID NO: 49984
  chr12:104322591-104323388
  hypo

SEQ ID NO: 84533 - DNA, 30 bp, Homo sapiens; identical to SEQ ID NO: 8998
  chr12:104459091-104459121
  hypo

SEQ ID NO: 84534 - DNA, 30 bp, Homo sapiens
  chr12:104464092-104464122
  hypo
actgcgcccggccaaatttattctttttta

SEQ ID NO: 84535 - DNA, 38 bp, Homo sapiens; identical to SEQ ID NO: 26441
  chr12:104506940-104506978
  hypo

SEQ ID NO: 84536 - DNA, 30 bp, Homo sapiens; identical to SEQ ID NO: 26442
  chr12:104532892-104532922
  hypo

SEQ ID NO: 84537 - DNA, 31 bp, Homo sapiens; identical to SEQ ID NO: 26443
  chr12:104598457-104598488
  hypo

SEQ ID NO: 84538 - DNA, 24 bp, Homo sapiens
  chr12:104671655-104671679
  hypo
tctttttttttttttttgagacga

SEQ ID NO: 84539 - DNA, 31 bp, Homo sapiens; identical to SEQ ID NO: 26445
  chr12:104684139-104684170
  hypo

SEQ ID NO: 84540 - DNA, 18 bp, Homo sapiens
  chr12:104684834-104684852
  hypo
cctcggcctcctaaagtg

SEQ ID NO: 84541 - DNA, 43 bp, Homo sapiens
  chr12:104685527-104685570
  hypo
gggattatgggcgtgagccaccgggcccagccctatttttgtt

SEQ ID NO: 84542 - DNA, 93 bp, Homo sapiens; identical to SEQ ID NO: 26447
  chr12:104686066-104686159
  hypo

SEQ ID NO: 84543 - DNA, 36 bp, Homo sapiens
  chr12:104691423-104691459
  hypo
taagctaccatgcccggcctgattttgtttttaatg

SEQ ID NO: 84544 - DNA, 17 bp, Homo sapiens
  chr12:104693544-104693561
  hypo
caaaaaaaaaaaaaaaa

SEQ ID NO: 84545 - DNA, 78 bp, Homo sapiens
  chr12:104695396-104695474
  hypo
gagccaccgtgcccggctgcttttgttgaatttaaagtggatgtgagaagctcctaagaatatcgttcactgtaaaag

SEQ ID NO: 84546 - DNA, 93 bp, Homo sapiens
  chr12:104696545-104696638
  hypo
cgtgagccaccgcgcccggccattcccattgttatgtatactttgctatttgctgctggtgagacagataaggagtcacgtctttaactgcac

SEQ ID NO: 84547 - DNA, 37 bp, Homo sapiens; identical to SEQ ID NO: 26451
  chr12:104702053-104702090
  hypo

SEQ ID NO: 84548 - DNA, 36 bp, Homo sapiens; identical to SEQ ID NO: 26452
  chr12:104703966-104704002
  hypo

SEQ ID NO: 84549 - DNA, 30 bp, Homo sapiens
  chr12:104744650-104744680
  hypo
cctcttagttacctcgcagtgcagcctccc

SEQ ID NO: 84550 - DNA, 299 bp, Homo sapiens; identical to SEQ ID NO: 49992
  chr12:104850237-104850536
  hypo

SEQ ID NO: 84551 - DNA, 2255 bp, Homo sapiens; identical to SEQ ID NO: 49993
  chr12:104850577-104852832
  hypo

SEQ ID NO: 84552 - DNA, 31 bp, Homo sapiens
  chr12:105056938-105056969
  hypo
cttccagaggcctgggcgagccctgtctaac

SEQ ID NO: 84553 - DNA, 30 bp, Homo sapiens
  chr12:105071468-105071498
  hypo
aagttcaaatgtggcgcatagctgcgcaca

SEQ ID NO: 84554 - DNA, 65 bp, Homo sapiens; identical to SEQ ID NO: 26455
  chr12:105096594-105096659
  hypo

SEQ ID NO: 84555 - DNA, 30 bp, Homo sapiens; identical to SEQ ID NO: 26456
  chr12:105106499-105106529
  hypo

SEQ ID NO: 84556 - DNA, 30 bp, Homo sapiens; identical to SEQ ID NO: 26457
  chr12:105132895-105132925
  hypo

SEQ ID NO: 84557 - DNA, 30 bp, Homo sapiens; identical to SEQ ID NO: 26458
  chr12:105150855-105150885
  hypo

SEQ ID NO: 84558 - DNA, 221 bp, Homo sapiens
  chr12:105392691-105392912
  hypo
ggggcagggtactggtggctgcgggactggtgccaaatgtgcgcacgtttatgctggctgcagtggctgcacagggcgcagggcaggtccactggtcactgtgcctagttttgcagctggtggcagtgttggtgtcggagtggggtactggtggtctccgtacctgcagatactccagtggcagtggcagcatggtggtcgggtgcagtgtgctcaagcca

SEQ ID NO: 84559 - DNA, 30 bp, Homo sapiens
  chr12:105472711-105472741
  hypo
ggtgacaagcgacaccgtagcaagagacat

SEQ ID NO: 84560 - DNA, 30 bp, Homo sapiens; identical to SEQ ID NO: 49998
  chr12:106216288-106216318
  hypo

SEQ ID NO: 84561 - DNA, 118 bp, Homo sapiens; identical to SEQ ID NO: 26459
  chr12:106460687-106460805
  hypo

SEQ ID NO: 84562 - DNA, 31 bp, Homo sapiens; identical to SEQ ID NO: 50000
  chr12:106532782-106532813
  hypo

SEQ ID NO: 84563 - DNA, 31 bp, Homo sapiens
  chr12:106537677-106537708
  hypo
gctccaacccctatcccgagctcatgtcaat

SEQ ID NO: 84564 - DNA, 265 bp, Homo sapiens; identical to SEQ ID NO: 50002
  chr12:106640991-106641256
  hypo

SEQ ID NO: 84565 - DNA, 55 bp, Homo sapiens; identical to SEQ ID NO: 9007
  chr12:106641514-106641569
  hypo

SEQ ID NO: 84566 - DNA, 143 bp, Homo sapiens
  chr12:106643970-106644113
  hypo
gcacaggtctctgacctgtggcgcggggagacagcagaagaaatcagaagacactcatcacaggaaccttgtttaaaaactattcagctgagttcgggttgtgttgttaaaatctctagcgcgcaaaaagaggttatccccct

SEQ ID NO: 84567 - DNA, 43 bp, Homo sapiens
  chr12:106829973-106830016
  hypo
tatttggactttagggtagagcgcacaagtgtctggtggttac

SEQ ID NO: 84568 - DNA, 190 bp, Homo sapiens; identical to SEQ ID NO: 26461
  chr12:106881471-106881661
  hypo

SEQ ID NO: 84569 - DNA, 265 bp, Homo sapiens; identical to SEQ ID NO: 50013
  chr12:106980177-106980442
  hypo

SEQ ID NO: 84570 - DNA, 43 bp, Homo sapiens
  chr12:107103206-107103249
  hypo
atgtaagtactgagttgagagcgggatggaagagagaattaca

SEQ ID NO: 84571 - DNA, 40 bp, Homo sapiens
  chr12:107114441-107114481
  hypo
ggcgtgagccacttcaaccggcctcatttttcaaagagac

SEQ ID NO: 84572 - DNA, 986 bp, Homo sapiens; identical to SEQ ID NO: 50017
  chr12:107167935-107168921
  hypo

SEQ ID NO: 84573 - DNA, 30 bp, Homo sapiens
  chr12:107272881-107272911
  hypo
cgggaagctgaaactcgtataggtaaattc

SEQ ID NO: 84574 - DNA, 231 bp, Homo sapiens
  chr12:107436702-107436933
  hypo
tacaaagtccagctgacggaattacctggagtccacgtaactgtgctcaccgtagagaaaaagcaaacactaggctccacaccctgcagctacagggctactacgctatgccatcgtagaattggaactatggctggagggtgtcttgctctggcggtgagtagccgtgactctccttcatctctgagactaagatgcaactgaaccaccgccccagccaagtggtccaac

SEQ ID NO: 84575 - DNA, 27 bp, Homo sapiens
  chr12:107484818-107484845
  hypo
agtccttttttttttttcttgcgacag

SEQ ID NO: 84576 - DNA, 27 bp, Homo sapiens
  chr12:107485084-107485111
  hypo
gatgagccaccgcgcccagcctaactc

SEQ ID NO: 84577 - DNA, 30 bp, Homo sapiens
  chr12:107889170-107889200
  hypo
cagcggggatggcccggcaggccagtccca

SEQ ID NO: 84578 - DNA, 31 bp, Homo sapiens
  chr12:108012257-108012288
  hypo
cgcacatgcacacacacgtgcacacacacac

SEQ ID NO: 84579 - DNA, 390 bp, Homo sapiens; identical to SEQ ID NO: 50023
  chr12:108169023-108169413
  hypo

SEQ ID NO: 84580 - DNA, 439 bp, Homo sapiens; identical to SEQ ID NO: 50028
  chr12:108297324-108297763
  hypo

SEQ ID NO: 84581 - DNA, 30 bp, Homo sapiens; identical to SEQ ID NO: 9022
  chr12:108594027-108594057
  hypo

SEQ ID NO: 84582 - DNA, 515 bp, Homo sapiens; identical to SEQ ID NO: 26466
  chr12:108926053-108926568
  hypo

SEQ ID NO: 84583 - DNA, 31 bp, Homo sapiens; identical to SEQ ID NO: 26467
  chr12:108931819-108931850
  hypo

SEQ ID NO: 84584 - DNA, 21 bp, Homo sapiens
  chr12:108939449-108939470
  hypo
aaaaacacatttggccaggtg

SEQ ID NO: 84585 - DNA, 33 bp, Homo sapiens; identical to SEQ ID NO: 26469
  chr12:108963689-108963722
  hypo

SEQ ID NO: 84586 - DNA, 30 bp, Homo sapiens
  chr12:108985733-108985763
  hypo
gtcactctggtccacgtacttcttcttggg

SEQ ID NO: 84587 - DNA, 30 bp, Homo sapiens
  chr12:108986004-108986034
  hypo
ggggaggaggccgacgagccctcggcctcc

SEQ ID NO: 84588 - DNA, 30 bp, Homo sapiens
  chr12:109014133-109014163
  hypo
atgcttaaaatcaggcgtcagcaaactgac

SEQ ID NO: 84589 - DNA, 213 bp, Homo sapiens
  chr12:109050946-109051159
  hypo
atccaatctaagacaatcaggcgtttagaaaactacactaagaatcccataatctacttactcactggaagacctgctcagaacagagagaaagctcaagtgaaagcaagtggaaagcctggggagggcgtaccggattccagagagccagctgccgctcgctcatgcggctgaacccagtggtgaagacattgccatcggccaggaagatgg

SEQ ID NO: 84590 - DNA, 29 bp, Homo sapiens
  chr12:109107871-109107900
  hypo
aaagaacaacctgggccgggcacagtggc

SEQ ID NO: 84591 - DNA, 30 bp, Homo sapiens
  chr12:109186582-109186612
  hypo
acagcttgttgtgccgctgtttgctgcggg

SEQ ID NO: 84592 - DNA, 181 bp, Homo sapiens
  chr12:109204590-109204771
  hypo
ggcccccagggtggcgcttgaaaccttgttgtgcctgtcagttgtatgtctctccttgtacccccaaagctggtgagttcctgctgcaccacattagtccgtgaactttcaggacaagccccatggagggcatgcggtgagagttcacttaacccatcgaggtggcggatgggtatcggtt

SEQ ID NO: 84593 - DNA, 253 bp, Homo sapiens
  chr12:109208563-109208816
  hypo
gggacctgggagaactgaagtcggggtgccgaggggaggcaaagggaggagagggtgggaaggaagagcgccatgggggcggtgcggacgagcgcacgggccagtctcctccagccaggcagcagcggagtgggatgcgcatgtgggcatctaaggcatgcccgtgactgctggcctgtgagctctgtgagactgtaggtgtgtctgccgtgctccctgatgtggccccagcacctggcggggcgcccggcac

SEQ ID NO: 84594 - DNA, 43 bp, Homo sapiens; identical to SEQ ID NO: 26472
  chr12:109213024-109213067
  hypo

SEQ ID NO: 84595 - DNA, 205 bp, Homo sapiens
  chr12:109488355-109488560
  hypo
tcagtctggagtcggagaaagcgattgaaagggagggaaaaatcttgctggctctaatgctttataaactgtgctgtccaatacggtagctgctggccacttggggctattgagcacatgaaaagtgggtactccaaactgagaggtacttagtaccaaaaaacaaaaaaataatgggccgggcgcggtggctcacacctgtaat

SEQ ID NO: 84596 - DNA, 31 bp, Homo sapiens; identical to SEQ ID NO: 26474
  chr12:109506483-109506514
  hypo

SEQ ID NO: 84597 - DNA, 246 bp, Homo sapiens
  chr12:109507774-109508020
  hypo
ccagggcggggagggcggtggaggagaggggctggcgaagttggcagggagcagattgtgcagggactaggaggctgcgggcggcatcagcttctattgtgtttgcagcggggagccactagaggactttgaactggggactggtttgatctgacttgttagaaaaggaaggctggaggggcaagaatgcaagccgagaggaaaggtgggaggccgctgcagttatctggccgagatggtgtggct

SEQ ID NO: 84598 - DNA, 31 bp, Homo sapiens
  chr12:109520626-109520657
  hypo
cgatttctcttccacccgcagctccctcagt

SEQ ID NO: 84599 - DNA, 30 bp, Homo sapiens; identical to SEQ ID NO: 26475
  chr12:109534311-109534341
  hypo

SEQ ID NO: 84600 - DNA, 30 bp, Homo sapiens
  chr12:109644631-109644661
  hypo
tgtctgccagagcccgtttttagcataaag

SEQ ID NO: 84601 - DNA, 211 bp, Homo sapiens
  chr12:109717148-109717359
  hypo
gaagtctcactcaacacgggcaggcattgcggctcaggcctcggaggagtgtcaaggggtcgggggatgctgggttgcttgtccaccttcctccattcttctgacttggaagagcccccagaaactgctccggaagctccagggggaggcacgagaaggagaggggctgctgaggggaaccgcttccctgtccagccggcaacttcgccac

SEQ ID NO: 84602 - DNA, 121 bp, Homo sapiens; identical to SEQ ID NO: 50041
  chr12:109746985-109747106
  hypo

SEQ ID NO: 84603 - DNA, 31 bp, Homo sapiens
  chr12:109873229-109873260
  hypo
aaacttcacttgtctgcgtgtctgatgttgg

SEQ ID NO: 84604 - DNA, 30 bp, Homo sapiens
  chr12:109873504-109873534
  hypo
tgacataggtgctatcgtctccgctttcta

SEQ ID NO: 84605 - DNA, 30 bp, Homo sapiens; identical to SEQ ID NO: 26477
  chr12:109878713-109878743
  hypo

SEQ ID NO: 84606 - DNA, 196 bp, Homo sapiens
  chr12:109881227-109881423
  hypo
aaatgcttgacatcactttaccggtgtctgagtagcaagaaactcggtactctgccccaccttccctggtgaagtcaccttccccttgcagtatggtgtcccggtcattaaatatgacagaaaaggcttcaaagcacggcagcggcaactcattcttactcagaaagcagcttacgtggtggaacttgccaaaatc

SEQ ID NO: 84607 - DNA, 30 bp, Homo sapiens; identical to SEQ ID NO: 26478
  chr12:109887567-109887597
  hypo

SEQ ID NO: 84608 - DNA, 123 bp, Homo sapiens
  chr12:109898490-109898613
  hypo
tggcttctgctagcagctcctcgatctcccggcggctctcgggtaaaggcaccgccccgtctcgaaggtagttgagtatcgtaccaaagtgcttcccacagcggtcaatgaggatccagcctg

SEQ ID NO: 84609 - DNA, 31 bp, Homo sapiens; identical to SEQ ID NO: 26479
  chr12:109906335-109906366
  hypo

SEQ ID NO: 84610 - DNA, 30 bp, Homo sapiens; identical to SEQ ID NO: 26480
  chr12:109911493-109911523
  hypo

SEQ ID NO: 84611 - DNA, 35 bp, Homo sapiens
  chr12:109916249-109916284
  hypo
aatagtctctttaagtcgtgtttcctattctttaa

SEQ ID NO: 84612 - DNA, 30 bp, Homo sapiens
  chr12:109935644-109935674
  hypo
tcagacaatctgattcggccgttcctcatc

SEQ ID NO: 84613 - DNA, 193 bp, Homo sapiens
  chr12:109935996-109936189
  hypo
ttctggcagtttctgatttaacggtctgctattctttgcagcgcctcactgttttagaatcccatgacatgcttcgtaaattcatcatatttttaagagaccaagatcgatgccgtgatgtatgtgaaagtttagaaggatgccatacgctttgtctaatgggtaagtatccgtggctggaacttgattgtgt

SEQ ID NO: 84614 - DNA, 30 bp, Homo sapiens
  chr12:109955675-109955705
  hypo
tctccctcggtgcatcgtaccttgtttgtg

SEQ ID NO: 84615 - DNA, 31 bp, Homo sapiens; identical to SEQ ID NO: 26481
  chr12:109963007-109963038
  hypo

SEQ ID NO: 84616 - DNA, 77 bp, Homo sapiens
  chr12:109973150-109973227
  hypo
gcgcctgctagggacgctatggacaccgtgagtccaaggcgctgctcctgccttgaagccacgcgctccacgccgcg

SEQ ID NO: 84617 - DNA, 30 bp, Homo sapiens
  chr12:109985301-109985331
  hypo
tggggcacccaagccgatgcccgctcctcg

SEQ ID NO: 84618 - DNA, 180 bp, Homo sapiens
  chr12:110019851-110020031
  hypo
tctcctcctacggggccgtctccacggagggcgtgtcacctctctgcgttcctattgaccacgtgagtcagtgaggcctgtccagacaggcttgaccacagaccatttctatcattaggagaatgttccttgagaaaccacccagtgcgcagaggttacgcagtttgtcccaggaccagg

SEQ ID NO: 84619 - DNA, 30 bp, Homo sapiens
  chr12:110025878-110025908
  hypo
agagcctcgggtgccgaggtgaagctggtc

SEQ ID NO: 84620 - DNA, 142 bp, Homo sapiens
  chr12:110164949-110165091
  hypo
agctctccagctctctgtggtcggggtcttctgaggccaggctgggacacactggcctttgtgtgagcttgagccgggccgggcggccagcagagtggggagagggcggtgcagcctggccggccagggacaaatgctcaga

SEQ ID NO: 84621 - DNA, 31 bp, Homo sapiens
  chr12:110169314-110169345
  hypo
agggcttccagctccacgtgagctgaggcat

SEQ ID NO: 84622 - DNA, 30 bp, Homo sapiens
  chr12:110170346-110170376
  hypo
cagatcatttgtaaccgtcaccaggcaatc

SEQ ID NO: 84623 - DNA, 31 bp, Homo sapiens
  chr12:110224373-110224404
  hypo
ggaaatgaactctgctcgggcctcttggggc

SEQ ID NO: 84624 - DNA, 83 bp, Homo sapiens; identical to SEQ ID NO: 26483
  chr12:110224629-110224712
  hypo

SEQ ID NO: 84625 - DNA, 35 bp, Homo sapiens
  chr12:110250927-110250962
  hypo
aagatgaggcgggatgcggtggctcacacctataa

SEQ ID NO: 84626 - DNA, 288 bp, Homo sapiens
  chr12:110258636-110258924
  hypo
cctattaagggatcgtaatagggtcgttgtgagaggtatataccttgagtcaagtgcctggcataaagaaagcctcaataaacagcagattgcacaacagatggcttctctctgagaatcccggattcaaaggcggtggaggtctctggctccgtccccatgccccaacttgcggagggtggaaaaaggggcccatcctcggggttacccgcggctttgcctgatctcatggaaaccctggcaaacatttgtcaaatcccatcctcctgattacgtgaccaaggaaag

SEQ ID NO: 84627 - DNA, 30 bp, Homo sapiens; identical to SEQ ID NO: 26485
  chr12:110340886-110340916
  hypo

SEQ ID NO: 84628 - DNA, 213 bp, Homo sapiens
  chr12:110352926-110353139
  hypo
tctccagctttccacgaggtacacgccacgcatacagcctctccagctttccacgaggtaagcgccacgcatacagcctctccagctttctatgaggtacacaccatgcatacagcctttcaagtcccgcatgctcccttccgttccttggcacgtgcattgctgttgctcagctggattctccagtctgggtagggccgcaggcttaccttc

SEQ ID NO: 84629 - DNA, 30 bp, Homo sapiens; identical to SEQ ID NO: 26486
  chr12:110368219-110368249
  hypo

SEQ ID NO: 84630 - DNA, 193 bp, Homo sapiens; identical to SEQ ID NO: 26487
  chr12:110378868-110379061
  hypo

SEQ ID NO: 84631 - DNA, 30 bp, Homo sapiens
  chr12:110385974-110386004
  hypo
atattaacatatcacgaagaaaactggaaa

SEQ ID NO: 84632 - DNA, 37 bp, Homo sapiens
  chr12:110388923-110388960
  hypo
actatgggattaaagcgtcaaccgtcctggcatttat

SEQ ID NO: 84633 - DNA, 27 bp, Homo sapiens
  chr12:110487901-110487928
  hypo
cggctcgtcctgctacaagactagaag

SEQ ID NO: 84634 - DNA, 43 bp, Homo sapiens
  chr12:110489186-110489229
  hypo
atctggcacatactgagcactcgctataggaaagctgctgccc

SEQ ID NO: 84635 - DNA, 30 bp, Homo sapiens
  chr12:110504564-110504594
  hypo
gcctccccgacctccgtgctgggctcactt

SEQ ID NO: 84636 - DNA, 28 bp, Homo sapiens
  chr12:110507232-110507260
  hypo
agactccgtctcaaaacaaacaaacaaa

SEQ ID NO: 84637 - DNA, 39 bp, Homo sapiens
  chr12:110563200-110563239
  hypo
attttattttttctgttgagacggagtctctctctgtcc

SEQ ID NO: 84638 - DNA, 38 bp, Homo sapiens
  chr12:110563478-110563516
  hypo
agagaacgacagctcccggcagcaactcattgcttaat

SEQ ID NO: 84639 - DNA, 106 bp, Homo sapiens
  chr12:110563721-110563827
  hypo
aaatggaattggacacagatacggaatttacagtttagcagggaagagaagatgcgtacctaaagaactagcacaagatcggccaggcgcggtggctcacgcctgt

SEQ ID NO: 84640 - DNA, 79 bp, Homo sapiens
  chr12:110717674-110717753
  hypo
tccacctggcttctctcagtgcgttgccatatagtataattttttgtttgtttgtttcgtgtagggttttgttggttct

SEQ ID NO: 84641 - DNA, 31 bp, Homo sapiens; identical to SEQ ID NO: 9031
  chr12:110719374-110719405
  hypo

SEQ ID NO: 84642 - DNA, 32 bp, Homo sapiens
  chr12:110767511-110767543
  hypo
cccccgcgcccggccatcctatattttttgac

SEQ ID NO: 84643 - DNA, 445 bp, Homo sapiens; identical to SEQ ID NO: 26490
  chr12:110778336-110778781
  hypo

SEQ ID NO: 84644 - DNA, 30 bp, Homo sapiens
  chr12:110780035-110780065
  hypo
ggcgatggcgtgaacgatgctcctgctctg

SEQ ID NO: 84645 - DNA, 143 bp, Homo sapiens
  chr12:110782617-110782760
  hypo
ctggcctgcatggcctcggtggcagcgagccctgcagaggcaagtgcatcagcatcactgtgtttgttcccaggttacgtcggcgctgctaccgtgggtgctgctgcatggtggttcattgctgctgacggtggtccaagagt

SEQ ID NO: 84646 - DNA, 314 bp, Homo sapiens
  chr12:110783958-110784272
  hypo
ccttccaggggaggctggaggcgtgacacgtcttccctgtgtgtcagctcatcttccagatcacaccgctgaacgtgacccagtggctgatggtgctgaaaatctccttgcccgtgattctcatggatgagacgctcaagtttgtggcccgcaactacctggaacctggtaaagagtgtgtgcagcctgccaccaaatcctgctcgttctcggcatgcaccgatgggatttcctggccgtttgtgctgctcataatgcccctggtgatctgggtctatagcacagacactaactttagcgatatgttctggtct

SEQ ID NO: 84647 - DNA, 110 bp, Homo sapiens
  chr12:110784842-110784952
  hypo
ctccccaccttacccccgccccgcttggcttcttctttaggattgtgatggttcgttctgtttacatcagttttaacgagaggtatgcctgtactcgcttgtgcagaaaa

SEQ ID NO: 84648 - DNA, 43 bp, Homo sapiens
  chr12:110785574-110785617
  hypo
cttccaacatccatcaactaacgtgagtattttcttcctggga

SEQ ID NO: 84649 - DNA, 43 bp, Homo sapiens; identical to SEQ ID NO: 26492
  chr12:110806696-110806739
  hypo

SEQ ID NO: 84650 - DNA, 129 bp, Homo sapiens
  chr12:110808030-110808159
  hypo
actcatctaaggacacgtgggttgtttccaccttttgctgctgtggacagtgctgcgtggacatggacgtgcaatcttttggcgttccagctttcacttcttcgggtgtacacccggaggtggaacact

SEQ ID NO: 84651 - DNA, 165 bp, Homo sapiens
  chr12:110808572-110808737
  hypo
tacctcaatggcccctcccagcgcagggcttcccggtgacctggccacagccgtgcctggaggatgaggtgaggttcatgtggagtctggactcactgcctgtcgtcagcagggaacgcaggcctgagcacaaccccagagagctgctcacggggacagctcacc

SEQ ID NO: 84652 - DNA, 18 bp, Homo sapiens
  chr12:110814621-110814639
  hypo
tcaaaccagataacagtg

SEQ ID NO: 84653 - DNA, 16 bp, Homo sapiens
  chr12:110908162-110908178
  hypo
ttttgtctctggtgct

SEQ ID NO: 84654 - DNA, 121 bp, Homo sapiens; identical to SEQ ID NO: 26494
  chr12:110915436-110915557
  hypo

SEQ ID NO: 84655 - DNA, 98 bp, Homo sapiens
  chr12:110916596-110916694
  hypo
ctatagaactatgagtcaatacgtgagtgttgttttaagccgctaaagttgtgttgttatggcagcaaaatgaaactaacatagagcccctttttaaa

SEQ ID NO: 84656 - DNA, 38 bp, Homo sapiens
  chr12:110916993-110917031
  hypo
aaagtagagaagagtacgtagaaaccaagatctgggtg

SEQ ID NO: 84657 - DNA, 30 bp, Homo sapiens
  chr12:110941072-110941102
  hypo
aacattaacaatgtcgtacgggatcagact

SEQ ID NO: 84658 - DNA, 268 bp, Homo sapiens
  chr12:110983625-110983893
  hypo
gaggggactatgaatgagccacgtcctgctcacacttaatggctgagaggggagattacctgtcgctcaagacgactccctcggcttcagggggagcgattgagagctggaatggagtgttgaagtaatgctgctgctcatctgatcggtgcacgacttcaccacccctgacaaccaggaagcctgaatcgcccaggtttgctgtgtgtaagcggtggctggttctgtccagcaccacaatgcaggcggtgctgctacctagaaacaa

SEQ ID NO: 84659 - DNA, 30 bp, Homo sapiens
  chr12:111074700-111074730
  hypo
ataccgcgtgggaggcgtgccccgtggtat

SEQ ID NO: 84660 - DNA, 146 bp, Homo sapiens; identical to SEQ ID NO: 26496
  chr12:111083878-111084024
  hypo

SEQ ID NO: 84661 - DNA, 154 bp, Homo sapiens
  chr12:111087518-111087672
  hypo
acagcttcagggaggatgtgacgcctgggctggatctgaaaggacaaggcaggctcagcccagggaagggcgctctaggtgcatgagcagcgctctgctgcaggcgggtgctgcggcagaggccagcttcccagatatcttttttttttgagac

SEQ ID NO: 84662 - DNA, 17 bp, Homo sapiens
  chr12:111195878-111195895
  hypo
aatgggccaggtgcagg

SEQ ID NO: 84663 - DNA, 209 bp, Homo sapiens; identical to SEQ ID NO: 50053
  chr12:111284785-111284994
  hypo

SEQ ID NO: 84664 - DNA, 828 bp, Homo sapiens; identical to SEQ ID NO: 50054
  chr12:111471131-111471959
  hypo

SEQ ID NO: 84665 - DNA, 137 bp, Homo sapiens; identical to SEQ ID NO: 9036
  chr12:111472058-111472195
  hypo

SEQ ID NO: 84666 - DNA, 315 bp, Homo sapiens; identical to SEQ ID NO: 9037
  chr12:111472356-111472671
  hypo

SEQ ID NO: 84667 - DNA, 84 bp, Homo sapiens; identical to SEQ ID NO: 9038
  chr12:111472851-111472935
  hypo

SEQ ID NO: 84668 - DNA, 163 bp, Homo sapiens; identical to SEQ ID NO: 50058
  chr12:111473179-111473342
  hypo

SEQ ID NO: 84669 - DNA, 31 bp, Homo sapiens
  chr12:111590541-111590572
  hypo
ttggcaggcaggggtgcggtgctgcgggagc

SEQ ID NO: 84670 - DNA, 30 bp, Homo sapiens
  chr12:111702688-111702718
  hypo
gccgtagataagagtcgattgttggttgcc

SEQ ID NO: 84671 - DNA, 30 bp, Homo sapiens; identical to SEQ ID NO: 26504
  chr12:111725501-111725531
  hypo

SEQ ID NO: 84672 - DNA, 30 bp, Homo sapiens; identical to SEQ ID NO: 26505
  chr12:111748331-111748361
  hypo

SEQ ID NO: 84673 - DNA, 30 bp, Homo sapiens
  chr12:111800687-111800717
  hypo
ggagggcactgggccggcggggcaggggca

SEQ ID NO: 84674 - DNA, 30 bp, Homo sapiens
  chr12:111800972-111801002
  hypo
gggtccccgcaaagcgcacagcgaaggcga

SEQ ID NO: 84675 - DNA, 515 bp, Homo sapiens; identical to SEQ ID NO: 50060
  chr12:111844288-111844803
  hypo

SEQ ID NO: 84676 - DNA, 62 bp, Homo sapiens
  chr12:111855882-111855944
  hypo
tgcttactccttgtcgcccccccacccacgtgtctttcagcccggccgcaccacctgggtct

SEQ ID NO: 84677 - DNA, 30 bp, Homo sapiens
  chr12:111856401-111856431
  hypo
cggggagctgccagcggcccacaccgctgc

SEQ ID NO: 84678 - DNA, 30 bp, Homo sapiens
  chr12:111856637-111856667
  hypo
ccgatggccccgaccgcgtgctggagctct

SEQ ID NO: 84679 - DNA, 30 bp, Homo sapiens; identical to SEQ ID NO: 50061
  chr12:111884592-111884622
  hypo

SEQ ID NO: 84680 - DNA, 114 bp, Homo sapiens
  chr12:111885451-111885565
  hypo
tcccacagcacctgcgcctgtcgctgacagagcggggccagtgccgtgtgcagcacctccactttccctcggtcgtggacatgctccaccacttccagcgctcgcccatcccac

SEQ ID NO: 84681 - DNA, 43 bp, Homo sapiens
  chr12:112015340-112015383
  hypo
ttacaggcatgagccaccgggcccggcccgcatgtttcaatta

SEQ ID NO: 84682 - DNA, 195 bp, Homo sapiens
  chr12:112082000-112082195
  hypo
ggtcacttgcccctcttgctgcggcccttcctggagggcaacttcccactgccccccgaagaggcagggctcgaggccgaggccatggcgatgttgatctgtccctcctggatttcctgccgggtctcggcaggcagatggttgatcttctgctgtgtctccaggtagaacatgacgtcacgcagctgctcctgg

SEQ ID NO: 84683 - DNA, 82 bp, Homo sapiens
  chr12:112082471-112082553
  hypo
ggacagacccctttctcccatcgtgagggagaatggttttctgccatcgcaatcagctatgcaaagcaagaattttgctcta

SEQ ID NO: 84684 - DNA, 22 bp, Homo sapiens
  chr12:112083152-112083174
  hypo
gagccaccgcgtccagcccaca

SEQ ID NO: 84685 - DNA, 87 bp, Homo sapiens
  chr12:112110964-112111051
  hypo
ctggaaccaaataataactgacgcttgttatgaaagaactctttaaggaaatgtcagcattgggctgggcgtggtggctcacgcctg

SEQ ID NO: 84686 - DNA, 121 bp, Homo sapiens
  chr12:112126605-112126726
  hypo
aaaacaaaacaaaaaaaagaaagcaaaaaaagtgcagctcgctgccagcacagtattctcagggcaagcaagatatgagttaagtaatccctagattgcttataatactggctgggcacga

SEQ ID NO: 84687 - DNA, 22 bp, Homo sapiens
  chr12:112149606-112149628
  hypo
cgcccagctatgctaacatttt

SEQ ID NO: 84688 - DNA, 30 bp, Homo sapiens; identical to SEQ ID NO: 50065
  chr12:112167993-112168023
  hypo

SEQ ID NO: 84689 - DNA, 55 bp, Homo sapiens; identical to SEQ ID NO: 26509
  chr12:112194069-112194124
  hypo

SEQ ID NO: 84690 - DNA, 160 bp, Homo sapiens
  chr12:112196486-112196646
  hypo
cagggatgcctcgggcgtgccaaggctgtcactcagagacccctcttgttggtatttctgctgccctccctgctgcgacataggtacagatttctccccttcgtccattttaccaaaatggatgcgcgttgggacaggtgagtcccggactccagcggcc

SEQ ID NO: 84691 - DNA, 92 bp, Homo sapiens
  chr12:112218334-112218426
  hypo
gacccctccttttcatcattccggactcggtcaaatgtccactcctcagggtgacctgcccctaccaccacggctggagttctctacccccc

SEQ ID NO: 84692 - DNA, 30 bp, Homo sapiens; identical to SEQ ID NO: 50068
  chr12:112241750-112241780
  hypo

SEQ ID NO: 84693 - DNA, 83 bp, Homo sapiens
  chr12:112288154-112288237
  hypo
aagatgcagcttttacgtgggtgcgagagtgctataagaaaggcataactatagactctaatatttttcgagaaaaagtcatt

SEQ ID NO: 84694 - DNA, 31 bp, Homo sapiens; identical to SEQ ID NO: 26511
  chr12:112430857-112430888
  hypo

SEQ ID NO: 84695 - DNA, 30 bp, Homo sapiens
  chr12:112457536-112457566
  hypo
tgctcagctctatacgccctcaggtcattc

SEQ ID NO: 84696 - DNA, 38 bp, Homo sapiens
  chr12:112535636-112535674
  hypo
accgagcagacccggcggctcatgcctgtaattccagc

SEQ ID NO: 84697 - DNA, 91 bp, Homo sapiens
  chr12:112574642-112574733
  hypo
cttcttggctttcccaaatgtcgagattacaggcgtgagctatggcatctggccaaaactggccaacgttgaatgagtatgttaattcacc

SEQ ID NO: 84698 - DNA, 36 bp, Homo sapiens
  chr12:112575270-112575306
  hypo
gatcttcatttcttggctgggcgcagtggctcacgc

SEQ ID NO: 84699 - DNA, 32 bp, Homo sapiens
  chr12:112591127-112591159
  hypo
ctggaggtgagtggaccgggggctgtgtttta

SEQ ID NO: 84700 - DNA, 131 bp, Homo sapiens; identical to SEQ ID NO: 26513
  chr12:112591859-112591990
  hypo

SEQ ID NO: 84701 - DNA, 268 bp, Homo sapiens
  chr12:112605588-112605856
  hypo
cgtggagcctcctcccggcctctgcctaccttgttcttattgacagctgagctggggcacagcagcagcagcgacagcgaggaactctgcagctccttacacacctgccacaggaagtggcggaaagagccgcctgtaggacagacgagacacatgggcacctggggtgtcccggcgggaggcgacaccgttccctccctctcacctgctggctggagcggctactccttccacggcctacctgccgctgtggcggggtagaaagaag

SEQ ID NO: 84702 - DNA, 645 bp, Homo sapiens; identical to SEQ ID NO: 26515
  chr12:112610021-112610666
  hypo

SEQ ID NO: 84703 - DNA, 94 bp, Homo sapiens; identical to SEQ ID NO: 26516
  chr12:112612658-112612752
  hypo

SEQ ID NO: 84704 - DNA, 71 bp, Homo sapiens; identical to SEQ ID NO: 26517
  chr12:112616769-112616840
  hypo

SEQ ID NO: 84705 - DNA, 252 bp, Homo sapiens
  chr12:112622464-112622716
  hypo
cgggatgtagatctcgtctttgaagaccccgccgtgggcgttgcaggccttgcggatggcgcctctgactacgccctcgtccaggtgggtggggatcccggagatcaccagcaagcggctgtgggcggtggggcccaccagggcctggcaggcatcggcgatggcgtcactcgtcacgcccagcccctgtgggtccttcctggtgaggtggcggaggatgatgagcagggtgagtgcgcggtggaaccacag

SEQ ID NO: 84706 - DNA, 30 bp, Homo sapiens
  chr12:112623022-112623052
  hypo
cctgccctggtcaccggccgccgccccccc

SEQ ID NO: 84707 - DNA, 161 bp, Homo sapiens; identical to SEQ ID NO: 26518
  chr12:112628548-112628709
  hypo

SEQ ID NO: 84708 - DNA, 30 bp, Homo sapiens; identical to SEQ ID NO: 50071
  chr12:112645385-112645415
  hypo

SEQ ID NO: 84709 - DNA, 31 bp, Homo sapiens; identical to SEQ ID NO: 26519
  chr12:112647931-112647962
  hypo

SEQ ID NO: 84710 - DNA, 383 bp, Homo sapiens; identical to SEQ ID NO: 26520
  chr12:112657023-112657406
  hypo

SEQ ID NO: 84711 - DNA, 30 bp, Homo sapiens
  chr12:112671602-112671632
  hypo
aaggaagattacaggcgtgagccacagcgc

SEQ ID NO: 84712 - DNA, 178 bp, Homo sapiens
  chr12:112681202-112681380
  hypo
tcactcccccgactcgtacggcagctgtcagcaattcccgcatgtgcaccagtgcctgcttgcgagtgtttccccgccgccaccttgtctgtgcagccaaaaggaaactgctgctggacacctgaaacacacaaggagggacacctgactcctgctaactgccgcaagaccccgcatg

SEQ ID NO: 84713 - DNA, 115 bp, Homo sapiens
  chr12:112684717-112684832
  hypo
aggggtcccagagatgcttctcgtgaggcccgactgggctgcgatggtgacatgcagcaacagctcggctcggttcattaaactcttcactaacgtctttgttttagccagtggg

SEQ ID NO: 84714 - DNA, 43 bp, Homo sapiens; identical to SEQ ID NO: 50072
  chr12:112689846-112689889
  hypo

SEQ ID NO: 84715 - DNA, 244 bp, Homo sapiens; identical to SEQ ID NO: 26522
  chr12:112743069-112743313
  hypo

SEQ ID NO: 84716 - DNA, 20 bp, Homo sapiens
  chr12:112802516-112802536
  hypo
caaagcgagaccctgtctca

SEQ ID NO: 84717 - DNA, 31 bp, Homo sapiens; identical to SEQ ID NO: 26523
  chr12:112814900-112814931
  hypo

SEQ ID NO: 84718 - DNA, 30 bp, Homo sapiens; identical to SEQ ID NO: 50073
  chr12:112817767-112817797
  hypo

SEQ ID NO: 84719 - DNA, 18 bp, Homo sapiens
  chr12:112821838-112821856
  hypo
cgggcacagtggctcacg

SEQ ID NO: 84720 - DNA, 30 bp, Homo sapiens; identical to SEQ ID NO: 9042
  chr12:112842259-112842289
  hypo

SEQ ID NO: 84721 - DNA, 30 bp, Homo sapiens
  chr12:112844577-112844607
  hypo
gatcagaatggtcccgggggtaatgctggc

SEQ ID NO: 84722 - DNA, 36 bp, Homo sapiens; identical to SEQ ID NO: 9043
  chr12:112884176-112884212
  hypo

SEQ ID NO: 84723 - DNA, 197 bp, Homo sapiens; identical to SEQ ID NO: 9044
  chr12:112888120-112888317
  hypo

SEQ ID NO: 84724 - DNA, 30 bp, Homo sapiens; identical to SEQ ID NO: 9045
  chr12:112891142-112891172
  hypo

SEQ ID NO: 84725 - DNA, 87 bp, Homo sapiens; identical to SEQ ID NO: 9046
  chr12:112915450-112915537
  hypo

SEQ ID NO: 84726 - DNA, 117 bp, Homo sapiens; identical to SEQ ID NO: 9047
  chr12:112924320-112924437
  hypo

SEQ ID NO: 84727 - DNA, 153 bp, Homo sapiens; identical to SEQ ID NO: 9048
  chr12:112926826-112926979
  hypo

SEQ ID NO: 84728 - DNA, 9 bp, Homo sapiens
  chr12:113494406-113494415
  hypo
ggatttggg

SEQ ID NO: 84729 - DNA, 794 bp, Homo sapiens; identical to SEQ ID NO: 50087
  chr12:113494430-113495224
  hypo

SEQ ID NO: 84730 - DNA, 31 bp, Homo sapiens; identical to SEQ ID NO: 26533
  chr12:113595320-113595351
  hypo

SEQ ID NO: 84731 - DNA, 30 bp, Homo sapiens
  chr12:113596782-113596812
  hypo
gcttgaggccaccacgctgcaggaagtgca

SEQ ID NO: 84732 - DNA, 244 bp, Homo sapiens
  chr12:113598990-113599234
  hypo
tgcacctgtgcctcagcgttaccctaatctgaccacaactgctctgcctacctgtgcacccacactccccaccctggctctcaccttggccacggtctcgcttcccacctcttcgctctgggcctcgccggtcagatgccccttcttcgtccgagtcacgatcatcaattttctgtttctgtttccacttctgatagctgggaaacctcgttaaggaagctgcgtgaagcccctgggatgggag

SEQ ID NO: 84733 - DNA, 30 bp, Homo sapiens; identical to SEQ ID NO: 26535
  chr12:113600982-113601012
  hypo

SEQ ID NO: 84734 - DNA, 31 bp, Homo sapiens; identical to SEQ ID NO: 26536
  chr12:113609784-113609815
  hypo

SEQ ID NO: 84735 - DNA, 187 bp, Homo sapiens; identical to SEQ ID NO: 26537
  chr12:113629776-113629963
  hypo

SEQ ID NO: 84736 - DNA, 309 bp, Homo sapiens; identical to SEQ ID NO: 26538
  chr12:113669641-113669950
  hypo

SEQ ID NO: 84737 - DNA, 475 bp, Homo sapiens
  chr12:113685185-113685660
  hypo
cccttctgccccctgccttcccgctttctgggcctgaaatgtcctcctcagaaagctgccgagccttcgagcataccttctgcgggaacaacgcagcactcggagtgggagcatatccattgtcccttcagccacttctgcaacctcttaagtggggaagagggttagacagcagacagggcaggggattagcactccacgaggtggcccagccccacccggcccctgccgtgccctcgtcttggctggtacagctgcactgctgcgtgaaggccacgtacaaaaggaacagaatggaactgtggctcctcgccttccatttgcaccctttctataatccctaaatatgtagcccagttgctcgtgccttgatgtgaaggaggccctttgcgatcacctgtggctttcttgaaaagtccctgagtggccagtgtcaccccaggccttccatccctctctccgtgtggagaaatga

SEQ ID NO: 84738 - DNA, 287 bp, Homo sapiens
  chr12:113690233-113690520
  hypo
aagctcctgtcaattcgaggagacccctgtgtgagaagaagggcaggaaggctccaaagggggtcttcacggcagccgctcacatagacactcgtgtctagtgtcaagtgggagggtggcactaatggctgctgccatctgtgccagctagcagctgcctgctccgctccatcattgttatttatgttacctaggactcttctgtgttgccggtgccagcccctgctggggcatgtggaggtcgtggaggacagggcatgggctcacgaggacgcagctccatccag

SEQ ID NO: 84739 - DNA, 87 bp, Homo sapiens
  chr12:113704019-113704106
  hypo
caaggatgccaaggcgctggcggcctacctctttgcacacaatcacctcttctacctgatggagctggccacggccctgctgctgct

SEQ ID NO: 84740 - DNA, 30 bp, Homo sapiens
  chr12:113725972-113726002
  hypo
ttaagttgaaggagcgctaccgcaacgtgc

SEQ ID NO: 84741 - DNA, 30 bp, Homo sapiens
  chr12:113729476-113729506
  hypo
accatggtaggtcccggaccacagaacgct

SEQ ID NO: 84742 - DNA, 30 bp, Homo sapiens
  chr12:113734344-113734374
  hypo
aaggaaagaactcccggtctccagggtggt

SEQ ID NO: 84743 - DNA, 22 bp, Homo sapiens
  chr12:113783671-113783693
  hypo
gccacctcgcccggcctttgag

SEQ ID NO: 84744 - DNA, 398 bp, Homo sapiens; identical to SEQ ID NO: 9056
  chr12:113796496-113796894
  hypo

SEQ ID NO: 84745 - DNA, 30 bp, Homo sapiens
  chr12:113827151-113827181
  hypo
tggaggaaccagaccgcaggctgtgccacc

SEQ ID NO: 84746 - DNA, 31 bp, Homo sapiens
  chr12:113872021-113872052
  hypo
aatatggtaaggctgacgcccctctccccag

SEQ ID NO: 84747 - DNA, 2007 bp, Homo sapiens; identical to SEQ ID NO: 50103
  chr12:113904491-113906498
  hypo

SEQ ID NO: 84748 - DNA, 340 bp, Homo sapiens; identical to SEQ ID NO: 50109
  chr12:113913883-113914223
  hypo

SEQ ID NO: 84749 - DNA, 492 bp, Homo sapiens; identical to SEQ ID NO: 50117
  chr12:114029352-114029844
  hypo

SEQ ID NO: 84750 - DNA, 46 bp, Homo sapiens; identical to SEQ ID NO: 50118
  chr12:114075829-114075875
  hypo

SEQ ID NO: 84751 - DNA, 123 bp, Homo sapiens; identical to SEQ ID NO: 50119
  chr12:114075909-114076032
  hypo

SEQ ID NO: 84752 - DNA, 108 bp, Homo sapiens
  chr12:114163036-114163144
  hypo
ctgagcagacggagccggcagctggtggcagagggaggagacaggagggaggcgcgtggagggcaggcggggacgaggggcccacggtgcccacggcggcactgggcc

SEQ ID NO: 84753 - DNA, 30 bp, Homo sapiens
  chr12:114236490-114236520
  hypo
ctcatcagcgaggccgtgcctgggtcccga

SEQ ID NO: 84754 - DNA, 30 bp, Homo sapiens
  chr12:114243009-114243039
  hypo
ccaatctgagcaggccggcagagcgaatga

SEQ ID NO: 84755 - DNA, 62 bp, Homo sapiens
  chr12:114254875-114254937
  hypo
aatcctttcctagacgctgcggagcacagacgggcgctgcgagagacggccctgcacaaaag

SEQ ID NO: 84756 - DNA, 532 bp, Homo sapiens
  chr12:114273455-114273987
  hypo
gccacccgtctgtgccggaagagcacttctccgggcactctgctcatagatctcccgccccagcccaacctggcttgggcaggcgggggaaggccccactgccagccactcgccatgctggtcatgtctgcgctcccagctctggaggtgaaaggtagagacgctaaccacagcccatcagtcctccccagctggaataagacaacatgggaagcagagccacgctcccagccaaataaaagcctgtttgcccagcctccctggctgtgagtgctgtaaaacacagggttctgcgcacggatttcttccataccattatattctctcggctgcgctcgcaggtactgtggcctgccgcggccctgaaagcttctcgatgccgtgaccctgctggtttgtaacacgctcaggaagaaaaggacacagccagcggcggactttcctctttcttccctccttgctctctcttttcaaactcccacatgcaaggcagtgaagaatagcacttcacctaccacggggctgctgcgct

SEQ ID NO: 84757 - DNA, 116 bp, Homo sapiens
  chr12:114282480-114282596
  hypo
tgagcggccgtcttccgccgcagggcctgcagggtcacctcggagtcggcccactccagcaccagcctccgcccgtacaagtgggtgctgtgacacagggcgttgaaggctctctg

SEQ ID NO: 84758 - DNA, 198 bp, Homo sapiens
  chr12:114282866-114283064
  hypo
tgccgtgtgtcatccgatctgtggagggcgaccccattagtgggctcgcctcccacccggctgtctgcatggcggccacttgagaaagccgagccctggccggctgctggatgacaagcgtgcaggcctctgggtgtcactgggtgtcgctctccttcactgccctggtgactctgtcccccacgctgctcttgaagg

SEQ ID NO: 84759 - DNA, 266 bp, Homo sapiens; identical to SEQ ID NO: 26548
  chr12:114290575-114290841
  hypo

SEQ ID NO: 84760 - DNA, 31 bp, Homo sapiens
  chr12:114294979-114295010
  hypo
tgcagtggagaaaagacgctgccctgtactc

SEQ ID NO: 84761 - DNA, 201 bp, Homo sapiens
  chr12:114295303-114295504
  hypo
caacacagggcaccacgtgcctgccccgctgtgagggtgagggccgtgacctgctgcatgcaaggtgtgtcccctgctgtctctgatgagaggcgagggaaaggctgccagccaggaggagagaggagcagatgtccagacaaatatggccatgtgtcaacaaaacaggcacttgagctcaagactcggagacaaaggtgg

SEQ ID NO: 84762 - DNA, 140 bp, Homo sapiens
  chr12:114318247-114318387
  hypo
agatcctgacaggtacgacagctcttgttctgtgagccttgtcgtaaacatttttctgcatgagggtcatatttcaagtggcttcggtctcaggggaagcagagtgatgtcacagctgcgaacggcgagactctgggcta

SEQ ID NO: 84763 - DNA, 110 bp, Homo sapiens
  chr12:114318956-114319066
  hypo
ttccccacccagccccgataatggcttttctcgagcgagtttctcggtagctgcagctgcagaagcacagacaggtacagttgccatgatacggccgttgtggtaattta

SEQ ID NO: 84764 - DNA, 188 bp, Homo sapiens
  chr12:114334063-114334251
  hypo
ttccctgtaatgtgctttgttcgcttgccccagagcagggaaaaccaggcaaattctccggaatgcagcggccccatcacgtgaggtgcttagagctccagggaatttctgggctcgggggcatgtccgccttaaaggttcaggcccaggctgtccccacaggctccgccccccatgggaggggagcc

SEQ ID NO: 84765 - DNA, 539 bp, Homo sapiens
  chr12:114337458-114337997
  hypo
cttagtaaatatttgctaaaccgacaagttatttcttaactaaaaagcagtgtttgagacctcccttttccgtggaaaactctgcgatgcgtgaggggagagaagctgttcctaaagaggaatcccccaagctgtctggggctccctgctgcctttcaccacccagaatgctggaagacatggcgcgcaattatcagctccaacaatgagccaacggcggccctccgagcaagcccagacaaagcacagagaccttgcagctgaaaaggctctgaatgcagacaggggaggtgtgaaagcaaggttagagtgagctgccgcggctgcttggggcaggaggggaggaatgagggcgcacaatgccacccttcccccggtacaggcacgctctccctggggcaccctgttccactgtctgagcttttgtcgcccactctggaaccagtctaggcgtgcagtgagggaaaacgccagctgcagcggaagcccgagcctgcgaaatctcaaaggaaggacgaaaacaacggcaagaaaaccct

SEQ ID NO: 84766 - DNA, 152 bp, Homo sapiens
  chr12:114349903-114350055
  hypo
gtggtgcactgaggcccgagtggaaggctggtggcctccgggaagggccccaggcactgctgcctcgggctaggaggctgccttctctcccctccagcaggcggggtagcttgaggccctgcccagagaatgctctccggagccctgcactc

SEQ ID NO: 84767 - DNA, 31 bp, Homo sapiens
  chr12:114393632-114393663
  hypo
tgtgactgcgcttgaccgtggggtgctgcct

SEQ ID NO: 84768 - DNA, 30 bp, Homo sapiens; identical to SEQ ID NO: 9072
  chr12:114841521-114841551
  hypo

SEQ ID NO: 84769 - DNA, 30 bp, Homo sapiens; identical to SEQ ID NO: 9085
  chr12:114881661-114881691
  hypo

SEQ ID NO: 84770 - DNA, 37 bp, Homo sapiens; identical to SEQ ID NO: 9089
  chr12:114885146-114885183
  hypo

SEQ ID NO: 84771 - DNA, 16 bp, Homo sapiens
  chr12:114885371-114885387
  hypo
cgctggaagaaacgaa

SEQ ID NO: 84772 - DNA, 80 bp, Homo sapiens; identical to SEQ ID NO: 26555
  chr12:114983016-114983096
  hypo

SEQ ID NO: 84773 - DNA, 236 bp, Homo sapiens
  chr12:115188682-115188918
  hypo
gggggtgatattatacaaatacgtctctggctgcattgctgggagccgtaaatgtgattgctaatgctgaaagtggaacccgcgcctggcacatagtaagcgctcggcacttggcggctctggagtgcttagaagacagaagccagatcgctatcctggacagggggtgatatatggtatcgagctctgactgagaattgaattcaacctcagccggagaattagaacattgtgat

SEQ ID NO: 84774 - DNA, 89 bp, Homo sapiens
  chr12:115192171-115192260
  hypo
gaaaataagattgtatcgcatatacttttttgcatttatttacttatttatttattaaggagacaagagctgactatgttgcccaggct

SEQ ID NO: 84775 - DNA, 141 bp, Homo sapiens
  chr12:115204969-115205110
  hypo
ttcttaataagacctccaggcgcatgacaaagcagaaaccttcagaaacaaaatctaccgagttcgaagaacgggcctggcccaaggcactttggacgctgtccgttctgtcttcacagcggcttgcagtaaacttcttgg

SEQ ID NO: 84776 - DNA, 18 bp, Homo sapiens
  chr12:115263647-115263665
  hypo
gcacgcgcgcacacacac

SEQ ID NO: 84777 - DNA, 150 bp, Homo sapiens
  chr12:115544513-115544663
  hypo
tccattccaatgagcactgtgcgtgtgatgggatgagtgaataactgacggtgtgcatcaggctttgggaaaccactcctgggtttgtacaccgtttctttgtcagtgtgcgaaatgagaccccaacacgcaagagtgtgtgtgttatat

SEQ ID NO: 84778 - DNA, 30 bp, Homo sapiens; identical to SEQ ID NO: 50158
  chr12:115836506-115836536
  hypo

SEQ ID NO: 84779 - DNA, 44 bp, Homo sapiens
  chr12:116040840-116040884
  hypo
tacaggtgtgagccaccgcacccggcctgaaagtcactttaaga

SEQ ID NO: 84780 - DNA, 30 bp, Homo sapiens; identical to SEQ ID NO: 50160
  chr12:116185147-116185177
  hypo

SEQ ID NO: 84781 - DNA, 204 bp, Homo sapiens; identical to SEQ ID NO: 26557
  chr12:116394792-116394996
  hypo

SEQ ID NO: 84782 - DNA, 27 bp, Homo sapiens
  chr12:116400806-116400833
  hypo
cagagcgagactccatctcgaataaac

SEQ ID NO: 84783 - DNA, 30 bp, Homo sapiens
  chr12:116409720-116409750
  hypo
ccgcatggaaggtatcgaatgttttccatc

SEQ ID NO: 84784 - DNA, 30 bp, Homo sapiens
  chr12:116409959-116409989
  hypo
gagattccacacatccggcacacatccttg

SEQ ID NO: 84785 - DNA, 237 bp, Homo sapiens
  chr12:116443622-116443859
  hypo
aagtcctttcatgtagcgaaatttttgtttatgtagctacggcaaactcaccccaagttcgtcgtcatcagaattatcaaagatgttgtctaagtcatgcagggaaggtgccaaatctgttacctgtgtaaggctactggagccagctctgccagcagcattatcctgccggacatctgtaggaaaggaggcaaaagacacagaataaacaactccaccaagcgcaaaggagtaggg

SEQ ID NO: 84786 - DNA, 30 bp, Homo sapiens
  chr12:116650862-116650892
  hypo
aaagccacttataaacgaagcataaagcct

SEQ ID NO: 84787 - DNA, 36 bp, Homo sapiens
  chr12:116678338-116678374
  hypo
ttatttttttttttttggagacggagtctcgccctg

SEQ ID NO: 84788 - DNA, 35 bp, Homo sapiens
  chr12:116678613-116678648
  hypo
gagccaccacgcccggacatcaaggtgtatgtttt

SEQ ID NO: 84789 - DNA, 18 bp, Homo sapiens
  chr12:116696277-116696295
  hypo
ttattataaaaagaaaaa

SEQ ID NO: 84790 - DNA, 30 bp, Homo sapiens; identical to SEQ ID NO: 26559
  chr12:116731524-116731554
  hypo

SEQ ID NO: 84791 - DNA, 298 bp, Homo sapiens
  chr12:116756062-116756360
  hypo
gccgtgtttaccgaccgtcctgtgactgtggggactggcaaagctaaatggcctgagtgggttgaactgtggccgcacctggttagcaccgttctttttcttcttctgaaggaaaggcgtggctgttccgaggtgccttgtgaaatagccagccgtcctgggctgccctttcactgttcctgctgaagccaaaggtgccagaaaagcctagacattgagctccgcgctccccagtcgtgactctgtgtctacgacgaactttctaaaggcagtggcttataaacgagcagtactgact

SEQ ID NO: 84792 - DNA, 30 bp, Homo sapiens
  chr12:116756774-116756804
  hypo
tttggcaaggtctggcgaggtggcatggca

SEQ ID NO: 84793 - DNA, 35 bp, Homo sapiens
  chr12:116770790-116770825
  hypo
ggattaaatgcgtgagccaccgcgcccagccaaga

SEQ ID NO: 84794 - DNA, 93 bp, Homo sapiens
  chr12:116804025-116804118
  hypo
taatgtgaaggaattcgaactgggttcagacacgtgaaccgtggcctggatgtcccaatctcacttgcctggtgtcctcgggcccctgtgggt

SEQ ID NO: 84795 - DNA, 246 bp, Homo sapiens
  chr12:116941178-116941424
  hypo
atagtcatggtgtacacagggcgtgggacgctggataaaacctaaagagacctgacccactgccctctaggtgcttagcctctgaccacaccaagctagcgacattccaatctctcataaaaagcatttcaaaatgaaagagactgggcaaataaatcgtggtacatgcacggaatgcgatggccttcaggcattgaaaagaaagaagtacgtttcccatactacggggatttgctcacctaactt

SEQ ID NO: 84796 - DNA, 41 bp, Homo sapiens
  chr12:116981480-116981521
  hypo
aggcatgagccaccgcacccggctggcccctagaattcttt

SEQ ID NO: 84797 - DNA, 193 bp, Homo sapiens; identical to SEQ ID NO: 26562
  chr12:116999940-117000133
  hypo

SEQ ID NO: 84798 - DNA, 325 bp, Homo sapiens
  chr12:117150056-117150381
  hypo
ctccaacatcagggactgagtcgtacacaggaagatcactgagtaggttctgtggagacgcagtcggcccatatgcacgtcaccactcggctcccagctcaggtgcagaccaacggcgaccacttgctccactttgctctgtgacagcagacgaggtaaggcatgttgcagatacatgctgaatatagggatgcctgtacacaaaactgcactcatgctgtgataacacgcaaaaggtcacacactggaagagccttgcccaacgaacgatagactaacaggccagaggcggggaaagcttctcggagtcccactatcttctttg

SEQ ID NO: 84799 - DNA, 101 bp, Homo sapiens
  chr12:117150586-117150687
  hypo
gagggtgtctgcattcggcggagtccaagagtgcggtgaggacacagtggcaaaggaataatgccattccttgaggcagcgctgggctagtagagacctgt

SEQ ID NO: 84800 - DNA, 491 bp, Homo sapiens
  chr12:117155344-117155835
  hypo
ccaccaccgtgagcccggcctccggtttcatctttcccgaatgggactggctggaggggccaagctgctttacagaagagttccatctggtaagcccgggtggtgagcgaagccaaagatgacaacacgagaaggggtcaaagccaaggtttcctcacgctgcctttgtcttcttcctgcagcctggcccgatggctgaagctgggtcccaggaggcgagttcttcagcggggcctcctcacccaggctggagcaagtccgctgcacccgtcaagcggggaagagctcgggcgggctttctccatagcaatactttgctatggggtcccggtaggtgttctcatgctgcacgctctgttggcaaaaggaaaataagagcgcagtgagagcgagcacagcttcacacacctccctctcggaagagtgagagtggatcgggactgtcagactctccctgcagggggctggccgagtccatctccaaatgtcac

SEQ ID NO: 84801 - DNA, 30 bp, Homo sapiens
  chr12:117160911-117160941
  hypo
gcggcactgattgctcggacgactgctatt

SEQ ID NO: 84802 - DNA, 62 bp, Homo sapiens
  chr12:117161611-117161673
  hypo
gtatgtaacccgctacggaacacacccaggccggccagccctctacccggacaagcaattgg

SEQ ID NO: 84803 - DNA, 30 bp, Homo sapiens
  chr12:117162199-117162229
  hypo
actacatgatcgtttcgatggtataaaaaa

SEQ ID NO: 84804 - DNA, 30 bp, Homo sapiens; identical to SEQ ID NO: 26566
  chr12:117187853-117187883
  hypo

SEQ ID NO: 84805 - DNA, 30 bp, Homo sapiens; identical to SEQ ID NO: 50170
  chr12:117316951-117316981
  hypo

SEQ ID NO: 84806 - DNA, 554 bp, Homo sapiens; identical to SEQ ID NO: 50171
  chr12:117317231-117317785
  hypo

SEQ ID NO: 84807 - DNA, 564 bp, Homo sapiens; identical to SEQ ID NO: 26567
  chr12:117407819-117408383
  hypo

SEQ ID NO: 84808 - DNA, 30 bp, Homo sapiens
  chr12:117436978-117437008
  hypo
cagcccacatctgagcggtcgcatcccaaa

SEQ ID NO: 84809 - DNA, 30 bp, Homo sapiens
  chr12:117448196-117448226
  hypo
tgtgtcaacctcagcgacagccctcccaac

SEQ ID NO: 84810 - DNA, 30 bp, Homo sapiens
  chr12:117457798-117457828
  hypo
agcctccctcattgcgactgcttaaatgct

SEQ ID NO: 84811 - DNA, 30 bp, Homo sapiens
  chr12:117461035-117461065
  hypo
agcttttgggtcagacgtgcgtttttaatc

SEQ ID NO: 84812 - DNA, 76 bp, Homo sapiens
  chr12:117464844-117464920
  hypo
gggacttgcccagggaggcagcgatgggccagtctctgttgcatgtggctgattcgtctgcagtagggtgtgccct

SEQ ID NO: 84813 - DNA, 233 bp, Homo sapiens
  chr12:117466158-117466391
  hypo
gcgtgtgccagggctcgagtcccacgtgctgccaactcaaacatagcctccttccccacccagctggccaccctggcctcagctccctcaggacgcctcagggatctcgctgcgcggtcctatacggtccctgcttagccagcttctgtgtgtccgccctcccagctccagccctgcaggccgtcttttccgtctccagccccttacctcttttcctccgagggcctttggat

SEQ ID NO: 84814 - DNA, 179 bp, Homo sapiens
  chr12:117472594-117472773
  hypo
agcccgaggcacagaccgcagtgcccagatggtggggctgactgagatccgtgcccggggcagcaaccctcggtctgtgttgatcaaaggccagcagccccacaagacgcatcagcctgccccttctgggatcaggtttgcaccaactcatcgccaaccctgatcgttcccgggatgcc

SEQ ID NO: 84815 - DNA, 27 bp, Homo sapiens
  chr12:117473776-117473803
  hypo
cctcaagtgagtcgcctgcctcggcct

SEQ ID NO: 84816 - DNA, 79 bp, Homo sapiens
  chr12:117474091-117474170
  hypo
acctacccaggaggtcgtgcgcattaaccaaaagctgagcctccccaggccgcactcactttcccggggccattcgccc

SEQ ID NO: 84817 - DNA, 135 bp, Homo sapiens
  chr12:117476985-117477120
  hypo
cttggtctcaatgtcgatcccctgccagatctggaagggacggagcagcgttaagggcacgttcccgccgccacctcacacctgaccaggccccccggtcctcggcccttcccacctaccgtctcctgccaccaa

SEQ ID NO: 84818 - DNA, 282 bp, Homo sapiens
  chr12:117484291-117484573
  hypo
aggccttccagaaacgcagaccataagcgggaaaggcactgcgcgtctcgggagggctgcaggggcgctcaccatctgccccatgcacacgctggccgcctccatcatggccccgtcggcgatggagcgagcggactccttctcgatgtgagggtttcccgacagcagctcctcgaccacctgccaggtggggcggaaacaaacggtgaccttgggcctccatcagggtcgtggggggcagagggggaaggcaccaggagccccgggcgggccagaggagca

SEQ ID NO: 84819 - DNA, 249 bp, Homo sapiens
  chr12:117484910-117485159
  hypo
gagctagcgctgtggcgttagggcctggcaactgccccgtgagcatgaatatcacgacagtaagcgttacccgttaacacaagtcaaacggtgtcgagttcaaaatattgttcccacagccctggagggcaccatcatctcacccatagcaggtcacggtccacagtgcttctgatctgggcccgactgatctaacatgggcagccccaggcctggcatcagggaggcgatggccgggagggggcctct

SEQ ID NO: 84820 - DNA, 116 bp, Homo sapiens
  chr12:117487069-117487185
  hypo
cacgatggctgctctcgccttgcgtctgtgccccaagaacctgcttcgtggcggggctgcaggctccggaagctgaaagctcagcccttgccctgccctcacggagctcatcatca

SEQ ID NO: 84821 - DNA, 36 bp, Homo sapiens; identical to SEQ ID NO: 26571
  chr12:117529345-117529381
  hypo

SEQ ID NO: 84822 - DNA, 183 bp, Homo sapiens
  chr12:117529971-117530154
  hypo
cacctcattcacagctggctgcgttttttaaggagcggaactggtggctcaaagaaggacacagcctggatgagacatctgagcgaagtggcacaggacggctccagcaccgagctcagtgcacatggaacgccatcctccagggtcccgctctgtggctgcgacagatggtgagatgatggg

SEQ ID NO: 84823 - DNA, 197 bp, Homo sapiens
  chr12:117531043-117531240
  hypo
atgagccgaggccaccgtctgaggccacttaaagactttagaaccaagaagtattacccaggggcgagaacgcagtggagaaaccagcgccacccccaccagccacgcttggctacgccagtcctccctgccatctctagctccttctccaaatgagattagaccaggaatggaatccgactctctttttttctttg

SEQ ID NO: 84824 - DNA, 70 bp, Homo sapiens
  chr12:117579641-117579711
  hypo
gtctcagccctccatgctccccgctacttcaggcgggatggagatggacggctcaggttgctctgatgcc

SEQ ID NO: 84825 - DNA, 82 bp, Homo sapiens
  chr12:117583675-117583757
  hypo
agattaattcactagtgtaggcggagagcaacattgtctttgcagctggggaagagcacacggtatttaaacttagtaggag

SEQ ID NO: 84826 - DNA, 181 bp, Homo sapiens
  chr12:117586329-117586510
  hypo
ggatcaggggttgctccatgacgtggcacagtggcacagagtttaaactgggcacttacaacgtgccagaccccacagcggtgtcacaggcacccctgccacgtaaccctggaaggagcccccttctgctgttgcgtgggctgcccaaggatttaaccccggactcaaaccagacagtccc

SEQ ID NO: 84827 - DNA, 44 bp, Homo sapiens; identical to SEQ ID NO: 26573
  chr12:117588695-117588739
  hypo

SEQ ID NO: 84828 - DNA, 104 bp, Homo sapiens; identical to SEQ ID NO: 26574
  chr12:117588798-117588902
  hypo

SEQ ID NO: 84829 - DNA, 290 bp, Homo sapiens
  chr12:117593453-117593743
  hypo
ggcccgaaggaggccggccatggggcgtcggccgcctctgaaggaaccgatggcccacgcccacagtacctacccgagggctcaaacgtgcgctgaaaacacgcccgcggggccactggcacaagcggaacccgccgcttaccttgggctgcgtatcgacaggagccgtcctccaccagcacgttatagaaaggctggtggtggccgtgcggcaggctgtggacgttcatgttccggatccactcgtgtcccatcatgcaggtggggtcccagccgtagatcacacagtt

SEQ ID NO: 84830 - DNA, 330 bp, Homo sapiens
  chr12:117599138-117599468
  hypo
ggaccaaggaactccacgggaggtggggagcatcaggcaagcagggccagaccgccgagaacctaaaagccacacggaggagagcaagtctggtcttcaaggcaacaggggagccaccctgaggggtttaagcagtgaagggacctaattgatattttgttaagattcctctggcctgcatacagagcgggttcacaggggctcagagtccagagagggaggacaagcaggaggccagggcactgcttcgggctgcagaagtgctggtctcagcgggtcgactttcacccgtctgggagacagagtcacgtgcaggggtgtagcaggtgt

SEQ ID NO: 84831 - DNA, 314 bp, Homo sapiens
  chr12:117600036-117600350
  hypo
tggatcatgatgaggacgaaggtctggcagcaggaaggagaaggtgcctgtgtgctggcttcttcagaagcgctctggccttggcccactgtaccacgggatgccgcatggggtgggctagggcatcagcttgcctgcactgaactcctagtgccgtcacggcatgtgcaggagacctggctaagttatttaacttctccctgcctcagtttcattatttcccatatggcaaaaagaaaaataatatctaccctatagggctgctaagaagatggaaggaggcgttcagtcagtactcccgacttaaaatctca

SEQ ID NO: 84832 - DNA, 30 bp, Homo sapiens; identical to SEQ ID NO: 50179
  chr12:117747574-117747604
  hypo

SEQ ID NO: 84833 - DNA, 88 bp, Homo sapiens; identical to SEQ ID NO: 26579
  chr12:117788577-117788665
  hypo

SEQ ID NO: 84834 - DNA, 192 bp, Homo sapiens; identical to SEQ ID NO: 50182
  chr12:117799086-117799278
  hypo

SEQ ID NO: 84835 - DNA, 138 bp, Homo sapiens; identical to SEQ ID NO: 50183
  chr12:117799330-117799468
  hypo

SEQ ID NO: 84836 - DNA, 601 bp, Homo sapiens; identical to SEQ ID NO: 26582
  chr12:118198706-118199307
  hypo

SEQ ID NO: 84837 - DNA, 30 bp, Homo sapiens; identical to SEQ ID NO: 50184
  chr12:118274656-118274686
  hypo

SEQ ID NO: 84838 - DNA, 197 bp, Homo sapiens
  chr12:118293043-118293240
  hypo
gctgcccttgctggtgtcttccggcctccaaatcccaggtccacgctgcctcttcctgcgtttcggatttgccccccagggttgactctgtctcgtcctggcctgcagtggcgggcacgggatgccgagggaccgcggcagctgtgctggggacaagtctccacatccccgaccccggggcctgctcacctgacatg

SEQ ID NO: 84839 - DNA, 226 bp, Homo sapiens
  chr12:118293459-118293685
  hypo
ctagaggagaacactccgcagtgtaaacgctttgcatgacagtggggtctccgaatctcgggtttgccactcattatctagataacctctgaccagtcgctcaacctctctgggcctcactttgctcatctgtaaagtgggactcctaagtgtccatacttggcaaggtagcgcaggtgcttagtgctattataattactaccctgtctggcgtcaacactgtgcc

SEQ ID NO: 84840 - DNA, 60 bp, Homo sapiens
  chr12:118313382-118313442
  hypo
tctgtgtccctcaggactgcccgtcagcaccccataatcgctgccttctccctaaaggta

SEQ ID NO: 84841 - DNA, 58 bp, Homo sapiens
  chr12:118318418-118318476
  hypo
taccctaggccaaggacgacccagaaaacctgccggaggaagccgtaaacatccacta

SEQ ID NO: 84842 - DNA, 80 bp, Homo sapiens
  chr12:118331633-118331713
  hypo
accaagataaatatattttaacgcagcattttaaaaagtcaaaattcatagccagaaaaatccacaaagaacaaaattct

SEQ ID NO: 84843 - DNA, 19 bp, Homo sapiens
  chr12:118332012-118332031
  hypo
ccaaaattcttaaataaag

SEQ ID NO: 84844 - DNA, 30 bp, Homo sapiens
  chr12:118334537-118334567
  hypo
tataggcacgagccaccacacctggcctgc

SEQ ID NO: 84845 - DNA, 28 bp, Homo sapiens
  chr12:118473719-118473747
  hypo
aatgaaccaggccaggcgcagtggctca

SEQ ID NO: 84846 - DNA, 39 bp, Homo sapiens; identical to SEQ ID NO: 26585
  chr12:118474261-118474300
  hypo

SEQ ID NO: 84847 - DNA, 30 bp, Homo sapiens
  chr12:118476063-118476093
  hypo
gaattaaagcaataacgctggagactcacc

SEQ ID NO: 84848 - DNA, 121 bp, Homo sapiens
  chr12:118481548-118481669
  hypo
gccacataagactttaaatcctagaaacaagctggccttcggtgaaatctgctgtgacttttctttttgtttctttttaagagttgatgtaggccaggcgtggtggctcatgcccgtaatc

SEQ ID NO: 84849 - DNA, 18 bp, Homo sapiens
  chr12:118481908-118481926
  hypo
ggcaaaactctatctcaa

SEQ ID NO: 84850 - DNA, 49 bp, Homo sapiens
  chr12:118533280-118533329
  hypo
ctcctttccaaggctccgagcacctctccagccccggtccctgccagcc

SEQ ID NO: 84851 - DNA, 326 bp, Homo sapiens; identical to SEQ ID NO: 26587
  chr12:118583594-118583920
  hypo

SEQ ID NO: 84852 - DNA, 30 bp, Homo sapiens; identical to SEQ ID NO: 26588
  chr12:118588914-118588944
  hypo

SEQ ID NO: 84853 - DNA, 214 bp, Homo sapiens; identical to SEQ ID NO: 26589
  chr12:118590037-118590251
  hypo

SEQ ID NO: 84854 - DNA, 30 bp, Homo sapiens
  chr12:118626750-118626780
  hypo
gtgtgagcgcgcacgcgcacgcgtgggggc

SEQ ID NO: 84855 - DNA, 90 bp, Homo sapiens
  chr12:118860391-118860481
  hypo
atgtttaaagtcaaatagtagcgtgtgtttaacatacatcacaagccttgaactttttttcttttttctttttttttagacagagtcttg

SEQ ID NO: 84856 - DNA, 12 bp, Homo sapiens
  chr12:118860720-118860732
  hypo
attacaggcgtg

SEQ ID NO: 84857 - DNA, 27 bp, Homo sapiens
  chr12:119002845-119002872
  hypo
aaccccgtctctactaaaaatggttcc

SEQ ID NO: 84858 - DNA, 30 bp, Homo sapiens; identical to SEQ ID NO: 50193
  chr12:119421330-119421360
  hypo

SEQ ID NO: 84859 - DNA, 100 bp, Homo sapiens; identical to SEQ ID NO: 26591
  chr12:119626323-119626423
  hypo

SEQ ID NO: 84860 - DNA, 52 bp, Homo sapiens; identical to SEQ ID NO: 26592
  chr12:120117232-120117284
  hypo

SEQ ID NO: 84861 - DNA, 116 bp, Homo sapiens; identical to SEQ ID NO: 26593
  chr12:120117614-120117730
  hypo

SEQ ID NO: 84862 - DNA, 31 bp, Homo sapiens; identical to SEQ ID NO: 26594
  chr12:120117937-120117968
  hypo

SEQ ID NO: 84863 - DNA, 154 bp, Homo sapiens
  chr12:120127977-120128131
  hypo
gtcctcacggctcccgcaggcagccggcccctgctgctgtcttcaaacagcctcccgggggaccgctctctccgcgtgctgagcatccggccgggggacttctctcgctccagggggcggccaggagacttgtccctgcgcagctcggtccgcc

SEQ ID NO: 84864 - DNA, 197 bp, Homo sapiens; identical to SEQ ID NO: 26595
  chr12:120134817-120135014
  hypo

SEQ ID NO: 84865 - DNA, 170 bp, Homo sapiens; identical to SEQ ID NO: 26596
  chr12:120137332-120137502
  hypo

SEQ ID NO: 84866 - DNA, 30 bp, Homo sapiens; identical to SEQ ID NO: 26597
  chr12:120147740-120147770
  hypo

SEQ ID NO: 84867 - DNA, 501 bp, Homo sapiens; identical to SEQ ID NO: 26598
  chr12:120147976-120148477
  hypo

SEQ ID NO: 84868 - DNA, 368 bp, Homo sapiens; identical to SEQ ID NO: 26599
  chr12:120148731-120149099
  hypo

SEQ ID NO: 84869 - DNA, 103 bp, Homo sapiens
  chr12:120150399-120150502
  hypo
tttggctgtatttgcgagttcggaagcaccaacggcaccatgaatagatacatccccgtcgggaaggcacagctcaaattcttccaccggcctctgtccagct

SEQ ID NO: 84870 - DNA, 267 bp, Homo sapiens
  chr12:120151875-120152142
  hypo
tgaagtaagaagctcgaaaatgaatgcactatatgatgagttagaaaaaaatcacctccacctgatagactttttaagctggagatgcacaggtgcccagcacagatgcacaactactgatcttaccgagacatttggatgcctggcgtccaaagtgcacggtatccagacacacagcacactttgtggctcgcatgttcagtcctacgttgaatcggtgaggaatattgtggtgcatgcgttccttaagacgccgactaaattctg

SEQ ID NO: 84871 - DNA, 435 bp, Homo sapiens
  chr12:120155993-120156428
  hypo
catatgcccacatgtcttagtcgactaaaagaaatttccatacaactccaacgtaccctctggagttgaagactcctttctgcggctggatggcggggccagcaggctcatggcactgggctggtgctctggcgaccgcacgatggcggacatggcgatctgctgcctcgcggtggctggcgtggatgggtgtgggtggtccgttgctttgcggtgggcagctgcagagagaccaggacaatgccttttggttagctgggtcgcctagaggaccaaactaagccgaatgtccctgggctatctttcaaggacccaagaccaaaagaatatgcgtcacatcaacttggcaatgcacaggggccatacgtttttcagacatgggatgtctggtctgaaagcgtatgggccataaacgaagacactgagctagttagt

SEQ ID NO: 84872 - DNA, 311 bp, Homo sapiens
  chr12:120172971-120173282
  hypo
tggctggtaagctgcatctctcgttccgtgatctcccggcggagatggtccacttcacttcgcagttgtacaatctcgtcgttggcgccagaagcctcatcgagttgtttggacaagtagaagttttggttgttgagttcagcgttgtcctcggtcagctggtttagctgctcctccaggtctgtgattacctaaaagaggaaaggaatccagttacacgccaagcacattcatttcaaataagaaattgcttctagggctatggatttctgaacccacgtgacactggcaatcaacgtgccgctcatgag

SEQ ID NO: 84873 - DNA, 305 bp, Homo sapiens
  chr12:120186342-120186647
  hypo
tcaccttacatgccccgatttcacatcttggctatcatgccgatggcttactaattaattaaacagagggcttgatatttatgtacgagaatgagaacgtgcactgactcatgattttaacaaatcaaagaggatgactttgggatcccatcatcacgctatgcagggagaaggattcctttcattagtgtctctagctttcaactcttgattattcaacattagtcacttgacagaatcggtaaaagaacagaggagtgaaaacacaaaatgtgttcatgaggcctggccggtgcacacagagc

SEQ ID NO: 84874 - DNA, 30 bp, Homo sapiens
  chr12:120186872-120186902
  hypo
ggcaagcattagaaacggcaacaaaggcct

SEQ ID NO: 84875 - DNA, 98 bp, Homo sapiens
  chr12:120214486-120214584
  hypo
tatgctgacattctgtcgctttccgcttgaattcttcagcagcaagccgagactctctcagctcagattcgtagagatcactccgtcttcttgctgag

SEQ ID NO: 84876 - DNA, 305 bp, Homo sapiens
  chr12:120222342-120222647
  hypo
tgaatgttaagagacgttgagcgtaatcaacacagtggccgcagtgacataagcaggagttttaaaagactaggaagagagacttcgcatcactcaaagcagatgggatgtatctcagccacaggtgaggacccaggccacctgccggaagaagcagacatctggctgggtcatgctgagaaacggactgtttaaatccagggcctcctctggtttagatttaaaggatttacagcaacagcaaggcccgaattcatctccctctgagctgctggaggcgcgacttcagcgaaggcaggagcgcc

SEQ ID NO: 84877 - DNA, 31 bp, Homo sapiens; identical to SEQ ID NO: 26603
  chr12:120234817-120234848
  hypo

SEQ ID NO: 84878 - DNA, 337 bp, Homo sapiens
  chr12:120241086-120241423
  hypo
ggggctcagctggcacggagaggatgaaacccacgaattcttctctggttcatcaaaattggaggtgtcatcgtcagacttgagggtgggaacgaaggggggaggagctggttaaagaaaaacaagaaaggaggcggggaggaaaaaaaatttcagccggattcaacactgttgcggagaagatcgtcttactccttcggcgctggcgatggcactgcagcgcctgctttcaatctagctcgcaacctcggctcctacagcaacaagagattaaccccttctctgccaacatggccaccaacccgcagacaggctgccttcccgcctggggtaaact

SEQ ID NO: 84879 - DNA, 30 bp, Homo sapiens
  chr12:120241908-120241938
  hypo
tacagcacccctgcgcgctgacggtgggaa

SEQ ID NO: 84880 - DNA, 30 bp, Homo sapiens
  chr12:120246512-120246542
  hypo
attcaaccaaaaacacgttcaacttcgttc

SEQ ID NO: 84881 - DNA, 37 bp, Homo sapiens
  chr12:120265238-120265275
  hypo
ccaatagattttttttttttccgagatggagtctcgc

SEQ ID NO: 84882 - DNA, 17 bp, Homo sapiens
  chr12:120286921-120286938
  hypo
gaggaggattagaaaat

SEQ ID NO: 84883 - DNA, 31 bp, Homo sapiens; identical to SEQ ID NO: 26604
  chr12:120421162-120421193
  hypo

SEQ ID NO: 84884 - DNA, 30 bp, Homo sapiens; identical to SEQ ID NO: 26605
  chr12:120533272-120533302
  hypo

SEQ ID NO: 84885 - DNA, 30 bp, Homo sapiens
  chr12:120534554-120534584
  hypo
gagagaatgagcaacgcggagcccactcca

SEQ ID NO: 84886 - DNA, 30 bp, Homo sapiens
  chr12:120534783-120534813
  hypo
cgctcggcgggcagcgtcctcgccaggtcc

SEQ ID NO: 84887 - DNA, 30 bp, Homo sapiens; identical to SEQ ID NO: 26606
  chr12:120541722-120541752
  hypo

SEQ ID NO: 84888 - DNA, 131 bp, Homo sapiens
  chr12:120543003-120543134
  hypo
ggttgagattaggtaggggaacgacatcccactcaaaagcaaatagctgaggatgatacgcaaccagaacacattcagaaaagcggccagcacccggggtcttccagccaggggaacgccaaggagtgcag

SEQ ID NO: 84889 - DNA, 36 bp, Homo sapiens; identical to SEQ ID NO: 26607
  chr12:120545352-120545388
  hypo

SEQ ID NO: 84890 - DNA, 298 bp, Homo sapiens; identical to SEQ ID NO: 26608
  chr12:120565537-120565835
  hypo

SEQ ID NO: 84891 - DNA, 31 bp, Homo sapiens; identical to SEQ ID NO: 26609
  chr12:120571412-120571443
  hypo

SEQ ID NO: 84892 - DNA, 41 bp, Homo sapiens
  chr12:120574315-120574356
  hypo
aagaggctgagtgtctcgagcagagccgccttcacattcca

SEQ ID NO: 84893 - DNA, 30 bp, Homo sapiens; identical to SEQ ID NO: 26610
  chr12:120578177-120578207
  hypo

SEQ ID NO: 84894 - DNA, 256 bp, Homo sapiens
  chr12:120580289-120580545
  hypo
aacaaggcccaggaaactcaccgttctcttatctgcacacgtgctggccaggaaacccagcaggagcccaaagagagtgggtaggatctcacgcaaggtgcggggggtattggagacaacaatcttccagacatgcagggacgcctgccgcaccaccagctgggtgtctgagcggcccatgtacagccctgccaacacccggttccgccgctctacccccagggcagtgatgatcgcctgcagccagtagaagggg

SEQ ID NO: 84895 - DNA, 116 bp, Homo sapiens
  chr12:120597712-120597828
  hypo
tcagcaagggcagaaaagagtcgaccaaaacagggatgtactgggtcaggccggacgggttcttggccaggatgatgtccagcagtccaagcgccgcctccagctccccatccagc

SEQ ID NO: 84896 - DNA, 172 bp, Homo sapiens; identical to SEQ ID NO: 26612
  chr12:120613495-120613667
  hypo

SEQ ID NO: 84897 - DNA, 43 bp, Homo sapiens
  chr12:120620160-120620203
  hypo
ccatgtttgtccccagaggtgcgctggataagctcccagggat

SEQ ID NO: 84898 - DNA, 283 bp, Homo sapiens
  chr12:120647680-120647963
  hypo
ggaagcacgcaaatccggacatgacgacgaggaggcagtagagacccatcctcaactgtaagtaactgccttcggcagggaaggggctaacccacgttgtgtgggctcaggcacggccgcgtctggttctgtgcaggaacacaggcagaggcaagccctgggtccgcatcatggctctgccctcactcagattgccttgtacatgtaggttcttgtcctagagcctctttccctacttctaaatgagtggaaagccacccacaagcccgtgagtgaggatgcc

SEQ ID NO: 84899 - DNA, 76 bp, Homo sapiens
  chr12:120662006-120662082
  hypo
ggattgtgccattgagggcctcgctggacgggggtggggggacggggggtggcacggcaatctcctggtatgtgtg

SEQ ID NO: 84900 - DNA, 30 bp, Homo sapiens
  chr12:120720047-120720077
  hypo
agcttcccggaccacggccaacctcgagcg

SEQ ID NO: 84901 - DNA, 30 bp, Homo sapiens
  chr12:120741550-120741580
  hypo
gcaggaatctccaccgaatcggggatacca

SEQ ID NO: 84902 - DNA, 121 bp, Homo sapiens
  chr12:120758713-120758834
  hypo
ccgccatgctcggcttgttaatgtttattatatttcatgactacagtgtcaaaattagcctgtagagtgtggtgaagtcttttatttagaaaagaaagtcgtggccgtgtgcggtggctca

SEQ ID NO: 84903 - DNA, 241 bp, Homo sapiens; identical to SEQ ID NO: 26615
  chr12:120908354-120908595
  hypo

SEQ ID NO: 84904 - DNA, 37 bp, Homo sapiens
  chr12:120927817-120927854
  hypo
taggattacaggcgtaagccaccgtgcctggcctatt

SEQ ID NO: 84905 - DNA, 37 bp, Homo sapiens; identical to SEQ ID NO: 26616
  chr12:120956374-120956411
  hypo

SEQ ID NO: 84906 - DNA, 41 bp, Homo sapiens
  chr12:120983606-120983647
  hypo
gctgggattacaggcgtgagccattgcgcccagcccccagt

SEQ ID NO: 84907 - DNA, 32 bp, Homo sapiens; identical to SEQ ID NO: 26617
  chr12:120991483-120991515
  hypo

SEQ ID NO: 84908 - DNA, 22 bp, Homo sapiens
  chr12:121031704-121031726
  hypo
gagccaccgcacccagccagca

SEQ ID NO: 84909 - DNA, 31 bp, Homo sapiens; identical to SEQ ID NO: 26618
  chr12:121038110-121038141
  hypo

SEQ ID NO: 84910 - DNA, 30 bp, Homo sapiens; identical to SEQ ID NO: 50221
  chr12:121078181-121078211
  hypo

SEQ ID NO: 84911 - DNA, 30 bp, Homo sapiens
  chr12:121093694-121093724
  hypo
ggaaccaccatttccgtcaaggattggaga

SEQ ID NO: 84912 - DNA, 30 bp, Homo sapiens; identical to SEQ ID NO: 26619
  chr12:121104894-121104924
  hypo

SEQ ID NO: 84913 - DNA, 30 bp, Homo sapiens
  chr12:121154632-121154662
  hypo
ggaggaggcaaagtcgggcttacagagatt

SEQ ID NO: 84914 - DNA, 30 bp, Homo sapiens; identical to SEQ ID NO: 26620
  chr12:121159497-121159527
  hypo

SEQ ID NO: 84915 - DNA, 95 bp, Homo sapiens; identical to SEQ ID NO: 26621
  chr12:121166588-121166683
  hypo

SEQ ID NO: 84916 - DNA, 30 bp, Homo sapiens
  chr12:121174995-121175025
  hypo
gcaggctctggcctcggctcccagccctga

SEQ ID NO: 84917 - DNA, 30 bp, Homo sapiens
  chr12:121175402-121175432
  hypo
tcttgccaccgcggcgctgggaggaagatt

SEQ ID NO: 84918 - DNA, 30 bp, Homo sapiens
  chr12:121175804-121175834
  hypo
gagaggggttcagccggatcctgggctgct

SEQ ID NO: 84919 - DNA, 30 bp, Homo sapiens; identical to SEQ ID NO: 26622
  chr12:121177325-121177355
  hypo

SEQ ID NO: 84920 - DNA, 139 bp, Homo sapiens
  chr12:121200045-121200184
  hypo
ttgagaaaacagaataagaggcggacctaagtgtatcaggcagcggggagcaaacgagcactggaagggaagtctaatgtgtgctttaactgcagccacccactcaaccctccgagacgagtagagtatttgctgtttc

SEQ ID NO: 84921 - DNA, 24 bp, Homo sapiens
  chr12:121200413-121200437
  hypo
tgagatggagtctcaccctgtcgc

SEQ ID NO: 84922 - DNA, 42 bp, Homo sapiens; identical to SEQ ID NO: 26623
  chr12:121203844-121203886
  hypo

SEQ ID NO: 84923 - DNA, 222 bp, Homo sapiens
  chr12:121203945-121204167
  hypo
gtcgagatcacaagctcactcaggggcttaagcagaatcacctccagcgaggagagtgcaaaccgaggcacaggccaatccaagttattgctttcacaggtttataactgctgctctcacctttaaataggccatcgtgaggagtggcaataaagtaaatggcaccaaatagagaagggcgggctgggcggcccggtgaatgcgagacgccacagtagcagt

SEQ ID NO: 84924 - DNA, 242 bp, Homo sapiens
  chr12:121205141-121205383
  hypo
aaggttggaggacagccagagcgaggatcatctgcagtctctctggttctcttacctacaaagtatccgatgagggtgcagtgaaagtaggagaccttctgcatgcgcccggagatgttggcaggtccaggggccccacaggagtccccactggcttgctttttgtagttgtcatagcgaaggacaaagcatagtaggagaccaggcataacgatgtctccgatgcccaacatggagaagtg

SEQ ID NO: 84925 - DNA, 150 bp, Homo sapiens
  chr12:121212804-121212954
  hypo
acaaagacagtgacaccaaaccgagctcaaatgttctctacgaggatgacataacctgtaaggtttctaagcagtgctcacattcgcgatacaggctctctagatatctatgccctatgtggagtcagcgcaccaagagtgtagcatttt

SEQ ID NO: 84926 - DNA, 32 bp, Homo sapiens
  chr12:121289696-121289728
  hypo
gtacctggcccgtttcacactgattttcaaac

SEQ ID NO: 84927 - DNA, 30 bp, Homo sapiens
  chr12:121328643-121328673
  hypo
aatcaagaatgtctccgaggtatctagctg

SEQ ID NO: 84928 - DNA, 32 bp, Homo sapiens
  chr12:121352804-121352836
  hypo
aggccttcccgggaacgcgtcagcacttgagc

SEQ ID NO: 84929 - DNA, 247 bp, Homo sapiens
  chr12:121363904-121364151
  hypo
ttcagaggatcctgtcgtagtcagcctcattccccaactgagaaacccctggcgttggcttgacgggggaaaaacagagctgatctgctatcctgagtcagctgttgggagaacctgacttctcaggtgagacaaggacccccaacaaggcgaggcctgggaatgctacccaagaaaaggaaacagatgtgacccttctgctccgagctcattccatggtgactcaaataaccgagtcttccctggc

SEQ ID NO: 84930 - DNA, 30 bp, Homo sapiens
  chr12:121440256-121440286
  hypo
cggggcgagtggcacgtttatttaactttt

SEQ ID NO: 84931 - DNA, 36 bp, Homo sapiens; identical to SEQ ID NO: 26627
  chr12:121531379-121531415
  hypo

SEQ ID NO: 84932 - DNA, 89 bp, Homo sapiens
  chr12:121653375-121653464
  hypo
agccgggatttttattggacagcacagctctgtaggattccttatgacgtattcactgtctcagtcacgagaatctttaaagcagtaaa

SEQ ID NO: 84933 - DNA, 1000 bp, Homo sapiens
  chr12:121687591-121688591
  hypo
tgatttccggcaccacgatcctcgactcggggttcttgtccagcatacgggtgatcaggtccttcaagtcctcagctatgtcgggcctggggatggagaggcgtcagggtggcagacacgggaccgccaagaactcggacaggagagatgcgggacggcgggagatactcactggtctggaaattccagggcctgactcttgatcttactgtgtaaacacatgatccgctcgtccatgaatgggcactgcaaagaggccagggacagagtggcagtcaatggcggccacatctgcccttcgagggccacctgtgctgtgccactccacataggatacagcagagaaatcaacaattgcggcccaggctagggggcaagcagttcccattctccccgagaatggccaagacacaggggtgtggggcctggccgacgcagggcagagccaggaatggccctctcgaagggctagagcctttcccaagcacactgcaggctccctctgtagctgggcctcagtttacctacttacaccaaagcaaacactgctcgtcacctacttgccaggtgaacaacaggaacaacaagaataacacaaaagactttgtgttatttgtggcagcagcagtgattttcaagggcttagcctggatcgcgccacgccctgccctgaggttttcattcactgttccccgtccctggaatgttcttctcaccaacatctacgtggcttggtctctcccaccatgcaggtgtctgactaaagctcaccttctcagggaggacttcctgaagccctgtctaaaacagacaacccccaatgccgccaccgcccacatcactcctcatcgtagcacttatccctgacgttatcgtacagatttgtttattgtttaacccctcccacgggaacgttagctccaagaaggcagggatttctggctgtcttgctcactgcggactctccgtgcctaggagcgttcctgcacaaagtaagggc

SEQ ID NO: 84934 - DNA, 31 bp, Homo sapiens; identical to SEQ ID NO: 26630
  chr12:121691829-121691860
  hypo

SEQ ID NO: 84935 - DNA, 136 bp, Homo sapiens
  chr12:121693276-121693412
  hypo
acactttccactttgcacccacgctcagaatgctaactacccactgggtgagagccctcccgcaggccctgctcacagtactcgatgcctttgatcagatcctggaagtagaaacgggcctggtcttcagagagtg

SEQ ID NO: 84936 - DNA, 30 bp, Homo sapiens
  chr12:121706442-121706472
  hypo
ggaaagccggcctgccggatcagcttcttt

SEQ ID NO: 84937 - DNA, 179 bp, Homo sapiens
  chr12:121711832-121712011
  hypo
acctggctcaccaccggctcacgcacctgcatacccgtgatggagacgtggtgagactccactgtcggccgccggggcagccgaggcgaggactgcggggagctgacgggtgagtagggcagggacgggcagatgcagcgtccgttcatgtccaggctgccaccggctgccagcccacc

SEQ ID NO: 84938 - DNA, 31 bp, Homo sapiens
  chr12:121740281-121740312
  hypo
cttatcttcacaggtgcgggggacataggac

SEQ ID NO: 84939 - DNA, 78 bp, Homo sapiens; identical to SEQ ID NO: 26632
  chr12:121754199-121754277
  hypo

SEQ ID NO: 84940 - DNA, 153 bp, Homo sapiens; identical to SEQ ID NO: 26633
  chr12:121756056-121756209
  hypo

SEQ ID NO: 84941 - DNA, 30 bp, Homo sapiens
  chr12:122107438-122107468
  hypo
tctggggctcagcgcgccccgtgtaatgcc

SEQ ID NO: 84942 - DNA, 30 bp, Homo sapiens
  chr12:122158136-122158166
  hypo
cccacttaccgctcccgtaacataccgttc

SEQ ID NO: 84943 - DNA, 31 bp, Homo sapiens; identical to SEQ ID NO: 26634
  chr12:122166515-122166546
  hypo

SEQ ID NO: 84944 - DNA, 213 bp, Homo sapiens
  chr12:122179048-122179261
  hypo
agacttggcctgcggcggtggtttacgaatgcctgcttgatagagaaaaagaacacacaggcaggcacacatacatgggggataaagcaaatacagcatgatggaacagctagtgaatctggtgaagaatagaggcgagttctttgtattgtttttgtaattctgcaagcttgaaattattattattactattattattattttgagacagag

SEQ ID NO: 84945 - DNA, 281 bp, Homo sapiens; identical to SEQ ID NO: 26635
  chr12:122182116-122182397
  hypo

SEQ ID NO: 84946 - DNA, 376 bp, Homo sapiens
  chr12:122192679-122193055
  hypo
gtggacgtgaattttggaaggatgctattcaacccagtacaccttctataggctaaaaacggggcagaggagggggattggacgggccgttcatctctgtgccggtgcccccgggaagcctgccctgctgtttaaccttaggcaaatgacgaacctctcccagcctcagtttcttgacagatacagtgagcgtgacaggagctacttggcagggcagcttggagggcaggagaagctgtgtctggagactggttagactggtgcctgtttaaatattagcaccggttagcatcaccgttgttttgggctaagactgggcatacgggaaaaaggctcacagcttcatagctagtgcgtccacagagcaggattctct

SEQ ID NO: 84947 - DNA, 136 bp, Homo sapiens
  chr12:122206326-122206462
  hypo
gcccagaactgttgcatgggccgtcaagggaagagtgatggtttagatccagtctcgttcttacgatgtgcgtatgcgagaccctgcctggaaaaaaaagagaaagcacgtgggcgtgtgtgtggacccatttccc

SEQ ID NO: 84948 - DNA, 43 bp, Homo sapiens
  chr12:122212993-122213036
  hypo
gctgtttgagctctccagccacgaggaatgcagagaatggcag

SEQ ID NO: 84949 - DNA, 270 bp, Homo sapiens; identical to SEQ ID NO: 26637
  chr12:122213468-122213738
  hypo

SEQ ID NO: 84950 - DNA, 214 bp, Homo sapiens; identical to SEQ ID NO: 50232
  chr12:122214096-122214310
  hypo

SEQ ID NO: 84951 - DNA, 170 bp, Homo sapiens
  chr12:122218792-122218962
  hypo
gggctccagctgggcggcccggagcttccgcagctgctccttgtccttcctcaggtctgtcttgcagccgatgagcaccatggggatcccgcggcagaaatgcgtgacctcagggaaccactgtggagggaggaggcgggatcaggggtgcggccgggcccagatgtggg

SEQ ID NO: 84952 - DNA, 1023 bp, Homo sapiens; identical to SEQ ID NO: 50234
  chr12:122231273-122232296
  hypo

SEQ ID NO: 84953 - DNA, 103 bp, Homo sapiens
  chr12:122246167-122246270
  hypo
agaccctcccagtgggcgagctggacgctgtctctccaatcgtgaatgagaccctgcaggtgggtttatggccgtcagtctgccccatcgccagctctttgat

SEQ ID NO: 84954 - DNA, 205 bp, Homo sapiens
  chr12:122252456-122252661
  hypo
cgcaggtgctcagccggctgatgacgggccagggcgcctgcccctacccgcccttcatggccgctgcggccgccgctgcctcagctgggctccagtttgtcaacctgccgccctaccggggccccttctccctgagcaactccggcccaggccgcgggcagcactggccaccactgcccaagtttgacccgtcagtgcctccacc

SEQ ID NO: 84955 - DNA, 30 bp, Homo sapiens; identical to SEQ ID NO: 26643
  chr12:122254987-122255017
  hypo

SEQ ID NO: 84956 - DNA, 30 bp, Homo sapiens
  chr12:122255281-122255311
  hypo
agcgagagcgagaccgggatatggcagaca

SEQ ID NO: 84957 - DNA, 30 bp, Homo sapiens
  chr12:122257629-122257659
  hypo
ccctccatgctggacgagccccccttgcct

SEQ ID NO: 84958 - DNA, 30 bp, Homo sapiens
  chr12:122261147-122261177
  hypo
cagccacagacccccgtcttccccagcacc

SEQ ID NO: 84959 - DNA, 196 bp, Homo sapiens; identical to SEQ ID NO: 26644
  chr12:122261813-122262009
  hypo

SEQ ID NO: 84960 - DNA, 122 bp, Homo sapiens
  chr12:122265476-122265598
  hypo
ggcgttcggagcagcgccgcctgctgtcctccttcactggcagctgtgacagtgacctgctcaagttcaaccagctcaaggtgaggccgggcttcacccagatcgccggggtggcggcagga

SEQ ID NO: 84961 - DNA, 31 bp, Homo sapiens; identical to SEQ ID NO: 26645
  chr12:122266346-122266377
  hypo

SEQ ID NO: 84962 - DNA, 30 bp, Homo sapiens; identical to SEQ ID NO: 26646
  chr12:122268182-122268212
  hypo

SEQ ID NO: 84963 - DNA, 111 bp, Homo sapiens
  chr12:122268639-122268750
  hypo
tcctggaagccacccggacctggacgcagggccaggtgctgtgggaaggatggaggcccccacggccttgacctcagaacactacgccctgaaagcgcccctcactgcccg

SEQ ID NO: 84964 - DNA, 212 bp, Homo sapiens; identical to SEQ ID NO: 26647
  chr12:122276668-122276880
  hypo

SEQ ID NO: 84965 - DNA, 42 bp, Homo sapiens; identical to SEQ ID NO: 26648
  chr12:122282338-122282380
  hypo

SEQ ID NO: 84966 - DNA, 70 bp, Homo sapiens
  chr12:122285027-122285097
  hypo
gccaccacaatggatcgcagagagctatattccgtgtgcacctgcgtgtcatccacggaccagaagcggt

SEQ ID NO: 84967 - DNA, 20 bp, Homo sapiens
  chr12:122312672-122312692
  hypo
ttttttttttttgagacgta

SEQ ID NO: 84968 - DNA, 31 bp, Homo sapiens; identical to SEQ ID NO: 26649
  chr12:122319020-122319051
  hypo

SEQ ID NO: 84969 - DNA, 118 bp, Homo sapiens
  chr12:122396581-122396699
  hypo
ctgggcctatctgtgcgtctctgcgcgctcaccccagcaggctggatgaggcgccttctctctggggctcccgcggtgtcctgggcctatctgtgcgtctctgcgcgctcaccccagg

SEQ ID NO: 84970 - DNA, 35 bp, Homo sapiens
  chr12:122425315-122425350
  hypo
ttaaaaagaatgcaggcgatagagtccaggcctgg

SEQ ID NO: 84971 - DNA, 59 bp, Homo sapiens
  chr12:122438022-122438081
  hypo
agtaatgggagggacccggagctagaaagcaaaagaatgtgattcgtgttgcaactacc

SEQ ID NO: 84972 - DNA, 88 bp, Homo sapiens
  chr12:122439685-122439773
  hypo
ttcccgcgctctgtccgtccttttgtttcttctgggcttattttccctttgttccactgacctgtcatcttgccggcttgggtgggtg

SEQ ID NO: 84973 - DNA, 31 bp, Homo sapiens; identical to SEQ ID NO: 26651
  chr12:122444564-122444595
  hypo

SEQ ID NO: 84974 - DNA, 25 bp, Homo sapiens
  chr12:122455086-122455111
  hypo
ccactgtacccggcctctcttttac

SEQ ID NO: 84975 - DNA, 19 bp, Homo sapiens
  chr12:122455989-122456008
  hypo
actccgtctcaatcaaaaa

SEQ ID NO: 84976 - DNA, 40 bp, Homo sapiens
  chr12:122458547-122458587
  hypo
tattacaggcatgagccaccgcgcccggccagtatttgtt

SEQ ID NO: 84977 - DNA, 198 bp, Homo sapiens; identical to SEQ ID NO: 50242
  chr12:122459881-122460079
  hypo

SEQ ID NO: 84978 - DNA, 360 bp, Homo sapiens; identical to SEQ ID NO: 50243
  chr12:122461020-122461380
  hypo

SEQ ID NO: 84979 - DNA, 77 bp, Homo sapiens; identical to SEQ ID NO: 26653
  chr12:122463062-122463139
  hypo

SEQ ID NO: 84980 - DNA, 31 bp, Homo sapiens
  chr12:122472063-122472094
  hypo
ctggtggtgaggctcacgtatcctgcatctt

SEQ ID NO: 84981 - DNA, 85 bp, Homo sapiens
  chr12:122472661-122472746
  hypo
gaaaaaaggaatggcacgaaaagcatccccatcctccctcctttctcccggggtcctccctcctttctcccggggtcttccttcc

SEQ ID NO: 84982 - DNA, 21 bp, Homo sapiens
  chr12:122474141-122474162
  hypo
aatgttgtaacttagccgggt

SEQ ID NO: 84983 - DNA, 144 bp, Homo sapiens
  chr12:122474513-122474657
  hypo
aaacacagaacgttccgagctagtccccagtgtcccccgcaggtcctcacggttttctccatccacccaaggaaaatgccctcagagattcaaacctaaagctccttttttttttttaaggcagagtctcgctcctgtcaccca

SEQ ID NO: 84984 - DNA, 84 bp, Homo sapiens
  chr12:122474896-122474980
  hypo
caccgcacccgtccctaaagcttcataaaaattaagttggttttccgtgtttggaaatcaggaaatctccgtcctgccatccct

SEQ ID NO: 84985 - DNA, 31 bp, Homo sapiens; identical to SEQ ID NO: 9137
  chr12:122478893-122478924
  hypo

SEQ ID NO: 84986 - DNA, 214 bp, Homo sapiens; identical to SEQ ID NO: 26655
  chr12:122479006-122479220
  hypo

SEQ ID NO: 84987 - DNA, 450 bp, Homo sapiens; identical to SEQ ID NO: 26656
  chr12:122480939-122481389
  hypo

SEQ ID NO: 84988 - DNA, 390 bp, Homo sapiens
  chr12:122481628-122482018
  hypo
cgagatccgtctcaaaaaaaaaaaaaacggtaaccagacccctccccgggagagctgccatggggttccgggcattgaggcacagggatgctgagccctctgacctacccgtccttggcagctgtgggatttcatcctgtggttctgttcccaccccctacagacgataacagcaaccagagctccatcgcagatgcctcccccatcaaacaggagaacagcagcaactccagccccgctccagagcccaactcggctgtgcccagcgacggcaccgaggccaaggtggatgaggcccaggctgatgggaaggagcacccaggagctgaaggtatgtggcctctggaggtggggctctgacggcctccctgtaaccggccttcaggcagt

SEQ ID NO: 84989 - DNA, 146 bp, Homo sapiens; identical to SEQ ID NO: 26658
  chr12:122483262-122483408
  hypo

SEQ ID NO: 84990 - DNA, 105 bp, Homo sapiens
  chr12:122491188-122491293
  hypo
gccgcgcccggccagggctcctagtctgagaagtaagtgtcaaccctgctcagactccctgggaaggagggtcttgctgtcccgttcccccgccctctgtgtccc

SEQ ID NO: 84991 - DNA, 21 bp, Homo sapiens
  chr12:122491955-122491976
  hypo
gtcagtcattgctctggcaat

SEQ ID NO: 84992 - DNA, 31 bp, Homo sapiens
  chr12:122492518-122492549
  hypo
tggctgctggaaacagcgccactgaaaaatc

SEQ ID NO: 84993 - DNA, 196 bp, Homo sapiens
  chr12:122493938-122494134
  hypo
ctgagacagactagggcgcagccatctagaagagcatggttgtgccttccaggttctgataaacattcttgcagcgtgcagtgagaaaagcaagctgcagatccgcaggcgtagcatgagcccatctggttaaaaacagtagaaaccaaagcctggtgatttatattaagaccaaagttgtcggctgggatctctg

SEQ ID NO: 84994 - DNA, 30 bp, Homo sapiens; identical to SEQ ID NO: 26661
  chr12:122497811-122497841
  hypo

SEQ ID NO: 84995 - DNA, 30 bp, Homo sapiens; identical to SEQ ID NO: 26662
  chr12:122499172-122499202
  hypo

SEQ ID NO: 84996 - DNA, 94 bp, Homo sapiens
  chr12:122511272-122511366
  hypo
actctttttttaatcataactttaaaaacccagttttaagttttattttttgtgctacactgtttcttgtgttccatatcgttctcgtacttga

SEQ ID NO: 84997 - DNA, 38 bp, Homo sapiens
  chr12:122586393-122586431
  hypo
gggattacaggcgtgagccaccgcgcccggccttctct

SEQ ID NO: 84998 - DNA, 77 bp, Homo sapiens
  chr12:122591532-122591609
  hypo
gcaggactccaactgggcccacgcctctcctctgagagcactggcaggggttcaacgtcaccagccctcctccttgt

SEQ ID NO: 84999 - DNA, 20 bp, Homo sapiens
  chr12:122596894-122596914
  hypo
gtatgtacaggccgggcgtg

SEQ ID NO: 85000 - DNA, 125 bp, Homo sapiens; identical to SEQ ID NO: 26663
  chr12:122602830-122602955
  hypo

SEQ ID NO: 85001 - DNA, 493 bp, Homo sapiens
  chr12:122614570-122615063
  hypo
agacatgctcatgtcggaattcagcgacaccctcttctccacactttcttcacaccagccggtggcctggcccaatccccgggaaataggtaacccaaaccagggccttgggctttgaacagccagccgcttccttctctgccaggccccctctgggccagggttccttcagggccatctctgagctgctgcacgtcacggttgggggcaggcagtaaggaagggaaggatggctggcctcatttgacatccaggccgcacgtaccgagtgggtggggtctgcagagtgggcccactgggcagctgccattcccgtagtgccatggtgggaggacagcagcagggtctagtctgagtcattggcacatttcagataccgttctcttcacggggtacgtgtgccgtgcctaagccgaggcggccgggccgtgactcatgctaaagaaaatcagaagcactcccgggtgtgaccgctcaccttggtggcattcag

SEQ ID NO: 85002 - DNA, 453 bp, Homo sapiens; identical to SEQ ID NO: 26665
  chr12:122622453-122622906
  hypo

SEQ ID NO: 85003 - DNA, 145 bp, Homo sapiens
  chr12:122623938-122624083
  hypo
cacctctaggggctctcgtgccaaggccaccttgcactcagccttccaggtggcagcacggctctcacggggagtggttcccgcctggtcactccccaccctgccaccgctctgcctctgagtaaacggtcggcacatgtgttgg

SEQ ID NO: 85004 - DNA, 30 bp, Homo sapiens
  chr12:122631443-122631473
  hypo
gggagggctcagcccgggccccacagctcc

SEQ ID NO: 85005 - DNA, 31 bp, Homo sapiens; identical to SEQ ID NO: 26666
  chr12:122667355-122667386
  hypo

SEQ ID NO: 85006 - DNA, 30 bp, Homo sapiens; identical to SEQ ID NO: 26667
  chr12:122684978-122685008
  hypo

SEQ ID NO: 85007 - DNA, 619 bp, Homo sapiens; identical to SEQ ID NO: 50247
  chr12:122688563-122689182
  hypo

SEQ ID NO: 85008 - DNA, 30 bp, Homo sapiens
  chr12:122691978-122692008
  hypo
tctctatcgtgatgcgaaattgatgcctgc

SEQ ID NO: 85009 - DNA, 30 bp, Homo sapiens
  chr12:122692275-122692305
  hypo
atacaatagagaaacggaaagaaaggaagg

SEQ ID NO: 85010 - DNA, 31 bp, Homo sapiens; identical to SEQ ID NO: 26668
  chr12:122712136-122712167
  hypo

SEQ ID NO: 85011 - DNA, 32 bp, Homo sapiens
  chr12:122752534-122752566
  hypo
taatttaacacacatggaggccgggcacggtg

SEQ ID NO: 85012 - DNA, 30 bp, Homo sapiens; identical to SEQ ID NO: 26669
  chr12:122794214-122794244
  hypo

SEQ ID NO: 85013 - DNA, 30 bp, Homo sapiens; identical to SEQ ID NO: 26670
  chr12:122839905-122839935
  hypo

SEQ ID NO: 85014 - DNA, 60 bp, Homo sapiens
  chr12:122877151-122877211
  hypo
accaccatggcaagccggctcgagaatcactcccactctaatgcccgctaccactcagac

SEQ ID NO: 85015 - DNA, 37 bp, Homo sapiens
  chr12:122878700-122878737
  hypo
agaaaaaagttccattgtttacgtactgcattactta

SEQ ID NO: 85016 - DNA, 203 bp, Homo sapiens; identical to SEQ ID NO: 50249
  chr12:122907626-122907829
  hypo

SEQ ID NO: 85017 - DNA, 33 bp, Homo sapiens
  chr12:122950310-122950343
  hypo
aaaaaaaaaagcgggggtgaaatacattttatt

SEQ ID NO: 85018 - DNA, 104 bp, Homo sapiens
  chr12:122952404-122952508
  hypo
aaaaaaaaaaaaaaaaaaaaaatttacctagagggaaaaaaagtaaaaaaaccccaattcaagacagaaaaaagcaaaatgattccagccgagaacttgaagaa

SEQ ID NO: 85019 - DNA, 18 bp, Homo sapiens
  chr12:122952917-122952935
  hypo
taattaatttattttttg

SEQ ID NO: 85020 - DNA, 11 bp, Homo sapiens
  chr12:122953534-122953545
  hypo
tcaaaaataaa

SEQ ID NO: 85021 - DNA, 197 bp, Homo sapiens
  chr12:122958415-122958612
  hypo
tggtacctcaggctcatccagcgtctgcttttcagatgtttttccctccgggacagggaggtctagctcatttggacaaggtgatgaggcaacggaattgccagttaaaggtgtgtccacaggaacgtcggagtcgctgtttacgctctcggcctgctcaagagctgcccagatccgcctctgctgttcttcaagtt

SEQ ID NO: 85022 - DNA, 101 bp, Homo sapiens; identical to SEQ ID NO: 26674
  chr12:122970384-122970485
  hypo

SEQ ID NO: 85023 - DNA, 116 bp, Homo sapiens
  chr12:123044411-123044527
  hypo
gcgcccggcctatcttaagcatttttaaatttaatggtattaaatacattcataatcacattcggccatcgtccatctccccaactcttttcatcgttgtgaaactgaaactctgc

SEQ ID NO: 85024 - DNA, 37 bp, Homo sapiens
  chr12:123097244-123097281
  hypo
gtgagccactgtgcccggccacctctttggttttcag

SEQ ID NO: 85025 - DNA, 38 bp, Homo sapiens
  chr12:123120644-123120682
  hypo
aaaagaaaatagctgactgggcgcagtgcctcacgcct

SEQ ID NO: 85026 - DNA, 37 bp, Homo sapiens; identical to SEQ ID NO: 26676
  chr12:123120921-123120958
  hypo

SEQ ID NO: 85027 - DNA, 181 bp, Homo sapiens
  chr12:123128961-123129142
  hypo
cgggcggcttcttcgcagcccgggctctcctccgactgcccaggccaaactccgcctcattcccccagtcaatggcctgatggcctgtaggcatgccagtgtctgactatgtgctcttccgccagcgtgctaccctcgatgtcctctcgatgtccagccacctgtgtctgcctgctagggt

SEQ ID NO: 85028 - DNA, 30 bp, Homo sapiens
  chr12:123211159-123211189
  hypo
aataaaatctgccaggctgggcggggtgcg

SEQ ID NO: 85029 - DNA, 534 bp, Homo sapiens
  chr12:123214108-123214642
  hypo
gggccccatggacagagggatcgcaggcactcgagggcaccgtccagaggaaatagagtctagcagacacgctgggcaggtagcatgtgatgaacacaattgccaccaccatgatgaaccgggtcgccttcttcatccgagcctgtctggccagctgctgcctccgcctcaggctccaaacaatcttgaaggagcaaaataagatgatgccgaggggcataaagaactccagctggaacatgatgtcatgccagccattggccgactccatgatgaagctctcacaggagacggccgtctcttgcacgcagagatggttctccagcaaaagatacactgttcccaggatgaccagggcccacagggtgcagacgatgccagccgccacccgggtggagatagtgttcaccgcgtggtgggggtggaccactttgaaatacctgtccgcagccaccaccgtaaggaacacgatgctcccggccctgttcatggccaacgtgaagagccccactcggcagggaatgtccccaaaag

SEQ ID NO: 85030 - DNA, 25 bp, Homo sapiens
  chr12:123234881-123234906
  hypo
aaaaaacttgtaagccgggcgcggt

SEQ ID NO: 85031 - DNA, 528 bp, Homo sapiens; identical to SEQ ID NO: 50252
  chr12:123258854-123259382
  hypo

SEQ ID NO: 85032 - DNA, 281 bp, Homo sapiens
  chr12:123325668-123325949
  hypo
tacccgccccctccccgcccaacttggtaatctgcgatgctaacttgaatatcacctcctctgtgcagccacccgctgccgtcctcctgcccaagcctctctgtgctgcccagtcctcatgacattatttgcgctgcttccacatctgccctgacacgctgtggctggcccagcagagcgggaggaagcagacagacatggggtgggcgcatgtgtagaccaggctcgcctgagaagtgggagtgtgtcatctccttgccgagttccctgagcaactgctc

SEQ ID NO: 85033 - DNA, 580 bp, Homo sapiens
  chr12:123333020-123333600
  hypo
ctgggcacacaccacgagaagggggctttcaccttctggtcctacgccattgggctgccgctgcccagcagctccattctcagctggaagttctgccacgtcctccacaaggtccttcgagacgggcaccccaatgtgagtagcagctgctgcctctgctccccggagctggggcactgtcccgcggacatgcgggctctggccctgttcctgtccccgtagctccgggctgttcctcccgcctcgggtggggagtgcgtgtctcagggccctgccacacggtcctggacactcccccactcccgtattccctgcgctgcaggtgctgcatgactgccagcggtaccgcagcaacatccgggagattggagacctgtgggtaggtccagccattctaggtcctgcctggcattcggggctttcctgagcgtgtggggctgagcgaagggtggctccctgtgggcagttccctgcgggtggctgggttttcccaggggcgacagtgggaggggcagcacggggagatgctgcctgcctttgagggcctggcccagggcgctccacacgcataaccagtggg

SEQ ID NO: 85034 - DNA, 30 bp, Homo sapiens; identical to SEQ ID NO: 26679
  chr12:123339276-123339306
  hypo

SEQ ID NO: 85035 - DNA, 337 bp, Homo sapiens
  chr12:123340659-123340996
  hypo
ctgcccagctggagggcgagcggagccagggcctgcgtgaggaggctgagagtacgtggggccttggccacaggggtccaagggtgtgtccccagcccctgccaccccacacggggcatcactgcccctcctctcgcccccagggaaggccagtgccacggaggcgcgctacaacaagctgaaggaaaagcacagtgagctcgtccatgtgcacgcggagctgctcagaaaggtaggtgcagcccatcctccatcccagccggtggcagggcctctcggggatggcagcagagcatgagcccttcccctgcccatgcagaacgcggacacagccaag

SEQ ID NO: 85036 - DNA, 30 bp, Homo sapiens; identical to SEQ ID NO: 26681
  chr12:123341720-123341750
  hypo

SEQ ID NO: 85037 - DNA, 502 bp, Homo sapiens; identical to SEQ ID NO: 50254
  chr12:123380318-123380820
  hypo

SEQ ID NO: 85038 - DNA, 88 bp, Homo sapiens; identical to SEQ ID NO: 26682
  chr12:123409956-123410044
  hypo

SEQ ID NO: 85039 - DNA, 30 bp, Homo sapiens; identical to SEQ ID NO: 50255
  chr12:123414330-123414360
  hypo

SEQ ID NO: 85040 - DNA, 31 bp, Homo sapiens; identical to SEQ ID NO: 9141
  chr12:123414419-123414450
  hypo

SEQ ID NO: 85041 - DNA, 30 bp, Homo sapiens
  chr12:123414623-123414653
  hypo
accacaatgaggtgcgcgtgctccacggtg

SEQ ID NO: 85042 - DNA, 326 bp, Homo sapiens
  chr12:123416624-123416950
  hypo
tctgggagagctcctggggcccgtctcttctcagcatccatctgctgggcgatgggggctctggccacctggagccgctcctgcccccgcattgcccaccaccctgtgactcaccagatactcgctctcggcatccaaagcgctggtggcttcatccaggatgaggactggggggttccgcaccagagcccgggccatggccacccgctgcttctggccacctgacagctgggcgcccttctcccctgtctctgtatggtggaggcacagagacaatttagcaatgggtgaggccgggcagcaccggggaagagtgagaggccctg

SEQ ID NO: 85043 - DNA, 106 bp, Homo sapiens
  chr12:123428942-123429048
  hypo
tacaatctcccaggacaaactcgtagatgatgaaggcgatgaggttgccgctggtcatctggcctgagatgacaaggtggcccccgtagtagaggatgctgacctg

SEQ ID NO: 85044 - DNA, 297 bp, Homo sapiens
  chr12:123434318-123434615
  hypo
cactggaaggaccaacctgtgcggttctcatcaaagaagcttgtctcctgggacaccagtgagcggaagagacagtttcgaaggcgaatgttcagtctggcaaatatgagggtaaaaatgccgccccgaatacctgcggcaaatgagctaattgcagataagagatattatagcacgatgtccttccagaccagtgaccacacccggctgccccctcccgctgccggcaggcctgggagccccaccgcagccccactccagggctggcatccctgcggggtccccctcattcccagt

SEQ ID NO: 85045 - DNA, 245 bp, Homo sapiens
  chr12:123434936-123435181
  hypo
ccttccctccctggtgcaggtcggggtgtgcggggcagggcgtgggggttgagccagctacctgccaatggccagcaggcacacgatgacgacagccgtgctgaactgatccatgcttttctggatgacgatgccatcaatggcgcggcccgtgtagtagggcaggaaggtctctcctgggggaggcagggcagcctcagggacgtctgcagccaggggaacccgcacccttcctcctgaggctc

SEQ ID NO: 85046 - DNA, 58 bp, Homo sapiens
  chr12:123446772-123446830
  hypo
tttgtgagtggggcttgtccacggtagggttaggaccgggctggggtgtgtccctggg

SEQ ID NO: 85047 - DNA, 30 bp, Homo sapiens; identical to SEQ ID NO: 50257
  chr12:123450200-123450230
  hypo

SEQ ID NO: 85048 - DNA, 30 bp, Homo sapiens
  chr12:123470608-123470638
  hypo
ggccagtcatggcgcggccccagcagccgg

SEQ ID NO: 85049 - DNA, 30 bp, Homo sapiens
  chr12:123481559-123481589
  hypo
gtgaggacccttcccggccagggcctggat

SEQ ID NO: 85050 - DNA, 53 bp, Homo sapiens
  chr12:123481906-123481959
  hypo
cgggcagggcaccaggcggatggcaaggcggcccagggcgctggggtagtgca

SEQ ID NO: 85051 - DNA, 31 bp, Homo sapiens
  chr12:123485544-123485575
  hypo
gctgaagccctgcaaccgccctccccaggct

SEQ ID NO: 85052 - DNA, 31 bp, Homo sapiens
  chr12:123490025-123490056
  hypo
ctcagcccataccactcgtcctgccagcacc

SEQ ID NO: 85053 - DNA, 31 bp, Homo sapiens; identical to SEQ ID NO: 50261
  chr12:123497425-123497456
  hypo

SEQ ID NO: 85054 - DNA, 158 bp, Homo sapiens; identical to SEQ ID NO: 26684
  chr12:123542054-123542212
  hypo

SEQ ID NO: 85055 - DNA, 43 bp, Homo sapiens
  chr12:123563305-123563348
  hypo
tggggactcccaggctccccacgctgggtggcatctcccatca

SEQ ID NO: 85056 - DNA, 204 bp, Homo sapiens
  chr12:123579930-123580134
  hypo
caatcatttcttgggcgtgcacccacatgtgtacatctcgattttacaggctctgttaaagcgcaaagatctttcaggtactcaacaaagcaagatgtcgtgatgttgccaccagcctgccccctcctccccccgcctccgacctgtcacccagatgaagtgagacgaagtgtcttccaatacacacatcggagtgtgtcactt

SEQ ID NO: 85057 - DNA, 143 bp, Homo sapiens
  chr12:123618871-123619014
  hypo
agtgctggggtctgccaagcccggtgaccacccctgagccatatgaccaggtaagagcacacccaggacattggtgatgtgatggaaaccaccactccacacctcctgcaagagtctgcggcggtgtcacccacagggtcctg

SEQ ID NO: 85058 - DNA, 30 bp, Homo sapiens; identical to SEQ ID NO: 26685
  chr12:123636702-123636732
  hypo

SEQ ID NO: 85059 - DNA, 31 bp, Homo sapiens; identical to SEQ ID NO: 26686
  chr12:123688895-123688926
  hypo

SEQ ID NO: 85060 - DNA, 31 bp, Homo sapiens; identical to SEQ ID NO: 26687
  chr12:123733912-123733943
  hypo

SEQ ID NO: 85061 - DNA, 42 bp, Homo sapiens
  chr12:123736870-123736912
  hypo
gggagcctgaggtgacagaatcgcctgaccctggggaagtca

SEQ ID NO: 85062 - DNA, 102 bp, Homo sapiens
  chr12:123736971-123737073
  hypo
ctgtctcaaaaaaaaaaaaaaaattagttgacttggtagttccaacgatgagtaccagttggaccacgttgttggcagtgcgtccagggaacagatgttcac

SEQ ID NO: 85063 - DNA, 5 bp, Homo sapiens
  chr12:123737475-123737480
  hypo
aataa

SEQ ID NO: 85064 - DNA, 30 bp, Homo sapiens; identical to SEQ ID NO: 26688
  chr12:123738276-123738306
  hypo

SEQ ID NO: 85065 - DNA, 212 bp, Homo sapiens; identical to SEQ ID NO: 50266
  chr12:123754991-123755203
  hypo

SEQ ID NO: 85066 - DNA, 153 bp, Homo sapiens
  chr12:123757398-123757551
  hypo
accaaaggcgcaggcgacgacaccccctccccagcttaacccccatccttgagatcagctgtaggccagcactagcgaagaatgctcagtgaaaccttattccatgaataaattaatgccacccatgtggctggtcccgggcgcccagtcctt

SEQ ID NO: 85067 - DNA, 31 bp, Homo sapiens
  chr12:123775023-123775054
  hypo
attttgatgaaccatccgggtcttcccaact

SEQ ID NO: 85068 - DNA, 31 bp, Homo sapiens; identical to SEQ ID NO: 26690
  chr12:123775567-123775598
  hypo

SEQ ID NO: 85069 - DNA, 31 bp, Homo sapiens; identical to SEQ ID NO: 26691
  chr12:123879620-123879651
  hypo

SEQ ID NO: 85070 - DNA, 30 bp, Homo sapiens
  chr12:123881693-123881723
  hypo
gccagctggcctatgcgggcctccgctgcc

SEQ ID NO: 85071 - DNA, 43 bp, Homo sapiens
  chr12:123881964-123882007
  hypo
atttcagccctcatgcggactccttcagcgttcttgatgttaa

SEQ ID NO: 85072 - DNA, 124 bp, Homo sapiens
  chr12:123882804-123882928
  hypo
ggtggctgagcaagactccgtctcaaaaaaaaaaaaagacagcactgcagatggtgaggtggtgccagaccacagaatcccagacacctcccagccagggttggagctgcggtgtgcccacaca

SEQ ID NO: 85073 - DNA, 44 bp, Homo sapiens
  chr12:123894662-123894706
  hypo
ggattataggcatgagccaccacgcccagcttaaaagttaatgc

SEQ ID NO: 85074 - DNA, 239 bp, Homo sapiens; identical to SEQ ID NO: 50271
  chr12:123920538-123920777
  hypo

SEQ ID NO: 85075 - DNA, 30 bp, Homo sapiens
  chr12:123945975-123946005
  hypo
tcttctttttttcacgtggagaaattccag

SEQ ID NO: 85076 - DNA, 30 bp, Homo sapiens
  chr12:123950159-123950189
  hypo
gacccacacgaccgcgcggtctggagggca

SEQ ID NO: 85077 - DNA, 233 bp, Homo sapiens
  chr12:123960004-123960237
  hypo
agaattctgaggcttcgctcgagtagaccgagcgcagccagtggcacagctgaaatcacactcaacatccacgtcaaatggagcacacaggtggcggccatgcagcttaagtggccagggggagacaggtcagccccagcagtagccgaagcagacattccaagggggcagctcaaacaaaacccaaaacacacacagtgcctacaagggaaacaagtcgtcggacaggctgc

SEQ ID NO: 85078 - DNA, 119 bp, Homo sapiens
  chr12:123986840-123986959
  hypo
tggaccggccactgccgggcagacgtcgtagcagaagtctttttgtgtaaggttacaaaggcctttgtgcaaagctgtcgtttttccagagtcttttttgttatcgggcatgcaagcgt

SEQ ID NO: 85079 - DNA, 301 bp, Homo sapiens; identical to SEQ ID NO: 26693
  chr12:123997852-123998153
  hypo

SEQ ID NO: 85080 - DNA, 30 bp, Homo sapiens; identical to SEQ ID NO: 26694
  chr12:123998629-123998659
  hypo

SEQ ID NO: 85081 - DNA, 21 bp, Homo sapiens
  chr12:124004349-124004370
  hypo
ctgagctaaccctttgggagc

SEQ ID NO: 85082 - DNA, 20 bp, Homo sapiens
  chr12:124004416-124004436
  hypo
tgtgggctgattcatgacaa

SEQ ID NO: 85083 - DNA, 24 bp, Homo sapiens
  chr12:124108088-124108112
  hypo
tctgcctgcagacctccgcctccc

SEQ ID NO: 85084 - DNA, 126 bp, Homo sapiens; identical to SEQ ID NO: 26696
  chr12:124111671-124111797
  hypo

SEQ ID NO: 85085 - DNA, 30 bp, Homo sapiens
  chr12:124116905-124116935
  hypo
aagaactccagcaacgtccggatggcagcc

SEQ ID NO: 85086 - DNA, 30 bp, Homo sapiens
  chr12:124140554-124140584
  hypo
cttgcgttatatttccgttgggcagcacta

SEQ ID NO: 85087 - DNA, 277 bp, Homo sapiens; identical to SEQ ID NO: 26697
  chr12:124141810-124142087
  hypo

SEQ ID NO: 85088 - DNA, 20 bp, Homo sapiens
  chr12:124145883-124145903
  hypo
ttttttaaaaatgtttactg

SEQ ID NO: 85089 - DNA, 143 bp, Homo sapiens
  chr12:124152493-124152636
  hypo
caccgttagcagtgacgagtctgtacaggtctgcagcaactcgattcttgcctcctcagaggaaagaatttggccaagcagcataaggcagagtgagagaccaaggcaaagtttaaagcaggggtaaacgtttattaaaaagt

SEQ ID NO: 85090 - DNA, 31 bp, Homo sapiens; identical to SEQ ID NO: 9146
  chr12:124156317-124156348
  hypo

SEQ ID NO: 85091 - DNA, 130 bp, Homo sapiens
  chr12:124171389-124171519
  hypo
catcaaatttaacaacgctgttcagacggtcctgcttcaccggcgtgtttggaggagacgtcaatcctccttttgatcagctctgctctgctgggacgacgacacgtggtgtccccgattggtttccctt

SEQ ID NO: 85092 - DNA, 30 bp, Homo sapiens
  chr12:124268537-124268567
  hypo
tgcaaccttaagtgcgctgcatgaacaaac

SEQ ID NO: 85093 - DNA, 30 bp, Homo sapiens
  chr12:124270424-124270454
  hypo
atcgcctgggaaatcgctgagagagtctgc

SEQ ID NO: 85094 - DNA, 30 bp, Homo sapiens; identical to SEQ ID NO: 26699
  chr12:124272251-124272281
  hypo

SEQ ID NO: 85095 - DNA, 30 bp, Homo sapiens
  chr12:124325918-124325948
  hypo
aaaactggtgtccgcgatgatttcagcaga

SEQ ID NO: 85096 - DNA, 31 bp, Homo sapiens
  chr12:124330450-124330481
  hypo
gggaccctttgtggtccgctgatctgtctca

SEQ ID NO: 85097 - DNA, 213 bp, Homo sapiens
  chr12:124335327-124335540
  hypo
taccatgaaaatgaatcgccacgcagctcgccgcaggccccctttccaaggggctggccggccgggccacctaactgcttctttctttcttccttcttgccctccagtttgaagggcaggagatttccctggactcccgcatgggcatcttcatcaccatgaaccccggctacgcaggccgcacggagctgcccgagtcggtgaaggcgctgt

SEQ ID NO: 85098 - DNA, 43 bp, Homo sapiens; identical to SEQ ID NO: 26701
  chr12:124338356-124338399
  hypo

SEQ ID NO: 85099 - DNA, 42 bp, Homo sapiens; identical to SEQ ID NO: 26702
  chr12:124338458-124338500
  hypo

SEQ ID NO: 85100 - DNA, 31 bp, Homo sapiens
  chr12:124341872-124341903
  hypo
tatgtacagtaaaatacgcataagtttcacc

SEQ ID NO: 85101 - DNA, 242 bp, Homo sapiens; identical to SEQ ID NO: 26703
  chr12:124404098-124404340
  hypo

SEQ ID NO: 85102 - DNA, 30 bp, Homo sapiens
  chr12:124422046-124422076
  hypo
acggggctccctgacgggctggcatctgag

SEQ ID NO: 85103 - DNA, 103 bp, Homo sapiens
  chr12:124423711-124423814
  hypo
taactccagacctgcacgcccagtttccctgtaccaactccaccacccagggcctgcctaggcactggacgccactggacgtctttcccgggcttctgtctgt

SEQ ID NO: 85104 - DNA, 40 bp, Homo sapiens
  chr12:124444121-124444161
  hypo
gattacaggtgtgagccaccgcatgcggccttaggtgcca

SEQ ID NO: 85105 - DNA, 37 bp, Homo sapiens; identical to SEQ ID NO: 26704
  chr12:124514724-124514761
  hypo

SEQ ID NO: 85106 - DNA, 115 bp, Homo sapiens
  chr12:124562300-124562415
  hypo
tgagtgcctgtgtcccctcaccgctgtcacactgtagcacgcgttccgcgccacttgtctcctcagtcccctcctccctcgcagaatttctctcggaaaccttactctctaatca

SEQ ID NO: 85107 - DNA, 30 bp, Homo sapiens
  chr12:124651761-124651791
  hypo
gagacagattccgccgcctcccccactcgg

SEQ ID NO: 85108 - DNA, 146 bp, Homo sapiens
  chr12:124668397-124668543
  hypo
atgggtagcgaggctcgccaagcaagcttgggcctgtctgctgcttgaactcatgctcacggccgtggcttagtttgcatcagatagcccagaaagtggctgagtgacctgtagaaagtgtttcttgggctgggcgcgttggctca

SEQ ID NO: 85109 - DNA, 324 bp, Homo sapiens
  chr12:124669009-124669333
  hypo
ccggtcctcactattcgtggttgctgtgtttgcgaatttgcctgctcaccgaaatgcatctataactccaaatccagtactcacgacaccttggccgtcacttgatgcgtgccgagtagcgagcaacgtgtctcccgacacacatgctctcagctgaggttgcacagggcagtgctctgcctcctggcgtcagctcacacacccctgacaagtgcccttttcagtctgtttggtgtcatgctttttgcacttgtgtgcttcttgttggttttgctgtttgcgacaacatccttgtggagcggtgaagggcgggtctggtgtttc

SEQ ID NO: 85110 - DNA, 51 bp, Homo sapiens
  chr12:124716558-124716609
  hypo
ggctccggatggggtgcgttggaggcctggtgcccacgtgtctcctgggcc

SEQ ID NO: 85111 - DNA, 217 bp, Homo sapiens
  chr12:124788612-124788829
  hypo
tgccttcttggccgcgagaggcacttcccttgcccactccccaggctggctggagtccacagggcgccacgaccgtttcgatgttcgaatagccctgcagccagaaagacgaagctgcgagcctcaggatgaactggtggctgccaccatcttcccttggtgtccagccctgcagctccgcgggagtgtcctgggccttggcggggacttcccgagc

SEQ ID NO: 85112 - DNA, 31 bp, Homo sapiens; identical to SEQ ID NO: 50280
  chr12:124790623-124790654
  hypo

SEQ ID NO: 85113 - DNA, 30 bp, Homo sapiens
  chr12:124791601-124791631
  hypo
actgagcatcaccacgcactagacgctggg

SEQ ID NO: 85114 - DNA, 226 bp, Homo sapiens
  chr12:124798800-124799026
  hypo
cgtacccaccgtcacggcctacagcgagaccatcgtggcagcacccaactgcacgtggcgcaactaccgcagccagctgaccctggagccacgcccgcgcgccctgcgcttccgcagcaccaccatcatcttccccaagcatgccaggagcactttccggaccaccctgcactgcagcctgggccggcccagccgctggttcaccgccagcgtgcagctgcagctt

SEQ ID NO: 85115 - DNA, 30 bp, Homo sapiens; identical to SEQ ID NO: 26707
  chr12:124810859-124810889
  hypo

SEQ ID NO: 85116 - DNA, 246 bp, Homo sapiens
  chr12:124819438-124819684
  hypo
cgtgaagatgccatcggctcgcatcacaggctcctcccatggattagggggcggtgatggtgccggtgctcggggctttgggatctcaccctcacccacgccctggatccccccagcgccatgccctggatcccccagccaccccgccaggacagaagggctgtggggttccccatcccctctccaggcctggtgcccccaggtgcaaaggtgacaagcagcagcagagaacgcgtagttacactg

SEQ ID NO: 85117 - DNA, 376 bp, Homo sapiens
  chr12:124821026-124821402
  hypo
ggagtagtcgtcagcgcgtgcaaaccggcgaggacggatgggcttcaaaacaaaataccaaaaccaacaacaaaaaaaacgggggccaaagtaaaaagcagagatctgaaaatatctttggaccacgagacggggtgggtgcgggccggaagtcttaccatcgcgaggggagccgttggccagcgcacctccttctcgcgcccctttatcgtgagcaatttgacgcatgataatcgcgtctatgaaggtggccgctgtcagggtggtcttacccagagaacggagttccagttcctggatggaaaagggtttactttgagtcttttcccggtgcgggtccgaggccgaggcaggtggcgccggcgggtccgggctg

SEQ ID NO: 85118 - DNA, 124 bp, Homo sapiens
  chr12:124827620-124827744
  hypo
gtccacgccactcacgccccgaagcaggtgctcatagggcgagatggggtgtgggtggtgctcgggcacggtgctgtgcggggacttggcgatctcacgaggcgtcgacgtcagctttcggtcc

SEQ ID NO: 85119 - DNA, 30 bp, Homo sapiens
  chr12:124829273-124829303
  hypo
accggggcgccgcgcgcaatggagcccccc

SEQ ID NO: 85120 - DNA, 101 bp, Homo sapiens
  chr12:124831186-124831287
  hypo
tctcatggatggagcggcccgcctccttcaccgtggccaccaggccctcatgggccggcttcagcttcagggggcccagggcctgcgtcttgtaggcctcg

SEQ ID NO: 85121 - DNA, 91 bp, Homo sapiens; identical to SEQ ID NO: 26709
  chr12:124832011-124832102
  hypo

SEQ ID NO: 85122 - DNA, 920 bp, Homo sapiens
  chr12:124832329-124833249
  hypo
acccgttgggggcaacgagggagcagggaacagggcagtaccttgtgtgatggacccgcggatgtggtgctgctctttgaggtggtgggggctgtgtcgctccggcgggatggcacggcccatgagacctgggtaggagagggtgaggccatcattccgtggctccctgagccgacactgggcagtgacaggggtcagtgtttacagccgccagtggtcatccccacgatgatggtggagtaggacccagcacgggaaggtccctgcgctacctccagatggagcctcagaaagcccagcctcggtttccccatctgtaaaacggggtcagccatccccccaccgcccaccagggggcaccgagagatgaagtctcctccctgctatcaccttcgatgctggctgaggagatggctctgcccacgcggccctccatcatgtcataggtgcgcttgggggcggccgtctcatgggggggtcctgagctgcttctgccgtcctccttggagcactgggtcacagacatgccacctggaaaccacacaaagcactcggtgaggagctgggcacgggcccaggaccacggtgggcaggcaggacaggcagagccggtaggcaggagccagcagtgcttccatgctggccccgtcacaaagcctcacagccgaggcctccagagggagctggcagcctgcaggccctgggggcctgccagcaggacccaggagcttttccagggggttgcacggtgggagatgcagggcacgctgcctgcaccctgtaccctagccctccagggtgctctgtctgcaagcaagggtgtgcctgtgaccacatgagcacgtgagtctgtgtccacacccacgggtgccgacatggggcgtgaacaagtgcacacacatgcacgtgagcaaggacgc

SEQ ID NO: 85123 - DNA, 30 bp, Homo sapiens; identical to SEQ ID NO: 26713
  chr12:124833920-124833950
  hypo

SEQ ID NO: 85124 - DNA, 30 bp, Homo sapiens
  chr12:124835201-124835231
  hypo
ggccgcggtccaagcgactcgggctgtcct

SEQ ID NO: 85125 - DNA, 31 bp, Homo sapiens; identical to SEQ ID NO: 26714
  chr12:124850367-124850398
  hypo

SEQ ID NO: 85126 - DNA, 264 bp, Homo sapiens
  chr12:124856542-124856806
  hypo
ttagggctgcctggcgcccactcaccggttcttgtcgccgccctcggcctcatccacctcgtctgcactgcaggtagcactggagtcgctgtcctggggggcgcccgagctcttggctgtggtggccctgccgctcccgccctccttcttctctgccttgagcgccccctcggccgtggcctcagcggcctccgcgtccttgcccttggccggcccctcctcggcttcctccgtgcactcgctcttgacgggctcctcggcctt

SEQ ID NO: 85127 - DNA, 30 bp, Homo sapiens
  chr12:124858829-124858859
  hypo
agcacaaacggtggcgctcacagaaagagg

SEQ ID NO: 85128 - DNA, 30 bp, Homo sapiens
  chr12:124869418-124869448
  hypo
atcgatgaggaaacacgcagcctagcgatg

SEQ ID NO: 85129 - DNA, 790 bp, Homo sapiens; identical to SEQ ID NO: 26717
  chr12:124869697-124870487
  hypo

SEQ ID NO: 85130 - DNA, 425 bp, Homo sapiens
  chr12:124879850-124880275
  hypo
gcctgccagcacctgtctccccgccccacccccgctccctcctgccatcgcctggaacacacagccattagcagccaccctgagcagtaattgtccagattgctgtaattcacggcagacgaacatgctgctgctcacgacattattacaaatgtcactgagcagggcctccgcgtgcacggcccccaggggacgctcactgccgtctccatgggcaggacccaggatgagctcactgtcatcactgaggacccaaccttgagatggtgggacacgggctcctctccgccggtgagtcatccccagccgtcctcccagcctccggatctgcccttccagaaggcaaacagagggcaggcactgtcttcccagttctcaggcaatgggcggtgggggcgggggtggtcaccggtgaggaggtggta

SEQ ID NO: 85131 - DNA, 191 bp, Homo sapiens
  chr12:124881244-124881435
  hypo
gaggagctctgagggcgaggggcagggtcccggggtgagggcgggggctgtgggggtcttctcagggctgtggggaccctcagcaccccccacaactacagtggaggacggggccgggcccaggagccccgtgatccaggctgttctcagatacacctgcccttatgtgccaagagcgtttgctataaagg

SEQ ID NO: 85132 - DNA, 214 bp, Homo sapiens
  chr12:124881709-124881923
  hypo
agccaggtgctgccccggcctcagcagtgctgccagtgatgcgccagctccgacagcccctgccccaggccaggcacggccgagggagggaggagattcgctcccactcagcccaccatgggccctcacacagggttatctgattccgcacagccaacctagacgaccctcccactcaacagacgggcaaaccgaggcccagaggcaggtcact

SEQ ID NO: 85133 - DNA, 459 bp, Homo sapiens; identical to SEQ ID NO: 26719
  chr12:124893320-124893779
  hypo

SEQ ID NO: 85134 - DNA, 30 bp, Homo sapiens; identical to SEQ ID NO: 26720
  chr12:124894793-124894823
  hypo

SEQ ID NO: 85135 - DNA, 538 bp, Homo sapiens
  chr12:124895906-124896444
  hypo
tggggaacagtggagagtggacggcagcagtcgggggcggagcctcggcctccctgggcttccttcttggacccaggccggatgactggagcccaggacgggctgttcccgtctcagtgtcccatctctgcagaaagagaggcccccttggccacatgaacccccatcgctgcgggaaggccatattggctaccaggggccgggccctgccacctggcctagccagcctcacatcctcgctccccaacggtctgcagtcaggccccagcattcctgggctctggttttgcaattcactaggataacgcggcccttccatcaatgaatcatggactataaaccactgtgccagcgcttgagctgttccccgcaccgccccacagtccgtgattcacctcagggtggtggtgatggggctcggagcccaagagaggatgctcgggcctcaacccagcctccaggctcaaaagccgctcacggccgatctcaggggccaggttccgggaggtgggggctcggccctcccttgccaaagctc

SEQ ID NO: 85136 - DNA, 30 bp, Homo sapiens
  chr12:124899762-124899792
  hypo
ctgcctgcacctcccgtccgtcaccgcagc

SEQ ID NO: 85137 - DNA, 30 bp, Homo sapiens
  chr12:124901409-124901439
  hypo
acagatagacccgccgcacagggagacccg

SEQ ID NO: 85138 - DNA, 30 bp, Homo sapiens; identical to SEQ ID NO: 26722
  chr12:124901827-124901857
  hypo

SEQ ID NO: 85139 - DNA, 30 bp, Homo sapiens; identical to SEQ ID NO: 26723
  chr12:124905087-124905117
  hypo

SEQ ID NO: 85140 - DNA, 294 bp, Homo sapiens
  chr12:124911264-124911558
  hypo
tgatgaacttgatgcgctgctggtcagcgtcgtacagcatgggcgggatcacggccagctggcgcatctgcttctccaggttctgcagggaaacggagggcagggtcagaggcccagggacgaggtgctccggccggcgcaggggacccagggaagacacagaggggacggatggtctgcgccagagcagggaaaacgcgaaaccaaggagaaggagaatgatgagtttaaaaataataatagctcatgctgggggaagggagaatgtaaaggcctccccgacaggtttatggt

SEQ ID NO: 85141 - DNA, 30 bp, Homo sapiens
  chr12:124915170-124915200
  hypo
gctcctgcagctcgcgctgcttgcggatct

SEQ ID NO: 85142 - DNA, 30 bp, Homo sapiens
  chr12:124919574-124919604
  hypo
gcagatgtttccacgcgacctggctcctgc

SEQ ID NO: 85143 - DNA, 144 bp, Homo sapiens
  chr12:124929575-124929719
  hypo
cagttcccatcagccgacccccaaatgaggcagcaggagggaagaaatcaggctgcgaaaagagaaaaacgagcaacggaagaaaccggcttccaggcctgagggggccggtgaaccagggcaacccccgggcaggcagaggca

SEQ ID NO: 85144 - DNA, 30 bp, Homo sapiens
  chr12:124930635-124930665
  hypo
cagtctagcatgagcggtcacaaaacatca

SEQ ID NO: 85145 - DNA, 30 bp, Homo sapiens
  chr12:124945950-124945980
  hypo
ggcacgttctcattcgagcagtggcacccc

SEQ ID NO: 85146 - DNA, 31 bp, Homo sapiens; identical to SEQ ID NO: 26726
  chr12:124947479-124947510
  hypo

SEQ ID NO: 85147 - DNA, 30 bp, Homo sapiens
  chr12:124947727-124947757
  hypo
ccagattccaagtgcgtgccttgtcccgga

SEQ ID NO: 85148 - DNA, 269 bp, Homo sapiens
  chr12:124964412-124964681
  hypo
cccccacgtccagctcgctcagcctggggccgtctacaaaagggggtcacagacccagcctccttgggctgggaagagatcagggaatgacactggctgggcatgacttggcacgtggcaggcagtcggcgctcacttaatggcacccgccatcactgcagcattcttaccactgcgtgaatgcctcctgcgtgccagcctcctgataaaggaggtgcctcaccctaggggtcaaccattcaatccaatccggccgcactgggcagaaa

SEQ ID NO: 85149 - DNA, 231 bp, Homo sapiens
  chr12:124966042-124966273
  hypo
ggcagccagggctggaaggagcgaggaaagaggaatgtgcctgggggagggcgctcctgcggagggcacagccggtgcaaaggtccccaggtgggaatgtgcctggcgtgtttgaggaactccagggtggcctgggaggctgtacgtgagcggttgagagggctgctgcagggagatgaggtcagggaggtgacggggctggatcacgccggacctgcagcccatggcaag

SEQ ID NO: 85150 - DNA, 31 bp, Homo sapiens; identical to SEQ ID NO: 26727
  chr12:124967299-124967330
  hypo

SEQ ID NO: 85151 - DNA, 30 bp, Homo sapiens
  chr12:124971039-124971069
  hypo
ctggatgatggagccgggcgacaggtggga

SEQ ID NO: 85152 - DNA, 196 bp, Homo sapiens
  chr12:124971725-124971921
  hypo
agggtgggtaagtgatgcccacgcgagggaacgaggctcgggcctcactcgccaggagaaggatggatggtggcaagtgatggcgacaaacacccgacagccagcgaggcccaaagaccaggtttcagaacaaagcgacccctgaccccaaggccgccctgtaaaagaggaactccccgctcgtatcacagccaga

SEQ ID NO: 85153 - DNA, 743 bp, Homo sapiens
  chr12:124979223-124979966
  hypo
cctcagagcctcgagccgcaccaaggtgaatacacacggaacgggaggacaggaaggaaggggagctgtgacctatccggcccccttgccccctggaagccaccccaatcctacccaatactgcggcagcgggggagcagaggtgaggctaggctgcaggaaagtgaatacagcaggagctccacattcgcgtgccaatcccactaccagtccagagagggcagagccccagctcagcctggccccagcctccatcttcccagctttaaaatgggagcaaagagattttatcagatattctggaaaaggcttcagacaccaggggtctctgtggcggcctcccctctgccctgggaggctcagagccacatgagcctggctcccaggagaaaggaaggggtgaagactcagtggaatggaagaagggtctcaaaggtagccccaggcgcacacatgtgcacccccttaccgtgtgcgtccgggcgatctgcactgggtaggaaaggctgtggggcgggtagcggggctcagtggccctccacgtctgtgccacaggctgtgtggatcccgacatggtggtgggggtcggcggggagctgctcccaggccccaataagctttctcttaatcaccaccaaggattaaaagccagtcctcgtcatcagctcacgggccaccccgtcactggcacctgcgggaaaacaagaaaagaaaaacaagatcagccacggggcagctggctc

SEQ ID NO: 85154 - DNA, 64 bp, Homo sapiens; identical to SEQ ID NO: 26731
  chr12:124980536-124980600
  hypo

SEQ ID NO: 85155 - DNA, 164 bp, Homo sapiens
  chr12:124989192-124989356
  hypo
ctgacaaacagatgaaacaaacgcagtctgtccatcaatggactacgattcagccacgcaaaggtaagcgctgactcagccacaacgcaggtgagccctgaagacatggcacaaaaggcaaagaagccgctcagaaaggccacgcactgcatgattccattaac

SEQ ID NO: 85156 - DNA, 622 bp, Homo sapiens
  chr12:125000712-125001334
  hypo
tggctcctgctggcccaagagcggaggccctgagccagtcactggcccagcatccggtgtcacttacaaacacaggacggctgccaccttctgcaggagaactggccctcccgcgccagtccccaggccacaccaggcactgtggggggtgcctggcccagggctggcacggaggggctcaggctgagtgggagacggggcagaacaggcaggcatggggggagacctggggatcccaaacaaaggcagagcctgggaagcacccactcgacctacctcccattatctggacccaggtttctacaaaacatgagagctctctgcaaagaagaaaagaaaaatggacggaactcgaacttaaatccaaccttgtggttacaattacggaggcccacccaggccagcactgtgcgggccccttcaggcttctctcaggctctcccgagacacaccggcaggctgcagtgctaccactgtggtaaaggacaaggaaactgaggctctgtgggattccgggacttgcccaaggtcacaccatccttgaggggtcgagccaggactggaacctcagtccggccactacaacttcataaataccatcgccctgagatgctgaaatccc

SEQ ID NO: 85157 - DNA, 255 bp, Homo sapiens
  chr12:125009051-125009306
  hypo
agcctgtctgagaacaaggcccgcatggaaggaggcacagctgaggcaaagccagctcccagaggcattgtttgagcacctagatccagccgtgcctgaacgtgtcctaccctggccactctgaggacccatcaactccccgtcatagcctaactcggctcgagtgtgtctctgccacaactcaggagccctaactaactgcccctaactaatcacccccaggtctccccttgaatgactcgtccctggacgcct

SEQ ID NO: 85158 - DNA, 30 bp, Homo sapiens; identical to SEQ ID NO: 26734
  chr12:125020032-125020062
  hypo

SEQ ID NO: 85159 - DNA, 30 bp, Homo sapiens
  chr12:125020464-125020494
  hypo
ggccccgggccacacggctaggctactggg

SEQ ID NO: 85160 - DNA, 30 bp, Homo sapiens; identical to SEQ ID NO: 26735
  chr12:125042451-125042481
  hypo

SEQ ID NO: 85161 - DNA, 40 bp, Homo sapiens
  chr12:125062417-125062457
  hypo
cgagctcggcaaacacgcatgtcctcgcaagccacaacac

SEQ ID NO: 85162 - DNA, 276 bp, Homo sapiens
  chr12:125062704-125062980
  hypo
ctgcaggggcggggccgagacaagcctgggcagggagaagggaagggagcccgtctgtgcctgtagcctgggcagggagaagggaagggagcccgtctgtgcctggaaaccaatttgctctggcagcgctgtggaagaaaaattccacgcatgtccccgcgagcccttcgaagctcttcgtggaaaggcacacactgcagtcttggagtgcatcctgctcttagggcctctgggggccaagtcaagccgatgaagggtgtgcgatgtgggtggatc

SEQ ID NO: 85163 - DNA, 30 bp, Homo sapiens; identical to SEQ ID NO: 26738
  chr12:125089689-125089719
  hypo

SEQ ID NO: 85164 - DNA, 219 bp, Homo sapiens; identical to SEQ ID NO: 26739
  chr12:125092406-125092625
  hypo

SEQ ID NO: 85165 - DNA, 31 bp, Homo sapiens
  chr12:125123326-125123357
  hypo
attgaaggcaaggctgcgcattgtctgatgg

SEQ ID NO: 85166 - DNA, 85 bp, Homo sapiens
  chr12:125128936-125129021
  hypo
ccgtgcccggcctgattccatttttttattcctagaagaggcaaaactagtccatagtgttaggggtgcacgcttgggtggaaaa

SEQ ID NO: 85167 - DNA, 319 bp, Homo sapiens; identical to SEQ ID NO: 26740
  chr12:125152046-125152365
  hypo

SEQ ID NO: 85168 - DNA, 31 bp, Homo sapiens; identical to SEQ ID NO: 26741
  chr12:125158872-125158903
  hypo

SEQ ID NO: 85169 - DNA, 521 bp, Homo sapiens
  chr12:125184197-125184718
  hypo
cacattggagtgtgtggacaacgcttacaaacggagatgttccatctcagttcttgaatatgaagaactgtgtcctgcaaggttgctgcaaggattgctgcacgtagagggtctcctgtgtgccaggcatggctagggggccagggacacaaaggactagacagggggtcgaaggctcaaaatcatattcaagatgaggaaactgaggctcagagacgctaagcacacttccaaggtcatacagccaatgagcgggagagccaggatttggaccgctgaccacctggtttccaaacctggtctcccttcacccctcctccccgctccacgcctgcagtctccaggacggagaaagtccttttcacttagcgttccacttgtgtcctcattagaactcctacttgcggccgggcgtggcagctcacgcctgtaatcccagcactttcggaggctagaggcaagacaggcagcgtcaacaagcagagctgctggggcacggcgatagggactggaagggagtg

SEQ ID NO: 85170 - DNA, 152 bp, Homo sapiens
  chr12:125221106-125221258
  hypo
acctacccacgcacccgcgcacccacccacccatgcacccacgcagccacgcacacacccatgcatgcacccggccacccacgcacccacgcacgcacccacgcatgcatccatccatgcacccacccacccacgcacgtacccacccacgc

SEQ ID NO: 85171 - DNA, 52 bp, Homo sapiens
  chr12:125223361-125223413
  hypo
gctctgaaccaaactggaaggcgagctggccgagaagccccttccttctcaa

SEQ ID NO: 85172 - DNA, 157 bp, Homo sapiens
  chr12:125223878-125224035
  hypo
agcccatgaatgagaccggaaatggcgaataaaattcaggtctcctcatgccccccagtgctcttccctccttcctcagggccaggtgagagttctccctcccctgctgtagagagcaggtactgttttggggtacaccgcattcatttctcttttt

SEQ ID NO: 85173 - DNA, 36 bp, Homo sapiens
  chr12:125224154-125224190
  hypo
agatcacaggcgtgcgccactgcatgcagcctcatt

SEQ ID NO: 85174 - DNA, 141 bp, Homo sapiens; identical to SEQ ID NO: 26744
  chr12:125236640-125236781
  hypo

SEQ ID NO: 85175 - DNA, 31 bp, Homo sapiens
  chr12:125276597-125276628
  hypo
atcaccctacagaggacgaaacacgatgggg

SEQ ID NO: 85176 - DNA, 30 bp, Homo sapiens; identical to SEQ ID NO: 26745
  chr12:125292498-125292528
  hypo

SEQ ID NO: 85177 - DNA, 31 bp, Homo sapiens
  chr12:125298971-125299002
  hypo
agtgtcagaggctggacgtggctggcccatc

SEQ ID NO: 85178 - DNA, 227 bp, Homo sapiens
  chr12:125299401-125299628
  hypo
gtgagtccccacgctccgaccacctcagggactgctctctgcacaaggggcaggcgggaggagagacaggggacgaggtcagggtgcgaggcggcgtgggccacagggcagcctcaccaagaccaggatgttgggcatgacgatgtagtcgctctccgagccgtgggacttggagggctggaactggaaggtgcggtactcgaggaaggacacggtgtcgttgttgt

SEQ ID NO: 85179 - DNA, 71 bp, Homo sapiens
  chr12:125301968-125302039
  hypo
atgacttgcctgcttccggaacaatctctggggctcagtcagcagcctccccatcccgtccactctgagac

SEQ ID NO: 85180 - DNA, 30 bp, Homo sapiens
  chr12:125302260-125302290
  hypo
ggaagggacaagtacgcttgtgaggagagt

SEQ ID NO: 85181 - DNA, 30 bp, Homo sapiens; identical to SEQ ID NO: 26746
  chr12:125333307-125333337
  hypo

SEQ ID NO: 85182 - DNA, 62 bp, Homo sapiens
  chr12:125336068-125336130
  hypo
aatcacaagcagaatggacctcggtctcctgactcagcctcgcacagtcctgctaatgagaa

SEQ ID NO: 85183 - DNA, 30 bp, Homo sapiens
  chr12:125349057-125349087
  hypo
cctatccttcgtaacgctggtgccaccatc

SEQ ID NO: 85184 - DNA, 114 bp, Homo sapiens; identical to SEQ ID NO: 26747
  chr12:125411764-125411878
  hypo

SEQ ID NO: 85185 - DNA, 30 bp, Homo sapiens
  chr12:125434950-125434980
  hypo
caactcacagaacacgctggcccggtgaca

SEQ ID NO: 85186 - DNA, 44 bp, Homo sapiens; identical to SEQ ID NO: 26748
  chr12:125447386-125447430
  hypo

SEQ ID NO: 85187 - DNA, 30 bp, Homo sapiens
  chr12:125449027-125449057
  hypo
atacgccagtgacgcggtcgtagtagcgtt

SEQ ID NO: 85188 - DNA, 30 bp, Homo sapiens
  chr12:125465173-125465203
  hypo
cggcagaggtgccacggtggtccccacacc

SEQ ID NO: 85189 - DNA, 190 bp, Homo sapiens
  chr12:125498605-125498795
  hypo
agaggagaccttgtcccttaccgccttaagagcttcagaggcatcccatgctctcaggatgaagtaaccttcccgttttctctaccgtgccccatggtgtgccaggtaaacagggatctcctagctgcccccgctccactgctctccttctgtccacaaggtggaggccgctcttcccctgggcctttcc

SEQ ID NO: 85190 - DNA, 118 bp, Homo sapiens
  chr12:125500618-125500736
  hypo
ccagaatagaggcatcggcagcggatccacgagccctgaatgcctgcattcatcaggggagcagctggcgcgttctggaggcgaaacgagcttgcttccgtgtcgaagcttttctagt

SEQ ID NO: 85191 - DNA, 30 bp, Homo sapiens
  chr12:125509765-125509795
  hypo
gaacgcggtgctgccgctgtgcttcgtggt

SEQ ID NO: 85192 - DNA, 247 bp, Homo sapiens
  chr12:125565909-125566156
  hypo
gatcacagttagtttacaaatcgcatcccttacttaagcaagggcctaagcagccgattattggctcgggggctttaagatcattgtgcttcgttttctgcatgtttttcctgacttgttccttacccagctgggtgcaggtgctcacggagctctgctccatgctcactcaggcgttctcagcaaaactcatctctcctatgggtaatccccgtcgaggccatgcgatgccctgcttaaaaaaata

SEQ ID NO: 85193 - DNA, 419 bp, Homo sapiens; identical to SEQ ID NO: 26751
  chr12:125578189-125578608
  hypo

SEQ ID NO: 85194 - DNA, 217 bp, Homo sapiens
  chr12:125609558-125609775
  hypo
gctccatctcaggtatggccccggtggggacagtccttccagccatccccgccggccccataagtatgcacacctctgcccagtgcttggattcatcccaaggacacagtccgctgggcagccaatacgcacagtcccttctcatgatctgaggcagtgatgttccacgaagtcactgtgaacacggaacccatacggaacccttgctcctggggga

SEQ ID NO: 85195 - DNA, 31 bp, Homo sapiens
  chr12:125621160-125621191
  hypo
actgaggggccccctgcgtgaatgtgcaccc

SEQ ID NO: 85196 - DNA, 31 bp, Homo sapiens; identical to SEQ ID NO: 26752
  chr12:125636478-125636509
  hypo

SEQ ID NO: 85197 - DNA, 293 bp, Homo sapiens; identical to SEQ ID NO: 50297
  chr12:126018009-126018302
  hypo

SEQ ID NO: 85198 - DNA, 30 bp, Homo sapiens; identical to SEQ ID NO: 50298
  chr12:126109505-126109535
  hypo

SEQ ID NO: 85199 - DNA, 17 bp, Homo sapiens
  chr12:126191562-126191579
  hypo
gtcttgtggcccaggct

SEQ ID NO: 85200 - DNA, 30 bp, Homo sapiens; identical to SEQ ID NO: 9155
  chr12:127509692-127509722
  hypo

SEQ ID NO: 85201 - DNA, 30 bp, Homo sapiens
  chr12:128245725-128245755
  hypo
gggtgggtggggagcgagggaagcggagct

SEQ ID NO: 85202 - DNA, 164 bp, Homo sapiens
  chr12:128247733-128247897
  hypo
ttcctgggacttgggaccttccgtgcttaaacggagacagttagggacaaactgggacgatttgcgcaccttaattcgatgagctgatgccgtcatatcaacgcacactttacctagcatgcataagcctagagtcagcagtcgtgatctgattgttttacaca

SEQ ID NO: 85203 - DNA, 94 bp, Homo sapiens
  chr12:128310533-128310627
  hypo
ttctgctgtgtatcagcagtccggtctgtggccttctgttacagccacactcatggaccaacatgtctcctgcgcaatccctgctttcattctt

SEQ ID NO: 85204 - DNA, 70 bp, Homo sapiens
  chr12:128386218-128386288
  hypo
ctaagggtaggagaccatgagcgacaaagacctcggtataaaggagcccggttggtgtcagctactgttt

SEQ ID NO: 85205 - DNA, 1129 bp, Homo sapiens; identical to SEQ ID NO: 50305
  chr12:128750748-128751877
  hypo

SEQ ID NO: 85206 - DNA, 1057 bp, Homo sapiens; identical to SEQ ID NO: 50306
  chr12:128752114-128753171
  hypo

SEQ ID NO: 85207 - DNA, 264 bp, Homo sapiens
  chr12:128773736-128774000
  hypo
actctcacttgttcattaatgcgcatatgcacctatacacaccctctcacatgttaacatacatgcacacttatacacacgcacacatgctcatgtgcgcacacacacacagacacacatacgtgaatgcagccttgtgactagccgttagtttttaagaacaagggaatctaaatccagatttaggaatttaaaaatgtccctaactccgtggggcacagtcctgttagtacatctatttgcgtgactaaccaaaacagtgaa

SEQ ID NO: 85208 - DNA, 167 bp, Homo sapiens
  chr12:128899664-128899831
  hypo
ggatgaccacggcgccggggagaagctgccatgcctgagggtctttgctttccgagaaaccagagaggtgcggggcagctgccggctgaagggggacctggggctgtgtgtggctgagctggagctcctgtccagctggttcagtgccccgacggtgggtgccggga

SEQ ID NO: 85209 - DNA, 30 bp, Homo sapiens
  chr12:129014690-129014720
  hypo
ctccgcaggcgtagacgatgcacccaggct

SEQ ID NO: 85210 - DNA, 30 bp, Homo sapiens
  chr12:129028676-129028706
  hypo
gtggttcctggtcccgggcccaggccggct

SEQ ID NO: 85211 - DNA, 224 bp, Homo sapiens
  chr12:129148502-129148726
  hypo
atacaggcacatgcacccacacgcacgcacgcgggcactcacacaggcacacacgcatacacacaggcacacgcacccacacgcacgcacgcgggcactcacaggcacacacacatacaggcacaagcacccacacgcacgcacacaggcacacgcacccgcacgcacgcgggcactcacacaggcacacacacatgcgcacaggcacacgcacccacacgcat

SEQ ID NO: 85212 - DNA, 46 bp, Homo sapiens
  chr12:129151359-129151405
  hypo
tcagtgaaaaatatatatgtccgaggcaggtggatcacgaggtcag

SEQ ID NO: 85213 - DNA, 198 bp, Homo sapiens
  chr12:129180360-129180558
  hypo
tcccttcccacaaggcccactcgtgagagcgaggatgaggacgaggaggagcggcggggccggggctgcgcactgcaataccagcacgccaccgtgcgggtcctcacccagtttgtgtctgagggcgccggtccatggggccagccgaactacctgcttagtcctaactggcagttcgacatcactcacctggtggca

SEQ ID NO: 85214 - DNA, 530 bp, Homo sapiens; identical to SEQ ID NO: 26756
  chr12:129189629-129190159
  hypo

SEQ ID NO: 85215 - DNA, 69 bp, Homo sapiens
  chr12:129305164-129305233
  hypo
cctcatcagtaaaatgggcaccgtacgtgtcatgtagactaagtagtcgtgtagacatgtagacatgta

SEQ ID NO: 85216 - DNA, 15 bp, Homo sapiens
  chr12:129337894-129337909
  hypo
cacggggcacacccg

SEQ ID NO: 85217 - DNA, 238 bp, Homo sapiens; identical to SEQ ID NO: 9163
  chr12:129338587-129338825
  hypo

SEQ ID NO: 85218 - DNA, 32 bp, Homo sapiens
  chr12:129806102-129806134
  hypo
ttttcttttttttttttgagacggagtctcac

SEQ ID NO: 85219 - DNA, 31 bp, Homo sapiens
  chr12:129806373-129806404
  hypo
gattacaggcgtgagccactgcacccggccg

SEQ ID NO: 85220 - DNA, 278 bp, Homo sapiens
  chr12:130037480-130037758
  hypo
cctggcatttaaggtcatccacggtccagatccaacaactacaacatggatgccccaagtccgagtctctggggacaagaaaggtcacgccaccatccgagccccagccttgctggtctgacagcatccaccggagcagcttcggttactcaacctttcaaggccaggctcttccccttttgagactccgagagtgttgcgcgtttgctcccagctgtgtctgagtcactgcttgtggctcatcagtcaggctccctgctggtcgctctcaccactgc

SEQ ID NO: 85221 - DNA, 40 bp, Homo sapiens
  chr12:130060595-130060635
  hypo
ggcgtgagccaccgcgcccggcccagatagatacatttta

SEQ ID NO: 85222 - DNA, 31 bp, Homo sapiens; identical to SEQ ID NO: 9164
  chr12:130136921-130136952
  hypo

SEQ ID NO: 85223 - DNA, 30 bp, Homo sapiens
  chr12:130161095-130161125
  hypo
cagtgtttcacatggcgagagcgggaggca

SEQ ID NO: 85224 - DNA, 373 bp, Homo sapiens; identical to SEQ ID NO: 26760
  chr12:130184499-130184872
  hypo

SEQ ID NO: 85225 - DNA, 36 bp, Homo sapiens
  chr12:130326760-130326796
  hypo
gggatgacaggcgtgagccaccgcgcccggccagca

SEQ ID NO: 85226 - DNA, 55 bp, Homo sapiens
  chr12:130628864-130628919
  hypo
gtgataacattttatttaactcgatgatccaaacgatgctcatttcaatgcagga

SEQ ID NO: 85227 - DNA, 1245 bp, Homo sapiens; identical to SEQ ID NO: 9168
  chr12:130645408-130646653
  hypo

SEQ ID NO: 85228 - DNA, 170 bp, Homo sapiens; identical to SEQ ID NO: 9169
  chr12:130646945-130647115
  hypo

SEQ ID NO: 85229 - DNA, 31 bp, Homo sapiens
  chr12:130700589-130700620
  hypo
ccccagtgatagacaacgagcatgtgaacac

SEQ ID NO: 85230 - DNA, 31 bp, Homo sapiens; identical to SEQ ID NO: 9170
  chr12:130709678-130709709
  hypo

SEQ ID NO: 85231 - DNA, 30 bp, Homo sapiens; identical to SEQ ID NO: 50324
  chr12:130765404-130765434
  hypo

SEQ ID NO: 85232 - DNA, 27 bp, Homo sapiens
  chr12:130765888-130765915
  hypo
tattcatcgactccccggcagggggag

SEQ ID NO: 85233 - DNA, 30 bp, Homo sapiens
  chr12:130821484-130821514
  hypo
ccttggaaatgcagccggcggggcccacct

SEQ ID NO: 85234 - DNA, 144 bp, Homo sapiens; identical to SEQ ID NO: 26764
  chr12:130852206-130852350
  hypo

SEQ ID NO: 85235 - DNA, 43 bp, Homo sapiens
  chr12:130883020-130883063
  hypo
ctaatgtgatcatttgagctgcgtgcttcatcaacttagtatt

SEQ ID NO: 85236 - DNA, 202 bp, Homo sapiens
  chr12:130892169-130892371
  hypo
aggaatgaggaggtgaacacacgtggcctcagtgtggtgtaccacgagggaagggaagggtgtggttgtgtccgtcatgaagtgcagtgtttggctggtacctcgacatcgacgttgggcgagctttctctggggtcgtagtcatacagggccaccattctccgcgtcgataccgaatgacgcctgccacttctcctgcttc

SEQ ID NO: 85237 - DNA, 34 bp, Homo sapiens; identical to SEQ ID NO: 26765
  chr12:130894170-130894204
  hypo

SEQ ID NO: 85238 - DNA, 225 bp, Homo sapiens
  chr12:130906936-130907161
  hypo
ggagtaagcagccacatgctccgcggctgaaagacacaacagcgatgatggggccactaaccgatggatgggactgtcacgggccgggacctctgaggaccagcgctgccacggggaaacctccggcccatgtgatccacccgtcctgcagaggctgggttccctaaaatctaaagacaaaacaacaacaaagtcgtaagtctcgccagcattgggaactgaaga

SEQ ID NO: 85239 - DNA, 30 bp, Homo sapiens
  chr12:130907880-130907910
  hypo
tgagtcactgaggcacggatctcgcacctc

SEQ ID NO: 85240 - DNA, 584 bp, Homo sapiens
  chr12:130909490-130910074
  hypo
cagaattagtcctggaggcaccgaggggggggaagcatgcgtctactcaggccgggggcatgccgtggagggctctgcaatgaaaacagaatgggttacggggctggggcggggtggaggctgaggcagagcacacgcagagccagcgggccgggcaggagccagcgccatgcatccagccaaggagagggcaggtgagatcccggcggcacatcaggccccacagtgcccacggtaccgctgctgtagatggtgggtgtggccacggtgccaggggagactgcccgggggctacatcctcagaaaccctgagggcagctgccactggaggccgtgtgtgactggagacagttcaccagacacggagcctgacccgtccctgtccatccactgggccaacttcccttccagcgctcggcaccctctgcaggactttctagttaggctgacgtgtcacccttctccctaagatacaagctgcgtgaaaccacgccatccccggccccaccaacagcgcccgcacaccatcgtgcagagtctgtgtcagcaaaggactggggtccgcctgtctcctctgcatcctg

SEQ ID NO: 85241 - DNA, 31 bp, Homo sapiens
  chr12:130910644-130910675
  hypo
gcgggaatgagtgaaccgggccagcgggggc

SEQ ID NO: 85242 - DNA, 195 bp, Homo sapiens
  chr12:130913666-130913861
  hypo
ttaggtttttaaaacatgccacgttgtctaacacacacgcgcagacactggcagacagcctggcctggcaggaggtggagccaccgcacagactgtgtgcttactccgggcccagctcagcctcagcatgagacgaagattgtgcagatagtaggggcactgggcggaggctgcggacagcagaaaggcttcaac

SEQ ID NO: 85243 - DNA, 259 bp, Homo sapiens
  chr12:130915749-130916008
  hypo
tgtgtgaaatgctagagataccgtagtcaactaaaagtggaggcttccacccactagaacatcggtgtcttggagcagatgggatagcgccagggggtaagggctcatgtgacggggcgggcagcatggggaagcggatggtcagggaacacttcccgggttgtaaaactggcagtctgtgcaccagctcaacttcagtcactccctaccactgtcatgatgcgtcacctagccagacgccatctgtatgattaatgaa

SEQ ID NO: 85244 - DNA, 578 bp, Homo sapiens
  chr12:130918919-130919497
  hypo
aacaaacatctgcccagttaacggaggtgaatgagcgaatggcaggttctgcctgaactgagcctaaccctacccggacctgcaaaaccacccctatgaccgaataccaggatggtgcagcgggggagggtggaagccctgcacttcgactttttcaattatccccaatgagggtatgtgacaggcattaaatataaacttcagaaacctagcacgacttaggaccccagctgggcgtctccatctctctcagggacccaagggtagcggggaaagtgcccatgtctcttgatctccacggggcccgctccgagcccgcgcccaccaggaggatggtgtggggcccggcccgctctcacctgcttgccaagttcagagcctttcaggaagtcgtccaccgaggcgcccctcctcttgaagtctggagagtcataggcgtcctcctcgtctgaggcggcgtactgccccgcgctgcttctctctaggaagacgctccttttctctaacttggaaagaaaaaggaggcacacgggtgaggcagggccaccttcagctacgctcagccccacctgcattca

SEQ ID NO: 85245 - DNA, 173 bp, Homo sapiens
  chr12:130920512-130920685
  hypo
caggaggacagtgtagggtcccggtgagaccccacaggctgacccagcagggccgagggtcctgaccagggctgtgctgccacctcaggtggaaacgggctcaacacaacaggagagatgagagcgggttctgggtggggatgcgggcacacgttctggctcccagccccaca

SEQ ID NO: 85246 - DNA, 193 bp, Homo sapiens
  chr12:130921641-130921834
  hypo
ctttgattggggtgcaggtctcgggtggggggtaggaggcaccaggagctcggggggaacggcagcaactgcagagtccacggactcgccctgggcggagagggtccgcacggtcacgcccttggcctccaggctccgcagccgcacaagctccacggccgtgctgtctgccgtggggaagatgacttcagcc

SEQ ID NO: 85247 - DNA, 30 bp, Homo sapiens
  chr12:130922996-130923026
  hypo
gacccggatggtggcgggggtcaccccagc

SEQ ID NO: 85248 - DNA, 142 bp, Homo sapiens; identical to SEQ ID NO: 26770
  chr12:130925067-130925209
  hypo

SEQ ID NO: 85249 - DNA, 437 bp, Homo sapiens
  chr12:130926605-130927042
  hypo
tgggtagccaggagagctgggcggagatctgcgtgatgttgtccacccgcaggtgggagggggccaccaccacgtccttgcccaccagcagcgtgcactgcagctcatccgagctgcccctgctggtgacgcactgcacggagatgcggtaggtgcaggctgccatgttgagcttctcgatgagggctttagttctgctccccagcgtgaggttcatgcgtgtctccttgtccaccaggacgttgtagctgctcaccgttccccatcctggtggcaccgccgggggctcccagcccacaataacacttttggcgagttgtttgatgagggtgatttttctagggtaaggcacgatgtcttctccgatgtcgtcgatgttcacgtccagggtcccggcactgttgtcggtgatgcccgcatctatgtgggttggggag

SEQ ID NO: 85250 - DNA, 103 bp, Homo sapiens
  chr12:130929719-130929822
  hypo
cctcatccatgtctccatagacgtagaggtattttcccgccgtgaggggcagctcagcttcggggttctcgttcggtccatcgaaggggttgtaactgcagag

SEQ ID NO: 85251 - DNA, 184 bp, Homo sapiens
  chr12:130931807-130931991
  hypo
ggtccctggctggtaagggcacggagaagaagtgggagatcctacggctgtcgtgacaacctcgtcggtgctcctgcgtgtgggccctggaggccacccgacctcgtgggtgttcagggcagacgctgccacgtactgtgtggatgagaccaggggacacgtcgggaatggggactcaacagag

SEQ ID NO: 85252 - DNA, 465 bp, Homo sapiens; identical to SEQ ID NO: 26772
  chr12:130933999-130934464
  hypo

SEQ ID NO: 85253 - DNA, 333 bp, Homo sapiens
  chr12:130934696-130935029
  hypo
tctgccccactcacaggggctcggtggacgccgaggggccgcacttacctatagcgggcaacacagaggtggaccttccccgagtatctctgcttggaggtattggaattccgttcattctccatctgtgaaaaaggcaatgggtgtgtgggttattgaagctggaggtgtcccaccccattcccgcggcacacgggaaagcccctcgcagcttcctgggccccaggagggacggcctgagactgtggcactcccaggaggcactgccacccgcacacccacatgcgagcttggaaaggagggtggtccctcggtgtggaccccttattacat

SEQ ID NO: 85254 - DNA, 151 bp, Homo sapiens
  chr12:130939633-130939784
  hypo
tgggtttcccagagcagaagccgtgcgtttcttgtcgcacggagtggggctctgtgtggcccttcacgggagggagagagacagcatggagacacgtgcattctgttttcccctgggaagaacggaaaccgtcttgttttcctccactctt

SEQ ID NO: 85255 - DNA, 125 bp, Homo sapiens; identical to SEQ ID NO: 26773
  chr12:130941077-130941202
  hypo

SEQ ID NO: 85256 - DNA, 176 bp, Homo sapiens
  chr12:130958395-130958571
  hypo
gtcaaagcattaactatgcatcgggcggtgagctcagcttctcttagtatcacacgttacataatagccttaagactgaaagcggtcattctaccagtaagaggaactgtagaccgaagtaaaatcggtcaagtctgcggatgaattataaatacggaaaagccctttagctcaca

SEQ ID NO: 85257 - DNA, 30 bp, Homo sapiens
  chr12:130958981-130959011
  hypo
ctcctaggtgtcaggcgatgtcctacgagt

SEQ ID NO: 85258 - DNA, 144 bp, Homo sapiens
  chr12:130963327-130963471
  hypo
tgtgcaagcagagagagggagcggcctgggagccaaggccgcaggtcggccgctccaccacaccagggatccccggcccacccgtggactccctgcctcgcacgccgcgcccggctgcccgccgcttaccttctgcagaaggtc

SEQ ID NO: 85259 - DNA, 399 bp, Homo sapiens
  chr12:130968369-130968768
  hypo
gccccgaccctcacctacacacggtgcccggagcccccaccctcacctacacacagtgcccggagcccccgtccccacctagacacggtgcccggagcccctgtccccgcctagatgtgtccctgagccatgccactaacaggggctgcgagggcttccgcggctcctggaaaggccccagaagttcccccaggcactggcttgctggcatggacaatgtcccatgggaaggatagactggaggcgaaacatctctccagagtctgccggcgactgtcacttaggtgtccttggccggaaggagcccgatgccccccgaagtggacccctggccccatgtcgcatcccagctgaaagcccctcggtggggagtaaagcggcatgctgtcacagggccac

SEQ ID NO: 85260 - DNA, 161 bp, Homo sapiens
  chr12:130985314-130985475
  hypo
taggacatggaagacacaagacgcgtcaggtgctagatgagaacggtggccacaggatttgggaacaaaggccgtggtgatggctgcctgagcttcatgctttaacccaagtgagccgcttctatcactctaccacacgcgtcatctaataatggaacaac

SEQ ID NO: 85261 - DNA, 216 bp, Homo sapiens; identical to SEQ ID NO: 26776
  chr12:131077262-131077478
  hypo

SEQ ID NO: 85262 - DNA, 210 bp, Homo sapiens
  chr12:131097714-131097924
  hypo
gtgagtaatgaggggatgggacggagggagagttgacagcagtgctggcgggttgccggggccaacaaggcaggggacgccgcccccaggtactccaattgtgggagctgcgaccgccccgccagagggccagtgggcaacccacagatacccctgccgcaatctccaggctcctactgcgacctcatcggccaagccacctggaagcca

SEQ ID NO: 85263 - DNA, 152 bp, Homo sapiens
  chr12:131102207-131102359
  hypo
ggctgagtgtctatgacctgacgctaagcagcccagcaccttcagtcctcgaaggtccgcagatgcaccccagttctgaattcacagaatgcacgcaaattagattattctggtagaacaggaatcactccgttgtctgggctacttagaga

SEQ ID NO: 85264 - DNA, 360 bp, Homo sapiens
  chr12:131111081-131111441
  hypo
cattaccatgactaccgccggcatcaccaccatcttctccatcacgactaccgccggcatcaccaccatctcctccatcaccacgactaccactggcatcaccacaatctcctccatcaccatgactaccagtcatcaccatctcttccatcacaactactgcttcatcacacctcctccatcaccacaactaccgccggcatcatcaccatctcctctgttgccacgactacctaccaccaaaatcatcaccatctcctccatcaacacgactaccaccagcatcaccaccatctcctccatcaccatgactatcagtcatcaccatcatcttctccatcaccacgactactgccggca

SEQ ID NO: 85265 - DNA, 30 bp, Homo sapiens
  chr12:131125184-131125214
  hypo
acgagggagacaccacggccggcccagagg

SEQ ID NO: 85266 - DNA, 129 bp, Homo sapiens
  chr12:131125841-131125970
  hypo
tgactgccggacactcggcccggcatcacgggctggatttaggatggtgactgccggacactcggcccggcttcacgggctggatttaggatggtgactgccggacactcggcccggcatcacgggctg

SEQ ID NO: 85267 - DNA, 51 bp, Homo sapiens
  chr12:131129059-131129110
  hypo
agattaaaagtatccttacttcgaggagccgtatcatcaagtgcaaattaa

SEQ ID NO: 85268 - DNA, 460 bp, Homo sapiens
  chr12:131133584-131134044
  hypo
tgacctcctgactcagaggcacgggagcagatctcccggcttttcctgcccttcgtggcggccgataggctcagtcggaggtgggtatggaggtgggtacggaggtggcaggaggaagctatggacaagagagcaaccggagggacagaaccgtgccaagcgcgtgtgtgactgcaaagccagcctctaggccaagtaaggcgctggaatgtggggcttgctgcgacgtacgtttctctcctcctcagcggagagatgagtgctcccggccggaggccgctccgctccatgcagtgacttagagacccaggcccctccctccgtggccgcccaacccctggggcctcatggcctccgcatccagccagtggggtactgggaagggcggcgccttcccccgactcagggctccactctcccattggccagaacaagccacgtggccacccagacccaaggg

SEQ ID NO: 85269 - DNA, 18 bp, Homo sapiens
  chr12:131148891-131148909
  hypo
acacatgcacacacatat

SEQ ID NO: 85270 - DNA, 78 bp, Homo sapiens
  chr12:131149028-131149106
  hypo
tcacacactccccatcctggctctgtcgactacaggacctggaggtcatgacacctcggctgtcatgagcactcctca

SEQ ID NO: 85271 - DNA, 569 bp, Homo sapiens; identical to SEQ ID NO: 26777
  chr12:131159258-131159827
  hypo

SEQ ID NO: 85272 - DNA, 288 bp, Homo sapiens
  chr12:131164353-131164641
  hypo
aatgtccctgtgttcacccaccgcgggaaggacctgtgactgtgaccacgcagagagtgtgttcgcccgccacgggaaggatccgtgagtgtgatcatgcaggcagtgtgttcacccaccgcgggaaggacccgtgagtgtgatcacgcagggagtgtgttcgcccgccgtgggaaggatccctgagtgtgatcatgcaggcagtgtgttcacccaccgtgggaaggatccctgagtgtgatcacgcaggcagtgtgttcacccaccgtgggaaggaccagcaagtga

SEQ ID NO: 85273 - DNA, 31 bp, Homo sapiens
  chr12:131173698-131173729
  hypo
ctcccgtgtcctgggccgggcacagtggctc

SEQ ID NO: 85274 - DNA, 133 bp, Homo sapiens
  chr12:131174312-131174445
  hypo
ctgtgttcattttctatgcatcgtaccaaatgatcacagatggcggcttaaacagccccatgtgttagctcatagctctgtgggtcaggcgtctgggcaggctcagccaggcgctctgctcacagtcttgtga

SEQ ID NO: 85275 - DNA, 223 bp, Homo sapiens
  chr12:131189178-131189401
  hypo
caaattaattagatggcactccgcattttctaacccactttccaaaggtgttccctccgtggactcataacccctcgccctgccaccaccgcctccacaggtctgtttcccaaagcgtagactgccagccagagagcacctgcaagacgggccgaggctccggggctccaccaccagggtcaccggttcaggtcctggcatcgctgctctctagctatgtgat

SEQ ID NO: 85276 - DNA, 216 bp, Homo sapiens
  chr12:131193260-131193476
  hypo
ttgaaaatactgttatacctgcgccccagctcactgcaccttctctaagaggctcgcgtgggccctggacacaggcgtgtttcagagctccctgggactgcatctgacccagaaccggctccgccccagcttctctgggatctcacaggtcctgcagcgctgtagtcccaacccagcttcgcggtcaggcagcccgggtttgaaactgggcccatc

SEQ ID NO: 85277 - DNA, 242 bp, Homo sapiens
  chr12:131268452-131268694
  hypo
ggacatcaacgcctacgtaccagagacaggtttcacaggttgagcctgggcaagttaccaacgaagaaaggaattaaaaatgaacaatcaaaaacgcagcaacaacaatcatcttcgcggatccaattccaaaattactacattactaaaaacatccagctttaaacaaatgatacatgcaaagaaacatgaaagtggaactcatccatgaaagcataaaaaagcagcgaatagaaactctc

SEQ ID NO: 85278 - DNA, 1513 bp, Homo sapiens
  chr12:131271935-131273448
  hypo
cctaagagacccagctgcccacgccacacagggggaaaggaagcagctggagagtccgctgcccacaccaccccgggctccacggcctcacccccaggccgtcacagagctccagtctcccgccacttcagtgcaaccctcgctgtctgcccactcctccggacatgacgcttaggaccttaccttgctctccagctcagagcccggcccccatggccgggccagacctgccccggcctctcccctccgcctgagccacgccccggcttcctgctcaccaggcctgcgttagcatctgcagctgtgcttcttcaggccgccgcaacaccagccttcccgcactgctccaagacactgagcctggtgcatgctcaggaaattcaacaatttcaaaacattgtcactctccccgcctgacgaccagccttgtactctactcacagggcaacctgctttagcaaactcaacgacacattaaaaagtacaatttgcaaaggagagctaccacctggctgggtgttctgcgcctagagactgggccccgggagagcgctccacagtgaacttgcgaaggatggaatttacataaagaaggcaccgtctttagtcctggaaaggcaccctgggattctctacctccgtccgtctttttcacaggcagggaactgaggtcccaggaggcccaggtcaccccacccaaggaggcagggcctcccctgcactctctggaacctctccctgccaagaagccagaggccctgttttctcaggcttaggaatctgcactctcttgttcaaagactgtgagtcagaagaggagggccaagtgccgccttgaatttctcttactgctcaaatggaaaacaatgaaacagggctgtccacatcacagcctgccacctgccagtcatttagagcctggcgcgcatttccatagctcctctgacgccaggacaatcagacccgtctccggagggctcctgcctctggatgtctaaatgttcttgccttaaacccggtgtgacgctccacccctcccacaccgcacacatacgaattttaacaaaatcttcaaagcagaacttaacaaaaggttgcgtggtaccaggtccatttggttccatgtgaaaccaactaggaagatccgcattaggctcttcctcagctgcgccgagggcctggtttctattcatttgagaagctgtgtgcgcccctgtatggtctgttctttcctttagggctcgcttttaacagtgagtgttgttgtggcaactaaaataaggagccggccagtgctcctagggaggaaaacctcggcaactccgcaggtgcaggcaccggccacagacccacgcctggggcactcgcgtttgcattagcagagcgcaggagtcagggagcgcgggcaggggcgggaggaggggtctgcgcactggccacggtgtgggggacccagccctaccccttcccggggctgagtgggactcgccacgaggccagcagtttttccagg

SEQ ID NO: 85279 - DNA, 30 bp, Homo sapiens
  chr12:131288961-131288991
  hypo
gaagacgatgcctccggcacaggcaacctc

SEQ ID NO: 85280 - DNA, 31 bp, Homo sapiens; identical to SEQ ID NO: 26780
  chr12:131291827-131291858
  hypo

SEQ ID NO: 85281 - DNA, 41 bp, Homo sapiens; identical to SEQ ID NO: 26781
  chr12:131294421-131294462
  hypo

SEQ ID NO: 85282 - DNA, 30 bp, Homo sapiens; identical to SEQ ID NO: 26782
  chr12:131366696-131366726
  hypo

SEQ ID NO: 85283 - DNA, 30 bp, Homo sapiens; identical to SEQ ID NO: 26783
  chr12:131389263-131389293
  hypo

SEQ ID NO: 85284 - DNA, 226 bp, Homo sapiens
  chr12:131402640-131402866
  hypo
tcaggggaaagtggggactgacggctccccttttcacgataagggtggcgtgtttccatttgacgaacggacccccttactaagtacctgttagcgcaggtgacacccacctgctccgcgagctcagtagacacccatctccacgaggggggcagcagagcagaacgctgaggctcggagtctgaaccttgagaaagatttcgtcgtggaattctagaattgatag

SEQ ID NO: 85285 - DNA, 30 bp, Homo sapiens
  chr12:131418750-131418780
  hypo
tgctgccctccaccccgggaactgaggatc

SEQ ID NO: 85286 - DNA, 222 bp, Homo sapiens
  chr12:131443344-131443566
  hypo
gtgctaaacagctatgaaaagcggccagtttgtctgcacgttgggcctttcaatgattttacatcatccttgcgagagccctgcggtggtgtcacgccctcgcaccgcgggtggagaagcgtgtctttcagacagaccaagcgatttgctcaaggtcacagggctcagaggacacaatattaagcccaagaagctcacagcgtgaggggaattaggggagac

SEQ ID NO: 85287 - DNA, 223 bp, Homo sapiens
  chr12:131478125-131478348
  hypo
tgaccccagctccaccactcccggctctgtgtccgtgggaaggttatttaacctcagcacacctgcttcccactgtgacatggggacagtgagatcgcccatgtgtctcaggtacttctggctgtgagaaacagggccctctgcttagcggacttagacttcaggccatgtactcgcttcaggcaacaagaggcccagaggcgggaatcctaggagtcactaa

SEQ ID NO: 85288 - DNA, 523 bp, Homo sapiens
  chr12:131478660-131479183
  hypo
caaggctgcccagtgtgggagcgcttccgggctccgaagggaaggacccgcggggtgttgggtggaaagagcgggtatagacaagctggaaggtccttatgcatgtatgcacaggaccgggcgtgaggccccgagacagggcttggtatgcagtaagtgctttattaatacgaacactcttgtttttgttgagatgggctacaaggggtgactgtggcaggcggtgccttctatgcagttagcacttagtaaacactcacactccgggcactagtgccctgcctgtagctaaggtatgcagtcggggcttcatgcccacttggcactggcaccctcccctctagccgtggtacacagtcggcgctcaataaacacccactctgggcacgggcgccctcccgtctgactagccatgggtaccctgcagcatcctcaggaatgtgcagcagacacttagcaggctccctctgtgtttccgggtgtctagggaaggagggagtccgagtgaggataaattaattag

SEQ ID NO: 85289 - DNA, 109 bp, Homo sapiens
  chr12:131499287-131499396
  hypo
gctcaggcaaaaccatttttacgcttcaggcattgcgtgataagctcttggtcctgatgcttcataaccgctctcctctccacatgtcgtttgtttttgccagtgagta

SEQ ID NO: 85290 - DNA, 84 bp, Homo sapiens
  chr12:131501102-131501186
  hypo
gagggtagggcagtgctgccccgcggcgtgtcaagcctgtagtcaagagtctgtagctgggcgcagtggctcagcctgtaatcc

SEQ ID NO: 85291 - DNA, 74 bp, Homo sapiens
  chr12:131513784-131513858
  hypo
tattgactattatagtcagtgcggatgaacacttgaacctgcagtgcgaatccgttcccctgaccccagcctct

SEQ ID NO: 85292 - DNA, 217 bp, Homo sapiens
  chr12:131515097-131515314
  hypo
agacagaagcttgctggacatcgtccctcccctgaggccaaggccggacgaggggtctcttcagctgcacatcggggcaggtgaggggtgtcagccacgtcccggggaatagtagcctgcccacctcagcagaatggcgaactcgctttcccgtggcctttggcatctgtagcgtggatgccatggagtgtggcgcgtgacacctcaatgtggcaca

SEQ ID NO: 85293 - DNA, 96 bp, Homo sapiens
  chr12:131518463-131518559
  hypo
ccaccctctgccagtcctccccgggggatgccggctccacctgcagctcacgtccgatttccaccggtacccatcgtcaccatcaccagccttgcc

SEQ ID NO: 85294 - DNA, 30 bp, Homo sapiens
  chr12:131556199-131556229
  hypo
tgtgcacgcactggcgggtcctatgtgtcc

SEQ ID NO: 85295 - DNA, 938 bp, Homo sapiens; identical to SEQ ID NO: 26784
  chr12:131572480-131573418
  hypo

SEQ ID NO: 85296 - DNA, 331 bp, Homo sapiens
  chr12:131581011-131581342
  hypo
ggtacacagagccacatctcccgtgttaaccactgcatagctctcccgcgggtggacactgaagtcatggtggtctttggccgcagcaaataaccagcatcctatgcacacatcccgcctccatctgtgaggatgggttcccgtggggcactgctggtccaggtttacatcccgcctccatctgtgaggatgggttcccgtggggcactgccggtccagttttatatcccgcctccatctgtgaggatgggttcccgtggggcactgccagtccaggtttacatcgccacaactgtttaaagcagccatcgtctggggcacagtggggact

SEQ ID NO: 85297 - DNA, 245 bp, Homo sapiens
  chr12:131623318-131623563
  hypo
tcatgggctgctctagccccacggctacagctgcgccgggtgtgtggcacgctccatgagtcaccgtggaatgaacgcagcgtggacagatgcatgggggtgaaagcgtgggtgccgggcagatgggtgagcagaggagggagtgagcgctcagcacagcacgcctgcagtgcccttaaggggagtcagcgtggagaaccgtgcggctggagacgccacagtgcgcacatcctcatctcccccag

SEQ ID NO: 85298 - DNA, 30 bp, Homo sapiens
  chr12:131649180-131649210
  hypo
ctgggaactggggacgaggagacggggacg

SEQ ID NO: 85299 - DNA, 31 bp, Homo sapiens; identical to SEQ ID NO: 26786
  chr12:131693247-131693278
  hypo

SEQ ID NO: 85300 - DNA, 126 bp, Homo sapiens
  chr12:131766979-131767105
  hypo
tgctaagatccctgctggccacgcagtgagctcagtgtcgttgtcaccatcctcgacgtcagccccacaaggagggtgctgcccgacatcccagcctcccgctgcggaagagagaggtttggtaaa

SEQ ID NO: 85301 - DNA, 351 bp, Homo sapiens
  chr12:131836987-131837338
  hypo
atgggttggaggagaagccagcggaggtgccgggatggcctggccgggcctgctggaaccagaggcaggccgattccaggaccagtgttctttccttggaaaacacggagtgagcttcctgacgtcgctgaccacttccatgagaatggaagaaggaggatgcaccccggaggggcagaatttcttgtcctggaatgccggcagtcagcccctcactcccgtcttcccgcagaggaggctctttgccttctcaggctcttcaggaaacagattccactcgtcaccgataaaccagctccaggtttcgttgtccttgctgccaggctgcccggctgtgtctggccttacctg

SEQ ID NO: 85302 - DNA, 152 bp, Homo sapiens
  chr12:131872312-131872464
  hypo
ataggccagcttagtccttagcgggaagacccctcgtgacccgtgacgccgtgggctgggggaccacgggagtcttagcgctgtgtcctccccggtgccgccacggtgcagtgctcgttttctcaggctgcgtggcccaggccccaggatgg

SEQ ID NO: 85303 - DNA, 403 bp, Homo sapiens
  chr12:131943498-131943901
  hypo
ctgacaattaggcttcaatggcgttcacgttgacgggtgctggatcgcccggcttggggcgtctcacgtggcttcagccctgccctccctgcggatctggctctggtacccaccgcgctgaaggagggagcgtgggaacacgtgagcctctctgcacagggaggtcccaggactgacaccgacacggaatctcctcaccttccacgggtccctcgggtccccaaatccaaactcacgccgggaagtacctcaacgcacttccgccctggcccaggctggacaaagcccaggtgctgctgagctggaaactcgctcttcaatgaggttcatctttttccgcgccaatgacatctttatgggggaggcattcagttatgcgcccgaggctcagcacctcatgtgc

SEQ ID NO: 85304 - DNA, 30 bp, Homo sapiens
  chr12:131979051-131979081
  hypo
ccggagggccctgtcggaaacagcttgagg

SEQ ID NO: 85305 - DNA, 110 bp, Homo sapiens
  chr12:132014575-132014685
  hypo
gactaggacttgcacagggagcgctgggaaagagcctccctctctatccgggaacctcagagctgcaagtgggcaccactcgctttcacgtgtccatgctgggagagacc

SEQ ID NO: 85306 - DNA, 30 bp, Homo sapiens
  chr12:132045350-132045380
  hypo
gactcagcaccaggcggtattcgcgggggc

SEQ ID NO: 85307 - DNA, 205 bp, Homo sapiens
  chr12:132060403-132060608
  hypo
gcaaagaggaattctaacacacggcttccccgtgccacctgccacctgccctgggctcagcgcacacaggcccccctgttgctgtgaagacgctgatctaagaggacaggggaagaccaaggactccacgctgctgggtcattttaacccctccacacaggcctggtgaccgtccccgtgtctcaacagtcggagcaaaatgcac

SEQ ID NO: 85308 - DNA, 30 bp, Homo sapiens
  chr12:132069080-132069110
  hypo
gcaccgttagagaagcgacaccgttttcag

SEQ ID NO: 85309 - DNA, 30 bp, Homo sapiens
  chr12:132069343-132069373
  hypo
aataataaaattggtcgcacggtctgctca

SEQ ID NO: 85310 - DNA, 30 bp, Homo sapiens
  chr12:132069599-132069629
  hypo
tcagccctctcttcgcgtctgatcagccct

SEQ ID NO: 85311 - DNA, 387 bp, Homo sapiens
  chr12:132076258-132076645
  hypo
gccacagaggggtcacgcagcccagtcaccagggccatgcggctccacggcttctacgcttgggcactgaggaccgaggggttcaatcaggtcccagctccagtccaaccttggaagccaagtgttgggaagggagcatccgaggacagacagagccagggcccctgagtcactgcaggaggacgcccccgctgggactcggcgtccgctgcgctgagccgctaaggagccggtctacttgctcccgcagcagcccgggggccggagctgccgacaccagggagacgcgttttctgcactgactcctacgctcccgcgtggacatccccagcatgatttctgtctccacccacttcgcacacaccccgccccggccagacaccccca

SEQ ID NO: 85312 - DNA, 30 bp, Homo sapiens; identical to SEQ ID NO: 26789
  chr12:132084638-132084668
  hypo

SEQ ID NO: 85313 - DNA, 152 bp, Homo sapiens
  chr12:132101820-132101972
  hypo
gcctctggctgatgtcctgctcgtccacctgcgtacccggctccttccatggaaagctcccgaatgcacggcctggagtgggctttctcctgaccagcgagccacttccttcgtcggacagagcaccatgcggagtggagattagagtggag

SEQ ID NO: 85314 - DNA, 31 bp, Homo sapiens; identical to SEQ ID NO: 26790
  chr12:132105679-132105710
  hypo

SEQ ID NO: 85315 - DNA, 77 bp, Homo sapiens
  chr12:132158657-132158734
  hypo
tgcccagtttgctgataaacacgtggggctccagtgtccacttctgtctgacctgcgccaatgcctgtgacatcctc

SEQ ID NO: 85316 - DNA, 266 bp, Homo sapiens; identical to SEQ ID NO: 26791
  chr12:132169224-132169490
  hypo

SEQ ID NO: 85317 - DNA, 65 bp, Homo sapiens; identical to SEQ ID NO: 26792
  chr12:132205018-132205083
  hypo

SEQ ID NO: 85318 - DNA, 36 bp, Homo sapiens
  chr12:132218720-132218756
  hypo
atcgctggctcctgccgccctcgaggacttgaaggc

SEQ ID NO: 85319 - DNA, 376 bp, Homo sapiens
  chr12:132218967-132219343
  hypo
ctaggaggtcagagaggcagccgcccaccccacgcactccctgcttgtaagccggggccgcattgttgtgttaccacacttctgttttagagcctgttacggttttgagttacacagacatgtgtgggcttgtgcatgtttgaatgccctgtggacccggagctctgtgaggcaaaggctgggactgtcttactagccagcgtgctccttgcacctcgatccaaggggccacggggctcccaggaacattcaccgagtaacttcagaaaagtgaagagcagaagttccaaaagcacctggtgcttcctgggagaagtcacctgcacaggtaccttggatccaactgacaggtgagatgaacgagctctccctgcgt

SEQ ID NO: 85320 - DNA, 119 bp, Homo sapiens; identical to SEQ ID NO: 26795
  chr12:132221104-132221223
  hypo

SEQ ID NO: 85321 - DNA, 678 bp, Homo sapiens; identical to SEQ ID NO: 26796
  chr12:132221596-132222274
  hypo

SEQ ID NO: 85322 - DNA, 31 bp, Homo sapiens; identical to SEQ ID NO: 26797
  chr12:132224662-132224693
  hypo

SEQ ID NO: 85323 - DNA, 30 bp, Homo sapiens
  chr12:132238985-132239015
  hypo
tatgtcgccaggaacggcctgaagttcgag

SEQ ID NO: 85324 - DNA, 43 bp, Homo sapiens
  chr12:132240155-132240198
  hypo
tctggcatactccatctttcacgtcccccttagctctggaacc

SEQ ID NO: 85325 - DNA, 231 bp, Homo sapiens
  chr12:132241085-132241316
  hypo
tggcgcgcctgaagacgcagccgaggtgggagcacgggcaggctcaggcgggaagaaggaggcatcgtccagtaagaccgtcccggacgggaagctggtgaaaggtatgctgccacttgcatgttggccttgcacattccaccataagttggcaagcgtaggatcctcggtgacctcagactcagcgccctcacctgcaggctggggtggggttggcggccccctggaggt

SEQ ID NO: 85326 - DNA, 243 bp, Homo sapiens
  chr12:132241763-132242006
  hypo
tctgtggagtagaggcgttcagctggtgttgcgagaggaacgggaagctctgaggcaggggtgcagccctaggcaggagccccgtggtgcgagctgcccggccccgtgttgagatgcggtaggtggtcagcagtgacttcgggggtggctggtgaaggagccttggccagcttgccccggtgcaccctgtcggggaggggccagcacatctgacaggctttaggtcagcggaataactttatc

SEQ ID NO: 85327 - DNA, 30 bp, Homo sapiens
  chr12:132242311-132242341
  hypo
tttgggcctctcattcgagtaggttacctg

SEQ ID NO: 85328 - DNA, 103 bp, Homo sapiens
  chr12:132243978-132244081
  hypo
agcttggcaatctgtagaccacgatcacttacaagtatagatgttaaaatattaaactgaattcagctatgtatgaaaatagtaggccgggcgcggtggctca

SEQ ID NO: 85329 - DNA, 330 bp, Homo sapiens
  chr12:132247419-132247749
  hypo
aggcgtaagccactgcacccggccaattttttttttcttatggaaaatctcaaacatgtacgaaaacagaatatcacataatgaccactcacgccccacacacgtgctcatcatctggcttcagctgccggccctgctgctttttattttgatgttataaaatactgctgtcccggtatcagtatctttgtgtgtgccctgtcccctgaggcagttgttgatgaaaagtggttatatttcagagggtctgggctatcacatgcttaactgtctacttcacatcacacgcgggtttggagccataaaatgctaaagcggaaggacctccgc

SEQ ID NO: 85330 - DNA, 323 bp, Homo sapiens
  chr12:132249366-132249689
  hypo
aacatgtctgaggttttgaaacgttctcttttagaggaatgagctctgctcttcactgagcctcaaatgcagtgccgctggcagtttgttttcgaagaaactgagttggccgtcttagctctaatgcgccacagtggaatgcattaatggcagctcactttgcacttggctggcagccccagggtaaaaggctcagcctgtcttcccagctcaggaaccaaactaggagatgccctcttgtgaggctgcctacccacagaaccattgggcccttgaaggtggtgtgtccccagctggttttccggctgcggctcatcttcatg

SEQ ID NO: 85331 - DNA, 242 bp, Homo sapiens
  chr12:132250661-132250903
  hypo
gcaaagcaaaagctggaagatcgcctcgcagctgctgcccgggaaaagctggcccaggcgtctaaggagtcaaaagagaaacagcttcaagcagaacgtaaaaggaaagcggcgttatttttacagaccctcaaaaatcctctgccggaagcagaagctgggaaaattgaggagagtcctttcagtgtcgaggtatagtaaaatcccacattggtatctgcggggctgtgtgatacatagag

SEQ ID NO: 85332 - DNA, 582 bp, Homo sapiens; identical to SEQ ID NO: 26800
  chr12:132259527-132260109
  hypo

SEQ ID NO: 85333 - DNA, 23 bp, Homo sapiens
  chr12:132260619-132260642
  hypo
ccggcaacagagcaagactctgc

SEQ ID NO: 85334 - DNA, 30 bp, Homo sapiens; identical to SEQ ID NO: 26801
  chr12:132263618-132263648
  hypo

SEQ ID NO: 85335 - DNA, 316 bp, Homo sapiens
  chr12:132270202-132270518
  hypo
cagggtccttggccgcgtgtggattatgtcaccacaggagagggacgagtcctttccaggcacatgaggaggaggaatcagtgttaatgggtggctttgcatctgtgaaatcgcataaacttaagttagctgaagctgtcgtgagactggcatttccaaattggattgaaggtttcaggcttcatgccagcgcaccacagcctgttcctgagtatctgtgctgagaggctgtaagattagtgtgaacaggagaaatttccaggtaggcctctagcttcattaccgttgggtttcttactgccggtattcagacagg

SEQ ID NO: 85336 - DNA, 30 bp, Homo sapiens
  chr12:132276662-132276692
  hypo
actgtgtgtgtgcacgtgtgtgttcacgga

SEQ ID NO: 85337 - DNA, 30 bp, Homo sapiens; identical to SEQ ID NO: 26803
  chr12:132282352-132282382
  hypo

SEQ ID NO: 85338 - DNA, 289 bp, Homo sapiens
  chr12:132284410-132284699
  hypo
tgggcccccagccctccgacagcagccactggactccccttccccgtctccacgcctcctgcggtcaccgcacaccccttcttcccaggccgtcagctccccgtgggcatgtgtccctgccggcacccatgctgcaactgccggacaggccctccctgcggcagtggtgcacagcaggggagcagcccagccccgcctcaccatgctgagcaccgcatgttgccttgagcgccggctgcttgctcctggcgcctttcctgacgtgcagatgcccgggactccactgcag

SEQ ID NO: 85339 - DNA, 479 bp, Homo sapiens
  chr12:132285799-132286278
  hypo
ttacatggaaaagtttttgtacgtatgtagtctttttttttttttttttttttttgccaaaagcctcgagcacctgatactcccagttggtctcccatccaagtactaaccaggcccaaccctgcttagcctccgcaatcagatgcaaccgggcccgttcaggcatggctgttcgtgtttgccgtggcccgtgtttgccgtggctgttcatgtttgccgtggctcgtgtttgccgtggctcgtgtttgccgtggctcgtgtttgccgtggctcgtgtttgccatggcccgtgtttgccgtggcccgtgtttgctgtggctgttcgtgtttgccgtggcccgtgtttgccgtggctcgtgtttgctgtggcctgtgtttgccgtggctgttcatgtttgctgtggctcatgtttgccgtggctcgtctttgccgtggcccgtgtttgccgtggctgttcgtgcttgccatggcttctggg

SEQ ID NO: 85340 - DNA, 27 bp, Homo sapiens
  chr12:132295800-132295827
  hypo
gccagctcttgaaaaattgtgcggccg

SEQ ID NO: 85341 - DNA, 324 bp, Homo sapiens; identical to SEQ ID NO: 50331
  chr12:132312445-132312769
  hypo

SEQ ID NO: 85342 - DNA, 562 bp, Homo sapiens
  chr12:132324903-132325465
  hypo
gggctctcatttccctccctccgtcatctatcccagtgaactactggaaccgccgtgagtgcatcggatgactcctggcgtggggaggaaggcggaagatgggggagaccctcataggggcacccccgggctgaggaggggcgttcagggaacctcggcctggggcacgtggcctgttctccgtgactcactctgggctgacccctgcctgcagggtccggacgttcccacgggactcaccactggggcacgacacggtgcgtgcactcatgtactacgccctcaaggtctggagcgacattgcgcccctgaacttccacgaggtggcgggcagcgccgccgacatccagatcgacttctccaaggccgaccataacgacggctaccccttcgacggccccggcggcaccgtggcccacgccttcttccccggccaccaccacaccgccggggacacccactttgacgatgacgaggcctggaccttccgctcctcgggtgcgtctggggcagccctcagggcagagtcaggagccccagcggcctgtgaggctgaggagca

SEQ ID NO: 85343 - DNA, 31 bp, Homo sapiens
  chr12:132326327-132326358
  hypo
gcgtctggcagctgtacggtgagtgtctccc

SEQ ID NO: 85344 - DNA, 31 bp, Homo sapiens
  chr12:132326974-132327005
  hypo
tctgacatccatgcatcgtttccactgtagt

SEQ ID NO: 85345 - DNA, 248 bp, Homo sapiens
  chr12:132328363-132328611
  hypo
gactcccacctcgacgtcagctctgggggcagcagtctcgctgatcgcagctgcgcccccacagagcctgtctgctgagtggcctcggtttcatccctgggattcagaagggctggtgggatgtggggggaggcgggcgtcgggggtttgaggccgtcctcctccttgtctcccgcaggtgtgcgggagtctgtgtctcccacggcgcagcccgaggagcctcccctgctgccggagcccccagacaa

SEQ ID NO: 85346 - DNA, 30 bp, Homo sapiens; identical to SEQ ID NO: 26807
  chr12:132329600-132329630
  hypo

SEQ ID NO: 85347 - DNA, 148 bp, Homo sapiens; identical to SEQ ID NO: 26808
  chr12:132329847-132329995
  hypo

SEQ ID NO: 85348 - DNA, 21 bp, Homo sapiens
  chr12:132333428-132333449
  hypo
gtctctccaagaccctgcttt

SEQ ID NO: 85349 - DNA, 200 bp, Homo sapiens
  chr12:132333508-132333708
  hypo
ttgacgttttggggagcctatgttctgtctcccgcagcggctgcacaatttcatactccctccccggcagcgcccggctctgccgtccccatatcctcccgacacaggtgactttccacgttcttgacagtgggggcgagggggcgtctcattgtggttttgagggcgtttctagtgacgttgaccatcttcaagtgctc

SEQ ID NO: 85350 - DNA, 30 bp, Homo sapiens
  chr12:132334500-132334530
  hypo
ctacgatgaccacacgaggcacatggaccc

SEQ ID NO: 85351 - DNA, 53 bp, Homo sapiens
  chr12:132349821-132349874
  hypo
aaggagatgatgcagtgtcagcggggagtctcgcagctgacacagggtgagtc

SEQ ID NO: 85352 - DNA, 320 bp, Homo sapiens
  chr12:132377953-132378273
  hypo
tagcgcgcaacgtgtacggtgaacagcactaacttttccccggtcctctctcccagagcaatcgctgttggctgtgtcttctgtgagtgagcccccgggctcttttggctgccggcggtgtgactttggacacattctccaacttttctccgccttgatttcctcatctgtaaaacagggacataacagcaagtgcctcgtggaatcattgaatggatgcactaatcgctggaaagtgcgctgcttggcctaagtgatgagttagctgtcattatagttaggaacgaccatgtacacattacaggcgtttcacacacaca

SEQ ID NO: 85353 - DNA, 38 bp, Homo sapiens; identical to SEQ ID NO: 9175
  chr12:132380827-132380865
  hypo

SEQ ID NO: 85354 - DNA, 30 bp, Homo sapiens; identical to SEQ ID NO: 26810
  chr12:132390059-132390089
  hypo

SEQ ID NO: 85355 - DNA, 30 bp, Homo sapiens
  chr12:132392621-132392651
  hypo
tgggcctgagcacccgggagccggcaggac

SEQ ID NO: 85356 - DNA, 35 bp, Homo sapiens
  chr12:132397844-132397879
  hypo
actgtggccttggaagtggcccgtgttatttacaa

SEQ ID NO: 85357 - DNA, 131 bp, Homo sapiens
  chr12:132400434-132400565
  hypo
ggctcctctgcacccgagcactctccccgcacttccgggctgggctgccgcctgcacagcgcccccaacctgtctgacttgcacgtcgtccgccccaagctgcccaaaccccccacggaccccctgggagc

SEQ ID NO: 85358 - DNA, 30 bp, Homo sapiens; identical to SEQ ID NO: 26812
  chr12:132401010-132401040
  hypo

SEQ ID NO: 85359 - DNA, 30 bp, Homo sapiens
  chr12:132401591-132401621
  hypo
aagcccatggagatcggtgtgtgggtgggt

SEQ ID NO: 85360 - DNA, 30 bp, Homo sapiens
  chr12:132403882-132403912
  hypo
gagagtgtggtggccgaccagatcagcctg

SEQ ID NO: 85361 - DNA, 30 bp, Homo sapiens; identical to SEQ ID NO: 26813
  chr12:132404841-132404871
  hypo

SEQ ID NO: 85362 - DNA, 248 bp, Homo sapiens
  chr12:132406593-132406841
  hypo
gttctttgttcaagcgttcctctggggaccggcagcagaggcaccgtgttctctcagccctggatacgtcttgtaatctttcacactttattcctaaaacgtgtcttatttttatgcagctcattttttctttaaaggagaaaacttgtaggtgtttaagaattggttttgggagggcgaggactgggccaggttagaggcagatggcacaggggcgtgtggcgggcgggtgaggctgctttgcacac

SEQ ID NO: 85363 - DNA, 121 bp, Homo sapiens
  chr12:132411601-132411722
  hypo
aaagagagggagagggagaccgtggggagagcgagagcgagagggggagggggagggagagcgagagcgagagcgagagcgagagggagagggagagagatttttgtatttttagagacgg

SEQ ID NO: 85364 - DNA, 30 bp, Homo sapiens; identical to SEQ ID NO: 26815
  chr12:132412423-132412453
  hypo

SEQ ID NO: 85365 - DNA, 499 bp, Homo sapiens
  chr12:132423549-132424048
  hypo
tactgggattacaggcgtgagccactatgcccggccctccagatgcatttttaacagctgaattcatgtgtgaaatgacgtaaggtccgcgtagtccttctttctcagagaccagcgtgcgaggcccaagggacccaccttccgtcacccgttctgctttgtttacagggtgtgtccgcagccggccaggtggtatccctgaaggtgtggctgattgacgacattctagaaaagatcaacagccaccttccctctcacattcggattctgggtaagccttgcagtgcaggcggccacacacctggttgtagatggtcttgcagagacacgaggctatgcatgctcctgccttttccaactgtctctgatgcagaagcgtagtcagagttgctttgcagctggttctgaccttcagaaacgggagccactagacaggagtagaaagctgttcatttgcagtgcttgttgctacacgggcgccttgttttaagcaaacaca

SEQ ID NO: 85366 - DNA, 31 bp, Homo sapiens
  chr12:132425403-132425434
  hypo
cactgcgcccggctgcttttattattttaaa

SEQ ID NO: 85367 - DNA, 30 bp, Homo sapiens
  chr12:132426923-132426953
  hypo
atgtccccaaagcccgagtttgttctttct

SEQ ID NO: 85368 - DNA, 30 bp, Homo sapiens; identical to SEQ ID NO: 26817
  chr12:132429296-132429326
  hypo

SEQ ID NO: 85369 - DNA, 30 bp, Homo sapiens
  chr12:132429618-132429648
  hypo
gcacacaactaatgcgcatgcgcctgacgt

SEQ ID NO: 85370 - DNA, 30 bp, Homo sapiens; identical to SEQ ID NO: 26818
  chr12:132446727-132446757
  hypo

SEQ ID NO: 85371 - DNA, 30 bp, Homo sapiens
  chr12:132455522-132455552
  hypo
agggtcacttgagaccgcgtattcaagacc

SEQ ID NO: 85372 - DNA, 14 bp, Homo sapiens
  chr12:132468722-132468736
  hypo
gtgagtcaccgcac

SEQ ID NO: 85373 - DNA, 182 bp, Homo sapiens
  chr12:132474660-132474842
  hypo
cgttgtcatggggtcgtaagaatcagtctgtcggagctggtgaggccacttcccgagaccagagctcgggcaccttgcttaggaagctttcgagcaccagagtcagcaacgtgtgcactctcctgggctgttgcttgttggcctttgaatgagctgctcgtgcctccgtctgtcttgcacag

SEQ ID NO: 85374 - DNA, 51 bp, Homo sapiens; identical to SEQ ID NO: 50336
  chr12:132480345-132480396
  hypo

SEQ ID NO: 85375 - DNA, 30 bp, Homo sapiens
  chr12:132497596-132497626
  hypo
acactcagttcttccggggcctcaccgcct

SEQ ID NO: 85376 - DNA, 30 bp, Homo sapiens
  chr12:132504706-132504736
  hypo
gcccgcttcgaggacggccgcccatcgcca

SEQ ID NO: 85377 - DNA, 272 bp, Homo sapiens
  chr12:132514251-132514523
  hypo
ctttgtgattcctccggtggtggcagcacccccgtccctacgggtgccgcggccgccacccctgtacagccacagaatgaggatcttgaggcagggcctgagagagcacgctgcgccgtacttccagcagctgcggcagaccacggctccacgcctgctgcagttccctgagctgaggctggtgcagttcgactcaggtatgcggcagttgggggcgtggcccgtgcgggagctgcaccggccctggatgatgaggcgctcttgatgtgatt

SEQ ID NO: 85378 - DNA, 30 bp, Homo sapiens
  chr12:132516053-132516083
  hypo
tttaacatgagcctcgtgttgaatggaata

SEQ ID NO: 85379 - DNA, 74 bp, Homo sapiens
  chr12:132529443-132529517
  hypo
ctgccccctgtgtacgtgaggaaggagcggaagcgacacaaaacagacccctcaggtgcgcatcccgagggcgt

SEQ ID NO: 85380 - DNA, 30 bp, Homo sapiens
  chr12:132530150-132530180
  hypo
ttctaacgcacgtccgtgcatccagctcac

SEQ ID NO: 85381 - DNA, 997 bp, Homo sapiens
  chr12:132536799-132537796
  hypo
ttgtcacacagtggcggatttgggaggcttcctcgttctgtggccccctttccgcacagtagtggagtgatccttgtcagaaggagttggctcagggcccatctccgcaaacccccaggactccctactgcccacgctctgagtcgcctggccctggctttcagccccttggtgctccctgagtgtgctggcagccgcgccccagcccttcacttaactgccctcgtgagatgttttcagagcgcactgttgagaattgcagccccgccctgctgttttcctccatagcagccagtacgtcttcagacccactgcacattttacctgtttgtcgtctgatgtgagtgctgtgatcgctgggactctagcgtctgggagcacagacccatcatttgattgatgttgtcgattaaatgaagagttaattcaccctactaatatttatggaccgcgggcctgcgcggcgtggagcctgggcattctcgggggagcgagagaggcacagtcccgccctccctttacctccctggagaggaactcgagggcatcctcacagaaggaacagacagagattttcccaagtacagtgcagacacatgaggtgggctgtgcgtttgggggctgccacaagtacgctggggacgtgttcggagatacttttcctggagagtgggagagctcggcctcaaggaagaggactcagcgccaggctgaggatgaggtctaggtggctcgatctcctgcagggcacattgggcaccttgctttacgccctcatctcttgggctggagctgccccagcacctggcagcatggtgtttctagggtacgtggtacttgtctgtcttaaaacttgcctgtatgtttttaacctttgcgtctgtctttcagtggaatcaactatgacaagccgctgcctcccatccaggtggcatctctccgtgcagagcgaatcgcaaaagagaaaaaggtcagcgccctgggcccttctgcttga

SEQ ID NO: 85382 - DNA, 176 bp, Homo sapiens; identical to SEQ ID NO: 26823
  chr12:132541956-132542132
  hypo

SEQ ID NO: 85383 - DNA, 207 bp, Homo sapiens; identical to SEQ ID NO: 26824
  chr12:132546644-132546851
  hypo

SEQ ID NO: 85384 - DNA, 64 bp, Homo sapiens
  chr12:132547230-132547294
  hypo
gggcaagctgacgccggtgagcatttcccagaggaccatgaacgtgtgcgtcttgcggtcagtc

SEQ ID NO: 85385 - DNA, 194 bp, Homo sapiens
  chr12:132548918-132549112
  hypo
gttggtgctacagatttaaatcgacttgtttgtgaggataatagaattctttttgctatgaacttatcagtcagaatccgtgtttgtagttttcaccgacgaatgcacatttttaataaatgaacacctggaagatactgggcagcccatggaaggcggtctggatgctgcacggtagcaggtgtctgctttgg

SEQ ID NO: 85386 - DNA, 484 bp, Homo sapiens
  chr12:132549415-132549899
  hypo
ccaggtggcccggctcgtaagtgtcagtttctgtttgttttccaaaagcagcatctttttatgttttaacacagctgttgcgcttgctcaggtgcgtgtcacgtgttacaggagtgagtgtgagacgggttcttttccccgagaacttagtaccccttggacagaggacgggactcaccactcgtggaacattaacacagcagcagctcccagagcccatccaggcatcaccaagcttctcagggcttgaattgaggggggtggagagtgagcgaggtgagatgcagcctgcgtggcttccctgtgctgctgagggaccctgcagggaccaaggcctgtgtggctggagcagagggcgctgtgcatgtaagccgtaggcatgggcaggtggcggtctctgaagctgctctcaggtgaccgctgtaggcagggagagcatttggagatttcagaagggactagcatcaggcgcaagtgctgtctg

SEQ ID NO: 85387 - DNA, 135 bp, Homo sapiens; identical to SEQ ID NO: 26826
  chr12:132551606-132551741
  hypo

SEQ ID NO: 85388 - DNA, 101 bp, Homo sapiens
  chr12:132553983-132554084
  hypo
gggagtcttgagcgcggcatggtctctgcggccctaatttcgcagtctctccccagatcaccgcacagcagatcaccacccctggcgcgcagcagaaggtt

SEQ ID NO: 85389 - DNA, 372 bp, Homo sapiens; identical to SEQ ID NO: 26827
  chr12:132556449-132556821
  hypo

SEQ ID NO: 85390 - DNA, 43 bp, Homo sapiens
  chr12:132567461-132567504
  hypo
ctgtctccctgactttgtgctcgtctcctttgttgtaaagtat

SEQ ID NO: 85391 - DNA, 33 bp, Homo sapiens
  chr12:132567755-132567788
  hypo
caaagctggccgggcacggtggctcacacttgt

SEQ ID NO: 85392 - DNA, 39 bp, Homo sapiens; identical to SEQ ID NO: 26828
  chr12:132581293-132581332
  hypo

SEQ ID NO: 85393 - DNA, 99 bp, Homo sapiens; identical to SEQ ID NO: 26829
  chr12:132581391-132581490
  hypo

SEQ ID NO: 85394 - DNA, 30 bp, Homo sapiens
  chr12:132588308-132588338
  hypo
tgaatacttcagttcgagaaaagtgtgagg

SEQ ID NO: 85395 - DNA, 30 bp, Homo sapiens; identical to SEQ ID NO: 26830
  chr12:132588622-132588652
  hypo

SEQ ID NO: 85396 - DNA, 439 bp, Homo sapiens
  chr12:132592864-132593303
  hypo
accatggctacctgccggccacagatcgaggtttcaactggacttcaaacaaagcttcagtgcctagggccagatttgttctttccagccctgtgaggcctgaaattgcatcagcgagccaagtgtccccgtgcccctctgttagtggctgaggccgccagctgcatgggatgtgcaggcggtgatcaactttgcaaagcttaaacattattttcccttcttcctcccttccctttgaatattccctctcaggtaaaggttgtggccagaaagcacgggcagcctgggactcctgttgccatagcaacccagctaccgccgaggacttctgcggcttttccagcccagcagcagccgctccaggtactttctgatggctccacagtgcagctccccagactttcctcactcggatttgaggactcgatgtgctgaggca

SEQ ID NO: 85397 - DNA, 85 bp, Homo sapiens
  chr12:132601573-132601658
  hypo
cgctcctctctgccctcgggacaggaggtggtcagggaaggtggtcccgtgtcctcaaggcggagtccctcgcagatggtgctga

SEQ ID NO: 85398 - DNA, 30 bp, Homo sapiens
  chr12:132601919-132601949
  hypo
tgggggctgtgaggcgagttgtgcggttgc

SEQ ID NO: 85399 - DNA, 302 bp, Homo sapiens
  chr12:132603384-132603686
  hypo
ccccccacgccgcacgccgcgcagctcgctgggcagaggcagaggcagaggcagcagcagtacgacccctccacggggcctcccgtgcagaacgcctccagcttgcacacgccgggaggctgccccagccggggtccgcgctgcagcgtctttgcaggtctcccagcagcaggcgacagagccacaagcacagctctcagtccagggaaggacccagcagccaatcgcagcgccgccacctttcctgccaggccggcgctcgccaccaggcaggctgtttagcttgcgctccacctccccac

SEQ ID NO: 85400 - DNA, 30 bp, Homo sapiens
  chr12:132606754-132606784
  hypo
gcctttggtttttccgcccaaactgccttt

SEQ ID NO: 85401 - DNA, 403 bp, Homo sapiens
  chr12:132617157-132617560
  hypo
gcctcccacccctgcccggcgcagcccctgggagcaggagccgtggggagggctggactgcagtaaggacgcctcgtgggatgtgccaaaccgctgcgtggagcctgggctgacttctctggatcttggtgcaactggcgtggcccttccaggaagccgggccacctggctcagagacgccagaccctggccggcaatggggctgccaggggcggggacgctggaggagctaggggtgtgggccactgtgctgcctgccccggcctggcggcctctccgtagcagagctgaggctgggacgcaggtgggggagcctggatgcgcctccttcctcagccacgggaggatgaggtccaggagcgcagcggggcccacgggggagcgccttcgggtgcggctcgtc

SEQ ID NO: 85402 - DNA, 166 bp, Homo sapiens
  chr12:132622472-132622638
  hypo
gcctgggacactccctatagccggagccttccttcagttagcgtcaggttccgggttcatccacggggtgcctatgctggtgcctcactcctttttctctcctggtgtggatttcccacgttttattctccattcatcagctgacggacatgtggtttctagtttt

SEQ ID NO: 85403 - DNA, 101 bp, Homo sapiens; identical to SEQ ID NO: 26833
  chr12:132630792-132630893
  hypo

SEQ ID NO: 85404 - DNA, 30 bp, Homo sapiens
  chr12:132632566-132632596
  hypo
gtctgcctcccctgcgggtcaggtgacctt

SEQ ID NO: 85405 - DNA, 30 bp, Homo sapiens
  chr12:132632845-132632875
  hypo
tcagaggccaccgccgcctcttggagtcaa

SEQ ID NO: 85406 - DNA, 30 bp, Homo sapiens; identical to SEQ ID NO: 26834
  chr12:132637719-132637749
  hypo

SEQ ID NO: 85407 - DNA, 675 bp, Homo sapiens
  chr12:132643424-132644099
  hypo
attcagggtgggccatcagtccggtggccggtgtcctagtcagaggcgtgaagaggagggcggaggccggaactatccatcggctccgagggtggagcaggggcctctgggagctggaaaaggcaggaatgggtcctccctgagtctctgagggccccgcctgcccacacctgcccatatttgccccaacctgcccacacctgcctcaggacagcatctcggtctcctggctgccagactgtgatgaagatgcatggttctaggccactggcttgtggtgacttgttgcatcagctgtggggagctcacacggtagcgcctgtcttggggggtgctgggcgggtgaccttcaggagacccctggggccccgctgccctcccaatgcctccagtcccagtgtctctgtggtggcatcctgtgctgaggatggtgcctcgcggagcctccactgcccctgtgtgctccgcaccacgtctgtctcgatggcgcccctcgaagacctcgggaagctccccgttcgctgtggccccccggggtctgtcccctgcagcactgttctctgggggctcgtggtccgagttctgatactgcaggtggcaggtcccctgaaggcatagtcagaggctttgctctgggctggcatggaggtatgggcgtggcggggtgtggctggg

SEQ ID NO: 85408 - DNA, 197 bp, Homo sapiens
  chr12:132653030-132653227
  hypo
gagacggggtctaggccgggataacgggatagtccattgctgggccagggctgctgagcgtgggtggggactgccgactgcagtacagacccagacggcaggagcccggcaaagcctgcccttccgaggagcctcacgtcggaggagctgcctgggctgtgctggcgccaggcttagaagccggggccccaactccg

SEQ ID NO: 85409 - DNA, 253 bp, Homo sapiens
  chr12:132665275-132665528
  hypo
agacttgcagctccgcgtgtctccgtcacggccactgcgggaagcctcctcactgctgggagggcctgtgggtctcggggtgtacactcgttccggcccacgggtgcccctgcattctgtggggctttgggggtgtctgtgtggggtgcacgtggacaccacggccctgaaaggtctcgtgttgggcacttccaggtttgcagggagtgtgggctccagggagggcaggtgtcggccccgaggggagagctgg

SEQ ID NO: 85410 - DNA, 558 bp, Homo sapiens
  chr12:132666022-132666580
  hypo
cacagcacacacacacacactcggtacacacacccagcacgcacacatagtacacacacccagcacaactcacactcagtacacacacccagcacatgtacccacccagcacacgttcactcgcaccctgcacagcccagcgcgcacacacccagcagacagcacatgctctcacatgctggcatcagccgtcagcctcagctgctggagggtgtggtggaggcgggcggtgagcgctgggtgctggggtccacgtccttccaagcccctgcatagcggccgccttggctggcgatgactggagggggtgaggggtgaggccaccagcacaggtgtgtcccttcactgtttccacctcgtgtgcccgccacgctgtcttcctgccgctggtgaagtctgtctcccccccccccccccccgagtgatggggcgcctccgactgcccggccacggtgcctgcacctccgctcctcctctccctgcaccctccaggcctgggggccccggggctgaccttgaccttcccacccgcccaggtgtggccgggacagcaccgca

SEQ ID NO: 85411 - DNA, 30 bp, Homo sapiens; identical to SEQ ID NO: 26839
  chr12:132667045-132667075
  hypo

SEQ ID NO: 85412 - DNA, 30 bp, Homo sapiens
  chr12:132673055-132673085
  hypo
gaggacagcccaggccgcagcgacggccag

SEQ ID NO: 85413 - DNA, 30 bp, Homo sapiens
  chr12:132675205-132675235
  hypo
tggactgaggggctcggggatagcacgtgt

SEQ ID NO: 85414 - DNA, 30 bp, Homo sapiens; identical to SEQ ID NO: 26840
  chr12:132682593-132682623
  hypo

SEQ ID NO: 85415 - DNA, 30 bp, Homo sapiens; identical to SEQ ID NO: 26841
  chr12:132688094-132688124
  hypo

SEQ ID NO: 85416 - DNA, 30 bp, Homo sapiens
  chr12:132694727-132694757
  hypo
gctggcacatcacagcgagaggagagacag

SEQ ID NO: 85417 - DNA, 90 bp, Homo sapiens
  chr12:132695505-132695595
  hypo
aaccatcacacttgagaggtgcgctcagcaaatccatgagatgcaccaaaaatcgcggtgcctgccgccggcctcagtccacagaaaggg

SEQ ID NO: 85418 - DNA, 30 bp, Homo sapiens; identical to SEQ ID NO: 26842
  chr12:132975804-132975834
  hypo

SEQ ID NO: 85419 - DNA, 30 bp, Homo sapiens
  chr12:132980288-132980318
  hypo
cgccctgctcagtcccgggccccgacggac

SEQ ID NO: 85420 - DNA, 30 bp, Homo sapiens
  chr12:132980678-132980708
  hypo
gaagatgcggaaatccgccaagcagggcta

SEQ ID NO: 85421 - DNA, 31 bp, Homo sapiens; identical to SEQ ID NO: 9177
  chr12:132982486-132982517
  hypo

SEQ ID NO: 85422 - DNA, 30 bp, Homo sapiens; identical to SEQ ID NO: 26844
  chr12:132983574-132983604
  hypo

SEQ ID NO: 85423 - DNA, 30 bp, Homo sapiens
  chr12:132985778-132985808
  hypo
aggcccaagcaccgccggtttctctgccgt

SEQ ID NO: 85424 - DNA, 363 bp, Homo sapiens
  chr12:132986397-132986760
  hypo
gagagaggaggacggcgcagctccattgctccacctgcccggctcagggatggaacccagagctgccaccgtcctgtgggtgacggcagaacatctggctgccgggtggcctccgtaaccgccacacacctgcctctgctggaatcacctgaggctctggtgcctcacacggattggccaaaacagggagcggagccgggaaggccacggacatctgtgtggtgtcacgaacaaggtccggccacgtgtgtgggagacgcgggcgccgaggcaggcgccaaactaagcccggccaccaaggggacgcccacaccccacctccgtggtgacccctgaacccccggagctcaccatccacaccag

SEQ ID NO: 85425 - DNA, 30 bp, Homo sapiens; identical to SEQ ID NO: 26846
  chr12:133000013-133000043
  hypo

SEQ ID NO: 85426 - DNA, 31 bp, Homo sapiens
  chr12:133002987-133003018
  hypo
ccaacttccaagttgccgagtccagtctgac

SEQ ID NO: 85427 - DNA, 30 bp, Homo sapiens; identical to SEQ ID NO: 26847
  chr12:133009941-133009971
  hypo

SEQ ID NO: 85428 - DNA, 30 bp, Homo sapiens; identical to SEQ ID NO: 26848
  chr12:133015505-133015535
  hypo

SEQ ID NO: 85429 - DNA, 30 bp, Homo sapiens; identical to SEQ ID NO: 26849
  chr12:133016772-133016802
  hypo

SEQ ID NO: 85430 - DNA, 30 bp, Homo sapiens; identical to SEQ ID NO: 26850
  chr12:133018295-133018325
  hypo

SEQ ID NO: 85431 - DNA, 30 bp, Homo sapiens
  chr12:133018847-133018877
  hypo
cctcggtggaatcccggctgttcgcagccg

SEQ ID NO: 85432 - DNA, 30 bp, Homo sapiens; identical to SEQ ID NO: 26851
  chr12:133019839-133019869
  hypo

SEQ ID NO: 85433 - DNA, 30 bp, Homo sapiens; identical to SEQ ID NO: 26852
  chr12:133060202-133060232
  hypo

SEQ ID NO: 85434 - DNA, 30 bp, Homo sapiens; identical to SEQ ID NO: 26853
  chr12:133077296-133077326
  hypo

SEQ ID NO: 85435 - DNA, 256 bp, Homo sapiens
  chr12:133088779-133089035
  hypo
ccagtgtgacaggggtcgagacccccctctcggctcatgcctggggggcacccatccccgggatcagtgtcctggggactggtgagggagggtggttcagctcagagtcctctgcatggcctgggcacgcgtgagggagcatggttcagcccagcatcctctgcacagcctgtcaggtgcttgtgttctgctcacggaaggccggggcatggaggggccgagtcctggctgcagcgccctggctgagctccaggct

SEQ ID NO: 85436 - DNA, 222 bp, Homo sapiens
  chr12:133099877-133100099
  hypo
tcccagttctacagggtttttcgagacgtgggactttcagagctaaaaccggccacccgaggaaggggaagagaccccaccccacgaccggcctggccacctttcagggcctccgggtttgggaggagcacacgcagggcagcccaccgagcccctctgtggcatgggggtgacgcgttccatctgcgcccagccctgaccggaggtggcttttgtgtgggt

SEQ ID NO: 85437 - DNA, 1259 bp, Homo sapiens
  chr12:133100821-133102080
  hypo
actagcccaccaccctgcccccggctcccgcccagtaaggctcagactcctcggggctgcatccctgcccggccagggcctcctccagtgtgggtgcctgctactgtgcggcttgatggacctcatgggccgggggcatttgacctcaggggcctgggtgacatcccttaattcgcactggcaccgtctgccttgtgtgcaccctgtcagccacccagggaggcctgttgctgcaggaggtgcacagagcgggcctctggctgagccgaaggtcggcagggagccaggctcatggctgcagcgagccacaccagccagtcctgggacgggtttccccgggctggggcgtgctcctgacttggatgactcaaagtaaagaacctcaccaggggccctggcatgcgaggcctgggggcccagatgtgctggggcgtgtcactacaaggtgcagaattgttccagatccaagttggccagagagggagaccgctgggcttccacgtgagtctgggcgctggctgtgcaggggcgtccctgctgggcgctggccagcaggagctctggcctctcacttccctcagctttgtgcaggtttgaaattatttccaagtaaaaaaagtaaatacatgcagggctcggggtctggtccctgcatggtcacttaacctgtctgcgcctctgttttctcatccgtgaaatgtaaaggaaaatagtttctactcggggccaccgtgtgagcaaatgtgtgagtgtgtgcaaagcgcccgggccaggccctggcacgcatcggcgcccatgttggctggtgtcaggggtggtggcggtgggcgtggggcgtgggggtggggtgaagggagtatgggtgctcccttcagcaggtgatgaaactgaggcacggggaggccgagcagtggcccaagggcccatggccagggtcaggcaggtcccaccaccacctcgctgcttgctctggcatggagccgaccgaaggaggtgctgtgggcacagccaggggacagtgggtggcactgaggctcgacctggaggtcatagccctgtacagccagatggggtggtgcgaaccagccagggtgtgggtggaggccctgcctgtggtccctagcacccccaggatgccttcaaagtcagcggcttgtggaaggggcggctccaagcacgtggcggttctcgtgtcactgagccggtgggtcctgggtaggtcctccccgtcctggtagagtgtgttatcagtgtgtgcg

SEQ ID NO: 85438 - DNA, 231 bp, Homo sapiens
  chr12:133102581-133102812
  hypo
aggaagccgctggttagggtccggtttcccaccaaggctttgtcttagcaatgagcattttgccttcgttaaagcgtgattttttactcattaggactttcccattaggagagatttaaatgaagaaatggtgagtgagctggcaggagcccagaggccaaaacgttaagccttggacgctgtgcctgcactgctggcctgtgggtggagggcaggcggacggccgccgag

SEQ ID NO: 85439 - DNA, 30 bp, Homo sapiens; identical to SEQ ID NO: 26857
  chr12:133103098-133103128
  hypo

SEQ ID NO: 85440 - DNA, 431 bp, Homo sapiens; identical to SEQ ID NO: 26858
  chr12:133111678-133112109
  hypo

SEQ ID NO: 85441 - DNA, 513 bp, Homo sapiens; identical to SEQ ID NO: 26859
  chr12:133121645-133122158
  hypo

SEQ ID NO: 85442 - DNA, 30 bp, Homo sapiens; identical to SEQ ID NO: 26860
  chr12:133122900-133122930
  hypo

SEQ ID NO: 85443 - DNA, 283 bp, Homo sapiens
  chr12:133123359-133123642
  hypo
ggagccacctggagtgtgactcgtcatgcgctgggagcagcacgttctcgctgcagagtgtctgctaaagcgcatttcacaccgtactgtgagctccgtcgctgaacactcggcagccgcggctgcacatggagggtggctgtgcgtttggttccctgcattaacccagtgggctccacataggagggcgccgcccacacatccggctggcactcaccaccctccgtgcactggggggtttattcttccaccaggtcattcattcgacgtgaatgcctcataa

SEQ ID NO: 85444 - DNA, 30 bp, Homo sapiens
  chr12:133126415-133126445
  hypo
atgcggcccctgcccgggcctgggctggag

SEQ ID NO: 85445 - DNA, 215 bp, Homo sapiens; identical to SEQ ID NO: 26862
  chr12:133131956-133132171
  hypo

SEQ ID NO: 85446 - DNA, 30 bp, Homo sapiens
  chr12:133144795-133144825
  hypo
ctccggcagggccacggggtctcggctcct

SEQ ID NO: 85447 - DNA, 30 bp, Homo sapiens
  chr12:133145037-133145067
  hypo
catgggacgggccccggtaggagaggcagc

SEQ ID NO: 85448 - DNA, 30 bp, Homo sapiens
  chr12:133146995-133147025
  hypo
tacctcacacctggcgctccggtcccaggc

SEQ ID NO: 85449 - DNA, 196 bp, Homo sapiens
  chr12:133147942-133148138
  hypo
gccgagcggcctggcgcctccctgggcccgggggctctgctgcgggcggagttccatcagcaccagcacacacaccagcacacgcaccaacacacacaccagcaccaacacacattcgcccccttccccgcagggctgcccccgacgccgcccgccgcacccccgccggtgcgtaggcccgcgtgctggcaggggg

SEQ ID NO: 85450 - DNA, 266 bp, Homo sapiens
  chr12:133148427-133148693
  hypo
accatgactcagggtgcctcccgtgttccccgccccggaggcccggtctgaggagggagttgctgggggctggagtcccctccactctctcgagttttattcggaaactggccagtttgtcagtaacccggtgtgtccccagcgcgacccagcagccagggcttcacgccccaggcctcagccaggcacacagactgcctgggggggccgagttcccaccccatgcaaggggacccttagaatggcagggccgccctggtctgaga

SEQ ID NO: 85451 - DNA, 30 bp, Homo sapiens
  chr12:133149005-133149035
  hypo
ccctcgcctggcctcgcccctgctgcattg

SEQ ID NO: 85452 - DNA, 30 bp, Homo sapiens
  chr12:133149579-133149609
  hypo
cgaggaggttcttacggggccgtccacacc

SEQ ID NO: 85453 - DNA, 30 bp, Homo sapiens
  chr12:133150698-133150728
  hypo
ccgccgggctggtgcggttcacacactcct

SEQ ID NO: 85454 - DNA, 31 bp, Homo sapiens; identical to SEQ ID NO: 26865
  chr12:133153970-133154001
  hypo

SEQ ID NO: 85455 - DNA, 50 bp, Homo sapiens
  chr12:133156530-133156580
  hypo
tttggggcaggctccgtagctgtcggtgtccatccgtcacgcctgaactc

SEQ ID NO: 85456 - DNA, 31 bp, Homo sapiens; identical to SEQ ID NO: 26867
  chr12:133158012-133158043
  hypo

SEQ ID NO: 85457 - DNA, 30 bp, Homo sapiens
  chr12:133158295-133158325
  hypo
agacctctgggtcccgcggttgcccccaca

SEQ ID NO: 85458 - DNA, 451 bp, Homo sapiens
  chr12:133167896-133168347
  hypo
ggtgcagggcctcagcattcacgctgcttcctcctgggagagcccgccccgcctctcagggactctcacaaccttggtgcgcagaaggttctggaccgcaattcggggacgccctcactggctttctccggagcgtgggcattggagtggaaatacgtagaattgctggggatcctcgaagccgccggcagcgcccgatgccagcttgtcccatcaggcgttggtcccgacctgcactcagccacctgcccccggttttgtaattgagcattgaggggaagatgcctgaacccatatgaaacctctttcccctcaaacgttccctgcacgcatcaattacatcagcgcagctgggccttcccctgagcgtgatgtccaggggcgaggccagtggcttcctgcgcgtgcccgtccccactcacagcccctgacctccggggcccccacgcac

SEQ ID NO: 85459 - DNA, 137 bp, Homo sapiens
  chr12:133172480-133172617
  hypo
cgggccactgtggcccgggtgactggacgttttctgtttgtatcttgctccctggctatggcagatgctccacttgccaggtatactcagctccccacaccgcgagcacacgcaggactgtgcgtccagccctcatg

SEQ ID NO: 85460 - DNA, 30 bp, Homo sapiens; identical to SEQ ID NO: 26869
  chr12:133183673-133183703
  hypo

SEQ ID NO: 85461 - DNA, 506 bp, Homo sapiens
  chr12:133199814-133200320
  hypo
cccagcctcgggcatcggcctcaggtcaccccacggcctgcacatgctgtgtggctcacaaatatccagctcatttttggagaaactggctcttctggttgagccgctgcttgggaaccagggccagagcttcccgtttctgacccctccaccactactcaaatgcccgcagctagcctcacagtgaacccaggctgactggcgcccacggctgcaccgggcgacccctggtcctgctaggtggccttcctgggggacgagcggctgtcccctggccccatcactcctcattcctgagggttctccagattcgcttccaggaatgaagcctagtcagccagcctccctcctcccctgcttgccctaatttgatttgatctccactctggaggcctcagcactcctccatctgagcaggcatcaggtttctccaggcaggcggccccagcagcatccaggggccaaacacgtgcccagtggtacccagtccccgatctgaggcgctc

SEQ ID NO: 85462 - DNA, 31 bp, Homo sapiens; identical to SEQ ID NO: 26871
  chr12:133200832-133200863
  hypo

SEQ ID NO: 85463 - DNA, 30 bp, Homo sapiens
  chr12:133202743-133202773
  hypo
agaagttacagctgcggcagatgacctcag

SEQ ID NO: 85464 - DNA, 210 bp, Homo sapiens
  chr12:133209150-133209360
  hypo
tcccacctgggggactggcaccggggaccacccatggcacacagaggagttaggtcactggcacatggcagtggcctcaaaagacaaaagactgctcaccgggaagggctccgaccgccccctcggcctcctgggagagctggctggcccccctcctcctcacgggggtgctccctggagcactgcgcctcagcccgtccttcatgcagt

SEQ ID NO: 85465 - DNA, 152 bp, Homo sapiens
  chr12:133210034-133210186
  hypo
cactgcgcccggccaacccggaacttttcaaaagagacatagaaagttgcaagagagaactgagaaagttaaagactcaaggacaagtagacaaaaatataaaatgatcatcaacgaaggcctctgtgaccgcatccacctgtgtgtgcaca

SEQ ID NO: 85466 - DNA, 30 bp, Homo sapiens
  chr12:133210492-133210522
  hypo
aactcctcaatgacacggccaggggcagcc

SEQ ID NO: 85467 - DNA, 60 bp, Homo sapiens; identical to SEQ ID NO: 26874
  chr12:133220202-133220262
  hypo

SEQ ID NO: 85468 - DNA, 154 bp, Homo sapiens; identical to SEQ ID NO: 26875
  chr12:133222187-133222341
  hypo

SEQ ID NO: 85469 - DNA, 45 bp, Homo sapiens
  chr12:133225532-133225577
  hypo
ctcctccgctttagcgactcgctggttcacgtagaacacacgggg

SEQ ID NO: 85470 - DNA, 278 bp, Homo sapiens; identical to SEQ ID NO: 26877
  chr12:133225890-133226168
  hypo

SEQ ID NO: 85471 - DNA, 37 bp, Homo sapiens
  chr12:133226389-133226426
  hypo
gggtgaggcagctttacgaggccgaagtcctccatgt

SEQ ID NO: 85472 - DNA, 30 bp, Homo sapiens
  chr12:133250168-133250198
  hypo
gctccgtggccatccggcacatgtcctccg

SEQ ID NO: 85473 - DNA, 30 bp, Homo sapiens
  chr12:133250821-133250851
  hypo
ctcctccctacagacgcattccctggagca

SEQ ID NO: 85474 - DNA, 31 bp, Homo sapiens; identical to SEQ ID NO: 26878
  chr12:133256229-133256260
  hypo

SEQ ID NO: 85475 - DNA, 62 bp, Homo sapiens; identical to SEQ ID NO: 26879
  chr12:133277668-133277730
  hypo

SEQ ID NO: 85476 - DNA, 181 bp, Homo sapiens; identical to SEQ ID NO: 26880
  chr12:133280427-133280608
  hypo

SEQ ID NO: 85477 - DNA, 30 bp, Homo sapiens
  chr12:133281489-133281519
  hypo
acttaaaatttagtcgaggcagtttcaatt

SEQ ID NO: 85478 - DNA, 294 bp, Homo sapiens; identical to SEQ ID NO: 50344
  chr12:133286745-133287039
  hypo

SEQ ID NO: 85479 - DNA, 30 bp, Homo sapiens
  chr12:133296209-133296239
  hypo
tgcacagaaataaccggggcgggagagtgg

SEQ ID NO: 85480 - DNA, 30 bp, Homo sapiens; identical to SEQ ID NO: 26881
  chr12:133301535-133301565
  hypo

SEQ ID NO: 85481 - DNA, 30 bp, Homo sapiens
  chr12:133302144-133302174
  hypo
cacgagaatgcctccgttgggactggaatc

SEQ ID NO: 85482 - DNA, 30 bp, Homo sapiens
  chr12:133303309-133303339
  hypo
atgagacccacgggcgaaccaacaggcact

SEQ ID NO: 85483 - DNA, 31 bp, Homo sapiens; identical to SEQ ID NO: 26882
  chr12:133306572-133306603
  hypo

SEQ ID NO: 85484 - DNA, 30 bp, Homo sapiens
  chr12:133307637-133307667
  hypo
cacagaagagctcccgggcgcagcactgtg

SEQ ID NO: 85485 - DNA, 30 bp, Homo sapiens; identical to SEQ ID NO: 26883
  chr12:133308349-133308379
  hypo

SEQ ID NO: 85486 - DNA, 306 bp, Homo sapiens
  chr12:133312070-133312376
  hypo
ttttccagagcttgcgaaaatcttctgcctatgaagaaaaaaaaatgtattgagccgtgtcaggcactgcgcccctcagctgcggaaacctgaagagccgtcgtcatcgcagtagctgcctgtctccgcacacccttccttctctccccttcactagcagatccctgggccacgtgcccacctgtggcatggctgagtggccgcacggctgcactctgacctgggggaggggaggcggtctcctttcttgcagccccgtctgggctgtgaggttcagaaccaggagggcccgagcacgaggcctca

SEQ ID NO: 85487 - DNA, 32 bp, Homo sapiens; identical to SEQ ID NO: 26885
  chr12:133348834-133348866
  hypo

SEQ ID NO: 85488 - DNA, 30 bp, Homo sapiens
  chr12:133349729-133349759
  hypo
gtgtctctgtgggtcgccgcgtgggccggc

SEQ ID NO: 85489 - DNA, 393 bp, Homo sapiens
  chr12:133351309-133351702
  hypo
cacacgacgctaaacggcctctcaatccgagcgctgccctcccacctgcctcctggaaaacatggatgtggaccgagcacagaaaaccgccgggcgcctgggcacagctcccgggccccagcccttcacacacagcagggactgccgagtcacagaccaccgctcatctgctttacaaagcacattacaacaaagtggtatttgaattcacagaacgaggaaaacactgttggatgaatgaaaccagaatgaaatgatttcatctgtcaccccattaccactgactacacagcagctgctcagtgtgggctcaacaaatccgtttatgtctgaatgactaacacgtctgccagcctcctgtccgagagcatctacagcgcacgtcggctaccc

SEQ ID NO: 85490 - DNA, 30 bp, Homo sapiens
  chr12:133352537-133352567
  hypo
cgcggccaagggatcggagccggcccaggc

SEQ ID NO: 85491 - DNA, 1101 bp, Homo sapiens
  chr12:133353480-133354581
  hypo
agtgaagtcacccagggcacccgtgagtccagccctgcaagtccagcccccgtgaaccgtcacctcttggtttcccacgggctgtttgctgagctgctcgtccagctgcttctgcaggagctggagctgtgcccgggcctcggccagctctgcttggaactgtgctatctcctgggaatgtttcccctcccgaatcctagcgtaaaaaaacaagaaagaagggaatcgccacgctcctccagtgtgctgtgccctcccgctgggaaatgctgcctgtggaaggcgttcgtcctggcaggccctctgctgtgcactgcgtgctgcagccatgcttggtgcccacagtgtgcactcgggcagtcctcacgaagcacctgagactcacacttcactggcacccctcacagatcccagagactcactttgccggcacccctcacagatcccagagagtgccggccccgagaccacagtgcatgggacccacagagccacagcatcagccccgcgccgggccgccccttcccgcctctgacctgaagctaagtactcctgctggggcgctttctctcttggggggaggacacggggcagtgagtgaggctcaggattctggagacggaggctgggtgccttctactcctatgattcactcaagtactcggcaatttgcaaaatatagatgaccctcgctgtgctgaaggtgtgaattagaccccgcccattgccaggacagccatgtttgagggctggcggggcccaggcactcactgaaggtcgtcggcctcggcctgcagcttctgcaccaggtgttccttggcctgcagctccttcttcacctcactcagctccaaggaggccgccttgaagtggcggcggttatgcccggcttccaccttggcagcagccacctaggaggaaggaagccacgttgtccatgccctgcgtgacacccacagctttatgacgtgccgggcgcagggggtgaatgcactcccggccccgtgcatgtcctggctgccggcgtgtgcttctccacaggcctgtcaagttccttgtaaagatgaaaccacctgacccggagctcggcacgcagcaagt

SEQ ID NO: 85492 - DNA, 31 bp, Homo sapiens; identical to SEQ ID NO: 26890
  chr12:133356749-133356780
  hypo

SEQ ID NO: 85493 - DNA, 221 bp, Homo sapiens; identical to SEQ ID NO: 26891
  chr12:133357042-133357263
  hypo

SEQ ID NO: 85494 - DNA, 30 bp, Homo sapiens; identical to SEQ ID NO: 26892
  chr12:133360655-133360685
  hypo

SEQ ID NO: 85495 - DNA, 30 bp, Homo sapiens
  chr12:133362595-133362625
  hypo
agaggcagctggaacgcgagcggaccaggg

SEQ ID NO: 85496 - DNA, 230 bp, Homo sapiens
  chr12:133365634-133365864
  hypo
tctcgctccttctgcgccgactggagatgcccttcaaggtccgccatgtgctgacggacctgggccacctctctgtgcaggcgcgagagctccgcctcggcagtccgcttctccccgtgcacttgcatcagctcctgccgcagctccttcagctccgagtccagcctcttcctggtggctttcagctcactgatgagctggtctttggaggtggcgtcgcgccggtaggc

SEQ ID NO: 85497 - DNA, 30 bp, Homo sapiens
  chr12:133372591-133372621
  hypo
tgcaggaggcagatcgtgtcctccctggag

SEQ ID NO: 85498 - DNA, 30 bp, Homo sapiens; identical to SEQ ID NO: 26893
  chr12:133373594-133373624
  hypo

SEQ ID NO: 85499 - DNA, 30 bp, Homo sapiens; identical to SEQ ID NO: 26894
  chr12:133374896-133374926
  hypo

SEQ ID NO: 85500 - DNA, 377 bp, Homo sapiens
  chr12:133380423-133380800
  hypo
ctgagagatgagcccaccaagcggcctccctgggaggactctggacccgggtcactctacacccctcgggctttgtcttcaatcttcccaccctgcttcgccctctccttcccactcctgttcacgcttgctctgagcaggccaaccacagtcttctccgtgtctgctgggcactggagtgtgagctctgggactggcccgggcggggactgagggggtggaaggcgtgctgccaagccacatggaagcccgccgcggcttccgcaatccactgccctacttgtactctctgggcgagccctatagggaggcagctggaccgacgcactgcatccagggagaaaaggttgccagacggacagtcaaggagctgttct

SEQ ID NO: 85501 - DNA, 110 bp, Homo sapiens
  chr12:133381359-133381469
  hypo
ctggtactgctcctcggccacctgcaagtcgttgttggacgacgccaggctggcattttttgcctccagcatgttctgcaggtcagtcatggctcgctccaggtcccagc

SEQ ID NO: 85502 - DNA, 30 bp, Homo sapiens; identical to SEQ ID NO: 26896
  chr12:133382212-133382242
  hypo

SEQ ID NO: 85503 - DNA, 201 bp, Homo sapiens; identical to SEQ ID NO: 26897
  chr12:133384550-133384751
  hypo

SEQ ID NO: 85504 - DNA, 30 bp, Homo sapiens
  chr12:133393100-133393130
  hypo
gaaaagcggggtaacggatgcttacacagt

SEQ ID NO: 85505 - DNA, 30 bp, Homo sapiens
  chr12:133393598-133393628
  hypo
ccctctggtgtccacgtccttcctgtaagg

SEQ ID NO: 85506 - DNA, 30 bp, Homo sapiens
  chr12:133401862-133401892
  hypo
caggtaaagtgtctcgtctaccccctctgc

SEQ ID NO: 85507 - DNA, 30 bp, Homo sapiens; identical to SEQ ID NO: 26898
  chr12:133402536-133402566
  hypo

SEQ ID NO: 85508 - DNA, 30 bp, Homo sapiens; identical to SEQ ID NO: 50345
  chr12:133405921-133405951
  hypo

SEQ ID NO: 85509 - DNA, 137 bp, Homo sapiens; identical to SEQ ID NO: 26899
  chr12:133412306-133412443
  hypo

SEQ ID NO: 85510 - DNA, 70 bp, Homo sapiens; identical to SEQ ID NO: 26900
  chr12:133414279-133414349
  hypo

SEQ ID NO: 85511 - DNA, 30 bp, Homo sapiens
  chr12:133417309-133417339
  hypo
acaagggagcagcacgtcctgggacctgcg

SEQ ID NO: 85512 - DNA, 42 bp, Homo sapiens
  chr12:133421486-133421528
  hypo
gggattacaggcgtgagcctccacgcccggccccacatggat

SEQ ID NO: 85513 - DNA, 223 bp, Homo sapiens
  chr12:133424358-133424581
  hypo
caagaagccctcaccgagagctgtgggaacaagagctgccgggaacaagagctgcgggaagcggctcctacgaattggtggcaggaggcacaaaaacgaaatacctatttttggaatacggaaaaaacagacaaacaccaatggcatgcagagaaccagctggctgcaccagtgaggaaacatggctcccggctccccaacccgcagcgggtcaggtaaaaca

SEQ ID NO: 85514 - DNA, 128 bp, Homo sapiens; identical to SEQ ID NO: 26902
  chr12:133428294-133428422
  hypo

SEQ ID NO: 85515 - DNA, 30 bp, Homo sapiens
  chr12:133429934-133429964
  hypo
cgcggccacgtgcacgtcagcaccgggcac

SEQ ID NO: 85516 - DNA, 30 bp, Homo sapiens
  chr12:133430211-133430241
  hypo
gggccggtgcaacgcgggtccgcagccatc

SEQ ID NO: 85517 - DNA, 30 bp, Homo sapiens
  chr12:133434301-133434331
  hypo
aatcagaggccacacggcctctgtgttttc

SEQ ID NO: 85518 - DNA, 388 bp, Homo sapiens
  chr12:133435575-133435963
  hypo
catgcccagccctgccccacacgggacgaagaacctgcagtgccatgttccgtgagccaagggtgaacacggtcgcacctcacgcagtcgtgcagcaggtcctggcagatgatgcatgtcagcgtctcctccatcttgtctggcttcccagccgctgctctgacgtcctcgtggacggtttgggcatttctacgcggttgtgcgaccaacaactgcccgttcaggtcaaggtccccatctacaggagaaagggatgtgttctgtcgtaaccaagaaggaaatacacgcaggttcaggtcaaggtccccgtccacaggagaaagggatgtgttctaactgtcgtaaccgagaaggaaatacatgcagtcttttttttttcgagacagag

SEQ ID NO: 85519 - DNA, 99 bp, Homo sapiens
  chr12:133441851-133441950
  hypo
ttttaaggaacctggaagatacgatgaagggtacacagcccaagagagctggtaaaacttcagcattcaggtggctattcaaatctggcatgttttctt

SEQ ID NO: 85520 - DNA, 123 bp, Homo sapiens; identical to SEQ ID NO: 9181
  chr12:133443617-133443740
  hypo

SEQ ID NO: 85521 - DNA, 75 bp, Homo sapiens; identical to SEQ ID NO: 26905
  chr12:133448787-133448862
  hypo

SEQ ID NO: 85522 - DNA, 126 bp, Homo sapiens; identical to SEQ ID NO: 26906
  chr12:133449099-133449225
  hypo

SEQ ID NO: 85523 - DNA, 30 bp, Homo sapiens
  chr12:133460321-133460351
  hypo
caccccttcctacacgttacctaggctttc

SEQ ID NO: 85524 - DNA, 1166 bp, Homo sapiens; identical to SEQ ID NO: 50347
  chr12:133463690-133464856
  hypo

SEQ ID NO: 85525 - DNA, 8 bp, Homo sapiens
  chr12:133481374-133481382
  hypo
tttcctca

SEQ ID NO: 85526 - DNA, 173 bp, Homo sapiens; identical to SEQ ID NO: 9185
  chr12:133481489-133481662
  hypo

SEQ ID NO: 85527 - DNA, 252 bp, Homo sapiens; identical to SEQ ID NO: 9186
  chr12:133484600-133484852
  hypo

SEQ ID NO: 85528 - DNA, 186 bp, Homo sapiens; identical to SEQ ID NO: 9187
  chr12:133485161-133485347
  hypo

SEQ ID NO: 85529 - DNA, 250 bp, Homo sapiens; identical to SEQ ID NO: 9188
  chr12:133485439-133485689
  hypo

SEQ ID NO: 85530 - DNA, 62 bp, Homo sapiens; identical to SEQ ID NO: 9189
  chr12:133485815-133485877
  hypo

SEQ ID NO: 85531 - DNA, 26 bp, Homo sapiens
  chr12:133705787-133705813
  hypo
tttaaaaaattgagtcagggccgggt

SEQ ID NO: 85532 - DNA, 103 bp, Homo sapiens; identical to SEQ ID NO: 50354
  chr12:133706913-133707016
  hypo

SEQ ID NO: 85533 - DNA, 137 bp, Homo sapiens
  chr12:133716925-133717062
  hypo
cgcactccggcctaggtgacaagaatgaggcctcgactttggaaaaaaaagaaaagaaagacacttgtgttactgggtcactagacgtcttttttttttttttttttaaataagtcttaccacgtgtcaggcaccat

SEQ ID NO: 85534 - DNA, 36 bp, Homo sapiens
  chr12:133721474-133721510
  hypo
tttgttgttgtttagacggagtcttgctctgtcacc

SEQ ID NO: 85535 - DNA, 103 bp, Homo sapiens
  chr13:19239972-19240075
  hypo
gggtgcaaggccagcagggaacgtggatagctacggcatgaccccgttgctcccggccagagtgacgggccacaccaacatcgtggagtacctcatccaggag

SEQ ID NO: 85536 - DNA, 159 bp, Homo sapiens
  chr13:19692225-19692384
  hypo
gtggtgcctctcccttctactcgtcctcctgcccggcaggagaagctcccgctgctggccgccctcctaccgttccatcgccaccaccacctgcagccacccagtgccccggatggcggctgctagcagccccttctcgtagttctctaaggcagatac

SEQ ID NO: 85537 - DNA, 30 bp, Homo sapiens
  chr13:20235903-20235933
  hypo
ctcatcacaaaaggcgcgaaagtgaacggt

SEQ ID NO: 85538 - DNA, 121 bp, Homo sapiens
  chr13:20265679-20265800
  hypo
cacaacgagcaaataaatatactgataaaattgacatgaatgaaaagacttgatgggaaactgttctgaaaaaggcacttataagagatttacaaaggccgggcgtggtgagtcattgcct

SEQ ID NO: 85539 - DNA, 29 bp, Homo sapiens
  chr13:20306777-20306806
  hypo
aaacttttggcagggcgcggtggctcacg

SEQ ID NO: 85540 - DNA, 28 bp, Homo sapiens
  chr13:20337836-20337864
  hypo
ttcattaaatcaaagtgaactcggccag

SEQ ID NO: 85541 - DNA, 408 bp, Homo sapiens; identical to SEQ ID NO: 26915
  chr13:20392319-20392727
  hypo

SEQ ID NO: 85542 - DNA, 39 bp, Homo sapiens
  chr13:20496684-20496723
  hypo
tatgaaaagccagtggttggccggatgtcgtggctcacg

SEQ ID NO: 85543 - DNA, 86 bp, Homo sapiens; identical to SEQ ID NO: 26916
  chr13:20521928-20522014
  hypo

SEQ ID NO: 85544 - DNA, 663 bp, Homo sapiens; identical to SEQ ID NO: 9194
  chr13:20735460-20736123
  hypo

SEQ ID NO: 85545 - DNA, 436 bp, Homo sapiens; identical to SEQ ID NO: 50365
  chr13:20766418-20766854
  hypo

SEQ ID NO: 85546 - DNA, 322 bp, Homo sapiens
  chr13:20975929-20976251
  hypo
gggcactcccacagccgatcactcctcattgcacactgtgcctgcttcaagcaaaatcatgaagcacttctgtctgcttccttctgccaaaacatgcctgatatccgcacaaaatacctgacagcaaaagtgggaaaatagaacttatatgaagcgatgtacctccaagccatgcacagttccgccctgcatgctggcgccagtgctgcccagggctgctgtggccgctcctcttggaatgcgtggctcagggataccatgagcccagcaggccatgagtggggccacctgcaccccacgaccccctcgtttcagcgacccc

SEQ ID NO: 85547 - DNA, 526 bp, Homo sapiens
  chr13:20979793-20980319
  hypo
catgcacgctccccacgctcctgctgctccccagccttggagagccatgatttctcagattctaaggagagggccctgggactttggtgaagagatgcaggaagaggcttatcctggagggagagggagggagccgcacgggctaggctgactgtgcgagaatggggtgcgcccaggggaaagcgcaggccagtcacggcccccacccagcactggcctgccccgacccgctgggccccgcagacttactctccctcacattcctcccctccctgctgccgggaggcgaacgggctggtgccggcctgtgcttagcaagtcaagtcagaagccagggccgggatcctggaagaggaggaggaggcgtttctagtcctgggcgccatggaggacataggctgggctactgctgcgaccctgactcatttcccacatctttcaaacccttaaaggctcagcagctggtcagtccgcctacaaaggtaacatggggacaaacgaagctgcagaacgtgcagagcctgcc

SEQ ID NO: 85548 - DNA, 30 bp, Homo sapiens; identical to SEQ ID NO: 26919
  chr13:20987502-20987532
  hypo

SEQ ID NO: 85549 - DNA, 73 bp, Homo sapiens
  chr13:21005161-21005234
  hypo
gaatcgaggcaaccgcgtggcaaatgcacccggcagtccagtcagacaatgtacctaacggggatttggccca

SEQ ID NO: 85550 - DNA, 30 bp, Homo sapiens
  chr13:21010322-21010352
  hypo
cagtctgccagccgcggcccccttcccaag

SEQ ID NO: 85551 - DNA, 212 bp, Homo sapiens
  chr13:21047372-21047584
  hypo
gccggcaggagtggcggggagacccgcagtcccactgtgcggcacccacatgctgctcactgtggccggagcgtcggactttaaggagctgtgagacagctatattttatgtggaaatttccagacttttaaacatcagtgagtcattcaaacaaacaaatgaacaattatttttaaagctgcacatggccagactcggcccctggtaccag

SEQ ID NO: 85552 - DNA, 157 bp, Homo sapiens
  chr13:21057335-21057492
  hypo
cacaataaaagataaacgtgtgaggttctggatatcctaatacaccgggattttaccatgacacactgaacacacaaatcaatcacacatgaatcccaaatatgtacaattaagatacagcaagtaattttttatttattattatttttttaagacg

SEQ ID NO: 85553 - DNA, 97 bp, Homo sapiens
  chr13:21057551-21057648
  hypo
tccgcctcctgggttcacgccatctggactgaccatatcatcaacatgaagtcagctttctcacttggactgtaacgtaccacatcatcattctaaa

SEQ ID NO: 85554 - DNA, 30 bp, Homo sapiens
  chr13:21094956-21094986
  hypo
gacccgggccgggcacggtggctcacgcct

SEQ ID NO: 85555 - DNA, 29 bp, Homo sapiens
  chr13:21095285-21095314
  hypo
aaggaaggaaggaacgaacgaacgaaaaa

SEQ ID NO: 85556 - DNA, 503 bp, Homo sapiens; identical to SEQ ID NO: 50370
  chr13:21099486-21099989
  hypo

SEQ ID NO: 85557 - DNA, 30 bp, Homo sapiens; identical to SEQ ID NO: 50372
  chr13:21141749-21141779
  hypo

SEQ ID NO: 85558 - DNA, 27 bp, Homo sapiens
  chr13:21363542-21363569
  hypo
tttttttttgagacagagtctcgctct

SEQ ID NO: 85559 - DNA, 173 bp, Homo sapiens
  chr13:21407277-21407450
  hypo
tagtgaacaaacatccgaaaactgagctaatacttctgaacgggcttctttcaataattaaataataaatatataataataaatatttgctgagcatctgtgctagggctcaacaatgcagtgagcaaaagcatggcccatgctttcacggagcttcgcgcagtaggtaaaca

SEQ ID NO: 85560 - DNA, 30 bp, Homo sapiens
  chr13:21562223-21562253
  hypo
tttgtcccccttggcgcttttgcggctctt

SEQ ID NO: 85561 - DNA, 245 bp, Homo sapiens
  chr13:21562938-21563183
  hypo
tggtgggccgcgggaccggcctgcttgtggtgtgggtgcggcacgtagagcccggcggcagggggtgggaaagcgaggccggcgcctggcggtcctccctggcccttcgtgggcaggctggcgtaacccccggtctccggcggcgtcttgctctggaaggaggggctgcgctgcactccgtagcccaggggttccccaggcaccagcaggtgcggccgcccgtagtgcgcgccctgcagcgggaa

SEQ ID NO: 85562 - DNA, 31 bp, Homo sapiens; identical to SEQ ID NO: 26923
  chr13:21563687-21563718
  hypo

SEQ ID NO: 85563 - DNA, 319 bp, Homo sapiens
  chr13:21572945-21573264
  hypo
cacggggcgggggccgcagcgacattgtgcacgccgggtgggggccctgcgacattgtccacgaccttgtgcacgcggggcgggggccctggcgacgttgtccacgcagggtaggagtcccggtgaccttgcgcacacggcgcaagggccctggtgaccttttccacgaccttgtccacgcaggacagggatccccgcgaccttgtgcacgcagggcgggggttctggcgacctggtccacaaccttgtccacgcgaggcaggggccccggtgaccttgggcaggcgcagcacgtgccgtgtgcgagccaattatgact

SEQ ID NO: 85564 - DNA, 31 bp, Homo sapiens; identical to SEQ ID NO: 26926
  chr13:21597467-21597498
  hypo

SEQ ID NO: 85565 - DNA, 45 bp, Homo sapiens
  chr13:21633808-21633853
  hypo
caaaattcttgtcaggtggggcgcggtggctcacgcctgtaatcc

SEQ ID NO: 85566 - DNA, 19 bp, Homo sapiens
  chr13:21634092-21634111
  hypo
gatcttgtcttaaaataac

SEQ ID NO: 85567 - DNA, 1165 bp, Homo sapiens; identical to SEQ ID NO: 50375
  chr13:21634590-21635755
  hypo

SEQ ID NO: 85568 - DNA, 228 bp, Homo sapiens; identical to SEQ ID NO: 9203
  chr13:21635777-21636005
  hypo

SEQ ID NO: 85569 - DNA, 50 bp, Homo sapiens
  chr13:21677729-21677779
  hypo
catgcgtgacatcactcgagaaaggaataaacccacgttttggcttaatc

SEQ ID NO: 85570 - DNA, 113 bp, Homo sapiens
  chr13:21678549-21678662
  hypo
agctggtggctgcccgcctcgctgggcaccagccactgccatcgggagaggagtgcctgtcagctgccgccacccactcgaccctgccgccgcgactcgcaagctgtggccct

SEQ ID NO: 85571 - DNA, 83 bp, Homo sapiens
  chr13:21713730-21713813
  hypo
ccggccagagttcttaatttttgccaatctagtgagtgtggtttaaaaaccaatcaattgaaactaatcgtggttttaatgca

SEQ ID NO: 85572 - DNA, 20 bp, Homo sapiens
  chr13:21744612-21744632
  hypo
ctggccggttatatactttc

SEQ ID NO: 85573 - DNA, 27 bp, Homo sapiens
  chr13:21745419-21745446
  hypo
aaatgaagacactgggccaggcgctgt

SEQ ID NO: 85574 - DNA, 26 bp, Homo sapiens
  chr13:21745685-21745711
  hypo
tgagcgagactccatctcaaaaaaaa

SEQ ID NO: 85575 - DNA, 32 bp, Homo sapiens; identical to SEQ ID NO: 26931
  chr13:21809449-21809481
  hypo

SEQ ID NO: 85576 - DNA, 32 bp, Homo sapiens
  chr13:21863995-21864027
  hypo
ccccaatactgatatgacacccgcaatactga

SEQ ID NO: 85577 - DNA, 70 bp, Homo sapiens
  chr13:21894156-21894226
  hypo
gccgtcttctacgtcccgagatctgcttgcggtctggaggacctgcaccgggagcgcatagtgtacaggg

SEQ ID NO: 85578 - DNA, 30 bp, Homo sapiens
  chr13:21896601-21896631
  hypo
cagaatccgcagcacgtaggacagggagcc

SEQ ID NO: 85579 - DNA, 148 bp, Homo sapiens
  chr13:22021308-22021456
  hypo
ttactttaaacaaccagagaccgccgaggtgcgggctgtgagagagggagcgtggagcctccgaggccgaggactcgtcccagtttggacagatagaagatgtgagcgctctccctctccctctccctctccgtctccctctccctct

SEQ ID NO: 85580 - DNA, 30 bp, Homo sapiens
  chr13:22034713-22034743
  hypo
aaatgtagtaaaagcgagtaagtatttaat

SEQ ID NO: 85581 - DNA, 35 bp, Homo sapiens
  chr13:22048999-22049034
  hypo
ctttttttttttgagacggagtctcgctctgtcgc

SEQ ID NO: 85582 - DNA, 24 bp, Homo sapiens
  chr13:22049273-22049297
  hypo
gagccaccgcgcccggctgtttct

SEQ ID NO: 85583 - DNA, 136 bp, Homo sapiens
  chr13:22058107-22058243
  hypo
caggccggaagactcgcccgcgatgccctcaacgatgtcattaacgaatggccttggaagagatgcgggtgtcggggtggacctgcttcagcagagtagctctccttgcggctgcgcttgcgcttcttgccaacct

SEQ ID NO: 85584 - DNA, 15 bp, Homo sapiens
  chr13:22091943-22091958
  hypo
gcgcgcgcgcacacg

SEQ ID NO: 85585 - DNA, 29 bp, Homo sapiens
  chr13:22093222-22093251
  hypo
attttttttgagacagagtttcgcttgcg

SEQ ID NO: 85586 - DNA, 29 bp, Homo sapiens
  chr13:22093490-22093519
  hypo
ccaccctcgagagttcactgcttttaaac

SEQ ID NO: 85587 - DNA, 30 bp, Homo sapiens
  chr13:22176368-22176398
  hypo
caggatgaatcggccgggcgcagtggctca

SEQ ID NO: 85588 - DNA, 161 bp, Homo sapiens; identical to SEQ ID NO: 26934
  chr13:22214671-22214832
  hypo

SEQ ID NO: 85589 - DNA, 35 bp, Homo sapiens
  chr13:22239915-22239950
  hypo
caccacacctggccgccagccagctttttatatat

SEQ ID NO: 85590 - DNA, 748 bp, Homo sapiens; identical to SEQ ID NO: 50382
  chr13:22243266-22244014
  hypo

SEQ ID NO: 85591 - DNA, 558 bp, Homo sapiens; identical to SEQ ID NO: 9207
  chr13:22244072-22244630
  hypo

SEQ ID NO: 85592 - DNA, 401 bp, Homo sapiens; identical to SEQ ID NO: 50384
  chr13:22244998-22245399
  hypo

SEQ ID NO: 85593 - DNA, 97 bp, Homo sapiens; identical to SEQ ID NO: 9210
  chr13:22247844-22247941
  hypo

SEQ ID NO: 85594 - DNA, 35 bp, Homo sapiens
  chr13:22338336-22338371
  hypo
gagccactgcgcccggccagaaaatatttttatgt

SEQ ID NO: 85595 - DNA, 46 bp, Homo sapiens
  chr13:22350433-22350479
  hypo
aagggctgtggtgcagctcaccgccatgagggacttcccttttttt

SEQ ID NO: 85596 - DNA, 32 bp, Homo sapiens; identical to SEQ ID NO: 26939
  chr13:22392837-22392869
  hypo

SEQ ID NO: 85597 - DNA, 32 bp, Homo sapiens; identical to SEQ ID NO: 26940
  chr13:22392988-22393020
  hypo

SEQ ID NO: 85598 - DNA, 49 bp, Homo sapiens
  chr13:22417707-22417756
  hypo
tgcagccaaggaactgctgggcggcgtcggactcagccctccttgtcca

SEQ ID NO: 85599 - DNA, 45 bp, Homo sapiens
  chr13:22467017-22467062
  hypo
gttgcaacaagaattgggggccgggcacggtggctcacgcctgta

SEQ ID NO: 85600 - DNA, 114 bp, Homo sapiens
  chr13:22511762-22511876
  hypo
gcctaggtctatttaatttaacgttgcttgggaaaaaaatgataataaaatcccaaaagataccgataagttctgcatcccgatatgtctttatgatgacgtagggtgacaaat

SEQ ID NO: 85601 - DNA, 181 bp, Homo sapiens; identical to SEQ ID NO: 26941
  chr13:22539243-22539424
  hypo

SEQ ID NO: 85602 - DNA, 31 bp, Homo sapiens; identical to SEQ ID NO: 9211
  chr13:22553926-22553957
  hypo

SEQ ID NO: 85603 - DNA, 200 bp, Homo sapiens
  chr13:22785988-22786188
  hypo
taatcatagtcaaattgtcctcgaaaagtgtatttcctggagcccagcatggcgccctgcagtgggcatgggcacgggcggtgcactgcatgggacttttccttctctccatccgggtgccatacacgagggttttcagcttagggcagcattcgcgttttcagtggttacatcgcaccgtcagcttacattaactttgt

SEQ ID NO: 85604 - DNA, 21 bp, Homo sapiens
  chr13:23143353-23143374
  hypo
ggcccaactgattcattttta

SEQ ID NO: 85605 - DNA, 30 bp, Homo sapiens
  chr13:23299563-23299593
  hypo
cgagactccgtcaaaaaaaaaaaaagcatt

SEQ ID NO: 85606 - DNA, 198 bp, Homo sapiens
  chr13:23509002-23509200
  hypo
ggacggggccttcccgcattactacccgaatgacactgctggggggaccgctctctggatgccattgtggccacgtgtcgggacggtcggctgcttgactccacgacttaaagctagatttggccttttaagcctctgtctcagtgccctcgggtcccttctgcagctcacctacctgtccctcggcctctggggtgg

SEQ ID NO: 85607 - DNA, 33 bp, Homo sapiens
  chr13:23654297-23654330
  hypo
tacacaaagaaaactatctttcgggctgggcgc

SEQ ID NO: 85608 - DNA, 668 bp, Homo sapiens; identical to SEQ ID NO: 50390
  chr13:23733629-23734297
  hypo

SEQ ID NO: 85609 - DNA, 22 bp, Homo sapiens
  chr13:23734814-23734836
  hypo
cgccttcagttcccccaattcc

SEQ ID NO: 85610 - DNA, 128 bp, Homo sapiens; identical to SEQ ID NO: 26947
  chr13:23896846-23896974
  hypo

SEQ ID NO: 85611 - DNA, 202 bp, Homo sapiens; identical to SEQ ID NO: 26948
  chr13:23897355-23897557
  hypo

SEQ ID NO: 85612 - DNA, 30 bp, Homo sapiens; identical to SEQ ID NO: 26949
  chr13:23993512-23993542
  hypo

SEQ ID NO: 85613 - DNA, 565 bp, Homo sapiens; identical to SEQ ID NO: 50393
  chr13:24040495-24041060
  hypo

SEQ ID NO: 85614 - DNA, 30 bp, Homo sapiens
  chr13:24152120-24152150
  hypo
agacaaagagaggacgatgggggactgcgt

SEQ ID NO: 85615 - DNA, 31 bp, Homo sapiens; identical to SEQ ID NO: 26950
  chr13:24155136-24155167
  hypo

SEQ ID NO: 85616 - DNA, 30 bp, Homo sapiens
  chr13:24269279-24269309
  hypo
catgcctacaggatcgcaggccaagccttt

SEQ ID NO: 85617 - DNA, 22 bp, Homo sapiens
  chr13:24373752-24373774
  hypo
ctgcgcccggcctaggataatt

SEQ ID NO: 85618 - DNA, 253 bp, Homo sapiens
  chr13:24408048-24408301
  hypo
gaaacccctcctggcggcagtgatgctccccacgtctcccacactaagtggcgcctcccttggcctgaccctgcggaaccctcggaagcaggatgcccctttgctgtcccctgcctcccaccctgaccccttcaccagccgtgtacttgtctgcgggttgctgggtcgccagagctgaggccacccagcaagggtgggtggagagaggccacgcgcccgggatgaggggagaggggccgagcccccggagccg

SEQ ID NO: 85619 - DNA, 36 bp, Homo sapiens
  chr13:24527675-24527711
  hypo
gccccgaatagctccccgacccgtccctgccatggg

SEQ ID NO: 85620 - DNA, 31 bp, Homo sapiens
  chr13:24631435-24631466
  hypo
acttctcggcctgtggcgctttgcactccca

SEQ ID NO: 85621 - DNA, 359 bp, Homo sapiens
  chr13:24718515-24718874
  hypo
atgcccaagagacaagatgagcgaatgaaactaacatcactcagcaccttctgtgttccaggaactaggccaggtgctacccaaaaagtttcctatttaagaagcgttggaggatggcaaaacccagctctccttcctggttgtcgcacagcgtacacaatgcacaagcactggcccagacaaactttgatcaggcaccgctgagcagctcttgggggctctttggtgcctgcaggttgctgccattgtgcccctcactcagctccgtccgggttgcagcacaccagccccgctgcagcagccaccgagagaggatcccacctttcagactttggccagcgtggcgtagttggtgtttt

SEQ ID NO: 85622 - DNA, 114 bp, Homo sapiens
  chr13:24720490-24720604
  hypo
caatttcaactcctctccctgcggccaggccagatcaccgagtacccttgtgatcgttagctgcttccatgcaggcaggcctgcaagaaattcgttggctttcatttaaagata

SEQ ID NO: 85623 - DNA, 1042 bp, Homo sapiens; identical to SEQ ID NO: 50399
  chr13:24734727-24735769
  hypo

SEQ ID NO: 85624 - DNA, 31 bp, Homo sapiens
  chr13:24797365-24797396
  hypo
ccacatggaacaccctcgcctccttccggaa

SEQ ID NO: 85625 - DNA, 90 bp, Homo sapiens
  chr13:24797622-24797712
  hypo
ctcgaggacacggacgatgccttccagcggagcacacaccgctcccgcagcctccgcagagcctacggcctgggccgcatctgcctgctg

SEQ ID NO: 85626 - DNA, 49 bp, Homo sapiens
  chr13:24815547-24815596
  hypo
aggcgcatttgtgagacggcattactcagcgaaacgcagagtgttttgc

SEQ ID NO: 85627 - DNA, 31 bp, Homo sapiens; identical to SEQ ID NO: 26955
  chr13:24860470-24860501
  hypo

SEQ ID NO: 85628 - DNA, 110 bp, Homo sapiens
  chr13:24868947-24869057
  hypo
gcaagctggagagcatcgacaagatagctcgctggcaggtgtctatcgtgggctgggaggtaagtggaaagcaccccacatgatcccatgccactcgcccttcccgcacc

SEQ ID NO: 85629 - DNA, 31 bp, Homo sapiens
  chr13:24966169-24966200
  hypo
cacgctcctttgagagcgcacagcagaactg

SEQ ID NO: 85630 - DNA, 30 bp, Homo sapiens
  chr13:25016308-25016338
  hypo
gtgctgggcacgttacgtgaatttccccct

SEQ ID NO: 85631 - DNA, 71 bp, Homo sapiens
  chr13:25026103-25026174
  hypo
cacatgcccccagcacgagtccagcacagccagtgaggaggtttacccaggcccttcgggacaagcggaga

SEQ ID NO: 85632 - DNA, 232 bp, Homo sapiens
  chr13:25026474-25026706
  hypo
gtcccctgcagggcaacaagacgacctccccgtgggtctggactatgtgaccagctctctgagactcacccgataccgcaggcgaataacctggtgtgcgggcggctcctcttcacgagctgtaatgtcaggctctcatcctggaggtgcccatcagacaccaggaggatgttccgtgaccctcgagcagggtacaataagctaagatatcggagtgttttccagaagtctg

SEQ ID NO: 85633 - DNA, 38 bp, Homo sapiens
  chr13:25084392-25084430
  hypo
ttaaaagtgttcactattggccgggcgcggtggctcac

SEQ ID NO: 85634 - DNA, 1081 bp, Homo sapiens; identical to SEQ ID NO: 9221
  chr13:25321112-25322193
  hypo

SEQ ID NO: 85635 - DNA, 30 bp, Homo sapiens; identical to SEQ ID NO: 50405
  chr13:25322238-25322268
  hypo

SEQ ID NO: 85636 - DNA, 30 bp, Homo sapiens
  chr13:25337240-25337270
  hypo
ccctatatcctctacgaagagttttcatac

SEQ ID NO: 85637 - DNA, 30 bp, Homo sapiens
  chr13:25469132-25469162
  hypo
gcgcagacttccagcgcagcgcgaaagctc

SEQ ID NO: 85638 - DNA, 49 bp, Homo sapiens
  chr13:25469372-25469421
  hypo
ccggctccttgcagcgcagtagatgccagaccccgagcaggtttaaaaa

SEQ ID NO: 85639 - DNA, 23 bp, Homo sapiens
  chr13:25491084-25491107
  hypo
aaagacaaaaaaatacatttacg

SEQ ID NO: 85640 - DNA, 30 bp, Homo sapiens
  chr13:25590533-25590563
  hypo
taataaaaccaaaccgctgtgcaccaaaaa

SEQ ID NO: 85641 - DNA, 79 bp, Homo sapiens; identical to SEQ ID NO: 26959
  chr13:25642760-25642839
  hypo

SEQ ID NO: 85642 - DNA, 30 bp, Homo sapiens; identical to SEQ ID NO: 26960
  chr13:25668701-25668731
  hypo

SEQ ID NO: 85643 - DNA, 22 bp, Homo sapiens
  chr13:25669248-25669270
  hypo
taacattacatatttattggtc

SEQ ID NO: 85644 - DNA, 102 bp, Homo sapiens
  chr13:25670561-25670663
  hypo
gttataaagggcaagccagtacgcatcatgtggtctcagcgtgatccatcacttcgaaaaagtggagtgggcaacatattcgttaaaaatctggataagtcc

SEQ ID NO: 85645 - DNA, 52 bp, Homo sapiens; identical to SEQ ID NO: 50412
  chr13:25744682-25744734
  hypo

SEQ ID NO: 85646 - DNA, 294 bp, Homo sapiens; identical to SEQ ID NO: 9226
  chr13:25745300-25745594
  hypo

SEQ ID NO: 85647 - DNA, 354 bp, Homo sapiens; identical to SEQ ID NO: 9227
  chr13:25745726-25746080
  hypo

SEQ ID NO: 85648 - DNA, 30 bp, Homo sapiens; identical to SEQ ID NO: 26964
  chr13:25889270-25889300
  hypo

SEQ ID NO: 85649 - DNA, 165 bp, Homo sapiens
  chr13:25932256-25932421
  hypo
tgggcatttttcatctccacattgagatgtgaagatttcagcatgtagatggaagagactcagattaaatcaggtttcagtttttgccaaacagaaacaatgaagctggtgagggacaagtgtttgggagatgatggcattcaaaatgggcgaggggggaaaatg

SEQ ID NO: 85650 - DNA, 373 bp, Homo sapiens; identical to SEQ ID NO: 9229
  chr13:25946300-25946673
  hypo

SEQ ID NO: 85651 - DNA, 112 bp, Homo sapiens; identical to SEQ ID NO: 9230
  chr13:25946801-25946913
  hypo

SEQ ID NO: 85652 - DNA, 14 bp, Homo sapiens
  chr13:26042693-26042707
  hypo
cgggactagagggt

SEQ ID NO: 85653 - DNA, 402 bp, Homo sapiens; identical to SEQ ID NO: 50420
  chr13:26042768-26043170
  hypo

SEQ ID NO: 85654 - DNA, 97 bp, Homo sapiens; identical to SEQ ID NO: 50421
  chr13:26043340-26043437
  hypo

SEQ ID NO: 85655 - DNA, 30 bp, Homo sapiens; identical to SEQ ID NO: 9232
  chr13:26594656-26594686
  hypo

SEQ ID NO: 85656 - DNA, 390 bp, Homo sapiens; identical to SEQ ID NO: 9234
  chr13:26625266-26625656
  hypo

SEQ ID NO: 85657 - DNA, 124 bp, Homo sapiens; identical to SEQ ID NO: 9235
  chr13:26626239-26626363
  hypo

SEQ ID NO: 85658 - DNA, 30 bp, Homo sapiens
  chr13:26907172-26907202
  hypo
acaccgttgattctgcgtcctcaagggaga

SEQ ID NO: 85659 - DNA, 31 bp, Homo sapiens
  chr13:27058903-27058934
  hypo
catggtctagaaggccgcgagtatctgccaa

SEQ ID NO: 85660 - DNA, 1014 bp, Homo sapiens; identical to SEQ ID NO: 50436
  chr13:27334205-27335219
  hypo

SEQ ID NO: 85661 - DNA, 38 bp, Homo sapiens; identical to SEQ ID NO: 26973
  chr13:27556410-27556448
  hypo

SEQ ID NO: 85662 - DNA, 30 bp, Homo sapiens
  chr13:27597715-27597745
  hypo
tgatgcacctgttgcgtgctgcaccctctg

SEQ ID NO: 85663 - DNA, 179 bp, Homo sapiens; identical to SEQ ID NO: 26974
  chr13:27620502-27620681
  hypo

SEQ ID NO: 85664 - DNA, 333 bp, Homo sapiens; identical to SEQ ID NO: 26975
  chr13:27690667-27691000
  hypo

SEQ ID NO: 85665 - DNA, 99 bp, Homo sapiens
  chr13:27691059-27691158
  hypo
tctgatgttcgcatgcacaatgacgaaatggcctaacgatacatttctcacaccatatccccatcgttacacatgatcgtattttcataatattgtcac

SEQ ID NO: 85666 - DNA, 133 bp, Homo sapiens; identical to SEQ ID NO: 9238
  chr13:27744843-27744976
  hypo

SEQ ID NO: 85667 - DNA, 23 bp, Homo sapiens
  chr13:27811768-27811791
  hypo
ccgcaccaggccttaagtgtcat

SEQ ID NO: 85668 - DNA, 30 bp, Homo sapiens; identical to SEQ ID NO: 9240
  chr13:27868706-27868736
  hypo

SEQ ID NO: 85669 - DNA, 32 bp, Homo sapiens; identical to SEQ ID NO: 26979
  chr13:27914839-27914871
  hypo

SEQ ID NO: 85670 - DNA, 92 bp, Homo sapiens
  chr13:27915170-27915262
  hypo
accagctaaagattgctccaagtatactcatccattgcttaacgatggcaatatgttctgagaagcgcattgttaggcgattgagtcattat

SEQ ID NO: 85671 - DNA, 28 bp, Homo sapiens
  chr13:27934907-27934935
  hypo
ccatctttaagaactgggttccggccag

SEQ ID NO: 85672 - DNA, 30 bp, Homo sapiens; identical to SEQ ID NO: 26980
  chr13:28026792-28026822
  hypo

SEQ ID NO: 85673 - DNA, 58 bp, Homo sapiens; identical to SEQ ID NO: 26981
  chr13:28152522-28152580
  hypo

SEQ ID NO: 85674 - DNA, 30 bp, Homo sapiens; identical to SEQ ID NO: 9243
  chr13:28179804-28179834
  hypo

SEQ ID NO: 85675 - DNA, 268 bp, Homo sapiens; identical to SEQ ID NO: 26983
  chr13:28239903-28240171
  hypo

SEQ ID NO: 85676 - DNA, 30 bp, Homo sapiens; identical to SEQ ID NO: 50462
  chr13:28476962-28476992
  hypo

SEQ ID NO: 85677 - DNA, 695 bp, Homo sapiens; identical to SEQ ID NO: 50464
  chr13:28493980-28494675
  hypo

SEQ ID NO: 85678 - DNA, 391 bp, Homo sapiens; identical to SEQ ID NO: 9262
  chr13:28551993-28552384
  hypo

SEQ ID NO: 85679 - DNA, 334 bp, Homo sapiens; identical to SEQ ID NO: 9263
  chr13:28552659-28552993
  hypo

SEQ ID NO: 85680 - DNA, 244 bp, Homo sapiens; identical to SEQ ID NO: 26987
  chr13:28575158-28575402
  hypo

SEQ ID NO: 85681 - DNA, 30 bp, Homo sapiens; identical to SEQ ID NO: 9264
  chr13:28578210-28578240
  hypo

SEQ ID NO: 85682 - DNA, 67 bp, Homo sapiens; identical to SEQ ID NO: 9265
  chr13:28592625-28592692
  hypo

SEQ ID NO: 85683 - DNA, 30 bp, Homo sapiens; identical to SEQ ID NO: 9266
  chr13:28599040-28599070
  hypo

SEQ ID NO: 85684 - DNA, 30 bp, Homo sapiens; identical to SEQ ID NO: 9267
  chr13:28602387-28602417
  hypo

SEQ ID NO: 85685 - DNA, 500 bp, Homo sapiens; identical to SEQ ID NO: 9268
  chr13:28608022-28608522
  hypo

SEQ ID NO: 85686 - DNA, 30 bp, Homo sapiens; identical to SEQ ID NO: 9269
  chr13:28610100-28610130
  hypo

SEQ ID NO: 85687 - DNA, 30 bp, Homo sapiens; identical to SEQ ID NO: 9270
  chr13:28611397-28611427
  hypo

SEQ ID NO: 85688 - DNA, 30 bp, Homo sapiens; identical to SEQ ID NO: 9271
  chr13:28622462-28622492
  hypo

SEQ ID NO: 85689 - DNA, 30 bp, Homo sapiens; identical to SEQ ID NO: 9272
  chr13:28623585-28623615
  hypo

SEQ ID NO: 85690 - DNA, 107 bp, Homo sapiens; identical to SEQ ID NO: 9273
  chr13:28636039-28636146
  hypo

SEQ ID NO: 85691 - DNA, 30 bp, Homo sapiens; identical to SEQ ID NO: 9274
  chr13:28644712-28644742
  hypo

SEQ ID NO: 85692 - DNA, 39 bp, Homo sapiens
  chr13:28662982-28663021
  hypo
agtgctgggattacaagcgtgagctgcccacccagccca

SEQ ID NO: 85693 - DNA, 170 bp, Homo sapiens; identical to SEQ ID NO: 9275
  chr13:28674056-28674226
  hypo

SEQ ID NO: 85694 - DNA, 470 bp, Homo sapiens; identical to SEQ ID NO: 9276
  chr13:28674720-28675190
  hypo

SEQ ID NO: 85695 - DNA, 23 bp, Homo sapiens
  chr13:28705877-28705900
  hypo
agttcactataccctcgaactcc

SEQ ID NO: 85696 - DNA, 99 bp, Homo sapiens
  chr13:28745558-28745657
  hypo
ttaagagctcagtcacgcaagactgctctccacttcagataccagtgacatgtagcgggtcctcagattatccacacttctatccgacttggctacaaa

SEQ ID NO: 85697 - DNA, 226 bp, Homo sapiens
  chr13:28745879-28746105
  hypo
agggatttttatggacgcttcatctcgcaggcaagggaaattattaactcagcctgtagcccctctctcctcactggaagatggttgggtagggctgaaagttccaaactggtaatcagggcttggtctttctggtgaacggctcccatctaggtacctaacaaaagtcacctcattagaacaaacgctactcctatcaccctggaaattccgagggatttaggag

SEQ ID NO: 85698 - DNA, 31 bp, Homo sapiens; identical to SEQ ID NO: 27004
  chr13:28777902-28777933
  hypo

SEQ ID NO: 85699 - DNA, 30 bp, Homo sapiens; identical to SEQ ID NO: 27005
  chr13:28778232-28778262
  hypo

SEQ ID NO: 85700 - DNA, 31 bp, Homo sapiens; identical to SEQ ID NO: 27006
  chr13:28818188-28818219
  hypo

SEQ ID NO: 85701 - DNA, 1111 bp, Homo sapiens; identical to SEQ ID NO: 50496
  chr13:29067874-29068985
  hypo

SEQ ID NO: 85702 - DNA, 30 bp, Homo sapiens
  chr13:29112391-29112421
  hypo
tcctgactcgtgattcgcccggtgtgagcc

SEQ ID NO: 85703 - DNA, 31 bp, Homo sapiens; identical to SEQ ID NO: 27008
  chr13:29241509-29241540
  hypo

SEQ ID NO: 85704 - DNA, 30 bp, Homo sapiens; identical to SEQ ID NO: 9283
  chr13:29283831-29283861
  hypo

SEQ ID NO: 85705 - DNA, 1128 bp, Homo sapiens; identical to SEQ ID NO: 9284
  chr13:29292470-29293598
  hypo

SEQ ID NO: 85706 - DNA, 30 bp, Homo sapiens
  chr13:29298156-29298186
  hypo
atccccgccgctgccgccatttcacttcat

SEQ ID NO: 85707 - DNA, 166 bp, Homo sapiens; identical to SEQ ID NO: 9285
  chr13:29394546-29394712
  hypo

SEQ ID NO: 85708 - DNA, 223 bp, Homo sapiens; identical to SEQ ID NO: 27012
  chr13:29913840-29914063
  hypo

SEQ ID NO: 85709 - DNA, 205 bp, Homo sapiens; identical to SEQ ID NO: 27013
  chr13:29920652-29920857
  hypo

SEQ ID NO: 85710 - DNA, 96 bp, Homo sapiens
  chr13:30079032-30079128
  hypo
gcttgtccagggcacgcctgctcggcacacgtgttgccaacgtgaaggcagacatggtccctggccctaggatgagtccacgctgggcttccgggc

SEQ ID NO: 85711 - DNA, 227 bp, Homo sapiens
  chr13:30079643-30079870
  hypo
atctgagccatcaccgctcccgaaacacatggggcggcagctgctgtgcctccttctcaattcttccacccccccacaccatcagaattcggatttctctccacgtggcgtctgcctctgtccccttccaggctggagcgacgtttccacgttcggatgctgcagcctctgcacctgcctcagacagacccaccagataccacctgtctcttcgtggcatttgggag

SEQ ID NO: 85712 - DNA, 243 bp, Homo sapiens
  chr13:30082637-30082880
  hypo
ttctgcagcagcagaacctcccgcagtaattacactgggccagaaaccacgcccaacctgtgtcccaggggcacgctgcacgagcttgcttacccaccacgcaagctctgtggtctggctttctgtgtggccaaggaacacgaaatgtgcatgatgctttcaggtgcagacgctcatcacatattccagatcataggcacgctggggcccggagagcagctcgcctgccttcctctctgcaca

SEQ ID NO: 85713 - DNA, 150 bp, Homo sapiens
  chr13:30087250-30087400
  hypo
tgtgtgtgaaatggtgctggccgcaggccccgacccaggcaagacgggggtggcgtgcactggagctatgggggtggggaggatgctcgggtctctcccacttgcagaggcgtggggtccgaagcatccggatgacagatacacaaaagg

SEQ ID NO: 85714 - DNA, 30 bp, Homo sapiens
  chr13:30088600-30088630
  hypo
ggggcggggctgtgcgtcacttgcactggt

SEQ ID NO: 85715 - DNA, 30 bp, Homo sapiens; identical to SEQ ID NO: 27016
  chr13:30096169-30096199
  hypo

SEQ ID NO: 85716 - DNA, 46 bp, Homo sapiens; identical to SEQ ID NO: 27017
  chr13:30101131-30101177
  hypo

SEQ ID NO: 85717 - DNA, 459 bp, Homo sapiens
  chr13:30106966-30107425
  hypo
agatgagaattatgatcactgcgaatatgtcggggttttcagccagcacgccgggggcgttcagagtcatgtgtgtccgtgagaactccccgatgggtctgcctatcagctcgtcgaaggtggcgctccaggccctcgctacgcttgaagtacctgccacaaagcacacacaacagaggagatgtgaggacaactgttagccaggtatttgtagtggagctccatgttgataacatcattgcaggagtcaccgacggtgcactggaatctggcagcagcagccagaccacagtgtatgctgagccagaagtgacggtcgactagtgctaagtgcgagaaggcttctagggcctacagaggaatgcacttcacatcctacccaatatacacaggtgtattctatcaaatatatatatccgaataaaaagttcgcaaaacgagtgttacccttaccacctg

SEQ ID NO: 85718 - DNA, 247 bp, Homo sapiens; identical to SEQ ID NO: 27019
  chr13:30123248-30123495
  hypo

SEQ ID NO: 85719 - DNA, 39 bp, Homo sapiens; identical to SEQ ID NO: 27020
  chr13:30128332-30128371
  hypo

SEQ ID NO: 85720 - DNA, 53 bp, Homo sapiens
  chr13:30141665-30141718
  hypo
tcccacactgaatgttcggaatgctcaaagggcttggccgcagccttttctct

SEQ ID NO: 85721 - DNA, 32 bp, Homo sapiens; identical to SEQ ID NO: 27021
  chr13:30149063-30149095
  hypo

SEQ ID NO: 85722 - DNA, 30 bp, Homo sapiens; identical to SEQ ID NO: 27022
  chr13:30163288-30163318
  hypo

SEQ ID NO: 85723 - DNA, 174 bp, Homo sapiens
  chr13:30163621-30163795
  hypo
tcctgacactggccacgtcccagcgcagctgccccaaggaccccagggctccagctgtgccaggtgcctggacttgggagggggaagacccactttcagagacagcagagggaaatcagggcaaagagaggggaggcagggtgccctccagcgttggggcgggtgaccggtgcc

SEQ ID NO: 85724 - DNA, 37 bp, Homo sapiens
  chr13:30314400-30314437
  hypo
gaatgccatgtgaacacgaaatcggagactggggtga

SEQ ID NO: 85725 - DNA, 31 bp, Homo sapiens
  chr13:30547747-30547778
  hypo
gtgggcaaggtgaacacgttgggcggttaca

SEQ ID NO: 85726 - DNA, 31 bp, Homo sapiens
  chr13:30573485-30573516
  hypo
ggtcgcattgactttccgagtctcagtttta

SEQ ID NO: 85727 - DNA, 3 bp, Homo sapiens
  chr13:30707200-30707203
  hypo
gac

SEQ ID NO: 85728 - DNA, 751 bp, Homo sapiens
  chr13:30707244-30707995
  hypo
cgtccctgcactgggtgggccgtgctgggagaaggtcccggggatcactcctcctaggccgccggggcagtctctccagccaccctctttccccagagccagcgggctggggttcttggtttagactctcttctctcctgtcctggaggaccagccatttgacgcccttgtccactgggaggatgttttccatgattccacttcttcccttcctcggccacctaaggcaggccggcttatgcgtgactgtcaaccgaggcaggccacagcgctgtgggcaggcggttttgcacgtatccttagtgaccctgaaggcccagcctctgctggctgcctgagccgagggttttacttcttttcatttaatcactttattggtccttgccgggagggagcccatgggtcctggtaaaagtgcatctccctgtggttctggggctgatcctccttctggagcagaagacagagctcagtgaggaccgcctgtgctgcctgcctgggacgccccagccgcagggccgcgcaggcgtgtttctttgagagccctcccctggaagctccctttcactccaccctgttgataaggcccaggacaaaaagcaagcaaccgctggaaacacacctgctggaaacacgcctccagtgccagcccaggaggtggtggccctgtcctgacgccccgtctagccaccgggccagagctgggagccccatagtggagtctgtgtccggcaggtgtctctggacagct

SEQ ID NO: 85729 - DNA, 31 bp, Homo sapiens
  chr13:30714428-30714459
  hypo
tctcccaatgcacaggcgcatgtcctgagct

SEQ ID NO: 85730 - DNA, 30 bp, Homo sapiens; identical to SEQ ID NO: 27024
  chr13:30905017-30905047
  hypo

SEQ ID NO: 85731 - DNA, 82 bp, Homo sapiens; identical to SEQ ID NO: 27025
  chr13:30910052-30910134
  hypo

SEQ ID NO: 85732 - DNA, 384 bp, Homo sapiens; identical to SEQ ID NO: 50513
  chr13:30982477-30982861
  hypo

SEQ ID NO: 85733 - DNA, 143 bp, Homo sapiens
  chr13:30992816-30992959
  hypo
cagcactccccaccgcggtgaccctcaatgactggcaagacgacccatttttaaagggccaatttttaacagctggaaacaataaacgtcgtgggaggtgaagatgctgggaggactgatttctccttcgctgttttcaaaag

SEQ ID NO: 85734 - DNA, 200 bp, Homo sapiens
  chr13:31002075-31002275
  hypo
aagtggccgttaccacgatgcattctgggaaagaagcagcaccaaatccaagatggcggccagcaggaggctgatgaaggagcttgaagaaatccgcaaatgtggaatggaaaacttccgtaacatccaggttgatgaagctaatttattgacttggcaagggcttattgttcctgacaaccctccgtataataaggggg

SEQ ID NO: 85735 - DNA, 30 bp, Homo sapiens
  chr13:31002688-31002718
  hypo
ccaccgtctggcgttcgcttgcagcagtta

SEQ ID NO: 85736 - DNA, 21 bp, Homo sapiens
  chr13:31069567-31069588
  hypo
gctctgtcctccagagcgaca

SEQ ID NO: 85737 - DNA, 44 bp, Homo sapiens
  chr13:31185328-31185372
  hypo
aatactgctttttttttgagacgcagtctcgctttattgcccag

SEQ ID NO: 85738 - DNA, 207 bp, Homo sapiens; identical to SEQ ID NO: 27029
  chr13:31208406-31208613
  hypo

SEQ ID NO: 85739 - DNA, 118 bp, Homo sapiens
  chr13:31259578-31259696
  hypo
cagactgaccatattaaaattcgatcacaccatttgctaagcctgtggactcgggcacgcttctttctctgcgttagtttcctcctctgtaaaacacggatgatgctataaacacacc

SEQ ID NO: 85740 - DNA, 66 bp, Homo sapiens; identical to SEQ ID NO: 27030
  chr13:31306160-31306226
  hypo

SEQ ID NO: 85741 - DNA, 30 bp, Homo sapiens; identical to SEQ ID NO: 27031
  chr13:31392474-31392504
  hypo

SEQ ID NO: 85742 - DNA, 56 bp, Homo sapiens
  chr13:31579359-31579415
  hypo
gggccgccgagtgccgacccccgggtgggcctgcctcacccggcggagaatgcaca

SEQ ID NO: 85743 - DNA, 30 bp, Homo sapiens; identical to SEQ ID NO: 27033
  chr13:31609960-31609990
  hypo

SEQ ID NO: 85744 - DNA, 225 bp, Homo sapiens
  chr13:31742916-31743141
  hypo
gcccaggcagataacccgccggctggtgcctcccaactcccaaagctcctttcgcctgggttctggtgtgccatccatgcttacgcatctctctgtgcccagtgccctgcactaagccaggtgtgtagccggccctcacgctgttagctgctgttaaatgccagcactccgccccacccaactctgttgtggctcctccgactgccagcacggctacgtcatcaa

SEQ ID NO: 85745 - DNA, 34 bp, Homo sapiens
  chr13:32244677-32244711
  hypo
agatacaggctaggctgggcgcggtggctcacgc

SEQ ID NO: 85746 - DNA, 173 bp, Homo sapiens
  chr13:32526647-32526820
  hypo
ttccttaggcgtcctgcgtcccccgattcctgctccctggttgccgcgtccttggctggcgtcagaaaaatggctacaaactttctagtaggtgagaagatctggttccacaagttcaaatatggcgatgcagaaaggagattctacgaacagatgaacgggcctgtggccgg

SEQ ID NO: 85747 - DNA, 31 bp, Homo sapiens
  chr13:32527132-32527163
  hypo
ttgacctgtttggcagcgacaatgaggcaac

SEQ ID NO: 85748 - DNA, 260 bp, Homo sapiens
  chr13:32885415-32885675
  hypo
ttgggcctccggagcggctcggaggcggcgtctccaggcacctgcttgctcttcgtctcctgagggcacggggcgtctttctcccccgattcctccagctgcccgggctcctcctgcctgtcagctcctgacctccgtgatggtggctgcggctggctggcctccgcagggcccgggagcgccttgctctccgcttcgtccccatctctccgcaggcggatcaagcccctgcggccggtggcgggcgaagtgaccccaca

SEQ ID NO: 85749 - DNA, 280 bp, Homo sapiens; identical to SEQ ID NO: 50525
  chr13:32889524-32889804
  hypo

SEQ ID NO: 85750 - DNA, 107 bp, Homo sapiens; identical to SEQ ID NO: 50526
  chr13:32890557-32890664
  hypo

SEQ ID NO: 85751 - DNA, 250 bp, Homo sapiens; identical to SEQ ID NO: 50527
  chr13:32893212-32893462
  hypo

SEQ ID NO: 85752 - DNA, 110 bp, Homo sapiens; identical to SEQ ID NO: 50528
  chr13:32899211-32899321
  hypo

SEQ ID NO: 85753 - DNA, 183 bp, Homo sapiens; identical to SEQ ID NO: 50529
  chr13:32900236-32900419
  hypo

SEQ ID NO: 85754 - DNA, 116 bp, Homo sapiens; identical to SEQ ID NO: 50530
  chr13:32900634-32900750
  hypo

SEQ ID NO: 85755 - DNA, 51 bp, Homo sapiens; identical to SEQ ID NO: 50531
  chr13:32903578-32903629
  hypo

SEQ ID NO: 85756 - DNA, 160 bp, Homo sapiens; identical to SEQ ID NO: 50532
  chr13:32905054-32905214
  hypo

SEQ ID NO: 85757 - DNA, 1117 bp, Homo sapiens; identical to SEQ ID NO: 50533
  chr13:32906407-32907524
  hypo

SEQ ID NO: 85758 - DNA, 4933 bp, Homo sapiens; identical to SEQ ID NO: 50534
  chr13:32910400-32915333
  hypo

SEQ ID NO: 85759 - DNA, 97 bp, Homo sapiens; identical to SEQ ID NO: 50535
  chr13:32918693-32918790
  hypo

SEQ ID NO: 85760 - DNA, 71 bp, Homo sapiens; identical to SEQ ID NO: 50536
  chr13:32920962-32921033
  hypo

SEQ ID NO: 85761 - DNA, 429 bp, Homo sapiens; identical to SEQ ID NO: 50537
  chr13:32928996-32929425
  hypo

SEQ ID NO: 85762 - DNA, 31 bp, Homo sapiens; identical to SEQ ID NO: 27034
  chr13:32930125-32930156
  hypo

SEQ ID NO: 85763 - DNA, 183 bp, Homo sapiens; identical to SEQ ID NO: 50538
  chr13:32930563-32930746
  hypo

SEQ ID NO: 85764 - DNA, 189 bp, Homo sapiens; identical to SEQ ID NO: 50539
  chr13:32931877-32932066
  hypo

SEQ ID NO: 85765 - DNA, 172 bp, Homo sapiens; identical to SEQ ID NO: 50540
  chr13:32936658-32936830
  hypo

SEQ ID NO: 85766 - DNA, 356 bp, Homo sapiens; identical to SEQ ID NO: 50541
  chr13:32937314-32937670
  hypo

SEQ ID NO: 85767 - DNA, 157 bp, Homo sapiens; identical to SEQ ID NO: 50542
  chr13:32944537-32944694
  hypo

SEQ ID NO: 85768 - DNA, 146 bp, Homo sapiens; identical to SEQ ID NO: 50543
  chr13:32945091-32945237
  hypo

SEQ ID NO: 85769 - DNA, 123 bp, Homo sapiens; identical to SEQ ID NO: 50544
  chr13:32950805-32950928
  hypo

SEQ ID NO: 85770 - DNA, 26 bp, Homo sapiens
  chr13:32951432-32951458
  hypo
acaataaaatagctggccaggcgcgg

SEQ ID NO: 85771 - DNA, 200 bp, Homo sapiens; identical to SEQ ID NO: 50545
  chr13:32953452-32953652
  hypo

SEQ ID NO: 85772 - DNA, 397 bp, Homo sapiens; identical to SEQ ID NO: 50546
  chr13:32953885-32954282
  hypo

SEQ ID NO: 85773 - DNA, 246 bp, Homo sapiens; identical to SEQ ID NO: 50547
  chr13:32968824-32969070
  hypo

SEQ ID NO: 85774 - DNA, 148 bp, Homo sapiens; identical to SEQ ID NO: 50548
  chr13:32971033-32971181
  hypo

SEQ ID NO: 85775 - DNA, 877 bp, Homo sapiens; identical to SEQ ID NO: 50549
  chr13:32972297-32973174
  hypo

SEQ ID NO: 85776 - DNA, 516 bp, Homo sapiens; identical to SEQ ID NO: 50550
  chr13:32973293-32973809
  hypo

SEQ ID NO: 85777 - DNA, 30 bp, Homo sapiens
  chr13:32977271-32977301
  hypo
acatcgtgttcataccgttctttcattcgg

SEQ ID NO: 85778 - DNA, 158 bp, Homo sapiens
  chr13:32983221-32983379
  hypo
gaccaacccagactgtttctacgccacagtaataaacacatcggagcgcgcatgtcaagtagtccttgagatactgcggtgaattaagagggagatgaaagacaaaactaaagtaaaatgcttccattttcaaaaacgagtgaatatacattccagaa

SEQ ID NO: 85779 - DNA, 384 bp, Homo sapiens; identical to SEQ ID NO: 50551
  chr13:33000976-33001360
  hypo

SEQ ID NO: 85780 - DNA, 36 bp, Homo sapiens; identical to SEQ ID NO: 27036
  chr13:33103875-33103911
  hypo

SEQ ID NO: 85781 - DNA, 31 bp, Homo sapiens; identical to SEQ ID NO: 9291
  chr13:33162267-33162298
  hypo

SEQ ID NO: 85782 - DNA, 27 bp, Homo sapiens
  chr13:33257158-33257185
  hypo
tttttttttttgaggcagtctcgccct

SEQ ID NO: 85783 - DNA, 30 bp, Homo sapiens; identical to SEQ ID NO: 50554
  chr13:33590258-33590288
  hypo

SEQ ID NO: 85784 - DNA, 88 bp, Homo sapiens
  chr13:33640653-33640741
  hypo
acactaggcggcggcgctggaggcggggacttcctggccctggtggggcgaagtgcactcattcctccaccgcgtctcagagcaccgc

SEQ ID NO: 85785 - DNA, 593 bp, Homo sapiens
  chr13:36788447-36789040
  hypo
ggagagtggactcgcgtcctggaaggggcccttcctgctattcgctccccacagttccccgacaatgagagctccccaggccgggctttgagggccgaggggaccaccgacctagggcccgcccgcgaggttataaacgcagctgcctccccttccacagcctcttacctggcccgagatctggcagtgctcctggcagataattgaggaagccatggccgctgcgcacgtgctgggtcctggggcagcctcccagcaggaggagctccacagccgctgcgtcccgggcccgccccctgcactaatggctcctggccgcagctgagggcgagcacgccccaggcgcccttaaagtggccctgtcgccagttctggcgcgtgggggagcagcaggccgctctgaggggtcaacgcggaacccgggtcgggggcctgcccgcgggggctactcaagctgtcctgggggcccttaggagaccgcgtcactagctgactgcgcactccaagtccccttcccagggcagctctcacgacactaagccccgcgtactcactcccactgcgccgcctggggaggcgggaggcaaggcgtc

SEQ ID NO: 85786 - DNA, 30 bp, Homo sapiens
  chr13:36789537-36789567
  hypo
acttcatttttgtgccgtgatttaacaaat

SEQ ID NO: 85787 - DNA, 29 bp, Homo sapiens
  chr13:36852068-36852097
  hypo
aagactccgtctcaaaaaaaaaaaaaaaa

SEQ ID NO: 85788 - DNA, 226 bp, Homo sapiens
  chr13:36909034-36909260
  hypo
taaaaacaaagtagaatttgtcgttatctttttgcacttatactggacacataaacattaacaaataaaaatgatgtagtctacacgtatttcaaattatgctttcatttttctttcgcttacctgaagaaacccgggaggacggtttagaaccgtatcgagagaattatccaaaaacctcacaattcgaaggtacccaggatacgaaggtgcactaacctcccct

SEQ ID NO: 85789 - DNA, 150 bp, Homo sapiens; identical to SEQ ID NO: 9303
  chr13:37005430-37005580
  hypo

SEQ ID NO: 85790 - DNA, 163 bp, Homo sapiens; identical to SEQ ID NO: 9304
  chr13:37005899-37006062
  hypo

SEQ ID NO: 85791 - DNA, 224 bp, Homo sapiens; identical to SEQ ID NO: 9305
  chr13:37006433-37006657
  hypo

SEQ ID NO: 85792 - DNA, 64 bp, Homo sapiens; identical to SEQ ID NO: 50570
  chr13:37006733-37006797
  hypo

SEQ ID NO: 85793 - DNA, 30 bp, Homo sapiens; identical to SEQ ID NO: 50574
  chr13:37357329-37357359
  hypo

SEQ ID NO: 85794 - DNA, 299 bp, Homo sapiens; identical to SEQ ID NO: 50575
  chr13:37393237-37393536
  hypo

SEQ ID NO: 85795 - DNA, 163 bp, Homo sapiens
  chr13:37453824-37453987
  hypo
ataagaggccacagcaggctccggcgcgcacgggaaccgcacagcccttcacggcaaagtgggcggcgagtagctctccaggggtggcatagggaccaacccgcccgttcttctgggagcagctgggaccaattcaagttgcgaagtgtgttgactttctcct

SEQ ID NO: 85796 - DNA, 30 bp, Homo sapiens
  chr13:37566847-37566877
  hypo
cccttggtctgaaacgcctcaagaacaaga

SEQ ID NO: 85797 - DNA, 423 bp, Homo sapiens
  chr13:37643589-37644012
  hypo
ccactgccaccccaccggctgcagtggggaggtgcgaggggtggcagcaggaacggctgtgggagcagcagtggcggtggtgggtcccctgtgccccacgtcccggaagcaacctcctgtgctgcccccaaactcatgcagccaggtgggacccgaccctaggcccggagctttcatcactcgggactctggccccacactgctgctctcacccacgcactgctgctgtggggagggcgtggggaggaggcggagctgggcccggggctgtgccacgcttcacgcttcacggaaccagcgggagccaaggacaagcaggagccgccccgcagccccttgggggccgccgctatgaggccaggccaagtcgcccagcccagagggggagtgatggagccacgcgattgggcacagaggagtggg

SEQ ID NO: 85798 - DNA, 389 bp, Homo sapiens
  chr13:37679435-37679824
  hypo
ctaggggaggatggaggcctccggggcccaccggcccgcaaggctgaggatgagggctgctggaaatggccaccgaggcgtttcccggtgttacagggcgtggagtcagcctgatccctgcagcacaccaggatttccgccaggccacagtttgcgagggtttctcaaggttccaggctgggccaccacctctttctcggtggcggtcgctgcctcgctgtcgtggcgatgtcgtgggctgagaaagggggcacagcgagttggggcagcagtactgctgccaccgctaccaacggctgtgggccagagggcccggtcacgccgccggcgccgccattttgttcctccacctcagccaaccacaaatcgagaatttttggagaagctgt

SEQ ID NO: 85799 - DNA, 61 bp, Homo sapiens
  chr13:37838970-37839031
  hypo
ccatgcatccatagcctgtaccggctattctgctccctccgatggcctctgctccagtgtt

SEQ ID NO: 85800 - DNA, 78 bp, Homo sapiens
  chr13:39358215-39358293
  hypo
acagagcgaaactcagtctcaaaaaaaaagctgacttcaggaccagccttggactccggggtccagaccaagtggttc

SEQ ID NO: 85801 - DNA, 34 bp, Homo sapiens; identical to SEQ ID NO: 9311
  chr13:39612008-39612042
  hypo

SEQ ID NO: 85802 - DNA, 1 bp, Homo sapiens
  chr13:39614062-39614063
  hypo
a

SEQ ID NO: 85803 - DNA, 30 bp, Homo sapiens
  chr13:40397655-40397685
  hypo
ccctgtctaaacctacggtagtgctcactg

SEQ ID NO: 85804 - DNA, 225 bp, Homo sapiens
  chr13:40762415-40762640
  hypo
ttcccatcccactcccgcacgcttagccctcgcccccgactccaagctgggggcgacggtgcagattcccagctcatgaaagcagcccaggcgtctgcccagaggtcgcctgccttctcctaccaagaaggaaaggagcacggagacaaaccgactgactcaaaagcccttctttcctaggactcctgccaggacaggaggagaagttgccgctgagacgaggag

SEQ ID NO: 85805 - DNA, 31 bp, Homo sapiens; identical to SEQ ID NO: 27045
  chr13:40956513-40956544
  hypo

SEQ ID NO: 85806 - DNA, 30 bp, Homo sapiens
  chr13:41055573-41055603
  hypo
tagggcagctctgacgatgctgtaaggcca

SEQ ID NO: 85807 - DNA, 30 bp, Homo sapiens; identical to SEQ ID NO: 27046
  chr13:41056273-41056303
  hypo

SEQ ID NO: 85808 - DNA, 30 bp, Homo sapiens
  chr13:41256562-41256592
  hypo
gtgagccaccgcgccggccatagtgcacat

SEQ ID NO: 85809 - DNA, 61 bp, Homo sapiens; identical to SEQ ID NO: 50596
  chr13:41345300-41345361
  hypo

SEQ ID NO: 85810 - DNA, 197 bp, Homo sapiens; identical to SEQ ID NO: 50597
  chr13:41364042-41364239
  hypo

SEQ ID NO: 85811 - DNA, 30 bp, Homo sapiens
  chr13:41500599-41500629
  hypo
tgataatttcctttcgaactgaatctaaca

SEQ ID NO: 85812 - DNA, 121 bp, Homo sapiens
  chr13:41561357-41561478
  hypo
cacagcacccggccgaaaatcactgctctccttttaagttactatggtaccaactgtttatggtgaaaattaataaatagtccggtgccgtggctcacgcctgtatcccagcactttggga

SEQ ID NO: 85813 - DNA, 147 bp, Homo sapiens
  chr13:41567498-41567645
  hypo
ctgcaggtgtgggcagtgcaccgatgggtctggggggagcggggctgggcggctctgtcctctagcggagcccgtttgctactatccgcccaacttaagcacccagcgggcgaggaactagtttttatttattttttagagacaggg

SEQ ID NO: 85814 - DNA, 24 bp, Homo sapiens
  chr13:41687832-41687856
  hypo
ttttttttttttgaaacggggtct

SEQ ID NO: 85815 - DNA, 327 bp, Homo sapiens; identical to SEQ ID NO: 50600
  chr13:41767765-41768092
  hypo

SEQ ID NO: 85816 - DNA, 30 bp, Homo sapiens; identical to SEQ ID NO: 50601
  chr13:41768402-41768432
  hypo

SEQ ID NO: 85817 - DNA, 39 bp, Homo sapiens
  chr13:41884494-41884533
  hypo
agaccagtggccttataaaaccgtaattccggccaggtg

SEQ ID NO: 85818 - DNA, 524 bp, Homo sapiens; identical to SEQ ID NO: 50605
  chr13:42032236-42032760
  hypo

SEQ ID NO: 85819 - DNA, 34 bp, Homo sapiens
  chr13:42600813-42600847
  hypo
gattgcaggtgtgagccaccgctcccggcccact

SEQ ID NO: 85820 - DNA, 30 bp, Homo sapiens
  chr13:42601182-42601212
  hypo
atatcagggtattaacgatggaagataata

SEQ ID NO: 85821 - DNA, 84 bp, Homo sapiens; identical to SEQ ID NO: 50606
  chr13:42615144-42615228
  hypo

SEQ ID NO: 85822 - DNA, 30 bp, Homo sapiens; identical to SEQ ID NO: 50607
  chr13:42615634-42615664
  hypo

SEQ ID NO: 85823 - DNA, 57 bp, Homo sapiens; identical to SEQ ID NO: 9316
  chr13:42615948-42616005
  hypo

SEQ ID NO: 85824 - DNA, 30 bp, Homo sapiens
  chr13:42692954-42692984
  hypo
tgaagggcttgaagcggtggcgtaatttaa

SEQ ID NO: 85825 - DNA, 31 bp, Homo sapiens
  chr13:43179216-43179247
  hypo
ccatgtgtttctttctcgatgaggctctcat

SEQ ID NO: 85826 - DNA, 43 bp, Homo sapiens; identical to SEQ ID NO: 27050
  chr13:43217490-43217533
  hypo

SEQ ID NO: 85827 - DNA, 178 bp, Homo sapiens
  chr13:43543175-43543353
  hypo
gatccataggtggccccgccctccctcattccggcagcggctgtgcttgcttacctagccgtctgggcaccaggtgaaccggtttagctctgttctgctccttccacttctccaggttggccagctcctgctccgcaactaagccaggcgagaaatatcaaatcgtcaattattagac

SEQ ID NO: 85828 - DNA, 598 bp, Homo sapiens; identical to SEQ ID NO: 9320
  chr13:43566053-43566651
  hypo

SEQ ID NO: 85829 - DNA, 85 bp, Homo sapiens
  chr13:43596562-43596647
  hypo
ccaaagagctgccacgttggtacagaagttggaaaacaccatacgcttcaactgctggttaatttttgctctaaaaacttgatgg

SEQ ID NO: 85830 - DNA, 42 bp, Homo sapiens
  chr13:43598747-43598789
  hypo
gggattacaggcgtgagccaccgcgtccggcatatttttaag

SEQ ID NO: 85831 - DNA, 121 bp, Homo sapiens
  chr13:43620968-43621089
  hypo
tggatccagcagggtgtccactgcgtttctgatccagtgaggtgcacattgccgcacctgatcaggctaaaggctcgcctttgttactgcacggctaagtgccctaatcgagctgaacact

SEQ ID NO: 85832 - DNA, 21 bp, Homo sapiens
  chr13:43621268-43621289
  hypo
aagacccgcccgtaacagtgg

SEQ ID NO: 85833 - DNA, 86 bp, Homo sapiens
  chr13:43728027-43728113
  hypo
tgtacttgcctggggcgtgattctggttgcgttgtttttctgacaattcaaccacatttggaattttcttacgtaggatatgggct

SEQ ID NO: 85834 - DNA, 28 bp, Homo sapiens
  chr13:44471009-44471037
  hypo
cagcctcgttttcatacttgatatttca

SEQ ID NO: 85835 - DNA, 30 bp, Homo sapiens
  chr13:44542847-44542877
  hypo
gagcacatctggttcgagaccaacgtgtcc

SEQ ID NO: 85836 - DNA, 31 bp, Homo sapiens
  chr13:44543380-44543411
  hypo
agggcctgaggagggccgctggagacccttc

SEQ ID NO: 85837 - DNA, 178 bp, Homo sapiens
  chr13:44543797-44543975
  hypo
cgtggtacagctggaccgctgggacctccacgctgagcccaaccccgaggcagggcctgaggaccgagatgaaggcgccaccgaccggttgcccctggatgtcttcaacaactacttcagcctgggctttgacgcccacgtcaccctggagttccacgagtctcgagaggccaaccca

SEQ ID NO: 85838 - DNA, 313 bp, Homo sapiens; identical to SEQ ID NO: 50619
  chr13:44544246-44544559
  hypo

SEQ ID NO: 85839 - DNA, 338 bp, Homo sapiens
  chr13:44544878-44545216
  hypo
tcaccctgctcacccacgccccggtcactgcaaggggatgctgcaccccctcaaggtgaagagctgattgaggctgccaagaggaacgacttctgtaagctccaggagctgcaccgagctgggggcgacatcatgcaccgagacaagcagagtcgcacgctcctgcaccacgcagtcagcactggcagcaaggatgtggtccgctacctgctggaccacgctcccccagagatccttgatgcggtggaggaaaacggggagacctgtttgcaccaagcagcggccctgggccagcgcaccatctgccactacatcgtggaggccggggccagaccagc

SEQ ID NO: 85840 - DNA, 21 bp, Homo sapiens
  chr13:44935631-44935652
  hypo
tataggcgtgaaccaccatgc

SEQ ID NO: 85841 - DNA, 104 bp, Homo sapiens
  chr13:44947060-44947164
  hypo
ccagtgtctgggaggcgcgtaaacgcttccatttttatccttccactgcagaaaatgcccagtttagtctgggagacactcagacccctcgggacaagggtggc

SEQ ID NO: 85842 - DNA, 24 bp, Homo sapiens
  chr13:44950895-44950919
  hypo
gcaagactccgtctaaaaaaaaaa

SEQ ID NO: 85843 - DNA, 18 bp, Homo sapiens
  chr13:44955224-44955242
  hypo
gggtagcatttggcagcg

SEQ ID NO: 85844 - DNA, 17 bp, Homo sapiens
  chr13:44955661-44955678
  hypo
agcgagactgcgtctca

SEQ ID NO: 85845 - DNA, 25 bp, Homo sapiens
  chr13:44969723-44969748
  hypo
aggaagactccgtctcaaaaaaaaa

SEQ ID NO: 85846 - DNA, 206 bp, Homo sapiens; identical to SEQ ID NO: 50622
  chr13:44991618-44991824
  hypo

SEQ ID NO: 85847 - DNA, 31 bp, Homo sapiens
  chr13:44994997-44995028
  hypo
gtggcatgggctgccccggtcctggagccca

SEQ ID NO: 85848 - DNA, 104 bp, Homo sapiens; identical to SEQ ID NO: 9329
  chr13:45150766-45150870
  hypo

SEQ ID NO: 85849 - DNA, 30 bp, Homo sapiens; identical to SEQ ID NO: 27059
  chr13:45154385-45154415
  hypo

SEQ ID NO: 85850 - DNA, 31 bp, Homo sapiens
  chr13:45302393-45302424
  hypo
caaattggggttcccacgactccctctttgc

SEQ ID NO: 85851 - DNA, 320 bp, Homo sapiens
  chr13:45383494-45383814
  hypo
ccctgggaaagcacatgctctcgtgcgagctacacaatgtaagcacttacttgtgtttgtcttgtgctttggctgattcgactgccggtggaccttcatgcattcttcctcttgtcgtgtgctctggagaccctgtctgctgctgagtctctcccagggccccacagatgcagccgttccaatgagattgtgaggtaaagttgctcggggaattgttctgaactttcagaaatgccactgtcctacaaggtggagtctgttctcaactgtttgttgttgttttgttttgttttgttttgttttgatacaagttctagctc

SEQ ID NO: 85852 - DNA, 23 bp, Homo sapiens
  chr13:45459147-45459170
  hypo
ataatgaacaagaaaacgactta

SEQ ID NO: 85853 - DNA, 31 bp, Homo sapiens; identical to SEQ ID NO: 27061
  chr13:45465264-45465295
  hypo

SEQ ID NO: 85854 - DNA, 193 bp, Homo sapiens
  chr13:45500373-45500566
  hypo
tgcaagagagaagctacgcagcagatgaatccgaaccaccagcagcaatattcctatggaaataaacaaagacaactaaatgagaaaagttaaaagcggtttattcagaacttgccatagcaagggagccagccaccatcgcttgtgttttggtgagactccaaggcaggcagaggagcgggaaagctttaaa

SEQ ID NO: 85855 - DNA, 109 bp, Homo sapiens
  chr13:45564772-45564881
  hypo
atttgtagactagcaccgacacccagttggagaagagtaaagctgaaagagtaaccctgccatttctgaatctaatttttcttcctggtctacccggaggctatgtttc

SEQ ID NO: 85856 - DNA, 30 bp, Homo sapiens; identical to SEQ ID NO: 27062
  chr13:45767894-45767924
  hypo

SEQ ID NO: 85857 - DNA, 30 bp, Homo sapiens
  chr13:45840995-45841025
  hypo
tgcctgggcaagcacggtggctcacacctg

SEQ ID NO: 85858 - DNA, 30 bp, Homo sapiens
  chr13:45889677-45889707
  hypo
tgaatatttaaaggcgcccttaacctaggg

SEQ ID NO: 85859 - DNA, 301 bp, Homo sapiens
  chr13:45926320-45926621
  hypo
agaatagcgaacgcttccttgtgccagggaaggtggagcagtcatgactcaggcttcgggagcctcaggctcgcagctacaggcttatacacactcacatcaaatgctaatggggcccgagtcagaaagaaattagccagactaagaaaaacaagactttggaaatataaacgtttgaatgaacattttaagcatggtatctgcctgccaccttggttctcaaagtggtctcccagaccttttcagggatctattacatcaaaactattttcagggtttttttttttttttttgagactga

SEQ ID NO: 85860 - DNA, 23 bp, Homo sapiens
  chr13:45933586-45933609
  hypo
accgcgcccggcccaagtttctt

SEQ ID NO: 85861 - DNA, 105 bp, Homo sapiens
  chr13:45936012-45936117
  hypo
tagagacgggttttcactgtgttagccaggatggacactttcttcttcctttggaaatacatcctctggtttccctcctccctcgctggcctctcctctcagact

SEQ ID NO: 85862 - DNA, 30 bp, Homo sapiens
  chr13:45936532-45936562
  hypo
ccatccctttcttgccgtcttgactgaacg

SEQ ID NO: 85863 - DNA, 163 bp, Homo sapiens
  chr13:45965400-45965563
  hypo
cgcagaacccgcggcgccagcaccagcgccagcagcagccccagggctaaccccaggcggccaccgcgcgccatcgtcccgaggagagggcggccgggagggagacgctgagcgagcgacaacagcggcagctcgggaatgggggctcggagcgcggcggcca

SEQ ID NO: 85864 - DNA, 137 bp, Homo sapiens; identical to SEQ ID NO: 27066
  chr13:46037881-46038018
  hypo

SEQ ID NO: 85865 - DNA, 31 bp, Homo sapiens; identical to SEQ ID NO: 27067
  chr13:46048626-46048657
  hypo

SEQ ID NO: 85866 - DNA, 88 bp, Homo sapiens; identical to SEQ ID NO: 27068
  chr13:46287704-46287792
  hypo

SEQ ID NO: 85867 - DNA, 78 bp, Homo sapiens
  chr13:46288450-46288528
  hypo
ctctacgccttcatgccggccaggagccaggaccccaagaagcctagcagggtctgaggcctcggccttgcaccggga

SEQ ID NO: 85868 - DNA, 88 bp, Homo sapiens
  chr13:46318162-46318250
  hypo
atgccatcttcatagcaattccgtccctcaccactaagtttaaaacttcaccatttcaggccgggggcggtggctcaagcctgtaatc

SEQ ID NO: 85869 - DNA, 28 bp, Homo sapiens
  chr13:46318489-46318517
  hypo
agactccgtctcaaaaaacaaaaaacaa

SEQ ID NO: 85870 - DNA, 30 bp, Homo sapiens
  chr13:46357889-46357919
  hypo
cgtggccaggaagacgatctcggctccctg

SEQ ID NO: 85871 - DNA, 30 bp, Homo sapiens
  chr13:46358159-46358189
  hypo
gctctgagtgacggcgcgccgactggacac

SEQ ID NO: 85872 - DNA, 31 bp, Homo sapiens; identical to SEQ ID NO: 27070
  chr13:46444487-46444518
  hypo

SEQ ID NO: 85873 - DNA, 108 bp, Homo sapiens
  chr13:46543044-46543152
  hypo
cattggatggggagcgaagacgaccagacgtatgactacggttactccgattgctcccgaggctgctgctcctcttttgatccataggcttgcgatgctgtgcatctt

SEQ ID NO: 85874 - DNA, 30 bp, Homo sapiens
  chr13:46549520-46549550
  hypo
ccctttggcgttctcgttctttatcccttt

SEQ ID NO: 85875 - DNA, 30 bp, Homo sapiens; identical to SEQ ID NO: 27072
  chr13:46559599-46559629
  hypo

SEQ ID NO: 85876 - DNA, 17 bp, Homo sapiens
  chr13:46622414-46622431
  hypo
caaactttgaagatttc

SEQ ID NO: 85877 - DNA, 75 bp, Homo sapiens
  chr13:46660688-46660763
  hypo
tgggaggaagtgagtgctgattggttcatgggtggccataggcgggtgcggaaaaatcaccgtcagttcccactg

SEQ ID NO: 85878 - DNA, 132 bp, Homo sapiens
  chr13:46661314-46661446
  hypo
ggagcatgaggctgccgccctgccatcacagaagggggcgggacttttacctcctcctggcttctgctggctccgtggagcacacagccccagccgtgcctcccgcatggcagcagccgctctagatgggcc

SEQ ID NO: 85879 - DNA, 43 bp, Homo sapiens; identical to SEQ ID NO: 27074
  chr13:46946400-46946443
  hypo

SEQ ID NO: 85880 - DNA, 121 bp, Homo sapiens; identical to SEQ ID NO: 27075
  chr13:46948514-46948635
  hypo

SEQ ID NO: 85881 - DNA, 77 bp, Homo sapiens
  chr13:48318850-48318927
  hypo
agcactgactcctccctcttgcgtctatccttatattgaattaaaccggaaatagcggtccatgtgaccttcctcta

SEQ ID NO: 85882 - DNA, 27 bp, Homo sapiens
  chr13:48545073-48545100
  hypo
ttaaggagaatggtgtgaacccgggag

SEQ ID NO: 85883 - DNA, 27 bp, Homo sapiens
  chr13:48545159-48545186
  hypo
gactccgtctcaaaaaaaaactaaaaa

SEQ ID NO: 85884 - DNA, 41 bp, Homo sapiens; identical to SEQ ID NO: 27076
  chr13:48731918-48731959
  hypo

SEQ ID NO: 85885 - DNA, 27 bp, Homo sapiens
  chr13:48747095-48747122
  hypo
ttgttttgttttgttttgagacggagt

SEQ ID NO: 85886 - DNA, 27 bp, Homo sapiens
  chr13:48747421-48747448
  hypo
atgctcggggaaacataaacacactac

SEQ ID NO: 85887 - DNA, 31 bp, Homo sapiens; identical to SEQ ID NO: 27077
  chr13:48759963-48759994
  hypo

SEQ ID NO: 85888 - DNA, 30 bp, Homo sapiens
  chr13:49076984-49077014
  hypo
acgtgcccaccctgcgtcttggccgcagac

SEQ ID NO: 85889 - DNA, 30 bp, Homo sapiens
  chr13:49168112-49168142
  hypo
gaagatcatcttgtcgggataagtgaatga

SEQ ID NO: 85890 - DNA, 30 bp, Homo sapiens; identical to SEQ ID NO: 27078
  chr13:49752543-49752573
  hypo

SEQ ID NO: 85891 - DNA, 37 bp, Homo sapiens; identical to SEQ ID NO: 27079
  chr13:49848523-49848560
  hypo

SEQ ID NO: 85892 - DNA, 30 bp, Homo sapiens
  chr13:49879703-49879733
  hypo
atgcttcgtgcccacggccctccctgcagc

SEQ ID NO: 85893 - DNA, 279 bp, Homo sapiens
  chr13:49884959-49885238
  hypo
gttttcttcaagtctcggatctgtttaatcaagtagttcttctcgtcagcgaactgctcatcatccgtcctttctttttggaagctgctcagaaactcaatgagtttgggctgattttttaacaggatctccacaataggctgtgttttgtgaggactggccacaaacacctgaaacaaaaagaaacaaatacttaggagtgcaagccagggacctcacccacgctacagcagtgcaggccagggacctcacccacactactcgcgtttcatgcgtgac

SEQ ID NO: 85894 - DNA, 122 bp, Homo sapiens
  chr13:49914521-49914643
  hypo
agtgggaggaatgagcgcagccaggacggaggacaagagatcaggaactgaagagggtgacaaactcctagccctcggagagtcaagtgcgaggggagagtgtgtgccgctgtgtaatgagg

SEQ ID NO: 85895 - DNA, 255 bp, Homo sapiens
  chr13:49922187-49922442
  hypo
cagggagaccataggacgctggcaggctgaatggaggcctgtggacacccgagcaggctgcaaactccttcccttcaaacccggacgctagaggccttgtgtttgttgcagttttgcctgaggctttggggaaatgatggcattgcggttcctttcctctgatgtctcgggcaattcagtgcttgtccgaaacccgcacaccctcctgcttacgacaacaaaagtgccacagtggccgggcgcagtgactcacac

SEQ ID NO: 85896 - DNA, 30 bp, Homo sapiens; identical to SEQ ID NO: 27081
  chr13:50262868-50262898
  hypo

SEQ ID NO: 85897 - DNA, 18 bp, Homo sapiens
  chr13:50367845-50367863
  hypo
aagagctgctttcggccg

SEQ ID NO: 85898 - DNA, 183 bp, Homo sapiens
  chr13:50411346-50411529
  hypo
gacagccccaactgctcgagacgtgcccaaaggtgaggaactccctagtacttccaggttttcacacaaatctgaatggctcaatgggaccccacagggatccccaggccccgatagatgctagagattcgacaggaggctgaggggagggatggatggggtatcagccgaacccactgccac

SEQ ID NO: 85899 - DNA, 31 bp, Homo sapiens
  chr13:50528477-50528508
  hypo
gtgcccggccgagaaaaaattttttgaggtg

SEQ ID NO: 85900 - DNA, 30 bp, Homo sapiens; identical to SEQ ID NO: 27082
  chr13:50702395-50702425
  hypo

SEQ ID NO: 85901 - DNA, 30 bp, Homo sapiens
  chr13:51575223-51575253
  hypo
aagagggtcgagatacgcgtgagccccagg

SEQ ID NO: 85902 - DNA, 30 bp, Homo sapiens
  chr13:51826071-51826101
  hypo
accagctgattctccggaggagccccagcc

SEQ ID NO: 85903 - DNA, 33 bp, Homo sapiens
  chr13:52242303-52242336
  hypo
cgcacccggcccggaacttctcatttttattgg

SEQ ID NO: 85904 - DNA, 93 bp, Homo sapiens; identical to SEQ ID NO: 27083
  chr13:52334719-52334812
  hypo

SEQ ID NO: 85905 - DNA, 30 bp, Homo sapiens; identical to SEQ ID NO: 27084
  chr13:52335568-52335598
  hypo

SEQ ID NO: 85906 - DNA, 183 bp, Homo sapiens; identical to SEQ ID NO: 27085
  chr13:52335913-52336096
  hypo

SEQ ID NO: 85907 - DNA, 30 bp, Homo sapiens; identical to SEQ ID NO: 27086
  chr13:52336387-52336417
  hypo

SEQ ID NO: 85908 - DNA, 101 bp, Homo sapiens
  chr13:52343292-52343393
  hypo
ttgaaagaagcggccgctgggctgtgcggctgcggcagaggagagggccagccacagcatggtgtccgcgccctgggcctcggagcgcaggcggtccccga

SEQ ID NO: 85909 - DNA, 199 bp, Homo sapiens
  chr13:52390090-52390289
  hypo
ggtttatgccacccagccagccgcagatcatagagaggtacttgaatagccagaggcagagacagactcaaggccaagcaaagaacctgcagcagcggcacacggtgcacacggcgctgcactccgcaatgcctgtagcaggccagcccgccccctatgtggaagctactgctttgacgttgttagattttatagctga

SEQ ID NO: 85910 - DNA, 165 bp, Homo sapiens
  chr13:52532585-52532750
  hypo
atgcttgtggccaggacgatgagcacgtccatgttggctgacctgtgtctcagagatttgtaggcctgaacgtagaagtaccacccaccgaggagctgaaagacaaggacagtgaaggctgccagcaagtagggaggagagttcaatgagcgacacagggccaag

SEQ ID NO: 85911 - DNA, 38 bp, Homo sapiens; identical to SEQ ID NO: 27088
  chr13:52564915-52564953
  hypo

SEQ ID NO: 85912 - DNA, 38 bp, Homo sapiens; identical to SEQ ID NO: 27089
  chr13:52565192-52565230
  hypo

SEQ ID NO: 85913 - DNA, 261 bp, Homo sapiens; identical to SEQ ID NO: 50670
  chr13:52585299-52585560
  hypo

SEQ ID NO: 85914 - DNA, 30 bp, Homo sapiens
  chr13:52699290-52699320
  hypo
gtggtctcaatgatcgtcatcctaaattct

SEQ ID NO: 85915 - DNA, 30 bp, Homo sapiens; identical to SEQ ID NO: 50672
  chr13:52702429-52702459
  hypo

SEQ ID NO: 85916 - DNA, 351 bp, Homo sapiens; identical to SEQ ID NO: 50673
  chr13:52702766-52703117
  hypo

SEQ ID NO: 85917 - DNA, 31 bp, Homo sapiens; identical to SEQ ID NO: 27090
  chr13:52732303-52732334
  hypo

SEQ ID NO: 85918 - DNA, 31 bp, Homo sapiens
  chr13:53171462-53171493
  hypo
agtctctgcagcctcccgttctctaggcctg

SEQ ID NO: 85919 - DNA, 1391 bp, Homo sapiens; identical to SEQ ID NO: 50689
  chr13:53424662-53426053
  hypo

SEQ ID NO: 85920 - DNA, 30 bp, Homo sapiens; identical to SEQ ID NO: 27092
  chr13:60422151-60422181
  hypo

SEQ ID NO: 85921 - DNA, 161 bp, Homo sapiens; identical to SEQ ID NO: 27093
  chr13:60492534-60492695
  hypo

SEQ ID NO: 85922 - DNA, 30 bp, Homo sapiens; identical to SEQ ID NO: 27094
  chr13:60587328-60587358
  hypo

SEQ ID NO: 85923 - DNA, 214 bp, Homo sapiens; identical to SEQ ID NO: 50701
  chr13:60972271-60972485
  hypo

SEQ ID NO: 85924 - DNA, 30 bp, Homo sapiens; identical to SEQ ID NO: 50704
  chr13:67797088-67797118
  hypo

SEQ ID NO: 85925 - DNA, 30 bp, Homo sapiens; identical to SEQ ID NO: 50705
  chr13:67798990-67799020
  hypo

SEQ ID NO: 85926 - DNA, 244 bp, Homo sapiens; identical to SEQ ID NO: 50706
  chr13:67799456-67799700
  hypo

SEQ ID NO: 85927 - DNA, 33 bp, Homo sapiens; identical to SEQ ID NO: 50707
  chr13:67801106-67801139
  hypo

SEQ ID NO: 85928 - DNA, 255 bp, Homo sapiens; identical to SEQ ID NO: 50708
  chr13:67801446-67801701
  hypo

SEQ ID NO: 85929 - DNA, 30 bp, Homo sapiens; identical to SEQ ID NO: 50709
  chr13:67802379-67802409
  hypo

SEQ ID NO: 85930 - DNA, 30 bp, Homo sapiens; identical to SEQ ID NO: 50714
  chr13:67806732-67806762
  hypo

SEQ ID NO: 85931 - DNA, 31 bp, Homo sapiens; identical to SEQ ID NO: 27095
  chr13:70989770-70989801
  hypo

SEQ ID NO: 85932 - DNA, 30 bp, Homo sapiens
  chr13:72249070-72249100
  hypo
aaaacacatacaaacggtgttcgcagccgc

SEQ ID NO: 85933 - DNA, 30 bp, Homo sapiens; identical to SEQ ID NO: 9374
  chr13:72966642-72966672
  hypo

SEQ ID NO: 85934 - DNA, 84 bp, Homo sapiens; identical to SEQ ID NO: 27097
  chr13:73324106-73324190
  hypo

SEQ ID NO: 85935 - DNA, 30 bp, Homo sapiens; identical to SEQ ID NO: 27098
  chr13:73394526-73394556
  hypo

SEQ ID NO: 85936 - DNA, 30 bp, Homo sapiens
  chr13:73636245-73636275
  hypo
gccaccagagtgaaacgactgcccctcctc

SEQ ID NO: 85937 - DNA, 87 bp, Homo sapiens
  chr13:73636810-73636897
  hypo
atacaatagaaggagtaaccccgatttggagaaacgacgcatccactactgcgattaccctggtatgtgctcttacctggttgaagc

SEQ ID NO: 85938 - DNA, 27 bp, Homo sapiens
  chr13:73636956-73636983
  hypo
acgcgcgtgcccttttcaacctcatgg

SEQ ID NO: 85939 - DNA, 30 bp, Homo sapiens
  chr13:73640051-73640081
  hypo
aggaacttgacctgccggcaaatacattta

SEQ ID NO: 85940 - DNA, 39 bp, Homo sapiens
  chr13:73642916-73642955
  hypo
tagcttttggttttaaaatctcgataatatttggctggg

SEQ ID NO: 85941 - DNA, 30 bp, Homo sapiens; identical to SEQ ID NO: 50722
  chr13:73811863-73811893
  hypo

SEQ ID NO: 85942 - DNA, 30 bp, Homo sapiens; identical to SEQ ID NO: 50723
  chr13:73814875-73814905
  hypo

SEQ ID NO: 85943 - DNA, 204 bp, Homo sapiens
  chr13:73824307-73824511
  hypo
acaagatgagggtttacgttgatctcatttaagtccagatgtaggcaagctggtctgttatatggcggctccctgatgtcatcaggaatcaggctctctgctctcatcctcaggctcacaaaatggttgttgcagctccggcaatcacaaccatgactcaagaagaaaaaagaggaagagcggcatgagcgaagaggatctgct

SEQ ID NO: 85944 - DNA, 30 bp, Homo sapiens; identical to SEQ ID NO: 50724
  chr13:73916612-73916642
  hypo

SEQ ID NO: 85945 - DNA, 30 bp, Homo sapiens; identical to SEQ ID NO: 50725
  chr13:73957665-73957695
  hypo

SEQ ID NO: 85946 - DNA, 102 bp, Homo sapiens
  chr13:73972454-73972556
  hypo
ttgtgcatggcacataacattcggtgacttgtattggcatattcgtttacatgtgtcactgctgtacctgtaatttagtttaatgccagatcaatgtgccaa

SEQ ID NO: 85947 - DNA, 39 bp, Homo sapiens
  chr13:74248144-74248183
  hypo
gagccaccatgcccagccgtgttttctttattgtacaac

SEQ ID NO: 85948 - DNA, 76 bp, Homo sapiens
  chr13:74352827-74352903
  hypo
tcaccaaacaacagcctgtcacgcaggtattattctcactttgccaacgagaaacgcaagcttagagaggttatgt

SEQ ID NO: 85949 - DNA, 1470 bp, Homo sapiens; identical to SEQ ID NO: 9375
  chr13:74707124-74708594
  hypo

SEQ ID NO: 85950 - DNA, 185 bp, Homo sapiens; identical to SEQ ID NO: 9376
  chr13:74709333-74709518
  hypo

SEQ ID NO: 85951 - DNA, 36 bp, Homo sapiens; identical to SEQ ID NO: 9377
  chr13:75794020-75794056
  hypo

SEQ ID NO: 85952 - DNA, 187 bp, Homo sapiens
  chr13:75936266-75936453
  hypo
tctccgttgcacgccggtgacactgctgcaccgagaccgaaactcctgctgctcatcaaagccagaatcttccaaaatccgctcagggaagcagacccgagagctggtcagggcaggctggctggccccggcaggtaagccaaggtgggtgtcggtgccgtcagcctcctccggcaggcagtctccg

SEQ ID NO: 85953 - DNA, 31 bp, Homo sapiens
  chr13:76043220-76043251
  hypo
gataaaaaactaagctcgcaaagaatggcag

SEQ ID NO: 85954 - DNA, 1104 bp, Homo sapiens; identical to SEQ ID NO: 50731
  chr13:76055017-76056121
  hypo

SEQ ID NO: 85955 - DNA, 30 bp, Homo sapiens
  chr13:76250123-76250153
  hypo
tccctaaaactgcacgtttgtaaaagactc

SEQ ID NO: 85956 - DNA, 33 bp, Homo sapiens
  chr13:76291200-76291233
  hypo
gtaagaacactcttctcggccgggcgcggtggc

SEQ ID NO: 85957 - DNA, 31 bp, Homo sapiens
  chr13:76352060-76352091
  hypo
gtaagccaccgtgcctggccacttctgattt

SEQ ID NO: 85958 - DNA, 152 bp, Homo sapiens
  chr13:76352658-76352810
  hypo
cgcccggccaatcgagtgccttttaacaatgcgcccttaagcagatgtaagcaccgtaaggcatattgagtttttttgaagtcaacacttgaaaatcattggcagtcgttccaggcgtttcacttaacttcgagtttctttgtgctttttat

SEQ ID NO: 85959 - DNA, 24 bp, Homo sapiens
  chr13:77234814-77234838
  hypo
aatgcttataacaagtagaagcgg

SEQ ID NO: 85960 - DNA, 33 bp, Homo sapiens
  chr13:77356968-77357001
  hypo
gccactgcgcccggccacttctgttgtttataa

SEQ ID NO: 85961 - DNA, 1110 bp, Homo sapiens; identical to SEQ ID NO: 50736
  chr13:77459235-77460345
  hypo

SEQ ID NO: 85962 - DNA, 55 bp, Homo sapiens
  chr13:77553626-77553681
  hypo
tgaagcccggctgggtcgctggagatccagcggagtgtgcggagggaggcgtgtt

SEQ ID NO: 85963 - DNA, 31 bp, Homo sapiens; identical to SEQ ID NO: 27106
  chr13:77850148-77850179
  hypo

SEQ ID NO: 85964 - DNA, 17 bp, Homo sapiens
  chr13:78081917-78081934
  hypo
ggcgtaactcatagtaa

SEQ ID NO: 85965 - DNA, 378 bp, Homo sapiens; identical to SEQ ID NO: 50741
  chr13:78271861-78272239
  hypo

SEQ ID NO: 85966 - DNA, 30 bp, Homo sapiens; identical to SEQ ID NO: 9382
  chr13:78272624-78272654
  hypo

SEQ ID NO: 85967 - DNA, 21 bp, Homo sapiens
  chr13:78925931-78925952
  hypo
tgagaaggagcctcactctgt

SEQ ID NO: 85968 - DNA, 264 bp, Homo sapiens; identical to SEQ ID NO: 9384
  chr13:79169849-79170113
  hypo

SEQ ID NO: 85969 - DNA, 36 bp, Homo sapiens; identical to SEQ ID NO: 9385
  chr13:79170347-79170383
  hypo

SEQ ID NO: 85970 - DNA, 778 bp, Homo sapiens; identical to SEQ ID NO: 9386
  chr13:79170467-79171245
  hypo

SEQ ID NO: 85971 - DNA, 272 bp, Homo sapiens; identical to SEQ ID NO: 50751
  chr13:79175671-79175943
  hypo

SEQ ID NO: 85972 - DNA, 48 bp, Homo sapiens; identical to SEQ ID NO: 50752
  chr13:79176077-79176125
  hypo

SEQ ID NO: 85973 - DNA, 144 bp, Homo sapiens; identical to SEQ ID NO: 9387
  chr13:79176276-79176420
  hypo

SEQ ID NO: 85974 - DNA, 576 bp, Homo sapiens; identical to SEQ ID NO: 9388
  chr13:79176608-79177184
  hypo

SEQ ID NO: 85975 - DNA, 317 bp, Homo sapiens; identical to SEQ ID NO: 9389
  chr13:79177305-79177622
  hypo

SEQ ID NO: 85976 - DNA, 120 bp, Homo sapiens; identical to SEQ ID NO: 9390
  chr13:79177885-79178005
  hypo

SEQ ID NO: 85977 - DNA, 31 bp, Homo sapiens; identical to SEQ ID NO: 9391
  chr13:79979539-79979570
  hypo

SEQ ID NO: 85978 - DNA, 37 bp, Homo sapiens; identical to SEQ ID NO: 27116
  chr13:79992931-79992968
  hypo

SEQ ID NO: 85979 - DNA, 36 bp, Homo sapiens; identical to SEQ ID NO: 27117
  chr13:79993207-79993243
  hypo

SEQ ID NO: 85980 - DNA, 24 bp, Homo sapiens
  chr13:80902405-80902429
  hypo
caccgcgcccggccctgcctggct

SEQ ID NO: 85981 - DNA, 500 bp, Homo sapiens; identical to SEQ ID NO: 50764
  chr13:80916946-80917446
  hypo

SEQ ID NO: 85982 - DNA, 61 bp, Homo sapiens
  chr13:84481753-84481814
  hypo
agctgtgaatcctgcatttgccgttcgtgtttcatctggcggttttgaaaccaggttttca

SEQ ID NO: 85983 - DNA, 52 bp, Homo sapiens
  chr13:87732414-87732466
  hypo
gccattcctggcttgaagattcggcctcaccggggacccaccccttcttgcc

SEQ ID NO: 85984 - DNA, 450 bp, Homo sapiens; identical to SEQ ID NO: 9398
  chr13:88323380-88323830
  hypo

SEQ ID NO: 85985 - DNA, 651 bp, Homo sapiens; identical to SEQ ID NO: 9399
  chr13:88323867-88324518
  hypo

SEQ ID NO: 85986 - DNA, 71 bp, Homo sapiens; identical to SEQ ID NO: 50769
  chr13:88324920-88324991
  hypo

SEQ ID NO: 85987 - DNA, 31 bp, Homo sapiens; identical to SEQ ID NO: 9403
  chr13:90384876-90384907
  hypo

SEQ ID NO: 85988 - DNA, 44 bp, Homo sapiens; identical to SEQ ID NO: 27123
  chr13:91755717-91755761
  hypo

SEQ ID NO: 85989 - DNA, 29 bp, Homo sapiens
  chr13:92834840-92834869
  hypo
gtttcagtgttaagaaaattccgatcgcc

SEQ ID NO: 85990 - DNA, 29 bp, Homo sapiens
  chr13:92835108-92835137
  hypo
gagactccgtctcaaaaaaagaaaaaaaa

SEQ ID NO: 85991 - DNA, 104 bp, Homo sapiens
  chr13:92858651-92858755
  hypo
tcgtgatccacccgcttcggcctcccaaagtgctgggagctcggctcccaaagtgcggtggctggaatgcagccaccgcacccggctgtcatgccatgtatttt

SEQ ID NO: 85992 - DNA, 30 bp, Homo sapiens; identical to SEQ ID NO: 9406
  chr13:93152311-93152341
  hypo

SEQ ID NO: 85993 - DNA, 151 bp, Homo sapiens
  chr13:95061642-95061793
  hypo
ccctggtgaagccagaaccctcgtgggacacagcagccctgctggtcgcactcactaacattttttttttgcggggggtgggtggggcagacggagtctcgttctgctggagtctctcgctctgtcgcccaggctggagtgcagtggcgcc

SEQ ID NO: 85994 - DNA, 819 bp, Homo sapiens; identical to SEQ ID NO: 9413
  chr13:95201108-95201927
  hypo

SEQ ID NO: 85995 - DNA, 150 bp, Homo sapiens; identical to SEQ ID NO: 27126
  chr13:95238871-95239021
  hypo

SEQ ID NO: 85996 - DNA, 201 bp, Homo sapiens; identical to SEQ ID NO: 50786
  chr13:95354638-95354839
  hypo

SEQ ID NO: 85997 - DNA, 175 bp, Homo sapiens; identical to SEQ ID NO: 50787
  chr13:95355116-95355291
  hypo

SEQ ID NO: 85998 - DNA, 369 bp, Homo sapiens; identical to SEQ ID NO: 50793
  chr13:95359620-95359989
  hypo

SEQ ID NO: 85999 - DNA, 539 bp, Homo sapiens; identical to SEQ ID NO: 50794
  chr13:95360263-95360802
  hypo

SEQ ID NO: 86000 - DNA, 466 bp, Homo sapiens; identical to SEQ ID NO: 9421
  chr13:95363493-95363959
  hypo

SEQ ID NO: 86001 - DNA, 226 bp, Homo sapiens; identical to SEQ ID NO: 9422
  chr13:95364064-95364290
  hypo

SEQ ID NO: 86002 - DNA, 1127 bp, Homo sapiens; identical to SEQ ID NO: 9423
  chr13:95364329-95365456
  hypo

SEQ ID NO: 86003 - DNA, 198 bp, Homo sapiens
  chr13:95411482-95411680
  hypo
tagaagtgtttgtctgacttgcgctccttgtgcttcttgcccctgtccagctggccccggtgcccgcccccagagccaggagcaggcacgcagcgcagcttccggtccaggccaggcccgcgcagggcgggagcggccccttagaggccctgcgcgccggaggcaagggggcggcgcgaggtccctctcaacccatgt

SEQ ID NO: 86004 - DNA, 974 bp, Homo sapiens; identical to SEQ ID NO: 50800
  chr13:95619807-95620781
  hypo

SEQ ID NO: 86005 - DNA, 165 bp, Homo sapiens; identical to SEQ ID NO: 50801
  chr13:95620853-95621018
  hypo

SEQ ID NO: 86006 - DNA, 160 bp, Homo sapiens
  chr13:95683563-95683723
  hypo
ctgccactgtgtgaatttgggcgactagctgcatcttggataccaaatgagacaaggagcagcgttttcaggcttgacacagaacgctacttaggggaagacatcggcctcccccagcaatctaccttctgttctccacggaccagctctgtgtccacat

SEQ ID NO: 86007 - DNA, 121 bp, Homo sapiens
  chr13:95693146-95693267
  hypo
tgcttctctgtaattcactcccgaagaattctctaactgcagattcgcttattcctcgttcactcacactaccagggagaatccagagcgttgtaaggacgggtgtgcagggactggagga

SEQ ID NO: 86008 - DNA, 30 bp, Homo sapiens; identical to SEQ ID NO: 27134
  chr13:95711730-95711760
  hypo

SEQ ID NO: 86009 - DNA, 109 bp, Homo sapiens; identical to SEQ ID NO: 27135
  chr13:95751945-95752054
  hypo

SEQ ID NO: 86010 - DNA, 92 bp, Homo sapiens; identical to SEQ ID NO: 27136
  chr13:95775583-95775675
  hypo

SEQ ID NO: 86011 - DNA, 154 bp, Homo sapiens
  chr13:95788978-95789132
  hypo
ctcacctaagggtggtggacacgctggggaaggacggggtggagaatcaaacacctgatgatgcaacaagtccctaggaagtgcctgggaacatgcctgccgaacgcccagcctgcccaggcgcacacggctcgccactgccagcatgtgctgc

SEQ ID NO: 86012 - DNA, 43 bp, Homo sapiens
  chr13:95839495-95839538
  hypo
tgaatgcattgttcctgcatgcgggtatcttttttgacaaaga

SEQ ID NO: 86013 - DNA, 138 bp, Homo sapiens
  chr13:95852550-95852688
  hypo
tttagtcttaagttatcctgacgtcgtttctatttgctacacatattttgacctcatgcgtttttttatcacacaactagggcaaggtttcccaaagacagcatattttcagggacacgaggacactttctaaagata

SEQ ID NO: 86014 - DNA, 95 bp, Homo sapiens
  chr13:95869959-95870054
  hypo
gtgacagtgagactccttctcaaaaattaaaaaaataaataaataaaacaaaagatgcaaaccgcagttcatcaccttcacgatgcaaattcctc

SEQ ID NO: 86015 - DNA, 141 bp, Homo sapiens
  chr13:95888735-95888876
  hypo
tttcatcccaaacaactagcacgggatcaggatatttacagaagacattcccatccctcagatgggtcatgatattaaatcccaacaagcctgtctcggcatgtgaacgcgcgcgtgcgcgcacacacacacacacacact

SEQ ID NO: 86016 - DNA, 30 bp, Homo sapiens; identical to SEQ ID NO: 27138
  chr13:95910917-95910947
  hypo

SEQ ID NO: 86017 - DNA, 21 bp, Homo sapiens
  chr13:95990699-95990720
  hypo
ttttgagatagagtttcgctc

SEQ ID NO: 86018 - DNA, 210 bp, Homo sapiens; identical to SEQ ID NO: 27139
  chr13:96061945-96062155
  hypo

SEQ ID NO: 86019 - DNA, 462 bp, Homo sapiens; identical to SEQ ID NO: 27140
  chr13:96085828-96086290
  hypo

SEQ ID NO: 86020 - DNA, 93 bp, Homo sapiens
  chr13:96126086-96126179
  hypo
ccaggctgttaagcttcggagggaacaaacccctgccctgaaggggctcgcccacagtgaaggaaacagaaataaaaaataaagtattagaat

SEQ ID NO: 86021 - DNA, 31 bp, Homo sapiens; identical to SEQ ID NO: 27142
  chr13:96210199-96210230
  hypo

SEQ ID NO: 86022 - DNA, 185 bp, Homo sapiens; identical to SEQ ID NO: 27143
  chr13:96353303-96353488
  hypo

SEQ ID NO: 86023 - DNA, 154 bp, Homo sapiens; identical to SEQ ID NO: 27144
  chr13:96409577-96409731
  hypo

SEQ ID NO: 86024 - DNA, 30 bp, Homo sapiens
  chr13:96433392-96433422
  hypo
tggtctgggtgggaccgctttttgtttgtt

SEQ ID NO: 86025 - DNA, 30 bp, Homo sapiens
  chr13:96433813-96433843
  hypo
aggagggtaggcaaacgtgtgtgcttacgt

SEQ ID NO: 86026 - DNA, 477 bp, Homo sapiens; identical to SEQ ID NO: 50810
  chr13:96705466-96705943
  hypo

SEQ ID NO: 86027 - DNA, 205 bp, Homo sapiens
  chr13:97980685-97980890
  hypo
aaccttagggccagcacttgccgttccgcggcctggcctgcttgcttgaaaatatcatcatgcacctacagcagcaagtgctgccaaggtggcactgaaagaggcaaaattcagaaaatcaggttgggattccagcccttcgctagaatcgttttccccaagaaaagtgttgctggagtctgccggtcaatgactcagcccatgt

SEQ ID NO: 86028 - DNA, 229 bp, Homo sapiens
  chr13:97999150-97999379
  hypo
gacaacaccgtaaccgtttgtatggattacataaaggggcgttgcatgagggagaaatgcaaatattttcaccctcctgcacacttgcaggccaaaatcaaagctgcgcagcaccaagccaaccaagctgcggtggccgcccaggcagccgcggccgcggccacagtcatggtaagtgcggccgcccgccgcccctgcaccccggcgcctctgcggaggccgctccggg

SEQ ID NO: 86029 - DNA, 30 bp, Homo sapiens
  chr13:98116566-98116596
  hypo
ctttatggaaacttccgctaagagtaaaac

SEQ ID NO: 86030 - DNA, 81 bp, Homo sapiens; identical to SEQ ID NO: 27147
  chr13:98679645-98679726
  hypo

SEQ ID NO: 86031 - DNA, 91 bp, Homo sapiens
  chr13:98688093-98688184
  hypo
gactggcccaagcccacgcaagagcactttcccactggaagctcaaccagcctttgccacatggagccagcccagatatcagggagactgt

SEQ ID NO: 86032 - DNA, 40 bp, Homo sapiens
  chr13:98695034-98695074
  hypo
acaggcgtgagccaccgcgcccggccggattcaaaaatta

SEQ ID NO: 86033 - DNA, 93 bp, Homo sapiens
  chr13:98761015-98761108
  hypo
ttcatcatcgcaaacacgtatcacttctttgtattgggaacattcgctatcccccttctaggtatttaaactgtatattattgttaactatag

SEQ ID NO: 86034 - DNA, 147 bp, Homo sapiens
  chr13:98768944-98769091
  hypo
ccatcccagactatggcgctttttacagcagtcttagaaaaccaatgcacctttctatctcttgcctctgcctccctctggatatctgcgtctttttcacactgcaaactaaatgtttctttttgtttgtgttttttgagatggagt

SEQ ID NO: 86035 - DNA, 703 bp, Homo sapiens; identical to SEQ ID NO: 50815
  chr13:98795068-98795771
  hypo

SEQ ID NO: 86036 - DNA, 154 bp, Homo sapiens
  chr13:98829227-98829381
  hypo
tcaggcgccgcctcctcgcccctcctgtcgccgtgagccgccttctgccagctgtggaggccccggggcctcggtgccacccgcgggggctgagccactgtgtcgccctcgtccccgctgctgctgctctctccgtgctcggggtcgcaggccg

SEQ ID NO: 86037 - DNA, 22 bp, Homo sapiens
  chr13:98829879-98829901
  hypo
gacagagcgagaccctgtctca

SEQ ID NO: 86038 - DNA, 31 bp, Homo sapiens
  chr13:98861198-98861229
  hypo
aatgagatttggaaaccggatggttttcctg

SEQ ID NO: 86039 - DNA, 420 bp, Homo sapiens
  chr13:98869919-98870339
  hypo
gctcatctcaaccacagtcctcggcggtttgttttctgcattagcttctcatgccagaacaccctcttatttgtttacctgcttagtgttggcctcttgcaggtagagtggccactccttggagggcaaggcctcttgttcttgttcgtcatcatatcctacgccgcagcggtgcctgtgcatgaaactgactggtgacagttctgctcggtcgtttaactatacgagagttggtgctgtcctagcataacaagggaaagagcaagtgggaagagcttctgagtcccttcctcgtgttttcacagcgtgaaggtggggctgggattggagtccggcccgccagaccctcaacttacccatcttctgggcactaagagccgcctcctttgtgagattcgcggacttcctctgcctcctact

SEQ ID NO: 86040 - DNA, 94 bp, Homo sapiens
  chr13:98873756-98873850
  hypo
aagcaccacttggacaattgccgtgaaacctccatttctgccaagctcgtttactgcgtttttgtggacttacgtgcagcttctgtgagcttca

SEQ ID NO: 86041 - DNA, 44 bp, Homo sapiens; identical to SEQ ID NO: 27150
  chr13:98917860-98917904
  hypo

SEQ ID NO: 86042 - DNA, 30 bp, Homo sapiens; identical to SEQ ID NO: 27151
  chr13:98945158-98945188
  hypo

SEQ ID NO: 86043 - DNA, 213 bp, Homo sapiens
  chr13:98965959-98966172
  hypo
gcctttttagcatgagtctatcgtcattcctttagagaaaaaaaatgcggaagaagtaacatggcacaacactgggaagggatcatagggaaggacctgccagccgcctcctcatctcggcccgctctttgctcacctcctcgccccacaagagcgcctgtgatagcccacttttaggaaagactagacttcgagaaaaacccaccaccttgc

SEQ ID NO: 86044 - DNA, 31 bp, Homo sapiens
  chr13:98969018-98969049
  hypo
tggtttgagcagccaccgctgtgatggaacc

SEQ ID NO: 86045 - DNA, 188 bp, Homo sapiens
  chr13:98981024-98981212
  hypo
aggtggcccttgagcacggacagcctggatctgctgggtaaagggagaagttatgtccagggtgggacagagaggacggcgagagatttcctcactactcagaacagcgggaaattcaaaacttagggattatttctgaaattttccatttaaaattttctatttaaaattgacgaagggtaactgaa

SEQ ID NO: 86046 - DNA, 31 bp, Homo sapiens
  chr13:99045547-99045578
  hypo
tcagagcatgggagggcgcagccacatcctc

SEQ ID NO: 86047 - DNA, 368 bp, Homo sapiens
  chr13:99047502-99047870
  hypo
catttggagaaggtgccgaatctccagggggccagagctgccggcgaggaaaggaaccgaaggtttccgccggggagccggggtcgcacccgagccctgcgccgaggagaagccccgcgggtaacaagcaggcggacggagccgcctcggcgcccacggaggaagaggaggaggtcgttaaggataggacccagcagagtaaacctcagcccccgcagccaagcacaggtccagcatcccgggctgccagaggcagcagtacttccattcctttcattgactgcagtgacgtagatagcgaatacgaccttcttagagaacaagcgtcccgatcccggtcccgatcccggtcccggtcccaaacaaat

SEQ ID NO: 86048 - DNA, 31 bp, Homo sapiens; identical to SEQ ID NO: 27153
  chr13:99054006-99054037
  hypo

SEQ ID NO: 86049 - DNA, 31 bp, Homo sapiens; identical to SEQ ID NO: 9440
  chr13:99064433-99064464
  hypo

SEQ ID NO: 86050 - DNA, 377 bp, Homo sapiens
  chr13:99068033-99068410
  hypo
gtgtacccatgcctttcctcacgttgccgtgatacggaagcgcaggttggctcctgtcgattgggatgggtaagatccgaattcgaggtcacacccccgccatggggctgtcttcagctgtaggtgtgggcctcgttgaaccgcatttcctcctgggtgaaatgtggatggcatctcccatgcagggtgttacgcaaatggcacagtgtctggaaggggcttagtatactgcgctgcgcagagaaagcggggaagctgatcattttttaaaaattaactttttatttggaaataattccagagaaaagttgccaagacaatagtgtttctgtatggtctgcacccatcctcttcccgttaacatcttatgtcaccat

SEQ ID NO: 86051 - DNA, 31 bp, Homo sapiens
  chr13:99074470-99074501
  hypo
tgagcttggagggccacgcagtggggccgac

SEQ ID NO: 86052 - DNA, 109 bp, Homo sapiens
  chr13:99095615-99095724
  hypo
agaaagccccctcccaaggcacgtggcatcaatcttgtgtcggtggcaggcagccctcatgtgccagacgccaaatgctcgctgactcgcagatgagccatccccaggg

SEQ ID NO: 86053 - DNA, 44 bp, Homo sapiens
  chr13:99101663-99101707
  hypo
ccctactcgggaaacgtctgcctgttctcgatggtgatggggtg

SEQ ID NO: 86054 - DNA, 102 bp, Homo sapiens
  chr13:99115921-99116023
  hypo
gggtcactcaggggccgacttacgcgtcggaatcctcggagctcgagtcgtcatggctctgctcggccttccatctcttgtacctgtcgatgagctcggtca

SEQ ID NO: 86055 - DNA, 31 bp, Homo sapiens; identical to SEQ ID NO: 50817
  chr13:99129086-99129117
  hypo

SEQ ID NO: 86056 - DNA, 96 bp, Homo sapiens
  chr13:99141396-99141492
  hypo
gcctccacttcccattgcccccgggactaatgtgcatgctcctcagaggggcttcgatgatgatgaagtgaggccgtgtacacagcaagactcatc

SEQ ID NO: 86057 - DNA, 114 bp, Homo sapiens
  chr13:99157092-99157206
  hypo
aggtgtggatggaggcaggttcgggctgatgaggaaggtgcacgtctgtctgggcgacgctgacagagcagcttacctccgtgggagtctgtcgatgtcagggtcatgtgccca

SEQ ID NO: 86058 - DNA, 30 bp, Homo sapiens; identical to SEQ ID NO: 27157
  chr13:99174594-99174624
  hypo

SEQ ID NO: 86059 - DNA, 30 bp, Homo sapiens
  chr13:99188983-99189013
  hypo
gtgctctggggtcccgggagctgccctgac

SEQ ID NO: 86060 - DNA, 113 bp, Homo sapiens; identical to SEQ ID NO: 27158
  chr13:99189689-99189802
  hypo

SEQ ID NO: 86061 - DNA, 30 bp, Homo sapiens
  chr13:99197410-99197440
  hypo
ggttgagggacaggcgtactcctgcacaca

SEQ ID NO: 86062 - DNA, 167 bp, Homo sapiens; identical to SEQ ID NO: 27159
  chr13:99204542-99204709
  hypo

SEQ ID NO: 86063 - DNA, 30 bp, Homo sapiens; identical to SEQ ID NO: 27160
  chr13:99219202-99219232
  hypo

SEQ ID NO: 86064 - DNA, 155 bp, Homo sapiens
  chr13:99219591-99219746
  hypo
ccaccacggaacatacgaccagactgatgccacctccgccctgccaagaagcacatactcaattctggaccagggggttggaaccccaaagcatcataaacttaagcaagcgtttctccagagagatcctatgaggctcccggacatcgttctgt

SEQ ID NO: 86065 - DNA, 330 bp, Homo sapiens; identical to SEQ ID NO: 9441
  chr13:99229763-99230093
  hypo

SEQ ID NO: 86066 - DNA, 30 bp, Homo sapiens
  chr13:99235382-99235412
  hypo
atgcacacatacgcacgcacacacacgttc

SEQ ID NO: 86067 - DNA, 42 bp, Homo sapiens; identical to SEQ ID NO: 27162
  chr13:99293493-99293535
  hypo

SEQ ID NO: 86068 - DNA, 31 bp, Homo sapiens; identical to SEQ ID NO: 27163
  chr13:99329817-99329848
  hypo

SEQ ID NO: 86069 - DNA, 31 bp, Homo sapiens
  chr13:99336418-99336449
  hypo
taagacagtgtgtgtacgtgtggcttaaata

SEQ ID NO: 86070 - DNA, 207 bp, Homo sapiens
  chr13:99376080-99376287
  hypo
agttcaaggaaaaagacgaagacttaaggcatcaaatgcgcacaaggtgggagggtgatgggggcagcagtgagcaccaactcacacgtgcacaggaaggctgtcgggggtgccatcatggttgtggtctgtgaggtcattaatggagcttactgaggtgactgcttgtccaattgtgtagacaatggagagcgacacaatggtcct

SEQ ID NO: 86071 - DNA, 43 bp, Homo sapiens
  chr13:99427800-99427843
  hypo
ccaacaagagcttagacggaggcttctccgccgtggctgtact

SEQ ID NO: 86072 - DNA, 100 bp, Homo sapiens
  chr13:99428267-99428367
  hypo
cttctaagggaccctggagtgcggcctgactgagagagtggatggggaggggatgccgggtctctggctcaggtgttgcgtgttgggagcccactaggta

SEQ ID NO: 86073 - DNA, 142 bp, Homo sapiens
  chr13:99428581-99428723
  hypo
catgtgggccccgcccgggaaggagagctgcctgggagatggggagctgcaagagagcacccagaggggtaaatttgcacaaggccactgcgtacactggtacgtgcttccttgaaaatgtgacattttcaggcagggcgcg

SEQ ID NO: 86074 - DNA, 30 bp, Homo sapiens
  chr13:99444836-99444866
  hypo
gcgacatggaacaaacgtatgctgggtaag

SEQ ID NO: 86075 - DNA, 30 bp, Homo sapiens
  chr13:99460082-99460112
  hypo
gagctatccctgaacgtaagcccagggctt

SEQ ID NO: 86076 - DNA, 21 bp, Homo sapiens
  chr13:99645849-99645870
  hypo
aatacttccactaggtggtgg

SEQ ID NO: 86077 - DNA, 21 bp, Homo sapiens
  chr13:99645989-99646010
  hypo
gtctcaaaaaataaaaataaa

SEQ ID NO: 86078 - DNA, 355 bp, Homo sapiens; identical to SEQ ID NO: 9443
  chr13:99739097-99739452
  hypo

SEQ ID NO: 86079 - DNA, 102 bp, Homo sapiens; identical to SEQ ID NO: 27166
  chr13:99851315-99851417
  hypo

SEQ ID NO: 86080 - DNA, 161 bp, Homo sapiens
  chr13:99851656-99851817
  hypo
aaacgaacaaaacaagactgtgaaaatgaactttacgaataaagcctaaagaagcaaataaaagtcatacttttgccttctataatcagtgttaacattttggcccactggaacctctctttgagggtagggactgtgttgatctacgaatcacagattta

SEQ ID NO: 86081 - DNA, 41 bp, Homo sapiens; identical to SEQ ID NO: 27168
  chr13:99863140-99863181
  hypo

SEQ ID NO: 86082 - DNA, 31 bp, Homo sapiens; identical to SEQ ID NO: 27169
  chr13:99870196-99870227
  hypo

SEQ ID NO: 86083 - DNA, 30 bp, Homo sapiens
  chr13:99917890-99917920
  hypo
acgtgcgtcttcaaacgtttcagcgcatct

SEQ ID NO: 86084 - DNA, 125 bp, Homo sapiens
  chr13:100005096-100005221
  hypo
gtctggaggcagcaccgtcggaaactctctacctccgtctccacccctgtgtccggggtaggggcagtgcacgtgtgttgcaaaggagtccaccaggaatccaaagggagcgaattctcatgtgt

SEQ ID NO: 86085 - DNA, 100 bp, Homo sapiens
  chr13:100020046-100020146
  hypo
atgatcaattggaatcgtctttttcctcctttacgtcagcgacaaaacgtaaactatcagggcggtcggcagtctgagccagcagcgccccctctagaag

SEQ ID NO: 86086 - DNA, 33 bp, Homo sapiens
  chr13:100020350-100020383
  hypo
ttattggttggggggcggcgggtgggaatgtat

SEQ ID NO: 86087 - DNA, 161 bp, Homo sapiens; identical to SEQ ID NO: 27170
  chr13:100035863-100036024
  hypo

SEQ ID NO: 86088 - DNA, 30 bp, Homo sapiens
  chr13:100037055-100037085
  hypo
tgtgatgccagggccgagcgtggcagtgat

SEQ ID NO: 86089 - DNA, 31 bp, Homo sapiens
  chr13:100042130-100042161
  hypo
tgaaacatagggggctcgcaggtttgtagaa

SEQ ID NO: 86090 - DNA, 30 bp, Homo sapiens; identical to SEQ ID NO: 27171
  chr13:100066633-100066663
  hypo

SEQ ID NO: 86091 - DNA, 320 bp, Homo sapiens
  chr13:100067887-100068207
  hypo
ctcaccttctagaaccgacttgaccaggcacagagccgctatctggtgcctttggaaagttgtgtgttcattttttaatttgttcaggcctcacagggcaaagagatgggactggctcctgacgcacccccaacccttggcaatgggccccccttcctgatttttcaggggcctcttccccagggcacatctcccccagcctcagctctgcctggccctcaggaattccagcctcagggttcaccgcgtgctgtggctccctgcctcagccggggtgcctcgtgccccctttgctgccaggacaccgcactagcctcgag

SEQ ID NO: 86092 - DNA, 135 bp, Homo sapiens; identical to SEQ ID NO: 27172
  chr13:100068638-100068773
  hypo

SEQ ID NO: 86093 - DNA, 193 bp, Homo sapiens; identical to SEQ ID NO: 27173
  chr13:100068976-100069169
  hypo

SEQ ID NO: 86094 - DNA, 5 bp, Homo sapiens
  chr13:100151896-100151901
  hypo
cggag

SEQ ID NO: 86095 - DNA, 98 bp, Homo sapiens
  chr13:100307597-100307695
  hypo
gggattataggcgtgagccactgcgcctggcctggtgttgcatttcgttactggcaagatgatgtatgctctttcacgtgcccacatgcaaaggtgtg

SEQ ID NO: 86096 - DNA, 186 bp, Homo sapiens
  chr13:100482065-100482251
  hypo
ggtactgtttaatcatttactcgcttgagtgtataagctccgtgagagcggagagcctgtctgcccatagcacacactcaggaaatattgttgaatatgatcattgggttgatggtctcacggggtggcaccaagggggccagcatgtcaagcgtaattcacaccggagcaagctttgggtcacat

SEQ ID NO: 86097 - DNA, 30 bp, Homo sapiens
  chr13:100523145-100523175
  hypo
atctgttcgttgtttcgtggttccgatgtt

SEQ ID NO: 86098 - DNA, 96 bp, Homo sapiens
  chr13:100575432-100575528
  hypo
tttcccaaatatgcacgccctgtaccgccgtcccaggctccgtgccaggcggcagcagccactgtgctcacactcatgtgtcgtgtctctcctccc

SEQ ID NO: 86099 - DNA, 30 bp, Homo sapiens
  chr13:100583874-100583904
  hypo
acaggtgtgtttgggcggcgtactctccac

SEQ ID NO: 86100 - DNA, 110 bp, Homo sapiens; identical to SEQ ID NO: 50830
  chr13:100620374-100620484
  hypo

SEQ ID NO: 86101 - DNA, 104 bp, Homo sapiens; identical to SEQ ID NO: 50831
  chr13:100620515-100620619
  hypo

SEQ ID NO: 86102 - DNA, 1399 bp, Homo sapiens; identical to SEQ ID NO: 9447
  chr13:100620631-100622030
  hypo

SEQ ID NO: 86103 - DNA, 505 bp, Homo sapiens; identical to SEQ ID NO: 50833
  chr13:100622155-100622660
  hypo

SEQ ID NO: 86104 - DNA, 1229 bp, Homo sapiens; identical to SEQ ID NO: 50838
  chr13:100631530-100632759
  hypo

SEQ ID NO: 86105 - DNA, 379 bp, Homo sapiens; identical to SEQ ID NO: 9451
  chr13:100633419-100633798
  hypo

SEQ ID NO: 86106 - DNA, 602 bp, Homo sapiens; identical to SEQ ID NO: 50840
  chr13:100634142-100634744
  hypo

SEQ ID NO: 86107 - DNA, 96 bp, Homo sapiens
  chr13:100678150-100678246
  hypo
atcggaatcataggttcgttacacacagtgctctatggaaaggattgtcaatgctgtggaagagaactgtgatagaacatcatgaaagtctgaaag

SEQ ID NO: 86108 - DNA, 29 bp, Homo sapiens
  chr13:100878043-100878072
  hypo
agcttttttttttctttgagacgaagagt

SEQ ID NO: 86109 - DNA, 30 bp, Homo sapiens; identical to SEQ ID NO: 27181
  chr13:101178560-101178590
  hypo

SEQ ID NO: 86110 - DNA, 113 bp, Homo sapiens
  chr13:101184479-101184592
  hypo
ggccctgctgtacacgaagcactgcaccgcggtgggcgctggcggctcctctgcgcccggggcccggtcctccagcagctgtacccgcagcaccgtgcgctggtacagggccg

SEQ ID NO: 86111 - DNA, 30 bp, Homo sapiens
  chr13:101184832-101184862
  hypo
agactagggccatccgggcagagctgcagg

SEQ ID NO: 86112 - DNA, 261 bp, Homo sapiens
  chr13:101194462-101194723
  hypo
tagagaactgaagagcaaccccgggtgcacaggagaagcagagcagccgctgacccccccagcaagaagacgggtagggtttgtttcatgggacaagatcgtccttcatgacgctgtggaaacgttggggagagcacggtttgtgccctaggacgctggccttactcttaacagatccagtccacgaaagtaaatctaaaaagcgtgttccagcctgccacgctgtcatccctcgtgcacggatttcctcatagcatctta

SEQ ID NO: 86113 - DNA, 30 bp, Homo sapiens
  chr13:101297345-101297375
  hypo
gtgagccactgcacccggcctgaacattct

SEQ ID NO: 86114 - DNA, 57 bp, Homo sapiens
  chr13:101297850-101297907
  hypo
tgagcaggtgagccccgtgcaccgctccaagtccctgactgccgctgtgaggtgagc

SEQ ID NO: 86115 - DNA, 15 bp, Homo sapiens
  chr13:101302747-101302762
  hypo
gcctggcatctccac

SEQ ID NO: 86116 - DNA, 58 bp, Homo sapiens; identical to SEQ ID NO: 27185
  chr13:101302821-101302879
  hypo

SEQ ID NO: 86117 - DNA, 210 bp, Homo sapiens; identical to SEQ ID NO: 27186
  chr13:101317802-101318012
  hypo

SEQ ID NO: 86118 - DNA, 208 bp, Homo sapiens; identical to SEQ ID NO: 27187
  chr13:101327900-101328108
  hypo

SEQ ID NO: 86119 - DNA, 30 bp, Homo sapiens; identical to SEQ ID NO: 9456
  chr13:101422012-101422042
  hypo

SEQ ID NO: 86120 - DNA, 30 bp, Homo sapiens; identical to SEQ ID NO: 50852
  chr13:101449976-101450006
  hypo

SEQ ID NO: 86121 - DNA, 138 bp, Homo sapiens; identical to SEQ ID NO: 50854
  chr13:102068219-102068357
  hypo

SEQ ID NO: 86122 - DNA, 228 bp, Homo sapiens; identical to SEQ ID NO: 9459
  chr13:102068417-102068645
  hypo

SEQ ID NO: 86123 - DNA, 259 bp, Homo sapiens; identical to SEQ ID NO: 9460
  chr13:102068811-102069070
  hypo

SEQ ID NO: 86124 - DNA, 108 bp, Homo sapiens; identical to SEQ ID NO: 9462
  chr13:102568659-102568767
  hypo

SEQ ID NO: 86125 - DNA, 705 bp, Homo sapiens; identical to SEQ ID NO: 50859
  chr13:102569312-102570017
  hypo

SEQ ID NO: 86126 - DNA, 22 bp, Homo sapiens
  chr13:102713428-102713450
  hypo
ccatgctggctccacatccatc

SEQ ID NO: 86127 - DNA, 716 bp, Homo sapiens; identical to SEQ ID NO: 50860
  chr13:103046524-103047240
  hypo

SEQ ID NO: 86128 - DNA, 33 bp, Homo sapiens; identical to SEQ ID NO: 27196
  chr13:103262163-103262196
  hypo

SEQ ID NO: 86129 - DNA, 1643 bp, Homo sapiens; identical to SEQ ID NO: 50864
  chr13:103450907-103452550
  hypo

SEQ ID NO: 86130 - DNA, 31 bp, Homo sapiens; identical to SEQ ID NO: 27198
  chr13:103453932-103453963
  hypo

SEQ ID NO: 86131 - DNA, 30 bp, Homo sapiens; identical to SEQ ID NO: 9470
  chr13:103454353-103454383
  hypo

SEQ ID NO: 86132 - DNA, 39 bp, Homo sapiens
  chr13:103456536-103456575
  hypo
acccaggctggagtgcagtggcgcgatcttggctcaacg

SEQ ID NO: 86133 - DNA, 29 bp, Homo sapiens
  chr13:103458965-103458994
  hypo
tgggctatttgctggccgggcatggtggc

SEQ ID NO: 86134 - DNA, 23 bp, Homo sapiens
  chr13:103464143-103464166
  hypo
attacaggcgtgagccaccgtgc

SEQ ID NO: 86135 - DNA, 45 bp, Homo sapiens; identical to SEQ ID NO: 27200
  chr13:103568842-103568887
  hypo

SEQ ID NO: 86136 - DNA, 45 bp, Homo sapiens
  chr13:103569186-103569231
  hypo
ttactccagccacacagccttttcgtatttctatttatttattta

SEQ ID NO: 86137 - DNA, 30 bp, Homo sapiens
  chr13:104859163-104859193
  hypo
tactgcataagcctacgctgtctccttggt

SEQ ID NO: 86138 - DNA, 37 bp, Homo sapiens; identical to SEQ ID NO: 27201
  chr13:106549791-106549828
  hypo

SEQ ID NO: 86139 - DNA, 30 bp, Homo sapiens
  chr13:106705518-106705548
  hypo
tgctgggattacaggcgtgagccactgcgc

SEQ ID NO: 86140 - DNA, 34 bp, Homo sapiens
  chr13:106718243-106718277
  hypo
gcacaagaaaagatgcttggccgggcgcgtggct

SEQ ID NO: 86141 - DNA, 64 bp, Homo sapiens
  chr13:106739740-106739804
  hypo
cttggctctggaaacagctagcgttgggctattcagtatcaccgacttaacaactgtgatatta

SEQ ID NO: 86142 - DNA, 202 bp, Homo sapiens
  chr13:106788530-106788732
  hypo
gcatgcccttgatcatcgccggtgaatagggtcacttgggcttgcagtcagaacatcgcagtctaaaattcattccttaactgtctactgtagttgccttaggcaagtccctacattttcttaaatttcaactttttcatctgcgaaatggagctaaaatacttaaatcttggaattgttgtaaatgcggtagtgtatatta

SEQ ID NO: 86143 - DNA, 31 bp, Homo sapiens
  chr13:106886316-106886347
  hypo
agggaggtttaccagccgcaatgggggagca

SEQ ID NO: 86144 - DNA, 659 bp, Homo sapiens; identical to SEQ ID NO: 27202
  chr13:106912352-106913011
  hypo

SEQ ID NO: 86145 - DNA, 31 bp, Homo sapiens; identical to SEQ ID NO: 27203
  chr13:106915515-106915546
  hypo

SEQ ID NO: 86146 - DNA, 30 bp, Homo sapiens; identical to SEQ ID NO: 27204
  chr13:107027610-107027640
  hypo

SEQ ID NO: 86147 - DNA, 132 bp, Homo sapiens
  chr13:107125446-107125578
  hypo
gcatggaaagctgggctgagccgtgctttttgaagggagctggtgggacacaggcccggcttgtggcagcacgctgaaatgttttctgaattgaagtcgtgtgctctcaccgcacagcagagatggcagtga

SEQ ID NO: 86148 - DNA, 43 bp, Homo sapiens
  chr13:107128749-107128792
  hypo
actcctctctccattttacagcgagaacacttaggactgcaaa

SEQ ID NO: 86149 - DNA, 2699 bp, Homo sapiens; identical to SEQ ID NO: 9472
  chr13:107186447-107189146
  hypo

SEQ ID NO: 86150 - DNA, 53 bp, Homo sapiens
  chr13:107229931-107229984
  hypo
gctggggtgcaacctgggtgtcgttgttttgcgggaggatgggctcacagggc

SEQ ID NO: 86151 - DNA, 169 bp, Homo sapiens
  chr13:107248707-107248876
  hypo
gttcctaaataccctgcccaccgtctcactttctcaccgtggctctcagctgcgacgcgctctccactccctctcctccgacacacctgtcagggatccagactcacgcctactccctccactgagtcttctggcacctcagccctccggtatcttctggaccttagcc

SEQ ID NO: 86152 - DNA, 31 bp, Homo sapiens; identical to SEQ ID NO: 27206
  chr13:108210141-108210172
  hypo

SEQ ID NO: 86153 - DNA, 256 bp, Homo sapiens; identical to SEQ ID NO: 9475
  chr13:108518444-108518700
  hypo

SEQ ID NO: 86154 - DNA, 1037 bp, Homo sapiens; identical to SEQ ID NO: 50876
  chr13:108518708-108519745
  hypo

SEQ ID NO: 86155 - DNA, 195 bp, Homo sapiens; identical to SEQ ID NO: 9478
  chr13:108519901-108520096
  hypo

SEQ ID NO: 86156 - DNA, 225 bp, Homo sapiens; identical to SEQ ID NO: 9479
  chr13:108520309-108520534
  hypo

SEQ ID NO: 86157 - DNA, 124 bp, Homo sapiens; identical to SEQ ID NO: 50879
  chr13:108520701-108520825
  hypo

SEQ ID NO: 86158 - DNA, 168 bp, Homo sapiens; identical to SEQ ID NO: 50880
  chr13:108520915-108521083
  hypo

SEQ ID NO: 86159 - DNA, 38 bp, Homo sapiens
  chr13:108841824-108841862
  hypo
attttttttttttttttgagacggagtctcactctgtc

SEQ ID NO: 86160 - DNA, 84 bp, Homo sapiens; identical to SEQ ID NO: 9482
  chr13:109147713-109147797
  hypo

SEQ ID NO: 86161 - DNA, 124 bp, Homo sapiens; identical to SEQ ID NO: 9483
  chr13:109148154-109148278
  hypo

SEQ ID NO: 86162 - DNA, 31 bp, Homo sapiens
  chr13:109318504-109318535
  hypo
ataagaaagaaggacccgttttctgatgtga

SEQ ID NO: 86163 - DNA, 94 bp, Homo sapiens; identical to SEQ ID NO: 27215
  chr13:109779846-109779940
  hypo

SEQ ID NO: 86164 - DNA, 45 bp, Homo sapiens; identical to SEQ ID NO: 27216
  chr13:109934404-109934449
  hypo

SEQ ID NO: 86165 - DNA, 117 bp, Homo sapiens
  chr13:109985084-109985201
  hypo
gtccaccggacctgccgggtgtagcagagagcaggagggagtgggctgttctcacgtgcggctgctgggaaccctcgctctgccacttactcaccgcaccagcggggacacactgct

SEQ ID NO: 86166 - DNA, 30 bp, Homo sapiens
  chr13:109985621-109985651
  hypo
ggggtggaggtttgtcggggagtgaataga

SEQ ID NO: 86167 - DNA, 30 bp, Homo sapiens; identical to SEQ ID NO: 27218
  chr13:110174216-110174246
  hypo

SEQ ID NO: 86168 - DNA, 30 bp, Homo sapiens; identical to SEQ ID NO: 27219
  chr13:110397628-110397658
  hypo

SEQ ID NO: 86169 - DNA, 73 bp, Homo sapiens
  chr13:110407429-110407502
  hypo
taaaacaagggtagtcttgtccggaattttttcgacaagtaacatgtactgcgagattgcttttcttcttttt

SEQ ID NO: 86170 - DNA, 30 bp, Homo sapiens; identical to SEQ ID NO: 27220
  chr13:110408112-110408142
  hypo

SEQ ID NO: 86171 - DNA, 555 bp, Homo sapiens
  chr13:110424382-110424937
  hypo
ccatctgggtatgggaagtcccgaacaaagaaaggagggcagagaggctcacccggcatgcgctgggcccaggcagcgcagggcagtcatgggtgagggtggccactgagatgacgggatcgggggcggcttctgccgcagacccgggaattcacgtggtcagatggtccctgacttcagtccctattttcggtggttcatagcacggagcggtgcaggtaggtgcacgctcttcccaggtcctctgcagaaggcaaaagttcccagaggcacccaaaccttgctggggaaaaggcttctggccgattcatgaagacccccagaccacacgtctgcatcagttttcctgactaaattggtgggtgctcaacaaacccatcactgcaacacagggcgctccgaacgtggctttcttcttaacctggaagaaggtccgtaactccattcgcccggatagcaaaactgctttcctgctttgctcatccagccaggtctccaatctcacctgctgtttggtgggtcacggcgctcaccgttgggggtgctggccaggaa

SEQ ID NO: 86172 - DNA, 2107 bp, Homo sapiens; identical to SEQ ID NO: 9486
  chr13:110434418-110436525
  hypo

SEQ ID NO: 86173 - DNA, 31 bp, Homo sapiens; identical to SEQ ID NO: 50889
  chr13:110439117-110439148
  hypo

SEQ ID NO: 86174 - DNA, 115 bp, Homo sapiens
  chr13:110486577-110486692
  hypo
ggtgtcactctgggaggagctcgtggaagccctgtcggcactgaccatagtaccttgactaggagaagtttctcaggtatgaccaggaagaggcgggtgatggtgatgataggca

SEQ ID NO: 86175 - DNA, 55 bp, Homo sapiens
  chr13:110525934-110525989
  hypo
atgtctccatgtgagactcaacggtgtcacacacggtggcctcagtgtggcaagg

SEQ ID NO: 86176 - DNA, 30 bp, Homo sapiens
  chr13:110709428-110709458
  hypo
catgaagtcccactgcgcaagcaaagaaaa

SEQ ID NO: 86177 - DNA, 284 bp, Homo sapiens
  chr13:110804669-110804953
  hypo
ctcccacttacttgaacatctcgctcctctctatggtggcgagccaaaagctgtaagcgtttgcgtagtaattgcaggtcccacggccgtgacactcgatgaatggcgcacttctaaactcctccaggcaggagccgggggacgccagggcttggccagagccttctgcaccagcgctggtgtgctgcagaacagatgcgagccgtgagtcagaggttccctccccaaacaccaggaaagagatcgatccttcccaggaaggcgccagggtgttccctctggaa

SEQ ID NO: 86178 - DNA, 30 bp, Homo sapiens; identical to SEQ ID NO: 27223
  chr13:110900678-110900708
  hypo

SEQ ID NO: 86179 - DNA, 131 bp, Homo sapiens; identical to SEQ ID NO: 9488
  chr13:110959517-110959648
  hypo

SEQ ID NO: 86180 - DNA, 390 bp, Homo sapiens; identical to SEQ ID NO: 9489
  chr13:110959752-110960142
  hypo

SEQ ID NO: 86181 - DNA, 840 bp, Homo sapiens; identical to SEQ ID NO: 50895
  chr13:110960344-110961184
  hypo

SEQ ID NO: 86182 - DNA, 66 bp, Homo sapiens
  chr13:110998868-110998934
  hypo
aaatgcaggcaactcatatttcgacggggcaccctccagtgctccgagatggaaattgcctgcatt

SEQ ID NO: 86183 - DNA, 30 bp, Homo sapiens
  chr13:111005705-111005735
  hypo
cttgtctttgatttgcgttaagcagtaaaa

SEQ ID NO: 86184 - DNA, 241 bp, Homo sapiens
  chr13:111006027-111006268
  hypo
acattccaaagtgtggtacttcgggctcttgtaaatgttggaattcctaagactctctctggaggacaggtaagatgtcagtgggaacacacatacacacatgcacgtgcgtgtgtgcacgcacggctggcatgtccatggaaactgccttggcgtggaatgagcagggctgcctctcaatgaggtattccttccctcacaatatagcactggagccatcggtacatgtagaaaagtgtta

SEQ ID NO: 86185 - DNA, 43 bp, Homo sapiens
  chr13:111087190-111087233
  hypo
ctggtagggcacaaaggcagccgtaaggaccatgtggcttttc

SEQ ID NO: 86186 - DNA, 30 bp, Homo sapiens
  chr13:111096179-111096209
  hypo
ccttggccatccctgcgcctccccgaccct

SEQ ID NO: 86187 - DNA, 35 bp, Homo sapiens
  chr13:111109169-111109204
  hypo
tgcgtggaaccccaggcgtccgtggggctgatgcc

SEQ ID NO: 86188 - DNA, 30 bp, Homo sapiens
  chr13:111109482-111109512
  hypo
cgtggggctgatgccgtgcgtctgcgtggg

SEQ ID NO: 86189 - DNA, 104 bp, Homo sapiens; identical to SEQ ID NO: 27227
  chr13:111122537-111122641
  hypo

SEQ ID NO: 86190 - DNA, 249 bp, Homo sapiens
  chr13:111127202-111127451
  hypo
atcacacactccatacacacacgtacccacacacgtgcctatgcacactcacgatcacacacatgcacatacccacacacgtgcctgtgcacacacgatcacacacacgtacatacccacacacgtgcctgtgcacactcacacatgatcgtacactcatacacacacgtacatacccactcgtgcctatgcacgctcacacatgatcacacactcacatacacacacgtgcctatgcatgctcacaca

SEQ ID NO: 86191 - DNA, 171 bp, Homo sapiens; identical to SEQ ID NO: 27228
  chr13:111135307-111135478
  hypo

SEQ ID NO: 86192 - DNA, 47 bp, Homo sapiens
  chr13:111144432-111144479
  hypo
tgggcctccagggtcgcagggagagctggggcggattggactgcctg

SEQ ID NO: 86193 - DNA, 196 bp, Homo sapiens
  chr13:111145417-111145613
  hypo
acacccccatgggtgaaataacgatgagtgacacccccatgggtgaaataacgatgagtgacacccccgcaggtgaaataaataacgatgagtgacacccccgcaggtgaaataaataacgatgagtgacacccccgcaggttttccgggactccgtgggatccgcggcttacacggcttgccaggcaccaagggc

SEQ ID NO: 86194 - DNA, 192 bp, Homo sapiens
  chr13:111168952-111169144
  hypo
actgctgttcccagcactcagcgaggttctcaaggctgaacggtgtccgagggagagtgacttatgggtggcacatctcctgcacggcctgtgcccagctgtgtggggcggctacagctccgatgttgatgcacgtgtgtgtgcagctgtgcagtggcacgtgtggcacacgtacaccctccccagaaaaga

SEQ ID NO: 86195 - DNA, 31 bp, Homo sapiens
  chr13:111171237-111171268
  hypo
cagagcttcataaccacgcaaggacgcttgc

SEQ ID NO: 86196 - DNA, 31 bp, Homo sapiens
  chr13:111171957-111171988
  hypo
cacagaagggaagatacgacctggactccac

SEQ ID NO: 86197 - DNA, 829 bp, Homo sapiens; identical to SEQ ID NO: 50897
  chr13:111213551-111214380
  hypo

SEQ ID NO: 86198 - DNA, 172 bp, Homo sapiens; identical to SEQ ID NO: 9494
  chr13:111268136-111268308
  hypo

SEQ ID NO: 86199 - DNA, 305 bp, Homo sapiens
  chr13:111277408-111277713
  hypo
aatccgagctagtacgtttctcatgcacgtcaccagggctgagtaatgagcgctggacgcctgtgtctggcgggtgggcagcgatgccggagcgatccctgagtcggcctcttgtgctccttcatcagggcgcagacttgtcccacgtgttctgtgccagtgcggccgcacctgtgattaaggcctacagcccggagctgatcgtccacccagttctgtgagtcgctctgcgccggcttctcgtaggttctctttccctcctgcatcatttggggttttggcactgacaccgaaagcgtcctgat

SEQ ID NO: 86200 - DNA, 545 bp, Homo sapiens
  chr13:111278079-111278624
  hypo
gtgtggaggtgttctctctgccgtccaggattgtggccactgagggcttgaaatgtggctgggaggtgcgggagcagagcgtttgctcttgtttacttttcattgtgtgtgtttgcaccgactggattgggctgtgctgctctggagacaagggagaggaggatgtcaggtggtgaaggaaccgtagagagcggcagcagggagggggctgtgagagtgggcagaggggcagttggggcggcagcacagtgtgatgacgcctgggtcgagcccggcctctccacaccagagaggagccggcgcggagctccaggtgcggtgctgtgatgtgtcgggtgaccaagaggtgcagggctgggccccacagggtgtggggctgctgtcagggctgtggctctggccctgagtaagcagggcagggccagtgtgggtcataaaggctcctacgcggctgtggggctgggccggaggctgtggtaaggacctgtgggagggaagggtgcagtcagatggtgagaggggccggattctgggtatgtttggaa

SEQ ID NO: 86201 - DNA, 130 bp, Homo sapiens
  chr13:111280928-111281058
  hypo
gtcatctgaggggcaggcagacgcaggctgacactgcacagaccaggaaaagcggcgtggagtcagcacgggagcccgtctttgagctttaaggtcttacccgctcaccgggaaggaggaggtggccatg

SEQ ID NO: 86202 - DNA, 30 bp, Homo sapiens
  chr13:111281309-111281339
  hypo
gaagtgagggtgtgcgtcgctgcccctgca

SEQ ID NO: 86203 - DNA, 30 bp, Homo sapiens; identical to SEQ ID NO: 27235
  chr13:111287102-111287132
  hypo

SEQ ID NO: 86204 - DNA, 175 bp, Homo sapiens
  chr13:111288423-111288598
  hypo
actggccactcccacggagcctggggaggcttcagcaagagccaagtgagagcagggcagaggccgggcccagcgccagcgaggcatctggggagccgtgcccttgttagcgctgaaaatggaagcccctccattcaggcctggacagatgatgggcagcgaatgtgctcacctg

SEQ ID NO: 86205 - DNA, 260 bp, Homo sapiens
  chr13:111289025-111289285
  hypo
ggccggtggaggcctcgctcggtgttgccctgtatggttgagctgtggtttaaggtgaactctggagtgtgggctgcaggtgagggctccgtccctgggagctggtgggaggagctggaggctggcgccgccctgctcagagctgcctgcttgggctcgtctgaggcggttccgagctgcaggtgtctccaccaacctgctgtgctacacagcggggtctggggcagcctcaccactgcgtgtcttggtttcctcttctg

SEQ ID NO: 86206 - DNA, 283 bp, Homo sapiens
  chr13:111290652-111290935
  hypo
gcccagggtagctgcggcccccggaccacgacgcccacttccccacacctcctgctgtccccctctccgcaggtccagccctctcctggtggccgcgtttggcgcctgctctctcaccaggcagtgcaaccaccaagccttccagaagcacggtcgctccaccaccacctccgacatgatcgccgaggtgggggccgccttcagcaagctctttgaaacctgagcccgcgcagaccagaagtaaacaggcaccttggacgggggagagcgtgtgtgtgatggg

SEQ ID NO: 86207 - DNA, 30 bp, Homo sapiens
  chr13:111294558-111294588
  hypo
aaaaagcatggtcacgggggatgtctgggc

SEQ ID NO: 86208 - DNA, 227 bp, Homo sapiens; identical to SEQ ID NO: 27239
  chr13:111294869-111295096
  hypo

SEQ ID NO: 86209 - DNA, 195 bp, Homo sapiens
  chr13:111295805-111296000
  hypo
tagttctctgttgagagccagcgagacatgtttggcccagagccaggccttcagcacacctgcttgggccccagtcccaagcggcgggaccctcggggtgctgggcagctggtctagagtggcagcccccgtccaggcagcagcagccgagccacaccccaaaagagccagagcgccttgtgctgagaattctac

SEQ ID NO: 86210 - DNA, 200 bp, Homo sapiens
  chr13:111301302-111301502
  hypo
acagcccccagccacgaggggagcaagcacgagccgggaagagagctctgcgctcgcacacgggattcatctccgccgcctctgcccgtttccagcaacacggagccaggcggaaacagtttctccagcccattcgcctccccgactcttcctctcacggcacggctgggctgctttcatcacgcgtaagtgcacaccac

SEQ ID NO: 86211 - DNA, 30 bp, Homo sapiens
  chr13:111303408-111303438
  hypo
gaaccggaagacatcgggggaaaaggtctt

SEQ ID NO: 86212 - DNA, 30 bp, Homo sapiens
  chr13:111303774-111303804
  hypo
cagacagcatggagcgatgctgtgctcagg

SEQ ID NO: 86213 - DNA, 290 bp, Homo sapiens; identical to SEQ ID NO: 27241
  chr13:111305193-111305483
  hypo

SEQ ID NO: 86214 - DNA, 588 bp, Homo sapiens
  chr13:111305919-111306507
  hypo
ctctcagaatgtaaacgcatgcagaattagcctcaatgtgttttcacgcatctcatagttctctgaaaccccaacaacattaaaggcttatcttccctgctcttgcgggggcgggcgctactgcagcgagctatagtagtagttctaatagaaatctggaatctaatctttctagagcattgagtttatacggactaaaggagaaacatattataacttcttcattacacagtattctgacaatgatgtgaaaactcttgaatactgtgggtgcacacggacattaattttttagcgtgttcctgctctgtgccggctgatatcagcaagtttctatactactccggttccaccgtgcaacctgccacggctccctgagaggcaaaatgtggcgacggcagtgtaagctcgtgctggaactctccaggaggtaagcaatctcccagagcccaggccggaggaccggattggccttcaggtggggatggtaacaagccatgtgagccccagtgagctcacgaggtaacagggtgcacactcacagggagcccgctgggtacacatgccagttgccgagggacttcctat

SEQ ID NO: 86215 - DNA, 31 bp, Homo sapiens; identical to SEQ ID NO: 27244
  chr13:111307807-111307838
  hypo

SEQ ID NO: 86216 - DNA, 215 bp, Homo sapiens
  chr13:111330262-111330477
  hypo
cccccaccagggaaatccagccggccaccccggtggaagcccctccagccgccagtgggcagcacgccccaggctgtgtctcttcgaaggagccttggcttctcgttcactcctgtttcacccacgtgagggacaggagcaccggcaacgctttcacctcagatgcaccagcgcacagggagagctgggcggccgggaacccacagaggctcatt

SEQ ID NO: 86217 - DNA, 196 bp, Homo sapiens
  chr13:111334623-111334819
  hypo
catgtgtaagcaaagcccacacggcctgctggtagccacgcctcacacgtggctgatgtgggcgtctgtgttccggcctgtgcggggagcgggacagggcaccacggcgggggaaggaaagaacctgaggggtcagtgctatggatggttaggattcattggcacagtttatggcgcagaaagacagtgcctaaaa

SEQ ID NO: 86218 - DNA, 31 bp, Homo sapiens
  chr13:111337749-111337780
  hypo
gatcctcagggcctcacgtgctcatcttacg

SEQ ID NO: 86219 - DNA, 130 bp, Homo sapiens; identical to SEQ ID NO: 27246
  chr13:111363842-111363972
  hypo

SEQ ID NO: 86220 - DNA, 31 bp, Homo sapiens; identical to SEQ ID NO: 27247
  chr13:111409606-111409637
  hypo

SEQ ID NO: 86221 - DNA, 30 bp, Homo sapiens
  chr13:111468879-111468909
  hypo
aaaggcaaagctatacgcagggccaaatga

SEQ ID NO: 86222 - DNA, 31 bp, Homo sapiens; identical to SEQ ID NO: 27248
  chr13:111481866-111481897
  hypo

SEQ ID NO: 86223 - DNA, 30 bp, Homo sapiens
  chr13:111589075-111589105
  hypo
ctcctgggatttggcggcaactgtgggagg

SEQ ID NO: 86224 - DNA, 356 bp, Homo sapiens; identical to SEQ ID NO: 27249
  chr13:111682504-111682860
  hypo

SEQ ID NO: 86225 - DNA, 48 bp, Homo sapiens
  chr13:111738320-111738368
  hypo
ggttttttgtgccaggtttgtcgatacgtaatccatatatgatagaag

SEQ ID NO: 86226 - DNA, 30 bp, Homo sapiens
  chr13:111774066-111774096
  hypo
agacactgggagacccggtcctctgcgtgc

SEQ ID NO: 86227 - DNA, 561 bp, Homo sapiens
  chr13:111880856-111881417
  hypo
tgttaagagtctatacgtggtcattctctgtatgtttatgtatatttttaagtttctaaaagtttgggaaaaagtaatggcacaattataacattttcgaacaaagatcgagcgtcttagcagatcatcccttgaacaactcggaggacgtcacctgacaggagggtgcatgtggttcaggaaagcggcaggcagacactgctgagcacgggcagacacacacagacattgactctgtgaactctgagtgcgtgagtaacagccaacaaaccacgcacagagccccagcacagaaggtcggaagaggacgtgggaattccgagtttttcagggccatgtctgctctggtggttgaagccagcggtgatgattaactctggactttgctgggttggtgacacgtcacaaatgaaagcgtaaccactgaaacagagggaagcggctgggtggcttccagtcaagcggaagaggcaagtgaggactcacagaagtgtgttcttctcaaaagaggcagaaattcccagccctgtgatggtggagctgcctcggagtggggagggc

SEQ ID NO: 86228 - DNA, 120 bp, Homo sapiens
  chr13:111881626-111881746
  hypo
ccctctgttttaatccgcgtattttaatctactttgcgtatctgtttgtttcactgtgctgtattatctattcctctgcctgtcagttcattaattccctcctcacggtgatactaacct

SEQ ID NO: 86229 - DNA, 103 bp, Homo sapiens
  chr13:111911429-111911532
  hypo
gattcctaaggtttcagcttccgggctctggctcgcagatggcatctctagacctgcccggagccaaggagaactcaccgtcctgaaggaaaggacacgtgcc

SEQ ID NO: 86230 - DNA, 254 bp, Homo sapiens
  chr13:111935986-111936240
  hypo
caggagctggaaaggcgctgagcccaggtggctttcactccctgtgtgtgaggccatcgctcagcatctgcacgctgtctgctgcgtctaacgacccctcctctaggttggggatcctgtccaggagccctgcattttgtcatccagaagccatttgagatgaagagaacatttactaatacaaatgaaaaacaatcacttaggcggtttccccctttgatgcataagaaatcatgatgcggtctttgcttgtc

SEQ ID NO: 86231 - DNA, 30 bp, Homo sapiens
  chr13:111936479-111936509
  hypo
tgagagtgtgggtatcgtgcgcgtcagtgt

SEQ ID NO: 86232 - DNA, 30 bp, Homo sapiens
  chr13:111937037-111937067
  hypo
caccgagcagctgccgtccagtgttgctga

SEQ ID NO: 86233 - DNA, 60 bp, Homo sapiens; identical to SEQ ID NO: 27253
  chr13:111940219-111940279
  hypo

SEQ ID NO: 86234 - DNA, 43 bp, Homo sapiens
  chr13:111943423-111943466
  hypo
agtctgttatgatgtagttctcgcagtctgagaacagaggtca

SEQ ID NO: 86235 - DNA, 30 bp, Homo sapiens
  chr13:111944542-111944572
  hypo
gcagtagcctttctcgtttggagccttcag

SEQ ID NO: 86236 - DNA, 30 bp, Homo sapiens
  chr13:111957372-111957402
  hypo
tgtcctctcggagccggtagcgttgctgtc

SEQ ID NO: 86237 - DNA, 30 bp, Homo sapiens; identical to SEQ ID NO: 27254
  chr13:111967916-111967946
  hypo

SEQ ID NO: 86238 - DNA, 31 bp, Homo sapiens; identical to SEQ ID NO: 27255
  chr13:111980477-111980508
  hypo

SEQ ID NO: 86239 - DNA, 108 bp, Homo sapiens
  chr13:111997495-111997603
  hypo
tgcctccaggaaggacgtggccttgctccaaaaagactttcttatggaagccagtgacgggctggacgctgcctacaagctgtagtcggtaaacccccaggctagaga

SEQ ID NO: 86240 - DNA, 31 bp, Homo sapiens; identical to SEQ ID NO: 27256
  chr13:111999133-111999164
  hypo

SEQ ID NO: 86241 - DNA, 57 bp, Homo sapiens; identical to SEQ ID NO: 27257
  chr13:112051222-112051279
  hypo

SEQ ID NO: 86242 - DNA, 169 bp, Homo sapiens
  chr13:112062636-112062805
  hypo
accagggccctccgccgcaccgcgcaggtgcggggcaggcacatccgcctccgggcccctgggctattgtttgctggtacagactttttttccactttaaaattgtgaagatgaaaacctattctggcgtggggtaaagattctccacagagcccgagtcaagtccaac

SEQ ID NO: 86243 - DNA, 82 bp, Homo sapiens
  chr13:112170645-112170727
  hypo
agcatcctcacctgggccccccggcttcctgctccctgtggtactggacgcggggtgagacgcagacttgctagggccatct

SEQ ID NO: 86244 - DNA, 1009 bp, Homo sapiens
  chr13:112199982-112200991
  hypo
ctggggacttcagtccttgagcggcagcaacgcaaagctccaagtgtgaacaaaagcgaactttttcttgaggccgtgatagaggaatgaccgcctcctgggacctgtggttttcttcggcgcaggagaaggcgacagggccctgtcctcggggatgggcggaggtgctggggatgaaggagggaccctgcgccttctgttctgagcaagcttccagggttccttagctccgcaatgcgttggagactccggcttccttgcacacgtcaggggaggactccacggagcctcgctcctcagaccggggtccggggaccggcggcaccggaatcgcctgggcgcctgtgggactgtcaggccccccccggtctattaaaccggacagcaggcgactgcgcgggacccagggcgactccgacagacggggagccggggggagtgtggtccggagtcgattctcagacgtgagggtgccggagagatcccctgcccggcttgtggagcccgggttgctgggcccgagggtcaggtgaggtcagggatggataaaacggaaaatgtcctcatatattgttcccggagagatgtatttcgagaagaaaatggatgaaaccacttgttaaagccgaaatgtaatggggcacgcagtgggtgtggacgtcaaactcgctgccggccagggggcttgccctgggaaccccactcccgctgaaggccagcagtgagagaggtgggacagcagtttctgcatctgttcgcagcaaggcagtctcttctgcctcgcagtctcgttcaggcaacactgcgggaattcggcgtgcatcgctggcgggccgctgctccctgccgccctcccgggttgtggctgagcccacgggaggcgcgtatttcccacgccatcgctggctgcgcttgctcctgtgggtcctgatgtctcctgagtgagcccccggccatggagcacccagccttggcgtctgctgcgggcgctgggcccctgttcctggct

SEQ ID NO: 86245 - DNA, 30 bp, Homo sapiens
  chr13:112238783-112238813
  hypo
tctccctccgcgctcgcgtccctccttgaa

SEQ ID NO: 86246 - DNA, 66 bp, Homo sapiens; identical to SEQ ID NO: 27259
  chr13:112273029-112273095
  hypo

SEQ ID NO: 86247 - DNA, 30 bp, Homo sapiens
  chr13:112274850-112274880
  hypo
ctcccaggttctcccggttctgcagcccag

SEQ ID NO: 86248 - DNA, 283 bp, Homo sapiens
  chr13:112275479-112275762
  hypo
acgccaaggccatttcgattcatggagaagaaaacgccactggggtctaattaagccattgatttaaaacaatgctcagaaaacggttgcagagactccgtgttccctaagttacgatgagtttgttcctgcccgcagaagccgcctcgcctccgcagtgccacctctgctgcccccagccaccggcacagctgagtcaaggtacaaccgcccagcaacgctttccagcagggaacgttgccctgaacagctctgactgttgagcgcacgttagaaggcgcca

SEQ ID NO: 86249 - DNA, 123 bp, Homo sapiens
  chr13:112297654-112297777
  hypo
caggccttgtggggagccagccgctccggtgtggcgtcgggccctgcagcatagaggctgccctggctctcagccgggcgagcctggtggcctcaggcacacggtgccctcaccagacactca

SEQ ID NO: 86250 - DNA, 386 bp, Homo sapiens
  chr13:112320936-112321322
  hypo
cttgaccgagcatccgctgaggggtaaagcgcctgcggacgctatttcccatcagattttgtgcttcctgtgagcgggtgcctcagctctcaccgtgcaggcgcggagacccccgcagggcccgcggctcccccagcctcacaggccacacccgcgggctccagcccaggcccgcccctgcacaccgaatgcggtgaccttgtggctatttgggcgaatttgaggggactgacagcctctttcatgcaaaggggccattggctcagggagattgtgaacgggacccccggctccaactatagaggggcgagggaggcgtctaatacgagccagcggaagtccccacagtgaagacgctcatccccggagaactgggaagggaccct

SEQ ID NO: 86251 - DNA, 305 bp, Homo sapiens
  chr13:112321605-112321910
  hypo
aaattgaatggggatctgagacgtgcgggatgagtgggactgagcctcctctggagcgtcagctccaggaaaatgctggaggtggagccgattaccaacggggtcacagttgcacccgcaatgtcttcagaagaaatagtccccttcctccctgagcatttcggagctgctctgaggcctggcgaggctccagaaggcccagtgaccttcgcaaggtctgatgtgggctcacagtgtgtggggcggtttccaggcgctcacaaggaccgctgtttcctccggccgcctgccccctgccccctgcc

SEQ ID NO: 86252 - DNA, 30 bp, Homo sapiens
  chr13:112323107-112323137
  hypo
gctggggacaggcccgggggcccacagggt

SEQ ID NO: 86253 - DNA, 180 bp, Homo sapiens
  chr13:112334237-112334417
  hypo
ctcttgcttaaaaaagagtggcgaggctgggcacacaccgacagtgcgcaggcagccatgccgaaccatgtagggacatcgggtacactcaggtcccttgcgccctaacaggaaccaagggccgtcccctgtagaaacgtttcttgcctggtgaccaacgtctggttctagatgtttgct

SEQ ID NO: 86254 - DNA, 88 bp, Homo sapiens
  chr13:112336760-112336848
  hypo
agagaaggagtttgaagactccggcagcatcaagaattttatctaaaaagccagcacctgcccgggcgtcatcccttcactgaccaac

SEQ ID NO: 86255 - DNA, 294 bp, Homo sapiens
  chr13:112559679-112559973
  hypo
cagtggactagcaaggcgggaggagcacgtgtttggagtgtggccccacgtccccgcccccttctgcgtccccgcccccttccgcgtccccgcccccttccgcgtccccgcccccttccgcgtccccgcccccttctgcgtccccgcccccttccgcgtccccgccccctccaccctcagtgactgtcactttctctctcaagctgccctctcacgcctgtgtgccagtgaaggcagggtcagagctctgctcacagctctgacacttcagtggcttcacgtgacacaagtttt

SEQ ID NO: 86256 - DNA, 51 bp, Homo sapiens
  chr13:112573543-112573594
  hypo
tcataaggaccacacggctgaacacctgcccatgccggggactgcgtgaga

SEQ ID NO: 86257 - DNA, 276 bp, Homo sapiens; identical to SEQ ID NO: 27262
  chr13:112618853-112619129
  hypo

SEQ ID NO: 86258 - DNA, 175 bp, Homo sapiens
  chr13:112668108-112668283
  hypo
gttccttgtactcaagcactgcgacccctggaccgtggatctgataaccaagaggccataagaggggcggggagcgtccgcagcctggagacgctggacgaagggagggttcagtcccgggagggaccaagcgggcggtgccagatttcaccacgctccccagaagggtgcacaa

SEQ ID NO: 86259 - DNA, 91 bp, Homo sapiens
  chr13:112682966-112683057
  hypo
cagccagcattgtccactggccgaggcaggagcaccgctgcgccatcgggtctggtgctctcccgagaacgggggggagaaattcctgaga

SEQ ID NO: 86260 - DNA, 284 bp, Homo sapiens
  chr13:112690615-112690899
  hypo
gaagctctgcaactacccatacgtagcccggggccctgcattttcctcagcagcagggccaggcccaccgtgacggctccgcaccgacgcacccttctcagggcaagatcgacacagagtgctctccagggccacccggagatgcccagactcagaggcctgcctccagccctgcctgcctggacagcaggcctgagagccggacatgcttccgtgtggccgtcacatccccagagttgcacccgcgcaggccgtgtgtgcacgtgttcttgaatcctagggtg

SEQ ID NO: 86261 - DNA, 226 bp, Homo sapiens
  chr13:112691505-112691731
  hypo
ccgcgtctccaccagtggccacggcgcgcagcccttcctcaggcccagctccctccgcgtctccaccagtggccacggcgcgcagcccttcctcaggcccagctccctccgcgtctccaccagccctttcttagacgcaactctctcagcgtctccaggtcagctccccttccctgctgctgaggggagacaacggtgcccacccgctgacaccagccccaggagg

SEQ ID NO: 86262 - DNA, 170 bp, Homo sapiens; identical to SEQ ID NO: 50909
  chr13:112708307-112708477
  hypo

SEQ ID NO: 86263 - DNA, 30 bp, Homo sapiens; identical to SEQ ID NO: 9498
  chr13:112710413-112710443
  hypo

SEQ ID NO: 86264 - DNA, 30 bp, Homo sapiens; identical to SEQ ID NO: 9499
  chr13:112710808-112710838
  hypo

SEQ ID NO: 86265 - DNA, 1061 bp, Homo sapiens; identical to SEQ ID NO: 50913
  chr13:112711800-112712861
  hypo

SEQ ID NO: 86266 - DNA, 128 bp, Homo sapiens; identical to SEQ ID NO: 50922
  chr13:112722274-112722402
  hypo

SEQ ID NO: 86267 - DNA, 261 bp, Homo sapiens; identical to SEQ ID NO: 50924
  chr13:112726467-112726728
  hypo

SEQ ID NO: 86268 - DNA, 379 bp, Homo sapiens; identical to SEQ ID NO: 50925
  chr13:112726796-112727175
  hypo

SEQ ID NO: 86269 - DNA, 41 bp, Homo sapiens; identical to SEQ ID NO: 50926
  chr13:112727837-112727878
  hypo

SEQ ID NO: 86270 - DNA, 239 bp, Homo sapiens; identical to SEQ ID NO: 50927
  chr13:112727961-112728200
  hypo

SEQ ID NO: 86271 - DNA, 89 bp, Homo sapiens; identical to SEQ ID NO: 50928
  chr13:112728335-112728424
  hypo

SEQ ID NO: 86272 - DNA, 183 bp, Homo sapiens
  chr13:112786385-112786568
  hypo
gtgcagggcttgacatgacagcgaacccaagcagtgaggagcgggcagggatagagcctggtgcggaggaagccgaggatgggcaggagcagcccacagagcacccggcgaacggaggcatgtgcccagcgtggatgactccaagagcaacagcactccctcgggaatgaatctgcagagtgg

SEQ ID NO: 86273 - DNA, 150 bp, Homo sapiens
  chr13:112804801-112804951
  hypo
ttccttggaaccacttgcaaacgttttctacttcaggcaatggtcacattcacattccttaagaagatggggatggagtccttcctgccccaccccaccccaacacccacacaccacacacacgcacggcaagcacacacatacacacac

SEQ ID NO: 86274 - DNA, 138 bp, Homo sapiens
  chr13:112805010-112805148
  hypo
aagcacacacacgcgcacagcaagcacacacacgcgcacacacccccacggcaagcacacacacccccccacagcaagcgcacacacacacccccacggcaagcacacacaccccccggcaagcacacacacacaccc

SEQ ID NO: 86275 - DNA, 64 bp, Homo sapiens
  chr13:112841712-112841776
  hypo
cttcctgagtcatggactggacgccgaatgtagtacctgtatcgatcagatttccccagggaaa

SEQ ID NO: 86276 - DNA, 217 bp, Homo sapiens
  chr13:112882620-112882837
  hypo
gctggccggctttcacgatcattaactacgttttgaattctgcgtggtgatgaattgctgcttttttttctttcaggacatggttctcctcggaggatacgttcacattcatttccatgtggctctgctcttctggaattcttctgtgattcaacacacagctgcatgagccctcttcaaccttcacatcttctgtgccatgcgtccacattgtttt

SEQ ID NO: 86277 - DNA, 233 bp, Homo sapiens
  chr13:112887633-112887866
  hypo
ctaggaaggcagagcagtggccgacaccccacaggcccactggccaggtgtggtgccggacagaccctcaggtgtcggctctgcccagcgtcctcttcctcagggtcggccctgctgacagcagccccaggctggcaaccggacgctgcgctgggacctccgggaacgatctcgaggcaccctcacctcccatgagccccccagcaatcctcggtgtgcagctctgcagctgg

SEQ ID NO: 86278 - DNA, 153 bp, Homo sapiens
  chr13:112904338-112904491
  hypo
agcaacacccaggggacgcatgcatcgcccacctccatccgagggtctgctgctcccaaacatgagccagcacaaaatagtgatgtcagaggcactggtcgtgcccttagcgtgtctgcaccagagcgcgtgctcacacgaggatggccactg

SEQ ID NO: 86279 - DNA, 163 bp, Homo sapiens; identical to SEQ ID NO: 27270
  chr13:112998005-112998168
  hypo

SEQ ID NO: 86280 - DNA, 46 bp, Homo sapiens
  chr13:113008185-113008231
  hypo
ttcagtgacaggtggatgggacggcgagcttagaaaacatcagcag

SEQ ID NO: 86281 - DNA, 53 bp, Homo sapiens
  chr13:113086507-113086560
  hypo
gcacaaagatgtaggactccacgcattgcttcggcaccaagccacactttctg

SEQ ID NO: 86282 - DNA, 31 bp, Homo sapiens; identical to SEQ ID NO: 27271
  chr13:113097958-113097989
  hypo

SEQ ID NO: 86283 - DNA, 552 bp, Homo sapiens; identical to SEQ ID NO: 27272
  chr13:113098819-113099371
  hypo

SEQ ID NO: 86284 - DNA, 30 bp, Homo sapiens
  chr13:113120219-113120249
  hypo
gcacgtgtggcaggcgggaagttcagggat

SEQ ID NO: 86285 - DNA, 192 bp, Homo sapiens
  chr13:113120930-113121122
  hypo
caccccaggaacaccggacaccccacttggtcccagaagcggcgcctcctcccagcttctccatgcacagccccacgtggaagcgggagctcctctccccaggaccccagcgacagggtgcacgggaagcgctttttctctccagcctgcggatggggcggcccacaccaggagggcgcagaaactgaaaca

SEQ ID NO: 86286 - DNA, 123 bp, Homo sapiens
  chr13:113163201-113163324
  hypo
ccattcccttccctccagccccgcggctgctgtaaccataaaggccaacgtcaccgcacacggattattacaactggctgccctgctaatcaccacggtcgcgccccaggttcattattctca

SEQ ID NO: 86287 - DNA, 30 bp, Homo sapiens
  chr13:113174158-113174188
  hypo
cggtgccggggcggcgttcccaacacgcag

SEQ ID NO: 86288 - DNA, 23 bp, Homo sapiens
  chr13:113218174-113218197
  hypo
caagacttcgcctcaaaaaaaaa

SEQ ID NO: 86289 - DNA, 30 bp, Homo sapiens
  chr13:113233720-113233750
  hypo
actgctgagtgccagcggggccacggcatc

SEQ ID NO: 86290 - DNA, 147 bp, Homo sapiens; identical to SEQ ID NO: 27274
  chr13:113244575-113244722
  hypo

SEQ ID NO: 86291 - DNA, 233 bp, Homo sapiens
  chr13:113255705-113255938
  hypo
ggtttagtgttctcattctgtcgcccgggcttgagatgagtgtggattcattctctcggtagcgttaacagcgcttcacagttccccgcggctctggccagggctgctgtgaggactggatgaggtaacgagaagtgtgtgctgagacatctgtgttcgcccaggtggcctgtgacatctggaatgtcgggttctgaggtcagatcactctcgaaggtcaagacctttggagt

SEQ ID NO: 86292 - DNA, 30 bp, Homo sapiens; identical to SEQ ID NO: 50935
  chr13:113261126-113261156
  hypo

SEQ ID NO: 86293 - DNA, 207 bp, Homo sapiens
  chr13:113274713-113274920
  hypo
ggagtgagtgttgttgtggcacggcctgcactcaggactgggtttatcatcaagaacctggcaggctgcctctaaagagagcgtcacctgcttatggggcccatgtacgtctttccactgcagctagacaagtcccgaattcaaatgacgattacgcatgttaaaagcttggactaggccaggtgtggtggctcatgcctgtaatct

SEQ ID NO: 86294 - DNA, 27 bp, Homo sapiens
  chr13:113275159-113275186
  hypo
aattccgtcaaaaaaaaaaaaaaaaag

SEQ ID NO: 86295 - DNA, 311 bp, Homo sapiens
  chr13:113291491-113291802
  hypo
caccccacagcccaacgtgcttctgtcagtcgacggtttttactccagcgagcagcatcacccttaaaaaggtggcagaaacatgggagatgggtgggaggagggcaacagagccaccgtctgctttcatcgcccaagcgcagcggctctgccacctggcagccgaggccatgcaagatttcgcaggaggagcccatggccgcggggaggaggagtgggcgcaggagcccacggaacaggccaggcaggagggaaggaggagtgggagacccaggccattctccttcccactttggcgctggcagacagat

SEQ ID NO: 86296 - DNA, 30 bp, Homo sapiens
  chr13:113303416-113303446
  hypo
tgtgctgggagtcccgtcatttgataactg

SEQ ID NO: 86297 - DNA, 242 bp, Homo sapiens
  chr13:113312400-113312642
  hypo
ttttgctggagcccccgagtcgcagggcagtggcctggactatctcaccagctggaggaacactgccacctgccaatggcggcactgctaatttccggtcaccgcagtcagctaagattcatcccacctgcctaggggctaggcctcaaacccacgtcatctgcgttgtctgcagctgtcagcgtcttggaatgtgcacccacagggctcacacgctgagcgaacttggctgtgtgattaga

SEQ ID NO: 86298 - DNA, 99 bp, Homo sapiens
  chr13:113342678-113342777
  hypo
gccttatacaacctctgattgcgcctcgaccccaatcccacagtcacggtttacaaggtagaagcttagtcaaaatccggcttcagcagtcagggttct

SEQ ID NO: 86299 - DNA, 177 bp, Homo sapiens
  chr13:113346803-113346980
  hypo
atagatctatataagtgtttgcgtagcttgcatttttaattcccctttgctgtattattacgcttatggcatcacattttcttttaatctaagcggtaaatattctttagtgaacttttccagcatatacattattggataacgtctcgggaatacgagttgtgggataatattatt

SEQ ID NO: 86300 - DNA, 507 bp, Homo sapiens
  chr13:113347506-113348013
  hypo
ggtttgggtgtttggatggaccggagccatgcagagatactttgtatttgtaaatggtgccgtgtttgtataccatgaggagtgcttgtgcttatggggtagtgtatgctccctggggtgatgtatgtgctctggggggcgtggggaaaagcgtgtgtgccgtggggtagtgtatgtgctgtggggtagtgtatgctccctagggtgatgtatgtgctgtcgggggcgtgaggtggtgtatgctctctggggtgatgtatgagctgtgggtacggggagaggggacggggtggagagtgtgtgtgccgtggggtggtgtatgtgctgtgggagccatggggtagcgtgtgtgccgtggactggcgtatgtgttgtggagtagtgtatgtgctatggggtagcatatgagccatggggtagtgcatgtgccatgaggtagtttgacctccatgacgtaacactttaaaagcacttctaggccaggcgcggtggctcatgcctgtaatc

SEQ ID NO: 86301 - DNA, 1386 bp, Homo sapiens
  chr13:113350354-113351740
  hypo
attcaagttccgtctcggctgacggctgcgtggccttggcaagttggttgccccctgtacgcttggtgccccatctgcaaggtggggactatgatggtgcccacctggtgggtctgtgcagtgacgggacaggtcacggcgctcgtgcacgctgggtgcccagtgcacggggcgtctttgttgcgcgcatggacctgcggctgcatcaccgtccatgcttctgggcttcttaaggagaccgcctctcaccttgggctttccggaaccttctccccgcactcctcttcacgtggagagtgggtgaccttgccctgctctcccggggagagcggtggtcactggtgggaacgcccctgccacgcccagcagcctttctgcctctgcgcttgcctcctccggttggagcgagtgacccgttctgccgaagtccagtcccgtgtgtgctgcggccccgtctctctccctctctgagtgacactgtctgccctgctgcttgccgtcccgctgttggcaccgctttagaccccatatttcccagcggtcaccgtgctcatttttggcttccagctaccgtttttcttaggttaccccgcgtagctggcccgtccttccttctcctgtctcttctgtgcctaccgcggggggttcccttaccaaggtctccatcacccccaggcccacctccctcgggcccctctctgcccttgccctccacctcagcgactccgtggggcttttgtgatcccagctgcagttagcgagcgcccctgtgtgctcagagacacgccagtgagccgggaaggacagagacccaagtcccatccctctggggcccccttggaatgggggaggcgaacaggaaaccaccacagtgagtgttggggtgccccgcaggcgacggtgctgagaaaaagagagtggggttgggggcagtgcgtgcgcaggctggcgggtgggcgaggcgggtggaggatgcgtggggcgcagtgcttgcgcgcagtgggtggcggggtggacgaggtgagggcctggccaggtgggtgcctgcgtgtccagcctgaggggcggcccacgcagcagcctctgggagccctggggccttccgtgggctgcttcctgtggcgtcctgcgggctggccgcccctcggtgggctccggtgctggcctctgccttccccagggccacggtgggctcctagtggcctttcttccctctccatcaacatccttgtcccaggaagaggcgtccactgcctgctacacgccacccagccgtgttcatttccgtgttccagtgtcacccgtgtgcctagaacgttcctggcacagaaaagccacgcagaaaacagctgctgggccaacaccgagaccccaggtcattagtgt

SEQ ID NO: 86302 - DNA, 524 bp, Homo sapiens
  chr13:113356665-113357189
  hypo
aaaaaaaaaaagaaaccactgtaagtacagacaccgtagcaaccacacggaggccccccgccccgccccccgcgtgttccagtgggaagcagagcctcggaaggcgtgcacacggggggtgcgtgatggtgtctccctctgccctcagatggccaggcctcgggcccgatgtgccagggtgggttcttgtgttccgcgggcttcttgtcccttctgtctgctgtgttgtgcgtgcgtctctctgggtggccttggccgggcttctctctctgtgagacaggcgcatctctcagggctttcttcgttctgctgatatctatcccctctcaggaccactcggtttcaaaagcggtaactaaacttgtctaacacgtgtgcatgagaggaaggcggccagaggcatgggtctgagggctttgcttgaagagcgggcggtgtgcgtgtctcgcagcgcccccacctcggtgtctcagggccttgctgtcttccgcctttttcccagcgtctcaccagcaaagtgagtt

SEQ ID NO: 86303 - DNA, 31 bp, Homo sapiens
  chr13:113357650-113357681
  hypo
ctaatcgtaagtacctcgtaaaggcccaatc

SEQ ID NO: 86304 - DNA, 131 bp, Homo sapiens
  chr13:113358399-113358530
  hypo
cctgctgtcccaggcgggggagtcacgggagggctcgagtgccacaccacccacacgtcagccaccatgtgggttcccaaggcaagcagtgagttcccaagccagctgtcgtccacctttctgggttagtg

SEQ ID NO: 86305 - DNA, 76 bp, Homo sapiens
  chr13:113364152-113364228
  hypo
atctcttcagatattttacagagtttgactcttgttgtcaactgtctgcaaataggagctgcgcccatgagggcat

SEQ ID NO: 86306 - DNA, 267 bp, Homo sapiens
  chr13:113366787-113367054
  hypo
gagggtctgggggtgggggatcgtgaggtgagggacagcaaccccgtcctgtccttgtctaggcctctgagacaggcccgaaggacaggcttttctctctactgtgggtgatggtcccggctggtcagctagcgtccacagcccctcgactccctgcgcagagcccctctcactggaccggcgtcagtgccccacagagactggaaacctgtttccaaggtgtggctctatggccggaccacagtcggtgaggtgagggccagttcc

SEQ ID NO: 86307 - DNA, 151 bp, Homo sapiens
  chr13:113368822-113368973
  hypo
cccagggctgaggagaggtggcgtctccactcctgacctggaggcccgtctggcttctggctccagccccctctgctgccttctttgtgtgtctgtgatggaatacgcgttctgcgtgatgagactgttatggagacgcaagagaatgtga

SEQ ID NO: 86308 - DNA, 179 bp, Homo sapiens
  chr13:113369393-113369572
  hypo
gtgttgtagcctgtatgactccgccgttcctttgcatggatataccacgttttgctcacacattcacctgttgaaggacacttgggttgtttcctgcggcagcttttcctgaccgaaagcttctcaaaaggactagccccctcaggtgccccaaactcgattgcagaagactgtgttgt

SEQ ID NO: 86309 - DNA, 214 bp, Homo sapiens
  chr13:113371105-113371319
  hypo
ccaggtggggtgtgggtaggtcggggaggctgctggcctcccagcctccctcaatttctgcgttctaaagatggctatgtgcaaaataaaggtgaaatgatggggcagtactggatcaggtggacatccgggagctggaggcccgtgcactttccctgggacgggcagaggcttgtggtgtccacccacagacgcagacccactggcctgcagg

SEQ ID NO: 86310 - DNA, 126 bp, Homo sapiens
  chr13:113375329-113375455
  hypo
ggtgaaccacaggccacagtccgcagcctccaggagctactgccgccagctgagggccacagttgctgatcgggaaagggtgtatgtaaggccagtcctctgtccggtcagaagtggaagggtctg

SEQ ID NO: 86311 - DNA, 293 bp, Homo sapiens
  chr13:113379233-113379526
  hypo
cctctgctccagccacccctgcggccatgcctgtggtcccctgtgtgggctgggctgtggccttggacctggtccccacgtcattttcttctcccttggggtggattgtctgtgggcccggtgtgggaccaacagctgatggccgacgcctcttgccgtaggttgccggccatgcatacctgggggaagacttgaactccatccctctgtcaaccctgttctgagtcacaagagacactgcaaaccccccttgtgggagctgactcaggctcgggctgggctcaaggcagtgg

SEQ ID NO: 86312 - DNA, 30 bp, Homo sapiens
  chr13:113382139-113382169
  hypo
actccggcgctgggcgaggaactcggctcc

SEQ ID NO: 86313 - DNA, 250 bp, Homo sapiens
  chr13:113382653-113382903
  hypo
ttacctgtatgtaccacgttgtcagtgtccacgtgtggaggggccatgagactgtgcggcccggctccctgtgttacctgtatgtaccacgttgtcagtatccacacgtggaggggccgtgagaccgtgcagcccgcttccctgtgttacctgtatgtaccgcgttatcagtatccacgcgtggagggggccgtgagactgtgtggcccgcctccctgtgttacctgtatgtaccgcgttgtcactatcc

SEQ ID NO: 86314 - DNA, 318 bp, Homo sapiens
  chr13:113383513-113383831
  hypo
acacgtctggttggcggtcagctcatttatgattgagcctgaccttatgacaggccacctcgttaacgattggatgttgtttttatcactctttactacgtttgctttcccacccctgctgtttccatgggtttatccgactctgcccactgaggcagcacagtcccctcgccttagcattgcgggcccagagtatctaacgcgtccgagtgcgaacagtgtcagaaggcactgaggcagcgcggttcccacctcggcattgcaggcccagagtatctaacgcgtctgcgtgtgaacagtgtcggaaggcactgaggc

SEQ ID NO: 86315 - DNA, 30 bp, Homo sapiens
  chr13:113389371-113389401
  hypo
aaaatgttagcagacgtctgggatggattt

SEQ ID NO: 86316 - DNA, 161 bp, Homo sapiens
  chr13:113391680-113391841
  hypo
ctttgtgagcaagttatccttcggtgaaatgttcgttaaaacagatcatgactcatgtggcgttaaatattacagggaaacctccagaagggatgggcttccagggacggtttggcaagggccagctatgctgagctgccgtggtcataaagaccagaagg

SEQ ID NO: 86317 - DNA, 30 bp, Homo sapiens
  chr13:113396096-113396126
  hypo
ctttaatgttttaccgggtattttgagcct

SEQ ID NO: 86318 - DNA, 111 bp, Homo sapiens; identical to SEQ ID NO: 27283
  chr13:113396991-113397102
  hypo

SEQ ID NO: 86319 - DNA, 392 bp, Homo sapiens
  chr13:113398308-113398700
  hypo
aatatttcctgctggtatggacgtggtcattttagtcatcatactatgacggctgagctgcgtgtccagctgcggtgagtgggccacttgcctctttcacgtaaggaaggcttcctcttcacgcatttgtcagtggtcaagaaagttaaaacaagaaggcaggagaatgtcgctgtcctcccagcacccggtttgggacggtctgggagggtgtgatggagtgcagtgttctgtatgttgatgtgtgttgacggatttctctgtcctcccggcacccggcttgggacggtctgggagggtgtgatggagtatggtgttctgtatattgatgtgtgttgatggatttttctttcctcccggcacccggcttcggatggtctgggagggtgtga

SEQ ID NO: 86320 - DNA, 737 bp, Homo sapiens
  chr13:113400146-113400883
  hypo
tattgagcacctccacattgtcgtgcagcggaactccagaaattctccgtcttgcaaaactcagcctctgggccgttaaactaggtgtccccacctcccctcccccaggccctggtgaccaccgttctgctttctctgtctgtgattttgaccactttagatacgtcatttcagtggactcatcctgtgtcgttttgtggcggaatcacgttctgttgtgtgtatacaccacgtttttcttgtccgttcacctgtgatggactcttgggcgtctgccgtaggccgctgtgaatgctggcggcggtgatcgtgtgctgacgtctcctccacgtactgagttcgtgtcttttggatgcgcgcccagaggtggcactgctggatcctgtgctgggtcatacctatgtttaattctctgaggaacctccgtgctgtctccatagcagccgtgtcgtttcacacttgcaccaacagtgcacagggctccggttccccacgtcctcaccgggtaactggggttccggctccccacgtcctccccgggtaactggggttccggttccccacgtcctcaccgggtaactggggttccggctccccgcgtcctccccgggtaactggggctctggttccccacgtcctcaccggcacttggcactgtctagtgttttggtagcagccatcctgctccgtgtaggtagtatctcattgtggggttttgttgttgttttttagagaca

SEQ ID NO: 86321 - DNA, 274 bp, Homo sapiens
  chr13:113401316-113401590
  hypo
taacttcctaagtggtactgacgtgtggccggggtgaaaacctctggcctaggtatggaacaggtagagggtgttaccgagatgatgagtaggagtgttcagaaggtggtagggatcacccgtctgctccggagggatcgcttgttgagatgagatgaacgctgcacttgtggacatgcagacgtcttgcaaacaagtggggtcaggatgtggtactcaggtgcagcctcagggccagggtggattcgggagcgtaagggaagggactgttgct

SEQ ID NO: 86322 - DNA, 30 bp, Homo sapiens; identical to SEQ ID NO: 27287
  chr13:113406735-113406765
  hypo

SEQ ID NO: 86323 - DNA, 30 bp, Homo sapiens
  chr13:113408405-113408435
  hypo
ttcactctcttcagcgcctggggccttcat

SEQ ID NO: 86324 - DNA, 30 bp, Homo sapiens; identical to SEQ ID NO: 27288
  chr13:113409130-113409160
  hypo

SEQ ID NO: 86325 - DNA, 68 bp, Homo sapiens
  chr13:113411147-113411215
  hypo
gggcctgctcccagcgcggggtctgctcccagcacgtggtctgctcccagcacggggcctgctcccag

SEQ ID NO: 86326 - DNA, 112 bp, Homo sapiens
  chr13:113417107-113417219
  hypo
tgctcacggtatgacgggcagccctccaggagtggcgtggaggccggggcactcagtcacgtgtgtgccgggagcacaggccttcctcgccgtgcgcggctcctgagctctg

SEQ ID NO: 86327 - DNA, 31 bp, Homo sapiens
  chr13:113418566-113418597
  hypo
gacacctgcggggccccggcctgttccttat

SEQ ID NO: 86328 - DNA, 801 bp, Homo sapiens
  chr13:113419197-113419998
  hypo
acctctttccttagctcagggcgctaccagtctgggctggtagaagccccgacacttgcctcactcggatccctggaggaggattatatgggcactggggcaaggcagggacatcttggcagcctccccaccgcacgcttttcttgcaagtcctttgaacggcacctgctccttagctgctgcctggcaactttgagggtttcagtgagatggggtgagtgcttcccagccagcaaagtgcgttgacagtggctggcttgccccccctcccccccgccccggctctggaagcttctccccctgggtcttccagtctcatgtctggacacagacaggagaggtgaggaggagcagcaggggtggcccgggcagttcctgtgacctggaggcctggcaagttgttctgacggccaggcccatccttggggaggcctctgaggacgcctggaaccccaggcccgccctgccttgttttctggtcctggcctgggggggtcgtggtctcgctggtgcagcctcctccgggcaggccccgcctctgctcccttcccctcactccatctgattcggccccgtttccttgtccactccacgttcttctgagcgtgtctctgggacatggttaaggttaagaagcggcctctgaacgagggagaatgtactgaaattgcctaagtgaacttcaaacacaggaagaagcgctcagtcgatgttcatggtgagaacgagggttgatcttttgaatgagtcacgggtttgagagagacctaagaaccattcgatctgaaaactagattcact

SEQ ID NO: 86329 - DNA, 295 bp, Homo sapiens
  chr13:113424729-113425024
  hypo
aaggaaggagagaaatccagtcgttaccatgagtgtgacgagagtggggagaaccagtggagcttctgatcctgtcccagcagatgccagtggctcggaccaaggaggacagagggatgggcgtgcccacgtgaagcctcaccccagaccccagaccctgcttacatgccgggacgaaggtgggagagaaccgtgcatctcagcacggcggtggaaacgtggtccacctgcggagggcctgtttgcgtttattacacccgagcaaggcccgcacgcccaccagaggggccagggt

SEQ ID NO: 86330 - DNA, 528 bp, Homo sapiens
  chr13:113425244-113425772
  hypo
ataccggccattagggagaatcgccctgtaaacattgatccagtgattgaggccggtcggcttgcttctgttctgccccgcggtgtaattcagctaataggttttgtttgtctcagctgaaatgtgaaacttccattaggtgtctaaccctggctaaaagtggttttcagcctatttttaaaaaatctcctttgtccctgcatgcattctaaccccattctaacctgatgcgggcagccacaacccaggccctaacagagttcatggtaaggatggtgaaggcgtgacccacggtggaaagttggttattttgggtaatccagcgattttctgattgaacttcgaatgcggaaacatcttgcccttactggggcaacgaggggaggcaaggcgtgcgccaggcagagacaccttggaatcccacccagcccagatgtgtctcctgggttctgggacgggcgcaggtgactgtatttgcgctggtgggaggagttgcccccttggttaaatccggaggacacagctgca

SEQ ID NO: 86331 - DNA, 18 bp, Homo sapiens
  chr13:113426593-113426611
  hypo
tgtgcagaagatgggcag

SEQ ID NO: 86332 - DNA, 30 bp, Homo sapiens; identical to SEQ ID NO: 27293
  chr13:113430251-113430281
  hypo

SEQ ID NO: 86333 - DNA, 20 bp, Homo sapiens
  chr13:113439158-113439178
  hypo
ccctgagctgtttccactgg

SEQ ID NO: 86334 - DNA, 43 bp, Homo sapiens; identical to SEQ ID NO: 27294
  chr13:113445466-113445509
  hypo

SEQ ID NO: 86335 - DNA, 191 bp, Homo sapiens; identical to SEQ ID NO: 27295
  chr13:113446209-113446400
  hypo

SEQ ID NO: 86336 - DNA, 31 bp, Homo sapiens
  chr13:113448116-113448147
  hypo
gtgcccgggttcgtctcgcagccagaggcca

SEQ ID NO: 86337 - DNA, 201 bp, Homo sapiens; identical to SEQ ID NO: 27296
  chr13:113461152-113461353
  hypo

SEQ ID NO: 86338 - DNA, 353 bp, Homo sapiens
  chr13:113461412-113461765
  hypo
tgtgtttcacacccaccagattggctttcagatgtgaaaggctggagagggcatggcgagggaggcaccacgggccgccggcaggagcgtggcggagccaccaagcacagcagttggcaacatctgacacaggcagagatggggacacacagggtccagtgcagatgataaacatgcagctgtgcagtcagtacatggggcctgtgtgtcttcactaggccagagccggccgtgcctaccgggatacgtgaactaggatattcatggtggctgtcattgattagcaaaggactcgggcaacctggtgtccctccgtaaggaaatggacagctccgccgcggtgcatggcagaa

SEQ ID NO: 86339 - DNA, 31 bp, Homo sapiens; identical to SEQ ID NO: 27299
  chr13:113463034-113463065
  hypo

SEQ ID NO: 86340 - DNA, 112 bp, Homo sapiens
  chr13:113472457-113472569
  hypo
gcggtgaccgtgtgtgcgcttggtgacagggcggtgaccgtcggtgcgcttggtgacgggcagtgactgttggtgcgcttggtgacggggcggtgaccgttggtgcgcttgg

SEQ ID NO: 86341 - DNA, 249 bp, Homo sapiens
  chr13:113474179-113474428
  hypo
cgtccggtcagtaacgtggcttttctgtcgccaggttcgtgggtcgcatcaacgtttacagtgacctgaatgaccccgtggtgaggtgagtgcctctgcggatgccttggccacggtcacctcccttgttgcgttagaaatgcattctttgacggacaagggtttccacggcggctgctctggtagatttggaaggtggagttccgctttcccacagggccgggctccactctcgtctctggtttgtct

SEQ ID NO: 86342 - DNA, 335 bp, Homo sapiens; identical to SEQ ID NO: 27302
  chr13:113477606-113477941
  hypo

SEQ ID NO: 86343 - DNA, 38 bp, Homo sapiens; identical to SEQ ID NO: 27303
  chr13:113482706-113482744
  hypo

SEQ ID NO: 86344 - DNA, 192 bp, Homo sapiens; identical to SEQ ID NO: 27304
  chr13:113488275-113488467
  hypo

SEQ ID NO: 86345 - DNA, 30 bp, Homo sapiens
  chr13:113489843-113489873
  hypo
ggaggtagtgaggtcgtggcctagatgaga

SEQ ID NO: 86346 - DNA, 36 bp, Homo sapiens
  chr13:113493551-113493587
  hypo
gcagtacacagaagaccgactcgaaagaagaaaagg

SEQ ID NO: 86347 - DNA, 577 bp, Homo sapiens; identical to SEQ ID NO: 27305
  chr13:113497160-113497737
  hypo

SEQ ID NO: 86348 - DNA, 95 bp, Homo sapiens; identical to SEQ ID NO: 27306
  chr13:113498378-113498473
  hypo

SEQ ID NO: 86349 - DNA, 55 bp, Homo sapiens
  chr13:113499308-113499363
  hypo
cagtccagttgccagccgctagcagtactagtccagttaccgggcactagccata

SEQ ID NO: 86350 - DNA, 46 bp, Homo sapiens
  chr13:113500587-113500633
  hypo
ccatgtactcaactgccggatgttgtctcaccgcttacaaaggctt

SEQ ID NO: 86351 - DNA, 179 bp, Homo sapiens
  chr13:113507107-113507286
  hypo
atctcagtggctttttcgtgatgatacttgcttataaattatttccttataatctccagtcagcaagtgcgaaacatctctgagcctcagcttccttttgaatcgaattgtagggccaggcccggtggagcacgcttgtaaacagggccaggcccggtggagcacgcttgtaatcctcg

SEQ ID NO: 86352 - DNA, 152 bp, Homo sapiens
  chr13:113508792-113508944
  hypo
gcaagacggtcctgcgccacagcgggagcctgaccagagacaacctgtccgggtaggcagcgcgtccccgcccccacccccacactcccgcaaaaggggcttcagacccagtggccttcacctgcaagtcggggagccgcattgtctctact

SEQ ID NO: 86353 - DNA, 30 bp, Homo sapiens
  chr13:113513505-113513535
  hypo
ctgagtggccaaaacgtggtcacatgtgca

SEQ ID NO: 86354 - DNA, 76 bp, Homo sapiens
  chr13:113516325-113516401
  hypo
caggcgtaaggcgtcacgtcaggcgtaaggtgtcacagcaggcgtaaggcatcacgtcaggcgtaaggcgtcacgt

SEQ ID NO: 86355 - DNA, 30 bp, Homo sapiens
  chr13:113520790-113520820
  hypo
atgtgtgggaggcccggtggggccctgtgc

SEQ ID NO: 86356 - DNA, 30 bp, Homo sapiens
  chr13:113533378-113533408
  hypo
tgcaggggcctgcacgccgtcctgaagtcg

SEQ ID NO: 86357 - DNA, 30 bp, Homo sapiens
  chr13:113533958-113533988
  hypo
acagacagggccggcgtccacacttgaaca

SEQ ID NO: 86358 - DNA, 142 bp, Homo sapiens; identical to SEQ ID NO: 27309
  chr13:113536447-113536589
  hypo

SEQ ID NO: 86359 - DNA, 181 bp, Homo sapiens
  chr13:113537190-113537371
  hypo
gcaccagaacctgtctcgggctgacgggggtggcacacaggacacgggtggatcccaacaggcagcaccgcacctctgcccgcctcccgcactgcagctccgcccgccgggctctgcgtccccacgtcccctcgtcccatccccacgtcccctcatcccgtcacctcgtccccacatcccc

SEQ ID NO: 86360 - DNA, 30 bp, Homo sapiens
  chr13:113537792-113537822
  hypo
ccagagggtgtttccgaggtgctcgacagt

SEQ ID NO: 86361 - DNA, 209 bp, Homo sapiens
  chr13:113539437-113539646
  hypo
acatgcagaacatgcacgtgtacacataccacagacacgcgtgtgcatgctcctacacaatacatatgcacatatcatgaacagcgtaagttcctacacacggacgtgtgatacacacatgcatgtacaggtaagcacacatgtacaagctcctacaggcttgctctcacacacgtgtatgcacagcagagagacgtatgagcttctac

SEQ ID NO: 86362 - DNA, 30 bp, Homo sapiens
  chr13:113543110-113543140
  hypo
ggtcctgaggtggacgaggactggccctgt

SEQ ID NO: 86363 - DNA, 30 bp, Homo sapiens; identical to SEQ ID NO: 27312
  chr13:113544110-113544140
  hypo

SEQ ID NO: 86364 - DNA, 31 bp, Homo sapiens; identical to SEQ ID NO: 9515
  chr13:113548669-113548700
  hypo

SEQ ID NO: 86365 - DNA, 30 bp, Homo sapiens
  chr13:113552757-113552787
  hypo
agctcggcaggtgccggaactgagtccagg

SEQ ID NO: 86366 - DNA, 30 bp, Homo sapiens
  chr13:113554073-113554103
  hypo
tgtggacggagggatcgctgcatcccttcc

SEQ ID NO: 86367 - DNA, 30 bp, Homo sapiens
  chr13:113554321-113554351
  hypo
tccagcttggggacgcgattgcagccaggg

SEQ ID NO: 86368 - DNA, 30 bp, Homo sapiens
  chr13:113554692-113554722
  hypo
atgcgcaggcagcctcgtggcaggctctgc

SEQ ID NO: 86369 - DNA, 243 bp, Homo sapiens
  chr13:113565659-113565902
  hypo
tctgcagctccgcccggcaccgtccatgcagggtgtagacccagacactctcctgcctgggagagcggcccagccgctagtcctgtgcgcccaccaggttcttctctcccagcgtggccgccatgttggccgtgatccccggatcctgcctgctgcaggctcctctgggaatggcccgcccaccatgctcctctgaaaccctccctcacttccagagacctgggccccgggcctcacccaagc

SEQ ID NO: 86370 - DNA, 30 bp, Homo sapiens
  chr13:113580658-113580688
  hypo
aacggagtgctgcacggcctggtctacata

SEQ ID NO: 86371 - DNA, 293 bp, Homo sapiens; identical to SEQ ID NO: 50939
  chr13:113597574-113597867
  hypo

SEQ ID NO: 86372 - DNA, 213 bp, Homo sapiens
  chr13:113598679-113598892
  hypo
tgtgctctggtgtctcggggcagcacagacgttgttactgctccatctggcctgggtgaacacctgggtctctctgtggagttgggggatgccgcctgctcaagggtcgcgttcctagtatgcgttccaggaatgctatgcaccaccagtgctaagccgcagaagagctgtcaatctgtcagtcctgtcccgctaaacctgaacttttttttt

SEQ ID NO: 86373 - DNA, 342 bp, Homo sapiens
  chr13:113627844-113628186
  hypo
tgctgaccttctgtgatctgacgccacggctcagtgcttcccaagagctcctgagaacgcagcgctcaggcctcccagctgggtgagtctgacgccctccatgcgaagacggcgcgagcacggcttcacctgtggaaccaggggcagacttatgagctcccgggggtttcagttccggcctgctctgaggacactggggggccggccctgtgtttgcttggagcgcccttcagggagacccgtggctccaggggctggcgctgagtgaccacaggcaaggtctcaggagtgagtgatgccaggcagcacctgagaaggggatgcctgcgaggtgtgttccga

SEQ ID NO: 86374 - DNA, 119 bp, Homo sapiens
  chr13:113631095-113631214
  hypo
gacacacaccaaaccggacacacaggcctcctgggcagcgggaaacctggagacaaggacctggtccagcagggctggcgcagaggggttggggtcgcccagtcggacagtgcggggct

SEQ ID NO: 86375 - DNA, 31 bp, Homo sapiens; identical to SEQ ID NO: 27317
  chr13:113638952-113638983
  hypo

SEQ ID NO: 86376 - DNA, 30 bp, Homo sapiens; identical to SEQ ID NO: 27318
  chr13:113641396-113641426
  hypo

SEQ ID NO: 86377 - DNA, 30 bp, Homo sapiens; identical to SEQ ID NO: 27319
  chr13:113642769-113642799
  hypo

SEQ ID NO: 86378 - DNA, 93 bp, Homo sapiens; identical to SEQ ID NO: 27320
  chr13:113644355-113644448
  hypo

SEQ ID NO: 86379 - DNA, 30 bp, Homo sapiens; identical to SEQ ID NO: 27321
  chr13:113647374-113647404
  hypo

SEQ ID NO: 86380 - DNA, 309 bp, Homo sapiens; identical to SEQ ID NO: 27322
  chr13:113648322-113648631
  hypo

SEQ ID NO: 86381 - DNA, 30 bp, Homo sapiens
  chr13:113649478-113649508
  hypo
gccccgggctcccctcgttttacagactcg

SEQ ID NO: 86382 - DNA, 288 bp, Homo sapiens
  chr13:113649730-113650018
  hypo
agtatacagttgtgcttagtacgtgttggcactgcaactgctgtccttgccgctgtgtgagctgctgctgggtggcagtgtctcagggctgccacttctgccccaggagagcagaggggagctggcggccgaggtggggtcggtggtggggtgagcctgcggcgttgtggctccaaggcctgctggcctgaagtcacccccgggatgtgccccgtgtgggaccgtgcgggatgcagggaggagcgtggctctgggtgtggaggtggcgggctgctggcatcctgtcac

SEQ ID NO: 86383 - DNA, 101 bp, Homo sapiens
  chr13:113650920-113651021
  hypo
acggcatcctgcgaccgtgctcctcaggtgtgccccacgggcccgggaatgtccttcttggatgcgcccgatggtcccgagactgtcgtcctcagatgggt

SEQ ID NO: 86384 - DNA, 39 bp, Homo sapiens
  chr13:113654368-113654407
  hypo
tgcatcggctggtgccgtggtgacggcgtgaggggccat

SEQ ID NO: 86385 - DNA, 197 bp, Homo sapiens
  chr13:113663191-113663388
  hypo
gggattcttacgcccgcctgcatcagagaacccaggtcttgtgggcgaggcagcgtggagagggagcgcagctctggagacggcccccagggcttgcgggcgggcgggcgaggcagcgtggagagcggagagcgaagctctggagacgacccccagaggagattggccaagtgcggatgtgcgagtcctccctgccc

SEQ ID NO: 86386 - DNA, 31 bp, Homo sapiens
  chr13:113666494-113666525
  hypo
gtggatggtggacaggcggtgtggacggtgg

SEQ ID NO: 86387 - DNA, 37 bp, Homo sapiens
  chr13:113666830-113666867
  hypo
gacactgcaatgaggacggtggacactgcgatgagga

SEQ ID NO: 86388 - DNA, 31 bp, Homo sapiens
  chr13:113673343-113673374
  hypo
ctcctcccgggaagaacgctggagaccttcg

SEQ ID NO: 86389 - DNA, 30 bp, Homo sapiens
  chr13:113673759-113673789
  hypo
agacgttccctgcccgtgggggtttgccct

SEQ ID NO: 86390 - DNA, 30 bp, Homo sapiens
  chr13:113679009-113679039
  hypo
cttcagcgagattccggacaaggagttcca

SEQ ID NO: 86391 - DNA, 37 bp, Homo sapiens
  chr13:113684750-113684787
  hypo
tggactctcaggtgtccgctgacgcaggtgtgggccc

SEQ ID NO: 86392 - DNA, 68 bp, Homo sapiens
  chr13:113696467-113696535
  hypo
gcgcaccctgggcccgcaccccattcccacgcgtgccccatgcccgcacccacgatggtgagcatggc

SEQ ID NO: 86393 - DNA, 30 bp, Homo sapiens
  chr13:113696922-113696952
  hypo
gtgtgaggcagacgcgcacttaacggcgtg

SEQ ID NO: 86394 - DNA, 183 bp, Homo sapiens
  chr13:113703692-113703875
  hypo
ctctgtccatgagccacgcactccttggagagggcagaccagggatgaccccttgggcatcttgattcagttttttggaaatggtgcagttgacctgacgtggggacaccaagtagtggctgcagcggggcacctggacgccaacccctgggctccaggccttgacagcgagctttggctggc

SEQ ID NO: 86395 - DNA, 326 bp, Homo sapiens
  chr13:113718438-113718764
  hypo
agctgcatcccatccgcacatccatccgcagtgtccaggtgcccccacccacacagccgcccgcagcatccaggcagacgtggtcctctctgtgctgctgggtgttctgctgatggggcagctcttttgggagccaacaataatcccaaacactaccacgcattccctttctcctccaggtcataatgctgagctccgtaccagacttacacggttacatcgataagtcgcagctgaccgaggacctgggtgggaccctggactactgccactcccggtggctgtgccagcgcacggtgagccgcgtcggggccagcggggctggc

SEQ ID NO: 86396 - DNA, 953 bp, Homo sapiens
  chr13:113719022-113719975
  hypo
ggcacaggcgactctaggtgacgggcacacgtgtagagtgtgcctggtatgtttctgaagaggtcaaggagggcaggacgctatgggagggcgttcaccgtctttgcgtcagccggtctcacctgatgggtctgtgtgggaacggtttccgccggtgtctgctttcagggcagcaggaggtgggtgcagtgcacaaggcatgcaattgtgttttctctgtccccaaggccatcgaaagtttcgccctcatggtgaagcagacggctcagatgctgcagtccttcgggaccgagctggctgaaacagagctgcccaatgacgtccagtcgacaagctcagtgctgtgtgcgcacacagagaagaaggacaaggcgaaggtacatggggggtgctccggctggaagctgtggggggctccggtcagtcagaagctgcgcggggctccggtcggaagctgcggggggtctttcgtcccagcgggagtttgtgtcagcagcacgtaagaccaagaagtcagcaggcttgagatgccttttgatggcaattagctcggcaacctctccgacgagaacggaataaaaggagtgtaaatgaaccctgtagattgctggctgcgcctgccattctggcgttgggtcaaccattggccctgggtggccgtggcttcaggagtgggaccaggggtggctcctctcaggagcacttttggctgtctgtgcggggagctcccgaatagacatctcttgcttctgagtgtgaccgagacaggatgtctgtgccggtttctcatgccgagcaggcgatgaagtggcggttggaattcctgtttgcagaacactcccagtgctcacgtgtccacagcgcttgctggaacaaacgtattctgaggagcacgtgctccctgctctgtgctgcccctggcccaccggcacgctgctggctttgcagcaatg

SEQ ID NO: 86397 - DNA, 31 bp, Homo sapiens
  chr13:113720175-113720206
  hypo
ggcccccacatcaccccgcctgcccgcacga

SEQ ID NO: 86398 - DNA, 144 bp, Homo sapiens
  chr13:113724280-113724424
  hypo
atgagccttggggtcgcttgaacacccaccgcgctccacgttgcatggggcgccgtgggccacacagacggtcaactcctcctctttcccaggctcctggcccagctgaacgaaaccgaggctgccttcgatgagttctgggca

SEQ ID NO: 86399 - DNA, 111 bp, Homo sapiens
  chr13:113731261-113731372
  hypo
taaagcgggggttgggcgtgccccggcacgttctgcgcctgactgtgtatttttagtgatgacaccaacatgtgcaaggcaccttactgagcatgcggtttcaggagcacg

SEQ ID NO: 86400 - DNA, 30 bp, Homo sapiens
  chr13:113735316-113735346
  hypo
agggaggcttcagccgccgtctgcagggtc

SEQ ID NO: 86401 - DNA, 30 bp, Homo sapiens
  chr13:113739495-113739525
  hypo
ggctccgcggtgaccgtggcccggcctccc

SEQ ID NO: 86402 - DNA, 30 bp, Homo sapiens
  chr13:113742879-113742909
  hypo
cagccagcaccgggcgctggagcagtcaca

SEQ ID NO: 86403 - DNA, 31 bp, Homo sapiens
  chr13:113745595-113745626
  hypo
ctaagggggatgctctcgtgggtctttatgc

SEQ ID NO: 86404 - DNA, 30 bp, Homo sapiens; identical to SEQ ID NO: 27327
  chr13:113748343-113748373
  hypo

SEQ ID NO: 86405 - DNA, 30 bp, Homo sapiens
  chr13:113750929-113750959
  hypo
cggcccgtccggctcggcccagtgcctgag

SEQ ID NO: 86406 - DNA, 30 bp, Homo sapiens; identical to SEQ ID NO: 27328
  chr13:113769397-113769427
  hypo

SEQ ID NO: 86407 - DNA, 30 bp, Homo sapiens; identical to SEQ ID NO: 27329
  chr13:113771922-113771952
  hypo

SEQ ID NO: 86408 - DNA, 264 bp, Homo sapiens; identical to SEQ ID NO: 27330
  chr13:113796034-113796298
  hypo

SEQ ID NO: 86409 - DNA, 30 bp, Homo sapiens; identical to SEQ ID NO: 27331
  chr13:113797338-113797368
  hypo

SEQ ID NO: 86410 - DNA, 361 bp, Homo sapiens; identical to SEQ ID NO: 27332
  chr13:113797732-113798093
  hypo

SEQ ID NO: 86411 - DNA, 30 bp, Homo sapiens; identical to SEQ ID NO: 27333
  chr13:113803258-113803288
  hypo

SEQ ID NO: 86412 - DNA, 30 bp, Homo sapiens; identical to SEQ ID NO: 27334
  chr13:113803564-113803594
  hypo

SEQ ID NO: 86413 - DNA, 106 bp, Homo sapiens
  chr13:113825962-113826068
  hypo
gcacatgcggtatgacgcggacgcgggggagaatgacctgtcactgctggagctggagtggcccatccagtgcccaggtgcggggctccccgtgtgcacccctgag

SEQ ID NO: 86414 - DNA, 30 bp, Homo sapiens; identical to SEQ ID NO: 27336
  chr13:113826539-113826569
  hypo

SEQ ID NO: 86415 - DNA, 30 bp, Homo sapiens; identical to SEQ ID NO: 27337
  chr13:113832340-113832370
  hypo

SEQ ID NO: 86416 - DNA, 20 bp, Homo sapiens
  chr13:113865698-113865718
  hypo
ttgtttgtttgttctttgag

SEQ ID NO: 86417 - DNA, 244 bp, Homo sapiens
  chr13:113884094-113884338
  hypo
tggtttctctctgacgactggaggttgagcctggagcggctctttccagcgctgcagttgaaactcggagaaagactgcctgctgcccgtggggtcgcagccctgaggctgtgcgtcccctgtggaatggcttgctcagcctcccggcctcctgagcacatagcactcatcgtccgtcatctttcggggactgtatacaccaggggttctggggcctttcctcagcagcgttcgcggccacgga

SEQ ID NO: 86418 - DNA, 92 bp, Homo sapiens; identical to SEQ ID NO: 27339
  chr13:113887592-113887684
  hypo

SEQ ID NO: 86419 - DNA, 116 bp, Homo sapiens; identical to SEQ ID NO: 27340
  chr13:113887884-113888000
  hypo

SEQ ID NO: 86420 - DNA, 50 bp, Homo sapiens
  chr13:113950840-113950890
  hypo
gcgagactccgtctcaaaaaaaaaaacaaagtgctcgacaggaactttct

SEQ ID NO: 86421 - DNA, 88 bp, Homo sapiens; identical to SEQ ID NO: 9520
  chr13:113951224-113951312
  hypo

SEQ ID NO: 86422 - DNA, 32 bp, Homo sapiens; identical to SEQ ID NO: 27342
  chr13:113953157-113953189
  hypo

SEQ ID NO: 86423 - DNA, 21 bp, Homo sapiens
  chr13:113969598-113969619
  hypo
aaccagcgtggagatgccggt

SEQ ID NO: 86424 - DNA, 30 bp, Homo sapiens
  chr13:113973513-113973543
  hypo
tgcccaggcagaaccgtcctgggtagtggg

SEQ ID NO: 86425 - DNA, 30 bp, Homo sapiens
  chr13:113974973-113975003
  hypo
gcagatgatgtgggcggggctgctgtgccc

SEQ ID NO: 86426 - DNA, 30 bp, Homo sapiens
  chr13:113977648-113977678
  hypo
tcctgatgttttgccgtggcttggggattg

SEQ ID NO: 86427 - DNA, 291 bp, Homo sapiens
  chr13:113980175-113980466
  hypo
gaacccggtgtcactccctggcggcccgcccgccccagggcccgagtgaggcgctcacctccacgggcaagatgtccacaaacaggcagatgaaccagcgggacaccagcagcgtccacagcacaccgagacgctccatcagggcccccacagccggcagcttcgcccgcaccagctccccgaggacctcctggtcggtcttcaggcccagcatggccgggctgtagtaatctgccaggcaatgtggagaaaagaccccgagacactcccgtcacctccacaagccccatt

SEQ ID NO: 86428 - DNA, 30 bp, Homo sapiens
  chr13:113982370-113982400
  hypo
gcccagccggcgcagcggctgctccctgca

SEQ ID NO: 86429 - DNA, 58 bp, Homo sapiens; identical to SEQ ID NO: 27344
  chr13:113985422-113985480
  hypo

SEQ ID NO: 86430 - DNA, 286 bp, Homo sapiens
  chr13:113985702-113985988
  hypo
ggataccaggaggcacgggctgcagcatgggaggcggcccaggaggagatgccaagaaggcacagcaaggacagccagtgcaggagccacccgggtgcccacccagcagctgcgcacccccactgcccgagccagcctctctgcatctcttttcctgagaagacttcggcgtggcacagcccttacagggcgtgagccttctcagacgcagctcaggttacagcaaggaagctgcaaggctggttttgctgtttggtttacttttttttttttttttttttttttt

SEQ ID NO: 86431 - DNA, 31 bp, Homo sapiens
  chr13:113986523-113986554
  hypo
cacctccctatctgcacgcacaccacacaca

SEQ ID NO: 86432 - DNA, 31 bp, Homo sapiens
  chr13:113987422-113987453
  hypo
aggagaggggcccagccggagggcgctgggg

SEQ ID NO: 86433 - DNA, 38 bp, Homo sapiens
  chr13:113990085-113990123
  hypo
catgctgctgaaatgacgggattttttttttttctttt

SEQ ID NO: 86434 - DNA, 84 bp, Homo sapiens
  chr13:114002278-114002362
  hypo
acctctgtggccgagagcagacctgggaggacctgtgtggctgagcggacctgggaggacctgtctggccgagtggacccggga

SEQ ID NO: 86435 - DNA, 98 bp, Homo sapiens
  chr13:114003075-114003173
  hypo
aaggcctgggacagtccgtccgtcacagcctcagaaagaacccgccccgcagacgccgcgacctcacctgccccgcagatgccgcgacctctgatgca

SEQ ID NO: 86436 - DNA, 30 bp, Homo sapiens; identical to SEQ ID NO: 27346
  chr13:114004354-114004384
  hypo

SEQ ID NO: 86437 - DNA, 30 bp, Homo sapiens; identical to SEQ ID NO: 27347
  chr13:114005302-114005332
  hypo

SEQ ID NO: 86438 - DNA, 298 bp, Homo sapiens
  chr13:114009497-114009795
  hypo
ttcatggaggaagacgtaacttcaagttaaaagcagcaggcgcaccgctcacccctggacgctgaggctagacactgggtggaaaccggttccttccggcccccgggccctgcaccagagctcgacccccaccgcctcacctgtcctgatggcgtcctccagcctggggtttctctctccctggagaagctggtggtagtagccgggattctggtccatctgcgcctgggccccactcagcaccatccagacgcgggcacggtgctccagcgggacccctttccggacatagcgcttc

SEQ ID NO: 86439 - DNA, 20 bp, Homo sapiens
  chr13:114012194-114012214
  hypo
catatatttaaaactgcggc

SEQ ID NO: 86440 - DNA, 477 bp, Homo sapiens; identical to SEQ ID NO: 50947
  chr13:114017991-114018468
  hypo

SEQ ID NO: 86441 - DNA, 30 bp, Homo sapiens
  chr13:114024465-114024495
  hypo
agtggggcagctcccggccaccccgggctc

SEQ ID NO: 86442 - DNA, 31 bp, Homo sapiens; identical to SEQ ID NO: 9523
  chr13:114048391-114048422
  hypo

SEQ ID NO: 86443 - DNA, 957 bp, Homo sapiens
  chr13:114055640-114056597
  hypo
ggggcagggactctggaggtccgtgtgcttcgtgagagaggggaccctgtcctcctagcaggggtccagcggcaccacagcaagacttctgtggccaagtacacgccatgctcagctctgcccccacccgcacccccggaccatcctgtgtgcagctgggctgccccgggacccacacgcgcgaggggcacccggtgctcaggagcctccacacacagcagctcgcacttagaacccacacgccaagcagaaacccctcgaagcgggctgggagcacggacccctgatttatagaggaggccccgggggccctgtcgggggagctgtggggaccggccccccagagctcagcacagcccggccctccttccagacaccagcactcgcatgtcccagcaggtgagggtgggtcaaacctgctggatctgaagttaattgttcgactggaaggaaacctgtgcgctccccggagcatgacgccacgccgcctccttggcgctgcagagccaaagccactggcgtctgccgggatggaccttccctggaaggagagacctcagccccgcgtgggtaggacgcgcctgctgaacgccctctcagggccgacactggaaaacaccttcctctaaaggaacatccgagtcagaaaacaggtgctcgcagcaggcaccaaagcgcctttgcgaacgcttagggctgtttcaggaaaccgctcagtagcaaaggcagaagatgccaagacaccttcaaaaagcaggaattaactttccacagggagggcaccaccaaaaacaagggtgcggggctgtagggcgacaggctgcatcggttcacgctgaaaatccagctgctccggggccactcaggcagccgtgtggcctcacgggtccgggtttcagaggccaccgagtggcctgggacgatggatcgcgacacggaggtgcatggctccatcat

SEQ ID NO: 86444 - DNA, 327 bp, Homo sapiens
  chr13:114060113-114060440
  hypo
tctggggtggctttcggacaaggctctgcttccccactggcccagcgtctctggctctcccgctgtgcggtctccagggctctgggtgctgcctggcgctggtgcaggcgtggcgcggctcgcaacgctccctgcagctgccatcgccccacaggctttcatacctggtttgggtggttcatttaatgaggacagtgggttctcgcgaacatcatggctggtgatttcctcggcagccttcaggggctgagaagactctattagcagcggccttctgcattcctccagcgcaccgggcactgtcatgcccatcggggtgacaccctc

SEQ ID NO: 86445 - DNA, 221 bp, Homo sapiens
  chr13:114063698-114063919
  hypo
cagggatgaggaacaaagactcgagtattacaggaaaagtcgccttcatggtgccgtttataatgttgaaaaatctagagcatcctcgatgtccaactccagggcggccgcacaatggcacgtccacatttgtgggagaagagtcggtggccggatgcggctggtgacgtggtgccaagtgaaaagctcactctaacccgattgtttttaagaagctgagg

SEQ ID NO: 86446 - DNA, 122 bp, Homo sapiens
  chr13:114064631-114064753
  hypo
gggccgcaccaccaacgcctctgatccacggtctggggaggggcctgggaatctgcattttaacgagtccctggtgattccgaggccgctggtccggggaccccactcggaaccactgaggc

SEQ ID NO: 86447 - DNA, 657 bp, Homo sapiens
  chr13:114074573-114075230
  hypo
tgccagcttttgtttacgatgcttgtggattttgtgtttgtgtgttttaatctataatcagtttgtaaatagactcactttctgattctcacggaggggtttgatttgcggatggagaccgagtccaccctgtttgaatgcagccgcgccctgctcatgcgagctggccttctcttccatacagcagggtggagagggaagcccactttccggtaagcgggcaaaacaggtactacgaccgtgttacttatgctagcaacagttccgacttaccttaattgggtttcttttcctgaaaggtaattctcagttaatttccccacacccacgggtgctgggaccacactccatggacgtgtgtgacgtgaggcccttcgcccccgtgtgcctgtctctctggttcttctgacttaaagcaccagtagcagcacagttagtccagttattcggaagctcagcacggagccacattgctgcagcatagaaggccacggattcctccatcagcatggactacacttcccacaaaacgaacggggcatctctatggaaaaagcaaagcgtgtccctatccctgggacacctctacccctgggacacacctagccccaggacccgcccacccccgggacccgctcaccccgggacaccactacc

SEQ ID NO: 86448 - DNA, 83 bp, Homo sapiens
  chr13:114077018-114077101
  hypo
agtcaggcacagaccgcagtggagcctcacagagacaccctcacccaggggctgcgagagggccctacgggccccggggtgga

SEQ ID NO: 86449 - DNA, 31 bp, Homo sapiens
  chr13:114081077-114081108
  hypo
tcaacatggacctgggcgcagactgaaagca

SEQ ID NO: 86450 - DNA, 176 bp, Homo sapiens
  chr13:114085571-114085747
  hypo
gggcccacggtgaacggccactcaacacggccgctacatggagcatggttgcccgtgacacgccatgcggagacaggccgcagagacaggctgcagagacgctttccagcggctgttgggccactcttgaaggcactcatcagggcctcccttggcccggcgggagggctgcagca

SEQ ID NO: 86451 - DNA, 30 bp, Homo sapiens
  chr13:114086979-114087009
  hypo
tgggacggccaggccggcagagctgcgtgt

SEQ ID NO: 86452 - DNA, 30 bp, Homo sapiens
  chr13:114087949-114087979
  hypo
cagctccaggcccccgccccccaccccaca

SEQ ID NO: 86453 - DNA, 144 bp, Homo sapiens
  chr13:114107395-114107539
  hypo
tgccacttttagcagcggtatcaggtaacaccatccgctgaaggaccgcactgccttcaaagctctcggaggcttactgggagaactcgagcagccagtgttccctccagcccgcacaccggagcgcggtgggcccagcctacc

SEQ ID NO: 86454 - DNA, 99 bp, Homo sapiens
  chr13:114108040-114108139
  hypo
ggggctcctctcgctgtccctggaaggagtgcgcacacttccccgtgtgtggcgtggggtgatgcgggagcagatgtgtgcaggcgtgcctgtcactgc

SEQ ID NO: 86455 - DNA, 30 bp, Homo sapiens
  chr13:114108698-114108728
  hypo
ggctgtgtctctcccgtctccttcctcggg

SEQ ID NO: 86456 - DNA, 190 bp, Homo sapiens
  chr13:114115106-114115296
  hypo
cccagcctgagaggagcttcccgtgactgccaagaagccacgttctgaggaggccccggagtggccccagctcagccctgcagtctccggcaaggtgacagagccaagtggcaacctgtctggacctgcggatctttgtgtgggatgttcatctgctgaaaacctccacgtgtgagacctgaggtggatg

SEQ ID NO: 86457 - DNA, 410 bp, Homo sapiens
  chr13:114122881-114123291
  hypo
aggactcctgactggtttaaacgcgagacgtgccacgctccatcaacctctccttcagacaagcggcctatgaggacgcagcactaaagggggcgggggagggccctggacaggcggggcggaggcagcacagtgtgtaaccttccctgaatctgcgcataaaagcagatgcagcaattagaaagcaaagccaaacacccagaggcaacatttaccataaatttaggtgagaaagtatcaccacaaacccaagttgtaagctaggggatgagccactgccagcaacaggacccgtgtgttgccgtcatgccggggacgtggggggcacagggcctctgacagatgtgagaacaggagggcctcagaggtgcctacacgccgggaccaggtaaggacgagcctgaagtagg

SEQ ID NO: 86458 - DNA, 207 bp, Homo sapiens
  chr13:114148518-114148725
  hypo
ttactttaaactgtaaatctgcgtaagtggtaggtgttggttttgttgccttttttgggatagctacttgtgactggtgatctcctagtggccaaattccacggactctacgtttattactccttccttccacggtctcggtttcccacctctcagctcgttctgccttagtgacctttgctggccgctgtctcatcctgctttctg

SEQ ID NO: 86459 - DNA, 31 bp, Homo sapiens
  chr13:114185373-114185404
  hypo
catagtgggaggcacccggctcccttagtga

SEQ ID NO: 86460 - DNA, 61 bp, Homo sapiens; identical to SEQ ID NO: 27358
  chr13:114185956-114186017
  hypo

SEQ ID NO: 86461 - DNA, 30 bp, Homo sapiens
  chr13:114187533-114187563
  hypo
gctgcttctgtggccgttgttgatcccttc

SEQ ID NO: 86462 - DNA, 139 bp, Homo sapiens
  chr13:114188350-114188489
  hypo
ctttcccagcattgtcgtggaagttctccgaatcctggttttgattggtcagattcttttttcactagcggcggtttttcttttatgtcttgttataaagaagtatctcattggaccctattatcggaagctgcacatg

SEQ ID NO: 86463 - DNA, 86 bp, Homo sapiens
  chr13:114188956-114189042
  hypo
cagctggggcgtggtcgcgctcatgtatagaccagctgctggagagactgagctgggaggatggcttgagcccaggaggccaaggc

SEQ ID NO: 86464 - DNA, 753 bp, Homo sapiens
  chr13:114189670-114190423
  hypo
gagtctcagtagtcctgacagcgcacctgggcaccgtcaccattgtcccaacagtgcacctgtgcaccgtcactgttcagcccggcaggtgctcttcctgctgtttatcccagagaaatgaagccgtgttcacacagtagcctgtacacaggtgtttatagcagctttattcgtattagccataaacagtccaaaggtacttcagtgggtaaataaatgttcaacaaactgagctatgtccataccacggaacgccacccagcagtaaaaccaccggcacacacctccgagaactgcgcagagtgggcaggcagcccccaaaggctgcgtactgtgtggttctttttatgtcacatttatgaggcgagaagattctgaagttgaggaaaggctcgtggttcccaggaattgaggatgggcagtctggggaggggctggggatggcactcgctgtcttcgctgtgtctgtatcggcacctgagtgggggtctggggaggggatggggatggcattcgctgtgtttgctgtgtctatatcggcacctgagtcggggtctggggagggactggggatggatggcactcgctgtctttgctgtgtccgtatcagcacctgagtgggatcttgtgctgtaatttggcaagatgttaccattggggaaactaaagggtaatgaggactttgtattactcttaaaactgcaggttaatatataattatctcaaaataaaaagtttccggctgggcgcggt

SEQ ID NO: 86465 - DNA, 30 bp, Homo sapiens; identical to SEQ ID NO: 27362
  chr13:114192832-114192862
  hypo

SEQ ID NO: 86466 - DNA, 118 bp, Homo sapiens
  chr13:114193121-114193239
  hypo
gcgtttcgcagagctgcgctgaggctcccgtgtcgcggccgtccggccggcgcgctgatgtggctgcaaacctgggtatcagatcagccgccgtggacacgccgatgcttctcgctgg

SEQ ID NO: 86467 - DNA, 30 bp, Homo sapiens; identical to SEQ ID NO: 27363
  chr13:114199040-114199070
  hypo

SEQ ID NO: 86468 - DNA, 30 bp, Homo sapiens; identical to SEQ ID NO: 27364
  chr13:114201781-114201811
  hypo

SEQ ID NO: 86469 - DNA, 449 bp, Homo sapiens; identical to SEQ ID NO: 27365
  chr13:114202508-114202957
  hypo

SEQ ID NO: 86470 - DNA, 348 bp, Homo sapiens
  chr13:114203746-114204094
  hypo
tccttatactgagtgtgaccacgctcagcctcttgctcgccccggtgctgtggagagctgcaatcacgaggtgtgtgcccagaccggagagacggtccagcctctgatggctcggagatgatggaccgtggaagggaagcgtctgtggggagtgagcgcttagatggccagcagctgctccttctgggaagctcgcaccttggcaacagaacagccctctagcagagcgtcagtgcagtcgtgttatcccggcttttacagaatattcttgtcctattttagaattttccggagtagtttatttgcagtctgttgattatgtgcagtagacccgggacactgcgtttt

SEQ ID NO: 86471 - DNA, 181 bp, Homo sapiens
  chr13:114205068-114205249
  hypo
ggcctcacctcccaacgcttgcagtgcacatcgaggggacagaagcatttgaaccgtagcaggtaccgtattaggctttttcaactgcatgaatttttttaattgacagataaaagtcaacatatttattgtgtacaacatagcaagtactttaagccagggttttcgtatacctgtcagc

SEQ ID NO: 86472 - DNA, 31 bp, Homo sapiens
  chr13:114206580-114206611
  hypo
agccattctcaaccagcgaggcctctgtgtc

SEQ ID NO: 86473 - DNA, 43 bp, Homo sapiens
  chr13:114212468-114212511
  hypo
gtttccctggttcccagtgggcgggggaaacataagagtgggc

SEQ ID NO: 86474 - DNA, 30 bp, Homo sapiens
  chr13:114221385-114221415
  hypo
ttggtgaacaaatgccgcggccaggcaggt

SEQ ID NO: 86475 - DNA, 51 bp, Homo sapiens
  chr13:114237563-114237614
  hypo
tctgggcggaggcccgtcgtgggcttggaggccaccgggtccagcagaggc

SEQ ID NO: 86476 - DNA, 31 bp, Homo sapiens; identical to SEQ ID NO: 50949
  chr13:114238865-114238896
  hypo

SEQ ID NO: 86477 - DNA, 43 bp, Homo sapiens; identical to SEQ ID NO: 27369
  chr13:114244324-114244367
  hypo

SEQ ID NO: 86478 - DNA, 146 bp, Homo sapiens
  chr13:114246190-114246336
  hypo
gatgattctggttgttcgggtactggccatgcactgctctctgtatctttgtgtgtagcccaagcctggaaaagcatccgccctttgtacctttttcccgactggctgagattcccgcagcatcccgactccgcttcagggctcct

SEQ ID NO: 86479 - DNA, 851 bp, Homo sapiens
  chr13:114251688-114252539
  hypo
cccaggcctggaccccgtcgcgctgtctggcagcgtgtgctgcatttccctctggaggattttcccaccggaacctgtgtgatgtgttgtggaggaagctgtgtgaggcaggggtcccggggcctgaacggctggaccttgctagccctgcgacctcaggtggggactcctggcctctgtgtgctcgcctgtcccacgtgggcggccagctgccctccctacagggcagtgagggagaaaggagggcgtcagctgcttgccacgtcctggctgaacttggatggattcaaaagagtgaacataaggctttgacgaaattaggagcacctcacaggcctgggcgctgtgtaagacctcctcccagccacgaggggctgatctgatcagagctggagggacggccattgccgtgtgtccaatgtgagggctctgagctcaggagccagcatccagacacgctggggactctgcggcctctgtctttgccccagtgttgcacagaggggccctggctttccctgggcactgtttagaatgattgagggggtggcaggtggccagaaacgggagaggtggagtctccgaggcagcaggcctcccctgcaggctgctgcttccaggagggctgcaggcacgaggtgttcaaatgcagcagtgacttcataagaaaagggagtggagccgccgacatttcaggtgagttgtcatcaagagtgcagaatccaactgtgttgggagccacttgctggtgcctggccaagttcccgtctggtccctctactccccaccaccccagccctggaaaaccgtgcctgccaggttcataccacacaacccggtgcagcccaccc

SEQ ID NO: 86480 - DNA, 31 bp, Homo sapiens; identical to SEQ ID NO: 27372
  chr13:114256383-114256414
  hypo

SEQ ID NO: 86481 - DNA, 86 bp, Homo sapiens
  chr13:114258209-114258295
  hypo
caatatgttaaaaacacgaagctaggccaggcgtggtagcttacacctgcttgagcccaggagttcgagaccagcctgggcagcgt

SEQ ID NO: 86482 - DNA, 30 bp, Homo sapiens
  chr13:114264423-114264453
  hypo
gcgtgtgctcttgccgtgtggctgtactgt

SEQ ID NO: 86483 - DNA, 31 bp, Homo sapiens
  chr13:114264680-114264711
  hypo
atcacacgtgtgaccccgctgtgtggttgtg

SEQ ID NO: 86484 - DNA, 245 bp, Homo sapiens
  chr13:114271764-114272009
  hypo
gctcacctgcagaaccgttcacctgcagagcccttcacctgcagaaccgttcacctgcagagcccttcacctgcagaaccattcacctgcagagccgctcacctgcagaacccttcacctgcagagccgctcacctgcagagcccttcacctgcagaacccttcacctgcagagccgctcacctgcagagccgctcacctgcagagccgctcacctgcagagccgctcacctgcagagctgctca

SEQ ID NO: 86485 - DNA, 30 bp, Homo sapiens; identical to SEQ ID NO: 27374
  chr13:114276770-114276800
  hypo

SEQ ID NO: 86486 - DNA, 30 bp, Homo sapiens
  chr13:114281662-114281692
  hypo
gccggcaggagcagcggcctgtgtgagccc

SEQ ID NO: 86487 - DNA, 30 bp, Homo sapiens
  chr13:114282671-114282701
  hypo
agcttggattccagccgtgagcacagtagg

SEQ ID NO: 86488 - DNA, 30 bp, Homo sapiens
  chr13:114283509-114283539
  hypo
cagcactgcatgggccggatgccgcggggc

SEQ ID NO: 86489 - DNA, 945 bp, Homo sapiens; identical to SEQ ID NO: 27375
  chr13:114283924-114284869
  hypo

SEQ ID NO: 86490 - DNA, 755 bp, Homo sapiens; identical to SEQ ID NO: 50950
  chr13:114285597-114286352
  hypo

SEQ ID NO: 86491 - DNA, 20 bp, Homo sapiens
  chr13:114286822-114286842
  hypo
tggtgcttggggctcacgcc

SEQ ID NO: 86492 - DNA, 31 bp, Homo sapiens; identical to SEQ ID NO: 27377
  chr13:114287596-114287627
  hypo

SEQ ID NO: 86493 - DNA, 42 bp, Homo sapiens
  chr13:114288212-114288254
  hypo
ccagaaaaacataagacggcgcgtctacgatgccttaaacgt

SEQ ID NO: 86494 - DNA, 101 bp, Homo sapiens
  chr13:114290174-114290275
  hypo
gtccaggccaactcctcgctgtcacgtggacgcagggagggctgtgaggacccctcgagcacaggggctgcgttcttgtgccgccacgggccacctggctc

SEQ ID NO: 86495 - DNA, 30 bp, Homo sapiens
  chr13:114290657-114290687
  hypo
gggagaataggcctcgatttgcctctcatc

SEQ ID NO: 86496 - DNA, 30 bp, Homo sapiens
  chr13:114292205-114292235
  hypo
tgccaggtgacagtcgttgagggtgtggga

SEQ ID NO: 86497 - DNA, 30 bp, Homo sapiens
  chr13:114292725-114292755
  hypo
gtctgccatcacggcgcacgtgtttttcag

SEQ ID NO: 86498 - DNA, 693 bp, Homo sapiens
  chr13:114293924-114294617
  hypo
ctttaaacattaggaacgtagtgagctctggttggtggtaggtttttgtggtgctgccagccctctgggttctcagtccccgctgccagattcgacccacgctctggactccatcctgtcctgccccgggctctcttttttcctgttgctggttatgagtgaaagtcccggagggagggatctaatggttttacagtttgttccctctggggcactgctcctgatggaatgatgagtgagggagaggcagcgtgtggctctgctcagcctcctgtttctgtcgttatgggttccaggagacagggccagaagagaaccagacagagatggagtaagtgccagagcgttggcgtgctgtagtgcagacactcagcctccccgttctgtttgtgtgactgacaaaacccacacctgtggggcacagcctgtcatttgaccacaagccctgaggcggggggaggctgggtgggccgcctgcactgacggcgccatccgcctcctgccttgcagtgacctgaccaacggtgcagatgggatgctggccacaagctccaatgggtctcagtacagcggctccagggtggagactccggtgtcctacgtcggggaggacgacgaggaggacgatgacttcaacgagaatgacgaggacgactgacgtcctccccacttcagattcggcttcaggaaaac

SEQ ID NO: 86499 - DNA, 57 bp, Homo sapiens
  chr13:114294961-114295018
  hypo
atgccgcttatttgccgtgagtttggacggcacccctgctggcggatagcaagactc

SEQ ID NO: 86500 - DNA, 30 bp, Homo sapiens; identical to SEQ ID NO: 27379
  chr13:114295265-114295295
  hypo

SEQ ID NO: 86501 - DNA, 151 bp, Homo sapiens
  chr13:114295751-114295902
  hypo
tttttattaataaaacgcgcatgggcattttaaacaagctgtgtttctctaattcaggattattatctagaaatttgtctgtcttgttggttttactttatacttgagtgagaaagtaggttgttaggcccagacgcggtgggcccgggtg

SEQ ID NO: 86502 - DNA, 30 bp, Homo sapiens
  chr13:114296439-114296469
  hypo
ggctcagaaaagacccgagaagaccttacg

SEQ ID NO: 86503 - DNA, 138 bp, Homo sapiens
  chr13:114300530-114300668
  hypo
ggcagagccctgtacacggtggggatgtaaagagccgcagccactatgaaaaaccaaatggctgtttttcacagaattaaaaacagaattaccctatgcccggcaattctgctcagcgtatacacccagagacatttg

SEQ ID NO: 86504 - DNA, 506 bp, Homo sapiens
  chr13:114302290-114302796
  hypo
ccgtgtcttctgtgctggtgtcgcacccgccggccaccgccaccctgcgtcttagacgtcccgccgcagctgtgtttccacctcatctccagcttgagtggcagccagcggcgccacctgcacacgagccccctccattcgagaagcacagactatgagtgtggccacgcgtcccatgacgtgaactcacgtctgcgccgagacctttgccggcggttttttactgacggagtaagcactggagatgcttggtacagcgtcttccatcggtaaattgatttagttaaccttacaacatatctgcaaggtttttaatctttcttccaagaccgtttctcatggacttttctgtgtgtctgttgggggctgacggacttcgacgcgccagtcgcttgtgcttggggccctttgggtactaacagccacactgctgagcatgtgaaatcaggacccaggctgcacaccgccgtcggggtgagacgcccgtggccttgcatgatgaaact

SEQ ID NO: 86505 - DNA, 30 bp, Homo sapiens
  chr13:114303262-114303292
  hypo
tcattagtgtaagccgtgtttcatatcagt

SEQ ID NO: 86506 - DNA, 32 bp, Homo sapiens
  chr13:114303497-114303529
  hypo
ggaagaactgatactcgcgagcaggtccttca

SEQ ID NO: 86507 - DNA, 549 bp, Homo sapiens; identical to SEQ ID NO: 27383
  chr13:114304587-114305136
  hypo

SEQ ID NO: 86508 - DNA, 30 bp, Homo sapiens
  chr13:114305731-114305761
  hypo
gcgtgctgctgacacgctactcagatgctt

SEQ ID NO: 86509 - DNA, 30 bp, Homo sapiens; identical to SEQ ID NO: 27384
  chr13:114312312-114312342
  hypo

SEQ ID NO: 86510 - DNA, 293 bp, Homo sapiens
  chr13:114318213-114318506
  hypo
ctaaacgtgcaattacgacacttttaggcatttaccccagagaaatagaaacttctattcacacaaaggcctacacagatgtttatagcagctttatagctaaacactggaaacgatccagccgtccttcaaccggtgaacggcgaaacggactgtggcactctcctctgtggagcacaccacagagacgaggagggaatggctgacacctgggaacagtgctgagtgagaaatgcaggtcctgaaaggctacatagtgtctgactccattcatgtgacgtgcttagagaagt

SEQ ID NO: 86511 - DNA, 30 bp, Homo sapiens
  chr13:114325814-114325844
  hypo
taccacatctacaacgtgaatgaggagaac

SEQ ID NO: 86512 - DNA, 358 bp, Homo sapiens
  chr13:114460622-114460980
  hypo
ctggaacagtgtctggtatatcgcggatgtttagtaagtcttgagaggctcactgagtgaacagtgttaattttcatggtttaaaactttatataaatggtaccatactcgctgccgtacttgctgtcgtactcgctgccgtactgtgcacttgcatttttgctccgcgttctgtttttggcatttatccacattgatccatgtagctctcatttattttaactgccatgtggtatttcgctgtatatgcccatttctttatcgcttctccccgtgttggatattcagggtgtgtccggtgctttggacacacagtgttgtgaggaatattctgtacgcatcttctagcacatgcata

SEQ ID NO: 86513 - DNA, 503 bp, Homo sapiens
  chr13:114497775-114498278
  hypo
tcaagcatgcacatgtgtgtgcgtgtgatgagcacacattagggttgggcacacgccctgccgtctggggttgcttctcagaggcgcgtgccgagggcccggggatggcaacgcccttccgtgcagaaggcgcctgggtgggtcttgcggaatagacgcgtgaggacgacccgcagggtggagtccggcctggccagggctggaagtcataggacgaaaggtagaggtgagaagaggcagttctgtgaaagaagccccgacctcgagctgggactttgaattggtttgcgtttgaaaaccggggttggtaaaagctgggcacccacacctctccttctgttgcagctggtggcagcgatcgtgtttatcagttttggcgtggtggccgccttctgctgcgccatcgtggacggcgtatttgcagcacagcacattgtgagtacattgtcattgtgtgcacagtcgctttccggggctgaaagagtcgacgtgaaaaaagtaca

SEQ ID NO: 86514 - DNA, 264 bp, Homo sapiens; identical to SEQ ID NO: 27386
  chr13:114502705-114502969
  hypo

SEQ ID NO: 86515 - DNA, 67 bp, Homo sapiens
  chr13:114515833-114515900
  hypo
ggtgggtcacaggtcccgagtgggtcacaggccccgggtgagtcacaggccccgggtgagtcacggg

SEQ ID NO: 86516 - DNA, 71 bp, Homo sapiens
  chr13:114517648-114517719
  hypo
aagctctgccagcctgagtcacggtctgatgaaccccctctctgggctccgctggggccttctgatcccag

SEQ ID NO: 86517 - DNA, 30 bp, Homo sapiens; identical to SEQ ID NO: 27387
  chr13:114536567-114536597
  hypo

SEQ ID NO: 86518 - DNA, 231 bp, Homo sapiens; identical to SEQ ID NO: 27388
  chr13:114537012-114537243
  hypo

SEQ ID NO: 86519 - DNA, 177 bp, Homo sapiens
  chr13:114551824-114552001
  hypo
attatcaggaatgaggaaacccggcttcaggatggttgtgggattcacctgggggcatgaaggtcaggattagcaggcgctggtagcattttgcagagtagcagacagaggcggtaggtacccagcgccgtctgcaacgcgcctctggcttcatgcgctggctctgcatggcctttc

SEQ ID NO: 86520 - DNA, 301 bp, Homo sapiens; identical to SEQ ID NO: 9525
  chr13:114565969-114566270
  hypo

SEQ ID NO: 86521 - DNA, 79 bp, Homo sapiens; identical to SEQ ID NO: 9526
  chr13:114566409-114566488
  hypo

SEQ ID NO: 86522 - DNA, 170 bp, Homo sapiens
  chr13:114616941-114617111
  hypo
gggagatgaatcacacgtgagccgacggtggaggaggcattgatcgggagatgattcacacgtgagccaacggtggaggaggcattgatcaggagagattcacacgtgagccgacggtggaggaggcattgatcaggagagattcacgcgtgagccaacagtggaggatg

SEQ ID NO: 86523 - DNA, 190 bp, Homo sapiens; identical to SEQ ID NO: 27391
  chr13:114617342-114617532
  hypo

SEQ ID NO: 86524 - DNA, 30 bp, Homo sapiens
  chr13:114741915-114741945
  hypo
ggggagcgccagctcgcagctccgtgtcag

SEQ ID NO: 86525 - DNA, 30 bp, Homo sapiens; identical to SEQ ID NO: 27392
  chr13:114742406-114742436
  hypo

SEQ ID NO: 86526 - DNA, 30 bp, Homo sapiens
  chr13:114744516-114744546
  hypo
agcctgtactgagccgaacagaaaatcccc

SEQ ID NO: 86527 - DNA, 30 bp, Homo sapiens
  chr13:114747463-114747493
  hypo
tgctgtgtatttaaacggcgcttcccacac

SEQ ID NO: 86528 - DNA, 30 bp, Homo sapiens; identical to SEQ ID NO: 27393
  chr13:114748282-114748312
  hypo

SEQ ID NO: 86529 - DNA, 524 bp, Homo sapiens
  chr13:114748560-114749084
  hypo
aggtgggctttctgcggagggcgtggcggtggtggcagcggttctgggagagggaaaccccagcgccacttgtctatgggccgggacggcgtgcatctcactttgccggctctgcgctcttccttctcttctccctcccaaaggctgcggctttgcatgggcagcttgctggcgccactgggcgcgtcccgcagactttaaatggaatgagtggaggtctcggactgctgccggatgtagttctggaagctcttgtctccgatggggtgctccctgaaaagggggatgggagagggaatgaggcacagaccccgttgcctggtgctcacccgtggctgcgggagcttttcctgttcctaaatgtgacacactcacactgcaatccacacaaaaaatagaggagccaaaggaaccacagtgcccccggaagcacccacggtgactctgatgtgtgtgcacaggtgggtcaggcgtgcaagtacatgtgcacgtgtgctctccctgtggcacgtgtgtagcgcata

SEQ ID NO: 86530 - DNA, 257 bp, Homo sapiens
  chr13:114751038-114751295
  hypo
cgcccactacactggccgtccagggcaggcacgggagtggcactcactggcttccatatttcgtcttcttgaacttgtccctcttatactgggcgtgctcctgctccaaagccccaaccccagcgatgacttgctttagcgtcttgtaggtctcctgggggtcgtcaatgacgaacgtcgaatactcctcctgctccgggccgtcatacacagatttgctcccacaggcctctgtggagggcggaggggtcagcgca

SEQ ID NO: 86531 - DNA, 169 bp, Homo sapiens
  chr13:114760877-114761046
  hypo
gtgggaggattaaacggtggcccagcatggagcacagctcatcccctgcagggcccttatgcgaaagcatcacgtggccacaacaacagcgaggtgcatctcacggagcataaccagggggaccgccaggcacccaggcctcctccttaggaccggcagatatgaccca

SEQ ID NO: 86532 - DNA, 30 bp, Homo sapiens
  chr13:114761592-114761622
  hypo
ggccgggaagacaacgggctgctgcgtcat

SEQ ID NO: 86533 - DNA, 362 bp, Homo sapiens
  chr13:114764875-114765237
  hypo
ttgatgcgagattccgacacaaactcaccagcacctggtgaacaacccgagtaacacgaagactctgagaagcctggagtgcagtgggtggggaagggtgagcccagggccaggtacgggaagagagcagagaaaacctggccaggcctcaacccgaaagagaggcttgggggccccacactcacgtttttcattttgaaagactcctcctccagcttctccactgccaggatgttctcgatgggaatgctgtagagaggctggtcccctgcagcagagatggactgtcagtgggtgcgggccccgctgtcccggctggggtccgggtggggctgaggggtctctgccggggggtctcccag

SEQ ID NO: 86534 - DNA, 213 bp, Homo sapiens
  chr13:114766177-114766390
  hypo
gccccgggctctgcccgcagcactgaatccttcctcccctcagctctccccctgaaaaagcagactcagtcccagggcccagcacgctccagcaagagccagggaaagcgaccttgctccttacctttgcttttgtggtaggtaaattcatggttggtcaagcgaaaccatctcttcttaaaattcttcatcccaaagcgcttccgtccttgg

SEQ ID NO: 86535 - DNA, 229 bp, Homo sapiens
  chr13:114767008-114767237
  hypo
aggacctacagccgcgggctcagggtcagggcggacagtggatgcccacacaacacagaggacctacggccacaggctcggggtcagggcgggcagtggatgcccacacaacacggaggacctgcggccgtgggctcggggtcagggcaggcagcggacgctcacacacggaggacctgcggccgcgggctcggggtcagagcgggcagcagacgcccatactcagagg

SEQ ID NO: 86536 - DNA, 443 bp, Homo sapiens
  chr13:114767520-114767963
  hypo
gctcggccttcattgccgggcaggggtccctgaccagaaccggcggccgagctggaggagaagaaagtggccagacagagtgactggaggacagaggtggaagctgaggacgagaagccaagctggagagacagagtggggaggtgggcgggggagacgcacctcgacaagcgcactcagaaatcggaaagaggggctttgagcagcaacacagccagatgtggccagagagctgtggacgcacaccggagggtgtggaagctgctgggagctgttcaagagagaaaagggcggggcgctgggagccgccaggacagcgcagttcacaaccagtggatgccgaacgccgttcattccagggattcacaggcaggaagtcagcccaggaggctgttgaggaccagcaggacccagtgggatgcgcagggcggggcctacacaga

SEQ ID NO: 86537 - DNA, 78 bp, Homo sapiens
  chr13:114768254-114768332
  hypo
gtcggttttctaaccgggcccatcgcgcgtgtgggacggggaggcaggagccacggctaagccggaagcctcaggctg

SEQ ID NO: 86538 - DNA, 313 bp, Homo sapiens
  chr13:114769879-114770192
  hypo
gccaaaggacagggggatagacgtttttcagaagacaaatggccaacaagcatacgatataaagcccagcgtggctcatcacctgaggaatgagagccagagctgcctgtgaccccacctcacgccaggcagaacgaagccacctgcgaccccagctcacgccaggcagaatggagccgcctgaacccagctcacgccgggcagaatggctgggatcaaataaaacacggaaaaatgacagacgctgcagagctgtggaggacgtgagcgcttgcacgctgtggggaatggaaattagcgcttaaggaaaccc

SEQ ID NO: 86539 - DNA, 30 bp, Homo sapiens; identical to SEQ ID NO: 27399
  chr13:114771083-114771113
  hypo

SEQ ID NO: 86540 - DNA, 75 bp, Homo sapiens
  chr13:114773206-114773281
  hypo
caagtgagtccttccccgagggctgtggggcctctgctccccactgtgccaccccagccccggcactgccacaga

SEQ ID NO: 86541 - DNA, 282 bp, Homo sapiens
  chr13:114774838-114775120
  hypo
gtcggagggtgagtcgatacttacgttcttcaccgcatcagcatatttctgctcattgaagaattcataaaatgtagccatgtaggactccttaaaactcgcctaaaatgaaacggagatcactcgaggacagcccgaagtacctcggctcacggcccaaatctgaaaaagctagaggcaagaactgtccaagcctaaatgacgataaacaggcaaagaacccggtgttaccgggcaagtgagagcccgcagggctgcccggaggacgaatcacataaatcg

SEQ ID NO: 86542 - DNA, 230 bp, Homo sapiens; identical to SEQ ID NO: 50954
  chr13:114776259-114776489
  hypo

SEQ ID NO: 86543 - DNA, 30 bp, Homo sapiens; identical to SEQ ID NO: 9528
  chr13:114776875-114776905
  hypo

SEQ ID NO: 86544 - DNA, 30 bp, Homo sapiens
  chr13:114777688-114777718
  hypo
ttgtgacactgtctcgactcccccagaacg

SEQ ID NO: 86545 - DNA, 126 bp, Homo sapiens
  chr13:114778696-114778822
  hypo
actgcagtgtacctgacgtccgggtcatctgcgggagagagaagcagggtgaccgttttcctcgggcacaatggcctcgtggggacaccatgccccggccccctgagggtccgcagggaagtccag

SEQ ID NO: 86546 - DNA, 108 bp, Homo sapiens
  chr13:114779900-114780008
  hypo
acacagaagcgtggacggctctgcaggaccatggccaccccggggtgtctgcagctgtcccgaggccacaggacacgcaaggaagagaggagccggcagcaaggccct

SEQ ID NO: 86547 - DNA, 528 bp, Homo sapiens
  chr13:114780555-114781083
  hypo
cggaactggggttcacgaccccgcagttctagtctagccagggctgcggggggttctgcctgggtgggagtcaccctgcacagcgctatggcagtttctcagcaacatgagggtgttcagggcactcaccctggaagcgcttggccgccgcctcccggagggagaagaagatgtcacacatgacggtcgggcagctcaccccagactcagtgatggcgtggaagacgcggtccacatactgccgtaggttctcctgcaacgggacacggcactgggacccactcccgaggctgcccacaggtgcgtgtagcaccagggcacgcccagggaggggcgcgtggggaggggctgagggcgggcgcagggcagctgcggcagtgagacacgtgtgaacagccactccctggaaatctgtgctgggagctgtggcaattcacgcgtgaaaatcactacacaggcaccacgtcggctccccggctcggccccgacctcgtttactgagtggggaatggacgttcactagaatgt

SEQ ID NO: 86548 - DNA, 30 bp, Homo sapiens
  chr13:114785928-114785958
  hypo
gcccgtgccgtcttcgtagaatcaaaagac

SEQ ID NO: 86549 - DNA, 43 bp, Homo sapiens
  chr13:114786708-114786751
  hypo
gaaactcatcaagccagagctcgtcagagctacatgcaaagta

SEQ ID NO: 86550 - DNA, 46 bp, Homo sapiens
  chr13:114789999-114790045
  hypo
agtgccagcatttcctactcacggcgcccctggaggggcagaccca

SEQ ID NO: 86551 - DNA, 145 bp, Homo sapiens; identical to SEQ ID NO: 27405
  chr13:114791747-114791892
  hypo

SEQ ID NO: 86552 - DNA, 154 bp, Homo sapiens
  chr13:114799637-114799791
  hypo
tccgtggctatccacgggctaaaggagtggcctgaccaccaaagacaggagaaagtgcctgacccaagaataaccaagaatccccactgcttcatccccgttctcaaatgccgggcgcaaactctctcaggacagaagcgttcagatttgcaag

SEQ ID NO: 86553 - DNA, 22 bp, Homo sapiens
  chr13:114802295-114802317
  hypo
agccaccgcgcccagcctggag

SEQ ID NO: 86554 - DNA, 31 bp, Homo sapiens
  chr13:114802664-114802695
  hypo
ctttgtggagatgcaacgtctgagtcctgat

SEQ ID NO: 86555 - DNA, 30 bp, Homo sapiens
  chr13:114804860-114804890
  hypo
aggaagccctcccgcgtcccaagggcgctg

SEQ ID NO: 86556 - DNA, 30 bp, Homo sapiens
  chr13:114805385-114805415
  hypo
ttcgacaatggacacgggagaccagaacgc

SEQ ID NO: 86557 - DNA, 44 bp, Homo sapiens
  chr13:114807146-114807190
  hypo
gcctagggtgctttccgtgtgtgtggacacgcacgtgtgtgcat

SEQ ID NO: 86558 - DNA, 392 bp, Homo sapiens
  chr13:114807561-114807953
  hypo
ttatatgtgtaaattcgcatctgcaaccattattatctgcttatacgttcacctcattccagaaacattcccgaggcgcggcaaacgtgtgcccatcccatccccggcaggacagggcttgtcaggcgctgggcaccgagccatctcccatcctgcgtcccttcatggcaccaccatgtcaaccctgccagtggcctccgcacactgcggaccacgccacccaccacggtgagcacccacggcagcacatgcacctctgttgaccgatgcacgtgaactcctagggagtcgcacacacatgtgaagtctgagcccatcacagagcacacacgagagcaggagtgaggaaggaaatgttggcagactcctcacgtcttcgttctgcacccaga

SEQ ID NO: 86559 - DNA, 30 bp, Homo sapiens
  chr13:114816400-114816430
  hypo
cagaggaacagggacgatgaagaaagccca

SEQ ID NO: 86560 - DNA, 30 bp, Homo sapiens; identical to SEQ ID NO: 27409
  chr13:114827286-114827316
  hypo

SEQ ID NO: 86561 - DNA, 229 bp, Homo sapiens
  chr13:114841889-114842118
  hypo
gccaggcctcaggtcggtcatcccatgtcagaagacaggctttccgaaggctcccaccgatgtgaagatcccacacgcagcacacgcacacacgcagcgcacacacgcagcacacgcacgcaggcagcaccgcacacacacgcagcacacgcaggcagcacacgcacacacacgcggcacacgcaggcagggtgtgtgatgagttcacaggcacgaaggggagaacatg

SEQ ID NO: 86562 - DNA, 30 bp, Homo sapiens; identical to SEQ ID NO: 27410
  chr13:114843009-114843039
  hypo

SEQ ID NO: 86563 - DNA, 30 bp, Homo sapiens
  chr13:114844710-114844740
  hypo
ttcccacgtcatcacggcgttttactcaac

SEQ ID NO: 86564 - DNA, 30 bp, Homo sapiens
  chr13:114845180-114845210
  hypo
tagagacccctctccgggctctgagctgct

SEQ ID NO: 86565 - DNA, 30 bp, Homo sapiens; identical to SEQ ID NO: 27411
  chr13:114847024-114847054
  hypo

SEQ ID NO: 86566 - DNA, 30 bp, Homo sapiens
  chr13:114847314-114847344
  hypo
acccccagggcccccgtgttcctagcgcag

SEQ ID NO: 86567 - DNA, 262 bp, Homo sapiens
  chr13:114855482-114855744
  hypo
catgtcacggatggaacgcattctgtgtatttgttaatcactgatggatgtttgggctgttcccagctttcagttgttgtgaatggtgccgctgtgaagtgtgcacaagttcccatgtgaacacggacagctttgggattctcttgattatttaccaacgggtggggccgcacggcaacaggtttaattaccctaggagccacccggctgcctgcccagggccgtgccttcacacctgcctgcaaagcgcaagcgttaccat

SEQ ID NO: 86568 - DNA, 30 bp, Homo sapiens
  chr13:114861674-114861704
  hypo
ctgggaagggagtgcgcaggcccaccccgg

SEQ ID NO: 86569 - DNA, 1063 bp, Homo sapiens
  chr13:114867636-114868699
  hypo
cagtgccagaaaacagagagacgggggctgtgaagcacaggatccacagcgggcgggtggtaggcgggcagcaggtgggcggtaggcgggcagtgggcaggcagcgggctgagaagcagagcagagccccagccaggagcccagagggcggcagagcagcgggcaccgaaccagactgtcggacctgtgctgggggagagcgagagtgaaggaggaagagagacggagacagagagacggtgagagggagagggacagagagggagtgagagcgcttcccacaagaagaaccaagctcaggtcccaccctcccccagagcctggtgcagctgcgtgggacgggcaggaggtgcgaggggccctgtctctgacgttttgtgccagcactgccctctacacacaaactctcaggaaccatcacgaccccattttgcaggagaagatgctgaggcccagggcggtgagcaggccacatggccggtggcaggggcagaagtgggactgcagcccaccaggtggtgtcacagccaaggctgcggcgtcactgcctgtcctgcctcacctacccccagggcgacgctcccgactaaaccacctctgtcctatggtctccggggcttcctgacccctggggagggcggcaaagcctgtggaggctggagtcctgtgggctggggacgacgggaagaccaagtcgtctgtataatcgccgtgggcgcagccggcagtgccacccacccacccacaaggcaacacggggcctgagtccagccccaggcaggtgggctcccagagttggggtccctgaaccaaaccacccctgctgctcgctcacccctaagagtgaggctgcgatgctgtcagccaaggacactcacgtgggcagctccggtgcagccggccccagggggagaaatgcagctgtggctgtcgtggaggtggctgtggccaatggccgtgactgttgctgtgtctggcagagaagccaggtgcactggctctgtgcttcaaggagacctagagggtctcccccaagtccaccggaaatgtgtgcacattcgcc

SEQ ID NO: 86570 - DNA, 85 bp, Homo sapiens; identical to SEQ ID NO: 27414
  chr13:114869699-114869784
  hypo

SEQ ID NO: 86571 - DNA, 71 bp, Homo sapiens
  chr13:114881846-114881917
  hypo
tttcataaacatgccgcattctgaggaatccgaaagactccagcgtaggacagaccgctgttccaagccac

SEQ ID NO: 86572 - DNA, 30 bp, Homo sapiens; identical to SEQ ID NO: 27416
  chr13:114902141-114902171
  hypo

SEQ ID NO: 86573 - DNA, 30 bp, Homo sapiens
  chr13:114911726-114911756
  hypo
tttcctccaatactcgagaatctgctccac

SEQ ID NO: 86574 - DNA, 230 bp, Homo sapiens; identical to SEQ ID NO: 27417
  chr13:114917487-114917717
  hypo

SEQ ID NO: 86575 - DNA, 245 bp, Homo sapiens
  chr13:114961695-114961940
  hypo
tggcttcctccaggggatactcggattccaaatctaagcacgagcctctttcagaacttcaggccgtgtgctgacatggaatccctggtgccacgaaagaccccagagcagcacaatctgagctcactctgtttccaatactgcgcccaggtaacgctgcctcctcatgccacaggtccagagcgcccagccgctggtagacacccgcgccccgctgacgttccgccatctccacctgaaactca

SEQ ID NO: 86576 - DNA, 30 bp, Homo sapiens; identical to SEQ ID NO: 27419
  chr13:114963680-114963710
  hypo

SEQ ID NO: 86577 - DNA, 31 bp, Homo sapiens; identical to SEQ ID NO: 50956
  chr13:114976825-114976856
  hypo

SEQ ID NO: 86578 - DNA, 42 bp, Homo sapiens
  chr13:114989884-114989926
  hypo
ctggagcctgagatgccggcatcgggccgggaggagctgggc

SEQ ID NO: 86579 - DNA, 99 bp, Homo sapiens; identical to SEQ ID NO: 27420
  chr13:115024216-115024315
  hypo

SEQ ID NO: 86580 - DNA, 248 bp, Homo sapiens
  chr13:115052294-115052542
  hypo
ggttgatggagagcacgtgatttttttagttaagatcattttaagttatgatgcttccgaatgagcagtgcagaagacacatgaatggtctgttcctgagcgtcagggaaggcatgttgtgtcacatagttgaagtcagtggtcacagacggatgcctcaagagcccataggaatgagatgttttgcttgcggtgaggtcatcttgctgcttcaacacaaatgccaggctccccgagccaggccaact

SEQ ID NO: 86581 - DNA, 31 bp, Homo sapiens
  chr14:20146797-20146828
  hypo
agccctgcgttcgtaccgatactactgaaaa

SEQ ID NO: 86582 - DNA, 36 bp, Homo sapiens
  chr14:20707549-20707585
  hypo
agtacatgaaagagctggtttcggccgggcgcggtg

SEQ ID NO: 86583 - DNA, 30 bp, Homo sapiens
  chr14:20785766-20785796
  hypo
tcacgcagcagaggcgcagctaattccgaa

SEQ ID NO: 86584 - DNA, 30 bp, Homo sapiens; identical to SEQ ID NO: 27422
  chr14:20786054-20786084
  hypo

SEQ ID NO: 86585 - DNA, 31 bp, Homo sapiens; identical to SEQ ID NO: 27423
  chr14:20786685-20786716
  hypo

SEQ ID NO: 86586 - DNA, 30 bp, Homo sapiens; identical to SEQ ID NO: 27424
  chr14:20904154-20904184
  hypo

SEQ ID NO: 86587 - DNA, 30 bp, Homo sapiens; identical to SEQ ID NO: 50971
  chr14:21121520-21121550
  hypo

SEQ ID NO: 86588 - DNA, 30 bp, Homo sapiens
  chr14:21167983-21168013
  hypo
tgtagggattatcgcgagtggttgacctta

SEQ ID NO: 86589 - DNA, 30 bp, Homo sapiens
  chr14:21200801-21200831
  hypo
acagataggaagcgccgaccctttgttctg

SEQ ID NO: 86590 - DNA, 30 bp, Homo sapiens; identical to SEQ ID NO: 27425
  chr14:21238096-21238126
  hypo

SEQ ID NO: 86591 - DNA, 43 bp, Homo sapiens
  chr14:21304101-21304144
  hypo
gataaaaagaacgatcgtcaccgctgcctttttcattcctgga

SEQ ID NO: 86592 - DNA, 241 bp, Homo sapiens
  chr14:21304263-21304504
  hypo
catgcggatttttccctgttaaccagggtcctggggaaactcaccagtaggcgagatcagtgaccggtgtgcacgcacagagagctgactggaggctgaggagcttcctttgtccggctgctgtggcctgctctccggggtggaggggtaggtccacgggggatgcagacctgagcctctcccgggttttggcaccaaaatgtaaggttcttgtatccgtttgaaccccgagagggagcca

SEQ ID NO: 86593 - DNA, 24 bp, Homo sapiens
  chr14:21315805-21315829
  hypo
tccgtgatctgtaaaacagacaag

SEQ ID NO: 86594 - DNA, 30 bp, Homo sapiens
  chr14:21456702-21456732
  hypo
atcacgactctgaacgtgagcattctcact

SEQ ID NO: 86595 - DNA, 31 bp, Homo sapiens
  chr14:21548996-21549027
  hypo
gaggaccaggtctgagcgcagcctcccttct

SEQ ID NO: 86596 - DNA, 30 bp, Homo sapiens
  chr14:21549737-21549767
  hypo
ctgcactggccctgcggcgggccccagagc

SEQ ID NO: 86597 - DNA, 30 bp, Homo sapiens
  chr14:21558837-21558867
  hypo
ggcccctagcccggcggctgtggtgcactt

SEQ ID NO: 86598 - DNA, 556 bp, Homo sapiens
  chr14:21560013-21560569
  hypo
acctacataccctgcgtggcggtcgatcttgcctgggccccagcagcagaggcagagtgccccggtccctcacccgggcgcgggtgcagggaagccagagagcccagcgacctgccccgggcccaggtttcctcctcggcctccaccacctcctcttcttcctcaggctcctccgcacggtgccggcgagcccgggccgggagagcagaggacagcgggcggaagcctccgaagctgcggccgggaccgggctcagcaccctcgccgttgggccggccctcgccagctcgcaggctcaggtagcccaagaggctcgggggctcacggcgctcggccggggtgggagccggggccaagaggagcgctgggcccaacggctcataggccagcaggccgaggtcaggaggctggggggcgcgggcaggcccggaggcaggccccggggcacgcagtgggcccagcttgctggcgtgcaccttcatgtggttcttaaggaaccagggctccttgaagcagcggccgcacaccggacacgcatgatcgaaggaggccttgt

SEQ ID NO: 86599 - DNA, 30 bp, Homo sapiens
  chr14:21561051-21561081
  hypo
cccagtcgggcctcgcgtagtagcgcgcgc

SEQ ID NO: 86600 - DNA, 34 bp, Homo sapiens
  chr14:21657869-21657903
  hypo
attaaaagctttcccactggccgggcgcggtggc

SEQ ID NO: 86601 - DNA, 121 bp, Homo sapiens
  chr14:21689076-21689197
  hypo
ctctactaaaatacacaaaaaaagtcaggtatggtggcgcgccggtattcccaggaactcacaagaggctaaggcaggaggatcccttgaaaccgggaggcaaaaggtgcagtgagctgag

SEQ ID NO: 86602 - DNA, 24 bp, Homo sapiens
  chr14:21714428-21714452
  hypo
gcctcaaaggctgggcgcggtggc

SEQ ID NO: 86603 - DNA, 40 bp, Homo sapiens
  chr14:21752060-21752100
  hypo
attataaacgtgagccaccgtgcctggcctgagatttact

SEQ ID NO: 86604 - DNA, 30 bp, Homo sapiens
  chr14:21755783-21755813
  hypo
atagaggcctatttcgcagagaaaagggat

SEQ ID NO: 86605 - DNA, 341 bp, Homo sapiens; identical to SEQ ID NO: 50986
  chr14:21769053-21769394
  hypo

SEQ ID NO: 86606 - DNA, 39 bp, Homo sapiens
  chr14:21789023-21789062
  hypo
tgctgggattacaggcacgtgccactgtgccctgcttga

SEQ ID NO: 86607 - DNA, 21 bp, Homo sapiens
  chr14:21818238-21818259
  hypo
aaacaggaattaaaggccagg

SEQ ID NO: 86608 - DNA, 31 bp, Homo sapiens; identical to SEQ ID NO: 27430
  chr14:21876123-21876154
  hypo

SEQ ID NO: 86609 - DNA, 30 bp, Homo sapiens
  chr14:21899060-21899090
  hypo
gctgctttactggtcggctgggctggacaa

SEQ ID NO: 86610 - DNA, 105 bp, Homo sapiens
  chr14:21969878-21969983
  hypo
agcttgcgacagggtcgatcagcatcactggctttcatgcactcctccttggttccatagtcacagaattcttgcacttgggcccgacctcgagagcgaaatttt

SEQ ID NO: 86611 - DNA, 31 bp, Homo sapiens
  chr14:21980160-21980191
  hypo
ttggtttgtttccatgcgttcatttacaaaa

SEQ ID NO: 86612 - DNA, 30 bp, Homo sapiens; identical to SEQ ID NO: 9553
  chr14:22694049-22694079
  hypo

SEQ ID NO: 86613 - DNA, 36 bp, Homo sapiens
  chr14:22763725-22763761
  hypo
tcttaagaaaatcactggggtcggcccggcgcagtg

SEQ ID NO: 86614 - DNA, 30 bp, Homo sapiens
  chr14:23027726-23027756
  hypo
tcgcaggccagaacacgccacgtcactcca

SEQ ID NO: 86615 - DNA, 18 bp, Homo sapiens
  chr14:23183108-23183126
  hypo
gggggtgtacaccccccg

SEQ ID NO: 86616 - DNA, 47 bp, Homo sapiens
  chr14:23183245-23183292
  hypo
tactcccaatatcgcaggtggggaaaacaccccgcctgtgatattgt

SEQ ID NO: 86617 - DNA, 31 bp, Homo sapiens; identical to SEQ ID NO: 27432
  chr14:23240342-23240373
  hypo

SEQ ID NO: 86618 - DNA, 30 bp, Homo sapiens
  chr14:23311725-23311755
  hypo
cctatgcctacatccgtgagggccatgaga

SEQ ID NO: 86619 - DNA, 251 bp, Homo sapiens
  chr14:23315013-23315264
  hypo
gatgggctgcccatcgggaggccggccggatgaggggactgaggaggagacggaggtgatcatcattgaggtggacgaggagggcggcggggcggtgagcgcggctgccgtggtgctgcccgtgctgctgctgctcctggtgctggcggtgggccttgcagtcttcttcttcagacgccatgggacccccaggcgactgctctactgccagcgttccctgctggacaaggtctgacgcccaccgccggccc

SEQ ID NO: 86620 - DNA, 28 bp, Homo sapiens
  chr14:23339756-23339784
  hypo
agactccgtctcaaaaaacaaacaaaca

SEQ ID NO: 86621 - DNA, 119 bp, Homo sapiens; identical to SEQ ID NO: 51000
  chr14:23355365-23355484
  hypo

SEQ ID NO: 86622 - DNA, 30 bp, Homo sapiens; identical to SEQ ID NO: 27433
  chr14:23375560-23375590
  hypo

SEQ ID NO: 86623 - DNA, 190 bp, Homo sapiens
  chr14:23426911-23427101
  hypo
cctcgtttagttcttaaagcgtcctgtgagaaagtcaccattatactcattttacagagggggagaactgaggcacaaagggttaagttcgaggtcgccatttggggggtctaaacctgtcccaatagctctcggaaggaaccttcccagacctgccacccaagccgcgtcctgcgagtctcctcactaa

SEQ ID NO: 86624 - DNA, 30 bp, Homo sapiens
  chr14:23429489-23429519
  hypo
ataggccagctctacgtaagactggaaagt

SEQ ID NO: 86625 - DNA, 31 bp, Homo sapiens
  chr14:23457305-23457336
  hypo
ttgaatgggaggttggcgatcactacttaga

SEQ ID NO: 86626 - DNA, 28 bp, Homo sapiens
  chr14:23469629-23469657
  hypo
aaaggagaggaggagccgggcatggtgg

SEQ ID NO: 86627 - DNA, 32 bp, Homo sapiens; identical to SEQ ID NO: 27435
  chr14:23470947-23470979
  hypo

SEQ ID NO: 86628 - DNA, 30 bp, Homo sapiens
  chr14:23495359-23495389
  hypo
tccagccatcctcccgcacgtggtagaggt

SEQ ID NO: 86629 - DNA, 449 bp, Homo sapiens
  chr14:23511621-23512070
  hypo
ctgcagctgacacgcgttcctcctgtggcagctatgtggcgtgtccagcctcatgcaaggtcatccctgtgcaccagcacctcctgggtaccacctctggcacctctgccgactgtgctacctggtatcgggtattacagcgggagctgcggcttcgggaactgagggagggtcagctgcccagtgtggccagtgctgccaagctcttgtcagccatgatgtctcaataccggggactggatctctgtgtggccactgccctctgcggctgggaccgctctggccctgagctcttctacgtctatagcgacggcacccgcctgcagggggacatcttctctgtgggctctggatctccctatgcctacggcgtgctagaccgtggctatcgctacgacatgagcacccaggaagcctacgccctggctcgctgcgccgtggcccacgcc

SEQ ID NO: 86630 - DNA, 34 bp, Homo sapiens
  chr14:23517721-23517755
  hypo
agcagggccgggagcgggcggcctgtctccatgt

SEQ ID NO: 86631 - DNA, 105 bp, Homo sapiens; identical to SEQ ID NO: 27436
  chr14:23518258-23518363
  hypo

SEQ ID NO: 86632 - DNA, 30 bp, Homo sapiens
  chr14:23528415-23528445
  hypo
gcttggtgtccctgcgatccctttccctgc

SEQ ID NO: 86633 - DNA, 89 bp, Homo sapiens
  chr14:23530468-23530557
  hypo
tactagtgggtatgcgtaccccatagctaagtacctacctttcttctcactcttcttttctttagacttcgcacgttccttgcggcggc

SEQ ID NO: 86634 - DNA, 31 bp, Homo sapiens; identical to SEQ ID NO: 27437
  chr14:23536685-23536716
  hypo

SEQ ID NO: 86635 - DNA, 44 bp, Homo sapiens
  chr14:23577684-23577728
  hypo
gagacgctccccacctcccagacggacacccatctcttaaaaaa

SEQ ID NO: 86636 - DNA, 31 bp, Homo sapiens
  chr14:23634538-23634569
  hypo
agcaggtggggaagagcggctgcagcacgta

SEQ ID NO: 86637 - DNA, 92 bp, Homo sapiens
  chr14:23706638-23706730
  hypo
aaaaatttctgaataaaggttgactttttttaattgaaatttgttagttctcaattaatatcacactgttctttgtccgcatcatttttaaa

SEQ ID NO: 86638 - DNA, 132 bp, Homo sapiens
  chr14:23707523-23707655
  hypo
ataggacaacgaagctcgtggcactgtgggatgcgtttgcgttgagctgtttattcagtacattttttatcgtaaatcttacgaagtttgtatccctcagcggttacacacacacacacatcctacgaaaag

SEQ ID NO: 86639 - DNA, 46 bp, Homo sapiens; identical to SEQ ID NO: 27438
  chr14:23719830-23719876
  hypo

SEQ ID NO: 86640 - DNA, 155 bp, Homo sapiens
  chr14:23757711-23757866
  hypo
gccactgcgccgggcccacaacttttctttagtaaacgtgcctaaaacttggaaacaatcttttctgaagtgactcttctgttctttggtctttgaaaaagtctcttcttgcctacttaggttaatgtaataccgtatatatacttgcctactta

SEQ ID NO: 86641 - DNA, 189 bp, Homo sapiens; identical to SEQ ID NO: 9560
  chr14:23776070-23776259
  hypo

SEQ ID NO: 86642 - DNA, 327 bp, Homo sapiens; identical to SEQ ID NO: 27441
  chr14:23776953-23777280
  hypo

SEQ ID NO: 86643 - DNA, 95 bp, Homo sapiens; identical to SEQ ID NO: 27442
  chr14:23793465-23793560
  hypo

SEQ ID NO: 86644 - DNA, 149 bp, Homo sapiens; identical to SEQ ID NO: 27443
  chr14:23815818-23815967
  hypo

SEQ ID NO: 86645 - DNA, 30 bp, Homo sapiens
  chr14:23820322-23820352
  hypo
ccgactcatggaaacggggatttcggtgag

SEQ ID NO: 86646 - DNA, 85 bp, Homo sapiens; identical to SEQ ID NO: 51020
  chr14:23835314-23835399
  hypo

SEQ ID NO: 86647 - DNA, 30 bp, Homo sapiens
  chr14:23853658-23853688
  hypo
tgagctccttgatgcgccgctcgctcttcc

SEQ ID NO: 86648 - DNA, 30 bp, Homo sapiens; identical to SEQ ID NO: 27444
  chr14:23855282-23855312
  hypo

SEQ ID NO: 86649 - DNA, 227 bp, Homo sapiens
  chr14:23884170-23884397
  hypo
cagggctctgcctggagtcaccgcccgtcgcacctggtaggtgagctccttgatgcgccgctcgctcttcctcatgcccttcaccgactctgcgttgcgcttctgctcggcctccagctcattctccagctcccgcacccgcgcttccagcttctgcagctgcttcttgccgcccttgagggcgatctgctcggcttcgtccagccggtgctgcaggtccttaatgg

SEQ ID NO: 86650 - DNA, 177 bp, Homo sapiens
  chr14:23938089-23938266
  hypo
agacctgtgtgaccgcggtaagtcatgtaaatatgaaccgttccccaatttgtaaaacgtattcttttcatgtccccaaactggtaggagcgaagagtgtcggggcgttattggagccgtttctcagcgctccacagtgcacaccaagagggcaggtgtcctcgcactcggtttcta

SEQ ID NO: 86651 - DNA, 30 bp, Homo sapiens
  chr14:24001942-24001972
  hypo
ctccacccccctcccgcaggtgggctgcca

SEQ ID NO: 86652 - DNA, 30 bp, Homo sapiens
  chr14:24035064-24035094
  hypo
agctccgtgatcagcgtgatggtgcccagc

SEQ ID NO: 86653 - DNA, 64 bp, Homo sapiens
  chr14:24081961-24082025
  hypo
tgaagtggtcagatgagagagcgcggcggagatggagagaagcggagaacttgatgcatatttt

SEQ ID NO: 86654 - DNA, 47 bp, Homo sapiens
  chr14:24108493-24108540
  hypo
gaggggctgagtgtggcgggcattgtgtgccacgtggggaaggctga

SEQ ID NO: 86655 - DNA, 25 bp, Homo sapiens
  chr14:24456361-24456386
  hypo
cagagtctccatctgtcgctcaggt

SEQ ID NO: 86656 - DNA, 24 bp, Homo sapiens
  chr14:24456625-24456649
  hypo
cacgcccagctgaatgtccaaatc

SEQ ID NO: 86657 - DNA, 39 bp, Homo sapiens
  chr14:24542843-24542882
  hypo
gaaatgataccttcctcggctctacggagtgcaccttgg

SEQ ID NO: 86658 - DNA, 31 bp, Homo sapiens
  chr14:24546649-24546680
  hypo
ccccaaatctgaccttcgtcttccaccattt

SEQ ID NO: 86659 - DNA, 30 bp, Homo sapiens; identical to SEQ ID NO: 27447
  chr14:24608184-24608214
  hypo

SEQ ID NO: 86660 - DNA, 98 bp, Homo sapiens
  chr14:24629477-24629575
  hypo
catcaatgcccactcgctggacccagccaccttgtatgaggtggaagagctggagacggccactgagcgctacctgcacgtacgcccccagcctttgg

SEQ ID NO: 86661 - DNA, 30 bp, Homo sapiens; identical to SEQ ID NO: 27449
  chr14:24634133-24634163
  hypo

SEQ ID NO: 86662 - DNA, 30 bp, Homo sapiens
  chr14:24635514-24635544
  hypo
ttgtccgtgataatcgtgtcctgaaaatcc

SEQ ID NO: 86663 - DNA, 30 bp, Homo sapiens
  chr14:24674784-24674814
  hypo
tgagccaccgcgcccggccgcacttcattc

SEQ ID NO: 86664 - DNA, 20 bp, Homo sapiens
  chr14:24713358-24713378
  hypo
tacttttttttttttttgag

SEQ ID NO: 86665 - DNA, 95 bp, Homo sapiens
  chr14:24722548-24722643
  hypo
cttgaaggagagaagtcgcttgcccaagggcatatagccagtaagtgctagagctgaacccgtatcattaggattccaaaacttcgcttgtgtgt

SEQ ID NO: 86666 - DNA, 503 bp, Homo sapiens
  chr14:24731054-24731557
  hypo
cagcaagtccacaccgttcactactagcatgccctctgcaaggacacagctccgtgtcagtgaagccccatgaggagcccaggcccttatcattagcttcctatcccccccagaaatgccaggctgagtctctggtcccattaaagccttttagctctcagctgaggaggacagaccggcctcacctcggatggtgccatctccagctgcattgacaccgctgccccgggatacaggccggcgggagtctgagccccgggagccaggtcttcgagtgccagagctggaccctcgacccctggagtcagagggttcaggtccccagtcgtcatctgccgcatttcggcatgaacagcagccacagcagcgagcccagaaggaacggcctcctcctctgcgagagcgtccgtctggctctggctctggctctggagatggcgtggtagggggctgcaaggggttgccaccccaacggcccacatcggaacgtggcccatccatca

SEQ ID NO: 86667 - DNA, 30 bp, Homo sapiens
  chr14:24732371-24732401
  hypo
cacagactggatgccgcagggacagacctg

SEQ ID NO: 86668 - DNA, 54 bp, Homo sapiens; identical to SEQ ID NO: 27452
  chr14:24733718-24733772
  hypo

SEQ ID NO: 86669 - DNA, 30 bp, Homo sapiens
  chr14:24737590-24737620
  hypo
ctgtcgtggagtcccggcaccagccctcct

SEQ ID NO: 86670 - DNA, 30 bp, Homo sapiens; identical to SEQ ID NO: 27453
  chr14:24800290-24800320
  hypo

SEQ ID NO: 86671 - DNA, 30 bp, Homo sapiens
  chr14:24838813-24838843
  hypo
catgcattcgccaccgccgcgaccagcccc

SEQ ID NO: 86672 - DNA, 30 bp, Homo sapiens
  chr14:24839244-24839274
  hypo
cgctgccctcgccccgggcctcccctcggc

SEQ ID NO: 86673 - DNA, 32 bp, Homo sapiens
  chr14:24859465-24859497
  hypo
agtgctgggattacaggcgtgagcccccgccc

SEQ ID NO: 86674 - DNA, 31 bp, Homo sapiens
  chr14:24877468-24877499
  hypo
gcaaggaagacatcatcgagtggctcagccg

SEQ ID NO: 86675 - DNA, 71 bp, Homo sapiens
  chr14:26802500-26802571
  hypo
gttctctaaaatatgctcccccgaaacctgtacatggttcactctcgtacgaacttcaggtcattgcttaa

SEQ ID NO: 86676 - DNA, 455 bp, Homo sapiens; identical to SEQ ID NO: 51065
  chr14:30396985-30397440
  hypo

SEQ ID NO: 86677 - DNA, 38 bp, Homo sapiens
  chr14:30790493-30790531
  hypo
tgggctcctgcttccccgactcacgttcaacccctgca

SEQ ID NO: 86678 - DNA, 30 bp, Homo sapiens
  chr14:31103971-31104001
  hypo
ccttgtcttgcttgtcgctgcgcctgtagg

SEQ ID NO: 86679 - DNA, 30 bp, Homo sapiens
  chr14:31161407-31161437
  hypo
cccgttcttagtttcgaaattcagcaaatg

SEQ ID NO: 86680 - DNA, 79 bp, Homo sapiens; identical to SEQ ID NO: 27455
  chr14:31456367-31456446
  hypo

SEQ ID NO: 86681 - DNA, 101 bp, Homo sapiens; identical to SEQ ID NO: 27456
  chr14:31456880-31456981
  hypo

SEQ ID NO: 86682 - DNA, 31 bp, Homo sapiens; identical to SEQ ID NO: 27457
  chr14:31478709-31478740
  hypo

SEQ ID NO: 86683 - DNA, 206 bp, Homo sapiens; identical to SEQ ID NO: 27458
  chr14:31484305-31484511
  hypo

SEQ ID NO: 86684 - DNA, 19 bp, Homo sapiens
  chr14:31512415-31512434
  hypo
gactctttcaaaaaagaaa

SEQ ID NO: 86685 - DNA, 30 bp, Homo sapiens
  chr14:31534585-31534615
  hypo
gtacacctatggaagcggacctgtcccagt

SEQ ID NO: 86686 - DNA, 35 bp, Homo sapiens
  chr14:31629123-31629158
  hypo
ccatgagtcactgtgcctggcgccggtttttatta

SEQ ID NO: 86687 - DNA, 7 bp, Homo sapiens
  chr14:31632819-31632826
  hypo
tttaatt

SEQ ID NO: 86688 - DNA, 34 bp, Homo sapiens
  chr14:31648024-31648058
  hypo
aaaaaaattcagcgctcacctcaaacatgaactg

SEQ ID NO: 86689 - DNA, 88 bp, Homo sapiens
  chr14:31671011-31671099
  hypo
ggccatgtttacattactacattttagaactcgatacatcaggtaaaagcaaaaacgaatcttgaacgtgttttactttctggagcat

SEQ ID NO: 86690 - DNA, 31 bp, Homo sapiens
  chr14:31707415-31707446
  hypo
taatggtgataataagcgtttgtataatttt

SEQ ID NO: 86691 - DNA, 42 bp, Homo sapiens
  chr14:31847699-31847741
  hypo
agaacactacttggccaggtgcggtggctcacgcctgtaatc

SEQ ID NO: 86692 - DNA, 25 bp, Homo sapiens
  chr14:31910757-31910782
  hypo
ccccgaggactttcagaatgtaatc

SEQ ID NO: 86693 - DNA, 30 bp, Homo sapiens; identical to SEQ ID NO: 27459
  chr14:31923652-31923682
  hypo

SEQ ID NO: 86694 - DNA, 80 bp, Homo sapiens
  chr14:31925273-31925353
  hypo
acccacacatcatatagttcacgggtactatttacaataagtaggcggggtgcggtggctcaggcttgtaatcccagcag

SEQ ID NO: 86695 - DNA, 79 bp, Homo sapiens
  chr14:31925652-31925731
  hypo
actaaaattgttttaagtaatgctagatctgggaccgaattcagcagaaaaggcgagcgaatgagattttgctacactg

SEQ ID NO: 86696 - DNA, 32 bp, Homo sapiens
  chr14:32287761-32287793
  hypo
tttctttttgagttggagtctcgcactgtcac

SEQ ID NO: 86697 - DNA, 32 bp, Homo sapiens
  chr14:32288032-32288064
  hypo
cgtgagctgccgtgcccagccaattgatataa

SEQ ID NO: 86698 - DNA, 30 bp, Homo sapiens
  chr14:32543358-32543388
  hypo
tttccatttctgtccgatatttgtgcgcgc

SEQ ID NO: 86699 - DNA, 316 bp, Homo sapiens
  chr14:32597575-32597891
  hypo
ctgcactccagcatgggctgggctcccaaacaggttcatcctcacaccaacttgcaagggcgtggcccgccttgtcaccatgagaccctgagaaagtcccttcacctcgctgggctctggtttcctcattccaaggatggctctgctatctgcgtgtcggctatcggtgctgaggctggcccgcctctgcgtgggcaggatcttggcattccttttgctccatggacgctgcctccctgggctcgccgcgcctggccgcccggcaggcagccccaggccccggctgctccatcccgctgccctgatttttcttata

SEQ ID NO: 86700 - DNA, 31 bp, Homo sapiens
  chr14:32606878-32606909
  hypo
aaaatatttagccttccgggccaggtggggt

SEQ ID NO: 86701 - DNA, 27 bp, Homo sapiens
  chr14:33163271-33163298
  hypo
agtgtggtccatggggccaggcgcggt

SEQ ID NO: 86702 - DNA, 2396 bp, Homo sapiens; identical to SEQ ID NO: 51077
  chr14:33402367-33404763
  hypo

SEQ ID NO: 86703 - DNA, 30 bp, Homo sapiens; identical to SEQ ID NO: 27462
  chr14:33462062-33462092
  hypo

SEQ ID NO: 86704 - DNA, 31 bp, Homo sapiens
  chr14:33491855-33491886
  hypo
gcgagactccgtcccaaaaaaaaaaaaaaaa

SEQ ID NO: 86705 - DNA, 30 bp, Homo sapiens; identical to SEQ ID NO: 9589
  chr14:34126415-34126445
  hypo

SEQ ID NO: 86706 - DNA, 30 bp, Homo sapiens
  chr14:34165620-34165650
  hypo
tggttattgggccatcgaaagacataataa

SEQ ID NO: 86707 - DNA, 100 bp, Homo sapiens
  chr14:34308654-34308754
  hypo
ggaagaaactgtccgcgtacaaaggtgggctactctgggcctggagtccaggtctttctgcctccaaagcccatgttcagatccacgggatccggctcac

SEQ ID NO: 86708 - DNA, 18 bp, Homo sapiens
  chr14:34408718-34408736
  hypo
acaatcttaaaacaggag

SEQ ID NO: 86709 - DNA, 38 bp, Homo sapiens; identical to SEQ ID NO: 27464
  chr14:34415280-34415318
  hypo

SEQ ID NO: 86710 - DNA, 31 bp, Homo sapiens
  chr14:34567013-34567044
  hypo
atgtgctcacttcctccggcattcccatccc

SEQ ID NO: 86711 - DNA, 31 bp, Homo sapiens; identical to SEQ ID NO: 27465
  chr14:34682592-34682623
  hypo

SEQ ID NO: 86712 - DNA, 30 bp, Homo sapiens
  chr14:34902847-34902877
  hypo
tctagtccttaaaacgtagggcaaaaaata

SEQ ID NO: 86713 - DNA, 34 bp, Homo sapiens
  chr14:34918991-34919025
  hypo
agccaccacacccgacctaggcattggttttatt

SEQ ID NO: 86714 - DNA, 27 bp, Homo sapiens
  chr14:34920639-34920666
  hypo
caattctaggctgggcgcggtagctca

SEQ ID NO: 86715 - DNA, 26 bp, Homo sapiens
  chr14:34920905-34920931
  hypo
agaacgagactctgtttcaaaaaaaa

SEQ ID NO: 86716 - DNA, 29 bp, Homo sapiens
  chr14:34921193-34921222
  hypo
aaatgtaaagaaagtgcctagcgtggtgg

SEQ ID NO: 86717 - DNA, 30 bp, Homo sapiens
  chr14:35006059-35006089
  hypo
caggattcagaatccgtctcaaaaaataca

SEQ ID NO: 86718 - DNA, 43 bp, Homo sapiens
  chr14:35009568-35009611
  hypo
gcacccacatccctccaacctcgcctctaacccttatgccttc

SEQ ID NO: 86719 - DNA, 30 bp, Homo sapiens
  chr14:35009837-35009867
  hypo
ttcctgcctcctaccgagacactgtggcac

SEQ ID NO: 86720 - DNA, 30 bp, Homo sapiens
  chr14:35021968-35021998
  hypo
cagtggcagccacgcggcgcccctcccggg

SEQ ID NO: 86721 - DNA, 342 bp, Homo sapiens
  chr14:35023175-35023517
  hypo
aataacaataaagaagaattcgtccattcaacaaccgttcactgagcgcatagcctgtgcccagacactgttccaggcctctgggagcaaaaaggcctcggtgcccgtattctagttagacaacgagaagcgcggggaggtggggggcgggggtgggagagagaaaatctacaccgggctgcataggtaaattcgtaggttaggtgctaagtgctttgaaaaagcaaacaaacacagggaaagtgagataaggagttgcggcaaggggcaggtggctgtgttaaatcgagtggttggaagaagctgctatgagaaggtaccgtatgagcaaaggacttgaag

SEQ ID NO: 86722 - DNA, 122 bp, Homo sapiens
  chr14:35032072-35032194
  hypo
actttggacttctgagtatgacgagtgcacgatgatggaccactgtcatggggaacacagtgcggcatcacggcacacagactggcatcgcctgggcgtgcgctgctccatgtttctcagaa

SEQ ID NO: 86723 - DNA, 30 bp, Homo sapiens; identical to SEQ ID NO: 27469
  chr14:35070432-35070462
  hypo

SEQ ID NO: 86724 - DNA, 30 bp, Homo sapiens; identical to SEQ ID NO: 27470
  chr14:35070701-35070731
  hypo

SEQ ID NO: 86725 - DNA, 37 bp, Homo sapiens; identical to SEQ ID NO: 27471
  chr14:35117758-35117795
  hypo

SEQ ID NO: 86726 - DNA, 38 bp, Homo sapiens
  chr14:35266882-35266920
  hypo
atttgacaaacatctggtttccgttccaagacggccgg

SEQ ID NO: 86727 - DNA, 121 bp, Homo sapiens
  chr14:35266979-35267100
  hypo
tgaggtacctggttcatctcattgggactggtgcccatggagggcgagccgaagcagggcgagccaaagcagggcgggccgaagcagggcgggcatcgcctcacccgggaagtgcaagggg

SEQ ID NO: 86728 - DNA, 30 bp, Homo sapiens
  chr14:35447869-35447899
  hypo
cttcttaaaatattcgggttaataaacatt

SEQ ID NO: 86729 - DNA, 23 bp, Homo sapiens
  chr14:35507705-35507728
  hypo
ttacgaatagagcgccgcccggg

SEQ ID NO: 86730 - DNA, 98 bp, Homo sapiens; identical to SEQ ID NO: 27472
  chr14:35578167-35578265
  hypo

SEQ ID NO: 86731 - DNA, 17 bp, Homo sapiens
  chr14:35684088-35684105
  hypo
ggcgacagagcgagact

SEQ ID NO: 86732 - DNA, 280 bp, Homo sapiens
  chr14:35808160-35808440
  hypo
cctgcctcccacaaaggataccgagctacagcgcaggtgcagttcggcaagtcccgacacaggcctcattgtacccagcccctcagcgagggccttgggacggccccacagatagggcacctccaccccatccccgggctgcagttcaggacctaggagacagaaggctgcgggtgactaagacccttaattgagccctgcaagcttgcacgatgagcctgtctacccgctaacaagcaccttgtgcctctgctcggtcggcctctgaccctggagaggg

SEQ ID NO: 86733 - DNA, 120 bp, Homo sapiens
  chr14:35866799-35866919
  hypo
tagctaactggaatatgagctcgggtcccgtctctcccacctgcactccgcgctggtgcctgggctcagctcccgtgctatgggctttcatctcatcacgcctttccatgcagttgtctg

SEQ ID NO: 86734 - DNA, 1379 bp, Homo sapiens; identical to SEQ ID NO: 51094
  chr14:36002577-36003956
  hypo

SEQ ID NO: 86735 - DNA, 654 bp, Homo sapiens; identical to SEQ ID NO: 9596
  chr14:36004080-36004734
  hypo

SEQ ID NO: 86736 - DNA, 100 bp, Homo sapiens; identical to SEQ ID NO: 9597
  chr14:36004821-36004921
  hypo

SEQ ID NO: 86737 - DNA, 394 bp, Homo sapiens
  chr14:36288872-36289266
  hypo
acaatgggtaaatctcaaaaacgtcactaaggagaaagtcaagttgtagcatacgtaatgcatgagaccacttaaaaatatgagcattttgagaccgtgctgggttgccgccgccgctgcagccatcgtgccagcccctcgggtctccgcgaggccggctgacggtccagagtgggagacaagccaatttgggagcagataggatccagcttcattccacattactaccagttatttgataacgatagaccccaactaggcgcaatttacattgacgcatcatgccttacgtgggaaggacaacagttccaggggaaagctgccattgtggagaagttgtctagccttcggttccagaaaatccagcacagcatcaccgcgcaggaccatcagc

SEQ ID NO: 86738 - DNA, 39 bp, Homo sapiens
  chr14:36301410-36301449
  hypo
aaaaaattaagtaggctgggccgggcacggtggcttacg

SEQ ID NO: 86739 - DNA, 39 bp, Homo sapiens
  chr14:36301688-36301727
  hypo
gtgacggagcgagactccgtctcaaaaaaaaaaaaaaat

SEQ ID NO: 86740 - DNA, 203 bp, Homo sapiens; identical to SEQ ID NO: 9638
  chr14:37132602-37132805
  hypo

SEQ ID NO: 86741 - DNA, 30 bp, Homo sapiens; identical to SEQ ID NO: 27478
  chr14:37174262-37174292
  hypo

SEQ ID NO: 86742 - DNA, 30 bp, Homo sapiens
  chr14:37606484-37606514
  hypo
agccaccgcgcccagctggcactgactttt

SEQ ID NO: 86743 - DNA, 31 bp, Homo sapiens
  chr14:37611523-37611554
  hypo
catcacagactatcatcgaggtagaaaccat

SEQ ID NO: 86744 - DNA, 24 bp, Homo sapiens
  chr14:37639248-37639272
  hypo
tttttttttttgagaccgagtctc

SEQ ID NO: 86745 - DNA, 1680 bp, Homo sapiens; identical to SEQ ID NO: 51166
  chr14:38677133-38678813
  hypo

SEQ ID NO: 86746 - DNA, 30 bp, Homo sapiens
  chr14:39519311-39519341
  hypo
aactacttgagtcacgaggagcagtcctta

SEQ ID NO: 86747 - DNA, 30 bp, Homo sapiens
  chr14:39569519-39569549
  hypo
caatcttaaaatcacgaattcaattacaaa

SEQ ID NO: 86748 - DNA, 30 bp, Homo sapiens
  chr14:39648400-39648430
  hypo
aacagacagaactgcggcttttggaacaga

SEQ ID NO: 86749 - DNA, 162 bp, Homo sapiens; identical to SEQ ID NO: 9663
  chr14:39735616-39735778
  hypo

SEQ ID NO: 86750 - DNA, 30 bp, Homo sapiens; identical to SEQ ID NO: 27482
  chr14:39856145-39856175
  hypo

SEQ ID NO: 86751 - DNA, 22 bp, Homo sapiens
  chr14:39889602-39889624
  hypo
gaagaaagcggctgggcgccgg

SEQ ID NO: 86752 - DNA, 204 bp, Homo sapiens
  chr14:39911459-39911663
  hypo
tggcatctccgggcttttgggcgccaccttgttcccctcatcgagacactggtctttgcagcagaagctgcttgcagtacatctggtccagccagagcctcacatggagccagtgcctgtgctggtgcttggtgctgcccgctccgcagcagcagctggtatgcctggctgtgcgcagtggccggattccacactgacttgctc

SEQ ID NO: 86753 - DNA, 38 bp, Homo sapiens; identical to SEQ ID NO: 27485
  chr14:39914480-39914518
  hypo

SEQ ID NO: 86754 - DNA, 38 bp, Homo sapiens; identical to SEQ ID NO: 27486
  chr14:40470105-40470143
  hypo

SEQ ID NO: 86755 - DNA, 647 bp, Homo sapiens; identical to SEQ ID NO: 51175
  chr14:42075396-42076043
  hypo

SEQ ID NO: 86756 - DNA, 288 bp, Homo sapiens; identical to SEQ ID NO: 51176
  chr14:42076105-42076393
  hypo

SEQ ID NO: 86757 - DNA, 30 bp, Homo sapiens
  chr14:43123066-43123096
  hypo
cttactgatatcaacgagggatgacagaca

SEQ ID NO: 86758 - DNA, 105 bp, Homo sapiens; identical to SEQ ID NO: 27489
  chr14:43839405-43839510
  hypo

SEQ ID NO: 86759 - DNA, 30 bp, Homo sapiens
  chr14:45356592-45356622
  hypo
ccgaggagcagacccgacaggaggcgcctg

SEQ ID NO: 86760 - DNA, 30 bp, Homo sapiens; identical to SEQ ID NO: 27490
  chr14:45365636-45365666
  hypo

SEQ ID NO: 86761 - DNA, 216 bp, Homo sapiens; identical to SEQ ID NO: 9671
  chr14:45431366-45431582
  hypo

SEQ ID NO: 86762 - DNA, 33 bp, Homo sapiens
  chr14:45437463-45437496
  hypo
ttttatttatttattttgagacggagtttcact

SEQ ID NO: 86763 - DNA, 32 bp, Homo sapiens
  chr14:45437735-45437767
  hypo
ccaccgcgcccggcctggactttaatttttaa

SEQ ID NO: 86764 - DNA, 30 bp, Homo sapiens
  chr14:45565391-45565421
  hypo
ccttgaaaagcggcacgacaacattaaacc

SEQ ID NO: 86765 - DNA, 30 bp, Homo sapiens
  chr14:45565851-45565881
  hypo
cctgcccacacaacccggtcagaatgcagg

SEQ ID NO: 86766 - DNA, 52 bp, Homo sapiens
  chr14:45579810-45579862
  hypo
gcaatggttcgtttacgaagagtaagtttagaacgacggcatggaaatctgg

SEQ ID NO: 86767 - DNA, 30 bp, Homo sapiens; identical to SEQ ID NO: 27493
  chr14:45588021-45588051
  hypo

SEQ ID NO: 86768 - DNA, 29 bp, Homo sapiens
  chr14:45588230-45588259
  hypo
tttttaaaatgttacggcactaagatctt

SEQ ID NO: 86769 - DNA, 29 bp, Homo sapiens
  chr14:46074248-46074277
  hypo
ccgcgcccggccacaatattcttaaagtt

SEQ ID NO: 86770 - DNA, 30 bp, Homo sapiens
  chr14:47121018-47121048
  hypo
cccctcgtccctcgcgggaaccatagagtc

SEQ ID NO: 86771 - DNA, 31 bp, Homo sapiens; identical to SEQ ID NO: 27495
  chr14:48130915-48130946
  hypo

SEQ ID NO: 86772 - DNA, 125 bp, Homo sapiens; identical to SEQ ID NO: 51191
  chr14:48145236-48145361
  hypo

SEQ ID NO: 86773 - DNA, 81 bp, Homo sapiens; identical to SEQ ID NO: 51192
  chr14:48145469-48145550
  hypo

SEQ ID NO: 86774 - DNA, 30 bp, Homo sapiens; identical to SEQ ID NO: 9677
  chr14:50022777-50022807
  hypo

SEQ ID NO: 86775 - DNA, 30 bp, Homo sapiens
  chr14:50155756-50155786
  hypo
tttttaaaaaaaagcgaagtttaatgaagg

SEQ ID NO: 86776 - DNA, 30 bp, Homo sapiens
  chr14:50185987-50186017
  hypo
gccttcgctgcatctcgtaagttttgttat

SEQ ID NO: 86777 - DNA, 181 bp, Homo sapiens; identical to SEQ ID NO: 27497
  chr14:50233117-50233298
  hypo

SEQ ID NO: 86778 - DNA, 151 bp, Homo sapiens; identical to SEQ ID NO: 27498
  chr14:50233597-50233748
  hypo

SEQ ID NO: 86779 - DNA, 138 bp, Homo sapiens
  chr14:50287091-50287229
  hypo
cctcaaacctgtcagcacttacgcgttgtcctctggtcactgcatgacttcgctgaagttccttaccctctccgtttcagattctgaaagtattgtatcaagagctaataatcggctgggcgcggtggctcatgccta

SEQ ID NO: 86780 - DNA, 20 bp, Homo sapiens
  chr14:50316835-50316855
  hypo
ttttagatggagtctcgctc

SEQ ID NO: 86781 - DNA, 45 bp, Homo sapiens; identical to SEQ ID NO: 27499
  chr14:50327505-50327550
  hypo

SEQ ID NO: 86782 - DNA, 121 bp, Homo sapiens; identical to SEQ ID NO: 27500
  chr14:50333978-50334099
  hypo

SEQ ID NO: 86783 - DNA, 24 bp, Homo sapiens
  chr14:50334338-50334362
  hypo
tccgtctcaaaaaaaaaaaaaaaa

SEQ ID NO: 86784 - DNA, 38 bp, Homo sapiens
  chr14:50373517-50373555
  hypo
cctcaggctatccgcccgcctctgcatcctaaagtgct

SEQ ID NO: 86785 - DNA, 26 bp, Homo sapiens
  chr14:50379101-50379127
  hypo
gatcattaaagacttacttttcggcc

SEQ ID NO: 86786 - DNA, 36 bp, Homo sapiens
  chr14:50434015-50434051
  hypo
catttatgcataaacgatcacatgacatgttctgtt

SEQ ID NO: 86787 - DNA, 30 bp, Homo sapiens
  chr14:50517342-50517372
  hypo
aagtctggtctcctcggtgatggaggaaga

SEQ ID NO: 86788 - DNA, 33 bp, Homo sapiens
  chr14:50540506-50540539
  hypo
ctttcttagaaatatggataccggatatgaagc

SEQ ID NO: 86789 - DNA, 30 bp, Homo sapiens
  chr14:50548794-50548824
  hypo
gctgcgtaaataactcgcagcggagtttct

SEQ ID NO: 86790 - DNA, 76 bp, Homo sapiens
  chr14:50574253-50574329
  hypo
actcccgacctcaggagatccgtctgcctcggcatacaggcgtgagccaccgcgcgtggggcctatttgactttga

SEQ ID NO: 86791 - DNA, 41 bp, Homo sapiens
  chr14:50589169-50589210
  hypo
ggaaccctggtctttaattacatcatcgagtcactgaatca

SEQ ID NO: 86792 - DNA, 38 bp, Homo sapiens
  chr14:50681832-50681870
  hypo
cgtgagccaccgcgcccggcaaggttgtttcttataac

SEQ ID NO: 86793 - DNA, 40 bp, Homo sapiens
  chr14:50777876-50777916
  hypo
ctccaacttctgacctcaggcgatccgcccgcctcggcct

SEQ ID NO: 86794 - DNA, 24 bp, Homo sapiens
  chr14:50888265-50888289
  hypo
caccgcgcccggcaacaaaataaa

SEQ ID NO: 86795 - DNA, 128 bp, Homo sapiens; identical to SEQ ID NO: 51211
  chr14:50999594-50999722
  hypo

SEQ ID NO: 86796 - DNA, 1183 bp, Homo sapiens; identical to SEQ ID NO: 51212
  chr14:51026823-51028006
  hypo

SEQ ID NO: 86797 - DNA, 30 bp, Homo sapiens
  chr14:51061291-51061321
  hypo
aagaagcagagtttcggtttacaactggcg

SEQ ID NO: 86798 - DNA, 35 bp, Homo sapiens
  chr14:51092387-51092422
  hypo
aggcccaacactttgggaggccgaggtgggtggat

SEQ ID NO: 86799 - DNA, 36 bp, Homo sapiens
  chr14:51123745-51123781
  hypo
tttttttttttttttttgagacggagtctcacgctg

SEQ ID NO: 86800 - DNA, 31 bp, Homo sapiens
  chr14:51171101-51171132
  hypo
ggcttgagctgccccacggagaccatggtgc

SEQ ID NO: 86801 - DNA, 481 bp, Homo sapiens; identical to SEQ ID NO: 27503
  chr14:51171646-51172127
  hypo

SEQ ID NO: 86802 - DNA, 30 bp, Homo sapiens; identical to SEQ ID NO: 27504
  chr14:51172389-51172419
  hypo

SEQ ID NO: 86803 - DNA, 30 bp, Homo sapiens; identical to SEQ ID NO: 27505
  chr14:51293778-51293808
  hypo

SEQ ID NO: 86804 - DNA, 27 bp, Homo sapiens
  chr14:51358238-51358265
  hypo
gcgtgagccaccgcgcccagctgataa

SEQ ID NO: 86805 - DNA, 968 bp, Homo sapiens; identical to SEQ ID NO: 51215
  chr14:51410198-51411166
  hypo

SEQ ID NO: 86806 - DNA, 1891 bp, Homo sapiens; identical to SEQ ID NO: 51217
  chr14:51560770-51562661
  hypo

SEQ ID NO: 86807 - DNA, 30 bp, Homo sapiens; identical to SEQ ID NO: 27509
  chr14:51711222-51711252
  hypo

SEQ ID NO: 86808 - DNA, 42 bp, Homo sapiens; identical to SEQ ID NO: 27510
  chr14:51836279-51836321
  hypo

SEQ ID NO: 86809 - DNA, 1647 bp, Homo sapiens; identical to SEQ ID NO: 51218
  chr14:52117842-52119489
  hypo

SEQ ID NO: 86810 - DNA, 320 bp, Homo sapiens
  chr14:52210615-52210935
  hypo
ttggggggtgatattactccccgaatcgaaggggggcccgcccccatgcgatgtggatcttaatatccaggggggagaggcgggtgatattactccccgcatcgaggggggcttccgcgcccctgcgatatggatcgtaatatccagtgggggagaggggagtgatattactccccgatttttcctcggatcctttctatagtgcctccctcggttcacaccctgggacattatcttccatattctagcaggatatggctactaaagtcgcagggggtatacacccgtcaatattattcgtaattttctaggggaatgtt

SEQ ID NO: 86811 - DNA, 48 bp, Homo sapiens; identical to SEQ ID NO: 27513
  chr14:52373770-52373818
  hypo

SEQ ID NO: 86812 - DNA, 17 bp, Homo sapiens
  chr14:52939944-52939961
  hypo
cctaaacaacttgtgtg

SEQ ID NO: 86813 - DNA, 25 bp, Homo sapiens
  chr14:52940020-52940045
  hypo
caacgctgctgctttgatttcatca

SEQ ID NO: 86814 - DNA, 20 bp, Homo sapiens
  chr14:53173039-53173059
  hypo
gcaggagcaagactccatct

SEQ ID NO: 86815 - DNA, 30 bp, Homo sapiens
  chr14:53176801-53176831
  hypo
aatttatatgattccgaaattgtattggca

SEQ ID NO: 86816 - DNA, 30 bp, Homo sapiens; identical to SEQ ID NO: 27515
  chr14:53194027-53194057
  hypo

SEQ ID NO: 86817 - DNA, 85 bp, Homo sapiens
  chr14:53196019-53196104
  hypo
ggattacaggcgtgagcctccgcgcccggcccaaatcttttcaccatgggtttacaggcataacgccaccacacccagggaattt

SEQ ID NO: 86818 - DNA, 18 bp, Homo sapiens
  chr14:53251937-53251955
  hypo
gcccggctattatcaggt

SEQ ID NO: 86819 - DNA, 143 bp, Homo sapiens
  chr14:53259035-53259178
  hypo
agggcacaggtgagtagaggccgggaatactgcttcacgccttacagtgcgcaggacagcgccgcacaacaaagaattacctggcctgaaatgtctggagtgctgaggtttagaaacctttcgttaggagaagaaaagtgact

SEQ ID NO: 86820 - DNA, 30 bp, Homo sapiens
  chr14:53310493-53310523
  hypo
cttcaggcttgttgcgttcatgtgagatca

SEQ ID NO: 86821 - DNA, 30 bp, Homo sapiens; identical to SEQ ID NO: 51237
  chr14:54410903-54410933
  hypo

SEQ ID NO: 86822 - DNA, 30 bp, Homo sapiens
  chr14:54863039-54863069
  hypo
caagggaggctaaggcgggaggattgcttg

SEQ ID NO: 86823 - DNA, 30 bp, Homo sapiens
  chr14:55031846-55031876
  hypo
tcagcctctgcgctgcgccctcctcgcctc

SEQ ID NO: 86824 - DNA, 30 bp, Homo sapiens; identical to SEQ ID NO: 51250
  chr14:55032290-55032320
  hypo

SEQ ID NO: 86825 - DNA, 108 bp, Homo sapiens; identical to SEQ ID NO: 51251
  chr14:55032357-55032465
  hypo

SEQ ID NO: 86826 - DNA, 30 bp, Homo sapiens; identical to SEQ ID NO: 27518
  chr14:55439698-55439728
  hypo

SEQ ID NO: 86827 - DNA, 18 bp, Homo sapiens
  chr14:55517152-55517170
  hypo
tcttaaaaaatgtatatt

SEQ ID NO: 86828 - DNA, 143 bp, Homo sapiens
  chr14:55522630-55522773
  hypo
gagcgagactccatctcaaaaacaaaacaaaaaacttacgaattatttatttctggaatttttcatttaatatgttcggaccttaggtaattaaaaccacagataaggggggatcaccctaacatgaacgctgtttattctag

SEQ ID NO: 86829 - DNA, 31 bp, Homo sapiens; identical to SEQ ID NO: 27521
  chr14:55523173-55523204
  hypo

SEQ ID NO: 86830 - DNA, 30 bp, Homo sapiens; identical to SEQ ID NO: 27522
  chr14:55590025-55590055
  hypo

SEQ ID NO: 86831 - DNA, 19 bp, Homo sapiens
  chr14:55668507-55668526
  hypo
agtgcggctttctgctcca

SEQ ID NO: 86832 - DNA, 87 bp, Homo sapiens
  chr14:55740425-55740512
  hypo
ttgaaggaggtccaaaatggacgcttgcatgtgtctttcccgagcggtagcgattctggggccggctacacggctgtatgtaagtta

SEQ ID NO: 86833 - DNA, 27 bp, Homo sapiens
  chr14:55751787-55751814
  hypo
agcttctttcaagaattgttccggccg

SEQ ID NO: 86834 - DNA, 881 bp, Homo sapiens
  chr14:55765279-55766160
  hypo
gcaaatttggcagggtggaggcggaggagggcgggcgccggagcccagccggagcgggcgttgaaggctggcgcggcgagcgctgttcggggctggagggggtaaggccggcaagggcggcctgaccctccaggaggccatccagcggctgcgggacacggaggagatgttaagcaagaaacaggagttcctggagaagaaaatcgagcagaggcacggcaccaaaaacaagcccgcggccctccaggcactgaagcgtaagaagaggtatgagaagcagctggcgcagatcgacggtacattatcaaccatcgagttccagcagcaggccctggagaatgccaacaccaataccgaggtgctcaagaacatgggctctgcagccaaggccaagaaggcggcccacgacaacatggacatcgataaagttgatgagttaatgcaggacattgctgaccagcaagaacttggggaggagatttcaacagcaatttcgaaacctgtagggtttggagaaaagtctgacgaggatgagctcatggcggaattagaagaactagaacaggaggaaccagacaagaatttgctggaagtcagtggccccgaaacagtccctctaccaaatgttccctctatagccctaccatcaaaacctgccaagaagaggaagacgacgacatgaaggatttggagaactgggctgggtccagcgcgggcaggatggatgtggtgcaggcaggttccatcgctctcgactctcactccaaagcagtagggccgcattgctgctcgctctctgcatagcatggtctgcacctagtgggatgggtgggggcgggtagaggggggttgcggggcacgggggctgtgggggagaagtg

SEQ ID NO: 86835 - DNA, 31 bp, Homo sapiens; identical to SEQ ID NO: 27527
  chr14:55772519-55772550
  hypo

SEQ ID NO: 86836 - DNA, 222 bp, Homo sapiens; identical to SEQ ID NO: 27528
  chr14:55817969-55818191
  hypo

SEQ ID NO: 86837 - DNA, 30 bp, Homo sapiens
  chr14:55819290-55819320
  hypo
acacctagatacaccgttcaaatgagcgta

SEQ ID NO: 86838 - DNA, 165 bp, Homo sapiens; identical to SEQ ID NO: 27529
  chr14:55819828-55819993
  hypo

SEQ ID NO: 86839 - DNA, 30 bp, Homo sapiens; identical to SEQ ID NO: 27530
  chr14:55822929-55822959
  hypo

SEQ ID NO: 86840 - DNA, 21 bp, Homo sapiens
  chr14:55823182-55823203
  hypo
tgagatggagtcttgctctgt

SEQ ID NO: 86841 - DNA, 32 bp, Homo sapiens
  chr14:55894599-55894631
  hypo
tttttttttttttttttgagacggagtctggc

SEQ ID NO: 86842 - DNA, 181 bp, Homo sapiens
  chr14:55894690-55894871
  hypo
tcacgccattctcctgcctcagcctcccaggattgctttcatagaacgtgctacagcattcttttttcatcttctccccaatccattctcccctcaccagctgtcaagccccttcctaccggcctagtccatttcacatgccttatcttttttttttttttttttttttttttttgagacg

SEQ ID NO: 86843 - DNA, 195 bp, Homo sapiens
  chr14:55981995-55982190
  hypo
attctaaactgtctccgagatcgggctcgcagattgttaaacaccgatgtgcgctttgcatggggctcctctgggatacgcgtaatttaaattacgacatgagcatttcattttgtattggctggtacacagtaaatggagcaagcgggagccggctgatttccagagagacagaaaactcgaaaactgcagctg

SEQ ID NO: 86844 - DNA, 56 bp, Homo sapiens; identical to SEQ ID NO: 27533
  chr14:56088960-56089016
  hypo

SEQ ID NO: 86845 - DNA, 30 bp, Homo sapiens
  chr14:56095795-56095825
  hypo
ggagttcatagtaccggcaaaacaaaatga

SEQ ID NO: 86846 - DNA, 24 bp, Homo sapiens
  chr14:56255319-56255343
  hypo
ttttttttttttaagacggagtct

SEQ ID NO: 86847 - DNA, 30 bp, Homo sapiens
  chr14:56793461-56793491
  hypo
ccagcgcgcccggcccgctccaagtacttc

SEQ ID NO: 86848 - DNA, 152 bp, Homo sapiens
  chr14:57045635-57045787
  hypo
gagatacattttatgcgggttgctctcctccccgcccactccaggataattgctttaataataaaacataagcttaaaaagcttaactgcgctgttatgtagttgtccttattaacggctccgattctttttttttgcgttacagctcattg

SEQ ID NO: 86849 - DNA, 30 bp, Homo sapiens
  chr14:57052071-57052101
  hypo
tcaggcaagaccttacgactgtcagcatgg

SEQ ID NO: 86850 - DNA, 30 bp, Homo sapiens
  chr14:57052549-57052579
  hypo
ttcaattgcctaccgcgtcaatcttctctg

SEQ ID NO: 86851 - DNA, 19 bp, Homo sapiens
  chr14:57073330-57073349
  hypo
tgggtgtagtggttcacgc

SEQ ID NO: 86852 - DNA, 78 bp, Homo sapiens; identical to SEQ ID NO: 27535
  chr14:57073648-57073726
  hypo

SEQ ID NO: 86853 - DNA, 149 bp, Homo sapiens; identical to SEQ ID NO: 9719
  chr14:57265912-57266061
  hypo

SEQ ID NO: 86854 - DNA, 18 bp, Homo sapiens
  chr14:57666704-57666722
  hypo
ccacgcccggcctaaagg

SEQ ID NO: 86855 - DNA, 31 bp, Homo sapiens; identical to SEQ ID NO: 9735
  chr14:57734480-57734511
  hypo

SEQ ID NO: 86856 - DNA, 30 bp, Homo sapiens; identical to SEQ ID NO: 9737
  chr14:58546605-58546635
  hypo

SEQ ID NO: 86857 - DNA, 121 bp, Homo sapiens; identical to SEQ ID NO: 27539
  chr14:58599585-58599706
  hypo

SEQ ID NO: 86858 - DNA, 215 bp, Homo sapiens
  chr14:58708562-58708777
  hypo
ttcttaattattaataaatattgagtgcactaggcactcaaatagtgtttatcacacacaagtaatgatgttaattaaaagattaactgatacctaaacaagttttgagtacttacggtttacctccaaggccaaaccttctgcaactattaacctttagctttcttcaacactttcttggactatcttggtctaaatccgaactccccaggaaa

SEQ ID NO: 86859 - DNA, 259 bp, Homo sapiens
  chr14:58761577-58761836
  hypo
gttcatgaggcacccacttatcgagctttttcactttttaatttgcttcaaatgctgaaggactgtagaatggtccacattgagttcttcggcaacatctcaagtagccttaagaggatcagctttgctgattgctcttaaccggtagttatcaacttctggcgaccagccactacgctcctgattttcaagactttccttccctttgcaaaatttcttgaaactgccaggcacagcggctcaagcctgtaatcccagc

SEQ ID NO: 86860 - DNA, 30 bp, Homo sapiens; identical to SEQ ID NO: 51305
  chr14:58862985-58863015
  hypo

SEQ ID NO: 86861 - DNA, 98 bp, Homo sapiens
  chr14:58863446-58863544
  hypo
ctcagaagcagaaggcatcttcgtgttttgtaaatctctgcggcaaaatttgattagtcccttttttgttgtttttaagaggcgggccgggcttggtg

SEQ ID NO: 86862 - DNA, 180 bp, Homo sapiens
  chr14:58922735-58922915
  hypo
ttaaacaattgccaccgttttttgaaaaatgccctggggatactttctcgctgagctagcagtgagtcagttcaaataaagacaaacactatgaatgagacttttaggagagcttgaaaccattctactgtctttagtggttgtgaggctgttggttttcgaggccgccacagagttggg

SEQ ID NO: 86863 - DNA, 162 bp, Homo sapiens
  chr14:59014414-59014576
  hypo
aacctcatattatttcgcaaagcataaagcacgtaaatactcaggttacgcatgttgagctgaatgagcttctcctttgtgcaggtgggaaagcagtgccactctccgcttcacagatgccccctgccaagatgtcagtgatgctgccgtcagtgaacctcg

SEQ ID NO: 86864 - DNA, 244 bp, Homo sapiens; identical to SEQ ID NO: 27540
  chr14:59112402-59112646
  hypo

SEQ ID NO: 86865 - DNA, 472 bp, Homo sapiens
  chr14:59113227-59113699
  hypo
caaggggaggaagagtgggggcgggcccgaggctggtgttcccggcaggcccgcgggcgggggccacagggcggggagcagggcgcatggccacggacgggaggcggtggtggccaaacctaagcacaagcgaactgactaccggcggtggaagtcctcggccgagatttcctacgaagaggccctgaggagggcccggcgcggtcgccgggagaatgtggggctgtaccccgcgcctgtgcctctgccctacgccagcccctacgcctacgtggctagcgactccgagtactcggccgagtgcgagtccctgttccactccaccgtggtggacaccagtgaggacgagcagagcaattacaccaccaactgcttcggggacagcgagtcgagtgtgagcgagggcgagttcgtgggggagagcacaaccaccagcgactctgaagaaagcgggggcttaatttggtcccag

SEQ ID NO: 86866 - DNA, 30 bp, Homo sapiens
  chr14:59650757-59650787
  hypo
ctctttctgaactccgaggagctgttcaaa

SEQ ID NO: 86867 - DNA, 31 bp, Homo sapiens; identical to SEQ ID NO: 27541
  chr14:59706174-59706205
  hypo

SEQ ID NO: 86868 - DNA, 35 bp, Homo sapiens
  chr14:59715782-59715817
  hypo
gcgtgagccaccgcgcctggcccatccctcagttt

SEQ ID NO: 86869 - DNA, 35 bp, Homo sapiens
  chr14:59734887-59734922
  hypo
ggatgacaggcatgagtcaccgcgcccggcgcctg

SEQ ID NO: 86870 - DNA, 31 bp, Homo sapiens; identical to SEQ ID NO: 27542
  chr14:59789611-59789642
  hypo

SEQ ID NO: 86871 - DNA, 30 bp, Homo sapiens; identical to SEQ ID NO: 27543
  chr14:59810622-59810652
  hypo

SEQ ID NO: 86872 - DNA, 165 bp, Homo sapiens; identical to SEQ ID NO: 27544
  chr14:59821077-59821242
  hypo

SEQ ID NO: 86873 - DNA, 30 bp, Homo sapiens; identical to SEQ ID NO: 51310
  chr14:59932273-59932303
  hypo

SEQ ID NO: 86874 - DNA, 170 bp, Homo sapiens; identical to SEQ ID NO: 27546
  chr14:59935187-59935357
  hypo

SEQ ID NO: 86875 - DNA, 78 bp, Homo sapiens; identical to SEQ ID NO: 27547
  chr14:59961996-59962074
  hypo

SEQ ID NO: 86876 - DNA, 137 bp, Homo sapiens; identical to SEQ ID NO: 51312
  chr14:60097109-60097246
  hypo

SEQ ID NO: 86877 - DNA, 167 bp, Homo sapiens; identical to SEQ ID NO: 9745
  chr14:60097406-60097573
  hypo

SEQ ID NO: 86878 - DNA, 720 bp, Homo sapiens; identical to SEQ ID NO: 27550
  chr14:60193646-60194366
  hypo

SEQ ID NO: 86879 - DNA, 763 bp, Homo sapiens; identical to SEQ ID NO: 51314
  chr14:60385979-60386742
  hypo

SEQ ID NO: 86880 - DNA, 23 bp, Homo sapiens
  chr14:60722175-60722198
  hypo
accgcgcccggcctatcatatgt

SEQ ID NO: 86881 - DNA, 249 bp, Homo sapiens; identical to SEQ ID NO: 51323
  chr14:60973758-60974007
  hypo

SEQ ID NO: 86882 - DNA, 59 bp, Homo sapiens; identical to SEQ ID NO: 51324
  chr14:60974077-60974136
  hypo

SEQ ID NO: 86883 - DNA, 335 bp, Homo sapiens; identical to SEQ ID NO: 9761
  chr14:60981477-60981812
  hypo

SEQ ID NO: 86884 - DNA, 497 bp, Homo sapiens; identical to SEQ ID NO: 9775
  chr14:61123391-61123888
  hypo

SEQ ID NO: 86885 - DNA, 30 bp, Homo sapiens; identical to SEQ ID NO: 9776
  chr14:61124115-61124145
  hypo

SEQ ID NO: 86886 - DNA, 93 bp, Homo sapiens; identical to SEQ ID NO: 51350
  chr14:61124403-61124496
  hypo

SEQ ID NO: 86887 - DNA, 185 bp, Homo sapiens
  chr14:61246678-61246863
  hypo
gccatgtgtccctggccatggcgctgcagctctcccgggagcagggaatcaccctgcgtgggagtgccgaaatcgtggacgagttcttctcattcggcatcaacagcattttatatcagcgtggcatttatccatctgaaatctttactcgagtgcagaaatacggactcaccttgcttgtaact

SEQ ID NO: 86888 - DNA, 31 bp, Homo sapiens; identical to SEQ ID NO: 9778
  chr14:61736456-61736487
  hypo

SEQ ID NO: 86889 - DNA, 139 bp, Homo sapiens; identical to SEQ ID NO: 9779
  chr14:61747388-61747527
  hypo

SEQ ID NO: 86890 - DNA, 579 bp, Homo sapiens; identical to SEQ ID NO: 9780
  chr14:61747582-61748161
  hypo

SEQ ID NO: 86891 - DNA, 29 bp, Homo sapiens
  chr14:61903530-61903559
  hypo
tgagccgccacacccggccttgctgccat

SEQ ID NO: 86892 - DNA, 80 bp, Homo sapiens
  chr14:61992776-61992856
  hypo
ctccttcactgggcaggaccacgatcatcctcacccctgctcccgtcctgcgctgctacgattgcaaccttttgtaggtt

SEQ ID NO: 86893 - DNA, 149 bp, Homo sapiens; identical to SEQ ID NO: 27559
  chr14:62015168-62015317
  hypo

SEQ ID NO: 86894 - DNA, 30 bp, Homo sapiens
  chr14:62021540-62021570
  hypo
ttggctattattatcgtcagctctcccaca

SEQ ID NO: 86895 - DNA, 260 bp, Homo sapiens; identical to SEQ ID NO: 51361
  chr14:62105860-62106120
  hypo

SEQ ID NO: 86896 - DNA, 89 bp, Homo sapiens; identical to SEQ ID NO: 51362
  chr14:62161812-62161901
  hypo

SEQ ID NO: 86897 - DNA, 641 bp, Homo sapiens; identical to SEQ ID NO: 51363
  chr14:62162323-62162964
  hypo

SEQ ID NO: 86898 - DNA, 23 bp, Homo sapiens
  chr14:62207098-62207121
  hypo
gataaacacgatggacttggttg

SEQ ID NO: 86899 - DNA, 30 bp, Homo sapiens
  chr14:62263105-62263135
  hypo
aatgctaatgctgacgcaaataaaattttc

SEQ ID NO: 86900 - DNA, 30 bp, Homo sapiens; identical to SEQ ID NO: 27562
  chr14:62273614-62273644
  hypo

SEQ ID NO: 86901 - DNA, 30 bp, Homo sapiens
  chr14:62298855-62298885
  hypo
tcccatccgtggagcggttgctccaggagg

SEQ ID NO: 86902 - DNA, 234 bp, Homo sapiens; identical to SEQ ID NO: 27563
  chr14:62523572-62523806
  hypo

SEQ ID NO: 86903 - DNA, 645 bp, Homo sapiens; identical to SEQ ID NO: 9788
  chr14:63512063-63512708
  hypo

SEQ ID NO: 86904 - DNA, 457 bp, Homo sapiens; identical to SEQ ID NO: 51372
  chr14:63512740-63513197
  hypo

SEQ ID NO: 86905 - DNA, 122 bp, Homo sapiens
  chr14:63856996-63857118
  hypo
gcactgacgcattctcgacacacacacacacacacacacacacacacacacacacacgcttgctctctacaaagcacagtgaatcttgtgaactcagcaccgggtgccgcaagaaacagagt

SEQ ID NO: 86906 - DNA, 30 bp, Homo sapiens
  chr14:63872814-63872844
  hypo
tcaaaacccttgaatgaaaaacgacagact

SEQ ID NO: 86907 - DNA, 30 bp, Homo sapiens
  chr14:63950402-63950432
  hypo
gtccacaggggccacgctagagacagagac

SEQ ID NO: 86908 - DNA, 198 bp, Homo sapiens
  chr14:64061785-64061983
  hypo
gttgaggattcctccggagacgccgtccacgtggatgtgcggcccctgacgggacgtgatgacccgctcactcttccaggtgccagctccgcggatcccttccagctccccctccagaatgccgcgcagctgggccagtactgactgcgcgctgcggccgcacggcaccccggaaagcgcggcgcgccaggcgtttcc

SEQ ID NO: 86909 - DNA, 30 bp, Homo sapiens
  chr14:64064593-64064623
  hypo
agcagattagagatcgagctggtaatccag

SEQ ID NO: 86910 - DNA, 30 bp, Homo sapiens
  chr14:64107207-64107237
  hypo
ttttttttctcttttttgagacgttgtctc

SEQ ID NO: 86911 - DNA, 21 bp, Homo sapiens
  chr14:64149781-64149802
  hypo
ccaccgcgactggccaagttt

SEQ ID NO: 86912 - DNA, 36 bp, Homo sapiens; identical to SEQ ID NO: 51377
  chr14:64182959-64182995
  hypo

SEQ ID NO: 86913 - DNA, 43 bp, Homo sapiens; identical to SEQ ID NO: 27566
  chr14:64190116-64190159
  hypo

SEQ ID NO: 86914 - DNA, 45 bp, Homo sapiens; identical to SEQ ID NO: 27567
  chr14:64191360-64191405
  hypo

SEQ ID NO: 86915 - DNA, 37 bp, Homo sapiens; identical to SEQ ID NO: 27568
  chr14:64222413-64222450
  hypo

SEQ ID NO: 86916 - DNA, 36 bp, Homo sapiens
  chr14:64227544-64227580
  hypo
gtttacaggcgtgagccaccacgcctggccttgtac

SEQ ID NO: 86917 - DNA, 1006 bp, Homo sapiens; identical to SEQ ID NO: 51381
  chr14:64760752-64761758
  hypo

SEQ ID NO: 86918 - DNA, 18 bp, Homo sapiens
  chr14:64822460-64822478
  hypo
tttttttttgagaggaag

SEQ ID NO: 86919 - DNA, 155 bp, Homo sapiens; identical to SEQ ID NO: 27569
  chr14:64884525-64884680
  hypo

SEQ ID NO: 86920 - DNA, 81 bp, Homo sapiens; identical to SEQ ID NO: 27570
  chr14:64888235-64888316
  hypo

SEQ ID NO: 86921 - DNA, 31 bp, Homo sapiens; identical to SEQ ID NO: 27571
  chr14:64892253-64892284
  hypo

SEQ ID NO: 86922 - DNA, 33 bp, Homo sapiens
  chr14:64904875-64904908
  hypo
gccactgtgcccggcctgttcaagagttttata

SEQ ID NO: 86923 - DNA, 82 bp, Homo sapiens
  chr14:64905828-64905910
  hypo
atagattcctgaggaagatcacgattggacaggctccaacggagaagggtcacacacggacggtaacaatttgtccctttcc

SEQ ID NO: 86924 - DNA, 27 bp, Homo sapiens
  chr14:64955675-64955702
  hypo
tgaaatcagcagggtgcggtggctcac

SEQ ID NO: 86925 - DNA, 13 bp, Homo sapiens
  chr14:64982517-64982530
  hypo
tgagccacggtgc

SEQ ID NO: 86926 - DNA, 44 bp, Homo sapiens
  chr14:64992808-64992852
  hypo
tacaggcatgagccaccgtgcccggccacctcaatttttttttc

SEQ ID NO: 86927 - DNA, 44 bp, Homo sapiens; identical to SEQ ID NO: 9796
  chr14:65005556-65005600
  hypo

SEQ ID NO: 86928 - DNA, 163 bp, Homo sapiens; identical to SEQ ID NO: 51388
  chr14:65005779-65005942
  hypo

SEQ ID NO: 86929 - DNA, 39 bp, Homo sapiens
  chr14:65122506-65122545
  hypo
gcttgagccaccgcgcccggcccctttaactctttatct

SEQ ID NO: 86930 - DNA, 21 bp, Homo sapiens
  chr14:65136323-65136344
  hypo
actagcatcagcagtattaat

SEQ ID NO: 86931 - DNA, 20 bp, Homo sapiens
  chr14:65136643-65136663
  hypo
tctcaaaaaaaaaaaaaaaa

SEQ ID NO: 86932 - DNA, 30 bp, Homo sapiens; identical to SEQ ID NO: 27577
  chr14:65150059-65150089
  hypo

SEQ ID NO: 86933 - DNA, 292 bp, Homo sapiens
  chr14:65194542-65194834
  hypo
ccagcagctggttgaacgtgaaggggcccctctccccgttcaacagccgggcagcggcagggcctgcacaccacaagctcagctacctgggccgagtggtgcgggagatcgtggagacagagcgcatgtacgtacaggacctgcgcagcatcgtggaggtgcgtgtcggaggccttgcggcacagtattctagcagaagcctgtttcaccctgggagggaagctctcaaaagacctgcttcccataaagtagttggagaactggggtctcccaccctcgctgactgcactgt

SEQ ID NO: 86934 - DNA, 31 bp, Homo sapiens; identical to SEQ ID NO: 27579
  chr14:65195784-65195815
  hypo

SEQ ID NO: 86935 - DNA, 31 bp, Homo sapiens
  chr14:65199533-65199564
  hypo
ccgctgcagcccagagcggctgaagaaggct

SEQ ID NO: 86936 - DNA, 31 bp, Homo sapiens
  chr14:65203193-65203224
  hypo
tggagccagggacctccggagatgttgctag

SEQ ID NO: 86937 - DNA, 30 bp, Homo sapiens
  chr14:65207684-65207714
  hypo
gtccccttgttccccggatcccatgaagga

SEQ ID NO: 86938 - DNA, 163 bp, Homo sapiens
  chr14:65208027-65208190
  hypo
tgctggaccaggccagcgtcattgcggagcgatttgtcagcagcttctctcggcggagcagcgtggcacaggaggacagcaagtccagtggctttgggagcccgcggctggtcagccggagcagcagcgtgctcagcctggagggcagcgagaagggcctggc

SEQ ID NO: 86939 - DNA, 140 bp, Homo sapiens; identical to SEQ ID NO: 27581
  chr14:65209827-65209967
  hypo

SEQ ID NO: 86940 - DNA, 31 bp, Homo sapiens
  chr14:65210331-65210362
  hypo
gagggttccagggacccggcagacccgagcc

SEQ ID NO: 86941 - DNA, 75 bp, Homo sapiens
  chr14:65215873-65215948
  hypo
agcttttgcagtgcagcgtggggcccgggggcccggcccgcgactcgactcatctcgattcgaccggcgggcggc

SEQ ID NO: 86942 - DNA, 31 bp, Homo sapiens
  chr14:65217132-65217163
  hypo
atattcaattttatatcgtgtttctaagcat

SEQ ID NO: 86943 - DNA, 143 bp, Homo sapiens; identical to SEQ ID NO: 27582
  chr14:65220229-65220372
  hypo

SEQ ID NO: 86944 - DNA, 391 bp, Homo sapiens
  chr14:65233319-65233710
  hypo
gggaggatggagggcggggctgcgccagctcatctcgcctccacctgggctgagcctagtaggggtgagagggctctggctgcagtgactcccaggaactagacaaacgagaccagagactgaccggggacgttctctcggtggccgcatggtgggaaactggagcctcccctgctgtctcgccttcctcctcttgaggcctaaggaagacacagtctctctttagaaacaagcacccctctgaggccagtgcctcctgcgaggcctggcttttcacctgcgcccacagggaggagcaccaaatagctccccctccagtcagccggcagcctggatggtgcttggcaaggagccgcccagcgacttcttcggaaaagccaaggcagattct

SEQ ID NO: 86945 - DNA, 47 bp, Homo sapiens
  chr14:65236249-65236296
  hypo
gctggcacagtggggacggagacggaggagctcgcctccatccttgc

SEQ ID NO: 86946 - DNA, 85 bp, Homo sapiens; identical to SEQ ID NO: 27584
  chr14:65237646-65237731
  hypo

SEQ ID NO: 86947 - DNA, 557 bp, Homo sapiens; identical to SEQ ID NO: 27585
  chr14:65239301-65239858
  hypo

SEQ ID NO: 86948 - DNA, 31 bp, Homo sapiens
  chr14:65240158-65240189
  hypo
aaaaggccctcagagacggcagccacgaacc

SEQ ID NO: 86949 - DNA, 55 bp, Homo sapiens
  chr14:65248986-65249041
  hypo
gtctacaacccactcacgtgccttcagcttagccaacatccgattgacactggtc

SEQ ID NO: 86950 - DNA, 222 bp, Homo sapiens; identical to SEQ ID NO: 27587
  chr14:65271601-65271823
  hypo

SEQ ID NO: 86951 - DNA, 91 bp, Homo sapiens; identical to SEQ ID NO: 27588
  chr14:65273126-65273217
  hypo

SEQ ID NO: 86952 - DNA, 193 bp, Homo sapiens
  chr14:65406251-65406444
  hypo
atggttgggaaggtgcggctgtagcgtcggaagggctctccctccggccctatgaggaacttctcaaagttccaggccacatctgagcggcgcacagggctccaaatgatgagcttgggatcggtcatgagggaaaatgggtcatcataagggtaggggagcttgtccttcaggtaggcgaagacaggatgct

SEQ ID NO: 86953 - DNA, 35 bp, Homo sapiens; identical to SEQ ID NO: 27590
  chr14:65492491-65492526
  hypo

SEQ ID NO: 86954 - DNA, 147 bp, Homo sapiens
  chr14:65493163-65493310
  hypo
tgggaggcattctcacggcgagtcagtgcagctcctcttatgtttaccgcaattaaggtgagcatgagagcagcctgcctctcttctgttctcccagccatggaagcaggctccattaaaaatgtgtttttcagccggatgcagtgg

SEQ ID NO: 86955 - DNA, 27 bp, Homo sapiens
  chr14:65493549-65493576
  hypo
agcctgggcgaccgagggcaaccccgc

SEQ ID NO: 86956 - DNA, 341 bp, Homo sapiens
  chr14:65532362-65532703
  hypo
tcacgggaccactgtcgtacatgcattctgttgttaaccaaaacatgatgtggcgtgactatatacaaaactctaccaccaattagccccaagaccaaggctttacctgctgcttaaaaagtgctgaccactcttgcctcatctgcccaaacaataacccctaagacagtccctcctgttctaccgcctctcatttgatccttgactcaccttgtaaggtgggtgaagcaggcgtattacctgccttttacaactggagaaacaggttggagagcttacgtaaatcacccaaggtttcccagctgtcaagtggtggtgcctgagcccgagcccgtatctgc

SEQ ID NO: 86957 - DNA, 30 bp, Homo sapiens
  chr14:65532964-65532994
  hypo
aggccgtgatgagtccgtcttcccaggagc

SEQ ID NO: 86958 - DNA, 24 bp, Homo sapiens
  chr14:65533278-65533302
  hypo
agaaaaatgcatggccgggtgtgg

SEQ ID NO: 86959 - DNA, 30 bp, Homo sapiens
  chr14:65746809-65746839
  hypo
ccggacctgccctccggggacagctagccc

SEQ ID NO: 86960 - DNA, 30 bp, Homo sapiens; identical to SEQ ID NO: 27591
  chr14:65747465-65747495
  hypo

SEQ ID NO: 86961 - DNA, 30 bp, Homo sapiens
  chr14:66096205-66096235
  hypo
acaggtctataatgacggatctatactacc

SEQ ID NO: 86962 - DNA, 31 bp, Homo sapiens; identical to SEQ ID NO: 27592
  chr14:66169220-66169251
  hypo

SEQ ID NO: 86963 - DNA, 30 bp, Homo sapiens; identical to SEQ ID NO: 27593
  chr14:66308224-66308254
  hypo

SEQ ID NO: 86964 - DNA, 219 bp, Homo sapiens
  chr14:66479540-66479759
  hypo
catttactcaagccccgccctgctcagcctcgggagcggacgaattctcagctggtggattggctgcttttgtctctttgccatcttgtggtttagggttttctgggcgtcggcgtcggtaattgaagttgcggcggtaccgacgttgaggtggctgctgaccttgggtctcatctccttgattttctttatcttcttcattgccgtcctctctaggct

SEQ ID NO: 86965 - DNA, 43 bp, Homo sapiens; identical to SEQ ID NO: 27594
  chr14:66814103-66814146
  hypo

SEQ ID NO: 86966 - DNA, 23 bp, Homo sapiens
  chr14:67585481-67585504
  hypo
gcggggggagttacctttcttaa

SEQ ID NO: 86967 - DNA, 30 bp, Homo sapiens
  chr14:67647725-67647755
  hypo
acagctagttttcccgatttggataaaagt

SEQ ID NO: 86968 - DNA, 31 bp, Homo sapiens
  chr14:67860125-67860156
  hypo
catcttgaagtgaagccgccatgatgattga

SEQ ID NO: 86969 - DNA, 170 bp, Homo sapiens
  chr14:67864420-67864590
  hypo
gccatccaggaggatccggcccttgggaggggtcactctccgacccccctcaagcttgtagtacaccagcgtgttctgccgaaggatgaaccatcgcgccttccagttgtggacaatgtggccctatggacagacaagaaagccctgaggtgaggcggtcagtgggaggg

SEQ ID NO: 86970 - DNA, 93 bp, Homo sapiens
  chr14:67876364-67876457
  hypo
actctgcttctttctcgtctgggtgggattaagagccaactctatcatgtccctgcctgtctctggcttcgctttcaccggtgatgactgctc

SEQ ID NO: 86971 - DNA, 38 bp, Homo sapiens
  chr14:67886278-67886316
  hypo
ctcataaaggctgcatccaggcggggggcggtggctca

SEQ ID NO: 86972 - DNA, 97 bp, Homo sapiens
  chr14:67886555-67886652
  hypo
cctccgtctcaaaaaaaaaaaaaggctgcatccattcgctaagccacatggcagtgggtctgcatctccccagagcgggtgcttttttctattccat

SEQ ID NO: 86973 - DNA, 180 bp, Homo sapiens
  chr14:67888348-67888528
  hypo
ggagggcctataggaacgatcctagccattaactcacctgttgggcttctagagatgtgcattcggagccattggtaagagcatggaattacgtggaaactgcagaggggccctccaacactttgcctctgaaatggacctaggctattgtgctttgcgggttctcggtctgctttccct

SEQ ID NO: 86974 - DNA, 48 bp, Homo sapiens
  chr14:67893183-67893231
  hypo
gccccttaaaacacaagtggccggtgcgattgccttcagcagcagcag

SEQ ID NO: 86975 - DNA, 30 bp, Homo sapiens
  chr14:68062849-68062879
  hypo
ttcattcattgattcgagacagaatttcac

SEQ ID NO: 86976 - DNA, 215 bp, Homo sapiens; identical to SEQ ID NO: 27598
  chr14:68067573-68067788
  hypo

SEQ ID NO: 86977 - DNA, 30 bp, Homo sapiens
  chr14:68142518-68142548
  hypo
aattcctgtcttcacgtcgggcatggtggc

SEQ ID NO: 86978 - DNA, 24 bp, Homo sapiens
  chr14:68166570-68166594
  hypo
gatttaggctgggcgcggtggctc

SEQ ID NO: 86979 - DNA, 23 bp, Homo sapiens
  chr14:68166833-68166856
  hypo
agacagagcgagaaaaaaaaaaa

SEQ ID NO: 86980 - DNA, 30 bp, Homo sapiens; identical to SEQ ID NO: 27600
  chr14:68214727-68214757
  hypo

SEQ ID NO: 86981 - DNA, 30 bp, Homo sapiens
  chr14:68265653-68265683
  hypo
atctttatttctcgcgccgcggtttcggtg

SEQ ID NO: 86982 - DNA, 31 bp, Homo sapiens
  chr14:68621852-68621883
  hypo
atataaaaggaaattacgcaaggggagctgg

SEQ ID NO: 86983 - DNA, 30 bp, Homo sapiens; identical to SEQ ID NO: 51423
  chr14:68660412-68660442
  hypo

SEQ ID NO: 86984 - DNA, 99 bp, Homo sapiens
  chr14:68829197-68829296
  hypo
agtttctggttctagaacctacgttctttcataaccatcactgctctgaaaaagagtaagcaccagacctgaaagaaacataacagaggccgggcgcag

SEQ ID NO: 86985 - DNA, 43 bp, Homo sapiens
  chr14:68968538-68968581
  hypo
gcatggggtgggctgtgacatcggccaccactgctggattcct

SEQ ID NO: 86986 - DNA, 30 bp, Homo sapiens
  chr14:69006125-69006155
  hypo
tccgccccctcctccgcctgcctctcagtc

SEQ ID NO: 86987 - DNA, 133 bp, Homo sapiens
  chr14:69014214-69014347
  hypo
agtgttggggtccaggagccccgctcactcctcagcacccgggagcatcacggaatctaaggtgaacctccggggcaggagacacagcactggccttagagtccacaagcccgggttccttggccctgtctct

SEQ ID NO: 86988 - DNA, 30 bp, Homo sapiens; identical to SEQ ID NO: 51424
  chr14:69034666-69034696
  hypo

SEQ ID NO: 86989 - DNA, 100 bp, Homo sapiens
  chr14:69050652-69050752
  hypo
ctaatgtgtgggccacagcaccggccactccagtcaccagatgaggacctggcgggggtgagcttagccaatgaaaaccggaggaaggagctttaaaggt

SEQ ID NO: 86990 - DNA, 94 bp, Homo sapiens
  chr14:69070515-69070609
  hypo
ccttcagtgtatccagccctgcggccgcgctggccccctgtccgcatgctgtcaggctacctccgtgccagacgaccaacacccagccacagtg

SEQ ID NO: 86991 - DNA, 44 bp, Homo sapiens
  chr14:69153994-69154038
  hypo
cctaaaaaaagttgggcgggaggccgagatgggtggatcacaag

SEQ ID NO: 86992 - DNA, 35 bp, Homo sapiens
  chr14:69154692-69154727
  hypo
agaatgaaggagggccaggtgcggtggctcatgcc

SEQ ID NO: 86993 - DNA, 94 bp, Homo sapiens
  chr14:69218774-69218868
  hypo
agtggatctggatagacgcaagttaagctgatgagtttgtctctaccacaggggtacctgcctttccccaggatcagcccgatggcaattctgg

SEQ ID NO: 86994 - DNA, 31 bp, Homo sapiens
  chr14:69229175-69229206
  hypo
tgccttggccatgattcgtagactcacttac

SEQ ID NO: 86995 - DNA, 71 bp, Homo sapiens; identical to SEQ ID NO: 27602
  chr14:69245928-69245999
  hypo

SEQ ID NO: 86996 - DNA, 31 bp, Homo sapiens; identical to SEQ ID NO: 9812
  chr14:69258877-69258908
  hypo

SEQ ID NO: 86997 - DNA, 228 bp, Homo sapiens; identical to SEQ ID NO: 9813
  chr14:69259277-69259505
  hypo

SEQ ID NO: 86998 - DNA, 196 bp, Homo sapiens; identical to SEQ ID NO: 27605
  chr14:69278084-69278280
  hypo

SEQ ID NO: 86999 - DNA, 18 bp, Homo sapiens
  chr14:69312385-69312403
  hypo
acagtgtcaggccaggcg

SEQ ID NO: 87000 - DNA, 41 bp, Homo sapiens
  chr14:69337464-69337505
  hypo
ggattacaggcatgggccaccgtgcccggcccagagtcttt

SEQ ID NO: 87001 - DNA, 161 bp, Homo sapiens; identical to SEQ ID NO: 27606
  chr14:69345630-69345791
  hypo

SEQ ID NO: 87002 - DNA, 175 bp, Homo sapiens
  chr14:69347539-69347714
  hypo
ttggtgtgcttgttgtcgaagatgagcgcctcctggatgagctggtggtcgccctccagctgatcaatctttggcttgtagttgacgatgctcttctcatactgccgcaggtggctgagctggtcctccagggtcccatgcatctcaatggagatcctcccgatctcctgctcac

SEQ ID NO: 87003 - DNA, 54 bp, Homo sapiens
  chr14:69352138-69352192
  hypo
tacttgagctcctgtgcgatggcggcaatctgctccacacggtcctggtgggca

SEQ ID NO: 87004 - DNA, 148 bp, Homo sapiens
  chr14:69352453-69352601
  hypo
tagaacatccaccaaccggcgcaacggggaaaagcactctcctcagagcacttccaaggccatgaaagtgtctacgcaggaaggctatgcaggagtctgtgggaatgcatagggcatgacgctatacacacagcgggaaacacagcca

SEQ ID NO: 87005 - DNA, 253 bp, Homo sapiens
  chr14:69354665-69354918
  hypo
aagatttatccttcactgctgcgtttttcggcttcgcttccacttttgcaggaggtttaactgacaaccgcgccgatctcctcttgggcttttccttggcggctccttcagcagagctgaccttccccttgggcatcctggcggcagggagggcgcgtgccaggtgtctgcgggccgcggcatgctgacagcctttgcgaaactgtgctgcctggccgctgccactcctcacgcccaggatagattctttaga

SEQ ID NO: 87006 - DNA, 31 bp, Homo sapiens
  chr14:69369341-69369372
  hypo
gaggcagaaagaagctcgcagcaccaccaag

SEQ ID NO: 87007 - DNA, 39 bp, Homo sapiens
  chr14:69385003-69385042
  hypo
atgtgaaagttctggccgggcgcggtggctcacgcctgt

SEQ ID NO: 87008 - DNA, 31 bp, Homo sapiens
  chr14:69396464-69396495
  hypo
agagtctctgaggacccgggacagagggagg

SEQ ID NO: 87009 - DNA, 622 bp, Homo sapiens; identical to SEQ ID NO: 51432
  chr14:69444742-69445364
  hypo

SEQ ID NO: 87010 - DNA, 300 bp, Homo sapiens; identical to SEQ ID NO: 51433
  chr14:69445726-69446026
  hypo

SEQ ID NO: 87011 - DNA, 193 bp, Homo sapiens
  chr14:69470453-69470646
  hypo
actcgtcccagtgactcggccctgcctgcccctcactctgttcaccacggcactctgttgtccctccactcaacccctttggcctccttgccacacctcgtgtgtgtcaaggtccttctggcctcagaacctctgtacttgctgttctttctgcctgaaacacccttccccgcagatccgcaggtttccccat

SEQ ID NO: 87012 - DNA, 164 bp, Homo sapiens; identical to SEQ ID NO: 27612
  chr14:69550072-69550236
  hypo

SEQ ID NO: 87013 - DNA, 31 bp, Homo sapiens; identical to SEQ ID NO: 9819
  chr14:69618276-69618307
  hypo

SEQ ID NO: 87014 - DNA, 96 bp, Homo sapiens; identical to SEQ ID NO: 9820
  chr14:69658737-69658833
  hypo

SEQ ID NO: 87015 - DNA, 140 bp, Homo sapiens; identical to SEQ ID NO: 27615
  chr14:69666739-69666879
  hypo

SEQ ID NO: 87016 - DNA, 21 bp, Homo sapiens
  chr14:69712707-69712728
  hypo
agccatcgcacccggccccta

SEQ ID NO: 87017 - DNA, 31 bp, Homo sapiens; identical to SEQ ID NO: 27616
  chr14:70078067-70078098
  hypo

SEQ ID NO: 87018 - DNA, 24 bp, Homo sapiens
  chr14:70106022-70106046
  hypo
tccgtctcaaaaaaaaaaaaaaaa

SEQ ID NO: 87019 - DNA, 471 bp, Homo sapiens
  chr14:70236263-70236734
  hypo
tgtgggttatcctaatcgttgtcttggtcactcttggttgggcctggttgactttgccagtcagctcctacagtgatcagttggccacctctagatctgtgtttgccggtctagacgttatcggtgcacttccttgaagtgccaggttgcagcgatcccagagcgttgataacgtgatctgatccctaagttgagacctgtcttcctgtaacgcttccgaataagaggtccggtcgaaaagagttgaaagatacgaaattaggtggtcgttggaatcctgatcgcagtaaagtggtccttggtaactgctcgagtagaacatgtctgcatccgccaatagtccgctaatagggagggctgtgcgattaaaggcttccatcgattgggtagtgtccttcaagtgggtggcgaagagccagtcgggcatatgtcatgaaggtttctccgaccgattaatggtttgctgcttga

SEQ ID NO: 87020 - DNA, 30 bp, Homo sapiens
  chr14:70238026-70238056
  hypo
gccggagcaagtcccgttctgttagtaggt

SEQ ID NO: 87021 - DNA, 411 bp, Homo sapiens; identical to SEQ ID NO: 51445
  chr14:70346136-70346547
  hypo

SEQ ID NO: 87022 - DNA, 1534 bp, Homo sapiens; identical to SEQ ID NO: 9826
  chr14:70654355-70655889
  hypo

SEQ ID NO: 87023 - DNA, 218 bp, Homo sapiens; identical to SEQ ID NO: 9827
  chr14:70655919-70656137
  hypo

SEQ ID NO: 87024 - DNA, 527 bp, Homo sapiens; identical to SEQ ID NO: 51450
  chr14:70826031-70826558
  hypo

SEQ ID NO: 87025 - DNA, 61 bp, Homo sapiens; identical to SEQ ID NO: 51452
  chr14:71108797-71108858
  hypo

SEQ ID NO: 87026 - DNA, 17 bp, Homo sapiens
  chr14:71398551-71398568
  hypo
gatctagggccaggcac

SEQ ID NO: 87027 - DNA, 30 bp, Homo sapiens
  chr14:71865070-71865100
  hypo
ttttttgtcaacagcggttcacctagtgaa

SEQ ID NO: 87028 - DNA, 29 bp, Homo sapiens
  chr14:72394662-72394691
  hypo
ccgcgcccggccaagaatccttttttttt

SEQ ID NO: 87029 - DNA, 43 bp, Homo sapiens
  chr14:72431250-72431293
  hypo
tatattcactcctggggtgtgcgattctgagctgaaaatcaat

SEQ ID NO: 87030 - DNA, 30 bp, Homo sapiens
  chr14:72703611-72703641
  hypo
cccagacggggcggcggcattcttaccacc

SEQ ID NO: 87031 - DNA, 31 bp, Homo sapiens
  chr14:72732621-72732652
  hypo
taactatcagtcctatcgcttttttgggggg

SEQ ID NO: 87032 - DNA, 37 bp, Homo sapiens; identical to SEQ ID NO: 27622
  chr14:72939847-72939884
  hypo

SEQ ID NO: 87033 - DNA, 36 bp, Homo sapiens; identical to SEQ ID NO: 27623
  chr14:72940123-72940159
  hypo

SEQ ID NO: 87034 - DNA, 31 bp, Homo sapiens
  chr14:73033095-73033126
  hypo
atgatcacggactcatcggaatggcctcctc

SEQ ID NO: 87035 - DNA, 30 bp, Homo sapiens
  chr14:73147136-73147166
  hypo
gcctggaagcctggcggggaagcagacagt

SEQ ID NO: 87036 - DNA, 30 bp, Homo sapiens; identical to SEQ ID NO: 27624
  chr14:73180229-73180259
  hypo

SEQ ID NO: 87037 - DNA, 30 bp, Homo sapiens
  chr14:73195193-73195223
  hypo
ggaatggagaggacacgcccaggaaggtca

SEQ ID NO: 87038 - DNA, 162 bp, Homo sapiens
  chr14:73238397-73238559
  hypo
gggagcctgcacatgcgcatgtcccaggagtggcgcagctcacctgggcctcggtgcctcttctccatccagatgtagcagttgttctgggccaccccagtctgtgagtccaggaagggaagacgcacgctgcgctctgcacacagccgtgagttgtaactc

SEQ ID NO: 87039 - DNA, 30 bp, Homo sapiens; identical to SEQ ID NO: 27625
  chr14:73302674-73302704
  hypo

SEQ ID NO: 87040 - DNA, 114 bp, Homo sapiens
  chr14:73318515-73318629
  hypo
caacgggtaggcaaccgatatgcccagaaaggcggccaatgggaggacagctcgcccagcctcccgattggccaggcccgccaccagctggaaccatggcgagctttgaggaca

SEQ ID NO: 87041 - DNA, 361 bp, Homo sapiens; identical to SEQ ID NO: 51458
  chr14:73358888-73359249
  hypo

SEQ ID NO: 87042 - DNA, 89 bp, Homo sapiens
  chr14:73390959-73391048
  hypo
ctacctttataatcgcgggtgcttaaccaatgggcgctgtgcaccaagtcctgggtgaggtactccatcatcagcgcttactccttaca

SEQ ID NO: 87043 - DNA, 123 bp, Homo sapiens; identical to SEQ ID NO: 27627
  chr14:73392218-73392341
  hypo

SEQ ID NO: 87044 - DNA, 242 bp, Homo sapiens; identical to SEQ ID NO: 51462
  chr14:73393286-73393528
  hypo

SEQ ID NO: 87045 - DNA, 30 bp, Homo sapiens
  chr14:73413375-73413405
  hypo
tcatccagccaggccgcagccagcactgag

SEQ ID NO: 87046 - DNA, 74 bp, Homo sapiens
  chr14:73428613-73428687
  hypo
ttcagtggaaggtttggctaccgcgggaacaccccagctctccgtcggagcacgtctgtctttggagaggtcac

SEQ ID NO: 87047 - DNA, 30 bp, Homo sapiens
  chr14:73459382-73459412
  hypo
acctctgctcctaaacgccccccgaacaaa

SEQ ID NO: 87048 - DNA, 336 bp, Homo sapiens
  chr14:73459711-73460047
  hypo
ccattcatgtgcttccgcttcttataacctctttccacccagatttccaatcaccagcaccacaaaagctggcgaactgagtgttctcaccacccactggcaccccaatgagaagcccttggggcacaagccaactgaccttcagggctttgaagatgactcccgggtgccggggagaacgggtggtgttattctctagtagctgctccaaagcacgccgaagcccagaaaagtccgtgggagggttgtaagtcctcgttcccttgtagtgaatggaactaaaggcttcagggaaacggcccagcttccggaaccggtcctggatgagcttctctg

SEQ ID NO: 87049 - DNA, 65 bp, Homo sapiens
  chr14:73464849-73464914
  hypo
cacagtgcaggactcctgggtcggggaggttttaaagacttcacgaccataaaagaaagtgtggt

SEQ ID NO: 87050 - DNA, 90 bp, Homo sapiens
  chr14:73482874-73482964
  hypo
gagattatagatgactcgtcagcatgaatcatttatttattatgacctctaaataatggatctgggccgggcacggtgttcacgcctgta

SEQ ID NO: 87051 - DNA, 31 bp, Homo sapiens; identical to SEQ ID NO: 9833
  chr14:73485669-73485700
  hypo

SEQ ID NO: 87052 - DNA, 30 bp, Homo sapiens; identical to SEQ ID NO: 27632
  chr14:73570122-73570152
  hypo

SEQ ID NO: 87053 - DNA, 16 bp, Homo sapiens
  chr14:73602380-73602396
  hypo
ggggtggatttttaaa

SEQ ID NO: 87054 - DNA, 365 bp, Homo sapiens
  chr14:73708406-73708771
  hypo
tggggcaggaaccacccagtccgagcaccttctctggatcacttatgctgtcagcggtcagtctgaacagaatgagtaaatgaataaaggtggcggcctgcgtgttcctgggcctcagcctctgctcccgtctgcacacgggtgtgcatgtgttctgtctctctcttacacacgtgcacattgggcagttgattcccctggaaacagtgcagcaggaaaggggacccctgagtggctccaggtgggagttgaaggaggcatgggtggggcgcctagcgcagcatgagacaggtgagggcaggccccaggtgaggctggctgtatcagctcattccggcttcacgccatgtcgggcagttcacggt

SEQ ID NO: 87055 - DNA, 30 bp, Homo sapiens
  chr14:73753942-73753972
  hypo
ccacattccttctcccgcttctgcttgcgc

SEQ ID NO: 87056 - DNA, 36 bp, Homo sapiens; identical to SEQ ID NO: 27634
  chr14:73855376-73855412
  hypo

SEQ ID NO: 87057 - DNA, 38 bp, Homo sapiens
  chr14:73926313-73926351
  hypo
gcaactttctaataagcgggccacattataccctttat

SEQ ID NO: 87058 - DNA, 30 bp, Homo sapiens
  chr14:73967287-73967317
  hypo
aaacaggctgcccgccgaactgctgtgaag

SEQ ID NO: 87059 - DNA, 31 bp, Homo sapiens
  chr14:73971262-73971293
  hypo
taatgctcctaggtgacgcctgtgctgctgg

SEQ ID NO: 87060 - DNA, 27 bp, Homo sapiens
  chr14:74020157-74020184
  hypo
tgagccgggatcgcgccactgcactcc

SEQ ID NO: 87061 - DNA, 25 bp, Homo sapiens
  chr14:74110603-74110628
  hypo
gtttgtttgtttgttttgagacgga

SEQ ID NO: 87062 - DNA, 155 bp, Homo sapiens; identical to SEQ ID NO: 51469
  chr14:74111424-74111579
  hypo

SEQ ID NO: 87063 - DNA, 94 bp, Homo sapiens; identical to SEQ ID NO: 27637
  chr14:74113148-74113242
  hypo

SEQ ID NO: 87064 - DNA, 33 bp, Homo sapiens
  chr14:74142424-74142457
  hypo
aagttaaaattgtaggctgggcgcagtggctca

SEQ ID NO: 87065 - DNA, 522 bp, Homo sapiens; identical to SEQ ID NO: 51470
  chr14:74180376-74180898
  hypo

SEQ ID NO: 87066 - DNA, 30 bp, Homo sapiens; identical to SEQ ID NO: 27638
  chr14:74184828-74184858
  hypo

SEQ ID NO: 87067 - DNA, 755 bp, Homo sapiens
  chr14:74185259-74186014
  hypo
ggtggagtccctcccgaggggaccgggactctcccggtccaggaaagcacgaggacagcttccgacagaccaaatgcaaagagagctggatcctggagcccttaacgctgctcccagggccttcataaataaaagagccgtttatgtcattgtctcatttgtttcgcagggaaaagtccctgcaatcctctcctcactccctcttgagatgccagggtgtctgcgggcgctggcggcggtgcgggaagggccgaggcccaggactgggccagcctggctcccgcgctcagcccttgtcgcccgcaccgctctcctcccgcagggcctgctggtgggcggcggcggcggcagcagcggcctctttctccttcagcctcagcgctgcagccttcttctcctgctctgcgtggctcttcatatgcgcactgcggctcttcaccttgtaaaacaccctgcagccgggtgggggttgctcagaaccggcctagcccacccgggggcccccagcgcgggtgcgcgaggagccccagccttcaccttcacccccacgctgcacagccgcggccggccagctcgcgtcattttccgaaagctgccccatgacgtcacagccctagaaacccgctgagccaaccagaaacgaggcggacaccgcctgtacctcttccccctcccctccaccccacccccgccccctccgcgcaccagcccgcgggggtcccagcggggacagcgctgcccaccttacctgccac

SEQ ID NO: 87068 - DNA, 245 bp, Homo sapiens
  chr14:74196425-74196670
  hypo
aagtagaggccagagccttcccgcacagggctgaggatggggggcggcgtgtagggaggtagctcaaagctccgctcagaggggtggtcagctaggcgcacgggagagcgcaggtggctctggtatggggtgatgttggagtagacgggaggggcgatgaaagtgcccgccttggtggggatgatgaggggctcgggcctgggccgctgctttggtttccgcacggaaggctccccctccaactt

SEQ ID NO: 87069 - DNA, 40 bp, Homo sapiens; identical to SEQ ID NO: 27642
  chr14:74244736-74244776
  hypo

SEQ ID NO: 87070 - DNA, 136 bp, Homo sapiens; identical to SEQ ID NO: 9841
  chr14:74253328-74253464
  hypo

SEQ ID NO: 87071 - DNA, 100 bp, Homo sapiens
  chr14:74273408-74273508
  hypo
cttgacacacccatctcggtgccagctgggcttagagatgctgggaggagcttgtgccaaagtctgcacaaaattgagtttagaaaaaattactgccggg

SEQ ID NO: 87072 - DNA, 22 bp, Homo sapiens
  chr14:74311711-74311733
  hypo
tttaattcggttgattgtcttc

SEQ ID NO: 87073 - DNA, 30 bp, Homo sapiens; identical to SEQ ID NO: 27645
  chr14:74367436-74367466
  hypo

SEQ ID NO: 87074 - DNA, 30 bp, Homo sapiens; identical to SEQ ID NO: 27646
  chr14:74367983-74368013
  hypo

SEQ ID NO: 87075 - DNA, 36 bp, Homo sapiens; identical to SEQ ID NO: 27647
  chr14:74369045-74369081
  hypo

SEQ ID NO: 87076 - DNA, 30 bp, Homo sapiens; identical to SEQ ID NO: 27648
  chr14:74418774-74418804
  hypo

SEQ ID NO: 87077 - DNA, 17 bp, Homo sapiens
  chr14:74499970-74499987
  hypo
atgcaaaaataaaaggg

SEQ ID NO: 87078 - DNA, 25 bp, Homo sapiens
  chr14:74529004-74529029
  hypo
ttacaaaagctgtgactaggccggg

SEQ ID NO: 87079 - DNA, 23 bp, Homo sapiens
  chr14:74601753-74601776
  hypo
gggatttgttgttgttgttgtcg

SEQ ID NO: 87080 - DNA, 89 bp, Homo sapiens; identical to SEQ ID NO: 27650
  chr14:74626547-74626636
  hypo

SEQ ID NO: 87081 - DNA, 162 bp, Homo sapiens; identical to SEQ ID NO: 27651
  chr14:74628385-74628547
  hypo

SEQ ID NO: 87082 - DNA, 23 bp, Homo sapiens
  chr14:74646928-74646951
  hypo
gtgagcaaacttaagcgctcaaa

SEQ ID NO: 87083 - DNA, 23 bp, Homo sapiens
  chr14:74647250-74647273
  hypo
gcgcccagcctagggaggaggaa

SEQ ID NO: 87084 - DNA, 30 bp, Homo sapiens
  chr14:74683509-74683539
  hypo
cttgtatgtctgtccgaatggaagtgcctc

SEQ ID NO: 87085 - DNA, 604 bp, Homo sapiens; identical to SEQ ID NO: 51485
  chr14:74706940-74707544
  hypo

SEQ ID NO: 87086 - DNA, 175 bp, Homo sapiens; identical to SEQ ID NO: 9845
  chr14:74707572-74707747
  hypo

SEQ ID NO: 87087 - DNA, 737 bp, Homo sapiens; identical to SEQ ID NO: 9846
  chr14:74707791-74708528
  hypo

SEQ ID NO: 87088 - DNA, 30 bp, Homo sapiens
  chr14:74727449-74727479
  hypo
gcattgcggtgctccgggccaaagctcagg

SEQ ID NO: 87089 - DNA, 30 bp, Homo sapiens; identical to SEQ ID NO: 27656
  chr14:74728371-74728401
  hypo

SEQ ID NO: 87090 - DNA, 30 bp, Homo sapiens; identical to SEQ ID NO: 27657
  chr14:74771139-74771169
  hypo

SEQ ID NO: 87091 - DNA, 30 bp, Homo sapiens
  chr14:74824408-74824438
  hypo
agaaggttgctgcccgcttctccgccaagc

SEQ ID NO: 87092 - DNA, 30 bp, Homo sapiens
  chr14:74824735-74824765
  hypo
cactggtaccctatcgctgcttcaaacgca

SEQ ID NO: 87093 - DNA, 86 bp, Homo sapiens
  chr14:74954262-74954348
  hypo
cctggccaaaaaccgcactttatgcggaaacagctagaaagcaaatgtagagcctgaaactccgcggaggaagatcagaaatgaat

SEQ ID NO: 87094 - DNA, 95 bp, Homo sapiens; identical to SEQ ID NO: 27658
  chr14:74957658-74957753
  hypo

SEQ ID NO: 87095 - DNA, 35 bp, Homo sapiens
  chr14:74958052-74958087
  hypo
tgtgagccactgtgcctggccggaatgagttatta

SEQ ID NO: 87096 - DNA, 30 bp, Homo sapiens
  chr14:75061253-75061283
  hypo
cagctagaggccttcgcagacgggacagtt

SEQ ID NO: 87097 - DNA, 82 bp, Homo sapiens
  chr14:75062986-75063068
  hypo
ggagcagaacttggtacgtgagggatggaggagacagtcgagggcccaagatccagaagaacaaggccggtgggggccactc

SEQ ID NO: 87098 - DNA, 28 bp, Homo sapiens
  chr14:75173766-75173794
  hypo
ttatcaaaattatacacgatctggtcgg

SEQ ID NO: 87099 - DNA, 31 bp, Homo sapiens
  chr14:75189113-75189144
  hypo
ttggcccaatagactccgttcaaatgttggc

SEQ ID NO: 87100 - DNA, 30 bp, Homo sapiens
  chr14:75265989-75266019
  hypo
tcttccacctttaccgcccctcccacctct

SEQ ID NO: 87101 - DNA, 29 bp, Homo sapiens
  chr14:75337378-75337407
  hypo
aggcaggggatatatgcgaaatctctgta

SEQ ID NO: 87102 - DNA, 30 bp, Homo sapiens
  chr14:75358451-75358481
  hypo
ttcctaagcgagaatcgtacccgtagacca

SEQ ID NO: 87103 - DNA, 27 bp, Homo sapiens
  chr14:75358763-75358790
  hypo
tcttaagcctaagtcaaccctcgatga

SEQ ID NO: 87104 - DNA, 30 bp, Homo sapiens
  chr14:75386636-75386666
  hypo
gcttcacagcctcacgtcgctccttgttgg

SEQ ID NO: 87105 - DNA, 30 bp, Homo sapiens; identical to SEQ ID NO: 27660
  chr14:75388090-75388120
  hypo

SEQ ID NO: 87106 - DNA, 30 bp, Homo sapiens
  chr14:75389051-75389081
  hypo
gtttagcacttctccgtggaccggatggat

SEQ ID NO: 87107 - DNA, 40 bp, Homo sapiens
  chr14:75416061-75416101
  hypo
gcatggtgacattggccgtctccaccggcacacagtgcag

SEQ ID NO: 87108 - DNA, 72 bp, Homo sapiens
  chr14:75423074-75423146
  hypo
ggaactgtacgctgcgcgggggtctgtgtgcatctgcgcgtgtgcatgggcatttgcgggtctgtgaatatc

SEQ ID NO: 87109 - DNA, 31 bp, Homo sapiens
  chr14:75446327-75446358
  hypo
tggcaagaaggcaagacggattgcatttcag

SEQ ID NO: 87110 - DNA, 286 bp, Homo sapiens
  chr14:75567771-75568057
  hypo
aggttgattcccagacgcttcttgtagttcccaacgcccagctgcccacacttgttgcagccaaaggtcagcagccggcctcgctctgagagagaagcaaaaagaaataacaaggcacaaatgagtcctggaacccagagaagatgcagccaagcagacttcatggattagcttccggttgttagaatatacaaatataaaactagccacatgatcctggacctaggacaaatacagtatctaggcactataaccaattagatccagtcagcgactcgatattgta

SEQ ID NO: 87111 - DNA, 30 bp, Homo sapiens
  chr14:75568426-75568456
  hypo
ggccaaggtaaaggacgttgtgtagggaac

SEQ ID NO: 87112 - DNA, 31 bp, Homo sapiens; identical to SEQ ID NO: 27662
  chr14:75636943-75636974
  hypo

SEQ ID NO: 87113 - DNA, 40 bp, Homo sapiens
  chr14:75641439-75641479
  hypo
aacccttttaaaaagtaaaaacgaggccaggcgcggtggc

SEQ ID NO: 87114 - DNA, 31 bp, Homo sapiens; identical to SEQ ID NO: 27663
  chr14:75725465-75725496
  hypo

SEQ ID NO: 87115 - DNA, 31 bp, Homo sapiens
  chr14:75732469-75732500
  hypo
tatttgtaaagcacttcgcataattcctgag

SEQ ID NO: 87116 - DNA, 31 bp, Homo sapiens
  chr14:75739620-75739651
  hypo
atctgtcctttgtggccgggtggtgtggctc

SEQ ID NO: 87117 - DNA, 395 bp, Homo sapiens; identical to SEQ ID NO: 51503
  chr14:75743667-75744062
  hypo

SEQ ID NO: 87118 - DNA, 31 bp, Homo sapiens
  chr14:75747316-75747347
  hypo
gctgcagccaaatgccgcaaccggaggaggg

SEQ ID NO: 87119 - DNA, 256 bp, Homo sapiens
  chr14:75747939-75748195
  hypo
agctggagcccctgtgcactccggtggtcacctgtactcccagctgcactgcttacacgtcttccttcgtcttcacctaccccgaggctgactccttccccagctgtgcagctgcccaccgcaagggcagcagcagcaatgagccttcctctgactcgctcagctcacccacgctgctggccctgtgagggggcagggaaggggaggcagccggcacccacaagtgccactgcccgagctggtgcattacagagag

SEQ ID NO: 87120 - DNA, 197 bp, Homo sapiens
  chr14:75749313-75749510
  hypo
ctttttattctcacaaaatcacgtggagggttattctacttcaaagatgagcaaattgaagaatggttagaataaacaactttcttgatattccgttatcggcattagaatcttcctgctcgttatcgtatccagcaggctgaactgcctcttgatacttggttaaaaaaaattttcaggccgggcgcggtggccca

SEQ ID NO: 87121 - DNA, 30 bp, Homo sapiens
  chr14:75759879-75759909
  hypo
aatctaaagaagactcgagaaaaaaaacat

SEQ ID NO: 87122 - DNA, 155 bp, Homo sapiens
  chr14:75760173-75760328
  hypo
atcatccaactggagtggcagcgctggaattagagtccaggcagtgtggcttcaatgcctgaactcttagccattagaaaggaaaaacaaagcaaaatcagtatccgcaacaaccttgcaggcacggaggccctcagaagggacaggagaggccg

SEQ ID NO: 87123 - DNA, 405 bp, Homo sapiens
  chr14:76012912-76013317
  hypo
tgctcggtgctggccgccagcacgccctcgccccccgaggtggtgtacagcgcccacgcattccaccaacctcatgtcagctccccgcgcttccagccctgagcttccgatgcggggagagcagagcctcgggaggggcacacagactgtggcagagctgcgcccatcccgcagaggcccctgtccacctggagacccggagacagaggcctggacaaggagtgaacacgggaactgtcacgactggaagggcgtgaggcctcccagcagtgccgcagcgtttcgaggggcgtgtgctggaccccaccactgtgggttgcaggcccaatgcagaagagtattaagaaagatgctcaagtcccatggcacagagcaaggcgggcagggaacggttatttttctaaa

SEQ ID NO: 87124 - DNA, 94 bp, Homo sapiens; identical to SEQ ID NO: 27670
  chr14:76128608-76128702
  hypo

SEQ ID NO: 87125 - DNA, 30 bp, Homo sapiens
  chr14:76289098-76289128
  hypo
tagcctcagggttgtcgtctcccattgggt

SEQ ID NO: 87126 - DNA, 30 bp, Homo sapiens
  chr14:76425453-76425483
  hypo
gcttgtgtgtttcccgaggagcgggcagtc

SEQ ID NO: 87127 - DNA, 176 bp, Homo sapiens
  chr14:76431241-76431417
  hypo
agcctctgacctcaggcgttccgcagttacccaaaatgggaatatgaaaggaaaagagaacttccctgaactccagagatcatcaaggctgagttccttgcaaacataatggaaaaccagaaatgactctcaacgacttcgccatctctacccaaacaccccggggacaaacaccc

SEQ ID NO: 87128 - DNA, 137 bp, Homo sapiens
  chr14:76446057-76446194
  hypo
acccactgccacccctccacccgctctcccgtgacacgcagacacaaagggcgccagcctcctctacgcatccacagccaaaacccgctctccccgtgcccaccggcctggagggcgcccattttgagcacatgaat

SEQ ID NO: 87129 - DNA, 86 bp, Homo sapiens
  chr14:76446467-76446553
  hypo
tgaggtctccacactgagaaccgtaagggctcctgacagagccggccttcccctttatggcacccagatgcttacagttactgata

SEQ ID NO: 87130 - DNA, 321 bp, Homo sapiens
  chr14:76446750-76447071
  hypo
cacatcctgagccttggtgctggtgaatcctggggcaccctgctgtgtggccagcactaggcccccctctgcagagctcccagctccagttcagaccctccagagcagacaccccagcgagaatttggacttactgtgctccgccagcccctggatcatgtcgaatttatggatttctttggcatagtattccgactcggtgttttcctgggtgcagccttcctccctctccccatgcatctcctccagcagctcccgggtgctgttgtaaagggccaggacctgataggggacgtgggtcatcaccgttggctcaggggg

SEQ ID NO: 87131 - DNA, 161 bp, Homo sapiens
  chr14:76447284-76447445
  hypo
agagaccccagcagacgtgcagaaggagggaggaaaaccaggcggcctccccagatcccaaagactgaggcttggcaagaaggtgcatgaactcactgcactgcgagagcttcaggacttccaggaagcgctggcaaccctgaggacgaagaagcggactg

SEQ ID NO: 87132 - DNA, 30 bp, Homo sapiens
  chr14:76455257-76455287
  hypo
gagtcagcgcaggccgagaatcacctcaat

SEQ ID NO: 87133 - DNA, 103 bp, Homo sapiens
  chr14:76461806-76461909
  hypo
cagaactgaaagttagccagattccctcgcaggaatctgagaaatgctgctgggctcatgttcccaaattaggccaatttcctcatcccccagcagcctcact

SEQ ID NO: 87134 - DNA, 30 bp, Homo sapiens
  chr14:76478947-76478977
  hypo
cctccgtccatcaggcggcagccccagcag

SEQ ID NO: 87135 - DNA, 762 bp, Homo sapiens; identical to SEQ ID NO: 9856
  chr14:76604775-76605537
  hypo

SEQ ID NO: 87136 - DNA, 30 bp, Homo sapiens
  chr14:76621091-76621121
  hypo
ggcggaaggtgaagcgagtgacatcagagg

SEQ ID NO: 87137 - DNA, 578 bp, Homo sapiens
  chr14:76905594-76906172
  hypo
ccttcccagccaccctacctgcggggctggacccgcccaccacacccacagcaccttgctggggctgacttcccgatttgtgtccacaggctgctgaacaggatgtcctcggacgacaggcacctgggctccagctgcggctccttcatcaagactgagccgtccagcccgtcctcgggcatcgatgccctcagccaccacagccccagtggctcgtccgacgccagcggcggctttggcctggccctgggcacccacgccaacggtctggactcgccacccatgtttgcaggcgccgggctgggaggcaccccatgccgcaagagctacgaggactgtgccagcggcatcatggaggactcggccatcaagtgcgagtacatgctcaacgccatccccaagcgcctgtgcctcgtgtgcggggacattgcctctggctaccactacggcgtggcctcctgcgaggcttgcaaggccttcttcaagaggactatccaaggtgcgtggtgggcctcaaggagcctgggcgcagggttgggggtggcagccgtgcctgcgggtctggcagaagccctagg

SEQ ID NO: 87138 - DNA, 31 bp, Homo sapiens; identical to SEQ ID NO: 27676
  chr14:76998234-76998265
  hypo

SEQ ID NO: 87139 - DNA, 31 bp, Homo sapiens
  chr14:77119608-77119639
  hypo
gcatggctctcgtgctcgcagccaggctgca

SEQ ID NO: 87140 - DNA, 242 bp, Homo sapiens
  chr14:77242296-77242538
  hypo
cagggaactacttccgccacatcgtgctgggggtgaacttcgcgggccgctacggtgcgctgggcatgagtcggcgcgaggacctgatgtacaagccgcccgccttccgcacgctcagcgagctcgtgctggacttcgaggccgcctacggccgctgctggcacgtgctcaagaaggtgaagctgggccagagcgtgtcacacgacccgcacagcgtggagcagatcgagtggaagcactcg

SEQ ID NO: 87141 - DNA, 34 bp, Homo sapiens
  chr14:77426435-77426469
  hypo
tggcattacagatgtgagccgcctcacccggctt

SEQ ID NO: 87142 - DNA, 104 bp, Homo sapiens
  chr14:77433609-77433713
  hypo
tctaaggcagagggtacgcaggtgggactacagcgctttttgggggacatttggataaaatccatcccattgccgggcgcagtggctcatgcctgtaatcccag

SEQ ID NO: 87143 - DNA, 366 bp, Homo sapiens; identical to SEQ ID NO: 51519
  chr14:77493393-77493759
  hypo

SEQ ID NO: 87144 - DNA, 31 bp, Homo sapiens; identical to SEQ ID NO: 27678
  chr14:77575062-77575093
  hypo

SEQ ID NO: 87145 - DNA, 767 bp, Homo sapiens; identical to SEQ ID NO: 51523
  chr14:77591100-77591867
  hypo

SEQ ID NO: 87146 - DNA, 662 bp, Homo sapiens; identical to SEQ ID NO: 51525
  chr14:77605687-77606349
  hypo

SEQ ID NO: 87147 - DNA, 138 bp, Homo sapiens; identical to SEQ ID NO: 51533
  chr14:77736728-77736866
  hypo

SEQ ID NO: 87148 - DNA, 285 bp, Homo sapiens; identical to SEQ ID NO: 51534
  chr14:77736883-77737168
  hypo

SEQ ID NO: 87149 - DNA, 360 bp, Homo sapiens; identical to SEQ ID NO: 51535
  chr14:77737210-77737570
  hypo

SEQ ID NO: 87150 - DNA, 46 bp, Homo sapiens
  chr14:77769160-77769206
  hypo
gggatggagtttctgacctgtcggcgcaagagttgtacttgaccat

SEQ ID NO: 87151 - DNA, 30 bp, Homo sapiens
  chr14:77781546-77781576
  hypo
cagccatagcagtgcgcacaaggactaaag

SEQ ID NO: 87152 - DNA, 30 bp, Homo sapiens
  chr14:77808998-77809028
  hypo
ctacaaataacagccggaatggagcccgga

SEQ ID NO: 87153 - DNA, 32 bp, Homo sapiens
  chr14:77935682-77935714
  hypo
gctgctaacttggggccggggcccctcccttc

SEQ ID NO: 87154 - DNA, 103 bp, Homo sapiens
  chr14:77937150-77937253
  hypo
taggggtgcaaaatgacgccttttgatgaagaacctggagtctagcttgaatcaaatcaacaggcccttcctaacagactcctaacagagacgattaaaaatg

SEQ ID NO: 87155 - DNA, 70 bp, Homo sapiens
  chr14:77942015-77942085
  hypo
gggagggagcacagcgtggaggcggctccagtcccccttgcacaggatccagggcgtcgtgtcgaacttg

SEQ ID NO: 87156 - DNA, 30 bp, Homo sapiens
  chr14:77942287-77942317
  hypo
tccaccggaagctgcggccctggtgctcgt

SEQ ID NO: 87157 - DNA, 31 bp, Homo sapiens; identical to SEQ ID NO: 27682
  chr14:77949054-77949085
  hypo

SEQ ID NO: 87158 - DNA, 502 bp, Homo sapiens; identical to SEQ ID NO: 51537
  chr14:77964629-77965131
  hypo

SEQ ID NO: 87159 - DNA, 30 bp, Homo sapiens; identical to SEQ ID NO: 51538
  chr14:77965376-77965406
  hypo

SEQ ID NO: 87160 - DNA, 19 bp, Homo sapiens
  chr14:77968364-77968383
  hypo
actgcgcctggccggccta

SEQ ID NO: 87161 - DNA, 28 bp, Homo sapiens
  chr14:78058349-78058377
  hypo
agccgccgtgcccagccagttgtgttct

SEQ ID NO: 87162 - DNA, 30 bp, Homo sapiens
  chr14:78086571-78086601
  hypo
aaggagatagaacccgggagtgaaaaggac

SEQ ID NO: 87163 - DNA, 44 bp, Homo sapiens
  chr14:78165391-78165435
  hypo
aggcctgagccactgcgcttgcccttattcggtctctttagcac

SEQ ID NO: 87164 - DNA, 32 bp, Homo sapiens
  chr14:78166102-78166134
  hypo
aaatattaggttctggctgggcgcggtggctc

SEQ ID NO: 87165 - DNA, 145 bp, Homo sapiens; identical to SEQ ID NO: 27683
  chr14:78189474-78189619
  hypo

SEQ ID NO: 87166 - DNA, 37 bp, Homo sapiens
  chr14:78228356-78228393
  hypo
attttaagatcaactcttggccgggcgcagtagctca

SEQ ID NO: 87167 - DNA, 34 bp, Homo sapiens
  chr14:78247789-78247823
  hypo
taaaaataattaggtgcggccgggtgcggtggct

SEQ ID NO: 87168 - DNA, 32 bp, Homo sapiens
  chr14:78268993-78269025
  hypo
gattaaaatttggttcctagccgggcgcggtg

SEQ ID NO: 87169 - DNA, 31 bp, Homo sapiens; identical to SEQ ID NO: 27684
  chr14:78291539-78291570
  hypo

SEQ ID NO: 87170 - DNA, 30 bp, Homo sapiens
  chr14:78304342-78304372
  hypo
gacggaaggcactccgcagccgtaagggtg

SEQ ID NO: 87171 - DNA, 96 bp, Homo sapiens; identical to SEQ ID NO: 27685
  chr14:78335481-78335577
  hypo

SEQ ID NO: 87172 - DNA, 35 bp, Homo sapiens; identical to SEQ ID NO: 27686
  chr14:78335636-78335671
  hypo

SEQ ID NO: 87173 - DNA, 30 bp, Homo sapiens
  chr14:78352831-78352861
  hypo
ggtgcttaggggcccgtgcacaggtatgag

SEQ ID NO: 87174 - DNA, 18 bp, Homo sapiens
  chr14:78387390-78387408
  hypo
caggcgcggtggctcacg

SEQ ID NO: 87175 - DNA, 38 bp, Homo sapiens
  chr14:78388713-78388751
  hypo
agctggagggctggcgtggtagcgggcatagtgtctta

SEQ ID NO: 87176 - DNA, 31 bp, Homo sapiens
  chr14:78397856-78397887
  hypo
tcaggacttagagattcgcaacaacgcggcc

SEQ ID NO: 87177 - DNA, 30 bp, Homo sapiens
  chr14:78709673-78709703
  hypo
ctggtggatggccgcgttcagctccgcttc

SEQ ID NO: 87178 - DNA, 20 bp, Homo sapiens
  chr14:79525884-79525904
  hypo
ccaccgcgcctggcctcagg

SEQ ID NO: 87179 - DNA, 208 bp, Homo sapiens; identical to SEQ ID NO: 27689
  chr14:81231424-81231632
  hypo

SEQ ID NO: 87180 - DNA, 30 bp, Homo sapiens
  chr14:81404941-81404971
  hypo
agccttttatctatcgagcacaatatgaaa

SEQ ID NO: 87181 - DNA, 94 bp, Homo sapiens
  chr14:81489151-81489245
  hypo
gagacttcatctcaaaagaacaaaaaaaaagatgtggggcgtttgggaggtgattgggtcatgaaggtggagcgctcattaatgagcttattaa

SEQ ID NO: 87182 - DNA, 90 bp, Homo sapiens
  chr14:81609902-81609992
  hypo
actgtctttgcaagcgagttatcggtgtatacgctgacggtcatcaccctggagcgctggtatgccatcaccttcgccatgcgcctggac

SEQ ID NO: 87183 - DNA, 31 bp, Homo sapiens; identical to SEQ ID NO: 9876
  chr14:81685635-81685666
  hypo

SEQ ID NO: 87184 - DNA, 301 bp, Homo sapiens
  chr14:81879109-81879410
  hypo
aaaaaaatgaccacgcgcaaagcagtcttcgcaaaggggaaaatatgattgctttgtgacctttaaaactttctgtcaaacattaaaagctttcttcttagaggcgccacggcttccatagcgatggcagctccagccgggcgatgcttagcacctccccaggagaccgttgcagtcagccagcccccttctccatgggtaaccatgtgcgaccaaaaggccgtgatcaaaaatgcggacatgtcggaagagacgcagcagaactcggtggagtgcgctcctcaggcgctggagaaataca

SEQ ID NO: 87185 - DNA, 103 bp, Homo sapiens
  chr14:82295805-82295908
  hypo
ccacactcatcagcccttgggtggttgatgggacgggggggccccgaagcagggggctgcgctcgtgggagaggctcaggccgtgcaggagcccagggcttgg

SEQ ID NO: 87186 - DNA, 76 bp, Homo sapiens
  chr14:87963379-87963455
  hypo
aaggatactgcagccacgctttatcttcttcatagtttttcttcagggcggtcatcagggtcgtttttatcctttc

SEQ ID NO: 87187 - DNA, 31 bp, Homo sapiens; identical to SEQ ID NO: 27691
  chr14:88131325-88131356
  hypo

SEQ ID NO: 87188 - DNA, 79 bp, Homo sapiens
  chr14:88457501-88457580
  hypo
tacattctttttgttttgtttcgctttggtttggtttttgggtttttttgtttgtttgtgttttgaacggagtctcact

SEQ ID NO: 87189 - DNA, 78 bp, Homo sapiens; identical to SEQ ID NO: 27693
  chr14:88457819-88457897
  hypo

SEQ ID NO: 87190 - DNA, 376 bp, Homo sapiens; identical to SEQ ID NO: 51562
  chr14:88459273-88459649
  hypo

SEQ ID NO: 87191 - DNA, 34 bp, Homo sapiens
  chr14:88527463-88527497
  hypo
tctgcttaaaataattatttgcggccagacgcgg

SEQ ID NO: 87192 - DNA, 34 bp, Homo sapiens
  chr14:88527736-88527770
  hypo
agagtgagactccgtctcaaaaatatatatatta

SEQ ID NO: 87193 - DNA, 148 bp, Homo sapiens
  chr14:88587437-88587585
  hypo
gaagaagcaagtctcccacatcgatgacaggagatactccctaagtactagcgagaataaaaaactgaacttgatagaccaagacaaagacaccaaaacaccggaagacccgttcagatgaacactcgagttgtcacagccaatggat

SEQ ID NO: 87194 - DNA, 59 bp, Homo sapiens
  chr14:88625360-88625419
  hypo
cacagggcctccagcctctcccgggatcacagcatcccgtaataaccctcacccatatc

SEQ ID NO: 87195 - DNA, 31 bp, Homo sapiens; identical to SEQ ID NO: 27696
  chr14:88669111-88669142
  hypo

SEQ ID NO: 87196 - DNA, 37 bp, Homo sapiens; identical to SEQ ID NO: 27697
  chr14:88686788-88686825
  hypo

SEQ ID NO: 87197 - DNA, 270 bp, Homo sapiens; identical to SEQ ID NO: 51563
  chr14:88789501-88789771
  hypo

SEQ ID NO: 87198 - DNA, 261 bp, Homo sapiens; identical to SEQ ID NO: 51564
  chr14:88789985-88790246
  hypo

SEQ ID NO: 87199 - DNA, 202 bp, Homo sapiens; identical to SEQ ID NO: 51565
  chr14:88790298-88790500
  hypo

SEQ ID NO: 87200 - DNA, 30 bp, Homo sapiens
  chr14:88945300-88945330
  hypo
ccagagagaaggtccgacaccggccttttc

SEQ ID NO: 87201 - DNA, 30 bp, Homo sapiens; identical to SEQ ID NO: 27700
  chr14:88945553-88945583
  hypo

SEQ ID NO: 87202 - DNA, 21 bp, Homo sapiens
  chr14:88954148-88954169
  hypo
agtgcccacaaattagccagg

SEQ ID NO: 87203 - DNA, 783 bp, Homo sapiens; identical to SEQ ID NO: 51568
  chr14:89020630-89021413
  hypo

SEQ ID NO: 87204 - DNA, 726 bp, Homo sapiens; identical to SEQ ID NO: 51571
  chr14:89290489-89291215
  hypo

SEQ ID NO: 87205 - DNA, 30 bp, Homo sapiens
  chr14:89291950-89291980
  hypo
acagaagtagcgctgcggcagtttgtcagt

SEQ ID NO: 87206 - DNA, 181 bp, Homo sapiens; identical to SEQ ID NO: 27704
  chr14:89292609-89292790
  hypo

SEQ ID NO: 87207 - DNA, 112 bp, Homo sapiens; identical to SEQ ID NO: 9895
  chr14:89506987-89507099
  hypo

SEQ ID NO: 87208 - DNA, 30 bp, Homo sapiens
  chr14:89577766-89577796
  hypo
cagccacgctttcccgccctgtgagcaacg

SEQ ID NO: 87209 - DNA, 30 bp, Homo sapiens; identical to SEQ ID NO: 27706
  chr14:89606226-89606256
  hypo

SEQ ID NO: 87210 - DNA, 241 bp, Homo sapiens
  chr14:89627945-89628186
  hypo
cgtgcacagggccaatcttcaggcttatggcttttggaacattttcttaatttaatagagaacagaattcaatgattagcaacatcactaaaaatttaccccatttcttctccatgagtcactgacacccgatgcgcatgaacagtccaacgtccacctcgtaagatgtcatcgggcttcagggttcagaagcatcgaggactggtggccggccctctgtgctcgccgtgtgacaattcca

SEQ ID NO: 87211 - DNA, 189 bp, Homo sapiens; identical to SEQ ID NO: 27708
  chr14:89657647-89657836
  hypo

SEQ ID NO: 87212 - DNA, 167 bp, Homo sapiens; identical to SEQ ID NO: 27709
  chr14:89711494-89711661
  hypo

SEQ ID NO: 87213 - DNA, 30 bp, Homo sapiens
  chr14:89720605-89720635
  hypo
atcaccaccatcatcgccatgctatcctgc

SEQ ID NO: 87214 - DNA, 217 bp, Homo sapiens
  chr14:89775980-89776197
  hypo
gccctctgggtgtgcgttttaacccttccacagccagccaaggcccggcctctacagcagattcccacaggggtgcgacggaaccattttctggtttaatgctgaaatggcaggcttgagcctcacctcactcagtaaaaagaatctcacttagtaatgaaaacccaattaagctctgccaagagtgaccgatggcgttggctgcctggggctctca

SEQ ID NO: 87215 - DNA, 248 bp, Homo sapiens
  chr14:89811173-89811421
  hypo
tctactggaaacattaaaatacgcatattctttaatgagaaatgacgtatctaggaaggaggggcacaggcaacataaagattagaacagctcagtggacttttccgaagaggtacgggcaagcaacccaaacacaccacccctccttccactttccagatctagattccgaaggccccacgccagagtctccttggcaaaggtgtagattccccaagcaagctggcgtggctcggtgtgcatgagta

SEQ ID NO: 87216 - DNA, 31 bp, Homo sapiens; identical to SEQ ID NO: 27711
  chr14:89845804-89845835
  hypo

SEQ ID NO: 87217 - DNA, 133 bp, Homo sapiens
  chr14:89875695-89875828
  hypo
cgggggggtcgcatggcgggagaacagctcctcccagtgtgcctcaacacagggcatccaacacccacttgtcactcccaaggctgactgatgaataatgttcccaagtctcgctgcacgccttggcgttggt

SEQ ID NO: 87218 - DNA, 43 bp, Homo sapiens
  chr14:89895171-89895214
  hypo
aggaccaaggtgggcatgccacggtgtcctggacttctggatg

SEQ ID NO: 87219 - DNA, 30 bp, Homo sapiens
  chr14:89902458-89902488
  hypo
acaggagtgtgccaccgcgcccggcctgta

SEQ ID NO: 87220 - DNA, 23 bp, Homo sapiens
  chr14:89914452-89914475
  hypo
ccgatgcctttcttcttacatgt

SEQ ID NO: 87221 - DNA, 204 bp, Homo sapiens
  chr14:89956463-89956667
  hypo
gatacggtgcccaggcgctgggaggcatgtgctttcttttttccactctttttaagggtctgaacttgcctgaattcagcagctgccgtgtcctcagcgacggctaatgaattgttagctttgctcctggttcccctgagctcaactcccagtccacttttgtttttaattctatcccaatgatatcagcgtttagcaaagagt

SEQ ID NO: 87222 - DNA, 30 bp, Homo sapiens
  chr14:89959559-89959589
  hypo
atgcaggcttaaatcgaataatgggcataa

SEQ ID NO: 87223 - DNA, 219 bp, Homo sapiens; identical to SEQ ID NO: 51579
  chr14:90085512-90085731
  hypo

SEQ ID NO: 87224 - DNA, 43 bp, Homo sapiens
  chr14:90097984-90098027
  hypo
tgagtcagtagacctgagattcggcctaggaataaacattttt

SEQ ID NO: 87225 - DNA, 30 bp, Homo sapiens
  chr14:90216222-90216252
  hypo
aagaaaagcctaaccgagtgcagccgccat

SEQ ID NO: 87226 - DNA, 236 bp, Homo sapiens
  chr14:90358153-90358389
  hypo
gccgctaccaatttcgggtcgcgctgctgggggacgcggcggtgggcaagacgtcgctgctgcggagctacgtggcgggcgcgcctggcgccccacagcccaagcccgagcccacggtgggcgccgagtgctaccgccgcgcgctgcagctgcgggctgggccgcgggtcaagctgcagctctgggacaccgcgggccacgagcgcttcagctgcatcaccgggtccttttaccgg

SEQ ID NO: 87227 - DNA, 360 bp, Homo sapiens; identical to SEQ ID NO: 51580
  chr14:90420658-90421018
  hypo

SEQ ID NO: 87228 - DNA, 200 bp, Homo sapiens; identical to SEQ ID NO: 9902
  chr14:90421129-90421329
  hypo

SEQ ID NO: 87229 - DNA, 604 bp, Homo sapiens; identical to SEQ ID NO: 9903
  chr14:90422191-90422795
  hypo

SEQ ID NO: 87230 - DNA, 164 bp, Homo sapiens; identical to SEQ ID NO: 27717
  chr14:90505788-90505952
  hypo

SEQ ID NO: 87231 - DNA, 2212 bp, Homo sapiens; identical to SEQ ID NO: 51583
  chr14:90526594-90528806
  hypo

SEQ ID NO: 87232 - DNA, 232 bp, Homo sapiens; identical to SEQ ID NO: 9905
  chr14:90528869-90529101
  hypo

SEQ ID NO: 87233 - DNA, 30 bp, Homo sapiens
  chr14:90651033-90651063
  hypo
gactcttgcgatcacgcaggaacgtggtga

SEQ ID NO: 87234 - DNA, 26 bp, Homo sapiens
  chr14:90723953-90723979
  hypo
ttaatttttatttttttgagacggag

SEQ ID NO: 87235 - DNA, 25 bp, Homo sapiens
  chr14:90724218-90724243
  hypo
ccaccgcgcccggcctcatagaggt

SEQ ID NO: 87236 - DNA, 30 bp, Homo sapiens
  chr14:90743968-90743998
  hypo
gctcggctcctagacggcttgggagcaggc

SEQ ID NO: 87237 - DNA, 30 bp, Homo sapiens
  chr14:90744600-90744630
  hypo
acgttctctgctcgcgcctcctagctccgc

SEQ ID NO: 87238 - DNA, 161 bp, Homo sapiens; identical to SEQ ID NO: 27720
  chr14:90754245-90754406
  hypo

SEQ ID NO: 87239 - DNA, 381 bp, Homo sapiens; identical to SEQ ID NO: 9908
  chr14:90849476-90849857
  hypo

SEQ ID NO: 87240 - DNA, 660 bp, Homo sapiens; identical to SEQ ID NO: 51588
  chr14:90849897-90850557
  hypo

SEQ ID NO: 87241 - DNA, 178 bp, Homo sapiens
  chr14:90871524-90871702
  hypo
aattggtttacctcaggatgacgtgcagaaaaatgggtgaaggataaaccgttgagacgtggccccactggtaggatggtcctcttgtacttcgtgtgctccgacccatggtgacgatgacacaccctggtggcatgcccgtgtatgttggtttagcgttgtctgcattgttctagag

SEQ ID NO: 87242 - DNA, 158 bp, Homo sapiens
  chr14:90983274-90983432
  hypo
acaagccactctccagggccacgggatggcagcctgatgagtcagcgcagttacctgatcaggcagcgtcgcgccatgagaggtgatctcatgcgccagtctccagccgctcctcgctattccccaggctctgggacggtggagttagctgaccaggc

SEQ ID NO: 87243 - DNA, 30 bp, Homo sapiens; identical to SEQ ID NO: 27723
  chr14:90990071-90990101
  hypo

SEQ ID NO: 87244 - DNA, 169 bp, Homo sapiens
  chr14:91007705-91007874
  hypo
gcctgctcagagcacgcgggggatgatggtgaagggcacggcggggctgctggcctccagctccaaggctgtcaggaagcactccgtagccgccgcatcgttgccctgagcttggaggacctcgcccagcccgttccagacctcgtgggctgtcgagttcacctgcacc

SEQ ID NO: 87245 - DNA, 30 bp, Homo sapiens
  chr14:91066723-91066753
  hypo
tgtgacagcaggggcggggccgctgcccac

SEQ ID NO: 87246 - DNA, 43 bp, Homo sapiens
  chr14:91077533-91077576
  hypo
tagcaagtgagtccatgaacacgccatccatgaagagttgtct

SEQ ID NO: 87247 - DNA, 30 bp, Homo sapiens
  chr14:91087571-91087601
  hypo
acgcaggtaggccacgtgggtatagccaga

SEQ ID NO: 87248 - DNA, 30 bp, Homo sapiens
  chr14:91091767-91091797
  hypo
ttctgagggcccaccgtatgctgctcttgg

SEQ ID NO: 87249 - DNA, 132 bp, Homo sapiens; identical to SEQ ID NO: 27724
  chr14:91127197-91127329
  hypo

SEQ ID NO: 87250 - DNA, 31 bp, Homo sapiens
  chr14:91288493-91288524
  hypo
caggtttatcagacctcgagtctgcaggttt

SEQ ID NO: 87251 - DNA, 27 bp, Homo sapiens
  chr14:91318387-91318414
  hypo
gcaaagacaaattatcggtatcttttc

SEQ ID NO: 87252 - DNA, 26 bp, Homo sapiens
  chr14:91318653-91318679
  hypo
ggtctcgacctcgtgatctgcccgcc

SEQ ID NO: 87253 - DNA, 36 bp, Homo sapiens
  chr14:91590534-91590570
  hypo
gctgggattacaggcgtgagccaccacaccctgcca

SEQ ID NO: 87254 - DNA, 214 bp, Homo sapiens
  chr14:91691107-91691321
  hypo
gctgcccttccacaacacccacgccgagatgatccagaagctggtggacgtcaccacggcacaggtgtaaccgtccatgttccgtgtgagcagagtccctaccaacgggcaggtctgcatccggggagaatgcagctgcttctggcgacaatcctgctagtaaacactggtcttcggtgagcaacgaacactcgcctggcctgggaaactgcat

SEQ ID NO: 87255 - DNA, 27 bp, Homo sapiens
  chr14:91691627-91691654
  hypo
tactcatagccaactgcagaccgaaaa

SEQ ID NO: 87256 - DNA, 87 bp, Homo sapiens
  chr14:91691773-91691860
  hypo
ctttgtccagggtacccgtgctgtctacaccacccgcctgccagtcacccagcaggtgatcagatcgactgtcatggtattgcagtg

SEQ ID NO: 87257 - DNA, 42 bp, Homo sapiens; identical to SEQ ID NO: 27726
  chr14:91700729-91700771
  hypo

SEQ ID NO: 87258 - DNA, 158 bp, Homo sapiens
  chr14:91701161-91701319
  hypo
agccagaagggcagcgagcagatgtagaagaggtcggccaccgtcaggttgcacaggtacacgcccagctcgttccgggccttgatctgcaggtagccgaagtagagggacaggcagttggccgggaagcccaccaccagcacggtaacatagaccac

SEQ ID NO: 87259 - DNA, 162 bp, Homo sapiens
  chr14:91712443-91712605
  hypo
tttcctacgtcagttgcttcttgcaggccttatgttacgagcaaaggcttcagcttgttgtggtgcagtagcgtgcatttagacacacgtgctacttctgagttgcggaagtgtggctggctttccctgatgtcatataggaggacgcggggttaggagcac

SEQ ID NO: 87260 - DNA, 30 bp, Homo sapiens
  chr14:91738072-91738102
  hypo
caacaccccgagaccggggatgtcgggtgc

SEQ ID NO: 87261 - DNA, 30 bp, Homo sapiens; identical to SEQ ID NO: 27727
  chr14:91739005-91739035
  hypo

SEQ ID NO: 87262 - DNA, 66 bp, Homo sapiens
  chr14:91744394-91744460
  hypo
ctgtgggagaggcccgttccgaggcaaggggtactcgtggcggccgagggcgttgcgtcccggtgt

SEQ ID NO: 87263 - DNA, 30 bp, Homo sapiens; identical to SEQ ID NO: 27729
  chr14:91750810-91750840
  hypo

SEQ ID NO: 87264 - DNA, 30 bp, Homo sapiens; identical to SEQ ID NO: 27730
  chr14:91752078-91752108
  hypo

SEQ ID NO: 87265 - DNA, 122 bp, Homo sapiens; identical to SEQ ID NO: 51597
  chr14:91755509-91755631
  hypo

SEQ ID NO: 87266 - DNA, 155 bp, Homo sapiens
  chr14:91757573-91757728
  hypo
actgagtttggaatacgggaatggtggcatgcgccgtgggttcagggagctctatgaccctgagatttactgaagcccctgggacccagctgtgagcgagctcaaggcagcaaacttctaacaatctgaaaactcacgctcggaagacccaagga

SEQ ID NO: 87267 - DNA, 30 bp, Homo sapiens
  chr14:91758626-91758656
  hypo
cgaactccagggcccggagcaggccccagg

SEQ ID NO: 87268 - DNA, 341 bp, Homo sapiens
  chr14:91766242-91766583
  hypo
atgtgcagggccgggcgccggcgctcacctgtccagctcgccccgcagcctctggttctcgcccatggcgagggcgtttgtcctctgctcctgctgcagcgcctctcgctcagtggtcaagaccttctcccgctcctccagctccgccttgcgcttcagcatgtcaccgtgcctgttggagggaagcacctgccgtgagtctggccagggccttcttttccgacaggtaactcacatcccagaggatctgcgtgcctcccgtgagaaaatgggattcctctggagagtctctctgcagaagtgaggggcatggggcagggaacaggcggggagcgcagcca

SEQ ID NO: 87269 - DNA, 396 bp, Homo sapiens; identical to SEQ ID NO: 27733
  chr14:91770037-91770433
  hypo

SEQ ID NO: 87270 - DNA, 30 bp, Homo sapiens
  chr14:91772368-91772398
  hypo
tttgggggccaaatcgagggtccgctggat

SEQ ID NO: 87271 - DNA, 101 bp, Homo sapiens; identical to SEQ ID NO: 27734
  chr14:91775791-91775892
  hypo

SEQ ID NO: 87272 - DNA, 169 bp, Homo sapiens; identical to SEQ ID NO: 27735
  chr14:91781817-91781986
  hypo

SEQ ID NO: 87273 - DNA, 27 bp, Homo sapiens
  chr14:91789563-91789590
  hypo
tagtgcaaatctcgtcagcacccccca

SEQ ID NO: 87274 - DNA, 414 bp, Homo sapiens
  chr14:91804340-91804754
  hypo
ctccctacctccatgcgggccttgtagaagtccacgtcgtgcagcttctccttgcagcgggtcagctccagctccagcctctccacgcggttcgccttctcccgcagggaatccagctcgtctcgataggcacgagcagaccgggcgtctgccgctagctggatgttctgcaaggtggacaaaggcaggagaacctagcttagggcatcctctaggaagggcagaaaggccattgcccttctgcatggtgtctccacgacggcccaggacaagccagctcctggtggccgggggcctccatgtgccaccaccacacgggatctccacctgctgtcactaagaaacagggtcatccccatagccgtgctcaggacaagtggctcttgtgtggcttaaaagcgctgctgttgagct

SEQ ID NO: 87275 - DNA, 1149 bp, Homo sapiens
  chr14:91805117-91806266
  hypo
taaactatgtccatccgccactcaggtctccctccctgtgtgtggggcaggtaaggagaccccagcggcagctgtaccaccccacagccaggctccacaggtgacatccatcagctgcaggaaacctgggagaacaggctcaccagattggagggaaggaggggcacctcatccctccagccaagaaaacacatcaggtgtggtcgtcccggccccaagctggagctgagcgtggactggaggctgcttctgtggacaacttgcaccgtctggacgggaggaaaccctgaagaccgggaagaatccccgcccccatccctgtgcaggcctcagaaggggaggcagctagtccgaggtcaaagagtaagctcagggcagaccccagctgactccggggcacacgtcagagctgtgccattggcagcaccacacatgtgagtcgacaccacaccagaaacatgtctgcaacacacacaaaggtaggagaagcagccggggactcacagctcctgcctgacgcgccgcagcctggccttggtgtcggccagctctacggccaggtgctgcttgtcttcgctagagaggctgctggtggggctgggagtggagtcggcgctggaggacttgatggggctgggtggatgctgtgcctgcaggtagtcccgttcctgagtgaggtccacgatcagctgcagccgggcagagagggggatggaggagaacaaacggggttaaccagcacaacgcctgagcttgaacagggtgaagaaaccgccaaaagacagatatttcagcggagactaagaaacgaggaggaaggtgggaaaaggctggcatgggttttgaaaagaggtgaaatatttagtgaaacaaaagggagtgtacgaaggaggagggccccaagctccgcgtcctgattccctgtatcctcccacaggcccgaggtgaccatgcactgcaggggccgtaaccagggaaagcacgcacgtcccacccccaccagaacctcagcagcaggaccgaggcgtctaggctgaagatgaagggagaggagatgaaggggcctaagccccttcccaggctgaccgggccaccgacccgcggacgcacctcggtgcactcgtcccgctggtcgatgagcctccgcag

SEQ ID NO: 87276 - DNA, 45 bp, Homo sapiens; identical to SEQ ID NO: 27740
  chr14:91825111-91825156
  hypo

SEQ ID NO: 87277 - DNA, 65 bp, Homo sapiens
  chr14:91837060-91837125
  hypo
ggatggtgggggaggggaaggcgggtcagtaggtggacacatccgtgcatacagaccccaacagc

SEQ ID NO: 87278 - DNA, 30 bp, Homo sapiens; identical to SEQ ID NO: 51598
  chr14:91841053-91841083
  hypo

SEQ ID NO: 87279 - DNA, 30 bp, Homo sapiens; identical to SEQ ID NO: 27741
  chr14:91841604-91841634
  hypo

SEQ ID NO: 87280 - DNA, 30 bp, Homo sapiens
  chr14:91842134-91842164
  hypo
gaggctcctcagggcgagtggggggcaaat

SEQ ID NO: 87281 - DNA, 237 bp, Homo sapiens
  chr14:91842553-91842790
  hypo
ctcctgaaacacccaggtgctcgtcgccgggcatatgcatgtctggctggtggtgggggcgctgtctgctcctgctccctgaccttggtcgccatcttctgcgctttgcacactcatgactgcctcgattttatatccactcatgtgttcattcactcacccaacaagcgtttagtgagcccccgtcccctcaaggcatgtgctaggagccagggcgttatagtgaatggaaacaga

SEQ ID NO: 87282 - DNA, 190 bp, Homo sapiens
  chr14:91848933-91849123
  hypo
tgacccagagaagacggagaaatacacaaccaccaaagctggggatgaaattaaatctgacctcagcccaagaagtaggtacaggcatgcatagatgctcccaaggactacctggcctcctacagaaaattcaagggacgaccttgtctgcttggatttttggcacagactcaagcgaacactccaaacc

SEQ ID NO: 87283 - DNA, 30 bp, Homo sapiens; identical to SEQ ID NO: 27744
  chr14:91849584-91849614
  hypo

SEQ ID NO: 87284 - DNA, 208 bp, Homo sapiens
  chr14:91850942-91851150
  hypo
tcactattgtgctgcacactacgcactggcaccgggaggaaagggtggccagcctaccccaactgcacacctgggacgcccatcagctgctctctccaacacgtgcggctgctctatggtgcagggccagctggggaaccaggcttgtcaatgtgctgcgaacaagcccagtgtgctgctggactccggatcctggagtcctccccca

SEQ ID NO: 87285 - DNA, 31 bp, Homo sapiens; identical to SEQ ID NO: 27746
  chr14:91861311-91861342
  hypo

SEQ ID NO: 87286 - DNA, 30 bp, Homo sapiens; identical to SEQ ID NO: 51599
  chr14:91883658-91883688
  hypo

SEQ ID NO: 87287 - DNA, 18 bp, Homo sapiens
  chr14:91903220-91903238
  hypo
catcttggctcctcccca

SEQ ID NO: 87288 - DNA, 49 bp, Homo sapiens; identical to SEQ ID NO: 9912
  chr14:91976435-91976484
  hypo

SEQ ID NO: 87289 - DNA, 26 bp, Homo sapiens
  chr14:91984187-91984213
  hypo
gccactgtgcccggccttttgtccta

SEQ ID NO: 87290 - DNA, 26 bp, Homo sapiens
  chr14:92081552-92081578
  hypo
ccacctcctgtcacatcggcggcagc

SEQ ID NO: 87291 - DNA, 31 bp, Homo sapiens
  chr14:92403222-92403253
  hypo
gcatgccagatacagacgatgtcttcaccaa

SEQ ID NO: 87292 - DNA, 30 bp, Homo sapiens
  chr14:92451341-92451371
  hypo
aggatttattttcttcgttactttcccggg

SEQ ID NO: 87293 - DNA, 30 bp, Homo sapiens
  chr14:92471671-92471701
  hypo
gccacaggtgcggttcgactctgctcttcc

SEQ ID NO: 87294 - DNA, 21 bp, Homo sapiens
  chr14:92491942-92491963
  hypo
ccagccgggcactgtggctca

SEQ ID NO: 87295 - DNA, 200 bp, Homo sapiens
  chr14:92492742-92492942
  hypo
aataataagaacataatggggcgccccactggctgctctgaaaagccatctttgcattgttcctcgtccgcctccttgctcgccgcagccggcagctttatcgccagagtccctgaactctcgctttctttttaatcccctgcatcggatcactggcgtgccctaccatgtcagacgcagccgtggacaccagctccgaa

SEQ ID NO: 87296 - DNA, 44 bp, Homo sapiens
  chr14:92507491-92507535
  hypo
caccaggcagtagtaattctccgtgaaagctgaatttttttttt

SEQ ID NO: 87297 - DNA, 44 bp, Homo sapiens
  chr14:92507654-92507698
  hypo
cccaagtagctgggactacaggcgcccattcttcattttactaa

SEQ ID NO: 87298 - DNA, 31 bp, Homo sapiens; identical to SEQ ID NO: 27751
  chr14:92554792-92554823
  hypo

SEQ ID NO: 87299 - DNA, 30 bp, Homo sapiens
  chr14:92683547-92683577
  hypo
agtgtttaatgggtacggagttttagtctg

SEQ ID NO: 87300 - DNA, 452 bp, Homo sapiens; identical to SEQ ID NO: 51611
  chr14:92789369-92789821
  hypo

SEQ ID NO: 87301 - DNA, 139 bp, Homo sapiens; identical to SEQ ID NO: 51612
  chr14:92789959-92790098
  hypo

SEQ ID NO: 87302 - DNA, 532 bp, Homo sapiens; identical to SEQ ID NO: 51613
  chr14:92790280-92790812
  hypo

SEQ ID NO: 87303 - DNA, 30 bp, Homo sapiens
  chr14:92953026-92953056
  hypo
cacacttgggatcccggatgtcatcatggg

SEQ ID NO: 87304 - DNA, 30 bp, Homo sapiens; identical to SEQ ID NO: 51614
  chr14:92979694-92979724
  hypo

SEQ ID NO: 87305 - DNA, 899 bp, Homo sapiens; identical to SEQ ID NO: 51615
  chr14:92980015-92980914
  hypo

SEQ ID NO: 87306 - DNA, 45 bp, Homo sapiens
  chr14:92992505-92992550
  hypo
aactgagctattgcccgggcgaggtggttcacgcctgtaatccca

SEQ ID NO: 87307 - DNA, 30 bp, Homo sapiens
  chr14:92994574-92994604
  hypo
tttattccctcccaccgcctccctcctagg

SEQ ID NO: 87308 - DNA, 230 bp, Homo sapiens
  chr14:92994921-92995151
  hypo
cgtgggggtgtggacggcatgatcatctgggaaatggggggcaggtccccagcgccaggtctgcccttgcttactgtgagacctctccgatcattgcttcttccattcatgcagtgtggagatacagggctgcactgtgtcccgggtggagtgtgagcagtgtgtagcacagcagccccgcacagtaggcacttcgcagcaggcatgaaaatgtgcggcttcatgatgtg

SEQ ID NO: 87309 - DNA, 27 bp, Homo sapiens
  chr14:93000627-93000654
  hypo
tagaaagtaaatggggctgggcgtggt

SEQ ID NO: 87310 - DNA, 31 bp, Homo sapiens
  chr14:93077330-93077361
  hypo
tatgaggtggtgtagtcgcttcttatggctg

SEQ ID NO: 87311 - DNA, 30 bp, Homo sapiens; identical to SEQ ID NO: 27757
  chr14:93078612-93078642
  hypo

SEQ ID NO: 87312 - DNA, 30 bp, Homo sapiens
  chr14:93103282-93103312
  hypo
tgtgtgcttgggcacgcgtatgtgtacatt

SEQ ID NO: 87313 - DNA, 30 bp, Homo sapiens; identical to SEQ ID NO: 51616
  chr14:93104056-93104086
  hypo

SEQ ID NO: 87314 - DNA, 30 bp, Homo sapiens; identical to SEQ ID NO: 27758
  chr14:93107808-93107838
  hypo

SEQ ID NO: 87315 - DNA, 226 bp, Homo sapiens
  chr14:93115302-93115528
  hypo
ggggcagcgcatggcacgtggaggaaggagtgaacggcagatagagtggagtgaagactcggtagatgatgccagagaagatgtgcaggggccagttcctgcagactggaatgccaggctaaagggttgaaagcgattctctacagagaaccaccaagggcctgccgtatgcccagccgaggaccccaggaggagaatggagtagagggggcggctacagccgtga

SEQ ID NO: 87316 - DNA, 64 bp, Homo sapiens
  chr14:93140293-93140357
  hypo
caaccagattttagatacagtcgttgtttcttgagtgtagtgcgtttgttaactttttccacct

SEQ ID NO: 87317 - DNA, 30 bp, Homo sapiens; identical to SEQ ID NO: 27759
  chr14:93151433-93151463
  hypo

SEQ ID NO: 87318 - DNA, 30 bp, Homo sapiens; identical to SEQ ID NO: 27760
  chr14:93155015-93155045
  hypo

SEQ ID NO: 87319 - DNA, 104 bp, Homo sapiens
  chr14:93226910-93227014
  hypo
tgtggggacgcctgcctgattattcaccagcattccagaggtgttcgatcactgcggggacgcctgccttgatcctccacctcggtggcaagtactaccactcc

SEQ ID NO: 87320 - DNA, 137 bp, Homo sapiens; identical to SEQ ID NO: 51618
  chr14:93389556-93389693
  hypo

SEQ ID NO: 87321 - DNA, 335 bp, Homo sapiens; identical to SEQ ID NO: 51619
  chr14:93389712-93390047
  hypo

SEQ ID NO: 87322 - DNA, 113 bp, Homo sapiens
  chr14:93415128-93415241
  hypo
ccacgcccgggcgccgcccacgctccgagggacccatgcccgggcaccacccacgctccaagtccgggcgccgcccacgctccgagggacccacacccggatatcacccacgc

SEQ ID NO: 87323 - DNA, 31 bp, Homo sapiens; identical to SEQ ID NO: 27762
  chr14:93423288-93423319
  hypo

SEQ ID NO: 87324 - DNA, 415 bp, Homo sapiens
  chr14:93454158-93454573
  hypo
tcttcctcaccccatgactcccggactgggggagggcactggcttccacacggcagacgccaggacggcagctcacgcagactcagaccagggctagccttggtcccagctgccgcctcatgccggcaacgcacctacccggcctggtctgcagctggcgcttagccgccccagggcaggggagccacaagcacaatcctgctctgcggagcctcccctgcactgaaagggcgggtctcagcctgggtggcagacaacagccgatgtgaaaacaaaaacagtggtgctcccacacatccctgaagtccaagaaagggaaccacaaaccaagcacctcccctgagagaccctacctccctggcaccctgtcctccctcattccagacccttcgatggggcacgctgtcccctcacc

SEQ ID NO: 87325 - DNA, 190 bp, Homo sapiens; identical to SEQ ID NO: 27764
  chr14:93486021-93486211
  hypo

SEQ ID NO: 87326 - DNA, 22 bp, Homo sapiens
  chr14:93509347-93509369
  hypo
cgagactgtctcaaaaaaaaaa

SEQ ID NO: 87327 - DNA, 89 bp, Homo sapiens
  chr14:93510735-93510824
  hypo
ccatgaataagtttgtgctggcgattactgagaaagtctagcataaaaattaaaccgaagcctaggccgaacactggcatccctctgct

SEQ ID NO: 87328 - DNA, 363 bp, Homo sapiens
  chr14:93521953-93522316
  hypo
ctgaacttctgcactcacctgcgcatgagctcgggactcctctcagctgtcccctcccatgcctccctcccacagcgcctttccaaagtccaaggacccatccttatccggtcctagccccaactgccagtcaggcctcaggtagaaactgaaggtgcccagcggtccctaccactccccgggcagagagtacaggctcttggaagaagtccagactcaagtctcagccttgtgaagccagctgactggagtggcaatgactccacagaccttcctgagcgctggctggggtctgagcacccagcagacgggaggagcagccggggcacccagtgaggtcacggctagggaggtgaatcaggc

SEQ ID NO: 87329 - DNA, 47 bp, Homo sapiens; identical to SEQ ID NO: 27766
  chr14:93525815-93525862
  hypo

SEQ ID NO: 87330 - DNA, 282 bp, Homo sapiens
  chr14:93533286-93533568
  hypo
ctgcaccaggccaaacgggaaccgactgctgaggaatccagtgtttgcatccgagtttctccatctgcacccagattccctaggatcacactctgagtagcaatgctatggataccttcaccccagaatgccaggacagtcagctactttaagagcagaatcttgcttctggccctttctaaaacccccgttccatcccttcctatttcccctgtgtacttcattccatctcttttctttgcttttacgtaaaatgcttacctggcacgctccactgaggcc

SEQ ID NO: 87331 - DNA, 30 bp, Homo sapiens; identical to SEQ ID NO: 51620
  chr14:93552647-93552677
  hypo

SEQ ID NO: 87332 - DNA, 34 bp, Homo sapiens
  chr14:93570835-93570869
  hypo
tttcctgacatcgatcgacggcagctggatgctg

SEQ ID NO: 87333 - DNA, 30 bp, Homo sapiens
  chr14:93693520-93693550
  hypo
gctgcagtagccaccgtgtggatgctgact

SEQ ID NO: 87334 - DNA, 21 bp, Homo sapiens
  chr14:93695624-93695645
  hypo
aaaatgcaggcagggcgcggt

SEQ ID NO: 87335 - DNA, 157 bp, Homo sapiens
  chr14:93697027-93697184
  hypo
aggcacaccgagccacgggaggctggggaccacaggtaccacgggggcgtggctgtcttcagtctcccaaagctgaagatggacacactgtttatgggttgagttgggcggggaggatgggtcgcagctgggcatggtgagacggctgccacctatg

SEQ ID NO: 87336 - DNA, 423 bp, Homo sapiens
  chr14:93706462-93706885
  hypo
ttctctttaaaaaaggagcctcgaatgcgatgcacagccgacctgcagattagtgttaactctgggagctcgggagcgtgcaccaccaccagtgtcaccgagcgcacccgcacagcagctaaccagtcaggcagcagaacgagtggcggcagtttgccggggcgtgcagacacacgacatgtttcccatcttggagactatctactgttcggcttttctaaaatgtcagattattcctgagtgtatatccacagggtaaaggaggaaaagaccgtaagagaaactatagttttgggagaaatcagcgttgttgacacccaatagaaaacctatttacttcaaagtgcatgtaattcatttacccggtagctcataaacgctccctagccctgcatagttttcgagtgagtgtgagtgattcat

SEQ ID NO: 87337 - DNA, 31 bp, Homo sapiens; identical to SEQ ID NO: 27770
  chr14:93763604-93763635
  hypo

SEQ ID NO: 87338 - DNA, 30 bp, Homo sapiens
  chr14:93764504-93764534
  hypo
aagaaaaatcagaagcgtcttcagaagcgg

SEQ ID NO: 87339 - DNA, 30 bp, Homo sapiens; identical to SEQ ID NO: 27771
  chr14:93770536-93770566
  hypo

SEQ ID NO: 87340 - DNA, 19 bp, Homo sapiens
  chr14:93783652-93783671
  hypo
aatatactttcaatcatat

SEQ ID NO: 87341 - DNA, 313 bp, Homo sapiens
  chr14:93813479-93813792
  hypo
ggggcgagggcagagcgccccctcgtggctggggcgcctgcgcaaaccagctgcctcacgagcactggagcttgcgttacttggcctcacctcacctgtgctgtccacgcctggctttgtctcacctgacgcgatatgcctctcctgcgtgggcgctgtcctgcccgccgccactaccgccgcttggccctgctcggcctgcagcccgctccccgcttcgcccactcggggcccccgcgccagcggcccctgtctgccgcggtgagttgaggcccagccatcatggtgggcgggaagcgcgtggccctggcgg

SEQ ID NO: 87342 - DNA, 30 bp, Homo sapiens
  chr14:93814022-93814052
  hypo
acctggctcgggggcggggctgtggtttcg

SEQ ID NO: 87343 - DNA, 30 bp, Homo sapiens
  chr14:94048703-94048733
  hypo
gactgccggggaatgcgccacgtgcacatg

SEQ ID NO: 87344 - DNA, 30 bp, Homo sapiens
  chr14:94055557-94055587
  hypo
gggcttaggagtggacgagagcaaatgggc

SEQ ID NO: 87345 - DNA, 46 bp, Homo sapiens
  chr14:94187581-94187627
  hypo
ggctcagcctggtgtccgagctgcctgggcccgcaggctgaccagg

SEQ ID NO: 87346 - DNA, 31 bp, Homo sapiens
  chr14:94196048-94196079
  hypo
cagtaggtgtgtcctgcggggaggaagaaga

SEQ ID NO: 87347 - DNA, 30 bp, Homo sapiens; identical to SEQ ID NO: 27773
  chr14:94209922-94209952
  hypo

SEQ ID NO: 87348 - DNA, 30 bp, Homo sapiens; identical to SEQ ID NO: 27774
  chr14:94210244-94210274
  hypo

SEQ ID NO: 87349 - DNA, 30 bp, Homo sapiens; identical to SEQ ID NO: 27775
  chr14:94210751-94210781
  hypo

SEQ ID NO: 87350 - DNA, 30 bp, Homo sapiens
  chr14:94220184-94220214
  hypo
aaacccccggaaacacgaaatcccacaatg

SEQ ID NO: 87351 - DNA, 71 bp, Homo sapiens
  chr14:94392882-94392953
  hypo
tgactacaaatgcaaggggaccgtgcaacgccaaccttttgtccggctgcgctgaatgggcaattcaggct

SEQ ID NO: 87352 - DNA, 198 bp, Homo sapiens
  chr14:94404859-94405057
  hypo
acaggcgtgagccaccgcgcccggccaagttctgacttttaaagtaacaacatggacgtgtcctgcctctgggtcgctggctttctgcttctgacctgaccctacaccagcctgctcttgacatgcctttccggatcgtgcttgtttcacatcgcattccaggtgtaggtttgctggaggtgacgagcctcttagttt

SEQ ID NO: 87353 - DNA, 82 bp, Homo sapiens; identical to SEQ ID NO: 51628
  chr14:94406108-94406190
  hypo

SEQ ID NO: 87354 - DNA, 30 bp, Homo sapiens; identical to SEQ ID NO: 27777
  chr14:94417498-94417528
  hypo

SEQ ID NO: 87355 - DNA, 31 bp, Homo sapiens
  chr14:94583280-94583311
  hypo
ggatggacccacaggccgatggccatgggca

SEQ ID NO: 87356 - DNA, 225 bp, Homo sapiens
  chr14:94603536-94603761
  hypo
tttggaatctatagaagatgccgtcactggaaaattaatcccaagccccaaagccttatttacgcagattagaatagcttctgttcaagtgtttgtgatgtcgccgtgtaagccctcatcgtgatgctttaaaagtcatcgttaagtcgtgttacctgctgtccggccctggcacagtgaggctacactcccacaaataatgacgaaactccctcctcccagttc

SEQ ID NO: 87357 - DNA, 72 bp, Homo sapiens; identical to SEQ ID NO: 9929
  chr14:94640375-94640447
  hypo

SEQ ID NO: 87358 - DNA, 176 bp, Homo sapiens
  chr14:94829567-94829743
  hypo
ccgccgtcgcctctgacgggctgctttgcactcacaggtgggggcattctctcctcatgctgccactgagaacgggaggctcagcaaagtggcttttctgggtcacacagtgccacagcgttctagcactcaggccctggcctggctctctctgggtgacccgcacttggcggccg

SEQ ID NO: 87359 - DNA, 31 bp, Homo sapiens; identical to SEQ ID NO: 27779
  chr14:94844985-94845016
  hypo

SEQ ID NO: 87360 - DNA, 31 bp, Homo sapiens
  chr14:95109946-95109977
  hypo
tgctgcggatggaccacgctgggaacaccac

SEQ ID NO: 87361 - DNA, 31 bp, Homo sapiens
  chr14:95157711-95157742
  hypo
atccctcagggttatccggtggagtgggcac

SEQ ID NO: 87362 - DNA, 31 bp, Homo sapiens; identical to SEQ ID NO: 27780
  chr14:95200598-95200629
  hypo

SEQ ID NO: 87363 - DNA, 234 bp, Homo sapiens
  chr14:95740183-95740417
  hypo
aagccaatcctatagataaaccgatcgtacatgaacctcatgaacctcattcagacctacgacacgctcctcccagccagtccagcctgcacttggaaactcacaacgctgggtcacgctcaactcagctgtctgattctgaacctggcatccccttcggttattaaacaaagaacgggtcctttaccgatgtagttctcagtgtcattacccgggttctggcttatcaatagg

SEQ ID NO: 87364 - DNA, 37 bp, Homo sapiens; identical to SEQ ID NO: 9935
  chr14:95864477-95864514
  hypo

SEQ ID NO: 87365 - DNA, 31 bp, Homo sapiens; identical to SEQ ID NO: 9936
  chr14:95932616-95932647
  hypo

SEQ ID NO: 87366 - DNA, 30 bp, Homo sapiens
  chr14:95942760-95942790
  hypo
tgcgcagcactcctcgcaaccactgaaaac

SEQ ID NO: 87367 - DNA, 30 bp, Homo sapiens
  chr14:96010482-96010512
  hypo
agcagagagggagccgttcatgtcagagac

SEQ ID NO: 87368 - DNA, 36 bp, Homo sapiens; identical to SEQ ID NO: 27783
  chr14:96015606-96015642
  hypo

SEQ ID NO: 87369 - DNA, 31 bp, Homo sapiens
  chr14:96022242-96022273
  hypo
actaccaggcagacttcgtgattcttggacc

SEQ ID NO: 87370 - DNA, 30 bp, Homo sapiens
  chr14:96152513-96152543
  hypo
ccaggagacccaggccgggttcctaactcc

SEQ ID NO: 87371 - DNA, 296 bp, Homo sapiens; identical to SEQ ID NO: 51650
  chr14:96152750-96153046
  hypo

SEQ ID NO: 87372 - DNA, 23 bp, Homo sapiens
  chr14:96342286-96342309
  hypo
aagccacattcgccacgctcccg

SEQ ID NO: 87373 - DNA, 363 bp, Homo sapiens; identical to SEQ ID NO: 9939
  chr14:96342879-96343242
  hypo

SEQ ID NO: 87374 - DNA, 31 bp, Homo sapiens; identical to SEQ ID NO: 51654
  chr14:96499773-96499804
  hypo

SEQ ID NO: 87375 - DNA, 523 bp, Homo sapiens; identical to SEQ ID NO: 51655
  chr14:96505366-96505889
  hypo

SEQ ID NO: 87376 - DNA, 81 bp, Homo sapiens
  chr14:96547951-96548032
  hypo
ttttgagacagggtctcgctggcacgcagactggaaagcagtggtgccatcagacctcactgcagccatgatttcctgggc

SEQ ID NO: 87377 - DNA, 203 bp, Homo sapiens
  chr14:96653270-96653473
  hypo
tgtgttggtgcgtgtgcgctggtatgtgcgacgtgtgtttctgtgtgtgtgcatatgtgtatgtgttgtgggctacttccgattgggcggtcaggcaggcttctctgggagaagtgtcacttgagccaaagtggccaggggacccggctatggaagatgagacaatcagggtgatggttggaactggccgcccccaggattag

SEQ ID NO: 87378 - DNA, 31 bp, Homo sapiens; identical to SEQ ID NO: 27790
  chr14:96694176-96694207
  hypo

SEQ ID NO: 87379 - DNA, 408 bp, Homo sapiens
  chr14:96730193-96730601
  hypo
ctgttggtcttcctcctgccccggcggcaactgaacgtggcagaaatctacctggccaacctggcagcctctgatctggtgtttgtcttgggcttgcccttctgggcagagaatatctggaaccagtttaactggcctttcggagccctcctctgccgtgtcatcaacggggtcatcaaggccaatttgttcatcagcatcttcctggtggtggccatcagccaggaccgctaccgcgtgctggtgcaccctatggccagccggaggcagcagcggcggaggcaggcccgggtcacctgcgtgctcatctgggttgtggggggcctcttgagcatccccacattcctgctgcgatccatccaagccgtcccagatctgaacatcaccgcctgcatcctgctcctcccc

SEQ ID NO: 87380 - DNA, 187 bp, Homo sapiens
  chr14:96745876-96746063
  hypo
gtatgcggggagtgccgcaaagtttaacaaacaaaaaaaaggaaagcatgctatagtgggaaacagagaggaagggagggtggccaggctgcctgaagtggagcctccgggctgagacagcaggagcagccagagatcccgacagagcatccgagttggggcggccatagcgcgttcttgccccagg

SEQ ID NO: 87381 - DNA, 38 bp, Homo sapiens
  chr14:96822199-96822237
  hypo
gacagagcataaaaacgcgcatgagctggctgagggcg

SEQ ID NO: 87382 - DNA, 8 bp, Homo sapiens
  chr14:96831166-96831174
  hypo
ttgtggag

SEQ ID NO: 87383 - DNA, 31 bp, Homo sapiens; identical to SEQ ID NO: 27791
  chr14:96912062-96912093
  hypo

SEQ ID NO: 87384 - DNA, 20 bp, Homo sapiens
  chr14:96923681-96923701
  hypo
gccaccgtgccaagcctgaa

SEQ ID NO: 87385 - DNA, 22 bp, Homo sapiens
  chr14:96939127-96939149
  hypo
tgttctctgggctgggcgtggt

SEQ ID NO: 87386 - DNA, 78 bp, Homo sapiens
  chr14:97045353-97045431
  hypo
gtgtcaatgagttagccgaagcctgtcccctcttccacttgccacgacgtgctcttctgtgtgcgtggaagttcttgc

SEQ ID NO: 87387 - DNA, 41 bp, Homo sapiens; identical to SEQ ID NO: 27793
  chr14:97262845-97262886
  hypo

SEQ ID NO: 87388 - DNA, 38 bp, Homo sapiens; identical to SEQ ID NO: 27794
  chr14:97338412-97338450
  hypo

SEQ ID NO: 87389 - DNA, 43 bp, Homo sapiens
  chr14:97389551-97389594
  hypo
ggagaatcaggggagaaggagcgcaacctcccagaagcatgcc

SEQ ID NO: 87390 - DNA, 92 bp, Homo sapiens
  chr14:97404571-97404663
  hypo
ggattccctggcttccgttaactcggggggtccccaacccctgggccatggactggtactggtggatgccctgttaggaaccgggctgcaaa

SEQ ID NO: 87391 - DNA, 30 bp, Homo sapiens
  chr14:97410219-97410249
  hypo
cccagatcttgctggcgttgctgccgtgtg

SEQ ID NO: 87392 - DNA, 30 bp, Homo sapiens
  chr14:97410525-97410555
  hypo
cccctgagcccttcgcgaagtcctagccgg

SEQ ID NO: 87393 - DNA, 27 bp, Homo sapiens
  chr14:97419092-97419119
  hypo
ataaaagacaagcaggccaggcgtggt

SEQ ID NO: 87394 - DNA, 31 bp, Homo sapiens; identical to SEQ ID NO: 27795
  chr14:97513199-97513230
  hypo

SEQ ID NO: 87395 - DNA, 571 bp, Homo sapiens; identical to SEQ ID NO: 9944
  chr14:97685395-97685966
  hypo

SEQ ID NO: 87396 - DNA, 30 bp, Homo sapiens; identical to SEQ ID NO: 51663
  chr14:98978313-98978343
  hypo

SEQ ID NO: 87397 - DNA, 30 bp, Homo sapiens; identical to SEQ ID NO: 51664
  chr14:99325155-99325185
  hypo

SEQ ID NO: 87398 - DNA, 30 bp, Homo sapiens
  chr14:99355835-99355865
  hypo
gtggcatgggaggacgcgtcagtcagcctc

SEQ ID NO: 87399 - DNA, 30 bp, Homo sapiens
  chr14:99437415-99437445
  hypo
ctgtgcaccgtttttcatggcagataacca

SEQ ID NO: 87400 - DNA, 118 bp, Homo sapiens; identical to SEQ ID NO: 27797
  chr14:99651821-99651939
  hypo

SEQ ID NO: 87401 - DNA, 331 bp, Homo sapiens
  chr14:99655544-99655875
  hypo
ctttgcctctgccaccgtgccaagcttcctccagccgctgctggctgccgggacgtggtcatctcgccaggcacagcctgacaccaccgaagtttccgggtgcccggatgcacagccgagctgcctggtgccgctagaacatcagaggactctaagatgcaccgaacgccaccatgggcggttatggaagagaaaagctgcacgcacactacatgcacacacacatgcaagttcacaataaaatgcagggggatgtgtgtccacgtgggcacacacgcacacccacacacacagtgtgcaggagagaaactaatgtcgacaaggagttaca

SEQ ID NO: 87402 - DNA, 30 bp, Homo sapiens; identical to SEQ ID NO: 51665
  chr14:99656310-99656340
  hypo

SEQ ID NO: 87403 - DNA, 30 bp, Homo sapiens; identical to SEQ ID NO: 27798
  chr14:99707178-99707208
  hypo

SEQ ID NO: 87404 - DNA, 18 bp, Homo sapiens
  chr14:99716739-99716757
  hypo
gggcgacagcgagactct

SEQ ID NO: 87405 - DNA, 31 bp, Homo sapiens
  chr14:99785811-99785842
  hypo
ctataaaatcatagaccgggcatggtgggtc

SEQ ID NO: 87406 - DNA, 30 bp, Homo sapiens; identical to SEQ ID NO: 51670
  chr14:99787653-99787683
  hypo

SEQ ID NO: 87407 - DNA, 533 bp, Homo sapiens
  chr14:99849837-99850370
  hypo
aggcccacggcaaggcgcttcttggtcctttcggaagggccgctcctaaaccaccagggctgatccgctgcttgggtggagcacaggcgggaagccctgccccgtctctttgtgagctgtgggtgcgcttggcgagtcacaagcctctctgggcccagttctttctatggaagtcatgggttgcagtgttgttgagggagccggtggtgcacgtggtgaagacctggctctgtagccggccagctgggtccccgtcacacactcacacgtgcacacatgcatgcatgcacacatcctcacacacattcatacgtgtgctctcacgctcacatgcacacattcacacacacgttcacacacccatgcgctcacatgcccatgcacgcacacgtttgcacatgtacgcgcacacacactaaacccgttgggcctcagcttactcatctgtcaagcggagaccatggcagtggctccgacaggtgcttggcacatggtaaatgcccaatacatacgacagcacttggaaatttgtc

SEQ ID NO: 87408 - DNA, 30 bp, Homo sapiens
  chr14:99861095-99861125
  hypo
tggtccatacaccccgatggctgcgcctgc

SEQ ID NO: 87409 - DNA, 30 bp, Homo sapiens
  chr14:99864937-99864967
  hypo
acaaggaaacacagcgatgtgaacggactg

SEQ ID NO: 87410 - DNA, 210 bp, Homo sapiens
  chr14:99880378-99880588
  hypo
ccaaatgaagcaggcggcgtccagccgcgctacagagggatcatcgcgctgttatgctctcatacatcactgtcaacttaatttgttgtgcccagcagccgccataaatctgcttcttcatatttcgatactagcacccacagacaacgcgcaaaacacaatttaaggtggaccgactttacaaaaggcaggcacgcctacgcgatgagc

SEQ ID NO: 87411 - DNA, 179 bp, Homo sapiens
  chr14:99889213-99889392
  hypo
ggctctgtggagccccgcggcccccaaggcgcctggggacagagggtttgtggacaccagcaagtcgcagatgcactggctctgctcctccacctcaggaagctcagttacttgagggaagcagtttccagttattcatattccctccttttctctattccccacgctcaaagagtgtt

SEQ ID NO: 87412 - DNA, 30 bp, Homo sapiens; identical to SEQ ID NO: 27801
  chr14:99891614-99891644
  hypo

SEQ ID NO: 87413 - DNA, 30 bp, Homo sapiens; identical to SEQ ID NO: 27802
  chr14:99893310-99893340
  hypo

SEQ ID NO: 87414 - DNA, 151 bp, Homo sapiens
  chr14:99902510-99902661
  hypo
tgacacgtggtgatcacgggaatgatggagattacaattcaagatgagatgggtggaaacacaaagcctaaccagatcaccaccgtacttccgccttccaagtgactcccgggaaagttcatcaaacagcttgtgtcgaatagttttctaa

SEQ ID NO: 87415 - DNA, 381 bp, Homo sapiens
  chr14:99969302-99969683
  hypo
acaggttaagcgagccgtggtgagtgggctaaagcaggccctgggtagagcaggctttccaggtggcggcaacacctgagcactgttcccatttctaagcgagcacagggaacaccggaagcagggggtgttcgccgaaactcgcagtccgactgcttgtcggtggggagcctgaaaacaaaggtgctccaaggacaggctgcctctgagaaccaggagggggctctctgcccggctccagccctgctgcctgtttcatccctgccagggttctgaagcctgtcggtgtcgttgccgtgtcctagcagtgtcgttgtgcatgctgcttctgtgcagctgcctgaccccaaacagtggaccgtttcctgcacccaagtggtc

SEQ ID NO: 87416 - DNA, 101 bp, Homo sapiens; identical to SEQ ID NO: 27803
  chr14:99975811-99975912
  hypo

SEQ ID NO: 87417 - DNA, 62 bp, Homo sapiens; identical to SEQ ID NO: 27804
  chr14:99976342-99976404
  hypo

SEQ ID NO: 87418 - DNA, 31 bp, Homo sapiens
  chr14:99987054-99987085
  hypo
cacacaggcaccaggacgcactcaccatggg

SEQ ID NO: 87419 - DNA, 1691 bp, Homo sapiens; identical to SEQ ID NO: 51671
  chr14:100069898-100071589
  hypo

SEQ ID NO: 87420 - DNA, 30 bp, Homo sapiens; identical to SEQ ID NO: 51672
  chr14:100097094-100097124
  hypo

SEQ ID NO: 87421 - DNA, 31 bp, Homo sapiens
  chr14:100104269-100104300
  hypo
catgaccaacccacatcgcctctcacactga

SEQ ID NO: 87422 - DNA, 178 bp, Homo sapiens
  chr14:100118138-100118316
  hypo
aaggtactagagggtgcggacggggtggtcagggaggatcggaggtgagccttgggcaggaacccaagttaagtgcagcagtgagctgtgctgatgtaggggcggaggcgcactgttaacacagagagggtgggtgacagtgcctcagactcttcctggcatacggcaggtgctccag

SEQ ID NO: 87423 - DNA, 30 bp, Homo sapiens
  chr14:100118959-100118989
  hypo
tgggcctacctgcccgaccgctcgaggctg

SEQ ID NO: 87424 - DNA, 30 bp, Homo sapiens; identical to SEQ ID NO: 51675
  chr14:100149398-100149428
  hypo

SEQ ID NO: 87425 - DNA, 1116 bp, Homo sapiens; identical to SEQ ID NO: 51676
  chr14:100149731-100150847
  hypo

SEQ ID NO: 87426 - DNA, 31 bp, Homo sapiens
  chr14:100268030-100268061
  hypo
gattctgcaccccaaacgtctcatcatccat

SEQ ID NO: 87427 - DNA, 30 bp, Homo sapiens; identical to SEQ ID NO: 9955
  chr14:100371996-100372026
  hypo

SEQ ID NO: 87428 - DNA, 30 bp, Homo sapiens; identical to SEQ ID NO: 27810
  chr14:100434919-100434949
  hypo

SEQ ID NO: 87429 - DNA, 43 bp, Homo sapiens
  chr14:100437166-100437209
  hypo
ggaactgtgtcttcttacacacggggagtgagaccctggagga

SEQ ID NO: 87430 - DNA, 544 bp, Homo sapiens; identical to SEQ ID NO: 9956
  chr14:100437405-100437949
  hypo

SEQ ID NO: 87431 - DNA, 1009 bp, Homo sapiens; identical to SEQ ID NO: 51680
  chr14:100438017-100439026
  hypo

SEQ ID NO: 87432 - DNA, 30 bp, Homo sapiens; identical to SEQ ID NO: 27813
  chr14:100485479-100485509
  hypo

SEQ ID NO: 87433 - DNA, 30 bp, Homo sapiens; identical to SEQ ID NO: 27814
  chr14:100504751-100504781
  hypo

SEQ ID NO: 87434 - DNA, 63 bp, Homo sapiens
  chr14:100587317-100587380
  hypo
ctcccaccatccccatcgccctgactcctgtggaatccaagctcagctcgggcgacgagaggt

SEQ ID NO: 87435 - DNA, 105 bp, Homo sapiens; identical to SEQ ID NO: 27816
  chr14:100591101-100591206
  hypo

SEQ ID NO: 87436 - DNA, 30 bp, Homo sapiens; identical to SEQ ID NO: 9958
  chr14:100613211-100613241
  hypo

SEQ ID NO: 87437 - DNA, 398 bp, Homo sapiens
  chr14:100615562-100615960
  hypo
gttgagcacctccatgcgggtcacggccttggggtggacgcagagcggccgtagtgagtagaagaagggctgcagcaccagccagagcagcttgcgggcgggtgtgcagaagaaccagccctccagacgcgtgggcacgtccacgtccagcccgtcgccgcccaggtagcggtggtggtccacgtggtacttcttgaaggaggcggcgtagggcacacccacgggcaggttggcgaacacggccagccagcggttgcgtgccgcacggcccgtgccgaaggccgcgttgtgcgagatgtcgtggatggccagcgtcagcgagtggttcacgcagccaccaaaggcgtaggcccagaacagcagccagcgccaggccagcccgcgcaccagccagcagg

SEQ ID NO: 87438 - DNA, 875 bp, Homo sapiens; identical to SEQ ID NO: 51682
  chr14:100625298-100626173
  hypo

SEQ ID NO: 87439 - DNA, 38 bp, Homo sapiens; identical to SEQ ID NO: 51683
  chr14:100626295-100626333
  hypo

SEQ ID NO: 87440 - DNA, 502 bp, Homo sapiens
  chr14:100644134-100644636
  hypo
ttagtggactcctcccaggctcgtcctccttcgccacccattcccagcgcattgccccccgccagccaggtccccaggcctcccaatcctgcactgtccgcggcggcgggggtggggagaggagggtgctttgcactcgcggttccccccccgggagcattgatacccccgcccctgggagcattgatcctcctgcccctgcagcccggagcccggagcagcccacgttgctcccgctgcggcccagcccagcccagcccagcccagcccagcccagtgccgcgcctgtcctcgaacctggcccaacgctcgccgggagcagggacctgcgtgcagctatggaaccgaggcgcgggctgcgggatcccgccctacctcccataaaccagggcccgagataagggagtcccagagggccaggggagtcgcgggcccagcgtctcagtgggcacgaatttcttactttaacctcttttctgtcgaccccatctgtccccacctg

SEQ ID NO: 87441 - DNA, 104 bp, Homo sapiens
  chr14:100684962-100685066
  hypo
tctccccaccctggtcctgggcgcacccagtgagctcctgtaaactattataaaagcccacgtggaagctggcagaaatgggccctttttgttgtgactttgtt

SEQ ID NO: 87442 - DNA, 20 bp, Homo sapiens
  chr14:100720797-100720817
  hypo
tcttttcttttcttttcgac

SEQ ID NO: 87443 - DNA, 31 bp, Homo sapiens; identical to SEQ ID NO: 27822
  chr14:100725479-100725510
  hypo

SEQ ID NO: 87444 - DNA, 31 bp, Homo sapiens; identical to SEQ ID NO: 27823
  chr14:100731699-100731730
  hypo

SEQ ID NO: 87445 - DNA, 43 bp, Homo sapiens
  chr14:100747006-100747049
  hypo
accctttcacaggatagtgtgcgcaatacctgtccgtgtttcc

SEQ ID NO: 87446 - DNA, 3 bp, Homo sapiens
  chr14:100747267-100747270
  hypo
gaa

SEQ ID NO: 87447 - DNA, 23 bp, Homo sapiens
  chr14:100747389-100747412
  hypo
ccgtctcccaaaaaaaaaaaaaa

SEQ ID NO: 87448 - DNA, 30 bp, Homo sapiens
  chr14:100747864-100747894
  hypo
caagtgcattccacccgaacttttaaccca

SEQ ID NO: 87449 - DNA, 243 bp, Homo sapiens
  chr14:100748314-100748557
  hypo
atgggcagcatgtacttgacacgttatcacccagtccccttgtaaaatctggaatggagcgtttaagctgagcgttagcatcaggtcagcaggcaaagcaaacctcccacaaactgggtgccgtaaggtgggaggtgacacatggagagcttcgtcctggccgagcaggcacccagccccatgtcccccgccagcattctggatgtcagaggagggtgcgtgtgatggcgtcacattcatctg

SEQ ID NO: 87450 - DNA, 160 bp, Homo sapiens
  chr14:100749343-100749503
  hypo
gtgggctcaggagcaagagggcgttttaaagagagcctcacccactgttcagaaagcacagcccagtgaaatgcccacgcagccggacctatgagcccatgtcagccctggaagctccggagctaactgggatggactcggaagaacttgaccaaataca

SEQ ID NO: 87451 - DNA, 30 bp, Homo sapiens; identical to SEQ ID NO: 51687
  chr14:100751557-100751587
  hypo

SEQ ID NO: 87452 - DNA, 35 bp, Homo sapiens; identical to SEQ ID NO: 27825
  chr14:100754245-100754280
  hypo

SEQ ID NO: 87453 - DNA, 30 bp, Homo sapiens; identical to SEQ ID NO: 27826
  chr14:100757483-100757513
  hypo

SEQ ID NO: 87454 - DNA, 104 bp, Homo sapiens
  chr14:100758849-100758953
  hypo
agcgcggggcgccccgcagtccgtccgcctgcagccgcgacttgaccacgtccacaggataggtagagagccaggacacgatgcctgacgtaccgcccgccaac

SEQ ID NO: 87455 - DNA, 30 bp, Homo sapiens
  chr14:100759295-100759325
  hypo
accccgaacaccagcgcgttgatgaaggtg

SEQ ID NO: 87456 - DNA, 298 bp, Homo sapiens; identical to SEQ ID NO: 51688
  chr14:100772012-100772310
  hypo

SEQ ID NO: 87457 - DNA, 371 bp, Homo sapiens; identical to SEQ ID NO: 51689
  chr14:100773261-100773632
  hypo

SEQ ID NO: 87458 - DNA, 245 bp, Homo sapiens
  chr14:100795241-100795486
  hypo
agcccgtgaggaggggctgtgcggcctctacaagggcagctcggccctggtcttacgggacggccactcctttgccacctacttcctttcctacgcggtcctctgcgagtggctcagccccgctggccacagccggccaggtgagcaggggctggaacctggcagggcggggagcccagaaggatgaggaggtcaaggtgaggtcgtgctgcccgccagtacccgagtgggggcttgaacttggc

SEQ ID NO: 87459 - DNA, 42 bp, Homo sapiens
  chr14:100812220-100812262
  hypo
gggccctgggcacgcggctggcccagcgtgaccctgacgctg

SEQ ID NO: 87460 - DNA, 35 bp, Homo sapiens
  chr14:100843921-100843956
  hypo
caggcgtgagccaccgcgcccggtcgttttattta

SEQ ID NO: 87461 - DNA, 199 bp, Homo sapiens
  chr14:100847789-100847988
  hypo
actcccagaagactaagacagcggcaggcattaagcacggagacaggcaagggtaaagacgtggagccacaggggccccctgcagggcgtgccccagcccctctctacgtgggcccgggagtgtctgagtttattcagccatatttgaatagccattataaagaaaccacagttccccggaaagtgcttttccacctga

SEQ ID NO: 87462 - DNA, 30 bp, Homo sapiens; identical to SEQ ID NO: 27829
  chr14:100890348-100890378
  hypo

SEQ ID NO: 87463 - DNA, 31 bp, Homo sapiens
  chr14:100966491-100966522
  hypo
gcctgactggatggggcggctccctcctagt

SEQ ID NO: 87464 - DNA, 43 bp, Homo sapiens
  chr14:100980663-100980706
  hypo
ctgtctaacaatctcttctttcgaactaggttatttgtcctgt

SEQ ID NO: 87465 - DNA, 194 bp, Homo sapiens
  chr14:100990018-100990212
  hypo
ggtttgctggtgggccgagtggtgggcagattgtagggacataacccctgcatgtgtcatgatcgatcttctgctttccccaagaccatgtccctgcatctctaccaggggcccgcagttgccagaagagtctgagtgagactcccttttggatccagctcgttaggctcgggtagcagcgtcccatgccagct

SEQ ID NO: 87466 - DNA, 30 bp, Homo sapiens; identical to SEQ ID NO: 27830
  chr14:101002155-101002185
  hypo

SEQ ID NO: 87467 - DNA, 1175 bp, Homo sapiens
  chr14:101003645-101004820
  hypo
gagatgagcaccggccgcactggggcatcatcccggcccacccgggacgatgggccgtgggagggctcagggcggtgtggtggccacactgcgaagaatggatttttaaaacacttcatagccccgaatttgtttcagctccctcttcgtggacacaacttcagggctcccttgtcactggcttgcgggggtggtctccccacttgcagagtctggtctccacaggacaccgtccttcccttcccttccaaggggcaggccccacgcaccctcgcccaaaaaataaaggagctttgtgttgaaaacgccaaggcagccgtccagggagctggaggccaagtgcgttaagaaagaccctttttctctataaaaatagtttcgctttataaaaggggggatgctcctctcacatgggggaaggacgcgtgaaaaacgctctaagtggagttccacgggccggggccgggtggacaccgtggtgtgggggaccctcccctcaggcctacagggctggggaggagaggaggtgcggggaggaacagactcctcgttgttggccggggcaggggaacagcgggggctggggagaggtgaggccggcccttctggggcacgtgggctggcggggagcgaaccacggccaggcctgcacgcaggcgctcagttgagcaaggttccgtagagctgggccttggtgaggctgtccttgcggctcagccccgagccaccagtccgcggaaaggcctgctgggggctgaggcgggcggcaggatgcatttccggggaggcctccatggagctcggctccaaggagtccctggaaccctgctcgggctcagggctgctggcggtcccacacagctgcaccccgagcctgtccccgtcccccccctcgctgggtgcatagccgggcagtgggtcagccgagcggccgggactgaggctcaggtcgccgcccgcccgcaggaagcagggctctgccaggtggccctgggagaggtcgtccccctcggagaagctgtcggccttgtagctggcgtagagcgggctggcgcggccgtcggccttcttgcccgggctgcccccggccccgccgtagtagcgttcagagaagctgcagggtgaggcgcggccggcagcgctcacggggtaggagtaggcgccgatgtcctcca

SEQ ID NO: 87468 - DNA, 30 bp, Homo sapiens
  chr14:101005665-101005695
  hypo
gaggagggggacggcgggtacagggtcact

SEQ ID NO: 87469 - DNA, 30 bp, Homo sapiens
  chr14:101122984-101123014
  hypo
gcgagagtggtttgcgatggaactcagtcc

SEQ ID NO: 87470 - DNA, 331 bp, Homo sapiens
  chr14:101133881-101134212
  hypo
agactcagcctttcagcgtaggagggagactgaggctggagagggcgaggcaggagcctggcccacatgcagggccgggagtctccctgggcagcagagggtctgggcagaacatggatgtccatacggttattaagaaggggtggctgggcaccctgcccgaaatgtcctcggtcacccactcacgttccaggaggcaactgggccccgggaagcgaattctccaggcctcctgaggagcattcattagccacgcacacagatggagagcagcggcgcccgggaggccggaagcggcccctcgctgctcgccagtggatcaaatgttccc

SEQ ID NO: 87471 - DNA, 31 bp, Homo sapiens; identical to SEQ ID NO: 27833
  chr14:101177221-101177252
  hypo

SEQ ID NO: 87472 - DNA, 30 bp, Homo sapiens; identical to SEQ ID NO: 9961
  chr14:101192401-101192431
  hypo

SEQ ID NO: 87473 - DNA, 30 bp, Homo sapiens
  chr14:101200885-101200915
  hypo
acccctggggtgcacgagctgccggtgcag

SEQ ID NO: 87474 - DNA, 256 bp, Homo sapiens
  chr14:101250116-101250372
  hypo
cattgacccggaggtcgaggcttccagagcgggccagccggcagccccaacgtgtgaggctgtgcacctgctggggagggtttttttgatggcgacggcgtgaggtgagcgggtttgctctgggcggtcgaggattagcgccgactgagagggtcaggtgcaccggggctttgttcagacctgtttgccttttgtcccccgcctgcagaaagcccaggctgcatgatgtcatttcggatgcattaagctggaacag

SEQ ID NO: 87475 - DNA, 30 bp, Homo sapiens
  chr14:101250597-101250627
  hypo
gtgcgggctaggcaccgagtgtggacacgt

SEQ ID NO: 87476 - DNA, 31 bp, Homo sapiens
  chr14:101274010-101274041
  hypo
gagtgccaggctcgctcggcccaccggtcac

SEQ ID NO: 87477 - DNA, 30 bp, Homo sapiens; identical to SEQ ID NO: 27836
  chr14:101337576-101337606
  hypo

SEQ ID NO: 87478 - DNA, 30 bp, Homo sapiens
  chr14:101341534-101341564
  hypo
cttcttcccctgtgcgtaccctgctcaggc

SEQ ID NO: 87479 - DNA, 270 bp, Homo sapiens
  chr14:101348431-101348701
  hypo
gccggtttggtcgtcgatttggatcagggaggcgtgcagggccgtgccggtgacgccggtttccaagtagaatgggttctggggcttggggtggtggaggagaggcgccttgcggaaagccctcttcaggcactcgaaggcctcttgctcctcgactccccagtagaactggtaggagctcagcagctgccgcaccaggggctctgcgatgatgctgaagcgctccacgaagtggcggtaggggaagacgaattcgatgaagtttcgcag

SEQ ID NO: 87480 - DNA, 59 bp, Homo sapiens
  chr14:101349269-101349328
  hypo
acaggttcccaaggcgcggtggagggacactcgtaaaaggtctcgctgtgatcactgtc

SEQ ID NO: 87481 - DNA, 134 bp, Homo sapiens
  chr14:101349617-101349751
  hypo
accacagagaagttcggtgaaggtacgatgtcaaattcgatggactcctggtggttctggtggatacacaccaggggctccgtgtagagccagacaggctcgttgccaatcagcgagccgtccacggattggac

SEQ ID NO: 87482 - DNA, 30 bp, Homo sapiens
  chr14:101350857-101350887
  hypo
cctctatttccttacgtgggccactggatg

SEQ ID NO: 87483 - DNA, 30 bp, Homo sapiens
  chr14:101377412-101377442
  hypo
ctccggttggacccacgagggcgctgcatt

SEQ ID NO: 87484 - DNA, 345 bp, Homo sapiens; identical to SEQ ID NO: 27840
  chr14:101489862-101490207
  hypo

SEQ ID NO: 87485 - DNA, 322 bp, Homo sapiens
  chr14:101491362-101491684
  hypo
gaccatagaacatgcgctatctctgtgtcgtatgtaatatggtccacatcttctcaatatcaaattcagtcatagagggcttcccagagagaggcaaagtcaccttcgtgggagacacactgatctggcttcagcgccattccacagtacttggagagatggtagagcataaagcatatgcattgttgaatgacagatgtagcatggtccactcattctcagtatcagccagccctggggcttcccggaggccatgccgacttgagagccaggcctgagtggtagccagggtgcagtgcaggtcaccgggtggttggctgca

SEQ ID NO: 87486 - DNA, 30 bp, Homo sapiens
  chr14:101505882-101505912
  hypo
gggacatgcgtcctccgcagggcccatgtc

SEQ ID NO: 87487 - DNA, 84 bp, Homo sapiens
  chr14:101506230-101506314
  hypo
tgcggaccacccacccgccttgaggagacccctctcgcaagctgcccgctcggccaagcggctgggctccgtcgtcattttctc

SEQ ID NO: 87488 - DNA, 30 bp, Homo sapiens
  chr14:101515184-101515214
  hypo
tccatcgtgggagaacggcccagaatcaac

SEQ ID NO: 87489 - DNA, 195 bp, Homo sapiens
  chr14:101515981-101516176
  hypo
tctgcctcggagggccgcccccacaggagacgtgagagtgtgtgccttgtgtgagctgagagcccctgccccggctccgtgctgcgtgagggaagcttcctggaagtgaggctggtggagggaagagccctgggttgctttgctgtgtttgctgtgaatgcgatgtgtttttgcgagttatgtgaggttccctcc

SEQ ID NO: 87490 - DNA, 110 bp, Homo sapiens
  chr14:101531852-101531962
  hypo
tagccgtccgtatccgctgcagcctgtggggcctgcgggccggggagccgatcgcgcttcagctcagcgcctttcctggtacttgaagggagatcgaccgtgttatattc

SEQ ID NO: 87491 - DNA, 30 bp, Homo sapiens
  chr14:101532210-101532240
  hypo
ggacgcggcagccacgttcttgagccgatg

SEQ ID NO: 87492 - DNA, 382 bp, Homo sapiens
  chr14:101569745-101570127
  hypo
aaacttcaaatacatcgctaacgcgtcccccgcactgcagctggctccctcagcactccagcctctctgcctgggccggccactcccttccaaccaggcgtccttccacttcgctgccccgctcagctatcaccctcaccacagagcctgtccagcccacccgaggcgctccctgcctctggccagctcaggctgtgtgtggggcatgtggaaggcaccatcttcccactcaggggttgcaccgcgggggctctggttgtagggatgacatcatcattctcctccccagctcactgccgcttgaaaccagtcggccctgacctttcttaccccgacaccccgcaggacccgcggcagctgggcgccacgttactgatgtccc

SEQ ID NO: 87493 - DNA, 275 bp, Homo sapiens; identical to SEQ ID NO: 27842
  chr14:101579007-101579282
  hypo

SEQ ID NO: 87494 - DNA, 30 bp, Homo sapiens
  chr14:101592465-101592495
  hypo
caggtgagcagaggcggccctggcctatca

SEQ ID NO: 87495 - DNA, 51 bp, Homo sapiens
  chr14:101638847-101638898
  hypo
gatgatggaaggtgaacggacagcaggaacatcaaccggtgagagagggag

SEQ ID NO: 87496 - DNA, 30 bp, Homo sapiens
  chr14:101640896-101640926
  hypo
cggcgatggctgatgcgtgggctggcacat

SEQ ID NO: 87497 - DNA, 30 bp, Homo sapiens; identical to SEQ ID NO: 9963
  chr14:101656894-101656924
  hypo

SEQ ID NO: 87498 - DNA, 31 bp, Homo sapiens
  chr14:101838210-101838241
  hypo
attagccaacaatgttcgccagccccaccat

SEQ ID NO: 87499 - DNA, 136 bp, Homo sapiens
  chr14:101874725-101874861
  hypo
gccaggaggggagaggatctgcgtgttggaggctggagcagcagcgcattcgatggccggcctgacagcatggcgagcagcttgtgctggtgcgtcctccagaaaaagaatgcgcgctctccaggaggtgatggtc

SEQ ID NO: 87500 - DNA, 31 bp, Homo sapiens; identical to SEQ ID NO: 27845
  chr14:101985982-101986013
  hypo

SEQ ID NO: 87501 - DNA, 306 bp, Homo sapiens
  chr14:102053853-102054159
  hypo
gccaggcactgggctcggtaatgcggctgcttaagtaacggggatttgccgttttccaagaacactaatacgataaatgctctcgcagctaaaaccgttctctgcgctgtctaatcgtgctttgacgacgccaaaggccttggaggctcgcgcagcatttcaggactgctgtaaatacccattgttcccgtacagtgagcggcggaggaaaacatgcgtgtgttgtcggggctttgttggcggtgctggttgcttagactcggatgaatgctccaccgctccgagggggcgcgggcaggatttaga

SEQ ID NO: 87502 - DNA, 279 bp, Homo sapiens
  chr14:102093962-102094241
  hypo
gcgtgagccaccgctcccggcctcaccttccacattttctacaatgaacaagaagaacttggcaagtcaagagaagaagcaaagccatagagagctagccaggggcgttggccggctgtggatctgtccagacccaggccgccctcctacgcgggcctgctgcaacctgcgctggggttgaggcaggaaccaagcttggggccaaccgactgcgtgggacgtggctcccggatctgcccctcaccagctgaggacaccggagcgtctctctccaggact

SEQ ID NO: 87503 - DNA, 30 bp, Homo sapiens
  chr14:102230216-102230246
  hypo
acctctgctactgacgtcctgggctagctc

SEQ ID NO: 87504 - DNA, 153 bp, Homo sapiens
  chr14:102239452-102239605
  hypo
ggcatgtgctgagcaccattgcgggtgcagagttcctgcactcgtggagtttgcctccagtgagggcacagaagtggagtgtggagctgcaggtgttttctgcggggcactagtgacattgggcgtgagagcgtctcacctttgcagagcaat

SEQ ID NO: 87505 - DNA, 167 bp, Homo sapiens; identical to SEQ ID NO: 27847
  chr14:102293899-102294066
  hypo

SEQ ID NO: 87506 - DNA, 25 bp, Homo sapiens
  chr14:102300430-102300455
  hypo
ccaccacacccggcctgaatcagtt

SEQ ID NO: 87507 - DNA, 95 bp, Homo sapiens
  chr14:102302010-102302105
  hypo
atcttgagcaggaacggtgagaccactcttctccctgtaagggaccagtagcatgtgtgggaccacgccgcctgcacagccgtcccctcacgggg

SEQ ID NO: 87508 - DNA, 31 bp, Homo sapiens; identical to SEQ ID NO: 27849
  chr14:102303817-102303848
  hypo

SEQ ID NO: 87509 - DNA, 246 bp, Homo sapiens
  chr14:102307820-102308066
  hypo
gagcttccacattgaaagacacggggccggctcgttccgtgtccagacagacactttcactctgtgcctccggagatgaggctccctgctgagcggtcagtcctcacctgaggaggtggggcgaggaaagggggttgcccacggtcactgtggtgttggtgttctttttgaaacgaaaccttccagtcgcagacacaaaagccgtagagagtaaggcagaggatcggccatgcttctgggaggcag

SEQ ID NO: 87510 - DNA, 300 bp, Homo sapiens
  chr14:102325126-102325426
  hypo
tacaaagaatgacaagactcccgctggcctggttcaggtcaaatgcccgcccttgaaccgagtgtgctcccgactgcttgaaaccgcctctcgtttgtatttcacagtagcagtgtgggttactggcaccacttaggatacttaaaagcccttgaggctgtttttatagattaagtcatcattgcctctcctctccctgtcataattgtttcctaacttgattctcctcctgctgtattaacttgtttcccacccaaacctcgcgctgggctccagagcgttgccagcccctgggctccc

SEQ ID NO: 87511 - DNA, 207 bp, Homo sapiens
  chr14:102343691-102343898
  hypo
tgtgctgcctttgttgggcagcgtgattctgcgtctgtgcctctgggtgtgcgctggatccgtaggtctcatttgagagatcacagtgaccctgtgtgctgcccagaagacccgggactccttagacctcagagcttctttggtgttcactgcataacgttgatgtcttctctgtttcctcagaccggatccatgcatccaggtagc

SEQ ID NO: 87512 - DNA, 31 bp, Homo sapiens; identical to SEQ ID NO: 27852
  chr14:102349235-102349266
  hypo

SEQ ID NO: 87513 - DNA, 428 bp, Homo sapiens
  chr14:102355901-102356329
  hypo
gctggcacagagggtagggtgcgtgtcctggggctcccctagaagcaggcgcagtggacagagatgtctcagaggaagggagctgggtctgtcgcagatgggtgcttcagaaagatcgcacctgagacagcacggaggatgcgtgtgggtgtcagtggggaactgggcaggtagaataagaggagttcaggaatcacttctaccctttgcaggaactgtgctaaatattgcgggctttaaaattaagtaagacattggcctatgttgaaatacagcaaaaacgtaagatggattaatgaacgagtaaaagatggatgaacagatgtgcgtgtgatcaagcagatggagcacattgctcgtggtcgaatctggtggttgaaatgggtgttcactgtagaattctttccgttttcctagatgcttgaaat

SEQ ID NO: 87514 - DNA, 30 bp, Homo sapiens
  chr14:102358075-102358105
  hypo
cttcccgcattgtccgctgtgccgcgcaga

SEQ ID NO: 87515 - DNA, 211 bp, Homo sapiens; identical to SEQ ID NO: 27854
  chr14:102360719-102360930
  hypo

SEQ ID NO: 87516 - DNA, 31 bp, Homo sapiens; identical to SEQ ID NO: 27855
  chr14:102365883-102365914
  hypo

SEQ ID NO: 87517 - DNA, 31 bp, Homo sapiens; identical to SEQ ID NO: 27856
  chr14:102372315-102372346
  hypo

SEQ ID NO: 87518 - DNA, 30 bp, Homo sapiens; identical to SEQ ID NO: 27857
  chr14:102384062-102384092
  hypo

SEQ ID NO: 87519 - DNA, 343 bp, Homo sapiens
  chr14:102391502-102391845
  hypo
gtcctcttgcacgccgcaagtccgagctgcctcaggacccccacaccaagaaagccttggaagctcactgcagggccgatgagctggcctcccaggacggccgctagcctccggggcgccgcgtcggggccgggcccgccagttcttttccggattctgtagaaaatacatacttcctgtgccataccaatcagttacactcaaagctttcttggaccccgttccgtaggcaataacgtgcgtccgcctcagcgcgagattaggagttcaaacaatggtgacttcccagagcccgctggcagagccgcgggttgacgacggtgtcctcgcagtgtcgccgcca

SEQ ID NO: 87520 - DNA, 192 bp, Homo sapiens
  chr14:102392533-102392725
  hypo
ttagcctaatgcaaactgcagcgcctttaagcataaagtaacacaacagcattgcacggggccggcactgccgctgccttcactgaaggctgcagtgctgttctgagagcttggaggaggcaccagcgaggatgacgtttagtggagctctttctgttgaaaagagctcacgttatcaacaccttgtaagga

SEQ ID NO: 87521 - DNA, 162 bp, Homo sapiens
  chr14:102398576-102398738
  hypo
acaaggctcccttcctgctggcgagccccctgctgactctcccttgggttcccctctgtgcgctgccctgagccggagcttccatgtctaatgcaacgcaggtgagcccgtccgccaggtacttcttgggtgtttaggtgcctgttgaaaatgggtcctcaa

SEQ ID NO: 87522 - DNA, 28 bp, Homo sapiens
  chr14:102416018-102416046
  hypo
aaggactctggcggccgggcgcagtggc

SEQ ID NO: 87523 - DNA, 100 bp, Homo sapiens
  chr14:102418540-102418640
  hypo
tcgcatgagccaccacgcccagtgtattcagattttcttcgtgtttcttttctcttccgggatcccatgcaggacaccacgtcgcatttagttgtccacc

SEQ ID NO: 87524 - DNA, 24 bp, Homo sapiens
  chr14:102418939-102418963
  hypo
cgcgcctggcccaccacagtttta

SEQ ID NO: 87525 - DNA, 30 bp, Homo sapiens
  chr14:102452458-102452488
  hypo
tgtaagatgagtcacgttcgtgacttgccc

SEQ ID NO: 87526 - DNA, 315 bp, Homo sapiens
  chr14:102467326-102467641
  hypo
aaaagcttccctgcccggttgcgacagtatgcgtcctatgagtttgttcagaggcttctgaaaggttacatgaaggtaggtggccagtatcgcacggtgatgagtgtccattagaaacgcacctgcacagatcactttgtttactttctccacagataaatatgctggtgattgaactgaaatccgaagcacttaaagaccgccattggaaacagctcatgaaaaggcttcacgttaattgggttgtttctgagctaacccttggccaaatctgggatgttgacttgcagaaaaatgaagcgattgtcaaggatg

SEQ ID NO: 87527 - DNA, 30 bp, Homo sapiens
  chr14:102479218-102479248
  hypo
aacacagtcaggcccggtatggatttgcac

SEQ ID NO: 87528 - DNA, 30 bp, Homo sapiens
  chr14:102481482-102481512
  hypo
cttggccacagtgtcgcgctgcggcatggt

SEQ ID NO: 87529 - DNA, 30 bp, Homo sapiens
  chr14:102482286-102482316
  hypo
tcatggacctaacacgcctgcgctgcctgg

SEQ ID NO: 87530 - DNA, 537 bp, Homo sapiens; identical to SEQ ID NO: 27860
  chr14:102493476-102494013
  hypo

SEQ ID NO: 87531 - DNA, 122 bp, Homo sapiens
  chr14:102499705-102499827
  hypo
tggagcagatgatccgagacctggaagccagcatcgcccgctacaaggaggaatacgccgtcctgatctcagaggcccaggccatcaaggcagacctggcagctgtcgaggcaaaagtaaga

SEQ ID NO: 87532 - DNA, 629 bp, Homo sapiens
  chr14:102500433-102501062
  hypo
cgttcattgcctacgcgggttactttgaccagcagatgcgtcagaacttgttcactacctggtcccatcacctacagcaagccaacatccaggtgagaatcacggggagttcaaaaaggatgtgcgagcagtgtgaggcaagctggtgtttagtgcacagttagagtcttgagaacagtcccatctgtggctgtgaagaggaggaaaggtaacggccttgcctttcagttccgtacagatattgccaggacggaatacctttccaatgctgatgagcgtcttcgctggcaggccagctccttgcctgctgatgacctttgcacagaaaatgccatcatgctgaaacgattcaataggtatgagctcgggtgccaaggagaggcatgggaggaatgtgggtggtgatcttgaatttttttcaaaatacacccttgtttgaagagaggaatagaaaatggggcgtgggcatacagtgctggcagcttggtgctcctctgatggtggggcgtgtgctgttctcgttattgtcaagtgtctgagttattctgcagtgaatgcttcttgtaaccttctaaaatcgattggcaggggccaggcacagtggatcacgtgaggtcaggagtttgaga

SEQ ID NO: 87533 - DNA, 30 bp, Homo sapiens; identical to SEQ ID NO: 27862
  chr14:102504836-102504866
  hypo

SEQ ID NO: 87534 - DNA, 30 bp, Homo sapiens
  chr14:102505787-102505817
  hypo
gacatttatcacaacgtcctatacgagaac

SEQ ID NO: 87535 - DNA, 30 bp, Homo sapiens
  chr14:102508984-102509014
  hypo
tgctccgtgcgggccgcatctttgtgttcg

SEQ ID NO: 87536 - DNA, 109 bp, Homo sapiens
  chr14:102510266-102510375
  hypo
tccaagaacgcttacgatacgcaccactggggtggtcaaagaagtatgaatttggagagtctgacctgcggtcagcttgcgatacggtggacacgtggctggatgacac

SEQ ID NO: 87537 - DNA, 30 bp, Homo sapiens
  chr14:102510775-102510805
  hypo
ctggcatgcaaggtcgacggacataaagac

SEQ ID NO: 87538 - DNA, 30 bp, Homo sapiens
  chr14:102515011-102515041
  hypo
tgagaggccgaactcgtggtgtggcttccg

SEQ ID NO: 87539 - DNA, 30 bp, Homo sapiens; identical to SEQ ID NO: 27863
  chr14:102516414-102516444
  hypo

SEQ ID NO: 87540 - DNA, 30 bp, Homo sapiens; identical to SEQ ID NO: 27864
  chr14:102516841-102516871
  hypo

SEQ ID NO: 87541 - DNA, 97 bp, Homo sapiens
  chr14:102530198-102530295
  hypo
acctgtccccaccctccacaccgtcaaagagcaaagagaaaatcttccaggcccccactccaggcatggtgggtgcgtcaggattcagaacagatga

SEQ ID NO: 87542 - DNA, 86 bp, Homo sapiens
  chr14:102592763-102592849
  hypo
tatcttaggggattcttaaagcggaaaaagaatggctcctcctctcaagaaactcggagtctaaatgggtagatactgactgcatc

SEQ ID NO: 87543 - DNA, 191 bp, Homo sapiens; identical to SEQ ID NO: 27865
  chr14:102635325-102635516
  hypo

SEQ ID NO: 87544 - DNA, 293 bp, Homo sapiens; identical to SEQ ID NO: 27866
  chr14:102650991-102651284
  hypo

SEQ ID NO: 87545 - DNA, 29 bp, Homo sapiens
  chr14:102653307-102653336
  hypo
ccaagaaaacctgcggaacagtctttgca

SEQ ID NO: 87546 - DNA, 31 bp, Homo sapiens; identical to SEQ ID NO: 18955
  chr14:102668717-102668748
  hypo

SEQ ID NO: 87547 - DNA, 91 bp, Homo sapiens
  chr14:102668987-102669078
  hypo
attacaggtgtgagccactgcgccgggcctgtacggaggtttttttcagagtttcacacactcttcctccgctgcacctgcttccttggag

SEQ ID NO: 87548 - DNA, 30 bp, Homo sapiens
  chr14:102680172-102680202
  hypo
ctaggggttgggggcggctggagaagggat

SEQ ID NO: 87549 - DNA, 119 bp, Homo sapiens
  chr14:102680414-102680533
  hypo
accatggcggcggtcggtgtgcccttggctgaggtttcgttccttagcagtgagaacctccacatgcgtgggtaggggtcgggtgacctggagacgcctcctccggtctggtctgggtg

SEQ ID NO: 87550 - DNA, 272 bp, Homo sapiens; identical to SEQ ID NO: 27868
  chr14:102681973-102682245
  hypo

SEQ ID NO: 87551 - DNA, 30 bp, Homo sapiens; identical to SEQ ID NO: 27869
  chr14:102685384-102685414
  hypo

SEQ ID NO: 87552 - DNA, 30 bp, Homo sapiens
  chr14:102685663-102685693
  hypo
agggtccagtgactcgcacaagtcctcagc

SEQ ID NO: 87553 - DNA, 122 bp, Homo sapiens
  chr14:102686106-102686228
  hypo
ccagggctgccatcaaaagggcgaagcctgctaacgggaacccccagttccgttatgccagtatggactacagaagacgagaggaggacaggtttgagggcggttgattcaagatctctctg

SEQ ID NO: 87554 - DNA, 30 bp, Homo sapiens
  chr14:102688909-102688939
  hypo
aggccagccctgcccgcccttctcttggac

SEQ ID NO: 87555 - DNA, 30 bp, Homo sapiens
  chr14:102689357-102689387
  hypo
accggctcactctgcggcgccgtgctcccg

SEQ ID NO: 87556 - DNA, 133 bp, Homo sapiens
  chr14:102691860-102691993
  hypo
cgagatggcatcactcgagatggttagtcctagctctgcctcagcccagtctgtcacccttcgctggttctggaatgcagtttgcatttggccatcactgtactaacgctgtcagatacgccccagtttactc

SEQ ID NO: 87557 - DNA, 449 bp, Homo sapiens
  chr14:102695441-102695890
  hypo
atcctaggcagctgcgcgggccgcgggtgcggcagggcgcagggcagcacccagagccccggccagcgcgaaacggacgcaggcgcatccccagccctccgtggcgtctcagcagcagatcacccaggcctggcccggtcgggcttggtgttgcctccgaagtcgagacgacggtgctgctcagttatcttccgcctttccgcactatggtgggcaggcgacactgctgcggggcaggcttaaggtccttctgcggatctgtctgtcaaagaaaaattacagacacaaaattcagtggcggcctgggctgggtcgaagagcagcgccgtcagagaagctggttccgcgctaccttcttgctcgcagggatgcacttcaagggtctcagcaccggcactcttccatttgttccagatccaagcacggactgcagcgtggggctggagtaa

SEQ ID NO: 87558 - DNA, 30 bp, Homo sapiens
  chr14:102698077-102698107
  hypo
ttactgagtggttccggtgccacagggtgc

SEQ ID NO: 87559 - DNA, 27 bp, Homo sapiens
  chr14:102791275-102791302
  hypo
gggtccgtctcaaaagaaaaagaaaaa

SEQ ID NO: 87560 - DNA, 234 bp, Homo sapiens; identical to SEQ ID NO: 27872
  chr14:102792999-102793233
  hypo

SEQ ID NO: 87561 - DNA, 190 bp, Homo sapiens
  chr14:102909002-102909192
  hypo
ctgctcaggagtgtgtcgtgtaagaagtcctgccggtgattcccacctagtttagtggaaggaaatatcacccaaggactgcaatactataggtgcgtctgtgattagtcacggagcatatttgagtactgagacctaattgcaggcctaaggtcaaggaatacagggttgtaggcgacagttggtctgt

SEQ ID NO: 87562 - DNA, 30 bp, Homo sapiens
  chr14:102910236-102910266
  hypo
aggcaccatgaggccgttcctgggaggcag

SEQ ID NO: 87563 - DNA, 30 bp, Homo sapiens; identical to SEQ ID NO: 27873
  chr14:102931263-102931293
  hypo

SEQ ID NO: 87564 - DNA, 639 bp, Homo sapiens
  chr14:102939181-102939820
  hypo
gctcccaggtgctgcccctgccgaggctcccctgggctgaggaaggcgcttctcccgggctgctggcactgacgattgtttgctgagatcagaagtgaagacaagctctgctgccaggcgctcgccttgtgccaggctaatgcctgaagcacatctttccctcagtcctcacaacaacctgggaagtgactgcgtctttccccatttgacagaggagaaaaccctagctcagaggttcagaaagttgcctgaggcctcatagcgggcaggcggcaggggtgggacatagacccaggtgtgtgacacccgcctctgcctctcctgtggctctgaggtccaaggcctgggccaggaccaactgcaggatggcagcaagcaccaggttgtggcgacatgtcataggcttagtggcctcacacgtcgtattttaggacaaagcctacacatgcgaatctttaaatcgcagagggtcctgcaaatgagcccaggagtgaggggagatgggggttcactctgaggactggaacgtcagaagagttggttgaatctgaggattggagaacaagcggggtttatgtattttgattatgttctacatctttccactttgttttatttgttcttcgacttgagcttctt

SEQ ID NO: 87565 - DNA, 30 bp, Homo sapiens
  chr14:102959521-102959551
  hypo
ttcaaaccacagcgcgtctcagctctgggc

SEQ ID NO: 87566 - DNA, 30 bp, Homo sapiens
  chr14:102965540-102965570
  hypo
agctgagcaagggtcgctcacttagaaatg

SEQ ID NO: 87567 - DNA, 169 bp, Homo sapiens
  chr14:102966287-102966456
  hypo
gcagcagaggcagccccaggccgggctgcatctctctgtgtctgttgtgccttgcccggcgcctcacggatggcaaagctctcctcacccatgggactgtagtgcaattaaacccgcgtctaggtgatgcttttaaagttgtagcttcgtgctttgtacagttttcttt

SEQ ID NO: 87568 - DNA, 252 bp, Homo sapiens
  chr14:102968259-102968511
  hypo
ccctactggggaagccggtccgtacgtaggccttgcatctcgccacctccacttctgtcctcaagaacaagtcctaggtcaagggaaacagcacagcctgtttataattaggaaacacttaaaacagcctggcatttgggaacagccatgttaacgtgagcaaattcctctcatgaaatagcctgcagctattaagaagcacgtgtgtgcaggaagcggaggcgcaggacctcaccgcgccagcgtgaagtt

SEQ ID NO: 87569 - DNA, 493 bp, Homo sapiens
  chr14:102973239-102973732
  hypo
gtcccaaaatccagcgcctagggtgctccgggcctagcctttgccagtgaggtccaacggctgcaggaatgggggcagcggcagctcgtccagggcctcggggaagcggcctggagagatggcggtgaccagcacctgcatggcgcgcgcgaagagcgagggcggcgccaggcccgccagccactggaacttgtcctcacccagcagccgctgccagcgcggccggtcgcccagcagctcctggcgggccgagccggcggcacccacgggggtgtacagcgccaggaggtccagcagcagcaggcggcgctggcgcggctccccgggagctgaggcgggggctccggcggcggagggagtggccccggcgtcgcggcccagctggcgcagcagcagctcgagaggcgtgaggccgccgccgtcccgcagaccgggcgaggcgccgtggcccagcagcaggaagaggcactcggggcgcgccagctcacaggcc

SEQ ID NO: 87570 - DNA, 30 bp, Homo sapiens
  chr14:102974350-102974380
  hypo
tcacacagcccctccggtcctggcccacca

SEQ ID NO: 87571 - DNA, 378 bp, Homo sapiens; identical to SEQ ID NO: 51716
  chr14:102975680-102976058
  hypo

SEQ ID NO: 87572 - DNA, 34 bp, Homo sapiens
  chr14:103018820-103018854
  hypo
ttgttttgttttgttttgagacgaagtctcactg

SEQ ID NO: 87573 - DNA, 19 bp, Homo sapiens
  chr14:103019592-103019611
  hypo
cttccttatgttttttgtt

SEQ ID NO: 87574 - DNA, 30 bp, Homo sapiens; identical to SEQ ID NO: 27878
  chr14:103024332-103024362
  hypo

SEQ ID NO: 87575 - DNA, 96 bp, Homo sapiens
  chr14:103046496-103046592
  hypo
gagctggaaggacctgggagccgggagagatgccggaggagtcccgcgcgctgcctgtcacagctgtgtgacttcgagacagggctctggccccct

SEQ ID NO: 87576 - DNA, 37 bp, Homo sapiens; identical to SEQ ID NO: 27880
  chr14:103109323-103109360
  hypo

SEQ ID NO: 87577 - DNA, 37 bp, Homo sapiens
  chr14:103109599-103109636
  hypo
gacagagcgagactccgtctcaaaaaaaagaggaatg

SEQ ID NO: 87578 - DNA, 26 bp, Homo sapiens
  chr14:103141100-103141126
  hypo
tctttaaaacttgataaaaatcgact

SEQ ID NO: 87579 - DNA, 121 bp, Homo sapiens; identical to SEQ ID NO: 27881
  chr14:103144543-103144664
  hypo

SEQ ID NO: 87580 - DNA, 155 bp, Homo sapiens
  chr14:103215887-103216042
  hypo
gggtccctgaaacttcgtgcagcacccgccctctcctgcagcagagattggcgctgcgttcccagccccttcagctgcttctccccagagccaggtgcttgggtccagccgtgcggtgtggaccaggccatgcttggggacgacaatcgaggcaa

SEQ ID NO: 87581 - DNA, 30 bp, Homo sapiens
  chr14:103216384-103216414
  hypo
ctcggtccctgcagccgcagtggcgcctgc

SEQ ID NO: 87582 - DNA, 174 bp, Homo sapiens; identical to SEQ ID NO: 51719
  chr14:103242389-103242563
  hypo

SEQ ID NO: 87583 - DNA, 353 bp, Homo sapiens
  chr14:103242914-103243267
  hypo
tgcgcaggccccagcggcctggtggagggtgcagggggcgcaggggcagccaggaccgccgaggacgctgggggcacgtggcaaactggctaccctgtccacccgtgagcaagacaccactccgggggcgtgggagggtccaagggagggagaaaggaaagtgccaccaaactaatgtggagccctgccctctgcatgcgaaaaggggctccacggcctgagtcaccctcagccccacctgcgtgtgcgcgagggtgcgtggcctggtacgcgtgcgcacggtgttggtgagcgtgtgtgtgcgtgtccgcttgaggggaatgtgaccgtcgtgtatgcgtccgcgacagtgc

SEQ ID NO: 87584 - DNA, 31 bp, Homo sapiens; identical to SEQ ID NO: 9977
  chr14:103263057-103263088
  hypo

SEQ ID NO: 87585 - DNA, 46 bp, Homo sapiens
  chr14:103277689-103277735
  hypo
gcagtggctattcacaggtgctgtcgtactgccctggatgatagta

SEQ ID NO: 87586 - DNA, 30 bp, Homo sapiens
  chr14:103298717-103298747
  hypo
tatcaagcactggccgggcgtggtggctca

SEQ ID NO: 87587 - DNA, 30 bp, Homo sapiens; identical to SEQ ID NO: 27885
  chr14:103345559-103345589
  hypo

SEQ ID NO: 87588 - DNA, 424 bp, Homo sapiens
  chr14:103363892-103364316
  hypo
gcagctggactagcacaggcccggcctgggaagccgcaggtcagcgttttcaaactgccttttctctggagagcaagcctccacccctcttccatgcctttgatctaccgttggagaaataagatgcgaagcttgtatttgttaaattagctgtttttattatttaagatttcatattgttcatgagtagttgctgtgtgcaaagtctcacttcctgcagtgaggtgctgtgcagcccagctactctgtgtgagctttccagtgacacgcgctcacccgctgggtttcactgtggaaatccacacgcacctccagaagaacaaaccagtgaacctttgctcccctgaatagaggcgatgatgtaaaggggactgatgaaatgtcgcttctcctgtcttctgtcgtcacaggtgtctgtggggtg

SEQ ID NO: 87589 - DNA, 385 bp, Homo sapiens; identical to SEQ ID NO: 27887
  chr14:103369446-103369831
  hypo

SEQ ID NO: 87590 - DNA, 30 bp, Homo sapiens
  chr14:103377890-103377920
  hypo
cctgccggactccccgggctgtcctctcag

SEQ ID NO: 87591 - DNA, 30 bp, Homo sapiens
  chr14:103378128-103378158
  hypo
cagagcagataaggcggagctctgacctcc

SEQ ID NO: 87592 - DNA, 145 bp, Homo sapiens
  chr14:103391459-103391604
  hypo
agccactcctgggctgcgtcctcatcctgtcacctgcacacctgccagctcagtcactcctgagtgagggtcactggtgagctgggtcggggtgtcggctccagatgtggggtccaggcctggggcccccgcgtgtgcgggtggg

SEQ ID NO: 87593 - DNA, 836 bp, Homo sapiens; identical to SEQ ID NO: 51721
  chr14:103394621-103395457
  hypo

SEQ ID NO: 87594 - DNA, 93 bp, Homo sapiens
  chr14:103397490-103397583
  hypo
ctggtaccaagctgctgggtgcgaaggcagatcatatggggtcacccatgtgcaagcgtgcgccactgcaccgacacagacaagggtccagcc

SEQ ID NO: 87595 - DNA, 30 bp, Homo sapiens
  chr14:103405832-103405862
  hypo
cacagcgccagcctcgcaggcactgccttt

SEQ ID NO: 87596 - DNA, 278 bp, Homo sapiens
  chr14:103406318-103406596
  hypo
gcaccagggacacacgcccctccaacttcccttccctccactcccggtgcagaggaaggctcacccgagaacttgctcttgaagtagatcaagcgtggaggctcgcagttgaggaggttgagggtgccttcagagttcaggggccttatctggattggaaaccagggagggacagtaagcgcggccacgcacagactgcaccgggagaagcccgcccgcacaggagggcaccgaggccgccttaccctccgcaggccgatggtctgcacccactccat

SEQ ID NO: 87597 - DNA, 137 bp, Homo sapiens; identical to SEQ ID NO: 27889
  chr14:103407160-103407297
  hypo

SEQ ID NO: 87598 - DNA, 507 bp, Homo sapiens
  chr14:103408300-103408807
  hypo
accaaggcggagaaccgaggaacttcaggtgtctacgccagacacgtgtggccaagattataaatacattgcactaagtgacctgggccctcttcaacgttacgctttgcaaaaatgtaaatcctgtgtggttttaaaccctgtgctggctgcctatgaagaggacagggtgttggggggtaagagtccaggacaaggggtgctgaggcagcgggactggccccttcctgcacctcaccgcaggcccacggcccagccccactgcccacacatgtctgctgtggtgtggccatcgggatggagccgggacacactgcagtaagcccgtgggtggagctggccgtgcacctcacaggcctggtgtctagccacgacgccctgggtatgatgccgtctcagcaaggctgacaatggggcagacaaaggggtttagcttcaggtaactgagggagaatgtcattccccaactcttggcctgttacccccatatgcgcggctcgtcttcct

SEQ ID NO: 87599 - DNA, 30 bp, Homo sapiens; identical to SEQ ID NO: 27891
  chr14:103410146-103410176
  hypo

SEQ ID NO: 87600 - DNA, 30 bp, Homo sapiens; identical to SEQ ID NO: 27892
  chr14:103411444-103411474
  hypo

SEQ ID NO: 87601 - DNA, 30 bp, Homo sapiens
  chr14:103411851-103411881
  hypo
gatgccggtcttcacggcacgctggcccct

SEQ ID NO: 87602 - DNA, 31 bp, Homo sapiens; identical to SEQ ID NO: 27893
  chr14:103419854-103419885
  hypo

SEQ ID NO: 87603 - DNA, 200 bp, Homo sapiens; identical to SEQ ID NO: 27894
  chr14:103421193-103421393
  hypo

SEQ ID NO: 87604 - DNA, 297 bp, Homo sapiens; identical to SEQ ID NO: 27895
  chr14:103423608-103423905
  hypo

SEQ ID NO: 87605 - DNA, 80 bp, Homo sapiens; identical to SEQ ID NO: 9979
  chr14:103430221-103430301
  hypo

SEQ ID NO: 87606 - DNA, 31 bp, Homo sapiens
  chr14:103432854-103432885
  hypo
tacccgttgtatacacgggatctcattgatg

SEQ ID NO: 87607 - DNA, 266 bp, Homo sapiens
  chr14:103433123-103433389
  hypo
cctgtctctgagaacgcaaggggtgtgaacggtttgccccaagtccttcagtgggttggtgggggcgtatctccacctctattccaacagaaccactgccccagacatgagaagttctggggaacagcagtgagacctgcaccccagcctgagaggcacggcctggcgtggagcacaggatcaggcagaagaggcggggcagaccccatggactgagcagggagcggattcacggccgctaatggggccgcgcacgtaccactgaa

SEQ ID NO: 87608 - DNA, 269 bp, Homo sapiens; identical to SEQ ID NO: 27898
  chr14:103433868-103434137
  hypo

SEQ ID NO: 87609 - DNA, 18 bp, Homo sapiens
  chr14:103437783-103437801
  hypo
cactcacctaagcggcgg

SEQ ID NO: 87610 - DNA, 17 bp, Homo sapiens
  chr14:103437920-103437937
  hypo
cccggcccgtgatttgc

SEQ ID NO: 87611 - DNA, 31 bp, Homo sapiens
  chr14:103442024-103442055
  hypo
tattttattcttcaagcgttcgatttcttca

SEQ ID NO: 87612 - DNA, 151 bp, Homo sapiens
  chr14:103442295-103442446
  hypo
gctgtgctccaggtcccgctgcacatcctcatctttggttaatgtgttggactgcattatgctcttcagagagcctcgatcagaaaaacagctgggaaaccaagcaacaggtttttttgatctactgaaaatttagcgatttcattagcat

SEQ ID NO: 87613 - DNA, 214 bp, Homo sapiens; identical to SEQ ID NO: 27902
  chr14:103444035-103444249
  hypo

SEQ ID NO: 87614 - DNA, 116 bp, Homo sapiens
  chr14:103453553-103453669
  hypo
cagttacagagcagcacgtgctggagcaggaacataaacacaggtctgtcccactaacgcctgtttctaaactactttctgtgcgctctcaaacacatgtgcgggtgcagggcacc

SEQ ID NO: 87615 - DNA, 118 bp, Homo sapiens
  chr14:103459688-103459806
  hypo
gggttctcaatgagccgctccacatgggatgcgaggcttctggccaagagcacgtctattaacagcacttttggggacatctaacagactctcccacgtccaccagtttttctgcatt

SEQ ID NO: 87616 - DNA, 155 bp, Homo sapiens
  chr14:103460343-103460498
  hypo
aaccataatttcacatacacacgaaaaatgtcccaagtggcctgagacaggctaggaagacacagaagagagtaaggaggcgccgagacacgccacaacaggtgttctatggaccgagttagcaggaatgcaacgaccagagtccaggctaaaca

SEQ ID NO: 87617 - DNA, 30 bp, Homo sapiens
  chr14:103460909-103460939
  hypo
cacagcggggagcagcggcgtcttcagggg

SEQ ID NO: 87618 - DNA, 356 bp, Homo sapiens
  chr14:103467946-103468302
  hypo
cagaagcccaggcaccgaggtgccactgcgtgtggagggcgatgcagagggggcggtggatgcacactgcaggcattccagagggagcggccccggcagctgacggacacacacggggccaggggagatgcggtgaacgaacggccaggccctcgggcccctaaggaaggccgtggggtcgagtcaagcccttactagctgagccccagccgcgtccacgtctgccgagaactctaagaggaggagcttcctacagcagcactgggtctgatcaacggtctcctggagcatggtctctgaggaaagctaacgcgggagctcgtgaggcagacggcggaggcccactccagaatgag

SEQ ID NO: 87619 - DNA, 68 bp, Homo sapiens
  chr14:103470285-103470353
  hypo
ggcgtagtgcagcgcggtgatccactggcagtcgccgttcaccagcacatcgcgctcctctcggaagc

SEQ ID NO: 87620 - DNA, 31 bp, Homo sapiens
  chr14:103474513-103474544
  hypo
aatgctgaaactctcccgatgctttttattt

SEQ ID NO: 87621 - DNA, 44 bp, Homo sapiens
  chr14:103487485-103487529
  hypo
aaagggagccctttaagaacacgtggatgtggccgcgtgcagtg

SEQ ID NO: 87622 - DNA, 30 bp, Homo sapiens
  chr14:103492444-103492474
  hypo
taaaacacggctgggcgtggtggctcacac

SEQ ID NO: 87623 - DNA, 29 bp, Homo sapiens
  chr14:103492713-103492742
  hypo
gaggttccgtctcaaaaacaaaacaaaac

SEQ ID NO: 87624 - DNA, 1487 bp, Homo sapiens; identical to SEQ ID NO: 51723
  chr14:103523057-103524544
  hypo

SEQ ID NO: 87625 - DNA, 94 bp, Homo sapiens
  chr14:103525305-103525399
  hypo
gcacgactccgtcttaataatagtaataataataagaagaagaagaagaagaagaggagtggctgcctatgccggagttgttgactggaacaag

SEQ ID NO: 87626 - DNA, 216 bp, Homo sapiens
  chr14:103538913-103539129
  hypo
caacagcctctgtgtgcccagcgcttccctctcacctgctcaaatagctgcacgtggccttgctcccctcctcactgtgcagataaggaaactgaggctcagagtgggcgagagactcgctcaggggcacacggtgaactgagggaggtgcctggacttcatctaagctggcgtggttggcagaggccgggcatcgcccctgagcatggagatgtc

SEQ ID NO: 87627 - DNA, 43 bp, Homo sapiens
  chr14:103539831-103539874
  hypo
ctgggtcgggtagcctgaggccgggatgccaggcctttgcaca

SEQ ID NO: 87628 - DNA, 78 bp, Homo sapiens; identical to SEQ ID NO: 9982
  chr14:103541956-103542034
  hypo

SEQ ID NO: 87629 - DNA, 31 bp, Homo sapiens; identical to SEQ ID NO: 51725
  chr14:103542258-103542289
  hypo

SEQ ID NO: 87630 - DNA, 30 bp, Homo sapiens
  chr14:103556641-103556671
  hypo
cttggggccagggccggaccctgagggcct

SEQ ID NO: 87631 - DNA, 30 bp, Homo sapiens; identical to SEQ ID NO: 27911
  chr14:103591734-103591764
  hypo

SEQ ID NO: 87632 - DNA, 304 bp, Homo sapiens; identical to SEQ ID NO: 51728
  chr14:103593780-103594084
  hypo

SEQ ID NO: 87633 - DNA, 295 bp, Homo sapiens
  chr14:103596341-103596636
  hypo
aatgtgagggagttgatggaccgagctctggagctagaggcacggcgctgggctgaggatgtgcctccccagaggctggacggccactgccacagcgagctggccatcgacatcatccaggtactgcaatctgccccagggcacacgtaccgcccgtgcacgtgcatggggagccccacgcacattccgtcctgtgtgcatacccatgcccacctcggggcaccccctctgttcccgcctgtttcctccccgtcccctgcccccttgtccaggcgagcccctgctcagctcaccc

SEQ ID NO: 87634 - DNA, 31 bp, Homo sapiens
  chr14:103693881-103693912
  hypo
ctcggttgctgaaatccgcctaaataggcgt

SEQ ID NO: 87635 - DNA, 73 bp, Homo sapiens
  chr14:103697778-103697851
  hypo
accacaggggtccaggcggtgcgaggtgggagagactgaggagtcccgggtccttgagcgaggagacgggcgc

SEQ ID NO: 87636 - DNA, 31 bp, Homo sapiens
  chr14:103698758-103698789
  hypo
cttatccccctcccccggccaggattaggcg

SEQ ID NO: 87637 - DNA, 30 bp, Homo sapiens
  chr14:103699247-103699277
  hypo
tccctccccactgaccggacctcaggtgct

SEQ ID NO: 87638 - DNA, 30 bp, Homo sapiens
  chr14:103699549-103699579
  hypo
cagccaatgccccagcgcccccagcagccc

SEQ ID NO: 87639 - DNA, 30 bp, Homo sapiens; identical to SEQ ID NO: 27914
  chr14:103777894-103777924
  hypo

SEQ ID NO: 87640 - DNA, 30 bp, Homo sapiens
  chr14:103803227-103803257
  hypo
tgcttctgtgataccgctaagtcaccttcc

SEQ ID NO: 87641 - DNA, 31 bp, Homo sapiens
  chr14:103845496-103845527
  hypo
ctaagcacaggaggttcgagggctctccact

SEQ ID NO: 87642 - DNA, 30 bp, Homo sapiens
  chr14:103912492-103912522
  hypo
gacctacttagatacgttttcagagaatct

SEQ ID NO: 87643 - DNA, 143 bp, Homo sapiens; identical to SEQ ID NO: 27915
  chr14:103977416-103977559
  hypo

SEQ ID NO: 87644 - DNA, 152 bp, Homo sapiens; identical to SEQ ID NO: 27916
  chr14:103977770-103977922
  hypo

SEQ ID NO: 87645 - DNA, 440 bp, Homo sapiens
  chr14:103981302-103981742
  hypo
cagaggggattcgggcgattgtgggaagcagagagcagacatgcaggtgggagccctgccccaggttaggcaaacaggcaacaaacacgtctggaggggttggtgccgtcctgagtgcaagtgggtgtggagtacctggagccactgggccaattcctctgcaagcccagcaggatcccaagccgaaccccacgctgcatgggattcatgaatggtagaacagggttgcagccccttcaccacagcaggaatgttgccagcacctcaggagttggtgccaggctgcacacacgcaggcatttcgccccacagcaccgaggacggccttgtcctcacagcctgggcagctgctggagcacgttgatacctggccacccctagctgcatgggagtcttgaaagtgtgctttcacagccaggcagctgcgtgcaggctggaaa

SEQ ID NO: 87646 - DNA, 833 bp, Homo sapiens; identical to SEQ ID NO: 51735
  chr14:103988695-103989528
  hypo

SEQ ID NO: 87647 - DNA, 182 bp, Homo sapiens; identical to SEQ ID NO: 9988
  chr14:103989537-103989719
  hypo

SEQ ID NO: 87648 - DNA, 30 bp, Homo sapiens
  chr14:103999035-103999065
  hypo
agcaccgtgtgggccgctgggtgactgtgc

SEQ ID NO: 87649 - DNA, 84 bp, Homo sapiens
  chr14:104000078-104000162
  hypo
ctcctggctcattcatgggcccggcatctcctgccggccacgggagcccgctggggaggatgcggcatgctcagcctctgtgcc

SEQ ID NO: 87650 - DNA, 114 bp, Homo sapiens; identical to SEQ ID NO: 27919
  chr14:104000990-104001104
  hypo

SEQ ID NO: 87651 - DNA, 30 bp, Homo sapiens; identical to SEQ ID NO: 27920
  chr14:104006540-104006570
  hypo

SEQ ID NO: 87652 - DNA, 243 bp, Homo sapiens; identical to SEQ ID NO: 27921
  chr14:104017482-104017725
  hypo

SEQ ID NO: 87653 - DNA, 38 bp, Homo sapiens
  chr14:104041399-104041437
  hypo
actgggcctcgccgcgccccatggctgtcagcgcattc

SEQ ID NO: 87654 - DNA, 156 bp, Homo sapiens
  chr14:104047673-104047829
  hypo
tcagacacaagcactgctgtacgacgacagtggatctgatcaccgagacggctgctgagtaactaacgagtggggcgcgtctacactgtggaggtgctggacagagggaggagtcgcctcctgggctggtcggagtaggaccttgggaggtttcat

SEQ ID NO: 87655 - DNA, 1178 bp, Homo sapiens
  chr14:104047888-104049066
  hypo
ccatttaatattttcagaccccactttacctcgggtaactgaaaccatggaaagaaaaaccatggatggaggggacagctgtgctgccgccatctcccttacacagttgagtaaaccgaggcacagaagaaaatgaagtagccccagatgacgtaggaaatggcagaactgaagggaaaagcagagcagggggctgtagagttaaactgttcttcattccggtggcactagacctgcccgggcggccagaggacacgtggctcctgtcctgtctgccgtgtggctaggggacagccgtgcttgtgctgtgccgtctgagtgtttgtttctgtctgtgggaataaaggggttgccagacaccctccctgctctgtggagggagggtggaatcatgcctttggccactttgcccactcccccttgggccggagcatcagcattagctgtgccacagggtggtatgcgctctgctgaaggtggcaccttcagggaaaggcagtctgccggggaggctagcgagcaccctgggtaggagctgagcgtggcctccgcgcctcctcatgggaagtgctggagatgcaggagcccctgagccagagcccagcgctcttacaagagacctcacttcctgttcggggactggggctgctaagtcagagtgcgcctcctgcacccgccaccctggatgtggttccattccctggtccctgagccatagctggggggcatgagactgtcccctgggctgctttggggaccctacttcagggcagccctgccactccctgtaacgggctgtgggtcctgccctgtggccttcctacctctcttgcgtgtgggtgagcctgagcgtggccaccgccctgggagtgccacagaggcaagcggcactggtcctcatgtgtaaacagccccaccagcacgcggggctggagtagtcaggccgggacctgtcccaggaatgggcaggctgttaacctaggatgcattcaagttaggacacatttcattcccgtgtagcggtggctcccagttcctccgcagaacctgcaggagtgtgcgtgatgaaacccgtcactcgttgtgtatggtagacatacctgcctgggtcgtaatcacttgtgaagaaaatgaattatgctgtgacctttagatacgattcacataccataaaattc

SEQ ID NO: 87656 - DNA, 30 bp, Homo sapiens; identical to SEQ ID NO: 27925
  chr14:104061814-104061844
  hypo

SEQ ID NO: 87657 - DNA, 32 bp, Homo sapiens
  chr14:104062201-104062233
  hypo
tttttttttttgagaccgagtctcgctctgtc

SEQ ID NO: 87658 - DNA, 20 bp, Homo sapiens
  chr14:104116033-104116053
  hypo
tgttttttttttttttcgag

SEQ ID NO: 87659 - DNA, 155 bp, Homo sapiens
  chr14:104121122-104121277
  hypo
gtcactggagatgttggagctcggcctgagtgaggcacaggtacgagtgagaatgactcagacgttatcaggaacttttgatggtaaaatggagacttgtttgaaataagcagtttcactaaagaagaggaaagatgattatagaataacagatc

SEQ ID NO: 87660 - DNA, 30 bp, Homo sapiens
  chr14:104129049-104129079
  hypo
cacagcagtgcagccgcggctgcccagcag

SEQ ID NO: 87661 - DNA, 115 bp, Homo sapiens
  chr14:104152223-104152338
  hypo
tactgtgtaatacacgagtttaaaaattaagagcgattagctgttcactttggtaacaggtagttaagtgtcacacaaggtgttgttgcaatggcatgacggtgacctgttgacg

SEQ ID NO: 87662 - DNA, 120 bp, Homo sapiens
  chr14:104158784-104158904
  hypo
tgtcctaggctgcccagaccacgctggcaggtctgctgcagacccgcactcggcccctgctcggcccctgctcctgcagagggctggggacgccgccacgtttgttcctagacagacagt

SEQ ID NO: 87663 - DNA, 261 bp, Homo sapiens
  chr14:104159176-104159437
  hypo
ctctgttaacatgatgactagcgtgctgtcagtttgacactaaaacctgaagcactcggtgcagttgctcgggcctcacacagacacatcaggtttacatctgaaagtactgcctcccttccccatcacggaggccgtttgagttttcatccactccgccctttggtgtggctgtcagtgggtggccgggtgcctgtggctgctctagaacctgtttctcaggtgcctggggcccacccggcagctcgagctgttgggact

SEQ ID NO: 87664 - DNA, 303 bp, Homo sapiens; identical to SEQ ID NO: 27929
  chr14:104159975-104160278
  hypo

SEQ ID NO: 87665 - DNA, 30 bp, Homo sapiens; identical to SEQ ID NO: 27930
  chr14:104164387-104164417
  hypo

SEQ ID NO: 87666 - DNA, 263 bp, Homo sapiens
  chr14:104164989-104165252
  hypo
atgagaaagtggagccgctgccctggaagagctgtgtctgaaccaggctcccagctgtgccacggcccaggcagacgcgttttaaaggcccgagccccgtgtgtcggggcttctcaggcagggctgttgtgcagccgccaccgtgtcagtgggactgggtcccaggtgtccctcgcaccccttcggcactgatcgtgtaggaacaggaggaggggggcaggtggggggcagagagcacccgcagggtccgggctgggcagccg

SEQ ID NO: 87667 - DNA, 30 bp, Homo sapiens
  chr14:104172959-104172989
  hypo
ggcggcggggcacccggggaaaggctgtgc

SEQ ID NO: 87668 - DNA, 30 bp, Homo sapiens
  chr14:104175832-104175862
  hypo
agacaaccattgtgcggctggaaaacagta

SEQ ID NO: 87669 - DNA, 132 bp, Homo sapiens
  chr14:104188352-104188484
  hypo
ttccactgagcatcagagctgcggggtccagttaaaggaggcgctggtgggagcctggtctggggcccggcttgctgtcctgcgcttcctttgcggggcgtgcttactggcggggtaggtatttggcagtag

SEQ ID NO: 87670 - DNA, 30 bp, Homo sapiens
  chr14:104191125-104191155
  hypo
gaggtctctgacagcgaggaccaaagcggg

SEQ ID NO: 87671 - DNA, 30 bp, Homo sapiens
  chr14:104192605-104192635
  hypo
tttgccggctggcgcgcagccccagaatca

SEQ ID NO: 87672 - DNA, 30 bp, Homo sapiens; identical to SEQ ID NO: 27932
  chr14:104193784-104193814
  hypo

SEQ ID NO: 87673 - DNA, 576 bp, Homo sapiens
  chr14:104194174-104194750
  hypo
gcagtgcgcggagtgcgccctcgtgtccctcaaggaggcggagttctacgacaagcagctcaaagtgctcctgagcggtaaggacgggtgtcctgcacagtcccgcgcgctccgccagccggctcctcgtgtctgtggcgatgctgtgggctgtgcacggggcgttctgcttctctgacgttctctcgccctccctcccttccccgttttcttctggattcgtttagaagcggttatagagccttcccttcttttcagaggcggaatgtcgtctaaaatgttggtgctgactccgctgggcacgtccatcaggtgggaggggaggccctgggcccaggcagcaccttcctccttcccccgggtggaacccggcgccggcgctcgggcgtttgcaaccactgtggctcctcggaggggccggagacctttgcccaatagcacgatgcagacccggttttgagccatctctggggacctggtgtgggagaagggcattctccaggggcatagggtgtgcctccctggaatctgaacaacgagcagcgccttctccccactgtccgtccacctctggcc

SEQ ID NO: 87674 - DNA, 31 bp, Homo sapiens; identical to SEQ ID NO: 27934
  chr14:104195284-104195315
  hypo

SEQ ID NO: 87675 - DNA, 153 bp, Homo sapiens
  chr14:104200029-104200182
  hypo
gatcacctgaaccctcgtgccacagcgcagtctgggtccagaaagaagactcacagccgccggggtgagacgggtttattgtgcacatttacacagcgtcagcagcgtctgggctggcagcggccatgctcctgtggtcgggctgctctacaa

SEQ ID NO: 87676 - DNA, 486 bp, Homo sapiens; identical to SEQ ID NO: 27935
  chr14:104202355-104202841
  hypo

SEQ ID NO: 87677 - DNA, 122 bp, Homo sapiens; identical to SEQ ID NO: 27936
  chr14:104204086-104204208
  hypo

SEQ ID NO: 87678 - DNA, 30 bp, Homo sapiens
  chr14:104205284-104205314
  hypo
ccagggggttaaaccggactctcagcccgt

SEQ ID NO: 87679 - DNA, 30 bp, Homo sapiens
  chr14:104206687-104206717
  hypo
catcactctggtagcgcagtggcgaatgca

SEQ ID NO: 87680 - DNA, 25 bp, Homo sapiens
  chr14:104220122-104220147
  hypo
ttcaggctggggagcactggccgga

SEQ ID NO: 87681 - DNA, 66 bp, Homo sapiens
  chr14:104222923-104222989
  hypo
gagtagcacatggggaagccccgttaaccacctgtcattgtcttcgtggccctgatcagtgttttc

SEQ ID NO: 87682 - DNA, 89 bp, Homo sapiens
  chr14:104231445-104231534
  hypo
tgcccggccaacacagctgttctatagcctgtgtcaggtcataccagtatctgaggtgtttgtcacattttgttcgtgatgtcttattt

SEQ ID NO: 87683 - DNA, 83 bp, Homo sapiens; identical to SEQ ID NO: 27938
  chr14:104335354-104335437
  hypo

SEQ ID NO: 87684 - DNA, 68 bp, Homo sapiens; identical to SEQ ID NO: 27939
  chr14:104335676-104335744
  hypo

SEQ ID NO: 87685 - DNA, 83 bp, Homo sapiens
  chr14:104349423-104349506
  hypo
ccctgacgggacattgcgcttgtcgaggcgacacagacagacctgatgcagcccctgccgctgctctgcgacccagttccctg

SEQ ID NO: 87686 - DNA, 130 bp, Homo sapiens; identical to SEQ ID NO: 27941
  chr14:104353833-104353963
  hypo

SEQ ID NO: 87687 - DNA, 18 bp, Homo sapiens
  chr14:104391675-104391693
  hypo
gcccggccaaaaaaacct

SEQ ID NO: 87688 - DNA, 604 bp, Homo sapiens
  chr14:104393985-104394589
  hypo
caccctcactcttctagagctcggccgggaccacctcagcctgtatctttggtccatgtgatcgcctggacctcctgtccgcacctgtttgtgtccagctgtgagtctgacaccgccgcctgagacaccggtttaggaaggaagatgaattcagttatgatccggctgcaaagaacttctcccagatcctcacctcagccatcagggccgcctgccctcccctataaccctgggtggtcctccgtctggcgcattcccccgtatcctgcaggggtctgcctggcgttactttctccgagaccttcctgaccttcttcttgcccctctccccccatattaggtgcaaggatgtcctggtacgtctgacccacgaacgcaaatcccttctctggtttgccttccatctcctcaccctgaggtgctcaagaaacgtatgtagggtcccggtccgctcaaagcgcacaaacctccgaggcagcagcctctaaatagagaggccagggagtgaccggagggcattttcttgtacacacaggggttgccacggaactcccgtgaaacagactcccgggccagccgcggcgctcaagcttcccctgaggtc

SEQ ID NO: 87689 - DNA, 272 bp, Homo sapiens; identical to SEQ ID NO: 27943
  chr14:104395315-104395587
  hypo

SEQ ID NO: 87690 - DNA, 30 bp, Homo sapiens; identical to SEQ ID NO: 27944
  chr14:104547817-104547847
  hypo

SEQ ID NO: 87691 - DNA, 64 bp, Homo sapiens
  chr14:104548474-104548538
  hypo
tccaccttgctccaccgtggccagcttctggcctcccctcaccaagccccgggacttcacgtga

SEQ ID NO: 87692 - DNA, 30 bp, Homo sapiens
  chr14:104560589-104560619
  hypo
tgtgtgatgctacctcgagggccagcaagc

SEQ ID NO: 87693 - DNA, 1395 bp, Homo sapiens; identical to SEQ ID NO: 51745
  chr14:104603915-104605310
  hypo

SEQ ID NO: 87694 - DNA, 39 bp, Homo sapiens
  chr14:104617751-104617790
  hypo
ctgtacccgatcctgcggctcttgcgccccttcggtgag

SEQ ID NO: 87695 - DNA, 790 bp, Homo sapiens
  chr14:104618013-104618803
  hypo
ctcctgcgtgtccccggccaggcggccttagctgacagtggtccggttgtccgggagccgcaaacctgccttgttagccgcaggccggggcgcttaatgacggctggggaaggtggacagttaacaaggacattgtgagcctcacgatgaagcccgatcattattttcctgctgggcttgtgtgggtgaaagtgtttgggcttattaatctgttacggatggtgcggtggccaggcgggagctcgcagcgtcatggacggtgagagtgctggtgggctctgggtgccggccctccctccccaggcactgaccctgcctttgtcccttgctgtcctcaggatccttgcctctctgccctgcttctcgacaagctaccagcacctggggccctgccagcctgtcgcccagaggccgagcgccgctgtgacgtctgcgccacacacctgcagcagctcacacgggaggccatgcacctgctgcaggcccctgccagccatgaggaccttgacgccccccatggaggccccagcctcgcaccccccagcaccacgaccagctcgagggacacgccaggaccagcgggtcctgcagggaggcagccaggacgagctgggccagacaggaccaaggggctggcctggtcccccgggcccagtgtccaggtgtctgtagcacctgcgggtcttggaggggcgctgagcacggtcaccatccaggcccagcagtgcctggagggcatgtggagtgtctcgcgggtcaacagcttcctcccgccggcgtgcctggtgag

SEQ ID NO: 87696 - DNA, 30 bp, Homo sapiens; identical to SEQ ID NO: 27949
  chr14:104621161-104621191
  hypo

SEQ ID NO: 87697 - DNA, 206 bp, Homo sapiens
  chr14:104623040-104623246
  hypo
tcctgggtcccggggcggcttgttctgctgacgtgccgtgcctggcctctggcctgtgccacttgggacaccctgaggacgctgggccttccagaccagcccacgtcccctcagcacggggaccccagtcctctgctagcctgggtacaaaggacgcctcgggcagtggttatcgactggacacttggggccgaatgacgcttggc

SEQ ID NO: 87698 - DNA, 296 bp, Homo sapiens
  chr14:104623446-104623742
  hypo
tgggaatggaacgtgcggaggtggagctcacgtttgctgggctgtcccgggcgtttaattacgtttgtgcttcattatgaggaggcctccctttctgggatttatttgagctaatgagttggaaatgccagggtagtatttcagatgagggagcgccacacatcaccgtacgtggggcaattagtgttcctgccaaatagttatcgtggtttcttctctaattacgccgctgggtgctcccaggaggctcaggggtgagagggtggggggtctgtgtccatcggtcttgaccagtg

SEQ ID NO: 87699 - DNA, 30 bp, Homo sapiens; identical to SEQ ID NO: 27951
  chr14:104624723-104624753
  hypo

SEQ ID NO: 87700 - DNA, 30 bp, Homo sapiens
  chr14:104627668-104627698
  hypo
tccaccagcctcgcacggcccagtgtggaa

SEQ ID NO: 87701 - DNA, 30 bp, Homo sapiens
  chr14:104627958-104627988
  hypo
tgtctcgttcatcctcgctcacgcgtgttc

SEQ ID NO: 87702 - DNA, 30 bp, Homo sapiens; identical to SEQ ID NO: 27952
  chr14:104630658-104630688
  hypo

SEQ ID NO: 87703 - DNA, 126 bp, Homo sapiens
  chr14:104633758-104633884
  hypo
ctctctgctctccagagtcaccgtgtgcaggcgggcccctgccatgggaaagcgggatgcgtgatgggttgattctggcgccgcgctccacatgggaagactgccgcctgtggagggcacagggcc

SEQ ID NO: 87704 - DNA, 30 bp, Homo sapiens; identical to SEQ ID NO: 27953
  chr14:104637046-104637076
  hypo

SEQ ID NO: 87705 - DNA, 601 bp, Homo sapiens; identical to SEQ ID NO: 27954
  chr14:104639201-104639802
  hypo

SEQ ID NO: 87706 - DNA, 111 bp, Homo sapiens
  chr14:104640184-104640295
  hypo
agccaagcatgtgccgtatcggtgagtgtagggcctgggcaggtgccgaccagggtggccccttggtgacctggtaaatccgtgtctggtgtgcccggtgctgctgtggcc

SEQ ID NO: 87707 - DNA, 188 bp, Homo sapiens
  chr14:104640494-104640682
  hypo
ctcaccatgctgctgcgtgaatccctggccaccgctggctgccgcaccaccatgatcgcccacgtgtcggatgcgccagcccagcacgcagagacactcagcaccgtgcagctcgccgcccgcatccaccgcctgcgcaggaagaaggccaaggtgctccccacctcctgcccgccccatctcggggc

SEQ ID NO: 87708 - DNA, 699 bp, Homo sapiens; identical to SEQ ID NO: 27955
  chr14:104641145-104641844
  hypo

SEQ ID NO: 87709 - DNA, 624 bp, Homo sapiens
  chr14:104642258-104642882
  hypo
ttgccggagctgggcggcccaccagcctggctagcttcgacagtgactgctccctgcgggccctggcctcggggtcccggccagtcagcatcatcagcagcatcaatgatgagtttgacgcctacacctctcaggcccctgagggggggcccctggagggggcagcctgggccggcagcagtcacggctcctccatcagctcctggctcagcgaggtcagcgtctgcactgccgacagccgtgaccccacgccgcagccccgcttcagccccgactcgctggcagggcttgaccctgggggcccccctgccctggatggttccctgggggatggaagctctgggttcctggggccagacagacctgacagtcctgggccaacctggggtccgtgccctggggaagtggctgcagtggccccatcccgacccggcagggagccccaggccgggccctcgcggtgggcatccgcagcccagaccatccactccagcctcccccggaaaccgaggactgcctctgccaccacccgtgtgggctgtgctcgcctgggccagagcccacctggccgtggaggcctgtttgaggacccatggctgctccgggtaggggagtgtgataccc

SEQ ID NO: 87710 - DNA, 1071 bp, Homo sapiens; identical to SEQ ID NO: 27956
  chr14:104643152-104644223
  hypo

SEQ ID NO: 87711 - DNA, 105 bp, Homo sapiens
  chr14:104645539-104645644
  hypo
catgcctgagcccccgcccgccctgcctcccagggtctggcgtgcgtcagtacaaggctgcggctggcggagcgcaggcagcagcggctgcgggaggtgcaggcc

SEQ ID NO: 87712 - DNA, 477 bp, Homo sapiens
  chr14:104645896-104646373
  hypo
cagcctcgggcctgacgcaggtgcccctcccctctcctcccctccccagttgaggtggacccggagctggagcccgagtcggccgagtacctggcggccctggagcgagccacggcggccctggagcagtgcgtgaacctgtgcaaggcgcacgtcatgatggtcacctgcttcgacatcagcgttgcagccagtgctgccatcccggggccgcaggaggtggacgtctgaggctgggcgccggacaagaggagggggcgtgcagcgggctggaggacgggacgtgggacggagcgaggatgtggtgggggctgcggggggaggatgcggaggggtttctgtgcaggacgggagtctcagagaggagacggagtgtgggggagggagggccggccacgcggtggacagagcgagggtgccagggtgaccagaagaccgtcaccacccgacagcaacgcaagtgcctttgaccttgat

SEQ ID NO: 87713 - DNA, 31 bp, Homo sapiens
  chr14:104650284-104650315
  hypo
tccaggcctgccctgacggccctgcccacac

SEQ ID NO: 87714 - DNA, 194 bp, Homo sapiens
  chr14:104655995-104656189
  hypo
acatgcacacacgggcgcacatgcacctagggacacacacgtgcacacacgtgcacacacgggtgcacatgcacataggggcgcacatgcacacacgggcacacatgcacctagggacacacatgtacacacatacatgcacacgggcacacaggcacgtaggggcacacccgcacacacgcatgcacacgggc

SEQ ID NO: 87715 - DNA, 164 bp, Homo sapiens
  chr14:104679989-104680153
  hypo
caggaaatgaatacatgtccccgatgtgtttttctggaaaacacgccttgcatttggcgtcctgtggccgctgcaaccagtgatcgcaaacgatgagcagggggcatcctctcaacgccccagggtccagaggtctgaaatccgtgtccctgggccacagccaa

SEQ ID NO: 87716 - DNA, 163 bp, Homo sapiens
  chr14:104695971-104696134
  hypo
cggcctgcccgtccgcgaagtcacttagctgggatctaatcgggtttcacaggggcataaattacttggctagaggttgttcccgggtgtttccaccccgggcctgttatttacacaccgtgcggtaatgtagtcacggccttgggtgcgcagtatttatggt

SEQ ID NO: 87717 - DNA, 31 bp, Homo sapiens; identical to SEQ ID NO: 27959
  chr14:104733598-104733629
  hypo

SEQ ID NO: 87718 - DNA, 91 bp, Homo sapiens; identical to SEQ ID NO: 27960
  chr14:104733748-104733839
  hypo

SEQ ID NO: 87719 - DNA, 605 bp, Homo sapiens
  chr14:104746282-104746887
  hypo
caggctgcttggggggttcatcgcaaccccattcatgagggaggtttagccaggtcagtggtcgggcaggcagcaggcctgggctcctcacgccgcagatacccactgatgacctgtgaggggcctggtgtccgtccaggttccaggacatccacaaaggggtggcgaaggctcctgctcaccttcaagtgtgaaatcgggtcattcacgaggaaacgggatctttgcagaaagctgtttggcgcgtgatctagaaccacaggttccgcgggggagcgggggcctgagtcggaagaggggctgcaggccgggaggcaaggaggagccattcccagggtgggagaagagggctccaagcagaggctggtgggggcgtttgctgtgttcccggaactgcggggggccgctgggacctggcaaatgatgggaagccatgggtgggttttgagcagggaccgctgtggtctgatcagattgaagggaatggcactggccagggaggaagcagggagcggagcagtgggctggggccagacgaggtggtcgcagtggacaagtgtgcacgtgtgtgtacgagtgtgtgcgtgcaagtgtgcatgtatgat

SEQ ID NO: 87720 - DNA, 88 bp, Homo sapiens
  chr14:104761182-104761270
  hypo
actcggtgcaggtctgcggactcagcctccatcattgtatgagctaattcactgcaataaatctctctttccacggcctgttgattct

SEQ ID NO: 87721 - DNA, 246 bp, Homo sapiens; identical to SEQ ID NO: 27961
  chr14:104800546-104800792
  hypo

SEQ ID NO: 87722 - DNA, 268 bp, Homo sapiens
  chr14:104854590-104854858
  hypo
gccccttatgcttcatggccccgcagcgtctgccccaaaacaagccaagatggatgaaaaatcgctggcgaaggtcactacaggacagccgcggaccggttgattgctcggggcggccctcgccccgtcggcgactccatcggcaacttcgccgcgctctgatttatgatgggaagaaaatggtcccctgaaccgccaccggctctggtttgggattctgtgtgactctctgtgtggccggcccaccgtttattcacaccactgaagt

SEQ ID NO: 87723 - DNA, 272 bp, Homo sapiens
  chr14:104895985-104896257
  hypo
gccgcatccttgccccgctccagcctctgtaacttagcacgcgtgctcgtccagcggcctttgctctgtgtgtgactgtccgtgttgctgctcaggttgccctgcgtttaggcagcaccctatccgttcatccgtcccactgcgggcgcagcaccctagccagtcattcgtcccactgcgggcgcagcaccatatccattcatccgtcccactgaggaggcagcaccctatccattcatccgtcccgctgcgggagcagcaccctagccagt

SEQ ID NO: 87724 - DNA, 285 bp, Homo sapiens
  chr14:104897580-104897865
  hypo
atatccattcatccgtcccactgcgggcgcagcaccatatctgttcattcatctcactgcggaggcagcaccatatccattcactaattccactgcggtggcagcaccctatccattcatcgtcccactgcgggctcatctgggtcttcgtggagccacggtcctgcttcagtagatccaattttccaaagctgctctgtggattttcagcccctcccaccgtgtgtgggggccactgccttctctgtcctaaagcggccctgccatcgccgctctggagagcag

SEQ ID NO: 87725 - DNA, 86 bp, Homo sapiens
  chr14:105102962-105103048
  hypo
gcaggaacggtggtcgtgtgggaaaggatacatttttacgcacacgcgtctccgggccattaacgggccgcgcgtccatctgtgtc

SEQ ID NO: 87726 - DNA, 30 bp, Homo sapiens; identical to SEQ ID NO: 27966
  chr14:105103479-105103509
  hypo

SEQ ID NO: 87727 - DNA, 30 bp, Homo sapiens
  chr14:105117867-105117897
  hypo
cacagtccatgctccggagtcagcatccca

SEQ ID NO: 87728 - DNA, 68 bp, Homo sapiens
  chr14:105119950-105120018
  hypo
tggcgaggcggctgggcgaacctggtgtatccaggccgggcgaggcggctgggcgaacctggtgtatc

SEQ ID NO: 87729 - DNA, 305 bp, Homo sapiens
  chr14:105149125-105149430
  hypo
tggccactcctaaaatcctcacgtcccccccggacaagtctagcctccaggatggaagaaagtcagccaaccctaggattatcacgtctgggttgaactgaggggtcttctgtgcatgcagcctgcgctagtggctggggcctccgcaatgttgggtgtgcctgggatagctcagagtaacacggctatacggcactcagggttggaaggggagccaggctcctctggctctgagctcaagcggtccaccctcccgagcctcccaaagtgctgggattacaggcgtgagccactgctaccttaat

SEQ ID NO: 87730 - DNA, 115 bp, Homo sapiens; identical to SEQ ID NO: 27967
  chr14:105153067-105153182
  hypo

SEQ ID NO: 87731 - DNA, 59 bp, Homo sapiens
  chr14:105157456-105157515
  hypo
ctgagttaaccttcaggtgagcgcccactttgtggaggagctgacggctgtcaagcgaa

SEQ ID NO: 87732 - DNA, 31 bp, Homo sapiens
  chr14:105173532-105173563
  hypo
cccatccctccctctccggctcccttctccc

SEQ ID NO: 87733 - DNA, 31 bp, Homo sapiens; identical to SEQ ID NO: 27968
  chr14:105175828-105175859
  hypo

SEQ ID NO: 87734 - DNA, 30 bp, Homo sapiens
  chr14:105176566-105176596
  hypo
cctccgaaccggggcgggagggctgctcgg

SEQ ID NO: 87735 - DNA, 30 bp, Homo sapiens
  chr14:105179109-105179139
  hypo
ccgggtggtgcccgcgcggggctctcacgg

SEQ ID NO: 87736 - DNA, 30 bp, Homo sapiens; identical to SEQ ID NO: 27969
  chr14:105181887-105181917
  hypo

SEQ ID NO: 87737 - DNA, 30 bp, Homo sapiens; identical to SEQ ID NO: 9996
  chr14:105190143-105190173
  hypo

SEQ ID NO: 87738 - DNA, 30 bp, Homo sapiens
  chr14:105195465-105195495
  hypo
ctgggccaagcagacgctgtggccagagga

SEQ ID NO: 87739 - DNA, 81 bp, Homo sapiens; identical to SEQ ID NO: 51752
  chr14:105195821-105195902
  hypo

SEQ ID NO: 87740 - DNA, 36 bp, Homo sapiens; identical to SEQ ID NO: 9999
  chr14:105196123-105196159
  hypo

SEQ ID NO: 87741 - DNA, 30 bp, Homo sapiens; identical to SEQ ID NO: 10000
  chr14:105196508-105196538
  hypo

SEQ ID NO: 87742 - DNA, 199 bp, Homo sapiens
  chr14:105201186-105201385
  hypo
gcccacatcccagtcccgcacagacgcatcagagctggccaccaaaccagacaccccaaaatccaacagcagtgccctgcagggacagacgaagccccatgtgggtcagtccatgtccggggggtcctcagtacccaagtgccttcagctcagccgggtttctgttccaggggggcaacaacgccggccacacggtggt

SEQ ID NO: 87743 - DNA, 158 bp, Homo sapiens
  chr14:105204797-105204955
  hypo
ttgccctgtcccagacgcggtgccctgagcggttgttggctggagccttcctgagggtttctcccacggaggggactggcaggggtgggttcccaacatagctggcccagctcatcacccgccggctctacccgcgcagaaagcgagtgagctgggca

SEQ ID NO: 87744 - DNA, 31 bp, Homo sapiens
  chr14:105206348-105206379
  hypo
tgcacactgtccttgccggctgccactgcca

SEQ ID NO: 87745 - DNA, 31 bp, Homo sapiens; identical to SEQ ID NO: 27974
  chr14:105208946-105208977
  hypo

SEQ ID NO: 87746 - DNA, 31 bp, Homo sapiens
  chr14:105210188-105210219
  hypo
ctcactttccttgtgcgcgatgcagggttca

SEQ ID NO: 87747 - DNA, 31 bp, Homo sapiens
  chr14:105211493-105211524
  hypo
agggggacagactactcgcctgggaccctgg

SEQ ID NO: 87748 - DNA, 42 bp, Homo sapiens
  chr14:105214102-105214144
  hypo
agtgctgggattacaggtgggaggcaccgcgccagcgtgttt

SEQ ID NO: 87749 - DNA, 40 bp, Homo sapiens; identical to SEQ ID NO: 51755
  chr14:105218313-105218353
  hypo

SEQ ID NO: 87750 - DNA, 45 bp, Homo sapiens; identical to SEQ ID NO: 27975
  chr14:105223768-105223813
  hypo

SEQ ID NO: 87751 - DNA, 95 bp, Homo sapiens; identical to SEQ ID NO: 27976
  chr14:105236574-105236669
  hypo

SEQ ID NO: 87752 - DNA, 30 bp, Homo sapiens
  chr14:105239842-105239872
  hypo
tgacacaatctcagcgccatagaagcgggc

SEQ ID NO: 87753 - DNA, 733 bp, Homo sapiens
  chr14:105240936-105241669
  hypo
tctgcaggacagagcccgggcctcaacaaaagcctggcaggcagggctgcagggcatggggagctggggcctcctggagcctcggcagagtgcaaggaagaccagggccacctgccccacccacctgcccgcacacgggagcagcgagcacagcccctagcccacactgggcacctccacagcctgaccctccagggcaggcctgtctcaccagcggcggagtccacggtgtgtaaagccctcacgtgcccaagaagacaggacatcgtcccctagagacagccccaggagtcgctacctggccccagcccttcagccccatctgggctcccactcactgtgaggaaggggtgcctggagttctgcaggacgcggttctcggtgagtgtgtgggccacctcgtcctgtaaagcagggctgggtgagctgccaccccgcaccctcatctccaccctgccccaccgccccggccccaccttggccacgatgacttccttcttgaggatcttcatggcgtagtagcggcctgtggccttctccttcaccaggatcaccttgccgaaagtgcccttgcccagcagcttcaggtactcaaactcgttcatggtctatgggcaggcaccagggtcagcaagcggcgctgccaacagtgcccagctggtcggcatgcgtggggtggcatgaggggccccagagtcggaggcagagccaggagaggcgtccacttcacacc

SEQ ID NO: 87754 - DNA, 30 bp, Homo sapiens; identical to SEQ ID NO: 51756
  chr14:105243204-105243234
  hypo

SEQ ID NO: 87755 - DNA, 30 bp, Homo sapiens; identical to SEQ ID NO: 27977
  chr14:105244256-105244286
  hypo

SEQ ID NO: 87756 - DNA, 59 bp, Homo sapiens; identical to SEQ ID NO: 27978
  chr14:105245407-105245466
  hypo

SEQ ID NO: 87757 - DNA, 30 bp, Homo sapiens; identical to SEQ ID NO: 10001
  chr14:105246536-105246566
  hypo

SEQ ID NO: 87758 - DNA, 205 bp, Homo sapiens
  chr14:105247292-105247497
  hypo
agacccacactcaggccctgccgccgtcggccctgccgcgtcccacccgtgggtcattcaggtacacgggaacattctccctcaagttttgcagcatcagccgtacgcaggcgttcacacttcagaatcagagcagctgtcctcggtgatagcccagcaagtaccatttttcatactgacactcggaaaaaaatgttccacttac

SEQ ID NO: 87759 - DNA, 30 bp, Homo sapiens; identical to SEQ ID NO: 27980
  chr14:105248619-105248649
  hypo

SEQ ID NO: 87760 - DNA, 228 bp, Homo sapiens
  chr14:105268575-105268803
  hypo
acactgaagaggcacgagcggacacactcgggtgagaagccctatacgtgtgtgcagtgtggcaaaagttttcagtactcccacaacctgagccggcacaccgtagtgcacactcgagagaagccgcatgcctgccggtggtgtgagcgccgtttcacgcagtccggggacctctaccgccacgtccgcaagtttcactgtggcctcgtcaagtcccttctggtgtga

SEQ ID NO: 87761 - DNA, 31 bp, Homo sapiens
  chr14:105269308-105269339
  hypo
ggacactcctggggagcggcagcaggaaccc

SEQ ID NO: 87762 - DNA, 65 bp, Homo sapiens
  chr14:105270249-105270314
  hypo
gcctggtctggagtgaaagaccgtccctagcgcatctcccacgcgccctgggctcctggtgtgct

SEQ ID NO: 87763 - DNA, 30 bp, Homo sapiens; identical to SEQ ID NO: 27982
  chr14:105271515-105271545
  hypo

SEQ ID NO: 87764 - DNA, 31 bp, Homo sapiens
  chr14:105277932-105277963
  hypo
agcctgaatgacagagcgagacagtgtcttg

SEQ ID NO: 87765 - DNA, 30 bp, Homo sapiens; identical to SEQ ID NO: 27983
  chr14:105287865-105287895
  hypo

SEQ ID NO: 87766 - DNA, 726 bp, Homo sapiens; identical to SEQ ID NO: 51764
  chr14:105330980-105331706
  hypo

SEQ ID NO: 87767 - DNA, 154 bp, Homo sapiens; identical to SEQ ID NO: 51765
  chr14:105331744-105331898
  hypo

SEQ ID NO: 87768 - DNA, 189 bp, Homo sapiens
  chr14:105335726-105335915
  hypo
tgcaacgtgctactgccgcacatgcccgggccatgccaggctctgacgaggtgggcaggcctcaggctgtggtgaggggtcctggccatgtgcacattccctggggcagacagtgtttgtctgcctctacccagggcagccccacccgatattgctgcatgtgtcctgctgtggcgggaaggtttgtgt

SEQ ID NO: 87769 - DNA, 31 bp, Homo sapiens
  chr14:105337646-105337677
  hypo
caaacctgtcaccctccgtcccttccacccg

SEQ ID NO: 87770 - DNA, 31 bp, Homo sapiens
  chr14:105346091-105346122
  hypo
gggcccctgtggggggcgtgagggtcctagg

SEQ ID NO: 87771 - DNA, 253 bp, Homo sapiens
  chr14:105349523-105349776
  hypo
gcacacgagatgcccacgaaggatgcagaggcaggtgggggcggagcggcccctgtggtgcagagccacgcctccttcaccatcgagtttgatgactgcagccctggcaagatgaagatcaaggaccatatcaccaagttttccctgcgccagcggcggcccccgggcaaggaggccacacctggcgagatggtgtcggctgagaccaaggtggccgactggctggtgcagaatgacccgagcctgctgcacc

SEQ ID NO: 87772 - DNA, 109 bp, Homo sapiens
  chr14:105350161-105350270
  hypo
ccccaggccacaagcacgaggacggcacgcagagtgactcagaggaccccctggccaaggcggcctcggccgctggggtgcccttggaggccagcggggagcaggtgcg

SEQ ID NO: 87773 - DNA, 30 bp, Homo sapiens
  chr14:105350682-105350712
  hypo
cctccggtgctgcccgctcccctgacaccc

SEQ ID NO: 87774 - DNA, 63 bp, Homo sapiens
  chr14:105351132-105351195
  hypo
ggggtggaggtgatgccgggggtggcgagtgagagccctcgtggggaacgggggggtggaggt

SEQ ID NO: 87775 - DNA, 30 bp, Homo sapiens
  chr14:105354204-105354234
  hypo
ccatggccgaagcacgggctgtctccagga

SEQ ID NO: 87776 - DNA, 30 bp, Homo sapiens
  chr14:105354874-105354904
  hypo
atgggcacagcaagcggggatggtcctctg

SEQ ID NO: 87777 - DNA, 72 bp, Homo sapiens
  chr14:105355230-105355302
  hypo
gcctgctgtccctacccgacgtggtgcactggtggtgtttgacccaagcatgcggctcgccatcatgccccg

SEQ ID NO: 87778 - DNA, 30 bp, Homo sapiens
  chr14:105451489-105451519
  hypo
gttaggctgcggggcgccgggagaaggggc

SEQ ID NO: 87779 - DNA, 30 bp, Homo sapiens
  chr14:105455824-105455854
  hypo
agagttctagaaaacgttccacactctgga

SEQ ID NO: 87780 - DNA, 700 bp, Homo sapiens
  chr14:105457658-105458358
  hypo
cccgggaacactgtttttagagttcttaacagccatacgcctcttggcttgtgcgcgtctcggcttgcgggtaaaggccaggcgccccgctgcgtgcctcgggccgtgcctcatgatctcctcagaaggctctcaaggtcaccttttaacaagtgcatctgttttccagtaacgaatccagaaaactctggagagcccttcagagcatacacaccacgtctacttctcagcgcctctggagcgagtcccgttgccaggagaacttctttcttgttctcggaatagatgctgcgcagaaggtaggcggtttgggttgacacagggctcctgggagtgtggttgaacttcactgtcaccagtggcccttggccgcgcccaaggggtgggtgcaggcagaggtgtgggttcaggtgggttaaagccactaggtggccccataaacgtgtcagggccactggatgactcccgaatgcttgaggcaggagccagcaaagcctagagcaggaggtggggaaaggctctggaaggaacgggcctgagcctgcagcagacaacgcattcagagatgtgcaacagtgtgtgtgcactcatgccactgccgccgccacgcacatgccaccacgcacacgccgccacgcacacgccgccacacacacgcctcacacgccgccatgcacacacctcacgccaccacatgccg

SEQ ID NO: 87781 - DNA, 30 bp, Homo sapiens
  chr14:105464944-105464974
  hypo
ctgaagtagcaggtgcgggaaagcagcttc

SEQ ID NO: 87782 - DNA, 30 bp, Homo sapiens
  chr14:105465281-105465311
  hypo
ccagccagctactgccgcttcccagctgtc

SEQ ID NO: 87783 - DNA, 67 bp, Homo sapiens
  chr14:105468471-105468538
  hypo
ttcagttgcaaggaatgagctcggggatctcttgtacgcagggaccgtaatcagtaacaatggatta

SEQ ID NO: 87784 - DNA, 261 bp, Homo sapiens
  chr14:105469654-105469915
  hypo
acacaacctgggcaaacctcacgacatgtaaaggccaggccctgcaggtgcccattcacaagcagatcaggcccacaaatcctgttggcaacggtggggacgcacctcccctaccttaacccatagcagctacagggtatcttcccgtgtaaactgttgccaagcggacactgacaattctggcatgttctggactctactatgtacctcaatttttaaaagttaaaaaggaaataaaggggccgggcgtggtggctcacg

SEQ ID NO: 87785 - DNA, 21 bp, Homo sapiens
  chr14:105470154-105470175
  hypo
gacagcaagactccatctcaa

SEQ ID NO: 87786 - DNA, 31 bp, Homo sapiens; identical to SEQ ID NO: 27991
  chr14:105477331-105477362
  hypo

SEQ ID NO: 87787 - DNA, 30 bp, Homo sapiens; identical to SEQ ID NO: 27992
  chr14:105477630-105477660
  hypo

SEQ ID NO: 87788 - DNA, 30 bp, Homo sapiens; identical to SEQ ID NO: 51771
  chr14:105486766-105486796
  hypo

SEQ ID NO: 87789 - DNA, 521 bp, Homo sapiens; identical to SEQ ID NO: 51772
  chr14:105511966-105512487
  hypo

SEQ ID NO: 87790 - DNA, 39 bp, Homo sapiens
  chr14:105516267-105516306
  hypo
ccccatgcaggtgctgcgtctgcccggctctgtgctctg

SEQ ID NO: 87791 - DNA, 551 bp, Homo sapiens
  chr14:105517522-105518073
  hypo
ttggcgggaatggtccgtggccagcacgtagataatggggtcagccacgccgttcaccgtggacaggcacagaaacaccacagaggctgtgtacagcctttcctccaagccgcacatggcgttcctgtctcctctgtagtaggaaaaggcagcggctttgacgaggagaaccaggtggtacggggcgaagcagactaggaagatgacaaccaccgcgatggccgagtgcttcaccttggccttctgggcagcgcttaagcccatgctctgcttgatgctcctgaaaatccggtggttggtgaaggcgatgatggagagagggatggcaaagccaacggtgaacctggcgtagtagtacccggcaatcctgctgtccatctgcagcatgtcaaagcaggtctccttgtcttccgtctggaacaccgggtagtgaacgatcccgacgaggatgaagatgcaggcggagatgaggatggcggtcctccggcggcggcggccccgactctccagcgcgtacaccacggccacgaagcggtcgcaggagatgcagc

SEQ ID NO: 87792 - DNA, 51 bp, Homo sapiens
  chr14:105533294-105533345
  hypo
actgggtggtctgtcacgttcaccaggcctcctctgcgcccccggtgaggg

SEQ ID NO: 87793 - DNA, 174 bp, Homo sapiens; identical to SEQ ID NO: 27996
  chr14:105538392-105538566
  hypo

SEQ ID NO: 87794 - DNA, 229 bp, Homo sapiens
  chr14:105546719-105546948
  hypo
ccatctgtataccttctgtggcgctctgtttgcgtggctgtgcaatgggatggcattgcgtttaatctacactcgcctaacgagaaattacgtggcgcgtcttttcatgttcgtatctgccgtctgtataccttctgtgactctgtttcttcagatctttagcctttttttttcctttccttttctcttcctctctttttcttttttgagacagtctcactctgtctcc

SEQ ID NO: 87795 - DNA, 31 bp, Homo sapiens
  chr14:105562583-105562614
  hypo
caggcacaggccagcacgcacggaggctggc

SEQ ID NO: 87796 - DNA, 31 bp, Homo sapiens; identical to SEQ ID NO: 27998
  chr14:105603443-105603474
  hypo

SEQ ID NO: 87797 - DNA, 30 bp, Homo sapiens
  chr14:105608459-105608489
  hypo
gccacgggccgtgccggcagccagggccac

SEQ ID NO: 87798 - DNA, 30 bp, Homo sapiens
  chr14:105609816-105609846
  hypo
acctgtggaagagccgcccgtaacaaccgt

SEQ ID NO: 87799 - DNA, 46 bp, Homo sapiens
  chr14:105610436-105610482
  hypo
ggtgtgtggccccattcgctgacacctgctccgtgatggccatccc

SEQ ID NO: 87800 - DNA, 85 bp, Homo sapiens
  chr14:105612251-105612336
  hypo
tgggcgctcagggcctcgggctggccggccagcagacaaggcttccatccgcaccacacctgggcaggcacgcacaggagggtca

SEQ ID NO: 87801 - DNA, 64 bp, Homo sapiens
  chr14:105612738-105612802
  hypo
ggccatccaggcagcggcagctgttgcagtcttccacccaggagcttccgtgtgggaacggagt

SEQ ID NO: 87802 - DNA, 30 bp, Homo sapiens
  chr14:105613087-105613117
  hypo
tgcagtgaggccaacgcccaccgcaggacc

SEQ ID NO: 87803 - DNA, 30 bp, Homo sapiens; identical to SEQ ID NO: 28001
  chr14:105613768-105613798
  hypo

SEQ ID NO: 87804 - DNA, 30 bp, Homo sapiens
  chr14:105614549-105614579
  hypo
atcgcactggaactcgcctgttggcacatg

SEQ ID NO: 87805 - DNA, 30 bp, Homo sapiens; identical to SEQ ID NO: 28002
  chr14:105615444-105615474
  hypo

SEQ ID NO: 87806 - DNA, 123 bp, Homo sapiens
  chr14:105617065-105617188
  hypo
ggcctccgaagccccgtgggcacacacactggtacccgttcaccaggtcctgggcgggccagccaggtgagcgtcccgcaggcaccctgacggccccgcagcacccacgccacacaccctcct

SEQ ID NO: 87807 - DNA, 31 bp, Homo sapiens
  chr14:105625471-105625502
  hypo
ccccgccccacacctccgactgtccctcaaa

SEQ ID NO: 87808 - DNA, 58 bp, Homo sapiens
  chr14:105639400-105639458
  hypo
gagacaccaaagatgacgccgagggtcttggggatgtccgggtcgtctgcaaaggcct

SEQ ID NO: 87809 - DNA, 156 bp, Homo sapiens; identical to SEQ ID NO: 51773
  chr14:105647608-105647764
  hypo

SEQ ID NO: 87810 - DNA, 669 bp, Homo sapiens
  chr14:105687720-105688389
  hypo
cctgtgacctgaaggcggtcccagtgagggtgacgagactcactgcattctggcgtcggcacacacccaattcttcacgccaggaccactgacgcccacacagccccattggggggactggtggtgccaccacccaagcccaccgcccgagaccaccacacctcccgacagaggatggcagcatccggctctccccatgagaggcacacgcctgaaagatctcccgatgacctcagcgtcccccagggccccatcagaactcactggggtcgctgctctgagaggagatgcattcgcggatggagtctgagatgcccaggctggctgcagtggggagggggtccagcagggaccccagggccggaggtctgccgccccactcggggcttcctgctgcttccgagctgccgggggcaccaccaaggagctcccggtataagtctttgttcaggtggctggccgcggcttccagctcctcgtcctctgtgtcctcctcgccacacaagctggacgcggtgtcctcggtggagcctaggtgtacacaatccacctgttaaccaggcagagggccagggtgcccgcttttgtgacaaaaaacaatgctaccaagctgccaggtaacccatagaacggctgtcagtgcacggtgcctggcggtcaggtgccaaa

SEQ ID NO: 87811 - DNA, 99 bp, Homo sapiens; identical to SEQ ID NO: 28005
  chr14:105688873-105688972
  hypo

SEQ ID NO: 87812 - DNA, 443 bp, Homo sapiens; identical to SEQ ID NO: 28006
  chr14:105689522-105689965
  hypo

SEQ ID NO: 87813 - DNA, 180 bp, Homo sapiens
  chr14:105690179-105690359
  hypo
agactgagaaaagaactttcacgggaggaatgtgactcctcctccttgagctacgtgttcatttcttgaaaccacttgctgttgccacaagtagctctaaactaacccaataatgccgcacccaatagtttaacgatgtacagccaatcacgaatgaacgttactattgtaagccaatga

SEQ ID NO: 87814 - DNA, 31 bp, Homo sapiens; identical to SEQ ID NO: 28007
  chr14:105691546-105691577
  hypo

SEQ ID NO: 87815 - DNA, 30 bp, Homo sapiens
  chr14:105695296-105695326
  hypo
ggcaacatctgtggcggcccaggacaacac

SEQ ID NO: 87816 - DNA, 184 bp, Homo sapiens; identical to SEQ ID NO: 51776
  chr14:105714257-105714441
  hypo

SEQ ID NO: 87817 - DNA, 181 bp, Homo sapiens
  chr14:105717869-105718050
  hypo
aaacctgtatgacccccgaaaagagggatggcccctcttggcacctgggagagggcatgggccgagtgtatagcctcagccggtgcccctctgctgctgcagcccgtgttgctcagtcctgttggtgacccagccccacctggtgcttctctacccaaaggacatacgctcctagatgcaa

SEQ ID NO: 87818 - DNA, 425 bp, Homo sapiens
  chr14:105728095-105728520
  hypo
gggccccaccctgagcggacaccagcattcccggccccatgggactggagagggggactgcggcgcccacacggcgtgaggaccaaggagcgaaacccacaccttctggagaatgatgcccagcactgcaccggcccacggctcactgcccctacccagtgccactccccttctgcaggccccccctgctctgagtgctcctcaccggcagccaacaccacctggcacgggaacacacggcccggccgaagctccgtgtagagcagtagtgcccagccccaacccaccaagggcaaggccctggcagcactcagcatacagcactcagcggccgaccaagcacccacacaggagcccggcaggcagactgggcatcctcaggccccgcacatgcctggacggggctatgacggatcctagcttgg

SEQ ID NO: 87819 - DNA, 31 bp, Homo sapiens; identical to SEQ ID NO: 28009
  chr14:105729868-105729899
  hypo

SEQ ID NO: 87820 - DNA, 30 bp, Homo sapiens
  chr14:105737833-105737863
  hypo
caccttcagaggggcgcagctcggaaaagg

SEQ ID NO: 87821 - DNA, 30 bp, Homo sapiens
  chr14:105738145-105738175
  hypo
gccaagctgcacaccgctgagggtcggcag

SEQ ID NO: 87822 - DNA, 30 bp, Homo sapiens; identical to SEQ ID NO: 28010
  chr14:105739109-105739139
  hypo

SEQ ID NO: 87823 - DNA, 31 bp, Homo sapiens
  chr14:105739465-105739496
  hypo
ctctgagtggcgtgtgcggtgtggctgaatg

SEQ ID NO: 87824 - DNA, 30 bp, Homo sapiens; identical to SEQ ID NO: 28011
  chr14:105778026-105778056
  hypo

SEQ ID NO: 87825 - DNA, 181 bp, Homo sapiens; identical to SEQ ID NO: 51779
  chr14:105781804-105781985
  hypo

SEQ ID NO: 87826 - DNA, 30 bp, Homo sapiens; identical to SEQ ID NO: 28013
  chr14:105792838-105792868
  hypo

SEQ ID NO: 87827 - DNA, 30 bp, Homo sapiens; identical to SEQ ID NO: 28014
  chr14:105793864-105793894
  hypo

SEQ ID NO: 87828 - DNA, 30 bp, Homo sapiens; identical to SEQ ID NO: 28015
  chr14:105794170-105794200
  hypo

SEQ ID NO: 87829 - DNA, 95 bp, Homo sapiens; identical to SEQ ID NO: 28016
  chr14:105796584-105796679
  hypo

SEQ ID NO: 87830 - DNA, 30 bp, Homo sapiens
  chr14:105801691-105801721
  hypo
tgtgacgctgtggccggcgcctggcgtggc

SEQ ID NO: 87831 - DNA, 9 bp, Homo sapiens
  chr14:105802372-105802381
  hypo
agcagggca

SEQ ID NO: 87832 - DNA, 30 bp, Homo sapiens; identical to SEQ ID NO: 10011
  chr14:106326603-106326633
  hypo

SEQ ID NO: 87833 - DNA, 30 bp, Homo sapiens; identical to SEQ ID NO: 10012
  chr14:106326872-106326902
  hypo

SEQ ID NO: 87834 - DNA, 30 bp, Homo sapiens
  chr14:106929435-106929465
  hypo
cagacgcaccgcggcgtcttcatccctgtg

SEQ ID NO: 87835 - DNA, 203 bp, Homo sapiens; identical to SEQ ID NO: 51782
  chr15:20478122-20478325
  hypo

SEQ ID NO: 87836 - DNA, 31 bp, Homo sapiens; identical to SEQ ID NO: 28020
  chr15:22547260-22547291
  hypo

SEQ ID NO: 87837 - DNA, 85 bp, Homo sapiens
  chr15:22803422-22803507
  hypo
gggtttcgggccaggcgcagtgactcacgactgcaattccagcagcccgggaggccgaggccggcggatcacccgaggtgaggag

SEQ ID NO: 87838 - DNA, 27 bp, Homo sapiens
  chr15:22822347-22822374
  hypo
gtaaagttccaggatacggccgggcgc

SEQ ID NO: 87839 - DNA, 180 bp, Homo sapiens
  chr15:22877016-22877196
  hypo
aagctagaaacatcctgatgacggtgaagaggtagatggatcaacactgaagtatatgcacgcagtggaatgcagttcagctgtgaaaacacagctcatccacataacgacataagagaattccaggaactttatgtcgaaaaaaaagccagacttaaaaggatccgttattattccatt

SEQ ID NO: 87840 - DNA, 290 bp, Homo sapiens; identical to SEQ ID NO: 51784
  chr15:22892152-22892442
  hypo

SEQ ID NO: 87841 - DNA, 30 bp, Homo sapiens
  chr15:22913648-22913678
  hypo
actcttctcctgagcgtgggagcgccccct

SEQ ID NO: 87842 - DNA, 61 bp, Homo sapiens
  chr15:22920759-22920820
  hypo
accaccactgtccagctagagcgtttcatctttccaagccgaaactctgtatccactaaac

SEQ ID NO: 87843 - DNA, 76 bp, Homo sapiens
  chr15:22927945-22928021
  hypo
ggtggtcattgtggcccccagcgccgcacctcagtgtcactagcttctggcagccgtctcttggcacacaggccac

SEQ ID NO: 87844 - DNA, 39 bp, Homo sapiens; identical to SEQ ID NO: 28022
  chr15:22929894-22929933
  hypo

SEQ ID NO: 87845 - DNA, 30 bp, Homo sapiens
  chr15:22930298-22930328
  hypo
cggtcactcgccagcgggggtccccagcac

SEQ ID NO: 87846 - DNA, 30 bp, Homo sapiens
  chr15:22940779-22940809
  hypo
atgatccagatccgcgaggaccacatgcgc

SEQ ID NO: 87847 - DNA, 87 bp, Homo sapiens
  chr15:22945062-22945149
  hypo
ggaggcccagaagacggacgcggagtaccgcaagctcttcgacctggcgctgcagggcctgcagctgttgtcgcagtggagcgcgca

SEQ ID NO: 87848 - DNA, 30 bp, Homo sapiens; identical to SEQ ID NO: 28024
  chr15:22956997-22957027
  hypo

SEQ ID NO: 87849 - DNA, 143 bp, Homo sapiens; identical to SEQ ID NO: 28025
  chr15:22966141-22966284
  hypo

SEQ ID NO: 87850 - DNA, 30 bp, Homo sapiens; identical to SEQ ID NO: 28026
  chr15:22968265-22968295
  hypo

SEQ ID NO: 87851 - DNA, 30 bp, Homo sapiens; identical to SEQ ID NO: 28027
  chr15:22968628-22968658
  hypo

SEQ ID NO: 87852 - DNA, 267 bp, Homo sapiens
  chr15:22977063-22977330
  hypo
gggcgtgccctaatacgattatagtcaattggaggaaaggatgcttgttggaaggatgtgcagggcaaagtctgggaggtttccatgtgcaaagctttccctgtcctcagggacgcatcaccctccgagctctgaggtgggacgctcctcagggtactgccagccaggggcgctcacttgggctgtggtgttcagtttttattggggcttcgttgcatgggcacagttgactgaatcactggccacgtagctgagctcagcctccag

SEQ ID NO: 87853 - DNA, 104 bp, Homo sapiens; identical to SEQ ID NO: 28028
  chr15:22979737-22979841
  hypo

SEQ ID NO: 87854 - DNA, 30 bp, Homo sapiens
  chr15:23044965-23044995
  hypo
acaacttcagaacacggaagctaatccatg

SEQ ID NO: 87855 - DNA, 36 bp, Homo sapiens; identical to SEQ ID NO: 28029
  chr15:23077085-23077121
  hypo

SEQ ID NO: 87856 - DNA, 24 bp, Homo sapiens
  chr15:23084568-23084592
  hypo
tgagatggagtcttgctctgccgc

SEQ ID NO: 87857 - DNA, 384 bp, Homo sapiens
  chr15:23084831-23085215
  hypo
agccaccgcgcccggccgcaagatgttcttctactccggtttgtgtggtgttttcctcatgcttacgctagggccgtggattggggaggtgaggtgctttctcaggccatcctatttataaggtcacgcgcgttgaccatctcacccagtcctggggcctgtcacacggacagatgctccctgaagtgtggctgcggtgtgtgtgtatctgtgtgccttagagacagacacatctgcatccttggaaaatcatacttggttttatttaattctatttaaattgtatgggagaccactatgctttcactttaaagctaaattccttaaattatccatgattttatattttcattcgagactgtcgggccctttatctcttctctg

SEQ ID NO: 87858 - DNA, 30 bp, Homo sapiens
  chr15:23087571-23087601
  hypo
tgtttttttgagacagagtctcgctctgtc

SEQ ID NO: 87859 - DNA, 28 bp, Homo sapiens
  chr15:23217789-23217817
  hypo
caggctgagccaccgcgccctgccctgg

SEQ ID NO: 87860 - DNA, 21 bp, Homo sapiens
  chr15:23272990-23273011
  hypo
tggtgtcgggtcaggcgcagt

SEQ ID NO: 87861 - DNA, 31 bp, Homo sapiens
  chr15:23666806-23666837
  hypo
tgatcgcacatccatccgtcaaaattttggg

SEQ ID NO: 87862 - DNA, 30 bp, Homo sapiens
  chr15:23891765-23891795
  hypo
catcctggcgaggtcgcctgccagcccggg

SEQ ID NO: 87863 - DNA, 30 bp, Homo sapiens; identical to SEQ ID NO: 28033
  chr15:25779326-25779356
  hypo

SEQ ID NO: 87864 - DNA, 142 bp, Homo sapiens
  chr15:25863537-25863679
  hypo
acacagccacactcattcacacggggaccatggagacatggggatctgctttacctgcacggctttgggatgtgggagagaacgaagtacctggggaaacccatacagacagggggagaacgtgcaaactccacacagtggc

SEQ ID NO: 87865 - DNA, 31 bp, Homo sapiens
  chr15:25896683-25896714
  hypo
tgtatgtcacatataccgtatatcatatata

SEQ ID NO: 87866 - DNA, 36 bp, Homo sapiens
  chr15:25940036-25940072
  hypo
gaccgacagcagaggacggagcggcactgcttggca

SEQ ID NO: 87867 - DNA, 302 bp, Homo sapiens; identical to SEQ ID NO: 28034
  chr15:25963360-25963662
  hypo

SEQ ID NO: 87868 - DNA, 30 bp, Homo sapiens; identical to SEQ ID NO: 28035
  chr15:25971133-25971163
  hypo

SEQ ID NO: 87869 - DNA, 245 bp, Homo sapiens; identical to SEQ ID NO: 28036
  chr15:26026130-26026375
  hypo

SEQ ID NO: 87870 - DNA, 30 bp, Homo sapiens
  chr15:26234754-26234784
  hypo
gcagccaggccaggcggcagccgcgcccgg

SEQ ID NO: 87871 - DNA, 30 bp, Homo sapiens; identical to SEQ ID NO: 28037
  chr15:26328926-26328956
  hypo

SEQ ID NO: 87872 - DNA, 405 bp, Homo sapiens; identical to SEQ ID NO: 28038
  chr15:27128172-27128577
  hypo

SEQ ID NO: 87873 - DNA, 105 bp, Homo sapiens
  chr15:27494274-27494379
  hypo
tggactcaggtgatgcggctgcgggaggtggtgagcgatgctggaagctgcgtcccggccacccagataccctgggagtgcgtggcgctccggggaggctgctcc

SEQ ID NO: 87874 - DNA, 30 bp, Homo sapiens; identical to SEQ ID NO: 28039
  chr15:27597394-27597424
  hypo

SEQ ID NO: 87875 - DNA, 30 bp, Homo sapiens
  chr15:27988992-27989022
  hypo
agccagcttccctcccgcagccaggtcctg

SEQ ID NO: 87876 - DNA, 30 bp, Homo sapiens
  chr15:28272133-28272163
  hypo
cgatgggcgctcagcgacttcaggtcggat

SEQ ID NO: 87877 - DNA, 30 bp, Homo sapiens
  chr15:28356552-28356582
  hypo
gaaagaaaaaaaatcgattgcacccacaag

SEQ ID NO: 87878 - DNA, 31 bp, Homo sapiens; identical to SEQ ID NO: 28040
  chr15:28356880-28356911
  hypo

SEQ ID NO: 87879 - DNA, 30 bp, Homo sapiens
  chr15:28358373-28358403
  hypo
ttataggtggccaccgacttgagaaggtgc

SEQ ID NO: 87880 - DNA, 31 bp, Homo sapiens; identical to SEQ ID NO: 28041
  chr15:28362499-28362530
  hypo

SEQ ID NO: 87881 - DNA, 30 bp, Homo sapiens
  chr15:28363845-28363875
  hypo
tggcgggttggaggcgcctgtgcagccttc

SEQ ID NO: 87882 - DNA, 31 bp, Homo sapiens; identical to SEQ ID NO: 28042
  chr15:28365195-28365226
  hypo

SEQ ID NO: 87883 - DNA, 30 bp, Homo sapiens
  chr15:28376711-28376741
  hypo
tcgcctgcagccaccgggcttgagtggagc

SEQ ID NO: 87884 - DNA, 93 bp, Homo sapiens
  chr15:28377831-28377924
  hypo
gtgccccagccggccgtagcggcctttgccccatgtgtagaggtccccggctgctgtgacacaggcgctgtgggctccgccagcagcaacatc

SEQ ID NO: 87885 - DNA, 30 bp, Homo sapiens
  chr15:28382604-28382634
  hypo
gtgctgacttaccgtcgctatgtcacgttt

SEQ ID NO: 87886 - DNA, 322 bp, Homo sapiens
  chr15:28389776-28390098
  hypo
agccagtcatctaaccttgatcgccataagccccttccttaccagcagctggcatgatgggatagacggtgaagcgccagccccagccattcacagacccatcgctgatgaacttccactttaactcatcccctgggatgcgcagctcgctggaccagtcggaccactctcggcctgcgggaggaaagcgcaccccggggttagcttcactccatcatccaatcaacacaaaccttcttagacgcaaagcagaatgatttccgtcacgtgtgaagagcaagttcctccaatccaagctctcccaagccgaagtgcacagtga

SEQ ID NO: 87887 - DNA, 30 bp, Homo sapiens
  chr15:28422179-28422209
  hypo
ggatgtgagggctgcgctgtgcgagctccc

SEQ ID NO: 87888 - DNA, 31 bp, Homo sapiens
  chr15:28427419-28427450
  hypo
ataatgtcttttagttcgtgtaaagaaacaa

SEQ ID NO: 87889 - DNA, 424 bp, Homo sapiens
  chr15:28516950-28517374
  hypo
gcccagggccccgcacgcctgctcctccctcagcttgttgtccacacctgttaaggcgggagctggtaccaaacagagtgacagctcaggtgacgtgccctgcacagagcccagtacataggaaggaccaacaaagcaggccgctattttcgttgttcttttctggtatttatttaaaagtgaatgtttcaagcttggttttgtgctgacaaggaagtcagtgctcactgatccgagtcttctccacaaacaagtgacctcccacacctgtctcatctgactcgctgctattaccaccaaacacacacacgccagagaaaaacactgccgttgacatgcatgctagtcttgctttaaaagtaactagactcgagtgccacctaaacacaaagttccatcatgacactcacgtgcatgtcgccct

SEQ ID NO: 87890 - DNA, 30 bp, Homo sapiens; identical to SEQ ID NO: 28045
  chr15:28519576-28519606
  hypo

SEQ ID NO: 87891 - DNA, 30 bp, Homo sapiens
  chr15:28520144-28520174
  hypo
ccgggaactgcagacgacacacacggaaca

SEQ ID NO: 87892 - DNA, 87 bp, Homo sapiens; identical to SEQ ID NO: 28046
  chr15:28900533-28900620
  hypo

SEQ ID NO: 87893 - DNA, 34 bp, Homo sapiens
  chr15:28938355-28938389
  hypo
ctttgtagggctgagcgcgggggatcacttgaga

SEQ ID NO: 87894 - DNA, 121 bp, Homo sapiens
  chr15:29029576-29029697
  hypo
tatccgaccgcctcggcctccctgggtgttaggatcgcaggcgttaaccaccacgcccagcccaatttttaatcagacaggaatagatcggcctggtgtcatggctcgcgcttgtgatccc

SEQ ID NO: 87895 - DNA, 23 bp, Homo sapiens
  chr15:29088391-29088414
  hypo
ccgcatctgctcctcctgctcct

SEQ ID NO: 87896 - DNA, 45 bp, Homo sapiens; identical to SEQ ID NO: 28047
  chr15:29101262-29101307
  hypo

SEQ ID NO: 87897 - DNA, 33 bp, Homo sapiens; identical to SEQ ID NO: 28048
  chr15:29101366-29101399
  hypo

SEQ ID NO: 87898 - DNA, 30 bp, Homo sapiens
  chr15:29101710-29101740
  hypo
gtgaagagatgtctccgggtgctgcctgcg

SEQ ID NO: 87899 - DNA, 31 bp, Homo sapiens; identical to SEQ ID NO: 10032
  chr15:29107370-29107401
  hypo

SEQ ID NO: 87900 - DNA, 87 bp, Homo sapiens; identical to SEQ ID NO: 28050
  chr15:29111212-29111299
  hypo

SEQ ID NO: 87901 - DNA, 44 bp, Homo sapiens
  chr15:29114836-29114880
  hypo
atgtggggactctttgagaggccgcacttattcattcccaagat

SEQ ID NO: 87902 - DNA, 387 bp, Homo sapiens; identical to SEQ ID NO: 51816
  chr15:29130660-29131047
  hypo

SEQ ID NO: 87903 - DNA, 98 bp, Homo sapiens; identical to SEQ ID NO: 51817
  chr15:29131532-29131630
  hypo

SEQ ID NO: 87904 - DNA, 156 bp, Homo sapiens
  chr15:29133628-29133784
  hypo
tcagctcctctccggcgctcctggctgtcctctgccacgcatacctgccccggtgactcaacaggtgtgggcctcaggtgacaccatggtccgaagtcgtggagaaacctttactgtccaggggaggagaggactggcggtcggtggggatcgaga

SEQ ID NO: 87905 - DNA, 247 bp, Homo sapiens
  chr15:29140039-29140286
  hypo
agtaagaacacaggagggtggcgggggcaggtgtctggccaaggcagctcctgcgtcattggggggctccagagcccgctccctatgttctgtaggaggcggctgctgctgccaagtcccagccttgctagtgaggacgtttaattttaccctttagagatttacaggatttctagattaacttgcccctgtttttctaaaagaacgacaaaatccatgacaaaccgttcatcacattattaactgg

SEQ ID NO: 87906 - DNA, 90 bp, Homo sapiens
  chr15:29144521-29144611
  hypo
cccaccaggatagggccatgtcgctgacttcagaggagagagactctttgtctgacgactgttgacctcgtaaccactcagcttcatggg

SEQ ID NO: 87907 - DNA, 93 bp, Homo sapiens
  chr15:29146200-29146293
  hypo
gtaccaagcccagcactgttccggtggtcatttccagggatgtgcgtgaagcaagctggtgtcatgtgatgcggtcactctagaacctcagaa

SEQ ID NO: 87908 - DNA, 67 bp, Homo sapiens
  chr15:29223573-29223640
  hypo
ggttccagagctaactaaagccgctgagactcagagggagtctcacgccactgcctcctgtgccccc

SEQ ID NO: 87909 - DNA, 243 bp, Homo sapiens; identical to SEQ ID NO: 28052
  chr15:29236504-29236747
  hypo

SEQ ID NO: 87910 - DNA, 39 bp, Homo sapiens; identical to SEQ ID NO: 28053
  chr15:29302742-29302781
  hypo

SEQ ID NO: 87911 - DNA, 229 bp, Homo sapiens
  chr15:29345749-29345978
  hypo
agtgagaagtcaggaatgagccggtaggttcctggggagaggcgtgtgtcctcgtgagttgccggtgcctcccttgactgcttttcccggagctctgtgtgccctcgttctccttggtgtggatgcgtgttgttctgatgatgagttagcgggggtggggatggcgcactgtttgaacagatgtgccctcacatggctgcgggaggacgtggtgggaggtgctgtggtg

SEQ ID NO: 87912 - DNA, 489 bp, Homo sapiens; identical to SEQ ID NO: 28054
  chr15:29346369-29346858
  hypo

SEQ ID NO: 87913 - DNA, 30 bp, Homo sapiens
  chr15:29385349-29385379
  hypo
agctgctatcagaacggaacccttccaaaa

SEQ ID NO: 87914 - DNA, 185 bp, Homo sapiens
  chr15:29389586-29389771
  hypo
ggtgcctcttacagactgcctcgagaactcacacttagctagatgatgcggccggtggcgtgcaggtagatttctgatggccagtagcatttccttctacgtggactctgggtaattgttaaaattgccgagccttccttcgagttattactttttacattgacggataaaattgtatgtatttg

SEQ ID NO: 87915 - DNA, 157 bp, Homo sapiens; identical to SEQ ID NO: 28055
  chr15:29398811-29398968
  hypo

SEQ ID NO: 87916 - DNA, 43 bp, Homo sapiens
  chr15:29403247-29403290
  hypo
ttgagggcagcagcagacttgcggggcctgcagtgaggaagga

SEQ ID NO: 87917 - DNA, 31 bp, Homo sapiens; identical to SEQ ID NO: 28056
  chr15:29404344-29404375
  hypo

SEQ ID NO: 87918 - DNA, 30 bp, Homo sapiens
  chr15:29409339-29409369
  hypo
accccagcctggccacgcagccaggacacc

SEQ ID NO: 87919 - DNA, 30 bp, Homo sapiens
  chr15:29409660-29409690
  hypo
tgaagctgtgcggagcgaactggcgcctcc

SEQ ID NO: 87920 - DNA, 526 bp, Homo sapiens; identical to SEQ ID NO: 28057
  chr15:29410105-29410631
  hypo

SEQ ID NO: 87921 - DNA, 218 bp, Homo sapiens
  chr15:29411053-29411271
  hypo
agccaggtagcaagcacgggctttgttcagaggcggtggcctggggtccagctgggttaggctgtgggtcttggatgggcaggagccctcctctctggcctgcccacagcagcgtgagctccttgctgtgggcactgaccaccttcacggcccaggattcttggggaactgcagagtaaggagaagacttactctcacctagccgcccagagggtgtg

SEQ ID NO: 87922 - DNA, 30 bp, Homo sapiens
  chr15:29413476-29413506
  hypo
gtaggcctctgccccggctgcatgaggaga

SEQ ID NO: 87923 - DNA, 386 bp, Homo sapiens
  chr15:29415481-29415867
  hypo
ttctgccaagaacatctgtggcgccaggcgttggtgtccacggtcagaaatgtggctccttcatacctggtccagaacgtcagcgccgaagacggcctcctcctcgaggcgctcctcgttggtgacagccaagcgcatggcacccaccatgtgctgtgcctcggtggggagggcacagtgtgagtgttccaaaaacttggccaccaaaaccctggcatccgcataggccttgctgtccactaaagagcgtggccgctctttggaggtcgctgggaagggctctggtgttggccgttggtcagttttccaggtatctgggtcccccgctggtgaaagctgggcccgacaggcagccgtggcagagcgagacatggaagctaaaaatc

SEQ ID NO: 87924 - DNA, 95 bp, Homo sapiens; identical to SEQ ID NO: 28059
  chr15:29417873-29417968
  hypo

SEQ ID NO: 87925 - DNA, 31 bp, Homo sapiens; identical to SEQ ID NO: 28060
  chr15:29418631-29418662
  hypo

SEQ ID NO: 87926 - DNA, 61 bp, Homo sapiens; identical to SEQ ID NO: 28061
  chr15:29428199-29428260
  hypo

SEQ ID NO: 87927 - DNA, 105 bp, Homo sapiens; identical to SEQ ID NO: 28062
  chr15:29448968-29449073
  hypo

SEQ ID NO: 87928 - DNA, 66 bp, Homo sapiens
  chr15:29487546-29487612
  hypo
atcacaagcactcaaggtcaacgctttcctcctctccccagatccgaggtggctctctgcagtttc

SEQ ID NO: 87929 - DNA, 30 bp, Homo sapiens; identical to SEQ ID NO: 28063
  chr15:29637535-29637565
  hypo

SEQ ID NO: 87930 - DNA, 31 bp, Homo sapiens
  chr15:29650110-29650141
  hypo
ctgggactggagatgccgtggcacactcacc

SEQ ID NO: 87931 - DNA, 22 bp, Homo sapiens
  chr15:29766772-29766794
  hypo
tttggagacagggtctcactcc

SEQ ID NO: 87932 - DNA, 18 bp, Homo sapiens
  chr15:29770525-29770543
  hypo
cagcctaacaatatattt

SEQ ID NO: 87933 - DNA, 19 bp, Homo sapiens
  chr15:29893412-29893431
  hypo
gatacgttctaatgcttgt

SEQ ID NO: 87934 - DNA, 31 bp, Homo sapiens
  chr15:29998410-29998441
  hypo
acaggcgtgagccaccgcgcctggcgagaat

SEQ ID NO: 87935 - DNA, 73 bp, Homo sapiens
  chr15:30022824-30022897
  hypo
gaagaagaggcgagaacgacccccggaccgaccaaagcccgcgtgccgctgcatcccacgtccagcacctacg

SEQ ID NO: 87936 - DNA, 38 bp, Homo sapiens
  chr15:30024946-30024984
  hypo
tctccagaagtcagcacggtctccgcctgctgtttttg

SEQ ID NO: 87937 - DNA, 658 bp, Homo sapiens; identical to SEQ ID NO: 51826
  chr15:30113644-30114302
  hypo

SEQ ID NO: 87938 - DNA, 857 bp, Homo sapiens; identical to SEQ ID NO: 51827
  chr15:30114349-30115206
  hypo

SEQ ID NO: 87939 - DNA, 43 bp, Homo sapiens
  chr15:30333820-30333863
  hypo
gatttcatgcgtgagccaccgcgcccagccaagatggattttt

SEQ ID NO: 87940 - DNA, 31 bp, Homo sapiens
  chr15:30400068-30400099
  hypo
aattcattctgaaatgcgatagatgttgaag

SEQ ID NO: 87941 - DNA, 26 bp, Homo sapiens
  chr15:30779249-30779275
  hypo
agaattgtctaaaatccggccgggcg

SEQ ID NO: 87942 - DNA, 31 bp, Homo sapiens; identical to SEQ ID NO: 28066
  chr15:31115691-31115722
  hypo

SEQ ID NO: 87943 - DNA, 30 bp, Homo sapiens
  chr15:31122522-31122552
  hypo
cgtgtggccgttctcggtggtgttcttggt

SEQ ID NO: 87944 - DNA, 121 bp, Homo sapiens
  chr15:31188900-31189021
  hypo
ctcctaggctccagtgatcaccgcgctctgtcgtccaaagtcctgggatcacaagcctgagcctccatgccaggccgatctattcctttctgattaataaattacgccgggcgcggtggct

SEQ ID NO: 87945 - DNA, 56 bp, Homo sapiens; identical to SEQ ID NO: 28068
  chr15:31194967-31195023
  hypo

SEQ ID NO: 87946 - DNA, 30 bp, Homo sapiens
  chr15:31217392-31217422
  hypo
ctgtatcagcgagccgtgcgcctgcgagag

SEQ ID NO: 87947 - DNA, 438 bp, Homo sapiens
  chr15:31220890-31221328
  hypo
ccttctgcacacatccgtggctcacgcccacctgggcaccgtgtgtccacagccagcagaaaccatctctgttacggtcctttgggtcatccacaggtcaagatgataacttattttaaaaatctgagtaatagaatttaagatgtaagtatgtgaagttttaaactttaatttagcctccaccttacatttagacctttcgtataaagtaccatcagcatcagccctcccgagcacctgccgtgtcgcaggcactgtgccaaggagctcacagacatgggcacatctgcctgttcagaggtccacccagctaagcgaaaagctgtttttgcaaattattactctaaaaaacaagtttaataaattgcttttatatcaattaacttttacttatcttttgagagaaagaatgtatcggttggccggtttccaagtttt

SEQ ID NO: 87948 - DNA, 91 bp, Homo sapiens
  chr15:31239317-31239408
  hypo
cacagggttgcttaccgtgctttgcttcactcgctggtgaggggagttgaacaggaaggtgccaaacagtgagatccgggtgctgtcatac

SEQ ID NO: 87949 - DNA, 35 bp, Homo sapiens; identical to SEQ ID NO: 28069
  chr15:31289999-31290034
  hypo

SEQ ID NO: 87950 - DNA, 34 bp, Homo sapiens; identical to SEQ ID NO: 28070
  chr15:31290273-31290307
  hypo

SEQ ID NO: 87951 - DNA, 30 bp, Homo sapiens
  chr15:31332393-31332423
  hypo
tgagcaatgaagtcccggtgtttggctgcc

SEQ ID NO: 87952 - DNA, 30 bp, Homo sapiens; identical to SEQ ID NO: 28071
  chr15:31358308-31358338
  hypo

SEQ ID NO: 87953 - DNA, 158 bp, Homo sapiens; identical to SEQ ID NO: 28072
  chr15:31395007-31395165
  hypo

SEQ ID NO: 87954 - DNA, 30 bp, Homo sapiens
  chr15:31452884-31452914
  hypo
aactgagaccacaggcgttggacaccgtgg

SEQ ID NO: 87955 - DNA, 164 bp, Homo sapiens
  chr15:31453186-31453350
  hypo
ccctgctgactccctcgggtggccaggccagtggcacaggggctgccctccctgggtgggcaggagcggagccacacactcggcggcagccccacactcggcggcagccccacgcactgggcgagggggccgagatcctggggcgaggccggccggaggctggt

SEQ ID NO: 87956 - DNA, 162 bp, Homo sapiens; identical to SEQ ID NO: 51830
  chr15:31508792-31508954
  hypo

SEQ ID NO: 87957 - DNA, 45 bp, Homo sapiens
  chr15:31512244-31512289
  hypo
tagcagaagatgagtagcaggcgcgggagcatgaccacctgagct

SEQ ID NO: 87958 - DNA, 241 bp, Homo sapiens; identical to SEQ ID NO: 28073
  chr15:31533431-31533672
  hypo

SEQ ID NO: 87959 - DNA, 279 bp, Homo sapiens
  chr15:31561302-31561581
  hypo
attctcaaggggcagcgaaagccttcacagttgcaagctttctgaagtggctgctcaacgagagggttcaggggcctatccacctgtcaccaggttgtggctgtgacaaacagtaaattctcctggcagcactgcgctctctcgggcaggcccctgagggtgacttggggcatcatcctagggacacgcctgttaacagctatgctggtatttttataagtctcttagtgatgggtggggggtgcagagggacaaagtcatttgcgctgagagtctgca

SEQ ID NO: 87960 - DNA, 166 bp, Homo sapiens
  chr15:31564342-31564508
  hypo
cagcctttttgtctttggcttcgaaaacctcaatcgtaaaatggagctaataaaaacaccaagcccagattggaggacgaaatggcatatggccctggtggggactccaccgggggggaggcatggcccaaaaggcttgggttgcgtcaatgattcccattctgtt

SEQ ID NO: 87961 - DNA, 20 bp, Homo sapiens
  chr15:31591814-31591834
  hypo
ccagccgcattcttttcatg

SEQ ID NO: 87962 - DNA, 30 bp, Homo sapiens
  chr15:31597337-31597367
  hypo
cagagacacctgcccggagggagccctgct

SEQ ID NO: 87963 - DNA, 30 bp, Homo sapiens
  chr15:31611588-31611618
  hypo
gaagtgaactgagtcgcaactgtggagagg

SEQ ID NO: 87964 - DNA, 15 bp, Homo sapiens
  chr15:31620728-31620743
  hypo
aaaggaatgccctgg

SEQ ID NO: 87965 - DNA, 173 bp, Homo sapiens; identical to SEQ ID NO: 10044
  chr15:31620800-31620973
  hypo

SEQ ID NO: 87966 - DNA, 30 bp, Homo sapiens
  chr15:31665235-31665265
  hypo
cagccctggctgagcgtagcactgcaccgt

SEQ ID NO: 87967 - DNA, 210 bp, Homo sapiens
  chr15:31668807-31669017
  hypo
tgtctgagacacattccggagacctttgtaccagaacttggatgcatagtccaccttactactgatacacgcctgagcaccctttagggcgaggcgccgcctcctgcctgctgtcctgtccctcagcatcagaagagttgaattcagcaggagacgggagcccggtgtccatgagggaagaggggtcgcgcttggtttctactgaccccc

SEQ ID NO: 87968 - DNA, 30 bp, Homo sapiens; identical to SEQ ID NO: 28076
  chr15:31695412-31695442
  hypo

SEQ ID NO: 87969 - DNA, 116 bp, Homo sapiens
  chr15:31731208-31731324
  hypo
caatatgtattcagtaggaagcggtaagatactctctcgatgccggacaccagccacgtgatcacgatggtaaacgaccttataggggactgtgcggccagacaatttgcccagct

SEQ ID NO: 87970 - DNA, 202 bp, Homo sapiens; identical to SEQ ID NO: 51835
  chr15:31774932-31775134
  hypo

SEQ ID NO: 87971 - DNA, 124 bp, Homo sapiens; identical to SEQ ID NO: 51836
  chr15:31775349-31775473
  hypo

SEQ ID NO: 87972 - DNA, 154 bp, Homo sapiens; identical to SEQ ID NO: 51837
  chr15:31775483-31775637
  hypo

SEQ ID NO: 87973 - DNA, 104 bp, Homo sapiens; identical to SEQ ID NO: 51838
  chr15:31775678-31775782
  hypo

SEQ ID NO: 87974 - DNA, 458 bp, Homo sapiens
  chr15:31776580-31777038
  hypo
ttggccttcttctccttgccccgctcggccgagtccccgttcttgccattggcggagttggcgcggcccatcttgccgtgcaccaggccgccgaggccgcccatgtttttcttcagcttgatgcccagcgtcttgctgaagctgcccagcttgttggccacggagtcggcgcgcgtcttgtccttctccttgcgctgcttctccttctccttgtccttgccgttcttgccgttattgctgttagaattgctgcacaccgaatcgcggtccgagtccagcgagtcggccagggactgcacgtcctcccctgccgaggccgtgggagactccggctgtgccaggggcgcctgtgtggagagggagggccggatcgaaggtggttagagaagagctgtccacgcgccagcgaggaagacacaccttgcccctgtgttgccgaggctagggccctggacctt

SEQ ID NO: 87975 - DNA, 123 bp, Homo sapiens; identical to SEQ ID NO: 28077
  chr15:31851282-31851405
  hypo

SEQ ID NO: 87976 - DNA, 24 bp, Homo sapiens
  chr15:31977846-31977870
  hypo
gcgagactccgtctcaaaaaaaga

SEQ ID NO: 87977 - DNA, 1047 bp, Homo sapiens; identical to SEQ ID NO: 51840
  chr15:32162229-32163276
  hypo

SEQ ID NO: 87978 - DNA, 30 bp, Homo sapiens
  chr15:32428944-32428974
  hypo
aggagaaggccggcgcggtggctgacgcct

SEQ ID NO: 87979 - DNA, 20 bp, Homo sapiens
  chr15:32445343-32445363
  hypo
gggcacggtggctcacgcct

SEQ ID NO: 87980 - DNA, 30 bp, Homo sapiens; identical to SEQ ID NO: 51842
  chr15:32994740-32994770
  hypo

SEQ ID NO: 87981 - DNA, 395 bp, Homo sapiens; identical to SEQ ID NO: 10048
  chr15:33010280-33010675
  hypo

SEQ ID NO: 87982 - DNA, 30 bp, Homo sapiens; identical to SEQ ID NO: 51847
  chr15:33012486-33012516
  hypo

SEQ ID NO: 87983 - DNA, 107 bp, Homo sapiens
  chr15:33358714-33358821
  hypo
tttggaatcagaggggccatccgctggcttagaattggaccgttcaaacacagctcttagcgactccttctcatgtctcatcttgcgcttgagagcttccagctcag

SEQ ID NO: 87984 - DNA, 134 bp, Homo sapiens
  chr15:33359131-33359265
  hypo
taaggacttctgcacaggctgcgtcaatttgagcaaagctaagtccccatcctttggtttaatttccgtgatggtctctcctccctcagcggtagcccccttcttcagcacacgaagcccactgaaaaaagctg

SEQ ID NO: 87985 - DNA, 376 bp, Homo sapiens
  chr15:33445899-33446275
  hypo
tggaggctgtttccccggctggcgactgcgatgacctatccccttgccgctccttgccctgccgcctggagccatgagccccagcctcagctcccgggagggtgagcaagtcggctttgggtacaaactcagcgtgggctgctgggcgaatggcaatcgtctccttacccttagaatgcgttttaactactctttgtacctgggaggacaggtcctgaactttggccaccactttggagacaggtttctgcttgcaagtccgcttagccggcttctccatctcatccttttctgcctctggatgcttctcagggtcctggtgactttcagacaaacctgtttgctgatgctccagcccgctcggcggcctccgaat

SEQ ID NO: 87986 - DNA, 36 bp, Homo sapiens; identical to SEQ ID NO: 28080
  chr15:33549939-33549975
  hypo

SEQ ID NO: 87987 - DNA, 35 bp, Homo sapiens; identical to SEQ ID NO: 28081
  chr15:33550214-33550249
  hypo

SEQ ID NO: 87988 - DNA, 917 bp, Homo sapiens; identical to SEQ ID NO: 51850
  chr15:33602691-33603608
  hypo

SEQ ID NO: 87989 - DNA, 142 bp, Homo sapiens; identical to SEQ ID NO: 51851
  chr15:33603647-33603789
  hypo

SEQ ID NO: 87990 - DNA, 210 bp, Homo sapiens; identical to SEQ ID NO: 51852
  chr15:33603879-33604089
  hypo

SEQ ID NO: 87991 - DNA, 30 bp, Homo sapiens; identical to SEQ ID NO: 28084
  chr15:33691031-33691061
  hypo

SEQ ID NO: 87992 - DNA, 27 bp, Homo sapiens
  chr15:33691827-33691854
  hypo
gactccgtttcaaaaataaaaaaggaa

SEQ ID NO: 87993 - DNA, 28 bp, Homo sapiens
  chr15:33849587-33849615
  hypo
ttttttattgattttttgagacggagtc

SEQ ID NO: 87994 - DNA, 126 bp, Homo sapiens; identical to SEQ ID NO: 28087
  chr15:33954375-33954501
  hypo

SEQ ID NO: 87995 - DNA, 30 bp, Homo sapiens
  chr15:34015217-34015247
  hypo
cattgacccttcatcgagaacagtgttgtc

SEQ ID NO: 87996 - DNA, 43 bp, Homo sapiens
  chr15:34142219-34142262
  hypo
tgcaatcatcagtaatgcctgcgtcttgttatacaggggcatg

SEQ ID NO: 87997 - DNA, 30 bp, Homo sapiens
  chr15:34322844-34322874
  hypo
gttgagaaagagtctcgggctgtcatccag

SEQ ID NO: 87998 - DNA, 211 bp, Homo sapiens
  chr15:34395525-34395736
  hypo
acctcccgacaaaacgagtacgatttggtctgaagctatatgtactttgtgaaagtcagtctggttatgtgtggaatgcgcttgttcacacagggcctggcatgaatttgaaagattcagcggatggcctgaaatcatcacgcattgttcttaccttggtcaatgaccttcttggccaagggtattgtgtcttcctcgataactttaatat

SEQ ID NO: 87999 - DNA, 30 bp, Homo sapiens; identical to SEQ ID NO: 28089
  chr15:34396313-34396343
  hypo

SEQ ID NO: 88000 - DNA, 81 bp, Homo sapiens; identical to SEQ ID NO: 28090
  chr15:34467904-34467985
  hypo

SEQ ID NO: 88001 - DNA, 45 bp, Homo sapiens
  chr15:34524062-34524107
  hypo
ttacaggcgtgagtcactgcacccggcccaaaattactcaatttc

SEQ ID NO: 88002 - DNA, 30 bp, Homo sapiens
  chr15:34531365-34531395
  hypo
aagagacacaggaccgcaacactgaactgg

SEQ ID NO: 88003 - DNA, 83 bp, Homo sapiens; identical to SEQ ID NO: 28091
  chr15:34546025-34546108
  hypo

SEQ ID NO: 88004 - DNA, 22 bp, Homo sapiens
  chr15:34546167-34546189
  hypo
agcacgtcgggaggccaaggtg

SEQ ID NO: 88005 - DNA, 153 bp, Homo sapiens
  chr15:34630946-34631099
  hypo
actataaagtaccttaaacacatttgtcctactttaattttttgttgttgttcttgtccttttaataaatgctatgtccactttctagtcagactgaaagttccactaaataatacgtttttttatacctggagaagacgttgatgtattttc

SEQ ID NO: 88006 - DNA, 29 bp, Homo sapiens
  chr15:34634443-34634472
  hypo
taaaatttaaaaaggccgagcgcggtggc

SEQ ID NO: 88007 - DNA, 148 bp, Homo sapiens
  chr15:34635788-34635936
  hypo
cgtaaagcgaaagagcgtaaagttattttatgaaactggtgaagcatgtttcagcggtcgaaccaagatttaaagttaggtccctaccgcaaattcagcgctctttcttatggtggtgagtagctaataataacgtaataaagtgcac

SEQ ID NO: 88008 - DNA, 44 bp, Homo sapiens
  chr15:34636137-34636181
  hypo
tggtttggcggggcgcggtggctcacgcctgtaatcccaacact

SEQ ID NO: 88009 - DNA, 22 bp, Homo sapiens
  chr15:34728766-34728788
  hypo
gtgctgcaggacaggcccctcc

SEQ ID NO: 88010 - DNA, 845 bp, Homo sapiens; identical to SEQ ID NO: 10055
  chr15:34728813-34729658
  hypo

SEQ ID NO: 88011 - DNA, 236 bp, Homo sapiens; identical to SEQ ID NO: 10056
  chr15:34729900-34730136
  hypo

SEQ ID NO: 88012 - DNA, 31 bp, Homo sapiens
  chr15:34812800-34812831
  hypo
gacaggacagcaaggccgaggagaatggctc

SEQ ID NO: 88013 - DNA, 31 bp, Homo sapiens
  chr15:34879898-34879929
  hypo
gagccaccgcatccggcgtgagtgcattctt

SEQ ID NO: 88014 - DNA, 30 bp, Homo sapiens; identical to SEQ ID NO: 10058
  chr15:34903026-34903056
  hypo

SEQ ID NO: 88015 - DNA, 284 bp, Homo sapiens; identical to SEQ ID NO: 51865
  chr15:35046864-35047148
  hypo

SEQ ID NO: 88016 - DNA, 404 bp, Homo sapiens; identical to SEQ ID NO: 51866
  chr15:35047296-35047700
  hypo

SEQ ID NO: 88017 - DNA, 30 bp, Homo sapiens
  chr15:35202377-35202407
  hypo
tggtaacatctgcacgaactcgggttggcc

SEQ ID NO: 88018 - DNA, 31 bp, Homo sapiens
  chr15:35213343-35213374
  hypo
caacaaactgttggaccgggtgcagtgtctc

SEQ ID NO: 88019 - DNA, 111 bp, Homo sapiens; identical to SEQ ID NO: 28100
  chr15:35310631-35310742
  hypo

SEQ ID NO: 88020 - DNA, 130 bp, Homo sapiens
  chr15:35385318-35385448
  hypo
gtggcggtggcggtggcggtggcccaggcggcggcggcggacgggagcgtgacaggaggcggttgagagatcgtgaaagatctgggcgattctgagccatgccatttttaccttacgtctgctagaaagt

SEQ ID NO: 88021 - DNA, 31 bp, Homo sapiens
  chr15:35389042-35389073
  hypo
cttttgaaaggccaggcgcggttgctcatgc

SEQ ID NO: 88022 - DNA, 111 bp, Homo sapiens
  chr15:35414091-35414202
  hypo
cagcggggcatcctgtcggtcttggtcatgagtcgccgggacagcagtttctggtcaggggtcacctcccggtgtactatgtcttccgtcaagatacgtttgccacaggga

SEQ ID NO: 88023 - DNA, 78 bp, Homo sapiens; identical to SEQ ID NO: 28103
  chr15:35529458-35529536
  hypo

SEQ ID NO: 88024 - DNA, 31 bp, Homo sapiens
  chr15:35591336-35591367
  hypo
aacataggatcatattcgtcagctaagggaa

SEQ ID NO: 88025 - DNA, 30 bp, Homo sapiens
  chr15:35591655-35591685
  hypo
aatgccggcccgcccgccgactctgcccat

SEQ ID NO: 88026 - DNA, 30 bp, Homo sapiens; identical to SEQ ID NO: 10064
  chr15:36053807-36053837
  hypo

SEQ ID NO: 88027 - DNA, 31 bp, Homo sapiens
  chr15:36905527-36905558
  hypo
tgctatatattgatgacgtaaagttaaaaag

SEQ ID NO: 88028 - DNA, 19 bp, Homo sapiens
  chr15:37212638-37212657
  hypo
cgcccggtctatactgatc

SEQ ID NO: 88029 - DNA, 31 bp, Homo sapiens; identical to SEQ ID NO: 10067
  chr15:37393697-37393728
  hypo

SEQ ID NO: 88030 - DNA, 30 bp, Homo sapiens
  chr15:37783047-37783077
  hypo
actcgccgctgaagcgcctgcgcaaggcca

SEQ ID NO: 88031 - DNA, 30 bp, Homo sapiens; identical to SEQ ID NO: 51880
  chr15:38217644-38217674
  hypo

SEQ ID NO: 88032 - DNA, 35 bp, Homo sapiens; identical to SEQ ID NO: 10071
  chr15:38365201-38365236
  hypo

SEQ ID NO: 88033 - DNA, 562 bp, Homo sapiens; identical to SEQ ID NO: 51882
  chr15:38543128-38543690
  hypo

SEQ ID NO: 88034 - DNA, 31 bp, Homo sapiens; identical to SEQ ID NO: 51883
  chr15:38545321-38545352
  hypo

SEQ ID NO: 88035 - DNA, 32 bp, Homo sapiens
  chr15:38652447-38652479
  hypo
tttttttttttctttttgagacggagtttcgc

SEQ ID NO: 88036 - DNA, 31 bp, Homo sapiens; identical to SEQ ID NO: 51885
  chr15:39140581-39140612
  hypo

SEQ ID NO: 88037 - DNA, 25 bp, Homo sapiens
  chr15:39267347-39267372
  hypo
ccgcgcccggcgaaaaatttatttt

SEQ ID NO: 88038 - DNA, 85 bp, Homo sapiens
  chr15:39415394-39415479
  hypo
catgtagtaaataaaacgaaaggcactaagaaagacatttaatataaaacagtgtcttcttggccgggcgcggtggctcacgcct

SEQ ID NO: 88039 - DNA, 40 bp, Homo sapiens
  chr15:39628273-39628313
  hypo
ctaggattacaggtgtgagccactgcgcctagcccgtaaa

SEQ ID NO: 88040 - DNA, 218 bp, Homo sapiens
  chr15:39703027-39703245
  hypo
ttggaagtgataaaaccggaaagatacaacagaataattgaacgcctcttcttgtatcccagcaccaccgggtcttcctcagcctattcctggacagtttaaacctcaagcaaaggctttctgtgctctgacactccaggctcacttctcctcacgacctttaacttgctgctcccctgtgcctggggtgctcccccaaaaaacggctgtggcattcc

SEQ ID NO: 88041 - DNA, 219 bp, Homo sapiens
  chr15:39742867-39743086
  hypo
atgcaggctccaaatgcgagcctcgaagacggcatgaacacggccatgacagctgaggtgggggagtggctggggtcccagagactggtgaggctgagagaatgcacgaggcgcaggagctacattcagtacactgcctcacattctacacagaaacaaacgtcaggtgaatccaacatacaaacataaaaacagtaacagccacgtaaaagtaggaaa

SEQ ID NO: 88042 - DNA, 31 bp, Homo sapiens; identical to SEQ ID NO: 28110
  chr15:39853006-39853037
  hypo

SEQ ID NO: 88043 - DNA, 30 bp, Homo sapiens; identical to SEQ ID NO: 51887
  chr15:39873899-39873929
  hypo

SEQ ID NO: 88044 - DNA, 137 bp, Homo sapiens; identical to SEQ ID NO: 28111
  chr15:39881426-39881563
  hypo

SEQ ID NO: 88045 - DNA, 30 bp, Homo sapiens; identical to SEQ ID NO: 51888
  chr15:39921485-39921515
  hypo

SEQ ID NO: 88046 - DNA, 46 bp, Homo sapiens; identical to SEQ ID NO: 51889
  chr15:39958297-39958343
  hypo

SEQ ID NO: 88047 - DNA, 37 bp, Homo sapiens; identical to SEQ ID NO: 28112
  chr15:39971425-39971462
  hypo

SEQ ID NO: 88048 - DNA, 35 bp, Homo sapiens
  chr15:39986668-39986703
  hypo
actttatacatatttacgtgcaaagtttgaattat

SEQ ID NO: 88049 - DNA, 319 bp, Homo sapiens; identical to SEQ ID NO: 10074
  chr15:40074996-40075315
  hypo

SEQ ID NO: 88050 - DNA, 67 bp, Homo sapiens; identical to SEQ ID NO: 51892
  chr15:40094249-40094316
  hypo

SEQ ID NO: 88051 - DNA, 30 bp, Homo sapiens
  chr15:40113152-40113182
  hypo
atcttcattagtcacgttgctgaaaactgg

SEQ ID NO: 88052 - DNA, 30 bp, Homo sapiens
  chr15:40236611-40236641
  hypo
gcagcttatgtttaacgatctctttttttt

SEQ ID NO: 88053 - DNA, 30 bp, Homo sapiens
  chr15:40236920-40236950
  hypo
accgcacccggccaacgatctctttatgtg

SEQ ID NO: 88054 - DNA, 30 bp, Homo sapiens; identical to SEQ ID NO: 51895
  chr15:40322108-40322138
  hypo

SEQ ID NO: 88055 - DNA, 49 bp, Homo sapiens
  chr15:40336684-40336733
  hypo
ctaaggctgggagacctcccacgtcagcgggaggtggttagctctggtg

SEQ ID NO: 88056 - DNA, 30 bp, Homo sapiens; identical to SEQ ID NO: 51896
  chr15:40364846-40364876
  hypo

SEQ ID NO: 88057 - DNA, 173 bp, Homo sapiens
  chr15:40368063-40368236
  hypo
aaagaccaggagagtggtgaacggcctcacgctcacttgacttcactcatgcagaagggctgcgggagcaagatggaagtcctgactgacgatccacactctgggtcttcagggaagtgtcagcctcagagctgcggtcagtgcgtggagccggctacctgttggggaagaag

SEQ ID NO: 88058 - DNA, 30 bp, Homo sapiens; identical to SEQ ID NO: 51897
  chr15:40383911-40383941
  hypo

SEQ ID NO: 88059 - DNA, 312 bp, Homo sapiens
  chr15:40423134-40423446
  hypo
aattatattaattatcgattgttaataataattattaatattattcctgatatccagggggtcgaggatgacattgcttcctatacctcagaacacgtacacccccatgtgatgttgttcctaataaccagggggtagaggatgacgttactccaaatatcgccgtgggtgtacatcccttctgcgatcttgttgctaatacccaggcggggagaagacgatattaatcccaatattgcagaaggtgtagacctcccctgatattcaggggaaagagcacgatattgctcccaatatcgcagtctgtgtacg

SEQ ID NO: 88060 - DNA, 183 bp, Homo sapiens
  chr15:40532012-40532195
  hypo
tctgtgttgggtgtggacccacgtgtgtgtgagtgcgagagtgtgtaagccagtgtgtgtgccgtccccctgctggggacagcagctgggtccagcagagagctggctgggggcttgacaggagtttatcctaactgatgctgggtgggcgcaggccctgagatgggcgtcagggagagggga

SEQ ID NO: 88061 - DNA, 135 bp, Homo sapiens; identical to SEQ ID NO: 28116
  chr15:40532790-40532925
  hypo

SEQ ID NO: 88062 - DNA, 31 bp, Homo sapiens
  chr15:40548271-40548302
  hypo
atttcccagctgggcacggtggtatgctcct

SEQ ID NO: 88063 - DNA, 31 bp, Homo sapiens
  chr15:40557125-40557156
  hypo
tgcggcgccccaagcccgtggtggacccttc

SEQ ID NO: 88064 - DNA, 86 bp, Homo sapiens
  chr15:40558265-40558351
  hypo
tctacctcagctgcaacgggggcacaccagcaggccacaagcagatgccgtggcccgagccacagagcccacgggtcctgcccaat

SEQ ID NO: 88065 - DNA, 58 bp, Homo sapiens; identical to SEQ ID NO: 51901
  chr15:40559554-40559612
  hypo

SEQ ID NO: 88066 - DNA, 30 bp, Homo sapiens; identical to SEQ ID NO: 51902
  chr15:40575416-40575446
  hypo

SEQ ID NO: 88067 - DNA, 30 bp, Homo sapiens; identical to SEQ ID NO: 28118
  chr15:40577310-40577340
  hypo

SEQ ID NO: 88068 - DNA, 30 bp, Homo sapiens
  chr15:40586481-40586511
  hypo
ggtggccaccaccacgtcgatgcggtccac

SEQ ID NO: 88069 - DNA, 560 bp, Homo sapiens
  chr15:40631662-40632222
  hypo
tgggcctccacctccttgctacgagccctgtctcccagggtgaggcttacaccgggaacctggctgatggtaacggtgaggccatcaggctggaggagtgctggtgtggtcacagccatccccccctgctctgcctgccgacggtcctcctggatctcctgtgggagggctgggggtcagcacacgccatggccccccaggtgcacagagacatagatgctgataggcctacacagagagacaccagtgggacaccagggggcagaggcgccacatcacacatccccaggaccctcaccaagcctctaagagggaccatgcccaccctacccctggccccagccccagaggcgcattgctgagcctgcagggagaccaccacgtgtggggcacagggagcggcagccaagtggtttctcctggccctgtggcagcccactcacctggtacctgcggagcaaggcctggttcttcttgcgcagggcaactatcctccgatccagctctgcgtccttctcctgcctgctcatgggggactcggctctgggagttccctgcag

SEQ ID NO: 88070 - DNA, 31 bp, Homo sapiens
  chr15:40676636-40676667
  hypo
tgttgtcttgtgttgccgcagaacacctgaa

SEQ ID NO: 88071 - DNA, 104 bp, Homo sapiens
  chr15:40701401-40701505
  hypo
atcagattgtattttacggaagaaagaggcagttagaaatcagatgaaaatggccaggtgtggtagtgggctcctataatccgagtgactcgggaggccaaggc

SEQ ID NO: 88072 - DNA, 44 bp, Homo sapiens
  chr15:40701564-40701608
  hypo
accccagcctggataagagagtgagagcccgcctcttgaaaaaa

SEQ ID NO: 88073 - DNA, 190 bp, Homo sapiens
  chr15:40716011-40716201
  hypo
acttttttcacttcctcgggccagccctgtccacgggccagtgtttgggagccctgaaatcaggtggtgcagagccccattcacattcctggctgtccccaacccctgcccacacttggtacccagagcctacagccacgctagtgccgagtgggagctctcctctccctgtgtgcgccacttggttact

SEQ ID NO: 88074 - DNA, 30 bp, Homo sapiens
  chr15:40722562-40722592
  hypo
gagcattgcaggttgcggagtgtgactgag

SEQ ID NO: 88075 - DNA, 30 bp, Homo sapiens
  chr15:40750991-40751021
  hypo
gccttgcccagccccgcaagcggcgcctgg

SEQ ID NO: 88076 - DNA, 34 bp, Homo sapiens
  chr15:40766006-40766040
  hypo
gagctaccacgcctggccccggaccattttcaaa

SEQ ID NO: 88077 - DNA, 34 bp, Homo sapiens; identical to SEQ ID NO: 28120
  chr15:40782123-40782157
  hypo

SEQ ID NO: 88078 - DNA, 25 bp, Homo sapiens
  chr15:40843287-40843312
  hypo
aaaatccatcctggcagggcacggt

SEQ ID NO: 88079 - DNA, 21 bp, Homo sapiens
  chr15:40848757-40848778
  hypo
caggtgcagtggctcccgctt

SEQ ID NO: 88080 - DNA, 20 bp, Homo sapiens
  chr15:40849017-40849037
  hypo
cagagcgagattccatctca

SEQ ID NO: 88081 - DNA, 22 bp, Homo sapiens
  chr15:40850999-40851021
  hypo
tctttctttttttttttgagac

SEQ ID NO: 88082 - DNA, 32 bp, Homo sapiens
  chr15:40854468-40854500
  hypo
aaaactgttttaagagctgttcgggtagtcac

SEQ ID NO: 88083 - DNA, 46 bp, Homo sapiens
  chr15:40856289-40856335
  hypo
attacaggcgtgagccaccgcgcccggcccctaaattctgttttca

SEQ ID NO: 88084 - DNA, 29 bp, Homo sapiens
  chr15:40860277-40860306
  hypo
agattcttggccgggcgcggtggcttacg

SEQ ID NO: 88085 - DNA, 31 bp, Homo sapiens
  chr15:41021280-41021311
  hypo
tatatacaggccgggcgcggtggctcaagcc

SEQ ID NO: 88086 - DNA, 30 bp, Homo sapiens
  chr15:41043696-41043726
  hypo
agtcactcctctcccggacaaacggaaacc

SEQ ID NO: 88087 - DNA, 70 bp, Homo sapiens; identical to SEQ ID NO: 28125
  chr15:41044230-41044300
  hypo

SEQ ID NO: 88088 - DNA, 57 bp, Homo sapiens; identical to SEQ ID NO: 10081
  chr15:41046992-41047049
  hypo

SEQ ID NO: 88089 - DNA, 26 bp, Homo sapiens
  chr15:41055007-41055033
  hypo
tctagaaaaccaatcacaggccggat

SEQ ID NO: 88090 - DNA, 378 bp, Homo sapiens
  chr15:41059264-41059642
  hypo
ggaggaggcagggggcgtgcacttaccccagcgcccagcaagcagccagcaagtgtgagtcactacaagagtggccaggctgcctgctgcagacactagctttgtaccaggagcttgctgtgtgcccctcctcaccccccccatcctgtctctttgcagttatgaatactacgtcgatgaccctccccgcatagtcctggacaagctggaacgcaggggcttccgtgtgctgagcatgacgggggtgggccagacgctggtgtggtgtctgcacaaggagtgaccttctcatgctgatttgcagacggggcacccctgtggaggggctgctgtgggccctgacctccaagctcctgcctcaccgtctgccttgctcct

SEQ ID NO: 88091 - DNA, 151 bp, Homo sapiens; identical to SEQ ID NO: 28129
  chr15:41082364-41082515
  hypo

SEQ ID NO: 88092 - DNA, 30 bp, Homo sapiens
  chr15:41082754-41082784
  hypo
cgacacagcgagactctctttccaaataaa

SEQ ID NO: 88093 - DNA, 67 bp, Homo sapiens
  chr15:41091082-41091149
  hypo
gcagccgtggtgccccgccttgtgagtgtgtgtgtaagaatttggcgcttgctggctgggcgcggtg

SEQ ID NO: 88094 - DNA, 30 bp, Homo sapiens; identical to SEQ ID NO: 28130
  chr15:41120696-41120726
  hypo

SEQ ID NO: 88095 - DNA, 173 bp, Homo sapiens; identical to SEQ ID NO: 28131
  chr15:41121305-41121478
  hypo

SEQ ID NO: 88096 - DNA, 30 bp, Homo sapiens; identical to SEQ ID NO: 10082
  chr15:41137004-41137034
  hypo

SEQ ID NO: 88097 - DNA, 433 bp, Homo sapiens; identical to SEQ ID NO: 28133
  chr15:41165166-41165599
  hypo

SEQ ID NO: 88098 - DNA, 30 bp, Homo sapiens
  chr15:41191674-41191704
  hypo
ttattgccaccactcggcagcgcctcttcc

SEQ ID NO: 88099 - DNA, 94 bp, Homo sapiens
  chr15:41253507-41253601
  hypo
ttcgcctgggactctgtgctgcgcactcctggctctaaccccctgtgcctctgttcctcggcctggcactgccgtccccattttggctccatcc

SEQ ID NO: 88100 - DNA, 30 bp, Homo sapiens
  chr15:41276132-41276162
  hypo
ggttaagatcattacgaccccctgtgctca

SEQ ID NO: 88101 - DNA, 30 bp, Homo sapiens; identical to SEQ ID NO: 28134
  chr15:41304855-41304885
  hypo

SEQ ID NO: 88102 - DNA, 20 bp, Homo sapiens
  chr15:41522244-41522264
  hypo
tgagagtaggcactaattta

SEQ ID NO: 88103 - DNA, 34 bp, Homo sapiens; identical to SEQ ID NO: 28135
  chr15:41622888-41622922
  hypo

SEQ ID NO: 88104 - DNA, 30 bp, Homo sapiens
  chr15:41630412-41630442
  hypo
atgagccactgcgtccggcccattcccata

SEQ ID NO: 88105 - DNA, 21 bp, Homo sapiens
  chr15:41631142-41631163
  hypo
acagagcgagactctgtctcc

SEQ ID NO: 88106 - DNA, 30 bp, Homo sapiens
  chr15:41696047-41696077
  hypo
actagtttccgcgccgcctcctcttcctca

SEQ ID NO: 88107 - DNA, 92 bp, Homo sapiens; identical to SEQ ID NO: 28136
  chr15:41732306-41732398
  hypo

SEQ ID NO: 88108 - DNA, 119 bp, Homo sapiens
  chr15:41769413-41769532
  hypo
caactgaatgagctggaggaacgggcagaggccctggaccgccagcggaccaagaacatatccgctatcaggtgtgttatggagcctatttttggcccgcagaccttggccaaaattat

SEQ ID NO: 88109 - DNA, 189 bp, Homo sapiens
  chr15:41769838-41770027
  hypo
ctctctgtatgtccacgtacatcgatataatttattcataatgaaaagcagcagtcttctgccctgtcctacctcttcccacccttagattctactccacaggtatttgttttttctcaatttctgtttcttggttgtttcccccatatctactctggtattcttgaagggaaaaggataatatgccgg

SEQ ID NO: 88110 - DNA, 42 bp, Homo sapiens
  chr15:41840740-41840782
  hypo
gcacctatagtcctagcgatgcagcggcgggggaatagcttg

SEQ ID NO: 88111 - DNA, 31 bp, Homo sapiens
  chr15:41862231-41862262
  hypo
gggccctcctcacagccgcacatcctgggta

SEQ ID NO: 88112 - DNA, 31 bp, Homo sapiens
  chr15:41872409-41872440
  hypo
gaaaaatgcaaaaaatcggctgggcgcagtg

SEQ ID NO: 88113 - DNA, 29 bp, Homo sapiens
  chr15:42076231-42076260
  hypo
acctctacgctactgctttggagaaaagc

SEQ ID NO: 88114 - DNA, 201 bp, Homo sapiens; identical to SEQ ID NO: 51933
  chr15:42112222-42112423
  hypo

SEQ ID NO: 88115 - DNA, 38 bp, Homo sapiens; identical to SEQ ID NO: 28138
  chr15:42117756-42117794
  hypo

SEQ ID NO: 88116 - DNA, 30 bp, Homo sapiens; identical to SEQ ID NO: 28139
  chr15:42129449-42129479
  hypo

SEQ ID NO: 88117 - DNA, 31 bp, Homo sapiens
  chr15:42148468-42148499
  hypo
cactgagtggaggagacgaaaggtgcccagg

SEQ ID NO: 88118 - DNA, 147 bp, Homo sapiens
  chr15:42153324-42153471
  hypo
ctaggcatttgggaagcgaggagggcaggggtgaggtggcaagaatgggtcaggcccacacaggcactctagaagctccttggtgttcgcggtggggcctgcccacagctgcatgggaactgctctagatgacgggtaagtaactgc

SEQ ID NO: 88119 - DNA, 56 bp, Homo sapiens
  chr15:42160235-42160291
  hypo
gagcggagtgtgagggcgggaggggacctgcctcctgggccgcgaggatctcctcc

SEQ ID NO: 88120 - DNA, 31 bp, Homo sapiens; identical to SEQ ID NO: 28142
  chr15:42160910-42160941
  hypo

SEQ ID NO: 88121 - DNA, 175 bp, Homo sapiens
  chr15:42162017-42162192
  hypo
ccaaagggcaggagccctcaccgccgtgcggaagcgggccaggaggcgtgcccgctccagctgggccctgcgctgctccatgcgtcgctgcagcactgcccacgcctgcgtcacagcttgctgcctctgctgcaccgcatgggcctgaggccccggacacagcttctgcaccctg

SEQ ID NO: 88122 - DNA, 31 bp, Homo sapiens
  chr15:42166942-42166973
  hypo
ggaggtctggacaccccggtcctgtgggtgc

SEQ ID NO: 88123 - DNA, 72 bp, Homo sapiens
  chr15:42167405-42167477
  hypo
ttcccctgttccctcacgcttcttcttccctgggggactcaagtggtgctgaccacccgctgggcacacagg

SEQ ID NO: 88124 - DNA, 175 bp, Homo sapiens
  chr15:42171429-42171604
  hypo
cccaatgccaccactgcgctggccgtactttacgaccacactttggaggaagtggaccctcctctccagcaccagggtcttcttctgggccagctgcagggcgtggcaggtgtcctctgagctccctggctgcagggcctccagctggaggagcacgtctcgcagctggacctgt

SEQ ID NO: 88125 - DNA, 169 bp, Homo sapiens
  chr15:42185522-42185691
  hypo
ttctcctgcatctgcatgtgccgggcctgtagcttgcgaatgtggcccgtctcgtactgagagtccatggtgagacttggactgggcgggacccggagttctgtgctgggcctcctgctgcggtgccctgcagccccgaggagctcccggggactgtggggctgaccag

SEQ ID NO: 88126 - DNA, 192 bp, Homo sapiens
  chr15:42192980-42193172
  hypo
gtcgcagtcgcagtcggccagcttccagatcttgcccaggacgctgttgggcagcttggaggtcaccatctccttcttggcgttgacacctgatatcttgccattgatgggcgacagagtgtagaagagctcgtcgtagacgggcttgtctttggccacgacccactcctcctcgtcggcgccctccttggc

SEQ ID NO: 88127 - DNA, 102 bp, Homo sapiens
  chr15:42211494-42211596
  hypo
ctgggcctcagcctcgaagagccggcggttgtccgtgttctgcaggggctgcgcccagaaggagccaatgtagacgcgcagtacctcgggcgtgttgatgac

SEQ ID NO: 88128 - DNA, 164 bp, Homo sapiens
  chr15:42232297-42232461
  hypo
tgagccaccgcgcccagccactcagcttttgagggttaatcatcaaccgcacaaaggggaaaggaggagcagtggagggcagtacacaagcggccacctttcctccttcccaggcacaatgcccataagggaggcaaagacccgccaataaagtcagtggggga

SEQ ID NO: 88129 - DNA, 38 bp, Homo sapiens
  chr15:42280069-42280107
  hypo
agccatgagggaaagccgggggccgccccccatcaccc

SEQ ID NO: 88130 - DNA, 175 bp, Homo sapiens
  chr15:42284448-42284623
  hypo
gatactgaggctggcccgttctgggagacgcgggactcctgtgacagccagctttggctggaggaccctccaagggccttgcagaccacatggtggtctgggatgctgccgcctgacctttcttcctctccccacccctagggtcagactcgcttcatggcgtcactgctctcca

SEQ ID NO: 88131 - DNA, 30 bp, Homo sapiens; identical to SEQ ID NO: 28145
  chr15:42289870-42289900
  hypo

SEQ ID NO: 88132 - DNA, 63 bp, Homo sapiens
  chr15:42302478-42302541
  hypo
taaaattgttttcctgtcattcgtccatgcctaaaattctccgataaagcccattaaataaaa

SEQ ID NO: 88133 - DNA, 100 bp, Homo sapiens
  chr15:42350763-42350863
  hypo
gggaaaaataaacaccgggaattccaaaagcggggagggagagagtgggagaagggtggacaaactgcctattgggtactatgttcgctacttgggtagg

SEQ ID NO: 88134 - DNA, 46 bp, Homo sapiens
  chr15:42362297-42362343
  hypo
tggggagaaggtggcccggagagaaccagcccggcccaggtcaatg

SEQ ID NO: 88135 - DNA, 111 bp, Homo sapiens
  chr15:42362996-42363107
  hypo
gtgttgatgaagtaggcggcgtccaccaggcagagccggggctccttgggggtcagctggctgggcatggagtcaagctggtagtctggtgggaatcgcaggatggtcaga

SEQ ID NO: 88136 - DNA, 31 bp, Homo sapiens
  chr15:42379547-42379578
  hypo
gactggtgtcggtgagcgtcttggtcttaaa

SEQ ID NO: 88137 - DNA, 30 bp, Homo sapiens; identical to SEQ ID NO: 28147
  chr15:42387272-42387302
  hypo

SEQ ID NO: 88138 - DNA, 45 bp, Homo sapiens
  chr15:42388223-42388268
  hypo
ccctgtcatccccatacgcccgccgggatccgctgggggaaccta

SEQ ID NO: 88139 - DNA, 193 bp, Homo sapiens
  chr15:42434609-42434802
  hypo
caggcccaccaggaggcgtgcttagtgacattctccagggaacccaccctcagaacagcgtcccatcaccatcccagggctctgtgggtcagtcccaggcctggagcttcccttacctggggccaggtgtgtgcggaaggtacggttaaccagggggaagtgcagcacaatgggggagcgggggtcctcagcc

SEQ ID NO: 88140 - DNA, 159 bp, Homo sapiens
  chr15:42446542-42446701
  hypo
agtggaaggtctcattccactcggggtcactgcagttggccactatcctagtctgggcagggcttggggacgccgtgggcagccacagttgcacatagcagtcggctttggacactgcaggtaggacagggaggggccggggcctcaagctctcattgc

SEQ ID NO: 88141 - DNA, 30 bp, Homo sapiens
  chr15:42447944-42447974
  hypo
ggagttcagcaccttcgtgatgtgtctgga

SEQ ID NO: 88142 - DNA, 121 bp, Homo sapiens; identical to SEQ ID NO: 28150
  chr15:42451756-42451877
  hypo

SEQ ID NO: 88143 - DNA, 120 bp, Homo sapiens
  chr15:42452408-42452528
  hypo
ggagactgaaaactaacagggcggctaccgaggggtgcagggcacagttaccatggagacgtaaaacactacacagaatgcgagccatcgggtccatgcggccagaagcttgagtgctgt

SEQ ID NO: 88144 - DNA, 30 bp, Homo sapiens
  chr15:42470144-42470174
  hypo
gtgagccactgctcccggactctcacctta

SEQ ID NO: 88145 - DNA, 58 bp, Homo sapiens
  chr15:42470688-42470746
  hypo
ttggaccagaagcctcggttcaaatgttcggatctcaacatatcgaggcaacactgca

SEQ ID NO: 88146 - DNA, 121 bp, Homo sapiens; identical to SEQ ID NO: 28152
  chr15:42562565-42562686
  hypo

SEQ ID NO: 88147 - DNA, 256 bp, Homo sapiens
  chr15:42684672-42684928
  hypo
agggccactgaaggtccgttcgtggtcgtgaggcacactttcagggagcagagtggtctgtgtcttcacagagcccggaaaatgaactagtatgaactttgcctccaagcagcagaacttctgttcccccgcccctaatgggttctctggttactgctctacagacaatcattccggttcagtatgagacaagaatggcctgcgggctggtcagaggtcacgcctactctgtcacggggctggatgaggtaagcct

SEQ ID NO: 88148 - DNA, 69 bp, Homo sapiens
  chr15:42696331-42696400
  hypo
gaaagtaagctggtgccggacctggtgttgacacttggatcctccacttaccagcggggtgacctggac

SEQ ID NO: 88149 - DNA, 181 bp, Homo sapiens
  chr15:42711708-42711889
  hypo
tcccgcctgagtaacataacaagaccctgtctcaaaaaaaaaaagaaaagaaaaacaaggaagcacaaagactctctgtcttggcttttccctacaggcttgttggtaaagtcttgtgattctaattcgaacacatgtttatttcttaaaagtaatgcaggccgggcactgtggctcacgc

SEQ ID NO: 88150 - DNA, 31 bp, Homo sapiens; identical to SEQ ID NO: 28153
  chr15:42717196-42717227
  hypo

SEQ ID NO: 88151 - DNA, 70 bp, Homo sapiens
  chr15:42742088-42742158
  hypo
tccttctctgtctcactctttcggtgaccgctaatattgcgaatgcggcgggcactattgaggtttggct

SEQ ID NO: 88152 - DNA, 138 bp, Homo sapiens
  chr15:42748434-42748572
  hypo
gttattttggcgatacgactatactatatactatacgatttatacaatgaagcttatattctaacacctttccactggaaaatttaaacgccaaataaaaacttattggtattcaaaagatttggatactggacaggt

SEQ ID NO: 88153 - DNA, 241 bp, Homo sapiens
  chr15:42784384-42784625
  hypo
aggtgtgagccaccgcgcccggccgcctatatttattattaaacttagcccatacccattccctcagaaacctaattttagtgactaagactatcagataaatgaaatgacattcaggttgataattatgtggagtgtccctcctatattattgagattataacatctctgtttaacaagaccttcaacgtctcaaataaaagtaagcagcggtggggcacagtggctcacgcctgtaatc

SEQ ID NO: 88154 - DNA, 30 bp, Homo sapiens
  chr15:42804855-42804885
  hypo
tgaaccaccacacccggccattgttttgtt

SEQ ID NO: 88155 - DNA, 41 bp, Homo sapiens
  chr15:42806616-42806657
  hypo
gattataggcgtgagccaccgtgtctggccagacattgtga

SEQ ID NO: 88156 - DNA, 154 bp, Homo sapiens
  chr15:43020213-43020367
  hypo
ctctgcactgctcagaacctgcgaaacagaactacagagtcaggggctaggggagggctgggtgcaacaaaggatgccagagtcgagcactgaccccgcccccacacaccctcccgcagcctcagactactccgtgcacctccccacaactgcc

SEQ ID NO: 88157 - DNA, 31 bp, Homo sapiens; identical to SEQ ID NO: 28155
  chr15:43020577-43020608
  hypo

SEQ ID NO: 88158 - DNA, 30 bp, Homo sapiens
  chr15:43022814-43022844
  hypo
gagtgaagatgtcccggtaatattccagca

SEQ ID NO: 88159 - DNA, 30 bp, Homo sapiens
  chr15:43024899-43024929
  hypo
tggactgaggttcgcgttctgagcccaggc

SEQ ID NO: 88160 - DNA, 34 bp, Homo sapiens
  chr15:43124801-43124835
  hypo
tttcagttacccacagtcaaccgtggtccgaata

SEQ ID NO: 88161 - DNA, 93 bp, Homo sapiens
  chr15:43124894-43124987
  hypo
gagtagtgtgatgaaatctcataccatcctgctccgtcaggcccaggacgtgaatcacccctttagtccagcgtatccacatgttgttacctg

SEQ ID NO: 88162 - DNA, 193 bp, Homo sapiens
  chr15:43300432-43300625
  hypo
aagtttgcagggcagaagccccgtgctcccgggcacagctgcaactgcccagctcagaagtgcgtgttctgagcctctccgcactcccaatgcccgctccgattttggagcaaagctgtggccaagcccaggcgctgccgcggccccggccaggtgtgtgcacactaggggcggtgctgacatgtcagccccc

SEQ ID NO: 88163 - DNA, 31 bp, Homo sapiens; identical to SEQ ID NO: 10096
  chr15:43312163-43312194
  hypo

SEQ ID NO: 88164 - DNA, 36 bp, Homo sapiens
  chr15:43406097-43406133
  hypo
acctagctgccaggccgggcccggtggctcacgcct

SEQ ID NO: 88165 - DNA, 105 bp, Homo sapiens; identical to SEQ ID NO: 28158
  chr15:43467794-43467899
  hypo

SEQ ID NO: 88166 - DNA, 20 bp, Homo sapiens
  chr15:43511836-43511856
  hypo
gtctctacagaataaaaaga

SEQ ID NO: 88167 - DNA, 207 bp, Homo sapiens
  chr15:43527645-43527852
  hypo
acaaactgtgcacatgcgtaccttctttaggagagagtgtgatgaacgctgtgtcctgccagaatggggacagggggctgccatcgtgcagcagagactgggcactcaggttcactttgaggtccttgaactgggaggacatgttgagggccagcaggacaaagcatatatcctggcccatgttgggcgggtcgagcagcttgaatt

SEQ ID NO: 88168 - DNA, 31 bp, Homo sapiens; identical to SEQ ID NO: 10100
  chr15:43584165-43584196
  hypo

SEQ ID NO: 88169 - DNA, 152 bp, Homo sapiens
  chr15:43661820-43661972
  hypo
ttctaaatcttccacgagagtcactgcctcctctccattttctggacattgttcctgtacccaattctggatctccccaggtaagacggtcaggaactgctctagcaccaacagttctacaatctgctccttggtgcgcacctccggcctta

SEQ ID NO: 88170 - DNA, 196 bp, Homo sapiens
  chr15:43820126-43820322
  hypo
acacctggggcctgcccgacccagtctggacttccctgcttcagcctttggcttctcctcattgcagccagctcccccacagctgccctctccagctgaaccccgctcggcaccctgtggctcccttgccttctctggggatcgagctctggctctggctccaggaccccccaccagaacccggcatgatgaatac

SEQ ID NO: 88171 - DNA, 30 bp, Homo sapiens
  chr15:43940125-43940155
  hypo
ctgatagtgtgccgcggcacagcttggctc

SEQ ID NO: 88172 - DNA, 30 bp, Homo sapiens
  chr15:43941019-43941049
  hypo
agcccaggaccatgcggagcaacgctcgcc

SEQ ID NO: 88173 - DNA, 18 bp, Homo sapiens
  chr15:43942153-43942171
  hypo
ttctttaaaatgtcaata

SEQ ID NO: 88174 - DNA, 112 bp, Homo sapiens; identical to SEQ ID NO: 28161
  chr15:44037225-44037337
  hypo

SEQ ID NO: 88175 - DNA, 14 bp, Homo sapiens
  chr15:44037647-44037661
  hypo
aaaaaaaaaaaaaa

SEQ ID NO: 88176 - DNA, 16 bp, Homo sapiens
  chr15:44037900-44037916
  hypo
cgcgccactgcactcc

SEQ ID NO: 88177 - DNA, 158 bp, Homo sapiens; identical to SEQ ID NO: 51955
  chr15:44038551-44038709
  hypo

SEQ ID NO: 88178 - DNA, 30 bp, Homo sapiens
  chr15:44092151-44092181
  hypo
gccggggctggggccggccttggcacccac

SEQ ID NO: 88179 - DNA, 127 bp, Homo sapiens
  chr15:44105441-44105568
  hypo
agtaccttgagtgtgtacttgcgcctttcctcagccatgcgttttgcttcctgctccagctccttctgtttcaatgcttcggcttcacgttcttgaactgtcactcggtccttcctgcatcacagag

SEQ ID NO: 88180 - DNA, 30 bp, Homo sapiens; identical to SEQ ID NO: 28162
  chr15:44121425-44121455
  hypo

SEQ ID NO: 88181 - DNA, 30 bp, Homo sapiens
  chr15:44171768-44171798
  hypo
ccatcctcaggatgcgcacacttaggggcc

SEQ ID NO: 88182 - DNA, 31 bp, Homo sapiens; identical to SEQ ID NO: 28163
  chr15:44191954-44191985
  hypo

SEQ ID NO: 88183 - DNA, 30 bp, Homo sapiens
  chr15:44204567-44204597
  hypo
tctgcttcccacagcgaaatgccacacggt

SEQ ID NO: 88184 - DNA, 24 bp, Homo sapiens
  chr15:44319844-44319868
  hypo
ttttgtttttttttttttttccga

SEQ ID NO: 88185 - DNA, 42 bp, Homo sapiens
  chr15:44435787-44435829
  hypo
actataatagaggtatcagaacgcattactagatggtagaaa

SEQ ID NO: 88186 - DNA, 927 bp, Homo sapiens; identical to SEQ ID NO: 10105
  chr15:44486763-44487690
  hypo

SEQ ID NO: 88187 - DNA, 34 bp, Homo sapiens
  chr15:44523584-44523618
  hypo
aaagaaatcaaagattgggcccggcacagtggct

SEQ ID NO: 88188 - DNA, 38 bp, Homo sapiens
  chr15:44823849-44823887
  hypo
aaaaagaagctataaaggggccgggcgcatggctcaca

SEQ ID NO: 88189 - DNA, 21 bp, Homo sapiens
  chr15:44872692-44872713
  hypo
ctggccaggcacagaggctca

SEQ ID NO: 88190 - DNA, 18 bp, Homo sapiens
  chr15:45206207-45206225
  hypo
tggagtctcactctgtcg

SEQ ID NO: 88191 - DNA, 24 bp, Homo sapiens
  chr15:45274983-45275007
  hypo
ttacaggcgcgagccaacgcgccg

SEQ ID NO: 88192 - DNA, 31 bp, Homo sapiens
  chr15:45387030-45387061
  hypo
gccagctcagcctggccgtccacccacctgc

SEQ ID NO: 88193 - DNA, 38 bp, Homo sapiens
  chr15:45391479-45391517
  hypo
ttacaggcgtgagccaccgcgcccggcctgcctatttc

SEQ ID NO: 88194 - DNA, 197 bp, Homo sapiens
  chr15:45439951-45440148
  hypo
ccagaagtgcccaggccgaggtcaggaagcagagcgacccttgctgtgtccagaagtgggtcatcacactggtgtgaggccccttttggccagcctgggggttcaggcaggcaggcgggggctctccttatggagtcctccctctcccaggctctcctgaggaaaagtctcgccttatgttccgcatgtacgacttt

SEQ ID NO: 88195 - DNA, 131 bp, Homo sapiens
  chr15:45440518-45440649
  hypo
gaggtggtggagtccatgttccgggagtcgggattccaggacaaggaggaactgacatgggaagattttcacttcatgctgcgggaccacaatagcgagctccgcttcacgcagctctgtgtcaaaggtgg

SEQ ID NO: 88196 - DNA, 628 bp, Homo sapiens
  chr15:45444091-45444719
  hypo
tgctgttcactgaggcgcaccgagagaagttccaacgcagctgtctccaccagacggtgcaacagttcaagcgcttcattgagaactaccggcgccacatcggctgcgtggccgtgttctacgccatcgctggggggcttttcctggagagggcctactgtgagtgactttacttaccacgagccctgtccctaggcttgcaatgagtgatcgccctgggggtggggcctgcgataagtgccagccctgggtagggtaagtggagcctgtctgagtgaagactgtgcgggggaggcctgttgtgagtggcagccggccagggcctaccgcccctaaccagctctctgtcctctgcactgaccctcgcttgcctgcctgggccccctccacagactacgcctttgccgcacatcacacgggcatcacagacaccacccgcgtgggaatcatcctgtcgcggggcacagcagccagcatctctttcatgttctcctacatcttgctcaccatgtgccgcaacctcatcaccttcctgcgagaaaccttcctcaaccgctacgtgcccttcgacgccgccgtggacttccatcgcctcattgcctccaccgccatcgtcctcacaggcagg

SEQ ID NO: 88197 - DNA, 41 bp, Homo sapiens
  chr15:45465161-45465202
  hypo
tccccaggcacacatgcgcacgtgcacgtacggacagacac

SEQ ID NO: 88198 - DNA, 165 bp, Homo sapiens; identical to SEQ ID NO: 28167
  chr15:45471639-45471804
  hypo

SEQ ID NO: 88199 - DNA, 263 bp, Homo sapiens; identical to SEQ ID NO: 10110
  chr15:45479774-45480037
  hypo

SEQ ID NO: 88200 - DNA, 650 bp, Homo sapiens; identical to SEQ ID NO: 10114
  chr15:45670188-45670838
  hypo

SEQ ID NO: 88201 - DNA, 117 bp, Homo sapiens; identical to SEQ ID NO: 10115
  chr15:45670932-45671049
  hypo

SEQ ID NO: 88202 - DNA, 23 bp, Homo sapiens
  chr15:45683594-45683617
  hypo
gcgagactgtatctcaaaaaaca

SEQ ID NO: 88203 - DNA, 515 bp, Homo sapiens; identical to SEQ ID NO: 10116
  chr15:45722444-45722959
  hypo

SEQ ID NO: 88204 - DNA, 30 bp, Homo sapiens
  chr15:45742300-45742330
  hypo
ctcaggccttcctggcggccacgccttacc

SEQ ID NO: 88205 - DNA, 73 bp, Homo sapiens
  chr15:45960771-45960844
  hypo
tggctttggggctgaagctcccggatgccagggcagggcctcttgactgcacgttacttcccttggctcctca

SEQ ID NO: 88206 - DNA, 31 bp, Homo sapiens
  chr15:47410608-47410639
  hypo
gagtgattatcacagacgtatgttctgtaca

SEQ ID NO: 88207 - DNA, 30 bp, Homo sapiens
  chr15:48054295-48054325
  hypo
aataccagtgagagcgctccaaagggcata

SEQ ID NO: 88208 - DNA, 30 bp, Homo sapiens; identical to SEQ ID NO: 59735
  chr15:48594809-48594839
  hypo

SEQ ID NO: 88209 - DNA, 925 bp, Homo sapiens; identical to SEQ ID NO: 51996
  chr15:48936720-48937645
  hypo

SEQ ID NO: 88210 - DNA, 888 bp, Homo sapiens; identical to SEQ ID NO: 10126
  chr15:48937709-48938597
  hypo

SEQ ID NO: 88211 - DNA, 25 bp, Homo sapiens
  chr15:49084196-49084221
  hypo
actcttttttttgaaacggagtttc

SEQ ID NO: 88212 - DNA, 16 bp, Homo sapiens
  chr15:49156944-49156960
  hypo
ccaataccacttttaa

SEQ ID NO: 88213 - DNA, 276 bp, Homo sapiens
  chr15:49268641-49268917
  hypo
cttgcctgctagctgggacagcggtcagtgtttctatcgagagctgagtcctctggccaggacctacgagcagggggacgccagtacaaattactggagccagccgtccggaaggcgcctatgcacacgtgttgtacagcaatgcgaacttgccctggttggggagaagtagcgggtgggaggtgggcaagtttcttcccagcaactatccgctgtccacactccgctactgcctcttccccagagagagaggccgccctgtattctggctgatag

SEQ ID NO: 88214 - DNA, 140 bp, Homo sapiens; identical to SEQ ID NO: 28176
  chr15:49658850-49658990
  hypo

SEQ ID NO: 88215 - DNA, 308 bp, Homo sapiens; identical to SEQ ID NO: 28177
  chr15:49698667-49698975
  hypo

SEQ ID NO: 88216 - DNA, 218 bp, Homo sapiens; identical to SEQ ID NO: 28178
  chr15:49997485-49997703
  hypo

SEQ ID NO: 88217 - DNA, 30 bp, Homo sapiens; identical to SEQ ID NO: 52008
  chr15:50475024-50475054
  hypo

SEQ ID NO: 88218 - DNA, 31 bp, Homo sapiens
  chr15:50516711-50516742
  hypo
ttgaataattgttagccgtaatgatgataat

SEQ ID NO: 88219 - DNA, 17 bp, Homo sapiens
  chr15:50657055-50657072
  hypo
ctcggcctcccaaagtg

SEQ ID NO: 88220 - DNA, 31 bp, Homo sapiens; identical to SEQ ID NO: 28180
  chr15:50709664-50709695
  hypo

SEQ ID NO: 88221 - DNA, 30 bp, Homo sapiens; identical to SEQ ID NO: 28181
  chr15:50793954-50793984
  hypo

SEQ ID NO: 88222 - DNA, 24 bp, Homo sapiens
  chr15:50798860-50798884
  hypo
aaatatccagttctagccaggcgc

SEQ ID NO: 88223 - DNA, 30 bp, Homo sapiens; identical to SEQ ID NO: 28183
  chr15:50834686-50834716
  hypo

SEQ ID NO: 88224 - DNA, 23 bp, Homo sapiens
  chr15:50928670-50928693
  hypo
agccagcacgcccagcccattct

SEQ ID NO: 88225 - DNA, 38 bp, Homo sapiens; identical to SEQ ID NO: 28184
  chr15:51016479-51016517
  hypo

SEQ ID NO: 88226 - DNA, 33 bp, Homo sapiens
  chr15:51176913-51176946
  hypo
tagtacagggctgggcgcggtggagtatagcct

SEQ ID NO: 88227 - DNA, 85 bp, Homo sapiens; identical to SEQ ID NO: 28186
  chr15:51202496-51202581
  hypo

SEQ ID NO: 88228 - DNA, 31 bp, Homo sapiens
  chr15:51350224-51350255
  hypo
cctgggcgtcaggtgccgctgcaccagttca

SEQ ID NO: 88229 - DNA, 144 bp, Homo sapiens; identical to SEQ ID NO: 28187
  chr15:51476313-51476457
  hypo

SEQ ID NO: 88230 - DNA, 300 bp, Homo sapiens; identical to SEQ ID NO: 52015
  chr15:51633850-51634150
  hypo

SEQ ID NO: 88231 - DNA, 154 bp, Homo sapiens; identical to SEQ ID NO: 52016
  chr15:51634174-51634328
  hypo

SEQ ID NO: 88232 - DNA, 31 bp, Homo sapiens; identical to SEQ ID NO: 52017
  chr15:51812127-51812158
  hypo

SEQ ID NO: 88233 - DNA, 23 bp, Homo sapiens
  chr15:51946188-51946211
  hypo
ctttcctggccaggtgcggtggc

SEQ ID NO: 88234 - DNA, 19 bp, Homo sapiens
  chr15:51949284-51949303
  hypo
acttcgtgtcaaaataagt

SEQ ID NO: 88235 - DNA, 90 bp, Homo sapiens
  chr15:52000704-52000794
  hypo
cattgggcctttaaaagttttcgctaagtgattttaatgtgcatcaaagtttgaaaacaactgccttgccgggcgcggaggctcacgcct

SEQ ID NO: 88236 - DNA, 30 bp, Homo sapiens; identical to SEQ ID NO: 28189
  chr15:52001033-52001063
  hypo

SEQ ID NO: 88237 - DNA, 61 bp, Homo sapiens
  chr15:52276807-52276868
  hypo
atatttaaatatgcagtaaatgtctaggaggatgtgtacagtgatgcgctagtaaaagctt

SEQ ID NO: 88238 - DNA, 24 bp, Homo sapiens
  chr15:52324098-52324122
  hypo
aataattttttttttttgaggcgg

SEQ ID NO: 88239 - DNA, 181 bp, Homo sapiens; identical to SEQ ID NO: 10133
  chr15:52404391-52404572
  hypo

SEQ ID NO: 88240 - DNA, 31 bp, Homo sapiens
  chr15:52405140-52405171
  hypo
aatcagatgcactgtgagactcgggttattt

SEQ ID NO: 88241 - DNA, 30 bp, Homo sapiens
  chr15:52405410-52405440
  hypo
accgcgcccggccatctaatatttatatta

SEQ ID NO: 88242 - DNA, 31 bp, Homo sapiens; identical to SEQ ID NO: 28192
  chr15:52426276-52426307
  hypo

SEQ ID NO: 88243 - DNA, 24 bp, Homo sapiens
  chr15:52544672-52544696
  hypo
actaaaaatacaaaaattggccgg

SEQ ID NO: 88244 - DNA, 23 bp, Homo sapiens
  chr15:52544995-52545018
  hypo
ccgaaaccttattaatcctcact

SEQ ID NO: 88245 - DNA, 37 bp, Homo sapiens
  chr15:52579877-52579914
  hypo
caaaaggaagttctggccaggcgcggtggctcacgtg

SEQ ID NO: 88246 - DNA, 36 bp, Homo sapiens
  chr15:52580153-52580189
  hypo
catgcgtgaaactccgtctcaaaaaaaaaaaaaaat

SEQ ID NO: 88247 - DNA, 664 bp, Homo sapiens; identical to SEQ ID NO: 52028
  chr15:52587420-52588084
  hypo

SEQ ID NO: 88248 - DNA, 265 bp, Homo sapiens; identical to SEQ ID NO: 52029
  chr15:52820545-52820810
  hypo

SEQ ID NO: 88249 - DNA, 33 bp, Homo sapiens; identical to SEQ ID NO: 28194
  chr15:52967805-52967838
  hypo

SEQ ID NO: 88250 - DNA, 26 bp, Homo sapiens
  chr15:53976374-53976400
  hypo
tctactgtttttaagaattgccggag

SEQ ID NO: 88251 - DNA, 19 bp, Homo sapiens
  chr15:54032741-54032760
  hypo
ctccgcctcccaaagtgct

SEQ ID NO: 88252 - DNA, 97 bp, Homo sapiens
  chr15:54191739-54191836
  hypo
gtcactgttcaccaaaatgagcgcttagctgaaaaaccagtctctctactttttttttagacggagtttcactcttgttgcccaggatctcggctca

SEQ ID NO: 88253 - DNA, 45 bp, Homo sapiens
  chr15:55074344-55074389
  hypo
gagacggagatgggagacggagacgggagatggagacaagggaga

SEQ ID NO: 88254 - DNA, 34 bp, Homo sapiens
  chr15:55313740-55313774
  hypo
gctcaaaaaaaaaggtttggccgggcgcggtggc

SEQ ID NO: 88255 - DNA, 31 bp, Homo sapiens; identical to SEQ ID NO: 28195
  chr15:55508246-55508277
  hypo

SEQ ID NO: 88256 - DNA, 30 bp, Homo sapiens; identical to SEQ ID NO: 28196
  chr15:55545630-55545660
  hypo

SEQ ID NO: 88257 - DNA, 26 bp, Homo sapiens
  chr15:55594209-55594235
  hypo
accaaaaatagaacaattagccgacc

SEQ ID NO: 88258 - DNA, 91 bp, Homo sapiens
  chr15:55699074-55699165
  hypo
cagcttttttgactgaaattccgccctcagcgtaaaaggttaaaaattatgaattaacgcccgcgcggtgggtcacgcctgtaatcccagc

SEQ ID NO: 88259 - DNA, 90 bp, Homo sapiens; identical to SEQ ID NO: 10158
  chr15:55699899-55699989
  hypo

SEQ ID NO: 88260 - DNA, 31 bp, Homo sapiens
  chr15:55723598-55723629
  hypo
tacatacagggatgaccgaagaagctctctg

SEQ ID NO: 88261 - DNA, 162 bp, Homo sapiens; identical to SEQ ID NO: 28198
  chr15:55806738-55806900
  hypo

SEQ ID NO: 88262 - DNA, 961 bp, Homo sapiens; identical to SEQ ID NO: 10159
  chr15:55879821-55880782
  hypo

SEQ ID NO: 88263 - DNA, 220 bp, Homo sapiens; identical to SEQ ID NO: 52061
  chr15:55880890-55881110
  hypo

SEQ ID NO: 88264 - DNA, 30 bp, Homo sapiens; identical to SEQ ID NO: 28201
  chr15:55881584-55881614
  hypo

SEQ ID NO: 88265 - DNA, 265 bp, Homo sapiens; identical to SEQ ID NO: 52062
  chr15:56034457-56034722
  hypo

SEQ ID NO: 88266 - DNA, 374 bp, Homo sapiens; identical to SEQ ID NO: 10162
  chr15:56034885-56035259
  hypo

SEQ ID NO: 88267 - DNA, 284 bp, Homo sapiens; identical to SEQ ID NO: 52064
  chr15:56035304-56035588
  hypo

SEQ ID NO: 88268 - DNA, 43 bp, Homo sapiens
  chr15:56105142-56105185
  hypo
tgggattacaggcatgagccaccatgcccggcctctcaaacac

SEQ ID NO: 88269 - DNA, 26 bp, Homo sapiens
  chr15:56133124-56133150
  hypo
caaagttttgtttgttcgtttgtttt

SEQ ID NO: 88270 - DNA, 31 bp, Homo sapiens
  chr15:56137949-56137980
  hypo
atttccagggaaatttcgacacaaagttatt

SEQ ID NO: 88271 - DNA, 185 bp, Homo sapiens
  chr15:56140360-56140545
  hypo
cccctcactgctattgcgtagggtaaggataatgacgttatagaatcttttcaaataactgagacttggagtatgggaaatgggggagaggagagaacggccaatgtgctttcctctcaatgcctgtagggttatgcccgtgactatctgctcttgaagagacaggtgagcggacagtcccatca

SEQ ID NO: 88272 - DNA, 30 bp, Homo sapiens
  chr15:56201481-56201511
  hypo
ctatcccaacagttcgcttcaatcttagtg

SEQ ID NO: 88273 - DNA, 31 bp, Homo sapiens
  chr15:56220529-56220560
  hypo
tctttcgtactgtaatcggacttacctagaa

SEQ ID NO: 88274 - DNA, 488 bp, Homo sapiens; identical to SEQ ID NO: 52065
  chr15:56285863-56286351
  hypo

SEQ ID NO: 88275 - DNA, 31 bp, Homo sapiens
  chr15:56510268-56510299
  hypo
caatatagtataaaaacgatttgcacagcat

SEQ ID NO: 88276 - DNA, 37 bp, Homo sapiens
  chr15:57209352-57209389
  hypo
tccggttgtaccgtccgccctccgtatctggggtttc

SEQ ID NO: 88277 - DNA, 30 bp, Homo sapiens; identical to SEQ ID NO: 52071
  chr15:57210229-57210259
  hypo

SEQ ID NO: 88278 - DNA, 30 bp, Homo sapiens; identical to SEQ ID NO: 10165
  chr15:57599111-57599141
  hypo

SEQ ID NO: 88279 - DNA, 30 bp, Homo sapiens
  chr15:57611622-57611652
  hypo
ggggtctgctgccccgagctctgggtgtcc

SEQ ID NO: 88280 - DNA, 30 bp, Homo sapiens
  chr15:57617666-57617696
  hypo
tcaggaggcggcagcggtggcctcttttgc

SEQ ID NO: 88281 - DNA, 256 bp, Homo sapiens
  chr15:57618464-57618720
  hypo
atacctgttctttgcgtgctgccactctataaactctcacgagggtcgccggtcggtccactaggaggtcgaaggccttcatcaggtagacgacggggttgggcagccaagtctgcgatgacagtgctggcatgtggcgcgggggcgcagggtacacatccttgtctcagctgtcccacatggcagcagtgagcgcggacttcgctcctggatgcgctgccctggcctccacctcggtcccggtccctactgattc

SEQ ID NO: 88282 - DNA, 53 bp, Homo sapiens; identical to SEQ ID NO: 28207
  chr15:57620576-57620629
  hypo

SEQ ID NO: 88283 - DNA, 31 bp, Homo sapiens; identical to SEQ ID NO: 28208
  chr15:57625821-57625852
  hypo

SEQ ID NO: 88284 - DNA, 185 bp, Homo sapiens
  chr15:57731149-57731334
  hypo
aatgtgccatccatgccgacaacgtcaatcgtcatgaaaacagaaggtatattcccttcctgccaggaactggacgggatattgatacaggatcaattcctggtgtggatcagttaattgaaaaatttgatcaaaaacctgggcttcagagaagaggaaggtctgggaagcgaaacagaattaat

SEQ ID NO: 88285 - DNA, 31 bp, Homo sapiens
  chr15:57763916-57763947
  hypo
caaaccactcagatttcgtgttcaatagtca

SEQ ID NO: 88286 - DNA, 130 bp, Homo sapiens; identical to SEQ ID NO: 28209
  chr15:57792922-57793052
  hypo

SEQ ID NO: 88287 - DNA, 31 bp, Homo sapiens; identical to SEQ ID NO: 28210
  chr15:57905026-57905057
  hypo

SEQ ID NO: 88288 - DNA, 157 bp, Homo sapiens
  chr15:57923146-57923303
  hypo
ggggaagaggggctgccggtccaccgcccggtctctgtattgccgccctggggatctgctgccagttcacttggcctgccacagccatgggacagatcatctcctctgtatgttcacttctaatagggcagctcttcttttccgtgtaagagttact

SEQ ID NO: 88289 - DNA, 22 bp, Homo sapiens
  chr15:57990321-57990343
  hypo
cgaaagaaaaaaaaatgcaaag

SEQ ID NO: 88290 - DNA, 216 bp, Homo sapiens; identical to SEQ ID NO: 28211
  chr15:57993431-57993647
  hypo

SEQ ID NO: 88291 - DNA, 20 bp, Homo sapiens
  chr15:58357799-58357819
  hypo
cggggtcggccttcacctcg

SEQ ID NO: 88292 - DNA, 24 bp, Homo sapiens
  chr15:58504154-58504178
  hypo
caccacagccggcccaggctagct

SEQ ID NO: 88293 - DNA, 31 bp, Homo sapiens
  chr15:58652177-58652208
  hypo
aaggggactctggcaccggctgtgtgcctgg

SEQ ID NO: 88294 - DNA, 155 bp, Homo sapiens; identical to SEQ ID NO: 28213
  chr15:58839521-58839676
  hypo

SEQ ID NO: 88295 - DNA, 32 bp, Homo sapiens
  chr15:58896582-58896614
  hypo
ttagctctggcgttatctccttaaaggctttt

SEQ ID NO: 88296 - DNA, 30 bp, Homo sapiens
  chr15:59026708-59026738
  hypo
ggcaagatggcaaaacgccatctctacaac

SEQ ID NO: 88297 - DNA, 28 bp, Homo sapiens
  chr15:59066351-59066379
  hypo
agtgtttgggttcccactgtgcgtgagg

SEQ ID NO: 88298 - DNA, 92 bp, Homo sapiens
  chr15:59158445-59158537
  hypo
ggtgtgagccaccgcgcccggccccaggtttggattctttcacacagcaggtatgggccgactcactgtctggggcccgcccagcccagccc

SEQ ID NO: 88299 - DNA, 38 bp, Homo sapiens
  chr15:59158759-59158797
  hypo
ttaaaaaaagtgaaaagaggccgggcgcggtggctcac

SEQ ID NO: 88300 - DNA, 43 bp, Homo sapiens
  chr15:59243450-59243493
  hypo
gtatgattgaactagtctggacggaagggcttgtctaggctag

SEQ ID NO: 88301 - DNA, 41 bp, Homo sapiens
  chr15:59291803-59291844
  hypo
ggattacaggtgtcagccactgtgcccggcctattactgca

SEQ ID NO: 88302 - DNA, 85 bp, Homo sapiens
  chr15:59454859-59454944
  hypo
aaaaaaaaaaaaaagaaagaaaggtgaaccacctacacaatacgttggccacctatagtcctcaagcccccggaggctctaccaa

SEQ ID NO: 88303 - DNA, 30 bp, Homo sapiens
  chr15:59463865-59463895
  hypo
ttagaggagctgtccggaggcaaccttttc

SEQ ID NO: 88304 - DNA, 117 bp, Homo sapiens
  chr15:59474905-59475022
  hypo
tcagagtgcggcacagcgtaaagtacagcatggaatcatgaagctggcatggcactcgagacagatccggataatcaacagagtcagttcacacctcatgcacgtatcacagggtcc

SEQ ID NO: 88305 - DNA, 31 bp, Homo sapiens
  chr15:59490728-59490759
  hypo
atcaggctgggtgcaacggctcactcctgta

SEQ ID NO: 88306 - DNA, 30 bp, Homo sapiens
  chr15:59499069-59499099
  hypo
tcttggcgtctcaacgttcggatcagcagc

SEQ ID NO: 88307 - DNA, 31 bp, Homo sapiens
  chr15:59524090-59524121
  hypo
tgaggggccccacacccgtgtgtcactggtg

SEQ ID NO: 88308 - DNA, 35 bp, Homo sapiens
  chr15:59525451-59525486
  hypo
cattcatccatccatccgtccgtccatatgtattc

SEQ ID NO: 88309 - DNA, 20 bp, Homo sapiens
  chr15:59533606-59533626
  hypo
ttggctgggtgcagtggctc

SEQ ID NO: 88310 - DNA, 103 bp, Homo sapiens
  chr15:59561664-59561767
  hypo
ttgacggtgttaagtccggataaagtaagcatatttcagtattttgaccaaataaaataaaaacctgcaactgaacataactgtttttgtacaattcaattaa

SEQ ID NO: 88311 - DNA, 87 bp, Homo sapiens; identical to SEQ ID NO: 28217
  chr15:59580023-59580110
  hypo

SEQ ID NO: 88312 - DNA, 30 bp, Homo sapiens
  chr15:59621554-59621584
  hypo
ctagaaagtggtgtcgagctggggccagag

SEQ ID NO: 88313 - DNA, 43 bp, Homo sapiens
  chr15:59648542-59648585
  hypo
ccaacgaaaatgaaaggcttgcgacattcaaatcacagggtgc

SEQ ID NO: 88314 - DNA, 49 bp, Homo sapiens; identical to SEQ ID NO: 10174
  chr15:59664056-59664105
  hypo

SEQ ID NO: 88315 - DNA, 264 bp, Homo sapiens; identical to SEQ ID NO: 52088
  chr15:59664434-59664698
  hypo

SEQ ID NO: 88316 - DNA, 31 bp, Homo sapiens
  chr15:59679645-59679676
  hypo
ataagcagtggcagggcgcaatggctcatgc

SEQ ID NO: 88317 - DNA, 165 bp, Homo sapiens; identical to SEQ ID NO: 28220
  chr15:59685906-59686071
  hypo

SEQ ID NO: 88318 - DNA, 31 bp, Homo sapiens; identical to SEQ ID NO: 28221
  chr15:59847661-59847692
  hypo

SEQ ID NO: 88319 - DNA, 87 bp, Homo sapiens
  chr15:59906438-59906525
  hypo
agtcactgagaatcccagtaccgcagaaaacagcctgtggagcagggcccacgtaggggtgcagatgaccctgttaccagaaagggg

SEQ ID NO: 88320 - DNA, 30 bp, Homo sapiens; identical to SEQ ID NO: 10177
  chr15:59915561-59915591
  hypo

SEQ ID NO: 88321 - DNA, 21 bp, Homo sapiens
  chr15:59950342-59950363
  hypo
aaactccgtctcaaaaaaaaa

SEQ ID NO: 88322 - DNA, 46 bp, Homo sapiens
  chr15:59989016-59989062
  hypo
cccagatgaacctgttccagacggcgaaactccatctccactaaaa

SEQ ID NO: 88323 - DNA, 145 bp, Homo sapiens; identical to SEQ ID NO: 52095
  chr15:60288753-60288898
  hypo

SEQ ID NO: 88324 - DNA, 438 bp, Homo sapiens; identical to SEQ ID NO: 52096
  chr15:60289224-60289662
  hypo

SEQ ID NO: 88325 - DNA, 155 bp, Homo sapiens
  chr15:60672389-60672544
  hypo
taccatctatatgccaggcatcgtgctaaatgcttcatactttacaacaatcccgtgaggtgggaactttgattagcacccctttataggcaaggaaactcagtcttagcaaagttccgtgttttccccaagtcgggtggctaatgagtgagttg

SEQ ID NO: 88326 - DNA, 39 bp, Homo sapiens; identical to SEQ ID NO: 10186
  chr15:60690304-60690343
  hypo

SEQ ID NO: 88327 - DNA, 36 bp, Homo sapiens
  chr15:60694277-60694313
  hypo
tctttaaaaagaagtttttgccgggcgtggtggctc

SEQ ID NO: 88328 - DNA, 29 bp, Homo sapiens
  chr15:60701626-60701655
  hypo
gttaagaaggtacagacaggccgggcgcg

SEQ ID NO: 88329 - DNA, 30 bp, Homo sapiens
  chr15:60735294-60735324
  hypo
gctttatttcagacacgaagtatctgacaa

SEQ ID NO: 88330 - DNA, 263 bp, Homo sapiens; identical to SEQ ID NO: 52104
  chr15:60885090-60885353
  hypo

SEQ ID NO: 88331 - DNA, 31 bp, Homo sapiens
  chr15:61711645-61711676
  hypo
gtctcctctggccgggcgtggtggctcatgc

SEQ ID NO: 88332 - DNA, 31 bp, Homo sapiens
  chr15:61726879-61726910
  hypo
gccactgtctttaatgcgttttgcacttttt

SEQ ID NO: 88333 - DNA, 161 bp, Homo sapiens
  chr15:61931948-61932109
  hypo
ttcttagcaagtctgggcagccgatcatttccgaaaacttggagagcaagccgggagtcagcctgtgctgtaacgttccattttactaacctttttatccaatttgaaaatacaaatagagctctcagggtgtaattagcggcaatgactcttaatacctg

SEQ ID NO: 88334 - DNA, 20 bp, Homo sapiens
  chr15:62347426-62347446
  hypo
ctcaaccttttttttttgag

SEQ ID NO: 88335 - DNA, 28 bp, Homo sapiens
  chr15:62361490-62361518
  hypo
gttataataggctaggtgtggcggctca

SEQ ID NO: 88336 - DNA, 27 bp, Homo sapiens
  chr15:62361757-62361784
  hypo
gcaaccggagtgagaccctgtctgcaa

SEQ ID NO: 88337 - DNA, 194 bp, Homo sapiens
  chr15:62367514-62367708
  hypo
tgtacgttcgaatttcgatgtaatgtaatcatcattatcttggtataagatattcagaaaatatgcgggtccattaaagaaacctggaacatcaagatttttaaatattcagcgatgattccacagctttagtgttcagtaagagttactgtgtttctttccaaaactcattaatttagccatttaaaaccaat

SEQ ID NO: 88338 - DNA, 710 bp, Homo sapiens; identical to SEQ ID NO: 10195
  chr15:62456255-62456965
  hypo

SEQ ID NO: 88339 - DNA, 334 bp, Homo sapiens; identical to SEQ ID NO: 10196
  chr15:62457008-62457342
  hypo

SEQ ID NO: 88340 - DNA, 30 bp, Homo sapiens; identical to SEQ ID NO: 28228
  chr15:62635671-62635701
  hypo

SEQ ID NO: 88341 - DNA, 17 bp, Homo sapiens
  chr15:62681566-62681583
  hypo
gtattgggatggaaata

SEQ ID NO: 88342 - DNA, 31 bp, Homo sapiens
  chr15:62702852-62702883
  hypo
gctactgagggatgggcgcagcctcttatcc

SEQ ID NO: 88343 - DNA, 196 bp, Homo sapiens
  chr15:62747447-62747643
  hypo
ccaggtgaggagagaggtgctcgatggaggggacgtgatggggaactcaggaaggggttcctggaggtgcacttcagccgcgccttcagcaatctgcagaatgtcaaaaagccagtgggagagggtgttcgggatgggagagactgaataaaccaagacaaaaagatggtacagcgcagtaggagtcagatagcac

SEQ ID NO: 88344 - DNA, 46 bp, Homo sapiens
  chr15:62752749-62752795
  hypo
ccgtgcccggcactagccacgtggtcttgtacgaagaggcaggtgt

SEQ ID NO: 88345 - DNA, 42 bp, Homo sapiens
  chr15:62753413-62753455
  hypo
attacaggcgtgagccaccgcgtctggccagttttgcctgtt

SEQ ID NO: 88346 - DNA, 526 bp, Homo sapiens
  chr15:62753661-62754187
  hypo
atgtatagagcaatacgaataatgttatttatgtcttcaacacggatgggtttatacctagacgtagtatttagatgtgtttgctttgcttttcctagtgcattcatttattgagtaaatagttactgagcatcactgcgggccaggctctggctcaggccctaggggtgagagcagaaataagacaagcaaggtgtgttagagggagaggagcagttgttttggatggtctctaaagagtcgacatttcagcgagggcttgaaggatgagagcaaggccaacaggtaagaggcgcctactccatgcgaggggaagagcatgcacaggagcactcacagaaattgctggtggctcaagagtggcctggtgagcgcagagtgaccagctgttggctagaccctatccaagctgaggaagtcatggcctgggacatttaacttctcattgttggagtcaggaggaagggctgtatctgtctgtacttttaactaggctgggcgtggtggctcacgcctgtaatcccag

SEQ ID NO: 88347 - DNA, 100 bp, Homo sapiens; identical to SEQ ID NO: 28230
  chr15:62776551-62776651
  hypo

SEQ ID NO: 88348 - DNA, 39 bp, Homo sapiens; identical to SEQ ID NO: 28231
  chr15:62776890-62776929
  hypo

SEQ ID NO: 88349 - DNA, 33 bp, Homo sapiens; identical to SEQ ID NO: 28232
  chr15:62791805-62791838
  hypo

SEQ ID NO: 88350 - DNA, 28 bp, Homo sapiens
  chr15:62792077-62792105
  hypo
aggcataagccaccgctcctggctgcaa

SEQ ID NO: 88351 - DNA, 181 bp, Homo sapiens; identical to SEQ ID NO: 28234
  chr15:62799428-62799609
  hypo

SEQ ID NO: 88352 - DNA, 74 bp, Homo sapiens; identical to SEQ ID NO: 28235
  chr15:62828094-62828168
  hypo

SEQ ID NO: 88353 - DNA, 88 bp, Homo sapiens
  chr15:62832518-62832606
  hypo
acggagtgagacgccatcttaaaataaataaataaacttttttttttttttttttacatgagtaagcgtcttggccttcaaagagtgc

SEQ ID NO: 88354 - DNA, 41 bp, Homo sapiens; identical to SEQ ID NO: 28236
  chr15:62880085-62880126
  hypo

SEQ ID NO: 88355 - DNA, 30 bp, Homo sapiens; identical to SEQ ID NO: 28237
  chr15:62884053-62884083
  hypo

SEQ ID NO: 88356 - DNA, 31 bp, Homo sapiens
  chr15:62896942-62896973
  hypo
tggagctcatattatgcgataagggatttat

SEQ ID NO: 88357 - DNA, 53 bp, Homo sapiens; identical to SEQ ID NO: 28238
  chr15:62898022-62898075
  hypo

SEQ ID NO: 88358 - DNA, 19 bp, Homo sapiens
  chr15:62898583-62898602
  hypo
ctggccccaaaagatattt

SEQ ID NO: 88359 - DNA, 31 bp, Homo sapiens; identical to SEQ ID NO: 28239
  chr15:62930017-62930048
  hypo

SEQ ID NO: 88360 - DNA, 30 bp, Homo sapiens; identical to SEQ ID NO: 28240
  chr15:62937894-62937924
  hypo

SEQ ID NO: 88361 - DNA, 30 bp, Homo sapiens
  chr15:62938319-62938349
  hypo
ctaaacctgtgtctcgtctcatctcgtctc

SEQ ID NO: 88362 - DNA, 98 bp, Homo sapiens; identical to SEQ ID NO: 28241
  chr15:62959084-62959182
  hypo

SEQ ID NO: 88363 - DNA, 66 bp, Homo sapiens
  chr15:62967378-62967444
  hypo
atgcaataactggtcccgaccactgtcacttttgcaggagcataagaactgcggagagatgagtga

SEQ ID NO: 88364 - DNA, 185 bp, Homo sapiens
  chr15:62968123-62968308
  hypo
cctcaggaaagtgatacgctgtttagttgtttaactattaggtttcacagatttctgcttgttttgctttgacccctttggcctctcgcctggggccgtggagaaagctctaacttatagtcagtcttcttgtgttgctttctgcaaatggaagcaaaccagccgtgttgcggctgcatccaggg

SEQ ID NO: 88365 - DNA, 31 bp, Homo sapiens; identical to SEQ ID NO: 28243
  chr15:62970008-62970039
  hypo

SEQ ID NO: 88366 - DNA, 162 bp, Homo sapiens
  chr15:62978881-62979043
  hypo
gggatcaccaaagactcggtgatgcgcgtggatgagaagaccaaggaagtgctgcaggagtggcccctcaccaccgtcaagcgctgggcagcctcacccaagagcttcacactggtagggactggcagagggcaaggagagcactagcgtggccttgagtga

SEQ ID NO: 88367 - DNA, 30 bp, Homo sapiens
  chr15:62990455-62990485
  hypo
agtgcctctcaggccggccttgggactccc

SEQ ID NO: 88368 - DNA, 347 bp, Homo sapiens
  chr15:62993096-62993443
  hypo
caagggagaatttgcacgccattgagtatctcttgctccttaagaggcctgttaaggatactgtttaggataacttaagggccctgtcggtgctggcctcataagaagaatgtagccaaaatgctggtgtgattttatggcggggcttctccggtctcctgggtaattctgtgctgtgattgtgttgtgccgttgtctggctttgcaggcatctagggtatgggttcagaacaaagtcgacgaatccaaacacgaaatccattctcaagttgatgctatcacggccggaacggcttcagttgttaacctcacagctggtaagtcccggagagatttgtgctgcattg

SEQ ID NO: 88369 - DNA, 264 bp, Homo sapiens; identical to SEQ ID NO: 28245
  chr15:63000748-63001012
  hypo

SEQ ID NO: 88370 - DNA, 185 bp, Homo sapiens
  chr15:63012432-63012617
  hypo
gccattgttcatggaccgggaaaagaaatgttaagtgcgtcttctccaaagatatgatcgttctttgtggcaattgtacagttagtattgtcagtctctgtggggtgaagggtagattcattttaaggaaaataaacgaaaatattaagttgtggaaaaattcccctttacgtgcttcttatatt

SEQ ID NO: 88371 - DNA, 142 bp, Homo sapiens
  chr15:63017544-63017686
  hypo
tgaagtattttatttacgaagtgggtagcaatgaggctatcatgatgcacatagaaaagattatcagcagtcattttaaaaaaacatttacttaatgcaaagcactaggatggacaacggcaaagtgcgtccatacaggaaa

SEQ ID NO: 88372 - DNA, 27 bp, Homo sapiens
  chr15:63022558-63022585
  hypo
tattttcatctccgcaatacagtctca

SEQ ID NO: 88373 - DNA, 31 bp, Homo sapiens
  chr15:63024967-63024998
  hypo
gagatggtaacatgaacggttccaagtgttt

SEQ ID NO: 88374 - DNA, 31 bp, Homo sapiens
  chr15:63028631-63028662
  hypo
catatgtaccaattcacggagctgcacatgt

SEQ ID NO: 88375 - DNA, 45 bp, Homo sapiens; identical to SEQ ID NO: 28247
  chr15:63029314-63029359
  hypo

SEQ ID NO: 88376 - DNA, 94 bp, Homo sapiens; identical to SEQ ID NO: 28248
  chr15:63059822-63059916
  hypo

SEQ ID NO: 88377 - DNA, 30 bp, Homo sapiens; identical to SEQ ID NO: 28249
  chr15:63060247-63060277
  hypo

SEQ ID NO: 88378 - DNA, 128 bp, Homo sapiens; identical to SEQ ID NO: 28250
  chr15:63060545-63060673
  hypo

SEQ ID NO: 88379 - DNA, 30 bp, Homo sapiens; identical to SEQ ID NO: 28251
  chr15:63062616-63062646
  hypo

SEQ ID NO: 88380 - DNA, 195 bp, Homo sapiens; identical to SEQ ID NO: 28252
  chr15:63066064-63066259
  hypo

SEQ ID NO: 88381 - DNA, 347 bp, Homo sapiens
  chr15:63068832-63069179
  hypo
aagaaatagaatagatcgctgtgctccattgtgggggtatggttttatattctacttttgaaggttattcttagaagactgagcaccgctctcttctgcttaaggaaatgtttcacaattcccttctcaggcacaacacacccatgacgccatcacagaggccgcccagttgatgaaggaagccgtggatgacatcatggtgacgctgaacgaagctgccagtgaagtggggctggttgggggcatggtggacgccattgcagaagccatgagcaaggtgggcatgggctctagggctctctactcccttatctccctcacccatgggcctcgcgtgcttttctcta

SEQ ID NO: 88382 - DNA, 21 bp, Homo sapiens
  chr15:63069713-63069734
  hypo
aacgagcgaaactctcaaaaa

SEQ ID NO: 88383 - DNA, 392 bp, Homo sapiens
  chr15:63075602-63075994
  hypo
tgaccccccagggctgcgctggcgaggggctggcacactcacctgccagagggtgggccctgggcactggctccaagctgcacagcccgaacgctgagcatgtgcccactgggcccggccagaatctgtggcctgagcggggccctgcgagggctctggccttttgtgtgcaatgcagcatgggcttggcttgaattgccctctccagcatctagccccaaatgcaaggcctggccttcaccccctcaggagcttaaaagtgaatgaaaccctttggcttccagtgatattaacacatggttctcatgcgtttctctctgtgtgtgtgtgtgtgtgtgtgtgtgtcttgcttgttttctttttccagatgactaagtcggttactaacccgg

SEQ ID NO: 88384 - DNA, 31 bp, Homo sapiens; identical to SEQ ID NO: 28255
  chr15:63077574-63077605
  hypo

SEQ ID NO: 88385 - DNA, 51 bp, Homo sapiens
  chr15:63084844-63084895
  hypo
attccagattcgcactcgtgtgcaggacctgggccacggctgtatcttcct

SEQ ID NO: 88386 - DNA, 573 bp, Homo sapiens
  chr15:63086975-63087548
  hypo
tctgctgagatctcagcagcacgggggacagagtgtctcatactccatgcctcttgctggcacggtaacacagtgactcccctgccctggtcagcatgtttgaagaaatctacctacgaaacgttgtcagattcttctttgggtcgtagtcaagggtagtgggtgtgtgcacgcagaggttaatacaaagactcaaagagcctccagccactagcctgacacatgcgatttacattgggtgcattgggccatcctgagggcaagaacggtgtgctgtggcgtcccgggaggcagggctgtctctggaagaggagagcagggggaggtgtccggggctcagctgttttgcaggctgcttgaggcacaggatgatacatccgtgcttggtggcttttccttcttccttcactttggcatctgacggggcaactagttcggtggctgcgggagaggggcaggagtcgttgcaggcagagcgcagacccagggtggagaggtgggagtgtttgggaaagtcaggagctggcgggtgtggtgagagccaggtgaagcggacacatgaccagaaacgga

SEQ ID NO: 88387 - DNA, 264 bp, Homo sapiens
  chr15:63088320-63088584
  hypo
tacaggtctccttggtgctctcggctctccaggccgggaacaaaggaacccaggcatgcattacagccgccaccgctgtgtctgggatcattgccgacctggacaccaccattatgtttgcaacagcggggacgctgaatgcagagaacagtgagaccttcgcagaccacaggtacgtgggggtcctggacggggagaggttcaggctggcctgcccctgaaactcatgatcgacttggagacgccacctgggagccagaaatg

SEQ ID NO: 88388 - DNA, 771 bp, Homo sapiens
  chr15:63089566-63090337
  hypo
cagccagcctgggctccgacgaccccgagacccaggtaccagcagggcctggggagtgcgtcctcccggtcttcccgtgaacgctgcacatcgggcctcagaagaggcctaaggcagaacaggaacttttgaagtagacaatgtgtgtgtgagtgtgtctggtttgaggaaccggtaggaggcagtcatccaagcgagatagtggcacagactgtggtggtggccatggggatggagacaagcggagggatttgagaagagtctagaaggaaggcttggcctggcccggtgaaggctggagcacggcatacctgagggaggggaaggagtgaaaggcggctccttgtgggccagagcagggcacaggagctccctgaagggagagctggtgtgggcagggggaggtggaggagattgaagtgccggagccacacacaggtagaactagtgagtgcgcgtgagcctgcccaggcacggggctgtgggttcagcgactgttgccatagaggtagcgactgcaaccacacgagaggaaaagccagggagtcggggcagagcctggaggaatccagcatttaggaccactttaccgtgcaagtggcacaggagacggagaagcagcagctgctgcagggaggaaagccgcgggcatcatgttgccaggatggagtgtttcaacccaccagagacagagttaagaaagagggaagactgggaactggttattggcctgttccggtaaccatcgagtgccatcgaggacattggtgt

SEQ ID NO: 88389 - DNA, 94 bp, Homo sapiens
  chr15:63100844-63100938
  hypo
actctgagtagcatccgggcctgtgtcttcccgcagtggtgtctcatcaaacagacgtggggccttgtgcctcaccgttcgaggcacaggggta

SEQ ID NO: 88390 - DNA, 30 bp, Homo sapiens
  chr15:63105189-63105219
  hypo
agggcacttactgacgggagacccaccatc

SEQ ID NO: 88391 - DNA, 65 bp, Homo sapiens
  chr15:63111786-63111851
  hypo
acagagctcatccaggcggcggaagccatgaaaggtaggctggattctcacgtcttggtggaggg

SEQ ID NO: 88392 - DNA, 171 bp, Homo sapiens
  chr15:63115971-63116142
  hypo
agaatgtcagtgagcgctggtgcatgtgctgacagtattgttaatggcgccgtttccacatctgcaggcagacttgtgctccaaagacagttatcggagttgctgcaaaagtgaccaccccctgcagccgtaaccttcaatactgtgcctagtctcgagctcagtcaaacc

SEQ ID NO: 88393 - DNA, 25 bp, Homo sapiens
  chr15:63118207-63118232
  hypo
gagtgagactcggtctcaaaaacat

SEQ ID NO: 88394 - DNA, 173 bp, Homo sapiens; identical to SEQ ID NO: 28262
  chr15:63129978-63130151
  hypo

SEQ ID NO: 88395 - DNA, 212 bp, Homo sapiens; identical to SEQ ID NO: 52116
  chr15:63130455-63130667
  hypo

SEQ ID NO: 88396 - DNA, 30 bp, Homo sapiens
  chr15:63131849-63131879
  hypo
actgttttatttatccgcatcaggagcact

SEQ ID NO: 88397 - DNA, 1054 bp, Homo sapiens
  chr15:63132462-63133516
  hypo
cacaggccagaaccagcgtgttttcatggctcagctgggtcattagtctcaaaacccaaacagtgacagaggctggtcgccagagctaagaaagctgttccggatgtgctgcagtgtcccacggtcgcgggagccgtggagctcacatgagcagtggggtgggtcggagggttttctacaaagtgttaggtccatccagcttgttgctttctttctagatcatcgccgcccaggaagaaatgctaaagaaagagcgagaactggaagaagcaaggaaaaaactggcccaaatccgccagcagcagtataagtttttacccaccgagctgagggaagatgagggctaaaggtgcgagcccagatggcgagccccaggggatggccctggctgaactggacagacagtgttcctgagaggctgggcacttagctggaaaccgcccacctccctcccgggtgagcctggagccctgcgtgcttgttctcacatctctgtcccgtcggcactggctgcatgatcgtgatgtcacacggtacaatgtcctacccacaactcctctgccgcctcccctcatgcctcaccgtgtctcaggagagaggggtgcacgtttcatggactgttaccaacaaagaaaagtcagtattatgttgttctcagacactttggcttttgttggtccttctcttaggcctgctcctggacctctttatgatattgtgatagggaaaaaaatcattgacgtcatagaatattcttcttcctctcaggagaagacggaagctggagttggacatggttcataaaagccagaaacacaaacccgtgtggactccgggagggtgactcaggtcctccttccatgtcttgagcactggctcacccagggggtgaaaaattcccgcccctgtttgcacgctttcttgcctccgtgtgtaagctccttgtacaacccagacccatcttgtattttgtggcccagaaaactgaacgattattttgttcctccgtagtccaaagggcagagttgcggaaggccgtcggggcttggtgagc

SEQ ID NO: 88398 - DNA, 31 bp, Homo sapiens
  chr15:63148262-63148293
  hypo
ccggtcactgctcgagcgatcacatacacta

SEQ ID NO: 88399 - DNA, 267 bp, Homo sapiens
  chr15:63167174-63167441
  hypo
tacccaggcttacccccactgcgaaatgggcccgcatccttgacattatggtctgggagagggaggcagcctggaatggagacctgtccgccagcgcgagctttgccatctgctgatgttgagcgcttggccaggcacccctaaggggttgggctagcgagtgtcttagagcaaaacaccatggggactccccgccagccctgagctctcagtcctgtatccggactagaatctcagggttgtctcgtcagctgagggtgggagatg

SEQ ID NO: 88400 - DNA, 90 bp, Homo sapiens; identical to SEQ ID NO: 28265
  chr15:63245890-63245980
  hypo

SEQ ID NO: 88401 - DNA, 101 bp, Homo sapiens
  chr15:63267855-63267956
  hypo
cacaggcctctccctggcagacggccccgcccttctccgcactccctaggcctttgttcctacctctgtacgactgcctcgtcttcctggagatggcattc

SEQ ID NO: 88402 - DNA, 93 bp, Homo sapiens
  chr15:63282595-63282688
  hypo
tattctttcccagggggccttcctatttaatggagcacattctttaagcgtttgcacatgcacacacatacacacttacgcacaacatttact

SEQ ID NO: 88403 - DNA, 48 bp, Homo sapiens
  chr15:63321675-63321723
  hypo
cgcgtccatgaaaacacgtgtagtgatgtctcccgcttggatttgccg

SEQ ID NO: 88404 - DNA, 17 bp, Homo sapiens
  chr15:63329447-63329464
  hypo
gccgtctcaaaaataat

SEQ ID NO: 88405 - DNA, 21 bp, Homo sapiens
  chr15:63494471-63494492
  hypo
gtctcaaaaagaaaaaagaaa

SEQ ID NO: 88406 - DNA, 235 bp, Homo sapiens
  chr15:63597953-63598188
  hypo
cttctttacaaccagcgctccagataacctcagggaaccagcacttcccaaaccgcagactacatctttagaggaagcacaactgtgcctttttctgaaaatccctttttctggtggaattgagaaagaaataaaactatgcagatatgcgttccattcacttggctttcacacaactgctctccgaaaggggtgctcagtggtgtgcgtcctggctgcacgagaatcacctggg

SEQ ID NO: 88407 - DNA, 30 bp, Homo sapiens
  chr15:63598540-63598570
  hypo
tgcaataataaattacgctgactgtggtaa

SEQ ID NO: 88408 - DNA, 30 bp, Homo sapiens
  chr15:63613299-63613329
  hypo
gattgggataagcacggtaaactctacaac

SEQ ID NO: 88409 - DNA, 200 bp, Homo sapiens
  chr15:63614191-63614391
  hypo
gaaccctcagtctctgaaagtcgggttcgtcgtccgggtctgcgcagggcatggatcttgagcgcttggaatgtgacttaactgagaaacgctactttattttaataagtttacatctaaaagccgatcattgattccattatttggaaaacaacttctaagtgtgtttggagcaactcggatattggaatcttttaaac

SEQ ID NO: 88410 - DNA, 68 bp, Homo sapiens
  chr15:63660075-63660143
  hypo
gtttttacatacttgtgagaacgacccaacatcaccaaaaagtatacgtgaactgtgaattaactgca

SEQ ID NO: 88411 - DNA, 31 bp, Homo sapiens
  chr15:63712164-63712195
  hypo
gagtgagttgaagccccgtgggtgaactttg

SEQ ID NO: 88412 - DNA, 298 bp, Homo sapiens
  chr15:63753341-63753639
  hypo
taaaagaatgttactgcggggcctccctaaaagacaagggaggaatcaagagaattccaagaaaggcgtccgagcaggaggtaagacagtagatttgaaagcaggactgagggagcaggaatgggaagaggggcccagccccagcgggtcaggggccggactaggctagcgaggcccaagtgcggtggccccatgcagagatcctggctcggtgcaaaggagatgccgctcccaccgtctgcaggaggcaagggctccccttccccggccaggagccgggtgcaagaggagcctgggg

SEQ ID NO: 88413 - DNA, 46 bp, Homo sapiens; identical to SEQ ID NO: 28268
  chr15:63772604-63772650
  hypo

SEQ ID NO: 88414 - DNA, 858 bp, Homo sapiens; identical to SEQ ID NO: 10203
  chr15:63795379-63796237
  hypo

SEQ ID NO: 88415 - DNA, 240 bp, Homo sapiens
  chr15:63889821-63890061
  hypo
ctggcactccagccgcgtgcaggtgtgcagcattgaggactggctcaagagtgccttccagagaagcatctgcagccggcacgagagcctggtcaatgatttcctcctccgggtgtgcgacaggtaggccaccttgcctcctgagcagtgctggccccgctagctctggcttccctcttggggggcagggaagagcaaattacgagaccaagatggctccaccttcggggcgcctcaaac

SEQ ID NO: 88416 - DNA, 59 bp, Homo sapiens; identical to SEQ ID NO: 28271
  chr15:63901442-63901501
  hypo

SEQ ID NO: 88417 - DNA, 30 bp, Homo sapiens; identical to SEQ ID NO: 28272
  chr15:63920918-63920948
  hypo

SEQ ID NO: 88418 - DNA, 80 bp, Homo sapiens
  chr15:64109576-64109656
  hypo
atatctgaaaggtaaacattacgtatgtcaaggatttgatttaaaacaatccagaggccgggtgtggtcgctcacacctg

SEQ ID NO: 88419 - DNA, 97 bp, Homo sapiens
  chr15:64234749-64234846
  hypo
caaaaaaacaacaacaaaaaaaacaaaaataaaaaaacaaacaaaaaaaagaaccccagggcagggccatgtttcccccgcccgagtctcatctgtc

SEQ ID NO: 88420 - DNA, 29 bp, Homo sapiens
  chr15:64392504-64392533
  hypo
aatgggagagaattggccaggcgcagtgg

SEQ ID NO: 88421 - DNA, 30 bp, Homo sapiens
  chr15:64422110-64422140
  hypo
gtagctgccacgtgccgtgggtacccagac

SEQ ID NO: 88422 - DNA, 30 bp, Homo sapiens
  chr15:64422568-64422598
  hypo
agtgaactggagatgcgagggcatgctgtt

SEQ ID NO: 88423 - DNA, 59 bp, Homo sapiens
  chr15:64443255-64443314
  hypo
gatgagcaaaggtctacggagctcctgaaatccaggcagtctgacgtccaaatcggagt

SEQ ID NO: 88424 - DNA, 30 bp, Homo sapiens; identical to SEQ ID NO: 28274
  chr15:64451476-64451506
  hypo

SEQ ID NO: 88425 - DNA, 115 bp, Homo sapiens; identical to SEQ ID NO: 52130
  chr15:64454727-64454842
  hypo

SEQ ID NO: 88426 - DNA, 181 bp, Homo sapiens
  chr15:64649872-64650053
  hypo
aaaaaaaccttcaaaataaactttcataccgacactatggataagaaaagagacctcatttattgtgtctgggtgatttggggtttgaaaatattgggaaaatgaatggttggggtaaaagttaacaaagtaatactcgaaaaaaacaactcgtatctggaggctgggtgcggtggctcac

SEQ ID NO: 88427 - DNA, 148 bp, Homo sapiens
  chr15:64670700-64670848
  hypo
ctgaggcaaccgtcccgccttcgcctccaaaagaaggaatggcatataaaagatagtgatcttttggttcacagttttcccaaaggaaccttacaggaatgcttttactactagaaaacatacagcagcagctgggcgcagtggctca

SEQ ID NO: 88428 - DNA, 241 bp, Homo sapiens
  chr15:64674682-64674923
  hypo
ggcaaggcaaggcaaggaaatgaaatgaaacgaaacgaaacgaaaagaccctgccaaatgtggtaagaccacatcgctgtcacacagtgagcataactctaggataaagggtcataatttttttctatctttatgcttaccttctaattactcacaacacccctggggagtgattttcactctctaaataccatacataaaacagaatcggtcaggcatggtggctcacacctgtaatcct

SEQ ID NO: 88429 - DNA, 29 bp, Homo sapiens
  chr15:64675162-64675191
  hypo
cctgggcgacagggcgagtctccgtctct

SEQ ID NO: 88430 - DNA, 23 bp, Homo sapiens
  chr15:64675582-64675605
  hypo
tgagatggagtctcacttcttcg

SEQ ID NO: 88431 - DNA, 8 bp, Homo sapiens
  chr15:64682783-64682791
  hypo
cagtatca

SEQ ID NO: 88432 - DNA, 80 bp, Homo sapiens
  chr15:64683090-64683170
  hypo
ctcaaaaaaaaaaaaaaattatattccgcctgggaaggaggtcagtgcccgtcggcatgtattacgctaagatactattt

SEQ ID NO: 88433 - DNA, 15 bp, Homo sapiens
  chr15:64715654-64715669
  hypo
cgtctcaaaaaaaaa

SEQ ID NO: 88434 - DNA, 89 bp, Homo sapiens; identical to SEQ ID NO: 28280
  chr15:64865095-64865184
  hypo

SEQ ID NO: 88435 - DNA, 31 bp, Homo sapiens
  chr15:65035875-65035906
  hypo
tatagtgaccaggttccgagagggctgcttc

SEQ ID NO: 88436 - DNA, 40 bp, Homo sapiens
  chr15:65041215-65041255
  hypo
aagtgtgctcctagggcggggtgcacgttgctgggatttg

SEQ ID NO: 88437 - DNA, 241 bp, Homo sapiens; identical to SEQ ID NO: 28281
  chr15:65119039-65119280
  hypo

SEQ ID NO: 88438 - DNA, 64 bp, Homo sapiens; identical to SEQ ID NO: 28282
  chr15:65119639-65119703
  hypo

SEQ ID NO: 88439 - DNA, 29 bp, Homo sapiens
  chr15:65124557-65124586
  hypo
atcttttttttttttttgagacggagtct

SEQ ID NO: 88440 - DNA, 43 bp, Homo sapiens
  chr15:65127718-65127761
  hypo
taggattacgggcgtgagccaccgcgcccggcctggatttatg

SEQ ID NO: 88441 - DNA, 508 bp, Homo sapiens; identical to SEQ ID NO: 52139
  chr15:65203767-65204275
  hypo

SEQ ID NO: 88442 - DNA, 30 bp, Homo sapiens; identical to SEQ ID NO: 28283
  chr15:65214150-65214180
  hypo

SEQ ID NO: 88443 - DNA, 34 bp, Homo sapiens; identical to SEQ ID NO: 52143
  chr15:65360351-65360385
  hypo

SEQ ID NO: 88444 - DNA, 30 bp, Homo sapiens
  chr15:65361320-65361350
  hypo
tctcttctggagtacgctccaggttagagc

SEQ ID NO: 88445 - DNA, 144 bp, Homo sapiens
  chr15:65380108-65380252
  hypo
gaaatggacagtccacagcatcgggagctgcacacagtcccactgaggctgccccagaacgtgtatactcaagattccagcgctccagcccggtgttggactggccttgtgtgggcaccatgcgctcaccccctagacagagga

SEQ ID NO: 88446 - DNA, 31 bp, Homo sapiens
  chr15:65385856-65385887
  hypo
caggaggggggcagaccgtacacctgcacct

SEQ ID NO: 88447 - DNA, 30 bp, Homo sapiens
  chr15:65395025-65395055
  hypo
cggaaagaaggcgacgtaaagcccagggca

SEQ ID NO: 88448 - DNA, 22 bp, Homo sapiens
  chr15:65478870-65478892
  hypo
cgtctcaaaaaaaaaaaaaaaa

SEQ ID NO: 88449 - DNA, 22 bp, Homo sapiens
  chr15:65482347-65482369
  hypo
taatcacccactggctagggcc

SEQ ID NO: 88450 - DNA, 31 bp, Homo sapiens
  chr15:65499416-65499447
  hypo
agccgtgatcctggtgcgctccagttctcct

SEQ ID NO: 88451 - DNA, 30 bp, Homo sapiens
  chr15:65594633-65594663
  hypo
ctcggttgcgggcccggcttcagcctcaag

SEQ ID NO: 88452 - DNA, 373 bp, Homo sapiens
  chr15:65625115-65625488
  hypo
ttagcggcagggccccgccccacgggaggggaggcagctctgcctgcgcagtgaggctgccggcgacagagtgaaaatgacaagcaggcccggagtgcacaggcaggcaggtgtgagcgtggagatgccacacgtgtgaatgaaaacagcacgtgggaagacacgtgtgagcgacacaggtggggacaccagctgagatgagaaagtggaaatgactccctgggtggaggggtattgacggacccggagggcacgcagaggccggggagcatgaccaagaccatccacccattcccaacgcaagcattcctcgggaagaacgcaccgcctttggcctggcctgggggccggtgaggggcgaggggcagggcga

SEQ ID NO: 88453 - DNA, 30 bp, Homo sapiens
  chr15:65667514-65667544
  hypo
gaagggctgcctcccggctccagcctgaag

SEQ ID NO: 88454 - DNA, 1338 bp, Homo sapiens; identical to SEQ ID NO: 52150
  chr15:65669326-65670664
  hypo

SEQ ID NO: 88455 - DNA, 30 bp, Homo sapiens
  chr15:65708903-65708933
  hypo
agcttcatggccagcgcttacttgccaccc

SEQ ID NO: 88456 - DNA, 30 bp, Homo sapiens
  chr15:65849181-65849211
  hypo
gctcctgactttgatcgttggctggatgaa

SEQ ID NO: 88457 - DNA, 27 bp, Homo sapiens
  chr15:65849509-65849536
  hypo
acatcatatcaagagtacatacggccg

SEQ ID NO: 88458 - DNA, 26 bp, Homo sapiens
  chr15:65849835-65849861
  hypo
tcaacgtgacacatcactgttgatat

SEQ ID NO: 88459 - DNA, 158 bp, Homo sapiens
  chr15:65862036-65862194
  hypo
ccccgtctcgataaaaaagaaaagccatggaattattaacacatgatagtagttatttataggggtcccacgtttgtagtgctctatttcttaacttgggttatataaactcaaatgtttatttggcagtattctttagactgcgtttgaacatgtgt

SEQ ID NO: 88460 - DNA, 44 bp, Homo sapiens; identical to SEQ ID NO: 28289
  chr15:65901232-65901276
  hypo

SEQ ID NO: 88461 - DNA, 34 bp, Homo sapiens
  chr15:66596952-66596986
  hypo
ttatggccgggcgtgacggcttatgcctataatc

SEQ ID NO: 88462 - DNA, 30 bp, Homo sapiens
  chr15:66612916-66612946
  hypo
ggtggtcgtgcgcatcgattcctgggagtc

SEQ ID NO: 88463 - DNA, 28 bp, Homo sapiens
  chr15:66645659-66645687
  hypo
aaaaaaaaaatctgggctgggcgcggtg

SEQ ID NO: 88464 - DNA, 30 bp, Homo sapiens; identical to SEQ ID NO: 28291
  chr15:66649764-66649794
  hypo

SEQ ID NO: 88465 - DNA, 30 bp, Homo sapiens
  chr15:66856966-66856996
  hypo
gtgtgtgcacgcgcgcgcacacacacacac

SEQ ID NO: 88466 - DNA, 54 bp, Homo sapiens
  chr15:66886755-66886809
  hypo
ttgctgctctgccattgtcaacgccccgcctccgtcttgaggtctgaggtggct

SEQ ID NO: 88467 - DNA, 82 bp, Homo sapiens; identical to SEQ ID NO: 28292
  chr15:66929156-66929238
  hypo

SEQ ID NO: 88468 - DNA, 31 bp, Homo sapiens; identical to SEQ ID NO: 28293
  chr15:66946040-66946071
  hypo

SEQ ID NO: 88469 - DNA, 44 bp, Homo sapiens
  chr15:66951023-66951067
  hypo
gagctgccatttttgcaagtcacgacttctctctgggcctcagt

SEQ ID NO: 88470 - DNA, 17 bp, Homo sapiens
  chr15:66961541-66961558
  hypo
ttttttttttttgagac

SEQ ID NO: 88471 - DNA, 31 bp, Homo sapiens
  chr15:66962085-66962116
  hypo
agggcaggtgagaaatcgcctggtctgctgg

SEQ ID NO: 88472 - DNA, 68 bp, Homo sapiens
  chr15:66963540-66963608
  hypo
cgcccttcctctgccccgcccctctcctctgctctgctcctcccacagcttcccgctacctgccccag

SEQ ID NO: 88473 - DNA, 31 bp, Homo sapiens; identical to SEQ ID NO: 52165
  chr15:66994355-66994386
  hypo

SEQ ID NO: 88474 - DNA, 1233 bp, Homo sapiens; identical to SEQ ID NO: 52166
  chr15:66994944-66996177
  hypo

SEQ ID NO: 88475 - DNA, 91 bp, Homo sapiens
  chr15:67011790-67011881
  hypo
ctggccttccatctcccggagttctgggggtctgccgatcccgagagccttgttaccctcagtgtcctgggatgtacgtcatccccaaaca

SEQ ID NO: 88476 - DNA, 214 bp, Homo sapiens
  chr15:67049570-67049784
  hypo
tccaatacgcagggtacgggaggaggcgtggtgtgcagccccgacgtctccctctgaaggagtgaacctggtgtctagggggtgtcagacatagcaagaaatgccgctttcctttcagcttggggatcccctccagccaccctttccttaaggaggagtcccccacaatgacagaggttcatgtggactcaggagacagcggacacattattta

SEQ ID NO: 88477 - DNA, 31 bp, Homo sapiens
  chr15:67071084-67071115
  hypo
tggcctagcaccaaggcggccccagcattca

SEQ ID NO: 88478 - DNA, 669 bp, Homo sapiens
  chr15:67073253-67073922
  hypo
cagcagtgcccacctccgctcctcggtgcctcccacctccccacccagaataacgcggcggtccctgtgcttgtcccgcagacgccagcatgtctccggacgccaccaagccgagccactggtgcagcgtggcgtactgggagcaccggacgcgcgtgggccgcctctatgcggtgtacgaccaggccgtcagcatcttctacgacctacctcagggcagcggcttctgcctgggccagctcaacctggagcagcgcagcgagtcggtgcggcgaacgcgcagcaagatcggcttcggcatcctgctcagcaaggagcccgacggcgtgtgggcctacaaccgcggcgagcaccccatcttcgtcaactccccgacgctggacgcgcccggcggccgcgccctggtcgtgcgcaaggtgccccccggctactccatcaaggtgttcgacttcgagcgctcgggcctgcagcacgcgcccgagcccgacgccgccgacggcccctacgaccccaacagcgtccgcatcagcttcgccaagggctgggggccctgctactcccggcagttcatcacctcctgcccctgctggctggagatcctcctcaacaaccccagatagtggcggccccggcgggaggggcgggtgggaggccgcggccaccgccacc

SEQ ID NO: 88479 - DNA, 31 bp, Homo sapiens
  chr15:67100496-67100527
  hypo
acggagtgtgcaggagcggaagtgcccattg

SEQ ID NO: 88480 - DNA, 168 bp, Homo sapiens
  chr15:67100820-67100988
  hypo
gggtgacctgggggatcgtgctgatctccattggacaaacattgcagggctgacaagccacgtgaatgttccatttagctgctgcacccccgcctacccggtgtaccttccttcagatgccatcacctcagcggttggcctgtgaggccggagcgctggcacacagtg

SEQ ID NO: 88481 - DNA, 31 bp, Homo sapiens
  chr15:67130300-67130331
  hypo
attctcataaaaagcacgaaacctaaatccc

SEQ ID NO: 88482 - DNA, 143 bp, Homo sapiens
  chr15:67137811-67137954
  hypo
gggggatagcaaggaacgcagtgtggctggagtgagggggacagatgagcgcgtgggcagggatgagactggagaagggaggggccgcacagtgggggggtgggcggatgggggaccctcaaggcaccgagctgccccactta

SEQ ID NO: 88483 - DNA, 45 bp, Homo sapiens
  chr15:67149349-67149394
  hypo
caagttacttctgaagcgaatcctagatgtcgtatcatttcattc

SEQ ID NO: 88484 - DNA, 87 bp, Homo sapiens
  chr15:67368275-67368362
  hypo
gtgagataagatgtatcaagtactttgccagtatcgatcataatacatagtagatgcttagtaaacgctcatttttcctttccaagg

SEQ ID NO: 88485 - DNA, 30 bp, Homo sapiens; identical to SEQ ID NO: 52171
  chr15:67386694-67386724
  hypo

SEQ ID NO: 88486 - DNA, 30 bp, Homo sapiens
  chr15:67418485-67418515
  hypo
tgcacagctcaccttcgttcagccctttac

SEQ ID NO: 88487 - DNA, 213 bp, Homo sapiens
  chr15:67457569-67457782
  hypo
tgctctgtctcccccggacagttctacctcctgtgttggtgccacgccacacagagatcccggccgagttccccccactggacgactacagccattccatccccgaaaacactaacttccccgcaggcatcgagccccagagcaatattccaggtaggcacgtgggcggcacaggctggcctgggaggcaggggcagcggtcagccccgacat

SEQ ID NO: 88488 - DNA, 30 bp, Homo sapiens; identical to SEQ ID NO: 28300
  chr15:67458650-67458680
  hypo

SEQ ID NO: 88489 - DNA, 30 bp, Homo sapiens; identical to SEQ ID NO: 52172
  chr15:67466231-67466261
  hypo

SEQ ID NO: 88490 - DNA, 73 bp, Homo sapiens
  chr15:67480916-67480989
  hypo
agggctgtgtgcccccgccttctgctccacactcccccctgccagccgccagctcctgcggcagatgcagagg

SEQ ID NO: 88491 - DNA, 78 bp, Homo sapiens
  chr15:67481787-67481865
  hypo
gacactatcaccacgcgggatgtcctgccagcacacccagtcctctgtggcccaccgcgtcaccgctgcctggcagca

SEQ ID NO: 88492 - DNA, 123 bp, Homo sapiens
  chr15:67482197-67482320
  hypo
tttccaaaataaggccgtagatgagaattatatcagcacattgggaaccgaaggcatgcggacactgttggcgctttgtaaaaaacacccctcaatcagacagacacacgtcatcgtcgcctg

SEQ ID NO: 88493 - DNA, 30 bp, Homo sapiens; identical to SEQ ID NO: 28301
  chr15:67489023-67489053
  hypo

SEQ ID NO: 88494 - DNA, 91 bp, Homo sapiens; identical to SEQ ID NO: 28302
  chr15:67545399-67545490
  hypo

SEQ ID NO: 88495 - DNA, 183 bp, Homo sapiens
  chr15:68098976-68099159
  hypo
cccgcagggccacccgttcatcgtgcagttcaatgatggaaatgccgccgtggtgtccatgtgggtgtgccgggcgctggaggagaggcggagccagcaggggcccccgtgaggctgccgcagggcactgaaagcccaggaccagtaaccaaggagaacaacccacccgtcgcccttctccgt

SEQ ID NO: 88496 - DNA, 985 bp, Homo sapiens; identical to SEQ ID NO: 52180
  chr15:68115505-68116490
  hypo

SEQ ID NO: 88497 - DNA, 72 bp, Homo sapiens; identical to SEQ ID NO: 52190
  chr15:68177207-68177279
  hypo

SEQ ID NO: 88498 - DNA, 27 bp, Homo sapiens
  chr15:68218916-68218943
  hypo
cccggcgagaggtgttttcttaagagg

SEQ ID NO: 88499 - DNA, 106 bp, Homo sapiens
  chr15:68394332-68394438
  hypo
caaaacactgagattatgggcgtgagccacagtgcctagccaagtcaaaaacctctctgcctgactttagatttggagatttttttttcctcgaaagtttttattt

SEQ ID NO: 88500 - DNA, 30 bp, Homo sapiens
  chr15:68499165-68499195
  hypo
tgtgtaggtgtctccgggggtgacgcacag

SEQ ID NO: 88501 - DNA, 234 bp, Homo sapiens
  chr15:68502838-68503072
  hypo
tgcccgtgcagggtgcgtgtgctgtgagcaccaactcaggagtgagccgggtccagggctggccctcacctcccagctgcagccttcggagccctcctccctctggcctcagtttctcctgggtaagatgggagggtggaacagatgaagcctcccagcctgggcccgggatctcctgaggctgagaccacatttctgaggtctcccccgactgagggacggggtaggtaggaa

SEQ ID NO: 88502 - DNA, 44 bp, Homo sapiens; identical to SEQ ID NO: 28306
  chr15:68506852-68506896
  hypo

SEQ ID NO: 88503 - DNA, 30 bp, Homo sapiens
  chr15:68523060-68523090
  hypo
tatttacaatagcccgtctcgagacctgag

SEQ ID NO: 88504 - DNA, 30 bp, Homo sapiens; identical to SEQ ID NO: 28307
  chr15:68594511-68594541
  hypo

SEQ ID NO: 88505 - DNA, 186 bp, Homo sapiens
  chr15:68614577-68614763
  hypo
tgcaactggtaggagtcgccgaatgcctcaggcagggaatgtcctgacagacctgcatgctgaaggctgccctggctgctgtgggagaatggagtgagaagatggaggctcgaggcagggagaccattgaggaggctgccacaacattcgggcaagagatgacgctggtgtcggtgtggtagtggg

SEQ ID NO: 88506 - DNA, 30 bp, Homo sapiens; identical to SEQ ID NO: 28308
  chr15:68624698-68624728
  hypo

SEQ ID NO: 88507 - DNA, 190 bp, Homo sapiens
  chr15:68854100-68854290
  hypo
catgtgcctgtgtgagcggagcatgtttccgtgggtctgagagtatgaggccatggttatcctgctagtgtgcttggtgagcctgtgtgcgtagttgtgcatgggaatgtcaatgagtagtaaaggggtgcctgtgagcatgaccgtgagtgtgtgttgtgagtgtgtacacatgcgtatgaatgtggat

SEQ ID NO: 88508 - DNA, 117 bp, Homo sapiens
  chr15:68893749-68893866
  hypo
gcaccgaggataaaacggtaagtgtggcagaggcctcagcctgcacggagcttacagtcaagagtggtgtgaggtggggattgcggccatgagcgtgcagtgcgaggagggctagga

SEQ ID NO: 88509 - DNA, 41 bp, Homo sapiens
  chr15:68899867-68899908
  hypo
ttctttgggccaggcacggtggctcatgcctgtgatcccaa

SEQ ID NO: 88510 - DNA, 30 bp, Homo sapiens
  chr15:68908959-68908989
  hypo
acggctgtgtcagcgcgtgggccccagcgc

SEQ ID NO: 88511 - DNA, 216 bp, Homo sapiens
  chr15:68937486-68937702
  hypo
ggcccctcacagatgtcctggcgtccgcaataccgtagctccaagttccggaatgtctacgggaaggtggccaaccgggagcactgcttcgatgggatccccatcaccaagaatgtgcacgacaaccacttctgtgccgtcaacacccgcttcctggccatcgtcaccgagagcgcagggggcggctccttcctcgtcatccccctggagcaggta

SEQ ID NO: 88512 - DNA, 259 bp, Homo sapiens; identical to SEQ ID NO: 28310
  chr15:69002973-69003232
  hypo

SEQ ID NO: 88513 - DNA, 31 bp, Homo sapiens; identical to SEQ ID NO: 28311
  chr15:69004017-69004048
  hypo

SEQ ID NO: 88514 - DNA, 181 bp, Homo sapiens
  chr15:69011589-69011770
  hypo
ctccacagagcacaggcggctgcagcctttgccttcagcgcagctcaccccagttctccttgtctgtccccctgtttgaacttccctcccacccagcctgctggaccatcacctgacagtccatgggatcgtcagtgagagcgtttcccttgccttctttagatcccgtgctgatgtcttt

SEQ ID NO: 88515 - DNA, 30 bp, Homo sapiens; identical to SEQ ID NO: 52203
  chr15:69059068-69059098
  hypo

SEQ ID NO: 88516 - DNA, 251 bp, Homo sapiens
  chr15:69076662-69076913
  hypo
tctgcaaagccaaggacgagccccaaggcctcagctgggcccctgcagccctgggccgcaccctgtcacccaccatcctcatcctcctcctcatcatccaggccctccacgtagccctcagcatccgagtcaggggcctccttgtcgtcccggtcatagccgtcgagatatgtgagttgcgggaggagcttgaacacattttctcggtagtcgttcaggttggttacctcgcaattgaaaaggtctaagct

SEQ ID NO: 88517 - DNA, 30 bp, Homo sapiens
  chr15:69100190-69100220
  hypo
ttacaaaaggtccacggcctctcaagagct

SEQ ID NO: 88518 - DNA, 24 bp, Homo sapiens
  chr15:69138833-69138857
  hypo
aacaattcatgaggccgggcgcgg

SEQ ID NO: 88519 - DNA, 31 bp, Homo sapiens; identical to SEQ ID NO: 28313
  chr15:69240580-69240611
  hypo

SEQ ID NO: 88520 - DNA, 31 bp, Homo sapiens
  chr15:69277654-69277685
  hypo
ctttcagtcatagaaacgtcctctctgccca

SEQ ID NO: 88521 - DNA, 31 bp, Homo sapiens
  chr15:69285805-69285836
  hypo
tcctgagctctgcagccggtaggctgtgtgt

SEQ ID NO: 88522 - DNA, 30 bp, Homo sapiens; identical to SEQ ID NO: 28314
  chr15:69320686-69320716
  hypo

SEQ ID NO: 88523 - DNA, 142 bp, Homo sapiens; identical to SEQ ID NO: 28315
  chr15:69322603-69322745
  hypo

SEQ ID NO: 88524 - DNA, 181 bp, Homo sapiens; identical to SEQ ID NO: 28316
  chr15:69322966-69323147
  hypo

SEQ ID NO: 88525 - DNA, 34 bp, Homo sapiens
  chr15:69325017-69325051
  hypo
tgggattacagacgtgagccactgcactgggcac

SEQ ID NO: 88526 - DNA, 31 bp, Homo sapiens; identical to SEQ ID NO: 10239
  chr15:69351241-69351272
  hypo

SEQ ID NO: 88527 - DNA, 33 bp, Homo sapiens
  chr15:69369616-69369649
  hypo
gagtgagattgagggccgggcgcagtggctcaa

SEQ ID NO: 88528 - DNA, 185 bp, Homo sapiens
  chr15:69387166-69387351
  hypo
aatcttgtgctgagcccggagcacaatgggagcgggctggcggggtgggttcacagctggactgggagcagcagacatacaggccgtaggcacagacatataaagacagtcatgcagattgcaggatgcctgagagcacagactctcacatgcacaaatacgtgcatgatcgccagtgtgcatcc

SEQ ID NO: 88529 - DNA, 40 bp, Homo sapiens; identical to SEQ ID NO: 28319
  chr15:69461180-69461220
  hypo

SEQ ID NO: 88530 - DNA, 38 bp, Homo sapiens
  chr15:69566085-69566123
  hypo
ttacaggcgtgagccaccgcgcccggctggataaattc

SEQ ID NO: 88531 - DNA, 161 bp, Homo sapiens
  chr15:69577240-69577401
  hypo
tacaacactttgccatcggcagaggtctttgggctggctctcgatgcctctgggccctggaacaagagaacaaatggaggccgcccaccatgtgtctaaatattatttaaaagttattaattaggggctgagcgcagtggctcatgcctgtaatcccagca

SEQ ID NO: 88532 - DNA, 17 bp, Homo sapiens
  chr15:69584194-69584211
  hypo
cgggcatggtggctcac

SEQ ID NO: 88533 - DNA, 200 bp, Homo sapiens; identical to SEQ ID NO: 28320
  chr15:69590166-69590366
  hypo

SEQ ID NO: 88534 - DNA, 20 bp, Homo sapiens
  chr15:69598756-69598776
  hypo
ttttttttttttgatacgga

SEQ ID NO: 88535 - DNA, 31 bp, Homo sapiens
  chr15:69672049-69672080
  hypo
attttagaagctactgcgagggaaggagaga

SEQ ID NO: 88536 - DNA, 21 bp, Homo sapiens
  chr15:69694938-69694959
  hypo
accaccgcgcctggcctaaac

SEQ ID NO: 88537 - DNA, 79 bp, Homo sapiens; identical to SEQ ID NO: 28322
  chr15:69715404-69715483
  hypo

SEQ ID NO: 88538 - DNA, 49 bp, Homo sapiens
  chr15:69754274-69754323
  hypo
gcagccctataggggcaaacacgcgcccgccatcccccaggagcctcat

SEQ ID NO: 88539 - DNA, 132 bp, Homo sapiens
  chr15:69793873-69794005
  hypo
acggttcctggcttgccgcccccaaagcacttgttataggcttaacattgtgggcatcaggcctcaggagcaggactcaggaagcagaatccctccgaccttctcctgccctcccttcggcaaccccaagcc

SEQ ID NO: 88540 - DNA, 201 bp, Homo sapiens
  chr15:69879204-69879405
  hypo
caaggggaagcaggggcgatgtccaccctggcacagggaatggtcttctctggatcttcaagaggcaggccctggcggtggtcagagccacagagggacttggggtccaatccttgtctgtaaacttgggaccaactgtaccgggttgtcatggagatgaaacaatgtggaggggaaggcacctgcgcgtggtaggtgctg

SEQ ID NO: 88541 - DNA, 142 bp, Homo sapiens; identical to SEQ ID NO: 28323
  chr15:69883339-69883481
  hypo

SEQ ID NO: 88542 - DNA, 156 bp, Homo sapiens
  chr15:69925150-69925306
  hypo
cagaaattctctctagatgttcgtttctctctccaaaactacacactcagggcagaggctagtatgcagtcacttctctgttcaggtagttcttccattgccggcatctcccctcccacctacattttctccttcgctggtggaccccactgccct

SEQ ID NO: 88543 - DNA, 151 bp, Homo sapiens
  chr15:70126640-70126791
  hypo
ctgttccatccctacgctgtgcatatgaacatgaggtgcccaagacttccccttgaggttccagagcccactaaagcagggctttggggcctcactttacctttctcttccctggagaccactgaaatgcactggcgagagagatgggttt

SEQ ID NO: 88544 - DNA, 30 bp, Homo sapiens
  chr15:70233743-70233773
  hypo
gcacccgagggcctcggcggtccccagata

SEQ ID NO: 88545 - DNA, 200 bp, Homo sapiens
  chr15:70339878-70340078
  hypo
agcctggggaccgccccgggaatgggcaccagcattctcctcttcccgcccagccccccgactccctccctggggacaatgacctgcatttctgggtctgcctcttctgcaaatgcttccttctgtatcatccaaaaacacacctttgtgacctagagattgaagatctcctcgtcccacctaaacgtgttaagcttaaa

SEQ ID NO: 88546 - DNA, 30 bp, Homo sapiens; identical to SEQ ID NO: 28325
  chr15:70340692-70340722
  hypo

SEQ ID NO: 88547 - DNA, 117 bp, Homo sapiens; identical to SEQ ID NO: 28326
  chr15:70342263-70342380
  hypo

SEQ ID NO: 88548 - DNA, 30 bp, Homo sapiens
  chr15:70345446-70345476
  hypo
ccaagtctcttggccgtggccactctgtga

SEQ ID NO: 88549 - DNA, 404 bp, Homo sapiens
  chr15:70352912-70353316
  hypo
cttccatgctgtagtccgcagagccccggtgcttctcactggcccggaggctttccgagggtgacacagagttattctggaaggaaaaagagggttcggggttaaaactttctgctgcgtgtaacaattcacacatccgcacacagctaagtgcaggtgacacggaggtcaggggagggaagagaagctgaactcctctctgccctgcagatcgtggctccatcagagccttgccagggaagccttccccactcccctgagactgagtccccggggagatgccctgggcgcatccccaattctcttttgcagctctgcactgctattaaataattaaccctgcagtaagccgtctgccttctggcctgtgggactacgctctgtgagggcgagggtcacctggg

SEQ ID NO: 88550 - DNA, 182 bp, Homo sapiens
  chr15:70354302-70354484
  hypo
tccactttcccagaggccaagcgtggctcaggggcaagggccacttggagggaacggggctgggcagtattcggtgggaatagtgcggcaaccagcctcagaacttaatttcctttcctaagccgggttctgggcagccctacccggccaagtttctgcccgaagcaaattaaaatggcaga

SEQ ID NO: 88551 - DNA, 88 bp, Homo sapiens; identical to SEQ ID NO: 28328
  chr15:70355591-70355679
  hypo

SEQ ID NO: 88552 - DNA, 30 bp, Homo sapiens
  chr15:70358404-70358434
  hypo
ctggctgcccagggcgcccagtgccagcag

SEQ ID NO: 88553 - DNA, 77 bp, Homo sapiens; identical to SEQ ID NO: 10243
  chr15:70391278-70391355
  hypo

SEQ ID NO: 88554 - DNA, 31 bp, Homo sapiens; identical to SEQ ID NO: 28330
  chr15:70539034-70539065
  hypo

SEQ ID NO: 88555 - DNA, 181 bp, Homo sapiens
  chr15:70703921-70704102
  hypo
accaaaggctgtctctctttccgcttaggcgtctgttaatcattgacacttaattagccctgtaacatattagaaagtgctttgaaaattgtaaagtcctattcaaatatgcgggataattattacacggacctattctctccactgaccctccttaagcgtctactccaggtcatgtgct

SEQ ID NO: 88556 - DNA, 31 bp, Homo sapiens
  chr15:70921645-70921676
  hypo
tccctgcatctgacagcgctgcaggcggccc

SEQ ID NO: 88557 - DNA, 97 bp, Homo sapiens
  chr15:70926694-70926791
  hypo
gaggcgctggatgctgcggtaaggccttggctctgtctcacaggcacagggttcaagaaggttaagcagagggtaacacagtcagatctatttcttt

SEQ ID NO: 88558 - DNA, 100 bp, Homo sapiens; identical to SEQ ID NO: 28331
  chr15:71047984-71048084
  hypo

SEQ ID NO: 88559 - DNA, 30 bp, Homo sapiens
  chr15:71093476-71093506
  hypo
accgctcccggccaacaagcacattataag

SEQ ID NO: 88560 - DNA, 31 bp, Homo sapiens
  chr15:71113899-71113930
  hypo
caggcatgagccaccccgcctggccactatt

SEQ ID NO: 88561 - DNA, 36 bp, Homo sapiens; identical to SEQ ID NO: 28332
  chr15:71124500-71124536
  hypo

SEQ ID NO: 88562 - DNA, 31 bp, Homo sapiens
  chr15:71152148-71152179
  hypo
tatggtgtggcagctgcgtgagtaccaggag

SEQ ID NO: 88563 - DNA, 14 bp, Homo sapiens
  chr15:71164698-71164712
  hypo
ggctcggcatcaga

SEQ ID NO: 88564 - DNA, 1126 bp, Homo sapiens; identical to SEQ ID NO: 52222
  chr15:71184310-71185436
  hypo

SEQ ID NO: 88565 - DNA, 964 bp, Homo sapiens; identical to SEQ ID NO: 52223
  chr15:71407654-71408618
  hypo

SEQ ID NO: 88566 - DNA, 32 bp, Homo sapiens; identical to SEQ ID NO: 28335
  chr15:71466446-71466478
  hypo

SEQ ID NO: 88567 - DNA, 31 bp, Homo sapiens
  chr15:71509041-71509072
  hypo
tgagcaccctctaggacggtctgctcctaaa

SEQ ID NO: 88568 - DNA, 180 bp, Homo sapiens
  chr15:71704015-71704195
  hypo
actttggtagtaaaaggcaatcgcaaatgtgagttgaactgccaggcaatgggctaccgcttctatgtacggcaagctgagaaagtcatcgatggcaccccctgtgaccagaacggcacggccatctgtgtgtctgggcagtgcaaggtaagtgcccccgaactggggtgaattcttaag

SEQ ID NO: 88569 - DNA, 39 bp, Homo sapiens
  chr15:71880350-71880389
  hypo
agaatcttgtcatggccgggcgcggtggctcacgcctgt

SEQ ID NO: 88570 - DNA, 100 bp, Homo sapiens
  chr15:71966263-71966363
  hypo
tacttttcttcttagacatcaaaagcctacctgatttaactggcacagttgtgtgttcttatggcttttgcacccaactgtctgtcggagtagttgcctc

SEQ ID NO: 88571 - DNA, 232 bp, Homo sapiens; identical to SEQ ID NO: 28336
  chr15:72040755-72040987
  hypo

SEQ ID NO: 88572 - DNA, 200 bp, Homo sapiens
  chr15:72042475-72042675
  hypo
tggatcttaggagacacgatgcagcccatgagcccccaccccgtccccactcccagcatcatgagaacaacaaccatagtatctcagactcaaagaaggaccctttcacgcagtttggggatatcagcagacatgccccatacggccacattggctgactccaactggtcagtgtccattctgaccggtcaatggccacc

SEQ ID NO: 88573 - DNA, 151 bp, Homo sapiens
  chr15:72081592-72081743
  hypo
ggaacttacacttaccgcgcctccacatgatcgacctcaccttgtatactcacagccacctcaacagctgggtgctgcaggtctctctgctttacagcggggaaaacaaagcctcagccaggtgagggaacttgctcgtgatcatgcaggt

SEQ ID NO: 88574 - DNA, 288 bp, Homo sapiens
  chr15:72082356-72082644
  hypo
cagtgtgctggaacttgatgccgatgtcagcctcaatgctctcaccctgacagcagaagtggcggcttctccctccacctgtgcccggacagtgccaccagtctaacttctgccaccgtccctacctgcagctcacctgagcccagaaccatgccccctgcaccctcccgacacactcaggtaatgcccccgtttgtgttatctcttgctctataacaaacaaccattttattatttctcatgattcactgggtcaggaatgtggtcgggacactggtaatagctcat

SEQ ID NO: 88575 - DNA, 124 bp, Homo sapiens
  chr15:72093245-72093369
  hypo
cgtatattttaatgccaagtacgtgattcagtaaaataaatccagcatccactccactcaacatctgttttctgggtgtttgcgatatgtcaggagctctgacgcacatgagccagtgtatcag

SEQ ID NO: 88576 - DNA, 30 bp, Homo sapiens
  chr15:72103893-72103923
  hypo
tgcaacggctgcagcggcttcttcaagagg

SEQ ID NO: 88577 - DNA, 30 bp, Homo sapiens
  chr15:72105865-72105895
  hypo
ggccagcatggagacgcgtgtcctgcagga

SEQ ID NO: 88578 - DNA, 30 bp, Homo sapiens; identical to SEQ ID NO: 28337
  chr15:72118829-72118859
  hypo

SEQ ID NO: 88579 - DNA, 23 bp, Homo sapiens
  chr15:72399866-72399889
  hypo
gcgacagagcaagactttgcccc

SEQ ID NO: 88580 - DNA, 31 bp, Homo sapiens
  chr15:72403196-72403227
  hypo
aattcttaaaattcttgatttcggccgggca

SEQ ID NO: 88581 - DNA, 46 bp, Homo sapiens; identical to SEQ ID NO: 28338
  chr15:72411789-72411835
  hypo

SEQ ID NO: 88582 - DNA, 109 bp, Homo sapiens
  chr15:72412074-72412183
  hypo
cgagactccgtccccgcccccagaaaaaaaagatggaggtcatttaactacagagaggcttggagatggaatgagaaacttgagcggcgttatgtttggaataactggt

SEQ ID NO: 88583 - DNA, 389 bp, Homo sapiens
  chr15:72462415-72462804
  hypo
gtcacagttcagaggcagcagcgcaggcagaggttctgggatggctgacggagtaggcgggtctcacacagcgtctttcccgaaagccagaagttctgcttatgcctaggctgggaggaaaatcaacctgtctacctcatctccagtgccaggcagctcgtaggccaggctgagtgaggcctctagccccacccttgaggaggcacactgagagggaggaccctgagactcgcttatgccgagaacaaaagtgtccaaagtacccgcgcagcatgactgtaaaccatcaggttccgggaaagtaggctgagcacaggaggccttatcaaagctcaggagctgatgcgctgaaggtgtgggaggtggacgcccatcagcctacaggtgag

SEQ ID NO: 88584 - DNA, 42 bp, Homo sapiens; identical to SEQ ID NO: 28341
  chr15:72471182-72471224
  hypo

SEQ ID NO: 88585 - DNA, 30 bp, Homo sapiens; identical to SEQ ID NO: 28342
  chr15:72491017-72491047
  hypo

SEQ ID NO: 88586 - DNA, 802 bp, Homo sapiens; identical to SEQ ID NO: 52228
  chr15:72522951-72523753
  hypo

SEQ ID NO: 88587 - DNA, 38 bp, Homo sapiens
  chr15:72525046-72525084
  hypo
ttgtctgggtgcagtggctcacgcctgtaatcccaaca

SEQ ID NO: 88588 - DNA, 38 bp, Homo sapiens
  chr15:72525323-72525361
  hypo
ctcaaaaacaaacaaacgaaaaagttctaaatctagat

SEQ ID NO: 88589 - DNA, 538 bp, Homo sapiens; identical to SEQ ID NO: 52230
  chr15:72564640-72565178
  hypo

SEQ ID NO: 88590 - DNA, 183 bp, Homo sapiens
  chr15:72581554-72581737
  hypo
gaatccattgaccccgatgggcgccggaagacctgggagggtgccagggccgctgccaggcggggagttggctgctgatggcggaaaaggtctgagagtcaggccgccaccccgccccgcccggcccctcccaggcgcgccccagtccctgggggccgtacctgccgcgggcaacagaggcgc

SEQ ID NO: 88591 - DNA, 81 bp, Homo sapiens
  chr15:72743818-72743899
  hypo
ccccacctgcctgcatctatgcgggccaactgggccacagccccgatgattccaaacaccgccttccttctctccctaccc

SEQ ID NO: 88592 - DNA, 43 bp, Homo sapiens
  chr15:72758598-72758641
  hypo
agattatatttataagaataaagtagaacgttgtgaacagaag

SEQ ID NO: 88593 - DNA, 43 bp, Homo sapiens
  chr15:72768976-72769019
  hypo
acaggcgtcagccaccgtgcccggcctgtagaagatgcacatg

SEQ ID NO: 88594 - DNA, 31 bp, Homo sapiens; identical to SEQ ID NO: 28346
  chr15:72773266-72773297
  hypo

SEQ ID NO: 88595 - DNA, 31 bp, Homo sapiens; identical to SEQ ID NO: 10258
  chr15:72827182-72827213
  hypo

SEQ ID NO: 88596 - DNA, 30 bp, Homo sapiens; identical to SEQ ID NO: 10259
  chr15:72827251-72827281
  hypo

SEQ ID NO: 88597 - DNA, 31 bp, Homo sapiens
  chr15:72967696-72967727
  hypo
atgctctgtacttttccgtatcttaaaaaat

SEQ ID NO: 88598 - DNA, 201 bp, Homo sapiens; identical to SEQ ID NO: 28349
  chr15:72992554-72992755
  hypo

SEQ ID NO: 88599 - DNA, 54 bp, Homo sapiens
  chr15:73147249-73147303
  hypo
ctgctgggattacaggtatgagtcatcgcacccggccctgctatggtttttatt

SEQ ID NO: 88600 - DNA, 298 bp, Homo sapiens; identical to SEQ ID NO: 52239
  chr15:73344007-73344305
  hypo

SEQ ID NO: 88601 - DNA, 30 bp, Homo sapiens
  chr15:73616169-73616199
  hypo
cagtgggccatctcccggtcatgctgcaca

SEQ ID NO: 88602 - DNA, 112 bp, Homo sapiens
  chr15:73616436-73616548
  hypo
gtccaggcggtccagcgccacggtctcgaaggcccttcgcatcatggggtactcctccagcacctcattgaagttgtccacgctcagcgagtagaggcggcagtaggtgtcg

SEQ ID NO: 88603 - DNA, 85 bp, Homo sapiens
  chr15:73735439-73735524
  hypo
gggtgggccctggggcgctccgcttactgattggttcgatgccagattggcaggtccccgccggcagtgcgtgtggtgaggcagg

SEQ ID NO: 88604 - DNA, 28 bp, Homo sapiens
  chr15:73806804-73806832
  hypo
ctcccccgccacagcacagtttctaacc

SEQ ID NO: 88605 - DNA, 30 bp, Homo sapiens
  chr15:73857171-73857201
  hypo
tctggctgtgcactcgaaaatacaaaattc

SEQ ID NO: 88606 - DNA, 259 bp, Homo sapiens; identical to SEQ ID NO: 28352
  chr15:73889425-73889684
  hypo

SEQ ID NO: 88607 - DNA, 31 bp, Homo sapiens; identical to SEQ ID NO: 28353
  chr15:73996272-73996303
  hypo

SEQ ID NO: 88608 - DNA, 30 bp, Homo sapiens
  chr15:74020171-74020201
  hypo
ctcagcctctcccacggccagaggccagta

SEQ ID NO: 88609 - DNA, 31 bp, Homo sapiens
  chr15:74043427-74043458
  hypo
tcgtcactgggctgcccgaggtccggggcgc

SEQ ID NO: 88610 - DNA, 24 bp, Homo sapiens
  chr15:74045074-74045098
  hypo
cgctcccacggctcagttcacgtt

SEQ ID NO: 88611 - DNA, 30 bp, Homo sapiens; identical to SEQ ID NO: 10266
  chr15:74045609-74045639
  hypo

SEQ ID NO: 88612 - DNA, 31 bp, Homo sapiens
  chr15:74067232-74067263
  hypo
ggatgcttgaaggctccgtctttgcaattaa

SEQ ID NO: 88613 - DNA, 31 bp, Homo sapiens
  chr15:74185285-74185316
  hypo
gaagctaattatatggcggtgttggtggcag

SEQ ID NO: 88614 - DNA, 202 bp, Homo sapiens
  chr15:74188045-74188247
  hypo
gctgtctctttacgtacgggcatggctgacatagaggactgaattgtctcctgtcagaagcatcctgaggaagggtcagctctcaggtcaagaggagggattgttcggacacctggcttgccgatgctctgctctgagaaatctgcgcaaagatgtctgtcagccaggcaggatattcttctctgcccgggctcctcactca

SEQ ID NO: 88615 - DNA, 30 bp, Homo sapiens; identical to SEQ ID NO: 28355
  chr15:74222801-74222831
  hypo

SEQ ID NO: 88616 - DNA, 70 bp, Homo sapiens
  chr15:74223033-74223103
  hypo
catgggtgggtggtttccaagcgcctgtcctgagcccagtttcttcctcgggtacctgtgccctcttcct

SEQ ID NO: 88617 - DNA, 30 bp, Homo sapiens; identical to SEQ ID NO: 52254
  chr15:74229274-74229304
  hypo

SEQ ID NO: 88618 - DNA, 31 bp, Homo sapiens
  chr15:74230145-74230176
  hypo
tttgggtggtgagacccgccccagcctaccc

SEQ ID NO: 88619 - DNA, 31 bp, Homo sapiens
  chr15:74246982-74247013
  hypo
ttgctgtcacctggctcgggcccctccctag

SEQ ID NO: 88620 - DNA, 409 bp, Homo sapiens
  chr15:74315316-74315725
  hypo
gatagtgcctttggcgcggttcacgcgcagatgcacgcggccgtcggccagctgggccgcgcgcgtgccgagaccgaggagctgatccgcgagcgcgtgcgccaggtggtagctcacgtgcgggctcaggagcgcgagctgctggaggctgtggacgcgcggtaccagcgcgactacgaggagatggccagtcggctgggccgcctggatgctgtgctgcagcgcatccgcacgggcagcgcgctggtgcagaggatgaagtgctacgcctcggaccaggaggtgctggacatgcacggtttcctgcgccaggcgctctgccgcctgcgccaggaggagccccagagcctgcaagctgccgtgcgcaccgatggcttcgacgagttcaaggtgcgcctgcaggacctca

SEQ ID NO: 88621 - DNA, 30 bp, Homo sapiens; identical to SEQ ID NO: 28357
  chr15:74332762-74332792
  hypo

SEQ ID NO: 88622 - DNA, 30 bp, Homo sapiens; identical to SEQ ID NO: 52265
  chr15:74473110-74473140
  hypo

SEQ ID NO: 88623 - DNA, 31 bp, Homo sapiens
  chr15:74634325-74634356
  hypo
tgtttgttgtttaaatcgcccagtcaatgcc

SEQ ID NO: 88624 - DNA, 31 bp, Homo sapiens; identical to SEQ ID NO: 28358
  chr15:74636045-74636076
  hypo

SEQ ID NO: 88625 - DNA, 163 bp, Homo sapiens; identical to SEQ ID NO: 28359
  chr15:74679804-74679967
  hypo

SEQ ID NO: 88626 - DNA, 43 bp, Homo sapiens
  chr15:74688409-74688452
  hypo
ttattccactgcctgcctccacgcctctgaccacgcagctcct

SEQ ID NO: 88627 - DNA, 175 bp, Homo sapiens
  chr15:74702941-74703116
  hypo
ggcatgcccagcctcgggaggccctagtggaccagcaagccaagagtgagtgtgggcagcacccccagccagagggaggcggccagggcacaggcatgacccagcaggtgctcggccatgatgccgtcctcgggcagcagctgccagtgctgagcctcgcggaagtaggagccct

SEQ ID NO: 88628 - DNA, 30 bp, Homo sapiens; identical to SEQ ID NO: 28360
  chr15:74704408-74704438
  hypo

SEQ ID NO: 88629 - DNA, 476 bp, Homo sapiens; identical to SEQ ID NO: 52270
  chr15:74725647-74726123
  hypo

SEQ ID NO: 88630 - DNA, 30 bp, Homo sapiens
  chr15:74751123-74751153
  hypo
ctgtctctggcaaccgaagaatagactttg

SEQ ID NO: 88631 - DNA, 40 bp, Homo sapiens
  chr15:74818766-74818806
  hypo
gtacattaataactcctttgccgggcgcaggggctcacac

SEQ ID NO: 88632 - DNA, 39 bp, Homo sapiens
  chr15:74819045-74819084
  hypo
gtgacagtgcaaggctccgtcaaaaataaataaataaat

SEQ ID NO: 88633 - DNA, 30 bp, Homo sapiens; identical to SEQ ID NO: 52273
  chr15:74912312-74912342
  hypo

SEQ ID NO: 88634 - DNA, 126 bp, Homo sapiens
  chr15:74913936-74914062
  hypo
tgggcattctgcagctgaagccggagcagccgctgaccagtctggatggttggacccaggcggggccagctgccttcttgcgccgccgttctcactgcatcttccgctctggcccaaagccacatg

SEQ ID NO: 88635 - DNA, 592 bp, Homo sapiens
  chr15:75091222-75091814
  hypo
caactacgtccagaagcgggagggcgtgaaggcgggtaccaaactcagcctcatgccgtgagtaccacgaggaggggttggggagggaaggggccttggtcctcctgaaggagcatcaggagcaagcagggaggccagagtgaggggcttgggtgttggggagggcctcaggaggaggtgcagggtgcgggtgcgggacctcacagagcagggctgggggcagaggcaggagggtggcaaagaagggacagggagcagaagaagagggcctcaaatgcctgactgagcgagtgcgagccacgggtgccaagcagagggaaccccttcagaaaggggagccagggtcagtacctttgggccaccatgacctccagccctgctgctccccagttggttccacggcaagatcacacgggagcaggctgagcggcttctgtacccgccggagacaggcctgttcctggtgcgggagagcaccaactaccccggagactacacgctgtgcgtgagctgcgacggcaaggtggagcactaccgcatcatgtaccatgccagcaagctcagcatcgacgaggaggtgtactttgagaac

SEQ ID NO: 88636 - DNA, 113 bp, Homo sapiens
  chr15:75094767-75094880
  hypo
tggcacctggacgccgccatgcggccctccttcctacagctccgagagcagcttgagcacatcaaaacccacgagctgcacctgtgacggctggcctccgcctgggtcatggg

SEQ ID NO: 88637 - DNA, 30 bp, Homo sapiens; identical to SEQ ID NO: 28363
  chr15:75118006-75118036
  hypo

SEQ ID NO: 88638 - DNA, 30 bp, Homo sapiens
  chr15:75132698-75132728
  hypo
caagcctggcctgacgcccctcagcagggg

SEQ ID NO: 88639 - DNA, 104 bp, Homo sapiens
  chr15:75158700-75158804
  hypo
agggatgacagcaagcaggagcgacttttggttcttggcactacttcacccaaaaatactctgttttctggccgggcgtggtggctcacacctgtaatcctagc

SEQ ID NO: 88640 - DNA, 43 bp, Homo sapiens; identical to SEQ ID NO: 28365
  chr15:75158923-75158966
  hypo

SEQ ID NO: 88641 - DNA, 30 bp, Homo sapiens
  chr15:75190199-75190229
  hypo
gggggaggagggagcgtgaaggtagtgact

SEQ ID NO: 88642 - DNA, 88 bp, Homo sapiens
  chr15:75205463-75205551
  hypo
tgccgtctcaaacaaaacaaacaaaaaaaagttacccagcctcaggtatccctttacagcaacacactaaacccgtttaagacaaagg

SEQ ID NO: 88643 - DNA, 143 bp, Homo sapiens
  chr15:75221040-75221183
  hypo
aaatgtacaaaactgttaccttttgctcatctagccttattgctatagcagtggttttcaattaagggtgacttcatccctcaggagacactgggtaatgcctagaaacatttttggttgtcatgatacgaatgtgtgcatac

SEQ ID NO: 88644 - DNA, 268 bp, Homo sapiens; identical to SEQ ID NO: 52284
  chr15:75248822-75249090
  hypo

SEQ ID NO: 88645 - DNA, 59 bp, Homo sapiens
  chr15:75293193-75293252
  hypo
tcatccttcctctgcctctttcgttccttaagtatgccgtgctattgctcttctgactt

SEQ ID NO: 88646 - DNA, 33 bp, Homo sapiens
  chr15:75413014-75413047
  hypo
ggcttgagccaccgcgcccggcctattgttttt

SEQ ID NO: 88647 - DNA, 30 bp, Homo sapiens
  chr15:75490773-75490803
  hypo
atgctgatggccaccgacgcagcccagctt

SEQ ID NO: 88648 - DNA, 104 bp, Homo sapiens
  chr15:75498357-75498461
  hypo
ggggcctaggagggctcgaagccttcacagcgatggcagagaagcgacccctgagaaccctggggcctgtgatgtatggcaagctgccccgcttagagacagac

SEQ ID NO: 88649 - DNA, 30 bp, Homo sapiens
  chr15:75500844-75500874
  hypo
tgtctcagctgcagcgcttcgatcgcaccc

SEQ ID NO: 88650 - DNA, 152 bp, Homo sapiens
  chr15:75594675-75594827
  hypo
gacagctctggtctggaccgtgcccctctccctggacctggtcccatagggctggttgtcatctctggcaggacaacatggccacctgtgtccccagtgccacaggagccccctgcccccatgaggcggtgcacgcacgttgttgatcatga

SEQ ID NO: 88651 - DNA, 70 bp, Homo sapiens; identical to SEQ ID NO: 28368
  chr15:75614950-75615020
  hypo

SEQ ID NO: 88652 - DNA, 254 bp, Homo sapiens; identical to SEQ ID NO: 52291
  chr15:75640557-75640811
  hypo

SEQ ID NO: 88653 - DNA, 30 bp, Homo sapiens
  chr15:75646768-75646798
  hypo
cagggcgcaagtcccgcaaaaagaaatcca

SEQ ID NO: 88654 - DNA, 216 bp, Homo sapiens
  chr15:75648426-75648642
  hypo
ccccaatcccacaccgccactcacaggatggcctcctgaaccggcagcgacaagtgcagccagcagtccacgtggctgccgtgggcctcatacagcctcaggaccagcgagcggcgctgggggctgctctccgcctgcagaggaacacgtctggtgggaggggccgagggcaggcccagttcggaaccccgtccccagcacgtcccaccccttgcc

SEQ ID NO: 88655 - DNA, 30 bp, Homo sapiens
  chr15:75649002-75649032
  hypo
tccggggctttaggcgcccgcaagctgggg

SEQ ID NO: 88656 - DNA, 30 bp, Homo sapiens; identical to SEQ ID NO: 28371
  chr15:75664834-75664864
  hypo

SEQ ID NO: 88657 - DNA, 197 bp, Homo sapiens; identical to SEQ ID NO: 28372
  chr15:75672984-75673181
  hypo

SEQ ID NO: 88658 - DNA, 27 bp, Homo sapiens
  chr15:75712725-75712752
  hypo
ttttgtttgttttttctgagacggagt

SEQ ID NO: 88659 - DNA, 37 bp, Homo sapiens; identical to SEQ ID NO: 28373
  chr15:75726681-75726718
  hypo

SEQ ID NO: 88660 - DNA, 31 bp, Homo sapiens; identical to SEQ ID NO: 10287
  chr15:75745114-75745145
  hypo

SEQ ID NO: 88661 - DNA, 259 bp, Homo sapiens
  chr15:75760808-75761067
  hypo
ttccccacttacctcggggaccctagcaaaaatcaatagccacaatttggttttaataaggcacagtttgatagcagatgctaggaattaagaacacattgctactggccctttctagtggcaatttcaccacatttatctagccaaagggaaaggctgccttgcgtgcacacgtgtgctgggagacacaagaaagaagttgatccatggcttcagcgtaactgatggcaacctataggctcagcggtgtccagggtag

SEQ ID NO: 88662 - DNA, 31 bp, Homo sapiens
  chr15:75790554-75790585
  hypo
tttctcccttcctatacgaatatgcctagtg

SEQ ID NO: 88663 - DNA, 206 bp, Homo sapiens
  chr15:75949259-75949465
  hypo
gatcagagccctcacacgctgtcctctgctctgcctatgccaggcgccttcgccaaggtgaaggagagccaacgcatgagtgacgagggccgcatggtgcaggacgaggcagacggcattcgcaggcgctgccgcgtggtgggtttcgccctgcaggccgagatgaaccacttccaccagcgccgtgagctcgacttcaagcacat

SEQ ID NO: 88664 - DNA, 31 bp, Homo sapiens
  chr15:75968616-75968647
  hypo
cggcacactgcctgtgcggttggccagctcg

SEQ ID NO: 88665 - DNA, 220 bp, Homo sapiens; identical to SEQ ID NO: 52300
  chr15:75976175-75976395
  hypo

SEQ ID NO: 88666 - DNA, 44 bp, Homo sapiens; identical to SEQ ID NO: 28375
  chr15:75981459-75981503
  hypo

SEQ ID NO: 88667 - DNA, 31 bp, Homo sapiens
  chr15:75990979-75991010
  hypo
tgtgggccctggataccgagacataactggg

SEQ ID NO: 88668 - DNA, 154 bp, Homo sapiens
  chr15:75997149-75997303
  hypo
ccggatttctgctcctcgtgatgcagccaccactgcttatatcatgagtggtggtaacagccccatggtgactctggcaggtgagctgtcccacgtccctgggccctggcctccagcccccacctccagagagggactcgcgaggggttggtag

SEQ ID NO: 88669 - DNA, 21 bp, Homo sapiens
  chr15:75999581-75999602
  hypo
gccaccgcgcctggcctccac

SEQ ID NO: 88670 - DNA, 57 bp, Homo sapiens
  chr15:76019656-76019713
  hypo
cctaccacgtacgcccgacctgagccatccatctatcagaaccgcagccctacttac

SEQ ID NO: 88671 - DNA, 187 bp, Homo sapiens; identical to SEQ ID NO: 28376
  chr15:76083846-76084033
  hypo

SEQ ID NO: 88672 - DNA, 17 bp, Homo sapiens
  chr15:76155787-76155804
  hypo
gtttttctttttttttt

SEQ ID NO: 88673 - DNA, 148 bp, Homo sapiens
  chr15:76197435-76197583
  hypo
ttacaggcgtgagccaccgcgcccggcatgttgggccttttaagtatccacattttcactattaacaacaacgctgtgcagaaccttcccttcacctgcttcccttgaagcaactttttgttgtctgttttaccgggaagacaactgg

SEQ ID NO: 88674 - DNA, 30 bp, Homo sapiens
  chr15:76444510-76444540
  hypo
ccttccacttccgtcgagtcacccccatgt

SEQ ID NO: 88675 - DNA, 30 bp, Homo sapiens
  chr15:76559644-76559674
  hypo
ggacaagcgaggctgcgcacaacaaagcta

SEQ ID NO: 88676 - DNA, 31 bp, Homo sapiens
  chr15:76845087-76845118
  hypo
cacccccagccaggaacgtcaagcactgcta

SEQ ID NO: 88677 - DNA, 121 bp, Homo sapiens
  chr15:77072339-77072460
  hypo
aggtacctggttcatctcattgtgactggttggacaggaggcgcccacaaaaggcgagccaaagcagggctgggtgccgcctcacccaggaaatacaagggatccagggatttccctttcc

SEQ ID NO: 88678 - DNA, 18 bp, Homo sapiens
  chr15:77204539-77204557
  hypo
gttttgttttgctttttg

SEQ ID NO: 88679 - DNA, 31 bp, Homo sapiens
  chr15:77322084-77322115
  hypo
cgccagcccttcttggcgcttcatgtgttca

SEQ ID NO: 88680 - DNA, 30 bp, Homo sapiens; identical to SEQ ID NO: 28378
  chr15:77323550-77323580
  hypo

SEQ ID NO: 88681 - DNA, 31 bp, Homo sapiens
  chr15:77331121-77331152
  hypo
aggtgaggagtgacttcggagcccagacttg

SEQ ID NO: 88682 - DNA, 35 bp, Homo sapiens
  chr15:77332739-77332774
  hypo
aacaaagatcagcaagtaggccgggcacggtggct

SEQ ID NO: 88683 - DNA, 35 bp, Homo sapiens; identical to SEQ ID NO: 28379
  chr15:77333013-77333048
  hypo

SEQ ID NO: 88684 - DNA, 32 bp, Homo sapiens
  chr15:77358027-77358059
  hypo
catgagccaccgcacctggctgataagtttta

SEQ ID NO: 88685 - DNA, 72 bp, Homo sapiens
  chr15:77473547-77473619
  hypo
gtacatcctcttcactctcctcgccactggaaaactctgggtaacagaaccggcccccttcattactaatca

SEQ ID NO: 88686 - DNA, 20 bp, Homo sapiens
  chr15:77729918-77729938
  hypo
tttttgttttttgagacgga

SEQ ID NO: 88687 - DNA, 31 bp, Homo sapiens; identical to SEQ ID NO: 28381
  chr15:77841399-77841430
  hypo

SEQ ID NO: 88688 - DNA, 210 bp, Homo sapiens
  chr15:77880952-77881162
  hypo
atggctccctggaatgcgtcttaagcagattttgtaaactacgtggggaaggaggggtactcttccttcctggccccaaaacttgacctacgaggctatgtcggcaaagagcagggctggtcagggaggctgtcctgccagctatgtgcccttcactcttggagagtgggtgcctggctgccagcttcttctgggcgctggctgaaggaa

SEQ ID NO: 88689 - DNA, 30 bp, Homo sapiens; identical to SEQ ID NO: 28382
  chr15:77908120-77908150
  hypo

SEQ ID NO: 88690 - DNA, 205 bp, Homo sapiens
  chr15:77936321-77936526
  hypo
ctccaaagagtggtgaggacacgctgggagaatccatcagagccacggggcagggcccggcactcaggagccctccaggggagagtccttgtgaccgtgaatctagctggggcagcggcatctgctttgcgaatgtatctacgctggggagtttaggaaggatacgtagctgtgttgtgttgtcgaactctgtggtatgtgtcat

SEQ ID NO: 88691 - DNA, 31 bp, Homo sapiens
  chr15:77937833-77937864
  hypo
gcgaggtggacgtgcacgcctcatggctaaa

SEQ ID NO: 88692 - DNA, 31 bp, Homo sapiens; identical to SEQ ID NO: 28383
  chr15:78090760-78090791
  hypo

SEQ ID NO: 88693 - DNA, 143 bp, Homo sapiens; identical to SEQ ID NO: 52323
  chr15:78110976-78111119
  hypo

SEQ ID NO: 88694 - DNA, 41 bp, Homo sapiens; identical to SEQ ID NO: 52324
  chr15:78111195-78111236
  hypo

SEQ ID NO: 88695 - DNA, 322 bp, Homo sapiens; identical to SEQ ID NO: 52325
  chr15:78111546-78111868
  hypo

SEQ ID NO: 88696 - DNA, 131 bp, Homo sapiens; identical to SEQ ID NO: 10299
  chr15:78111916-78112047
  hypo

SEQ ID NO: 88697 - DNA, 152 bp, Homo sapiens
  chr15:78165452-78165604
  hypo
ttcctgcaaggtcaagcgagaaccccctgagttgttcagaaggggccacgcagcagttggccagacctggaaggccgtgcctgaccttctgcaggtcacgtctctgggggcactaccacaggaaaggcaacgtcaagcgatgggactgcttc

SEQ ID NO: 88698 - DNA, 463 bp, Homo sapiens
  chr15:78191190-78191653
  hypo
cgagtggccatcagccgtgaatgaccacgcccctgtgcagaccatcagccggatcttccatgtggcccagggtgggtggcggctgctgactacagactacgtggccttcagcgatgctgactcaggctttgctgacgcccagctggtgctcacccgcaaggacctccctttggcagtatcatggccatggataagcccacgcggcccatctactgcttaacccaggaggacctcaggaagaggcgagtactgttcatgcacttgggctgatcatggcgggatccagctgcaggtgtccgatgggcaacaccaggccactgtgctgctggaggtgcaggcctcggagccctacctccgtgtggccaacggctccagccttgtggtccctcaaggaggccagggcaccatcgacatggccgtgctccacctggacaccagcctcgacatccgcaatggagatgag

SEQ ID NO: 88699 - DNA, 59 bp, Homo sapiens
  chr15:78193840-78193899
  hypo
cctgtacctgcactcccgccctgaggcctggagcgatgccttctcgctggatgtggcct

SEQ ID NO: 88700 - DNA, 173 bp, Homo sapiens
  chr15:78267622-78267795
  hypo
ccagccgggcctgggccgccctccccagggcccccgcctccatgctcactgcctcgtggtgttggggctgggcagccttgtcttcgccacaccgcagcagcaggagtatgtggtggatacagatggcacctgctcatgtctgccagtttccccgccatcgctgccagggaatg

SEQ ID NO: 88701 - DNA, 31 bp, Homo sapiens; identical to SEQ ID NO: 28387
  chr15:78268479-78268510
  hypo

SEQ ID NO: 88702 - DNA, 39 bp, Homo sapiens
  chr15:78295564-78295603
  hypo
agccagccgctctaccgccaccaacgctgctgacggttg

SEQ ID NO: 88703 - DNA, 28 bp, Homo sapiens
  chr15:78349692-78349720
  hypo
aacctaaacaggctgctatggcggctca

SEQ ID NO: 88704 - DNA, 28 bp, Homo sapiens
  chr15:78349959-78349987
  hypo
cctgggcgacagtgagactctgtctcaa

SEQ ID NO: 88705 - DNA, 80 bp, Homo sapiens; identical to SEQ ID NO: 28388
  chr15:78450090-78450170
  hypo

SEQ ID NO: 88706 - DNA, 19 bp, Homo sapiens
  chr15:78450289-78450308
  hypo
ccaccgcacctggctggct

SEQ ID NO: 88707 - DNA, 179 bp, Homo sapiens; identical to SEQ ID NO: 28390
  chr15:78463269-78463448
  hypo

SEQ ID NO: 88708 - DNA, 38 bp, Homo sapiens
  chr15:78487123-78487161
  hypo
tgccctgggcagagctcgcagcccgtctggtgctgaca

SEQ ID NO: 88709 - DNA, 176 bp, Homo sapiens
  chr15:78498324-78498500
  hypo
atctggaactcacccacgctgtagcgcagaggctccccctccacccccaaggacaccagggctgcaggacagggtgctgggcagagcatggcccccgagccaggtctgtgggagcccatgatgcctgcttagcactgccctgggaagcacctggggtccctcggtggcctccgctc

SEQ ID NO: 88710 - DNA, 167 bp, Homo sapiens; identical to SEQ ID NO: 28391
  chr15:78501820-78501987
  hypo

SEQ ID NO: 88711 - DNA, 22 bp, Homo sapiens
  chr15:78509925-78509947
  hypo
gagatggagtcttcactctgtc

SEQ ID NO: 88712 - DNA, 82 bp, Homo sapiens; identical to SEQ ID NO: 28393
  chr15:78510186-78510268
  hypo

SEQ ID NO: 88713 - DNA, 53 bp, Homo sapiens
  chr15:78526012-78526065
  hypo
tggggtcctggagttccgtgtgtgtgcgtgtgcgcgtgcgcctgccttcttcc

SEQ ID NO: 88714 - DNA, 30 bp, Homo sapiens
  chr15:78552597-78552627
  hypo
atccacccagcccccggggtctgctgctag

SEQ ID NO: 88715 - DNA, 79 bp, Homo sapiens
  chr15:78554708-78554787
  hypo
cgtcttccatgaaactggtctctggtgccaaaaagcctgggaactggtgatcttaaggatgtgacgttgaattattaga

SEQ ID NO: 88716 - DNA, 30 bp, Homo sapiens
  chr15:78555210-78555240
  hypo
gaatgcctatggtcccgagtactaaatctg

SEQ ID NO: 88717 - DNA, 150 bp, Homo sapiens
  chr15:78566543-78566693
  hypo
ggtgggaagaagggatcggtggagaagtgcccgctgtgcaaggggcgggggatgcagatccacatccagcagatcgggccgggcatggtacagcagatccagaccgtgtgcatcgagtgcaagggccagggtgagcgcatcaaccccaag

SEQ ID NO: 88718 - DNA, 27 bp, Homo sapiens
  chr15:78569543-78569570
  hypo
gagacaggggtcttgctctgtcgccca

SEQ ID NO: 88719 - DNA, 26 bp, Homo sapiens
  chr15:78569689-78569715
  hypo
gtttcgccatgttgcccagacttgtg

SEQ ID NO: 88720 - DNA, 33 bp, Homo sapiens
  chr15:78570999-78571032
  hypo
tcttttttttttgagacggagtctcgctctgtc

SEQ ID NO: 88721 - DNA, 119 bp, Homo sapiens
  chr15:78577625-78577744
  hypo
tgtgaacacaagtcctcgttccaacatcccaaacttttacacttttgtcagacgaactattttaaaaagtgaacattagtatcggtttgaagttggaaggacttcgaccaaaaatcctt

SEQ ID NO: 88722 - DNA, 215 bp, Homo sapiens
  chr15:78596057-78596272
  hypo
gccaccgcgcccggccactgtttacactattgttgcagtagctgctgccatcaccgggctgcggcagggaggcacagctggggctgcatgctggtggatgcctcccccttctgagttggggagagctccccaggtgctgctgcagccgcccaaacagcagttgcagatccaggcctcctgctttacggagcaggcagggtcgccaccctcctggg

SEQ ID NO: 88723 - DNA, 30 bp, Homo sapiens
  chr15:78601931-78601961
  hypo
agaggggacagggaccgtgaagcccagctg

SEQ ID NO: 88724 - DNA, 31 bp, Homo sapiens; identical to SEQ ID NO: 28397
  chr15:78605856-78605887
  hypo

SEQ ID NO: 88725 - DNA, 31 bp, Homo sapiens
  chr15:78612008-78612039
  hypo
acatttcccaaacagacgcttccttctccca

SEQ ID NO: 88726 - DNA, 31 bp, Homo sapiens; identical to SEQ ID NO: 28398
  chr15:78615520-78615551
  hypo

SEQ ID NO: 88727 - DNA, 30 bp, Homo sapiens; identical to SEQ ID NO: 28399
  chr15:78679678-78679708
  hypo

SEQ ID NO: 88728 - DNA, 189 bp, Homo sapiens
  chr15:78698063-78698252
  hypo
ggctgtgaggggataccgccggggctgcatgctccacagagccaggaggagcgggcaacaggcagcagcccagccctcctgggtgcagctgcagccgcccaagttgggtttgtggacccagacttccgtgtgctcttgggggcctgggaaggccctgcactgcccttgcaggctcggaagtgcctcttt

SEQ ID NO: 88729 - DNA, 189 bp, Homo sapiens; identical to SEQ ID NO: 28400
  chr15:78699263-78699452
  hypo

SEQ ID NO: 88730 - DNA, 31 bp, Homo sapiens; identical to SEQ ID NO: 28401
  chr15:78832918-78832949
  hypo

SEQ ID NO: 88731 - DNA, 586 bp, Homo sapiens; identical to SEQ ID NO: 52341
  chr15:78912441-78913027
  hypo

SEQ ID NO: 88732 - DNA, 375 bp, Homo sapiens; identical to SEQ ID NO: 52342
  chr15:78913094-78913469
  hypo

SEQ ID NO: 88733 - DNA, 16 bp, Homo sapiens
  chr15:78913480-78913496
  hypo
cgaccagatctgagca

SEQ ID NO: 88734 - DNA, 72 bp, Homo sapiens; identical to SEQ ID NO: 28404
  chr15:79031605-79031677
  hypo

SEQ ID NO: 88735 - DNA, 134 bp, Homo sapiens
  chr15:79050494-79050628
  hypo
ggctacattcacctttcgtccagggttgtcatacgctggagagtagaatgtgagaggtgacccctgtaggctgcagggcgagctctctgaaccttagtgtcccccacctggagaaggggcgtaacaccttccag

SEQ ID NO: 88736 - DNA, 155 bp, Homo sapiens
  chr15:79056309-79056464
  hypo
cccgcagggccggtgcgcaggcggcttggcaggcccgggctgacaatggaagggccgcagtggccggaggtcccgtgtgtccacacactgcacgtcccgcactgaggaacctccgccgcagctgcgggagcactggggaccgagagacgtgtatg

SEQ ID NO: 88737 - DNA, 31 bp, Homo sapiens
  chr15:79066666-79066697
  hypo
tcagcaacagctggggcgggagtatggaggc

SEQ ID NO: 88738 - DNA, 124 bp, Homo sapiens
  chr15:79081979-79082103
  hypo
tgcgagggtgaagctcggctctcagtgtagcaatgggggcaggcacagtacctgtgcccgagctcgtgggctacagtgaaggccagcggcaggcccgtgtcctcgttgatgctgcagctgcggt

SEQ ID NO: 88739 - DNA, 14 bp, Homo sapiens
  chr15:79082154-79082168
  hypo
ggttcatggctgca

SEQ ID NO: 88740 - DNA, 30 bp, Homo sapiens; identical to SEQ ID NO: 10305
  chr15:79125413-79125443
  hypo

SEQ ID NO: 88741 - DNA, 31 bp, Homo sapiens
  chr15:79138735-79138766
  hypo
ttgaaaagtctgctatcgatttaattgtttt

SEQ ID NO: 88742 - DNA, 27 bp, Homo sapiens
  chr15:79152040-79152067
  hypo
agccaccgcgcccggcctttgtttttt

SEQ ID NO: 88743 - DNA, 274 bp, Homo sapiens
  chr15:79163905-79164179
  hypo
aagtcatggagacaaaggtttgcgtaggaggataaaggtttacataggggatgcaggtaggctaagggctgtttgtggaaggatttaaataccaggctaaggactttgagatttatcgtctaaagttcattgagcacttattcattgttgggtaccgcgctaagcccgtatatgtaattctcacaataaactgacggaaatggtgctattttgcagcttagccaacaaagttgtttttgaacagggaacgacataaatccgtttgtttaggcca

SEQ ID NO: 88744 - DNA, 31 bp, Homo sapiens; identical to SEQ ID NO: 28407
  chr15:79202795-79202826
  hypo

SEQ ID NO: 88745 - DNA, 36 bp, Homo sapiens
  chr15:79208302-79208338
  hypo
tctcaattctgtccacaaaatcgtgaaggcggccaa

SEQ ID NO: 88746 - DNA, 207 bp, Homo sapiens
  chr15:79218011-79218218
  hypo
ggaccacggggtacagcgtggacctactcattcagtcattcacatccattccctgaggtcctctcctgggccagcagctctcacccctacacccataaacccagagtctacaaagctttgctgctagaacacaggggttataaaccatggacgggtaggtcccagatggcggtggaaacgagaagacccatccgagggctgtgtgac

SEQ ID NO: 88747 - DNA, 88 bp, Homo sapiens; identical to SEQ ID NO: 52347
  chr15:79237307-79237395
  hypo

SEQ ID NO: 88748 - DNA, 31 bp, Homo sapiens; identical to SEQ ID NO: 28410
  chr15:79240714-79240745
  hypo

SEQ ID NO: 88749 - DNA, 31 bp, Homo sapiens
  chr15:79288611-79288642
  hypo
aggagagtggtacacacggtggggaatgagg

SEQ ID NO: 88750 - DNA, 126 bp, Homo sapiens
  chr15:79309572-79309698
  hypo
ccaaagcaaaactaaatcttccgtgtgcataattgaggctgggtttgatcttaggtagctgccccgactcactgaagaagctacccttggctttcagggacaccgttctctcgctgtgaacattat

SEQ ID NO: 88751 - DNA, 134 bp, Homo sapiens
  chr15:79310061-79310195
  hypo
gttaggcatgaagggaccactcgctttcaggaacaggtgacgctactcacctggctgatgtcactggtccacgctgccttctcctgtctggacgaggccactaggatgactgtaaagggcggggaatcctttgg

SEQ ID NO: 88752 - DNA, 1285 bp, Homo sapiens; identical to SEQ ID NO: 10307
  chr15:79382098-79383383
  hypo

SEQ ID NO: 88753 - DNA, 30 bp, Homo sapiens; identical to SEQ ID NO: 10310
  chr15:79551660-79551690
  hypo

SEQ ID NO: 88754 - DNA, 30 bp, Homo sapiens
  chr15:79589981-79590011
  hypo
gacgatgagttcgccgaattagactgttct

SEQ ID NO: 88755 - DNA, 144 bp, Homo sapiens; identical to SEQ ID NO: 10313
  chr15:79723975-79724119
  hypo

SEQ ID NO: 88756 - DNA, 209 bp, Homo sapiens; identical to SEQ ID NO: 10314
  chr15:79724351-79724560
  hypo

SEQ ID NO: 88757 - DNA, 81 bp, Homo sapiens; identical to SEQ ID NO: 10315
  chr15:79724606-79724687
  hypo

SEQ ID NO: 88758 - DNA, 91 bp, Homo sapiens; identical to SEQ ID NO: 10316
  chr15:79724701-79724792
  hypo

SEQ ID NO: 88759 - DNA, 743 bp, Homo sapiens; identical to SEQ ID NO: 10317
  chr15:79724863-79725606
  hypo

SEQ ID NO: 88760 - DNA, 30 bp, Homo sapiens
  chr15:79852971-79853001
  hypo
ggtcccggccctggcgaggtccctgccctg

SEQ ID NO: 88761 - DNA, 31 bp, Homo sapiens
  chr15:79891742-79891773
  hypo
gtgattagatttgacacggagagaaagtgga

SEQ ID NO: 88762 - DNA, 1248 bp, Homo sapiens; identical to SEQ ID NO: 52362
  chr15:80215296-80216544
  hypo

SEQ ID NO: 88763 - DNA, 224 bp, Homo sapiens
  chr15:80216924-80217148
  hypo
agccactcaaaagtgctgggattactggcgtcagccaccgcgcgcccggtcgtgctaatcactttgaaaggcattatctcatcggttaaaacatagttttccggacttaaaagtttacagcacactggcgcagaagatggaaaaccgctgcttgcctttctccgtttattgactcacattctgctctttggatcattttcttcggaaaaagttttccaaagtgt

SEQ ID NO: 88764 - DNA, 80 bp, Homo sapiens
  chr15:80217365-80217445
  hypo
agtggagttattaacgccactcactaaacacaagtggaagttattaagagtggaggttccctcctccactcttaataaca

SEQ ID NO: 88765 - DNA, 96 bp, Homo sapiens
  chr15:80219640-80219736
  hypo
atatcattgctgtttcggaccagtctgaacatgttgccagagggttgaaaatcatgactactggccgggcgcggtggctcacgcctgtctgtaatc

SEQ ID NO: 88766 - DNA, 103 bp, Homo sapiens
  chr15:80295589-80295692
  hypo
aaaaagacatacttttccaattagggtaaacgtgcgattcgcaagggagggtgggggataggagtggtccctctgctacagcacaaggcgtgttcggacatgt

SEQ ID NO: 88767 - DNA, 25 bp, Homo sapiens
  chr15:80416209-80416234
  hypo
cccccacacccggtctcaagaatta

SEQ ID NO: 88768 - DNA, 40 bp, Homo sapiens
  chr15:80434193-80434233
  hypo
tacaggcgtgagtcaccgcgcccagccaatagattttatg

SEQ ID NO: 88769 - DNA, 37 bp, Homo sapiens; identical to SEQ ID NO: 28421
  chr15:80451293-80451330
  hypo

SEQ ID NO: 88770 - DNA, 31 bp, Homo sapiens; identical to SEQ ID NO: 28422
  chr15:80471842-80471873
  hypo

SEQ ID NO: 88771 - DNA, 30 bp, Homo sapiens; identical to SEQ ID NO: 28423
  chr15:80478607-80478637
  hypo

SEQ ID NO: 88772 - DNA, 30 bp, Homo sapiens; identical to SEQ ID NO: 10322
  chr15:80654042-80654072
  hypo

SEQ ID NO: 88773 - DNA, 30 bp, Homo sapiens
  chr15:80700805-80700835
  hypo
gaatggtcattttgcgctgatggctggcgt

SEQ ID NO: 88774 - DNA, 193 bp, Homo sapiens
  chr15:80759863-80760056
  hypo
gcatgggaggaaagccggttctccagggtgtctggcgggcaagtgcggggcggtggcgtgcagccctggacctaactcatgcgtgtactgcccatgatcttacaacgcccatcagcggccagggtgcctgcccagcatcttgcaaggtcagcagcctcagccaacggtctctgtgttccgtccaccccatcgg

SEQ ID NO: 88775 - DNA, 30 bp, Homo sapiens
  chr15:80884056-80884086
  hypo
gagcaccgccttctcgtaggtaccggcgcc

SEQ ID NO: 88776 - DNA, 30 bp, Homo sapiens
  chr15:80889577-80889607
  hypo
agcccataagctatgcgagaatgtgaacgc

SEQ ID NO: 88777 - DNA, 31 bp, Homo sapiens
  chr15:80907326-80907357
  hypo
ctccctcagaatctgtcgtccagcctttgag

SEQ ID NO: 88778 - DNA, 177 bp, Homo sapiens; identical to SEQ ID NO: 28425
  chr15:81041838-81042015
  hypo

SEQ ID NO: 88779 - DNA, 30 bp, Homo sapiens; identical to SEQ ID NO: 28426
  chr15:81192769-81192799
  hypo

SEQ ID NO: 88780 - DNA, 95 bp, Homo sapiens
  chr15:81199004-81199099
  hypo
gaaaccaatgtacctgcacatcggggaggagatagacggcgtggacatgcgggcggaggttgggcttctgagccggaacatcatagtgatggggg

SEQ ID NO: 88781 - DNA, 30 bp, Homo sapiens; identical to SEQ ID NO: 28427
  chr15:81245851-81245881
  hypo

SEQ ID NO: 88782 - DNA, 121 bp, Homo sapiens
  chr15:81247851-81247972
  hypo
gcccaatctcaggctctcccagatcagctgaatcagaatctgcattttaagaagggacccagggtagttgtttgcacagtaaagtttgagaagtgtgtgtttgtgcgtgtgtgtgtgtgtg

SEQ ID NO: 88783 - DNA, 120 bp, Homo sapiens; identical to SEQ ID NO: 52375
  chr15:81294106-81294226
  hypo

SEQ ID NO: 88784 - DNA, 30 bp, Homo sapiens
  chr15:81428880-81428910
  hypo
ggctatattcattacggtgacaaagtgatg

SEQ ID NO: 88785 - DNA, 30 bp, Homo sapiens; identical to SEQ ID NO: 28429
  chr15:81489145-81489175
  hypo

SEQ ID NO: 88786 - DNA, 30 bp, Homo sapiens; identical to SEQ ID NO: 28430
  chr15:81605217-81605247
  hypo

SEQ ID NO: 88787 - DNA, 103 bp, Homo sapiens
  chr15:81605776-81605879
  hypo
ctgcagcagaggtgctggggacgagcgccaggcaggtgagcagagcccagcccagtggaaatggccatgatacagtgatcgcgtctcatcccttgctgtgccc

SEQ ID NO: 88788 - DNA, 30 bp, Homo sapiens
  chr15:81625063-81625093
  hypo
aaatcttcattccacgacttgtagtgcacc

SEQ ID NO: 88789 - DNA, 572 bp, Homo sapiens; identical to SEQ ID NO: 10331
  chr15:82339663-82340235
  hypo

SEQ ID NO: 88790 - DNA, 30 bp, Homo sapiens; identical to SEQ ID NO: 28432
  chr15:82379868-82379898
  hypo

SEQ ID NO: 88791 - DNA, 30 bp, Homo sapiens
  chr15:82452671-82452701
  hypo
actacttgagagacacgatgctgaacgctt

SEQ ID NO: 88792 - DNA, 844 bp, Homo sapiens; identical to SEQ ID NO: 10332
  chr15:83316231-83317075
  hypo

SEQ ID NO: 88793 - DNA, 30 bp, Homo sapiens
  chr15:83361042-83361072
  hypo
ttccacgtccttctcgcgcacgttggaagg

SEQ ID NO: 88794 - DNA, 1174 bp, Homo sapiens; identical to SEQ ID NO: 52385
  chr15:83377914-83379088
  hypo

SEQ ID NO: 88795 - DNA, 105 bp, Homo sapiens
  chr15:83379973-83380078
  hypo
gctgggacctgggacgagcagacacagtgcaaagtgcacacagttgctgcgcatggagtgataggatggtgggtccgcgtccgtcgcttcgctcactctgcgcag

SEQ ID NO: 88796 - DNA, 96 bp, Homo sapiens
  chr15:83523580-83523676
  hypo
ggggtgggtgctgtcccgtctggctccgcccgcgtggggaaggggactccgccatccctcagcacacccctggggggcccacgccctctccccaca

SEQ ID NO: 88797 - DNA, 121 bp, Homo sapiens; identical to SEQ ID NO: 28435
  chr15:83572357-83572478
  hypo

SEQ ID NO: 88798 - DNA, 30 bp, Homo sapiens; identical to SEQ ID NO: 52388
  chr15:83627114-83627144
  hypo

SEQ ID NO: 88799 - DNA, 376 bp, Homo sapiens; identical to SEQ ID NO: 52389
  chr15:83654592-83654968
  hypo

SEQ ID NO: 88800 - DNA, 106 bp, Homo sapiens; identical to SEQ ID NO: 52390
  chr15:83655930-83656036
  hypo

SEQ ID NO: 88801 - DNA, 30 bp, Homo sapiens; identical to SEQ ID NO: 52391
  chr15:83656501-83656531
  hypo

SEQ ID NO: 88802 - DNA, 31 bp, Homo sapiens
  chr15:83665102-83665133
  hypo
aaataataaagctggcgcggtggctcacgcc

SEQ ID NO: 88803 - DNA, 135 bp, Homo sapiens; identical to SEQ ID NO: 52392
  chr15:83680650-83680785
  hypo

SEQ ID NO: 88804 - DNA, 30 bp, Homo sapiens; identical to SEQ ID NO: 52393
  chr15:83695057-83695087
  hypo

SEQ ID NO: 88805 - DNA, 30 bp, Homo sapiens; identical to SEQ ID NO: 52394
  chr15:83722444-83722474
  hypo

SEQ ID NO: 88806 - DNA, 30 bp, Homo sapiens; identical to SEQ ID NO: 52395
  chr15:83735225-83735255
  hypo

SEQ ID NO: 88807 - DNA, 86 bp, Homo sapiens; identical to SEQ ID NO: 10338
  chr15:83775915-83776001
  hypo

SEQ ID NO: 88808 - DNA, 115 bp, Homo sapiens; identical to SEQ ID NO: 10339
  chr15:83776022-83776137
  hypo

SEQ ID NO: 88809 - DNA, 149 bp, Homo sapiens; identical to SEQ ID NO: 10340
  chr15:83776157-83776306
  hypo

SEQ ID NO: 88810 - DNA, 384 bp, Homo sapiens; identical to SEQ ID NO: 10341
  chr15:83776332-83776716
  hypo

SEQ ID NO: 88811 - DNA, 174 bp, Homo sapiens; identical to SEQ ID NO: 52401
  chr15:83776768-83776942
  hypo

SEQ ID NO: 88812 - DNA, 30 bp, Homo sapiens; identical to SEQ ID NO: 52402
  chr15:83777667-83777697
  hypo

SEQ ID NO: 88813 - DNA, 30 bp, Homo sapiens; identical to SEQ ID NO: 52403
  chr15:83801859-83801889
  hypo

SEQ ID NO: 88814 - DNA, 42 bp, Homo sapiens; identical to SEQ ID NO: 28442
  chr15:83827861-83827903
  hypo

SEQ ID NO: 88815 - DNA, 30 bp, Homo sapiens; identical to SEQ ID NO: 52408
  chr15:83912383-83912413
  hypo

SEQ ID NO: 88816 - DNA, 30 bp, Homo sapiens; identical to SEQ ID NO: 52409
  chr15:83950994-83951024
  hypo

SEQ ID NO: 88817 - DNA, 30 bp, Homo sapiens; identical to SEQ ID NO: 52412
  chr15:84006836-84006866
  hypo

SEQ ID NO: 88818 - DNA, 73 bp, Homo sapiens; identical to SEQ ID NO: 52413
  chr15:84034425-84034498
  hypo

SEQ ID NO: 88819 - DNA, 30 bp, Homo sapiens; identical to SEQ ID NO: 52414
  chr15:84042481-84042511
  hypo

SEQ ID NO: 88820 - DNA, 30 bp, Homo sapiens; identical to SEQ ID NO: 52415
  chr15:84103752-84103782
  hypo

SEQ ID NO: 88821 - DNA, 30 bp, Homo sapiens; identical to SEQ ID NO: 52421
  chr15:84178217-84178247
  hypo

SEQ ID NO: 88822 - DNA, 30 bp, Homo sapiens; identical to SEQ ID NO: 52422
  chr15:84228139-84228169
  hypo

SEQ ID NO: 88823 - DNA, 30 bp, Homo sapiens; identical to SEQ ID NO: 52423
  chr15:84250230-84250260
  hypo

SEQ ID NO: 88824 - DNA, 195 bp, Homo sapiens; identical to SEQ ID NO: 52425
  chr15:84323017-84323212
  hypo

SEQ ID NO: 88825 - DNA, 30 bp, Homo sapiens; identical to SEQ ID NO: 52426
  chr15:84323521-84323551
  hypo

SEQ ID NO: 88826 - DNA, 30 bp, Homo sapiens; identical to SEQ ID NO: 52427
  chr15:84573172-84573202
  hypo

SEQ ID NO: 88827 - DNA, 30 bp, Homo sapiens
  chr15:84683975-84684005
  hypo
atgaaccactgcgcccggtcagatgttagt

SEQ ID NO: 88828 - DNA, 47 bp, Homo sapiens; identical to SEQ ID NO: 10353
  chr15:84748572-84748619
  hypo

SEQ ID NO: 88829 - DNA, 627 bp, Homo sapiens; identical to SEQ ID NO: 10354
  chr15:84748678-84749305
  hypo

SEQ ID NO: 88830 - DNA, 30 bp, Homo sapiens; identical to SEQ ID NO: 52430
  chr15:84820321-84820351
  hypo

SEQ ID NO: 88831 - DNA, 30 bp, Homo sapiens; identical to SEQ ID NO: 52431
  chr15:84862070-84862100
  hypo

SEQ ID NO: 88832 - DNA, 31 bp, Homo sapiens
  chr15:84862581-84862612
  hypo
cctggtgatggtgctgcgtggcatcttggca

SEQ ID NO: 88833 - DNA, 30 bp, Homo sapiens
  chr15:84954170-84954200
  hypo
acccaggtgtcgtccgcgggcaggggcatg

SEQ ID NO: 88834 - DNA, 30 bp, Homo sapiens; identical to SEQ ID NO: 52432
  chr15:85138337-85138367
  hypo

SEQ ID NO: 88835 - DNA, 30 bp, Homo sapiens; identical to SEQ ID NO: 52433
  chr15:85141961-85141991
  hypo

SEQ ID NO: 88836 - DNA, 185 bp, Homo sapiens; identical to SEQ ID NO: 52434
  chr15:85143716-85143901
  hypo

SEQ ID NO: 88837 - DNA, 30 bp, Homo sapiens; identical to SEQ ID NO: 52436
  chr15:85173528-85173558
  hypo

SEQ ID NO: 88838 - DNA, 30 bp, Homo sapiens; identical to SEQ ID NO: 52437
  chr15:85177510-85177540
  hypo

SEQ ID NO: 88839 - DNA, 30 bp, Homo sapiens; identical to SEQ ID NO: 52438
  chr15:85189435-85189465
  hypo

SEQ ID NO: 88840 - DNA, 30 bp, Homo sapiens; identical to SEQ ID NO: 52439
  chr15:85192532-85192562
  hypo

SEQ ID NO: 88841 - DNA, 30 bp, Homo sapiens; identical to SEQ ID NO: 52440
  chr15:85198783-85198813
  hypo

SEQ ID NO: 88842 - DNA, 30 bp, Homo sapiens; identical to SEQ ID NO: 52441
  chr15:85199264-85199294
  hypo

SEQ ID NO: 88843 - DNA, 184 bp, Homo sapiens; identical to SEQ ID NO: 52442
  chr15:85200332-85200516
  hypo

SEQ ID NO: 88844 - DNA, 30 bp, Homo sapiens; identical to SEQ ID NO: 52444
  chr15:85207731-85207761
  hypo

SEQ ID NO: 88845 - DNA, 30 bp, Homo sapiens; identical to SEQ ID NO: 52445
  chr15:85223340-85223370
  hypo

SEQ ID NO: 88846 - DNA, 30 bp, Homo sapiens; identical to SEQ ID NO: 52446
  chr15:85258868-85258898
  hypo

SEQ ID NO: 88847 - DNA, 30 bp, Homo sapiens; identical to SEQ ID NO: 52450
  chr15:85328132-85328162
  hypo

SEQ ID NO: 88848 - DNA, 30 bp, Homo sapiens; identical to SEQ ID NO: 52451
  chr15:85358579-85358609
  hypo

SEQ ID NO: 88849 - DNA, 75 bp, Homo sapiens
  chr15:85383064-85383139
  hypo
gaagcgcaaggctgcggcaaagctgcgcgagatcgagcagagctggaagcacgagaaggcggtgcctggggaggt

SEQ ID NO: 88850 - DNA, 30 bp, Homo sapiens; identical to SEQ ID NO: 52452
  chr15:85399690-85399720
  hypo

SEQ ID NO: 88851 - DNA, 83 bp, Homo sapiens
  chr15:85401075-85401158
  hypo
cctcccgccgcctcaccggcctcctggaccgtgaggtgcaggctggccgccaggcccttgctgctgcccgaggctcctggggt

SEQ ID NO: 88852 - DNA, 30 bp, Homo sapiens; identical to SEQ ID NO: 52453
  chr15:85412526-85412556
  hypo

SEQ ID NO: 88853 - DNA, 31 bp, Homo sapiens
  chr15:85436148-85436179
  hypo
tagctcaggtcctgcccgtccccaaaccaat

SEQ ID NO: 88854 - DNA, 30 bp, Homo sapiens; identical to SEQ ID NO: 52454
  chr15:85447871-85447901
  hypo

SEQ ID NO: 88855 - DNA, 90 bp, Homo sapiens; identical to SEQ ID NO: 28447
  chr15:85478274-85478364
  hypo

SEQ ID NO: 88856 - DNA, 438 bp, Homo sapiens; identical to SEQ ID NO: 52456
  chr15:85525135-85525573
  hypo

SEQ ID NO: 88857 - DNA, 30 bp, Homo sapiens; identical to SEQ ID NO: 28448
  chr15:85680329-85680359
  hypo

SEQ ID NO: 88858 - DNA, 30 bp, Homo sapiens; identical to SEQ ID NO: 28449
  chr15:85681158-85681188
  hypo

SEQ ID NO: 88859 - DNA, 152 bp, Homo sapiens; identical to SEQ ID NO: 28450
  chr15:85695658-85695810
  hypo

SEQ ID NO: 88860 - DNA, 121 bp, Homo sapiens
  chr15:85725511-85725632
  hypo
atgttgtacatccagtcagcagtgaactctggcggaacaccaaagatgaggacaataagagaagagatacgtccaattaaaggagttaagaagagatgcttgaacttatgttttaaaaagt

SEQ ID NO: 88861 - DNA, 43 bp, Homo sapiens
  chr15:85774089-85774132
  hypo
aaaaaaaaaaaaaaagtccaggtgtcttcgcctagctttgtca

SEQ ID NO: 88862 - DNA, 17 bp, Homo sapiens
  chr15:85886342-85886359
  hypo
cgaattaaagaatgtat

SEQ ID NO: 88863 - DNA, 32 bp, Homo sapiens
  chr15:86095825-86095857
  hypo
ggattgaggataatttatcatcgtttttttgg

SEQ ID NO: 88864 - DNA, 25 bp, Homo sapiens
  chr15:86096036-86096061
  hypo
gttttttcaccgtgttagccaggat

SEQ ID NO: 88865 - DNA, 30 bp, Homo sapiens
  chr15:86219060-86219090
  hypo
ttgattaagttggtcgaataatgattagaa

SEQ ID NO: 88866 - DNA, 30 bp, Homo sapiens
  chr15:86220153-86220183
  hypo
gccctggcataatccgagcatgctctaatg

SEQ ID NO: 88867 - DNA, 30 bp, Homo sapiens
  chr15:86284454-86284484
  hypo
aggagaagcgcaggcgcgagcgtgagtggg

SEQ ID NO: 88868 - DNA, 118 bp, Homo sapiens
  chr15:86295494-86295612
  hypo
agtgcttagtctggggcccagcgcactcatctggaagcatgtcagcggagccgcgggacagctgccacggacggcagtggccccggattcatgtcccgagtctgaagagagctcctcc

SEQ ID NO: 88869 - DNA, 333 bp, Homo sapiens
  chr15:86313541-86313874
  hypo
aggattctcacatgggctgtccggctctggagcctgatctctgttcaaggtgactaatccctgcagggtttgctgtggacgcccaagcagagcctcacgtacccacttccctgctcccagcaggctctgccctgggccgggctccaagcggtactggctagacatcccccttgccttggaacaagagccgccatcaaggcccaagtgctcagtggagacatgttctctgaatccaggtgtctccacagggctctttacctagctggggcaagtgatggcttggaggtggggccgccagtgactcaccctcgagaccaacgcagaggcccaaga

SEQ ID NO: 88870 - DNA, 99 bp, Homo sapiens
  chr15:86332521-86332620
  hypo
ctcagccctgcttccccgtgggaggagccatccaactggtcttgcaggctggtgctcagtcgcctcctcctgccctgctgggctcccttgagatccctt

SEQ ID NO: 88871 - DNA, 30 bp, Homo sapiens
  chr15:86675318-86675348
  hypo
actttaaagagtacccgagtagcggagtac

SEQ ID NO: 88872 - DNA, 43 bp, Homo sapiens
  chr15:88493812-88493855
  hypo
caaggacacatcctcagaggccgcatttggcaatttactaaac

SEQ ID NO: 88873 - DNA, 17 bp, Homo sapiens
  chr15:88600097-88600114
  hypo
caagaacacaaagaaat

SEQ ID NO: 88874 - DNA, 264 bp, Homo sapiens; identical to SEQ ID NO: 10360
  chr15:88798724-88798988
  hypo

SEQ ID NO: 88875 - DNA, 1265 bp, Homo sapiens; identical to SEQ ID NO: 10361
  chr15:88799036-88800301
  hypo

SEQ ID NO: 88876 - DNA, 596 bp, Homo sapiens; identical to SEQ ID NO: 52462
  chr15:88800412-88801008
  hypo

SEQ ID NO: 88877 - DNA, 30 bp, Homo sapiens; identical to SEQ ID NO: 28455
  chr15:89180784-89180814
  hypo

SEQ ID NO: 88878 - DNA, 30 bp, Homo sapiens
  chr15:89198767-89198797
  hypo
catccagcccgttccgcagggactagaggc

SEQ ID NO: 88879 - DNA, 60 bp, Homo sapiens; identical to SEQ ID NO: 52469
  chr15:89248429-89248489
  hypo

SEQ ID NO: 88880 - DNA, 189 bp, Homo sapiens; identical to SEQ ID NO: 52470
  chr15:89248747-89248936
  hypo

SEQ ID NO: 88881 - DNA, 329 bp, Homo sapiens; identical to SEQ ID NO: 10369
  chr15:89345997-89346326
  hypo

SEQ ID NO: 88882 - DNA, 447 bp, Homo sapiens; identical to SEQ ID NO: 10370
  chr15:89346346-89346793
  hypo

SEQ ID NO: 88883 - DNA, 342 bp, Homo sapiens; identical to SEQ ID NO: 52473
  chr15:89346881-89347223
  hypo

SEQ ID NO: 88884 - DNA, 98 bp, Homo sapiens
  chr15:89386726-89386824
  hypo
gctggctggccgaccgcagcgtgcgctaccccatctccaaggcccggcccaactgcggtggcaacctcctgggcgtgaggaccgtctacgtgcatgcc

SEQ ID NO: 88885 - DNA, 216 bp, Homo sapiens
  chr15:89388868-89389084
  hypo
cagcgtgatccttaccgtaaagcccatcttcgaggtctcccccagtcccctggaacccgaggagcccttcacgtttgcccctgaaataggggccactgccttcgctgaggttgagaatgagactggagaggccaccaggccctggggctttcccacacctggcctgggccctgccacggcattcaccagtgaggacctcgtcgtgcaggtgaccgc

SEQ ID NO: 88886 - DNA, 187 bp, Homo sapiens
  chr15:89404007-89404194
  hypo
gcgggtcacacctctccgctcctggtgaggagtgtctgagtggggccatcttgtatcgtgcagagtgaaccccaccaagttgcctccatgcttgggtctgcgtggggtttgggtccccttcttgccctgaaggaaatgacacaaacaacggtaatcacccagcacagggattcgtggatgtagggca

SEQ ID NO: 88887 - DNA, 31 bp, Homo sapiens
  chr15:89421231-89421262
  hypo
aagcggctctgcgggtcggggaagccaaagc

SEQ ID NO: 88888 - DNA, 30 bp, Homo sapiens
  chr15:89424701-89424731
  hypo
gctctttgtcctgccgcaggtgcacgcggc

SEQ ID NO: 88889 - DNA, 30 bp, Homo sapiens
  chr15:89454572-89454602
  hypo
aggagtcctctagccgacattagcatccca

SEQ ID NO: 88890 - DNA, 31 bp, Homo sapiens
  chr15:89460438-89460469
  hypo
ccatctgccctttttgcggaaattgacaagt

SEQ ID NO: 88891 - DNA, 31 bp, Homo sapiens; identical to SEQ ID NO: 28462
  chr15:89538331-89538362
  hypo

SEQ ID NO: 88892 - DNA, 36 bp, Homo sapiens
  chr15:89605893-89605929
  hypo
caggcgtgagccaccgcacccagttggaattgattt

SEQ ID NO: 88893 - DNA, 30 bp, Homo sapiens; identical to SEQ ID NO: 28463
  chr15:89703308-89703338
  hypo

SEQ ID NO: 88894 - DNA, 19 bp, Homo sapiens
  chr15:89714323-89714342
  hypo
gcaacgagcaaaactccat

SEQ ID NO: 88895 - DNA, 30 bp, Homo sapiens
  chr15:89760454-89760484
  hypo
gccagctcctcccccgaggccgcctgcgcc

SEQ ID NO: 88896 - DNA, 41 bp, Homo sapiens; identical to SEQ ID NO: 28464
  chr15:89809025-89809066
  hypo

SEQ ID NO: 88897 - DNA, 520 bp, Homo sapiens
  chr15:89876310-89876830
  hypo
ccctgcccctacttaccaggccgagggggatatggccaccgccaatgtggggcaagttccctctgccaagcagacctccacgtcgaacaccagggcccgctcctcggggatggccacgggtacggcctccccctcggggccgtaccgggtccagccctccgcccaggcccaagccgggggcttcgggggcagctgggcctgcaacagcaagttggccgcctccaggtagggcaggctctgcttctgggccaggaggcggaagtgctggtccaggttgtccccgtagaggggcggcaggcgcagctccacgtcgggcaagggcacggctggctgcccccagagcccgtgcttctgcaggtgctcgacgctgcggcgcaccgcggcctcgccaggcatctcccctccttgcccgaagatttgctcgtgcagccctctcgagagcatctggatgtccaatgggttgtgccgcagctgcccgccctccgaggatagcacttgcggctgctgaggctgctgttgc

SEQ ID NO: 88898 - DNA, 30 bp, Homo sapiens
  chr15:89880712-89880742
  hypo
tcatcaaaacactccgtactttttttcttc

SEQ ID NO: 88899 - DNA, 788 bp, Homo sapiens; identical to SEQ ID NO: 52478
  chr15:89905399-89906187
  hypo

SEQ ID NO: 88900 - DNA, 19 bp, Homo sapiens
  chr15:90109241-90109260
  hypo
tgcccggcccattctcgct

SEQ ID NO: 88901 - DNA, 69 bp, Homo sapiens; identical to SEQ ID NO: 28466
  chr15:90171831-90171900
  hypo

SEQ ID NO: 88902 - DNA, 30 bp, Homo sapiens; identical to SEQ ID NO: 28467
  chr15:90174811-90174841
  hypo

SEQ ID NO: 88903 - DNA, 30 bp, Homo sapiens; identical to SEQ ID NO: 28468
  chr15:90176972-90177002
  hypo

SEQ ID NO: 88904 - DNA, 30 bp, Homo sapiens
  chr15:90191911-90191941
  hypo
ggtgttgagggtctcgtcgaagtcggagga

SEQ ID NO: 88905 - DNA, 73 bp, Homo sapiens
  chr15:90192227-90192300
  hypo
gggtatgtggctgccccggcgctgagggtcccccagggcgctgatgacgttgcccagcgccaggaggctgctg

SEQ ID NO: 88906 - DNA, 206 bp, Homo sapiens
  chr15:90192555-90192761
  hypo
tcatccaggccctccacgtcgacctccttcaccccgcacagcactgcgggcacagaaggccgtgagccccagggcaggggccgccagactgaccagccaggagggcaggcagagcagaactagccccaaacctgcccttcctgacccactgctccctccccatgcccacggggtactgcccttcctagttccggcttgaggggctc

SEQ ID NO: 88907 - DNA, 59 bp, Homo sapiens
  chr15:90192965-90193024
  hypo
cctcaccaacattcccgcgctcatcttcccggagctggatgtcacggctggcagtgccc

SEQ ID NO: 88908 - DNA, 31 bp, Homo sapiens
  chr15:90193326-90193357
  hypo
cttggccatgctccagcgtggtcaggcagaa

SEQ ID NO: 88909 - DNA, 30 bp, Homo sapiens
  chr15:90196079-90196109
  hypo
tgggcagcagtggtcgaactcgcagggcaa

SEQ ID NO: 88910 - DNA, 30 bp, Homo sapiens
  chr15:90207834-90207864
  hypo
ttgtgtaaacacaagcggggagtgcataca

SEQ ID NO: 88911 - DNA, 244 bp, Homo sapiens
  chr15:90214506-90214750
  hypo
ccagaaaccccacctccgtttagcttcacagggagaagaggagcctgttgtgtggccttgggagcaggcactctccgccagccttggagggtgctcaccatgggacacagacttccagtcacggcatcagcagcccctgccctctcctccctgagaggcggtgacgacagagtgcagggaggcttcgagaggtgggaagggctcaccttttcaggggggtactggagggcggggatcttttcct

SEQ ID NO: 88912 - DNA, 30 bp, Homo sapiens
  chr15:90292468-90292498
  hypo
tataaactcaggaccgccacaccattattt

SEQ ID NO: 88913 - DNA, 33 bp, Homo sapiens; identical to SEQ ID NO: 28470
  chr15:90296996-90297029
  hypo

SEQ ID NO: 88914 - DNA, 42 bp, Homo sapiens
  chr15:90317993-90318035
  hypo
tgctaaatatgaattcggccaggcgcagtggctgacgcctat

SEQ ID NO: 88915 - DNA, 81 bp, Homo sapiens
  chr15:90342640-90342721
  hypo
ggtggcagacactcaccgagtggtctctctgcagctgagtctgaatcttcctccagttctcttcgtcgtagttcacccggt

SEQ ID NO: 88916 - DNA, 31 bp, Homo sapiens
  chr15:90344911-90344942
  hypo
attctcgcctcgaccccggggggccacttgt

SEQ ID NO: 88917 - DNA, 31 bp, Homo sapiens
  chr15:90346603-90346634
  hypo
aggcccgggtcaagggcgaggggcagaagga

SEQ ID NO: 88918 - DNA, 98 bp, Homo sapiens
  chr15:90378766-90378864
  hypo
tgggaactttgatgttgagatcgccaatgttgatgttccgaggaatctctggcaggttgatgtttttcacagcagacacagcccgcgcaggggctgct

SEQ ID NO: 88919 - DNA, 31 bp, Homo sapiens
  chr15:90448918-90448949
  hypo
acaccttcccatccctcggacctttcagtgg

SEQ ID NO: 88920 - DNA, 137 bp, Homo sapiens; identical to SEQ ID NO: 28471
  chr15:90451517-90451654
  hypo

SEQ ID NO: 88921 - DNA, 305 bp, Homo sapiens; identical to SEQ ID NO: 52507
  chr15:90455904-90456209
  hypo

SEQ ID NO: 88922 - DNA, 30 bp, Homo sapiens; identical to SEQ ID NO: 28473
  chr15:90501249-90501279
  hypo

SEQ ID NO: 88923 - DNA, 50 bp, Homo sapiens
  chr15:90501715-90501765
  hypo
gaaaatgcatatactcattgtcgcagcgcgactgcaacaggcaataccca

SEQ ID NO: 88924 - DNA, 16 bp, Homo sapiens
  chr15:90541279-90541295
  hypo
aaataatagaagtgta

SEQ ID NO: 88925 - DNA, 37 bp, Homo sapiens; identical to SEQ ID NO: 28475
  chr15:90548959-90548996
  hypo

SEQ ID NO: 88926 - DNA, 30 bp, Homo sapiens; identical to SEQ ID NO: 28476
  chr15:90586506-90586536
  hypo

SEQ ID NO: 88927 - DNA, 93 bp, Homo sapiens
  chr15:90590717-90590810
  hypo
ttaaagtccatttctacgcctcacagactaatactttatcaacctggctcaaatatcacagcattttcacattgctatacaagtttcttttct

SEQ ID NO: 88928 - DNA, 197 bp, Homo sapiens
  chr15:90606045-90606242
  hypo
agccccttctgcatacacacacgcgcgcacgcgcacacacacacagcctgcctggccgccccagtgaacaagacaacatggacacggggcctgcccccataagcctcacaaagagagcattacagggtggtgtgtgttctactcagccaagtctccaggccagtgtaaaagaaagcgtggggccaactgcccaggtg

SEQ ID NO: 88929 - DNA, 338 bp, Homo sapiens
  chr15:90611435-90611773
  hypo
gccacaaggccttcacgcagaccagccacctcaagcgccacatgctgctgcactcggaggtcaagccctacagctgccacttctgcggccgcggcttcgcctaccccagcgagctcaaggcccacgaagtgaagcatgagagtggccgctgccatgtctgcgtcgagtgcggcctggacttctccaccctgacccagctcaagcgccacctggcctcccaccagggccccaccctctaccagtgcctcgagtgtgacaagtccttccactaccgcagccagttgcagaaccacatgctcaagcaccagaacgtgcgacccttcgtgtgcactgaatgc

SEQ ID NO: 88930 - DNA, 154 bp, Homo sapiens
  chr15:90617274-90617428
  hypo
aggtgggagtgggctggggtccggggaaagcaggttccccacaggctcaggacaccgggttgatgtgttctaggtgtgcgggaagtccttcaaccgcatgtacaacctgctgggccacatgcacctgcacgccggcagcaagcccttcaagtgc

SEQ ID NO: 88931 - DNA, 30 bp, Homo sapiens; identical to SEQ ID NO: 10391
  chr15:90627537-90627567
  hypo

SEQ ID NO: 88932 - DNA, 69 bp, Homo sapiens; identical to SEQ ID NO: 10392
  chr15:90628226-90628295
  hypo

SEQ ID NO: 88933 - DNA, 30 bp, Homo sapiens; identical to SEQ ID NO: 10393
  chr15:90630474-90630504
  hypo

SEQ ID NO: 88934 - DNA, 370 bp, Homo sapiens; identical to SEQ ID NO: 10394
  chr15:90631579-90631949
  hypo

SEQ ID NO: 88935 - DNA, 30 bp, Homo sapiens; identical to SEQ ID NO: 10395
  chr15:90633802-90633832
  hypo

SEQ ID NO: 88936 - DNA, 82 bp, Homo sapiens; identical to SEQ ID NO: 10396
  chr15:90634776-90634858
  hypo

SEQ ID NO: 88937 - DNA, 30 bp, Homo sapiens; identical to SEQ ID NO: 10397
  chr15:90645565-90645595
  hypo

SEQ ID NO: 88938 - DNA, 18 bp, Homo sapiens
  chr15:90706029-90706047
  hypo
tctcccttttttattgtc

SEQ ID NO: 88939 - DNA, 28 bp, Homo sapiens
  chr15:90717590-90717618
  hypo
ccaccgcgcccagccccagggctggatt

SEQ ID NO: 88940 - DNA, 28 bp, Homo sapiens
  chr15:90718920-90718948
  hypo
tttttttttttttttttgagacggagtc

SEQ ID NO: 88941 - DNA, 147 bp, Homo sapiens
  chr15:90719187-90719334
  hypo
gattacagacgtgagccaccgcacccggccggaatgcccattttatggaggagtaaactgggaggacgagcagaaatatcaaaaaagccttaagtgctgtgaaggaggctttaacgtaggaaagtcggggttgctttcccaaggagc

SEQ ID NO: 88942 - DNA, 25 bp, Homo sapiens
  chr15:90724716-90724741
  hypo
agcaagactccgtctcaaaaaaaaa

SEQ ID NO: 88943 - DNA, 37 bp, Homo sapiens; identical to SEQ ID NO: 28487
  chr15:90729567-90729604
  hypo

SEQ ID NO: 88944 - DNA, 21 bp, Homo sapiens
  chr15:90741432-90741453
  hypo
gccaccgcgcctggctggtaa

SEQ ID NO: 88945 - DNA, 30 bp, Homo sapiens; identical to SEQ ID NO: 28488
  chr15:90746123-90746153
  hypo

SEQ ID NO: 88946 - DNA, 70 bp, Homo sapiens
  chr15:90746747-90746817
  hypo
gaaggcaaaactggagagcagcgaggggaatcgaggggacctgcttcccgaggagcagctagaatacttg

SEQ ID NO: 88947 - DNA, 37 bp, Homo sapiens
  chr15:90751190-90751227
  hypo
aaattttaattaggccaggtgcggtggctcacgccta

SEQ ID NO: 88948 - DNA, 233 bp, Homo sapiens
  chr15:90753832-90754065
  hypo
atgacatgacttaatccgtttaaagggctgagaaagtgctcacatactttagctctttgagggctagaggcccagaaggcatgtgagggagacacggagtgatgcttgagactgggggcacaggtacctagaggacggggtggcgtggcccgtgtctggggtctgtcagcgaggcgatccctgggctcttggcagggctggcactgctgaacgtggggctggctgaggcccaa

SEQ ID NO: 88949 - DNA, 566 bp, Homo sapiens; identical to SEQ ID NO: 28490
  chr15:90755552-90756118
  hypo

SEQ ID NO: 88950 - DNA, 152 bp, Homo sapiens; identical to SEQ ID NO: 28491
  chr15:90761174-90761326
  hypo

SEQ ID NO: 88951 - DNA, 30 bp, Homo sapiens
  chr15:90771699-90771729
  hypo
ccccgctcgatcaccgagggtaccagtccc

SEQ ID NO: 88952 - DNA, 218 bp, Homo sapiens; identical to SEQ ID NO: 52517
  chr15:90792592-90792810
  hypo

SEQ ID NO: 88953 - DNA, 201 bp, Homo sapiens
  chr15:90806188-90806389
  hypo
accttgtagctgctgccgggacagctggacaccatgaggcctcaagaaattgtggaagaggaggagctggagcggatgaaggccctgctacaaagggagactctcatccgaagcctgggtattgtagagcagctcacccgtctgcagcaccctggcccccagggccagaaaaaacttcatgagagtcgggtgagggtccct

SEQ ID NO: 88954 - DNA, 30 bp, Homo sapiens; identical to SEQ ID NO: 28493
  chr15:90818578-90818608
  hypo

SEQ ID NO: 88955 - DNA, 31 bp, Homo sapiens
  chr15:90835325-90835356
  hypo
acaacaagaccgttgccggagtccataccac

SEQ ID NO: 88956 - DNA, 90 bp, Homo sapiens; identical to SEQ ID NO: 52518
  chr15:90891917-90892007
  hypo

SEQ ID NO: 88957 - DNA, 30 bp, Homo sapiens; identical to SEQ ID NO: 28494
  chr15:90892481-90892511
  hypo

SEQ ID NO: 88958 - DNA, 27 bp, Homo sapiens
  chr15:90896204-90896231
  hypo
cttttttttttttagacggaatttcgc

SEQ ID NO: 88959 - DNA, 359 bp, Homo sapiens; identical to SEQ ID NO: 28495
  chr15:90904012-90904371
  hypo

SEQ ID NO: 88960 - DNA, 30 bp, Homo sapiens
  chr15:90904584-90904614
  hypo
agagaaaacctgggcgtcagtggctcaatt

SEQ ID NO: 88961 - DNA, 20 bp, Homo sapiens
  chr15:90919371-90919391
  hypo
tttgagacggagtctcgctc

SEQ ID NO: 88962 - DNA, 27 bp, Homo sapiens
  chr15:90919630-90919657
  hypo
ggcctgagccaccgcacccgacccatc

SEQ ID NO: 88963 - DNA, 121 bp, Homo sapiens; identical to SEQ ID NO: 28497
  chr15:91072202-91072323
  hypo

SEQ ID NO: 88964 - DNA, 38 bp, Homo sapiens; identical to SEQ ID NO: 28498
  chr15:91072382-91072420
  hypo

SEQ ID NO: 88965 - DNA, 30 bp, Homo sapiens
  chr15:91150817-91150847
  hypo
cttagagaggcagctcgtggcagggaagcg

SEQ ID NO: 88966 - DNA, 30 bp, Homo sapiens
  chr15:91162924-91162954
  hypo
aatttggctttacagcgagtaagcccagct

SEQ ID NO: 88967 - DNA, 31 bp, Homo sapiens
  chr15:91166197-91166228
  hypo
ccaaaactccacagttcgcccagtcctactt

SEQ ID NO: 88968 - DNA, 31 bp, Homo sapiens
  chr15:91166886-91166917
  hypo
ccaagtctgttagccacgctgtcctaagaaa

SEQ ID NO: 88969 - DNA, 31 bp, Homo sapiens
  chr15:91189368-91189399
  hypo
cagctgctccccattccgtcccatggcccgt

SEQ ID NO: 88970 - DNA, 31 bp, Homo sapiens; identical to SEQ ID NO: 28499
  chr15:91192933-91192964
  hypo

SEQ ID NO: 88971 - DNA, 40 bp, Homo sapiens
  chr15:91268409-91268449
  hypo
gattacaggcataagccaccacgcccggcccccagaggaa

SEQ ID NO: 88972 - DNA, 41 bp, Homo sapiens; identical to SEQ ID NO: 28500
  chr15:91311951-91311992
  hypo

SEQ ID NO: 88973 - DNA, 41 bp, Homo sapiens
  chr15:91312231-91312272
  hypo
aggcgtgagccaccgcacccggccttatagaggttttaata

SEQ ID NO: 88974 - DNA, 30 bp, Homo sapiens; identical to SEQ ID NO: 28502
  chr15:91312476-91312506
  hypo

SEQ ID NO: 88975 - DNA, 51 bp, Homo sapiens
  chr15:91312874-91312925
  hypo
acatgttagaatcacctgtggcgctttaacgccaccaccccacccccaccc

SEQ ID NO: 88976 - DNA, 35 bp, Homo sapiens
  chr15:91313687-91313722
  hypo
gagccaccgtgcccggccaatccccacatatttat

SEQ ID NO: 88977 - DNA, 26 bp, Homo sapiens
  chr15:91328773-91328799
  hypo
tttttttttttttttccggagacaga

SEQ ID NO: 88978 - DNA, 44 bp, Homo sapiens
  chr15:91365250-91365294
  hypo
tcctacctgtgcagaacgtcagtcccagccgagaaagcaagggc

SEQ ID NO: 88979 - DNA, 30 bp, Homo sapiens
  chr15:91368495-91368525
  hypo
gcacagtggttctgcgtcatcacagacagc

SEQ ID NO: 88980 - DNA, 30 bp, Homo sapiens
  chr15:91410493-91410523
  hypo
ccctgatcactaaacggcccattgttgtgc

SEQ ID NO: 88981 - DNA, 31 bp, Homo sapiens; identical to SEQ ID NO: 10400
  chr15:91414432-91414463
  hypo

SEQ ID NO: 88982 - DNA, 31 bp, Homo sapiens; identical to SEQ ID NO: 28505
  chr15:91419630-91419661
  hypo

SEQ ID NO: 88983 - DNA, 30 bp, Homo sapiens; identical to SEQ ID NO: 28506
  chr15:91421366-91421396
  hypo

SEQ ID NO: 88984 - DNA, 108 bp, Homo sapiens
  chr15:91423322-91423430
  hypo
gagacatcgggaaacggctcgaggtgcggaagaccgtgaccgcgtgcctgggcgagcccaaccacatcactcggctggagcacgctcaggcgcggctcaccctgtcct

SEQ ID NO: 88985 - DNA, 286 bp, Homo sapiens
  chr15:91425021-91425307
  hypo
tggcaggaggagtgcccgtctgactcagaagaggacgagggccggggcgagaggaccgcctttatcaaagaccagagcgccctctgatgagcccactgcccaccccctcaagccaatcccctccttgggcactttttaattcaccaaagtatttttttatcttgggactgggtttggaccccagctgggaggcaagaggggtggagactgcttcccatcctaccctcgggcccacctggccacctgaggtgggcccaggaccagctggggcgtggggagggccgta

SEQ ID NO: 88986 - DNA, 77 bp, Homo sapiens; identical to SEQ ID NO: 52524
  chr15:91427391-91427468
  hypo

SEQ ID NO: 88987 - DNA, 278 bp, Homo sapiens; identical to SEQ ID NO: 52525
  chr15:91427788-91428066
  hypo

SEQ ID NO: 88988 - DNA, 30 bp, Homo sapiens
  chr15:91433515-91433545
  hypo
gccccatccgcggccgctgcccgccaccgg

SEQ ID NO: 88989 - DNA, 30 bp, Homo sapiens
  chr15:91434273-91434303
  hypo
ccacggggccatcccgagggcagaggtggc

SEQ ID NO: 88990 - DNA, 31 bp, Homo sapiens; identical to SEQ ID NO: 28509
  chr15:91448167-91448198
  hypo

SEQ ID NO: 88991 - DNA, 30 bp, Homo sapiens; identical to SEQ ID NO: 28510
  chr15:91450699-91450729
  hypo

SEQ ID NO: 88992 - DNA, 30 bp, Homo sapiens; identical to SEQ ID NO: 28511
  chr15:91454676-91454706
  hypo

SEQ ID NO: 88993 - DNA, 93 bp, Homo sapiens
  chr15:91497738-91497831
  hypo
gtaatcccagctactcggtaggcgaaggttgcagtgagcccagagcgcagcctcccaaagtgtcgcctgggcgacacagcgagaccctatctc

SEQ ID NO: 88994 - DNA, 121 bp, Homo sapiens
  chr15:91501897-91502018
  hypo
tcctccacaccatattctcatggaatgggcctgggctggttgccaagctcaggaaaccctgggctgagcctcgccaacgtggcaaaacctcgtctttgtacaaaaaatataaaaatgagct

SEQ ID NO: 88995 - DNA, 418 bp, Homo sapiens; identical to SEQ ID NO: 28512
  chr15:91503629-91504047
  hypo

SEQ ID NO: 88996 - DNA, 30 bp, Homo sapiens
  chr15:91517536-91517566
  hypo
aacagcagcagggccgggaatctaggcccg

SEQ ID NO: 88997 - DNA, 26 bp, Homo sapiens
  chr15:91529849-91529875
  hypo
agagcgaaactgtcaaaaaagaaaat

SEQ ID NO: 88998 - DNA, 30 bp, Homo sapiens; identical to SEQ ID NO: 28513
  chr15:91542179-91542209
  hypo

SEQ ID NO: 88999 - DNA, 30 bp, Homo sapiens
  chr15:91586359-91586389
  hypo
actgaaagtccccacgagagaacagagctt

SEQ ID NO: 89000 - DNA, 70 bp, Homo sapiens
  chr15:91840255-91840325
  hypo
gcttcttctgcctgatcgttgggcgcacgctccttctgcctgatcgttgggcgcacgctccttctgcctg

SEQ ID NO: 89001 - DNA, 31 bp, Homo sapiens; identical to SEQ ID NO: 28514
  chr15:92006983-92007014
  hypo

SEQ ID NO: 89002 - DNA, 18 bp, Homo sapiens
  chr15:92238882-92238900
  hypo
actcgttggtgctgtcct

SEQ ID NO: 89003 - DNA, 31 bp, Homo sapiens
  chr15:92279572-92279603
  hypo
aaaaaaatagtgcacccggcttgatgaatag

SEQ ID NO: 89004 - DNA, 23 bp, Homo sapiens
  chr15:92415799-92415822
  hypo
acgtgcccaagcccaagttggca

SEQ ID NO: 89005 - DNA, 444 bp, Homo sapiens; identical to SEQ ID NO: 10404
  chr15:92459206-92459650
  hypo

SEQ ID NO: 89006 - DNA, 30 bp, Homo sapiens
  chr15:92463539-92463569
  hypo
gccagggcattccacgagacagcccgaagc

SEQ ID NO: 89007 - DNA, 31 bp, Homo sapiens
  chr15:92621960-92621991
  hypo
tgtctcagtttccttacgttaaaatgggagt

SEQ ID NO: 89008 - DNA, 990 bp, Homo sapiens; identical to SEQ ID NO: 52533
  chr15:92936663-92937653
  hypo

SEQ ID NO: 89009 - DNA, 364 bp, Homo sapiens; identical to SEQ ID NO: 52534
  chr15:92937696-92938060
  hypo

SEQ ID NO: 89010 - DNA, 171 bp, Homo sapiens; identical to SEQ ID NO: 52535
  chr15:92938122-92938293
  hypo

SEQ ID NO: 89011 - DNA, 56 bp, Homo sapiens; identical to SEQ ID NO: 52536
  chr15:92938315-92938371
  hypo

SEQ ID NO: 89012 - DNA, 31 bp, Homo sapiens
  chr15:92979028-92979059
  hypo
ctttgatcagggacaccgtggagtcagcaac

SEQ ID NO: 89013 - DNA, 187 bp, Homo sapiens
  chr15:93153519-93153706
  hypo
ggctctgctcaaatgacgcaaggacagtcactgagcttctctctgccaggggaggggagaacacaggtcagaactgcacatactctggtcctgatcgctgggcttggcagggagcaggcgctccctggttgccatgcagaaacaatgacgggtcacagcaagtggggcccagcgcctaggcgggctg

SEQ ID NO: 89014 - DNA, 75 bp, Homo sapiens
  chr15:93176137-93176212
  hypo
cctaagactctctgcacgaaggctgcgatatgtatcagaacatggctggaaggtctaggacgccactgggaataa

SEQ ID NO: 89015 - DNA, 147 bp, Homo sapiens
  chr15:93179957-93180104
  hypo
gctgagacctccccaacaggtcgccttgagtcatccctggtatgccctgctctgtcacccccactcactcccatccaagagccccactccacgcctcaccggagttcgcagccacttgactttagcgccaaaaaactctttgccctc

SEQ ID NO: 89016 - DNA, 31 bp, Homo sapiens; identical to SEQ ID NO: 28520
  chr15:93206673-93206704
  hypo

SEQ ID NO: 89017 - DNA, 29 bp, Homo sapiens
  chr15:93338401-93338430
  hypo
aaaaacaggtggctggctgggcgcggtgc

SEQ ID NO: 89018 - DNA, 15 bp, Homo sapiens
  chr15:93350448-93350463
  hypo
ttttttattgagagg

SEQ ID NO: 89019 - DNA, 42 bp, Homo sapiens
  chr15:93360311-93360353
  hypo
atggatggccaggcgcggtggctcatgcctataatcccagca

SEQ ID NO: 89020 - DNA, 25 bp, Homo sapiens
  chr15:93364650-93364675
  hypo
tctcgggggaaaaaaaaaaaaaaaa

SEQ ID NO: 89021 - DNA, 32 bp, Homo sapiens; identical to SEQ ID NO: 28524
  chr15:93368948-93368980
  hypo

SEQ ID NO: 89022 - DNA, 29 bp, Homo sapiens
  chr15:93372503-93372532
  hypo
acctggccgggactctgtcttaaaaaaca

SEQ ID NO: 89023 - DNA, 22 bp, Homo sapiens
  chr15:93374251-93374273
  hypo
cggcctctttttgaattttttt

SEQ ID NO: 89024 - DNA, 38 bp, Homo sapiens
  chr15:93432396-93432434
  hypo
ttaagttaaaaatttgccaggcgcggtggctcacgcct

SEQ ID NO: 89025 - DNA, 52 bp, Homo sapiens
  chr15:93433732-93433784
  hypo
gcctgctatatttcttgattatgatctgtccgaatgactaaaggaatttaga

SEQ ID NO: 89026 - DNA, 20 bp, Homo sapiens
  chr15:93434385-93434405
  hypo
cattttatttattttttgag

SEQ ID NO: 89027 - DNA, 29 bp, Homo sapiens
  chr15:93460771-93460800
  hypo
cagagcgcgacttggtctcaaaaaacaaa

SEQ ID NO: 89028 - DNA, 95 bp, Homo sapiens; identical to SEQ ID NO: 28527
  chr15:93504238-93504333
  hypo

SEQ ID NO: 89029 - DNA, 35 bp, Homo sapiens
  chr15:93505378-93505413
  hypo
ggattgcaggcgtgagcccccgtgcccggaccctc

SEQ ID NO: 89030 - DNA, 138 bp, Homo sapiens; identical to SEQ ID NO: 28528
  chr15:93546306-93546444
  hypo

SEQ ID NO: 89031 - DNA, 82 bp, Homo sapiens; identical to SEQ ID NO: 28529
  chr15:93567907-93567989
  hypo

SEQ ID NO: 89032 - DNA, 221 bp, Homo sapiens; identical to SEQ ID NO: 28530
  chr15:93588122-93588343
  hypo

SEQ ID NO: 89033 - DNA, 89 bp, Homo sapiens; identical to SEQ ID NO: 28531
  chr15:93595487-93595576
  hypo

SEQ ID NO: 89034 - DNA, 24 bp, Homo sapiens
  chr15:93612618-93612642
  hypo
gtgagccaccgcgcctggccgatg

SEQ ID NO: 89035 - DNA, 38 bp, Homo sapiens; identical to SEQ ID NO: 28532
  chr15:93642691-93642729
  hypo

SEQ ID NO: 89036 - DNA, 30 bp, Homo sapiens
  chr15:93808641-93808671
  hypo
gtttcacagcggggacggcagcaggtggct

SEQ ID NO: 89037 - DNA, 45 bp, Homo sapiens
  chr15:93897784-93897829
  hypo
taaaatctgcatttcctggaccgggcgcggtggctcacgcctata

SEQ ID NO: 89038 - DNA, 45 bp, Homo sapiens
  chr15:93957515-93957560
  hypo
tctcctggagtcgggctgtccagcggctgggctctcccctgactg

SEQ ID NO: 89039 - DNA, 30 bp, Homo sapiens
  chr15:93975779-93975809
  hypo
cccggaaaatgggccgtgaacggctcccac

SEQ ID NO: 89040 - DNA, 33 bp, Homo sapiens; identical to SEQ ID NO: 28533
  chr15:94014474-94014507
  hypo

SEQ ID NO: 89041 - DNA, 43 bp, Homo sapiens
  chr15:94025233-94025276
  hypo
ttcttttttttttttttgagacggagtctctctctgtccccca

SEQ ID NO: 89042 - DNA, 393 bp, Homo sapiens
  chr15:94048776-94049169
  hypo
ggaagcctctgtggccagcagcgcctccgcctgggttttacttgcgtccactgggcttgttctgcccacttggcccggcaggctgagctgggctcatgctactgcccagatcccacgcctgccaagggcgagccaggtgcggagcagcaaggggtgtgtgagtgagcgagcatggagtctggccactgtgtgtagccatgcgtgctggctgcagcagggtgggccactccaggcgccggcacaagcgccggctccagccctgtgtgaacctgcagctggagcatgtgtaccacaagcggcttctgctgtgggccccagcgtctggtcaaggggaatgcaattgcgcccaaaagcttggagatgccaggaaccgcaacaccccaaagagggtgt

SEQ ID NO: 89043 - DNA, 33 bp, Homo sapiens
  chr15:94442494-94442527
  hypo
tttacagacagcgtccatctcactggtgggtcc

SEQ ID NO: 89044 - DNA, 30 bp, Homo sapiens; identical to SEQ ID NO: 52552
  chr15:94774273-94774303
  hypo

SEQ ID NO: 89045 - DNA, 30 bp, Homo sapiens; identical to SEQ ID NO: 52553
  chr15:94774835-94774865
  hypo

SEQ ID NO: 89046 - DNA, 30 bp, Homo sapiens; identical to SEQ ID NO: 52554
  chr15:94775179-94775209
  hypo

SEQ ID NO: 89047 - DNA, 221 bp, Homo sapiens
  chr15:94778461-94778682
  hypo
gacaagagcgaaactccgtctcaaaaaaaaaaaaaaatccctggtggtttagactcattcattctcctccactgatgttcttcgagtccggcagcacctacgtacctgagattaacttgttagaaatgcacgttctcaggcaccccgcattaggagctctgcgtctagagcacagtaatctgtgctttaagaagccctccggatgattctggtgcatgcta

SEQ ID NO: 89048 - DNA, 44 bp, Homo sapiens; identical to SEQ ID NO: 28535
  chr15:94794562-94794606
  hypo

SEQ ID NO: 89049 - DNA, 77 bp, Homo sapiens
  chr15:94841668-94841745
  hypo
gaggccttggccccagagggccggccttactccgggccacagtcttcctacacctcggtgcccagcagtctgtccac

SEQ ID NO: 89050 - DNA, 31 bp, Homo sapiens; identical to SEQ ID NO: 28536
  chr15:94871784-94871815
  hypo

SEQ ID NO: 89051 - DNA, 248 bp, Homo sapiens
  chr15:94881643-94881891
  hypo
aagcattgtatcatgcgacgcacatgcatgtaacacacgcacaatacataattcatgtattatgtttgcaggcattttttttttttttttttttacttccattgatctgaaaaatgtggaggagggtctgccatcagcccttctttttgctttgggcggagtgactggagggacattattcatttcttttggcgtctgtttcaaagctcccagggaggagccgggcgggtcagcggtgtcagcactga

SEQ ID NO: 89052 - DNA, 30 bp, Homo sapiens
  chr15:94897961-94897991
  hypo
gtgtggcattgttgcgtcacttattaagag

SEQ ID NO: 89053 - DNA, 27 bp, Homo sapiens
  chr15:94947824-94947851
  hypo
gcctccgtttcatcttctttcattctt

SEQ ID NO: 89054 - DNA, 107 bp, Homo sapiens
  chr15:95019505-95019612
  hypo
catttgttttcatagcagaggcggctgttaatcagcgtattccaaaaaagccaacgtgctccccagtttgagcgtgtgtttctgtcgccctgctgctgggattgtaa

SEQ ID NO: 89055 - DNA, 20 bp, Homo sapiens
  chr15:95404989-95405009
  hypo
tgcccagcctgtcattttac

SEQ ID NO: 89056 - DNA, 90 bp, Homo sapiens
  chr15:96007650-96007740
  hypo
ggctacctcttgccccaacctcgctgtcccctacccctatgttctgtccaaaagaaaaatccctcagccgcaatggttgtttttattaaa

SEQ ID NO: 89057 - DNA, 30 bp, Homo sapiens; identical to SEQ ID NO: 10416
  chr15:96284567-96284597
  hypo

SEQ ID NO: 89058 - DNA, 43 bp, Homo sapiens
  chr15:96817438-96817481
  hypo
attaattgattagttaattaacgtatggctaaagcaattaggt

SEQ ID NO: 89059 - DNA, 31 bp, Homo sapiens; identical to SEQ ID NO: 10419
  chr15:96873708-96873739
  hypo

SEQ ID NO: 89060 - DNA, 325 bp, Homo sapiens; identical to SEQ ID NO: 52563
  chr15:96873742-96874067
  hypo

SEQ ID NO: 89061 - DNA, 36 bp, Homo sapiens; identical to SEQ ID NO: 52564
  chr15:96874394-96874430
  hypo

SEQ ID NO: 89062 - DNA, 31 bp, Homo sapiens
  chr15:97308493-97308524
  hypo
tgacactgcccagacccgtttctaaaaatca

SEQ ID NO: 89063 - DNA, 30 bp, Homo sapiens; identical to SEQ ID NO: 52581
  chr15:98061086-98061116
  hypo

SEQ ID NO: 89064 - DNA, 213 bp, Homo sapiens
  chr15:98292426-98292639
  hypo
agtggacacgaacacccgccattgctatgcagcgggatgtctgcttagcaccagcaaagcgtttgggaataagtgagcaaaatgctttaatttgatagggttagaatcctgcaggctctggggtgaaaggtctccaacagctccgctcacactgaatatgcagaaataaaaaagtaaattgcttacatctgctgcaggcggcagggaaaatga

SEQ ID NO: 89065 - DNA, 137 bp, Homo sapiens; identical to SEQ ID NO: 28540
  chr15:98448106-98448243
  hypo

SEQ ID NO: 89066 - DNA, 267 bp, Homo sapiens; identical to SEQ ID NO: 52584
  chr15:98503609-98503876
  hypo

SEQ ID NO: 89067 - DNA, 737 bp, Homo sapiens; identical to SEQ ID NO: 52585
  chr15:98503946-98504683
  hypo

SEQ ID NO: 89068 - DNA, 31 bp, Homo sapiens; identical to SEQ ID NO: 28543
  chr15:98512522-98512553
  hypo

SEQ ID NO: 89069 - DNA, 245 bp, Homo sapiens; identical to SEQ ID NO: 52586
  chr15:98836082-98836327
  hypo

SEQ ID NO: 89070 - DNA, 23 bp, Homo sapiens
  chr15:98971127-98971150
  hypo
aaagctagacattttttttttcg

SEQ ID NO: 89071 - DNA, 462 bp, Homo sapiens; identical to SEQ ID NO: 52588
  chr15:98971469-98971931
  hypo

SEQ ID NO: 89072 - DNA, 31 bp, Homo sapiens
  chr15:99107215-99107246
  hypo
cattccagagctaccacgtatcagctacata

SEQ ID NO: 89073 - DNA, 20 bp, Homo sapiens
  chr15:99153343-99153363
  hypo
tttgtttttgagacagtgtc

SEQ ID NO: 89074 - DNA, 157 bp, Homo sapiens
  chr15:99161541-99161698
  hypo
tctttcacagcacacgataacacatagcagtgggtcctgctgagccctgtgcacggggtatgttgaattcactcacaagatgcactcctgagaaggaggtcgagaaacacaggaacaagctggtgaaagtccgggcgaaaggcaggtaatagtggtg

SEQ ID NO: 89075 - DNA, 20 bp, Homo sapiens
  chr15:99168894-99168914
  hypo
tcccagacctcagagtcctc

SEQ ID NO: 89076 - DNA, 19 bp, Homo sapiens
  chr15:99169213-99169232
  hypo
ctctaaataaataaataca

SEQ ID NO: 89077 - DNA, 30 bp, Homo sapiens; identical to SEQ ID NO: 52591
  chr15:99190542-99190572
  hypo

SEQ ID NO: 89078 - DNA, 177 bp, Homo sapiens; identical to SEQ ID NO: 52592
  chr15:99191461-99191638
  hypo

SEQ ID NO: 89079 - DNA, 1649 bp, Homo sapiens; identical to SEQ ID NO: 52593
  chr15:99192803-99194452
  hypo

SEQ ID NO: 89080 - DNA, 210 bp, Homo sapiens
  chr15:99210741-99210951
  hypo
acgcatgctgtgtgtcgaaggccaggtccgcctgtctgcctctccagcagatactctctggggctatttttttctgcttggttgtcatcctttggtttaaccaggcgccagggctcaggcctggacctgctggattccaaagaagacttcgaggtggccgagcttgtctggcttccagaggagctttctctgtcccgcccgggggagtgg

SEQ ID NO: 89081 - DNA, 30 bp, Homo sapiens
  chr15:99213129-99213159
  hypo
gtgccacttggattcggctacagtgggcgg

SEQ ID NO: 89082 - DNA, 30 bp, Homo sapiens
  chr15:99215852-99215882
  hypo
gcttccatgctaaacgttgtatttcttccg

SEQ ID NO: 89083 - DNA, 31 bp, Homo sapiens; identical to SEQ ID NO: 28550
  chr15:99222035-99222066
  hypo

SEQ ID NO: 89084 - DNA, 30 bp, Homo sapiens
  chr15:99237484-99237514
  hypo
attaaaggggtgaggcggctcctcaaagat

SEQ ID NO: 89085 - DNA, 38 bp, Homo sapiens; identical to SEQ ID NO: 28551
  chr15:99244846-99244884
  hypo

SEQ ID NO: 89086 - DNA, 178 bp, Homo sapiens
  chr15:99250370-99250548
  hypo
gatacttggctgctgagctgtcgttcaggccttggcaactgacgctctgcagaacggaccaggagtgtgcggtggtggagtccggctggcctgggttgcagatttaactttcgcctctgcctctgtgtgcctctgggctgtaagctttagtttgcacggttaacggggatggcctctc

SEQ ID NO: 89087 - DNA, 64 bp, Homo sapiens
  chr15:99250991-99251055
  hypo
tcttccccaacctcacggtcatccgcggctggaaactcttctacaactacgccctggtcatctt

SEQ ID NO: 89088 - DNA, 258 bp, Homo sapiens
  chr15:99254455-99254713
  hypo
ttaagatggccattcgaaaacattaagcacagaagaatcccattcaggtaatcttctgttggctggctgtagaactacggagaacatctggagaaacacgtcaagggtgtgtgtgaaatcgttgagcctactcgattttgtcgtgctgttgcgcggttttcacttggcactgtcctttaaactccttctgtgccgtgactctgcagtgtctggcagcgtagtagactctactccctctatggacgtgatccctctgtg

SEQ ID NO: 89089 - DNA, 30 bp, Homo sapiens
  chr15:99254929-99254959
  hypo
tacccccacaggtgccgcttctctgtctcc

SEQ ID NO: 89090 - DNA, 225 bp, Homo sapiens; identical to SEQ ID NO: 28553
  chr15:99256134-99256359
  hypo

SEQ ID NO: 89091 - DNA, 210 bp, Homo sapiens
  chr15:99276211-99276421
  hypo
ggagcacccctcacgcgagcccatttttcaaggatacatgtttgtcttttagattctataaggagtagctgctacacagaaagatgtctacgtgtgggtgaacacctggcgtatcccatgcagggaggcttcagcagaccttggtggcgatggaaccaccacagtgatccgaggattgggtctgaaggctcctccgagtctccaataaaa

SEQ ID NO: 89092 - DNA, 19 bp, Homo sapiens
  chr15:99295591-99295610
  hypo
aaagaatagagtgtttatt

SEQ ID NO: 89093 - DNA, 19 bp, Homo sapiens
  chr15:99295909-99295928
  hypo
ctcaaagaaaaaaaaaaag

SEQ ID NO: 89094 - DNA, 254 bp, Homo sapiens
  chr15:99338921-99339175
  hypo
gtcatgagccactgcgcctattatgtgtttcttatagaaaatctctctaattttttaataagcatgtttttacaaatgctgtttcctgagaactgtcgcaccacatgcgacatgccatgcatgcgactggaacatgccagatatttgtgggtggtcccttcgtgtcacctgtgccttcttaccaagtaatttgaaacacccgtgtaaactacctttggcaaataggatagctaaatcaccgctaagatttataa

SEQ ID NO: 89095 - DNA, 39 bp, Homo sapiens
  chr15:99340601-99340640
  hypo
ggacagtgagcatggcgagtggaccgttacctgtgcata

SEQ ID NO: 89096 - DNA, 173 bp, Homo sapiens
  chr15:99352650-99352823
  hypo
cagcctcccaagttccgctggcgtgagaggcttgcctggtgccagggctctgggcattgggaacattgcctggtctaccgggcaagaaacgtgaaccaccgcagtgaactggcagcgcgttggcatttttccctccatgtttttataaaaccgctgagtagacaccagattat

SEQ ID NO: 89097 - DNA, 121 bp, Homo sapiens; identical to SEQ ID NO: 28558
  chr15:99354750-99354871
  hypo

SEQ ID NO: 89098 - DNA, 30 bp, Homo sapiens
  chr15:99364765-99364795
  hypo
tcagttgagtgatgcgtgagggaggcgtta

SEQ ID NO: 89099 - DNA, 160 bp, Homo sapiens; identical to SEQ ID NO: 28559
  chr15:99371125-99371285
  hypo

SEQ ID NO: 89100 - DNA, 11 bp, Homo sapiens
  chr15:99414271-99414282
  hypo
catgcacaaag

SEQ ID NO: 89101 - DNA, 30 bp, Homo sapiens
  chr15:99427001-99427031
  hypo
tcgaaagtgttcgccgggctgcctctgcct

SEQ ID NO: 89102 - DNA, 30 bp, Homo sapiens
  chr15:99429890-99429920
  hypo
aattctcagttttggcgctcgcatggaaca

SEQ ID NO: 89103 - DNA, 46 bp, Homo sapiens
  chr15:99430951-99430997
  hypo
gaacctcacagatccattatacgacgtgaattttgtgggaataaca

SEQ ID NO: 89104 - DNA, 30 bp, Homo sapiens
  chr15:99431389-99431419
  hypo
ccgtacttgctgtgtcgtccgttccctggg

SEQ ID NO: 89105 - DNA, 39 bp, Homo sapiens
  chr15:99433537-99433576
  hypo
agcagatgcagttaaagaagccggcgcaaacccaccaaa

SEQ ID NO: 89106 - DNA, 495 bp, Homo sapiens; identical to SEQ ID NO: 28560
  chr15:99434482-99434977
  hypo

SEQ ID NO: 89107 - DNA, 109 bp, Homo sapiens
  chr15:99440184-99440293
  hypo
tgttgatgcttttcatgctcccgtccctgagtcaccactaaaatatgggcttagataaacaacatggtgtgtaagcctcacgcatgacgtctcttctttgagtttccct

SEQ ID NO: 89108 - DNA, 30 bp, Homo sapiens
  chr15:99451514-99451544
  hypo
aagtgtacgctgttccgattgggtagcaga

SEQ ID NO: 89109 - DNA, 196 bp, Homo sapiens
  chr15:99451865-99452061
  hypo
gactgtggccaagggcaggtgcgctaacatcgatttctgtgcttctaggaattactccttctacgtcctcgacaaccagaacttgcagcaactgtgggactgggaccaccgcaacctgaccatcaaagcagggaaaatgtactttgctttcaatcccaaattatgtgtttccgaaatttaccgcatggaggaagtg

SEQ ID NO: 89110 - DNA, 109 bp, Homo sapiens
  chr15:99454575-99454684
  hypo
accacgtcgaagaatcgcatcatcataacctggcaccggtaccggccccctgactacagggatctcatcagcttcaccgtttactacaaggaagcgtgagtttctgctt

SEQ ID NO: 89111 - DNA, 30 bp, Homo sapiens; identical to SEQ ID NO: 28563
  chr15:99456401-99456431
  hypo

SEQ ID NO: 89112 - DNA, 42 bp, Homo sapiens; identical to SEQ ID NO: 28564
  chr15:99461819-99461861
  hypo

SEQ ID NO: 89113 - DNA, 30 bp, Homo sapiens
  chr15:99462513-99462543
  hypo
ctgctgcccgccacacggaaggatggattt

SEQ ID NO: 89114 - DNA, 30 bp, Homo sapiens
  chr15:99464335-99464365
  hypo
cctattcctaagaccggtgaccccagccga

SEQ ID NO: 89115 - DNA, 30 bp, Homo sapiens; identical to SEQ ID NO: 28565
  chr15:99491944-99491974
  hypo

SEQ ID NO: 89116 - DNA, 312 bp, Homo sapiens
  chr15:99497067-99497379
  hypo
ggttctgcgggaatcgagtgcttgagtgggacccagacagacaggaagggcgctcctgctcagttagccccagtaagctcactgaggcacacaggccccatgtccacagccgctcctggctgaggcgtggttcctaagacgacccttactgttgagggctgccaggagggagagacacattcagccccgcaggtcctctgggaatccggtgagcgtcggcaccgggctggggccgtgctgattcccggcagcgtgtgggaatgtgcgggtgcctcgtggcctgctgacatcgcacacaggtcacagcctgtc

SEQ ID NO: 89117 - DNA, 30 bp, Homo sapiens
  chr15:99500688-99500718
  hypo
tgtgcaaacagtaacgtgtgcgcacgcgca

SEQ ID NO: 89118 - DNA, 30 bp, Homo sapiens
  chr15:99502669-99502699
  hypo
gttgagtgggaccccgggatccaggctggc

SEQ ID NO: 89119 - DNA, 275 bp, Homo sapiens
  chr15:99504098-99504373
  hypo
agcccagtggccggcgccgaggctcgtggcgtcacgccccccccgccagggctgtacctccgtctccctggtcctgctgctcacaggacagacggctcgctcccctcttccagcagctgctcttacaggcactgatgatttcgctgggaagtgtggcgggcagctttgcctaagcgtggatggctcctcggcaattccagcctaagtgaaggcgctcaggagcctcctgctggaacgcgacccatctctcccaggaccccggggatcttaaggtc

SEQ ID NO: 89120 - DNA, 178 bp, Homo sapiens; identical to SEQ ID NO: 28567
  chr15:99506041-99506219
  hypo

SEQ ID NO: 89121 - DNA, 106 bp, Homo sapiens
  chr15:99512751-99512857
  hypo
gccaggtaggcacacgccgccctcgggccagaagctgcggatgtcggcgtcccggtagccttggttcttgccagactgttccagaatgatcgccttggcggcggtg

SEQ ID NO: 89122 - DNA, 30 bp, Homo sapiens
  chr15:99514211-99514241
  hypo
ctccagctccacatcgccagtcccatgccc

SEQ ID NO: 89123 - DNA, 31 bp, Homo sapiens; identical to SEQ ID NO: 28569
  chr15:99947375-99947406
  hypo

SEQ ID NO: 89124 - DNA, 39 bp, Homo sapiens; identical to SEQ ID NO: 10433
  chr15:99955138-99955177
  hypo

SEQ ID NO: 89125 - DNA, 438 bp, Homo sapiens
  chr15:99966716-99967154
  hypo
cctcatggtcacttccaggtgcgcagagtccaggaactgtcccgttttccagatgaggaaatggatgcttttgagagtcacgtcacatgcacggagcacaggtgtgcccgaggccgcgccccgcagcagagctgggattagaatctagctgttttggagccatcgtcttttccgtgatgttctgaggggcctctctgtttcttttgaggagtttcatgctgattattgagacaaggtggttcaggcaagaccgctctcgagcatggacgcaggcacgtaaaagttcatgcacaatcacaccacaggcattccagagcacctcagacgggaggggcctgcgggagggtaaagtcagagggcctgggcgggcggcagatgcagtgatgaggagagagcatcccggggagctactctggggatcggcgtgggaggctggac

SEQ ID NO: 89126 - DNA, 31 bp, Homo sapiens; identical to SEQ ID NO: 28572
  chr15:99975076-99975107
  hypo

SEQ ID NO: 89127 - DNA, 235 bp, Homo sapiens
  chr15:100007567-100007802
  hypo
gaacaaggatgggtacgactgcgctgggtagagtgggaagaggtggttttctaggagaaaggattagcgtggacaaaggtgtgggggcagagggtcgcctggggctgaaaccagcaggcctggccggaagcatggcgcaaagccaggctgccagcgggggtcccggactgagtgtcccttgttctgcaggctgttgtgagccctggagagagtcacaagacgggtgtgtttttct

SEQ ID NO: 89128 - DNA, 61 bp, Homo sapiens; identical to SEQ ID NO: 52596
  chr15:100273843-100273904
  hypo

SEQ ID NO: 89129 - DNA, 337 bp, Homo sapiens; identical to SEQ ID NO: 52597
  chr15:100273945-100274282
  hypo

SEQ ID NO: 89130 - DNA, 31 bp, Homo sapiens
  chr15:100519845-100519876
  hypo
ctggcaaaccgacaggcgactcaaagtggag

SEQ ID NO: 89131 - DNA, 210 bp, Homo sapiens
  chr15:100649030-100649240
  hypo
caccaggcaacactggcggcaggaggcggcatcactgggtgccttcctaagaaaatccactcccctaggcctcctgagacctctgctctaccccactccctgtctggggagagtgagtctcctctccaaagccccaccaaggaccgaaggagaagtacgtcacctggcacttgccgtgcacgcagagatcagtctcgtagggcccgcagg

SEQ ID NO: 89132 - DNA, 205 bp, Homo sapiens; identical to SEQ ID NO: 28575
  chr15:100726605-100726810
  hypo

SEQ ID NO: 89133 - DNA, 255 bp, Homo sapiens
  chr15:100739955-100740210
  hypo
ctggatgggcactccatgctgcgatcctacgccagatctgtctaacttcagcgcctagggctgggaccaggtgagccagccaggtaagacaccgagggtgcaaggtttaagaggccctgactcccctcaggcgatgcccctgcacccgcacaccctgagagggagcgcctcctcacaatgcgcatcccgggcgtgagccggggtctgtgctgggtctcgtggacagcacgccccggaaggctgcacagaatgttc

SEQ ID NO: 89134 - DNA, 103 bp, Homo sapiens; identical to SEQ ID NO: 28576
  chr15:100791526-100791629
  hypo

SEQ ID NO: 89135 - DNA, 31 bp, Homo sapiens
  chr15:100796879-100796910
  hypo
cctggtggtgcagcttcgggccagctgtgtc

SEQ ID NO: 89136 - DNA, 146 bp, Homo sapiens
  chr15:100851743-100851889
  hypo
agttactaaagtggggcgggcgtgtgttgcataagagtccaggggagaactgggaagagccgacaccacttcttgtccaattcctctgtttggtggagctgcatgtgggaaaaaggattcagacacatatgcgcacacacaaaaaa

SEQ ID NO: 89137 - DNA, 683 bp, Homo sapiens; identical to SEQ ID NO: 52599
  chr15:100881160-100881843
  hypo

SEQ ID NO: 89138 - DNA, 520 bp, Homo sapiens; identical to SEQ ID NO: 52600
  chr15:100881966-100882486
  hypo

SEQ ID NO: 89139 - DNA, 27 bp, Homo sapiens
  chr15:100889039-100889066
  hypo
tcaagatggagtcgctctggttcgaac

SEQ ID NO: 89140 - DNA, 238 bp, Homo sapiens; identical to SEQ ID NO: 28579
  chr15:101099269-101099507
  hypo

SEQ ID NO: 89141 - DNA, 30 bp, Homo sapiens; identical to SEQ ID NO: 28580
  chr15:101189043-101189073
  hypo

SEQ ID NO: 89142 - DNA, 31 bp, Homo sapiens
  chr15:101246102-101246133
  hypo
gccacagaaagggagtcgggctacggaaatg

SEQ ID NO: 89143 - DNA, 31 bp, Homo sapiens
  chr15:101251437-101251468
  hypo
attaggtgcatgctttcgtcccagttgctca

SEQ ID NO: 89144 - DNA, 194 bp, Homo sapiens
  chr15:101266999-101267193
  hypo
tgctccctcctcactgcgtggagcagcggctttgctgggcttccttctaccatccccattaccctgatttcattcttatcccattcctttcctcctgggaaggcctggaatgatgatatgtcccagtgccatagagtagcacggataccagcacacacacagagtactcggcatgaacccggctctgttccact

SEQ ID NO: 89145 - DNA, 30 bp, Homo sapiens
  chr15:101417773-101417803
  hypo
ctctgtttactcacccgtaaaatggggaga

SEQ ID NO: 89146 - DNA, 471 bp, Homo sapiens; identical to SEQ ID NO: 52605
  chr15:101458273-101458744
  hypo

SEQ ID NO: 89147 - DNA, 1208 bp, Homo sapiens; identical to SEQ ID NO: 52606
  chr15:101459064-101460272
  hypo

SEQ ID NO: 89148 - DNA, 164 bp, Homo sapiens
  chr15:101464763-101464927
  hypo
gcaccccacagccagcggcagtggcagtgacaacagcgggacctgcctttgaagatcggctgctgcaagggttgatggctggcatgtcgcaaagaccccccagcatgtactggtgtgtggggccggaggagtcagctgtgtgtccagaacgtgccatggagacg

SEQ ID NO: 89149 - DNA, 175 bp, Homo sapiens
  chr15:101469410-101469585
  hypo
cttgggaagacttctggattgcggagggtgggtggaacttgagcagacatcacccaggcagtggctcgcccccccagctctctgtgagtggccgtcgcttcggtcctgaaagccctgccacagtcacacacctctcagagcactgcccaccaccggacccagcatggaccaaagg

SEQ ID NO: 89150 - DNA, 148 bp, Homo sapiens
  chr15:101535256-101535404
  hypo
gctgtgaccttgttgaagtaacggtcccttcagggcacgtgtgacggaggttgttgctccagccctggtacaacaagcagtcacgggccacgcgatgatgtcttagggagatcatgcatgtgccatcgtgttttttgtgtggttgagc

SEQ ID NO: 89151 - DNA, 30 bp, Homo sapiens
  chr15:101591988-101592018
  hypo
ctgggcccagcacacggaccccagtgagaa

SEQ ID NO: 89152 - DNA, 30 bp, Homo sapiens
  chr15:101593326-101593356
  hypo
agacatatgctgcccgggtctaagctctgt

SEQ ID NO: 89153 - DNA, 30 bp, Homo sapiens
  chr15:101605991-101606021
  hypo
agggacatgtttcccgtgcggcccttggac

SEQ ID NO: 89154 - DNA, 30 bp, Homo sapiens; identical to SEQ ID NO: 28585
  chr15:101606252-101606282
  hypo

SEQ ID NO: 89155 - DNA, 30 bp, Homo sapiens
  chr15:101626332-101626362
  hypo
tccgcaagactctccggcgcctgcgcggct

SEQ ID NO: 89156 - DNA, 30 bp, Homo sapiens
  chr15:101641428-101641458
  hypo
cattcattcccagccggtttcaagacccgg

SEQ ID NO: 89157 - DNA, 30 bp, Homo sapiens; identical to SEQ ID NO: 28586
  chr15:101713830-101713860
  hypo

SEQ ID NO: 89158 - DNA, 20 bp, Homo sapiens
  chr15:101761369-101761389
  hypo
tgtcacacgcaggtacgcag

SEQ ID NO: 89159 - DNA, 117 bp, Homo sapiens
  chr15:101785824-101785941
  hypo
cagtcacgcacaatccgctattgacagccacatctatccctggaatcaatccgctattgacagccacagccatccctggaaatccctggaatattgtttgagcgcttcaagatcttg

SEQ ID NO: 89160 - DNA, 31 bp, Homo sapiens
  chr15:101801703-101801734
  hypo
acgtataattgatatacgataaactgcacat

SEQ ID NO: 89161 - DNA, 99 bp, Homo sapiens
  chr15:101809505-101809604
  hypo
tcttcaggagtgctcaaggaccgcaaaggatgctaacttcaggcgaggaccgaggcgacccatcaccccctgccacacgtgacctgaagagcagcttca

SEQ ID NO: 89162 - DNA, 291 bp, Homo sapiens; identical to SEQ ID NO: 52609
  chr15:101835657-101835948
  hypo

SEQ ID NO: 89163 - DNA, 30 bp, Homo sapiens
  chr15:101843584-101843614
  hypo
gattctcaaaacaacgcccctcacccactc

SEQ ID NO: 89164 - DNA, 34 bp, Homo sapiens
  chr15:101845351-101845385
  hypo
gctgtcaggtgcagggcgccgctcctgaaacaga

SEQ ID NO: 89165 - DNA, 430 bp, Homo sapiens
  chr15:101850159-101850589
  hypo
aacccagcaggcctgcgtcctgacctgcatgttccaacgcagcccgtctggccacatgctccctcggagctgcctggcacagcagcagcggacggccacggcgtccaccagcattctggggcctggaggatgcctgtggttctcagctcaggctgtccaagtggggagagaccccgcagaaccaatcggaccaaggccttgcttcctttgggaggcgtccacactgacgctcttcctggggggtgcttctccaagacccggtgtgtcagccccagcactgtcagcctctgcagggccgaaagctgcccctcacctgggaacaagtacccaggaaactcctgtcctccactgcccaaagagaggtttgcggtggggctgcccgcctgctgcctcctgaggggcaaagagaggtttgcggtggggctgcctg

SEQ ID NO: 89166 - DNA, 31 bp, Homo sapiens
  chr15:101859003-101859034
  hypo
gtgttggcatttatggcgtgtgacggggctg

SEQ ID NO: 89167 - DNA, 197 bp, Homo sapiens
  chr15:101862666-101862863
  hypo
aacacactccaagcagcgccaccgccctgacattcctcaggtttcgagggggttttacctgaatccttctttacagacagtacatttctcaggttcatccacgcactttttacagcttgggtggcatttaaggcaatttttctgacctggagaaaaatagcgagataagaaaagagaagggacgacactgacaggaa

SEQ ID NO: 89168 - DNA, 117 bp, Homo sapiens
  chr15:101865102-101865219
  hypo
tctcctggtggtgatagaacccgcggcggcaagacaggcactgcgtcgcagctctgctggagcaggtctcacaccccttgtggcaccggcgacagcgtcttgctgctgtgtccccaa

SEQ ID NO: 89169 - DNA, 31 bp, Homo sapiens
  chr15:101865528-101865559
  hypo
tgacttttggaactgtcggctctggcaaaac

SEQ ID NO: 89170 - DNA, 31 bp, Homo sapiens; identical to SEQ ID NO: 28590
  chr15:101911510-101911541
  hypo

SEQ ID NO: 89171 - DNA, 31 bp, Homo sapiens
  chr15:101922353-101922384
  hypo
ttctttgcctccacaacgagagcttctgcgt

SEQ ID NO: 89172 - DNA, 30 bp, Homo sapiens
  chr15:101926292-101926322
  hypo
cttgtctcggtgcacgtttactaggaacgc

SEQ ID NO: 89173 - DNA, 289 bp, Homo sapiens; identical to SEQ ID NO: 28591
  chr15:101938604-101938893
  hypo

SEQ ID NO: 89174 - DNA, 34 bp, Homo sapiens
  chr15:101949372-101949406
  hypo
agcagggaggctgagcgcgggggctcatgcctgt

SEQ ID NO: 89175 - DNA, 33 bp, Homo sapiens
  chr15:101949765-101949798
  hypo
ggcgacagagtaagactccgtctcaaaaaaaaa

SEQ ID NO: 89176 - DNA, 30 bp, Homo sapiens
  chr15:101967403-101967433
  hypo
cacgcggggcaggggcggctgctgctccgt

SEQ ID NO: 89177 - DNA, 169 bp, Homo sapiens; identical to SEQ ID NO: 28592
  chr15:101974858-101975027
  hypo

SEQ ID NO: 89178 - DNA, 115 bp, Homo sapiens
  chr15:101977434-101977549
  hypo
ccagcagggcaagagggccatcgtgacaagtgagagacgattacatggtttcgtgagagcccatcatggcgagatgcccaggcccacctccggcgcagcactggctcacctaggg

SEQ ID NO: 89179 - DNA, 30 bp, Homo sapiens
  chr15:101998573-101998603
  hypo
cataaacccaaatgccgtagagacccgagc

SEQ ID NO: 89180 - DNA, 30 bp, Homo sapiens
  chr15:101998878-101998908
  hypo
gctcctcgctccttccgaagactcccactc

SEQ ID NO: 89181 - DNA, 173 bp, Homo sapiens; identical to SEQ ID NO: 28593
  chr15:102004884-102005057
  hypo

SEQ ID NO: 89182 - DNA, 284 bp, Homo sapiens
  chr15:102022131-102022415
  hypo
caggagccagtacagattccccgagacagagccatgctggtgtgcagccctttgagtctgtgcgcgttcacgcacacgcatgtgcacgcacccggtggacagagggagaaacggcggctggtggggtctccggaggttgctatgcctcttgtctgttcattctggcagaagccgaaaggcttttctgtctgatgatttacctttgtctgggaagcaggtacgaggtgacagcagtagaaggtgagtcagagggtgtggggtccggccctggcctgtcagtcact

SEQ ID NO: 89183 - DNA, 76 bp, Homo sapiens
  chr15:102030589-102030665
  hypo
ggtgaacccccaggccgcgcaggtgaacccccaggccgtgcaggtgaacccccaggccgtccgcttagcctcgctg

SEQ ID NO: 89184 - DNA, 31 bp, Homo sapiens; identical to SEQ ID NO: 28595
  chr15:102031395-102031426
  hypo

SEQ ID NO: 89185 - DNA, 372 bp, Homo sapiens; identical to SEQ ID NO: 28596
  chr15:102043026-102043398
  hypo

SEQ ID NO: 89186 - DNA, 20 bp, Homo sapiens
  chr15:102043700-102043720
  hypo
acaaagaatacgggccgggc

SEQ ID NO: 89187 - DNA, 157 bp, Homo sapiens
  chr15:102070858-102071015
  hypo
cagcagcacactcatggagggcgggtggcgccctgggtgctgctgtgtgccagctgtcaatcaccgtgggctggaatgtggattacaagcctggaaggggtatcgcgcactcagggtttagccacagtatacaaacggcttttccacctttcctgtc

SEQ ID NO: 89188 - DNA, 30 bp, Homo sapiens
  chr15:102075829-102075859
  hypo
ggccagtgggaaacgcgtgtagggttgttt

SEQ ID NO: 89189 - DNA, 30 bp, Homo sapiens
  chr15:102076400-102076430
  hypo
ttgtggggcggggggcgggggtggacggcg

SEQ ID NO: 89190 - DNA, 581 bp, Homo sapiens
  chr15:102076806-102077387
  hypo
agagctgtgggagcagcgtggggacagacccggggaaggtggcagagaaagaaccccagtcgggtggtgggtggtccccagctcagcgctgtcctggggccagtgattcggcctccgggccccagcttcattgtctgggtcttcctggcagggcagtggcgaggagttctacgagctaacgggagtggaatgcctgccctttctcatctccctgacgtgaatcagtttctccaagttcttcacctaacagagcagaaatggtgactcgcggccacacccggggctcttagtcttggaggcctgtccccgccccatctgctgctgcccacagggaaccctcctagagccgtcacggggcataaggcccagggggcctcgcgagctgatctttcctgtgcggagccaaggatgcagcagagggtgtgctcacggcgaggtgtccctctccggaggcagctcttcagggtttggcagaggagaggagcgcagtgaccacccagcactgccctaaggtttgcaggcacccgggagggacaatggctccatggcgggcggaggccgagaagcacttggcaagctag

SEQ ID NO: 89191 - DNA, 9 bp, Homo sapiens
  chr15:102157738-102157747
  hypo
tacagccct

SEQ ID NO: 89192 - DNA, 30 bp, Homo sapiens
  chr15:102226036-102226066
  hypo
taattgtgacgaagcgtgctatgtgctctc

SEQ ID NO: 89193 - DNA, 175 bp, Homo sapiens
  chr15:102251171-102251346
  hypo
gaattcagggcaggaggtggacggggctggctgtttgctaacgattcaagcataggcctatggaatgtgaagcatctgtgacacatccctgtccggcactcaactatgtgagatgtttggctgaggttaatgaggtccttgattatcacggagcgaattaaactagcctctctct

SEQ ID NO: 89194 - DNA, 21 bp, Homo sapiens
  chr15:102332520-102332541
  hypo
gatgggtttaaaatgctttac

SEQ ID NO: 89195 - DNA, 30 bp, Homo sapiens
  chr15:102506222-102506252
  hypo
tgggtgcaggtggtcgtgggtggctgtgat

SEQ ID NO: 89196 - DNA, 30 bp, Homo sapiens; identical to SEQ ID NO: 10441
  chr15:102515284-102515314
  hypo

SEQ ID NO: 89197 - DNA, 120 bp, Homo sapiens
  chr16:84350-84470
  hypo
aggttcatgtgcacacacacacggagaaggcacactcacagtcacacgcagacacagctgcgtttgcccacaaatacacataggcacacacaggcaaacgtgtctacaggcactttcaca

SEQ ID NO: 89198 - DNA, 260 bp, Homo sapiens
  chr16:91468-91728
  hypo
tctctgattccttatcaatcccgaaacatttctgggggttcatccgggattggagacgacagatttactttctcctttgcctgcggcactagagccccagggccaggggagacccagcatccaaggtgcaccacgggggagcttcacccggatagaagccggcactccccacgtcccggcgccctgtccggcagcgcaacggaaccagggatggggctgtaggatgataccagcacttcgggaaccatggtaaggagtaa

SEQ ID NO: 89199 - DNA, 392 bp, Homo sapiens
  chr16:94324-94716
  hypo
acacacacacacacacaaaatctcagaggttctccagggtgcaaataaaagcaccagtcagttttataatagacttcgtaaggcattttggttgtacactccgtttaaccctgaggctgctgaaaatcagcacatggtgaatacgacatttgtaaggcaggcccaaggagatatcgggcataaattacagaagttggaagctccgcaggcgtgaatgctactcagcttattaaagtggctaccaaggtgtacattaacggagatcaggaggctgatcagaggcttaagaaaggctaatttactagcagcagcgcttacaggaagagaagctagctttgcaagaaggcatggacgcgggcgtgaatgcagtcgtggaaaaagctaataaactg

SEQ ID NO: 89200 - DNA, 94 bp, Homo sapiens
  chr16:101671-101765
  hypo
aagtaactgaatagcgcaaacctgggctgccaaaccttaaatttcaggattacataagagttcactcggctgggcgtggtggctgacacctgta

SEQ ID NO: 89201 - DNA, 31 bp, Homo sapiens
  chr16:109540-109571
  hypo
ttgctggcatccagggcgagtttcagccgca

SEQ ID NO: 89202 - DNA, 119 bp, Homo sapiens; identical to SEQ ID NO: 28605
  chr16:111054-111173
  hypo

SEQ ID NO: 89203 - DNA, 148 bp, Homo sapiens
  chr16:111738-111886
  hypo
cccccaccctcccccgggagcctccatcccaacccaggccttgcctgccacgcctacctgtggtcgtccatgtcctcgatctggcgcttgacgaagctgtcgatgcgcttgcggtaggtgcggttggtgagccgtcccaccatgccca

SEQ ID NO: 89204 - DNA, 30 bp, Homo sapiens; identical to SEQ ID NO: 28606
  chr16:112429-112459
  hypo

SEQ ID NO: 89205 - DNA, 55 bp, Homo sapiens; identical to SEQ ID NO: 28607
  chr16:112972-113027
  hypo

SEQ ID NO: 89206 - DNA, 30 bp, Homo sapiens; identical to SEQ ID NO: 28608
  chr16:113696-113726
  hypo

SEQ ID NO: 89207 - DNA, 146 bp, Homo sapiens; identical to SEQ ID NO: 28609
  chr16:114336-114482
  hypo

SEQ ID NO: 89208 - DNA, 30 bp, Homo sapiens; identical to SEQ ID NO: 28610
  chr16:114972-115002
  hypo

SEQ ID NO: 89209 - DNA, 272 bp, Homo sapiens
  chr16:117807-118079
  hypo
cctaatctggggtaacggaggattcctcaagatgacctctcagctgggtctgggaagacgagctgcctggcatgagcggatgcaagcaggaacagtcagggggtgagaagagccgagagctgtgagcgtgtacggggaacctgacctccccaggactgtttcggccggggaccacagccggccccaggaacctccccaggactgtctcagccggggaccacagtcggccccaggaacctccccaggactgtctcagccggggaccacagtcg

SEQ ID NO: 89210 - DNA, 30 bp, Homo sapiens; identical to SEQ ID NO: 28612
  chr16:136641-136671
  hypo

SEQ ID NO: 89211 - DNA, 345 bp, Homo sapiens
  chr16:142445-142790
  hypo
cacgtagcacttgcacggcaagcccccaaaaccaaggagaagcaggtggcagtgctgagggctctcagatcagaaccaacagccaggcaggtagtgcctatccactacacacctgccactctgggctccttgagcttctgtgactcacctcctgcacagcgggggccaggggattcctaaattctgacaaggagaccggcaaggagaacttggcaagaacggacggcaggtcatgagatgggaactggtgggagaactgctcggccagcggggagtacctgcaggcaggtgagcatgccagtgagtgcagcagacccccccaccgtgttctcaacactggcctca

SEQ ID NO: 89212 - DNA, 121 bp, Homo sapiens; identical to SEQ ID NO: 28614
  chr16:189553-189674
  hypo

SEQ ID NO: 89213 - DNA, 406 bp, Homo sapiens; identical to SEQ ID NO: 52616
  chr16:204480-204886
  hypo

SEQ ID NO: 89214 - DNA, 577 bp, Homo sapiens; identical to SEQ ID NO: 52617
  chr16:215295-215872
  hypo

SEQ ID NO: 89215 - DNA, 534 bp, Homo sapiens; identical to SEQ ID NO: 10444
  chr16:215912-216446
  hypo

SEQ ID NO: 89216 - DNA, 273 bp, Homo sapiens; identical to SEQ ID NO: 10445
  chr16:216505-216778
  hypo

SEQ ID NO: 89217 - DNA, 30 bp, Homo sapiens; identical to SEQ ID NO: 52620
  chr16:230581-230611
  hypo

SEQ ID NO: 89218 - DNA, 30 bp, Homo sapiens; identical to SEQ ID NO: 52621
  chr16:231134-231164
  hypo

SEQ ID NO: 89219 - DNA, 10 bp, Homo sapiens
  chr16:232155-232165
  hypo
tgtaatccca

SEQ ID NO: 89220 - DNA, 21 bp, Homo sapiens
  chr16:234181-234202
  hypo
gtctcaaaaaaaaaaaaaaaa

SEQ ID NO: 89221 - DNA, 90 bp, Homo sapiens
  chr16:255868-255958
  hypo
tgagccactgtgctgggcccaaaatgtataaattttttaaaaaatgggagcaagcatgggctcaattaattccaacggtcaacgctgcca

SEQ ID NO: 89222 - DNA, 31 bp, Homo sapiens; identical to SEQ ID NO: 28619
  chr16:267427-267458
  hypo

SEQ ID NO: 89223 - DNA, 24 bp, Homo sapiens
  chr16:280205-280229
  hypo
tttgagacggagtttcgcccaggc

SEQ ID NO: 89224 - DNA, 37 bp, Homo sapiens; identical to SEQ ID NO: 28621
  chr16:299612-299649
  hypo

SEQ ID NO: 89225 - DNA, 102 bp, Homo sapiens; identical to SEQ ID NO: 28622
  chr16:299876-299978
  hypo

SEQ ID NO: 89226 - DNA, 29 bp, Homo sapiens
  chr16:300217-300246
  hypo
ccgcgcccggccaggaatctatgttttaa

SEQ ID NO: 89227 - DNA, 30 bp, Homo sapiens
  chr16:304589-304619
  hypo
ctttttgtggtgttcgtcgtctcattcgtc

SEQ ID NO: 89228 - DNA, 36 bp, Homo sapiens
  chr16:310515-310551
  hypo
aacatgaaccagcactcggcccgtcaggggagatcg

SEQ ID NO: 89229 - DNA, 355 bp, Homo sapiens; identical to SEQ ID NO: 28624
  chr16:311205-311560
  hypo

SEQ ID NO: 89230 - DNA, 30 bp, Homo sapiens
  chr16:312550-312580
  hypo
aggtgggtccgggccgcagcctttctccat

SEQ ID NO: 89231 - DNA, 51 bp, Homo sapiens
  chr16:316209-316260
  hypo
ggtcagggtggggagggctgccgaggaggcgagcacccccacccagacctg

SEQ ID NO: 89232 - DNA, 30 bp, Homo sapiens
  chr16:322262-322292
  hypo
agcggaggaggcggacgcgctgcgagtcct

SEQ ID NO: 89233 - DNA, 31 bp, Homo sapiens
  chr16:323417-323448
  hypo
agcacgctgacccctgcgctggccagcgacc

SEQ ID NO: 89234 - DNA, 340 bp, Homo sapiens; identical to SEQ ID NO: 52622
  chr16:325254-325594
  hypo

SEQ ID NO: 89235 - DNA, 172 bp, Homo sapiens
  chr16:332588-332760
  hypo
agctctgatgccctcgccctccctagtggacaagaccgtctacatggtgggcagctatggcccgagcgcccaggagtatgagtttgtgactccggtggaggaagcgccgaggggtgcgctggtgcggggcccctatctggtggtgtccctcttcaccgacgatgacaggacg

SEQ ID NO: 89236 - DNA, 189 bp, Homo sapiens
  chr16:334794-334983
  hypo
gagccactgggcatggggggccgggccatgagggcagtgactgtgggtgggaccgggtggcctcacagggccaggcccctcaggacctgcaggacgaggacgtggccaccttcttggccttggcccaggacgccctggacatgacctttggcctcacagaccggccgcggctctttcagcagtttggcc

SEQ ID NO: 89237 - DNA, 34 bp, Homo sapiens
  chr16:337626-337660
  hypo
ggtgcagtgctccgtcgccgattcacacagtggc

SEQ ID NO: 89238 - DNA, 137 bp, Homo sapiens
  chr16:339476-339613
  hypo
ggcccagggtgacagcgcggcccctcaccagggtgcggtaggggatgggttccccgcagaagtagtacgccacaacgatgctgtcacacggctgggcactcccgccgcccaccttcctctgcgatcttgtcctgggg

SEQ ID NO: 89239 - DNA, 31 bp, Homo sapiens; identical to SEQ ID NO: 28625
  chr16:339929-339960
  hypo

SEQ ID NO: 89240 - DNA, 122 bp, Homo sapiens
  chr16:341170-341292
  hypo
accctcaggacgcacgtactctgtctcggagagctccatgtccgacacggctggtaccacgtgcagcaccggcgcgcacgctggcctgacgcaggcgcgtccccgccgcataacctcctgca

SEQ ID NO: 89241 - DNA, 30 bp, Homo sapiens
  chr16:343248-343278
  hypo
agcaatgagcgcggcggcctcgggtgtgtg

SEQ ID NO: 89242 - DNA, 30 bp, Homo sapiens; identical to SEQ ID NO: 52624
  chr16:347279-347309
  hypo

SEQ ID NO: 89243 - DNA, 383 bp, Homo sapiens
  chr16:350654-351037
  hypo
actaaagaggacagacggatgctggagcagagccgggggacaggtgggtggtgggcatcccctggcggatgcagctatgctgcctccctttccttggttttgtaggactaaagggcccgggcactctggggagaaatcttaaccgagggtcttcctagggactaaaagtgtttggagttttgatgccgttcactgccttggccgagctccacatcggcaggaattctatcatggggctgtgaaatgttacagattaacttaaccactcggctaatggtttttgttttcttctttgtgctttaatttcccaaatttcacaatgaaaataggttatttaaaaaatctggagttcacgcctgtaatcccagcactttgggaggccg

SEQ ID NO: 89244 - DNA, 135 bp, Homo sapiens
  chr16:354254-354389
  hypo
aaacagcacgacaccgacgcggagcgcgacaccgacgcggcccactcaccatgcgcacgcgcttcagccgctcctccagcttctcctcggcctcccgcgtgcgctgcacagcctccaggcggtggatgagctcct

SEQ ID NO: 89245 - DNA, 35 bp, Homo sapiens
  chr16:356088-356123
  hypo
tttatcatccccttaccggcaggcacatgcgtaca

SEQ ID NO: 89246 - DNA, 334 bp, Homo sapiens; identical to SEQ ID NO: 28628
  chr16:356182-356516
  hypo

SEQ ID NO: 89247 - DNA, 183 bp, Homo sapiens; identical to SEQ ID NO: 28629
  chr16:360131-360314
  hypo

SEQ ID NO: 89248 - DNA, 144 bp, Homo sapiens; identical to SEQ ID NO: 28630
  chr16:364474-364618
  hypo

SEQ ID NO: 89249 - DNA, 82 bp, Homo sapiens; identical to SEQ ID NO: 28631
  chr16:364963-365045
  hypo

SEQ ID NO: 89250 - DNA, 30 bp, Homo sapiens
  chr16:368033-368063
  hypo
tagcccacagcacacggcgcgtctgtagcc

SEQ ID NO: 89251 - DNA, 14 bp, Homo sapiens
  chr16:374801-374815
  hypo
tgcagaggcagctt

SEQ ID NO: 89252 - DNA, 261 bp, Homo sapiens; identical to SEQ ID NO: 52626
  chr16:374858-375119
  hypo

SEQ ID NO: 89253 - DNA, 47 bp, Homo sapiens
  chr16:400401-400448
  hypo
caataaagtgagtccataaaacgggcgggatgcctacaagtatgata

SEQ ID NO: 89254 - DNA, 1484 bp, Homo sapiens
  chr16:410198-411682
  hypo
acctgtgccctccgccgcctccctctgcttggctgtcccaagatgtctctctccactgcctaggaaccctgaggccgcggccaagttctgagcgtgtgactgtgtgtgctgggccccaggcccctttgtcgccgcggcgtctgtcgtggcaaacaaaagtgaaccggattagccacagtggattaaaagatttacgtctcagagtttacctaataacctaacaatcgtgtcaacgggagctttgaacccccagggcgcgcctgccaggccaactgagagctcaaggcctctgtgggcagcaggacgtggtcggggggaggagacgcagccacggctgtcctcacacccagctcggcccctgcgggctcctctgggcagaacctggggaaggcacggcctctagcaggaggtggaggcctttgaaagggtgcaggtgttgggaccaggtacccggcccaggcccccagccgcgtccacacacgtcgcacacggcagcaaggacgcaagcagtgtggaggtggccgcgtcggcgacgtatgggccccgtggtgctgcggtgcacgacctctgtgctgtcaccccacagtgtccgctcctgcacgtacacgcgtgcacgcgcacacacgtgcacacgcacacacacacaagcacgccccgctttgatctctaaaggagagtccattgacaagctcttaatcgcagctgcccttgcagggcctgtccctgaagtcccgagtaatgggatttggcgcttctgatccatcgggctggccgcttcccgtgtcataggtggacattttttttctttatatcgcttctgtttcttttttttttttctcctcgaaaaaatgctgcttaaacggcaccgacttgacatggcttgtctcctaaccttggagtggcggccgggacgccggcctggatcagtcgggggtctttgatgccgcctccatgtgaaacctgacgtggaagacccaccggggcggttttggggtccgaggtccgtcaggattcatcctgcctcaccctgctccctttgtctcttcccctgacccttcctcgggacacccggagagggtctgagggtgagggtgcgggcgctgcgtgtgggcttgcactcgagggtggggtgggccgagggcagggccgcagccgcgagaacaatgggcagaggaggcgcgtccacctgtccgcccggccgcctgcccggcttacctcacctgcctggctccgtgtgcctgctcacgccccaccgtcccgctgtccgccatgatgggcttggccgtccgtccgagcactttcagccactctgggaagcaggtccctgctcttggccactgtgtggctgggaggcagaagcgtgactctgggctgcagctcgggctcctgccgccgattggctgaggcagggaccagatgacgggcctcagaaccctatggtagccatggcaaccagcccctttagacaccgccacccccgagcc

SEQ ID NO: 89255 - DNA, 30 bp, Homo sapiens
  chr16:423857-423887
  hypo
tgagccaccatgctcggccgagatgtgagg

SEQ ID NO: 89256 - DNA, 30 bp, Homo sapiens
  chr16:426784-426814
  hypo
ctcccgcgtgtaatcggggacaaagaccct

SEQ ID NO: 89257 - DNA, 622 bp, Homo sapiens
  chr16:428820-429442
  hypo
caaggggacagctgccctctgcgttccaagcgggcaaggctcctaactgtcctcagggaacgcacccacgcctggtgcggggatggagaagggcccgtgggagacatcctgctcatggccccaggcgaggactcaggctctcacccccagccccccgtgccagctccagcctcgtgcccttgcgaccttgggcatccttccctccctgggtcccagccttctcctgggtaggtcagggcggagggcacatccctttgggggcccctccctccgaggttaattaacgacaaaggcttcagaaggaaaagcacagtggacacagcagggggcgggaccctcccctctgctgcagctccccctccccacacactcaggagcgctgcctaggtctcactggagagtggctggctcaggcccaggcccctcctgaggagggagacaggtgagcagcaggctctcctgccagcctcgtgaccctcccatagaggcaccagaagaaacgatacacctgccaatagcagcctgtcggcaaatccaggccaagctccaggggaacctggcgtggcgactgggcaggggctggccaggctccacccacgacgcactccaggctttccaggtg

SEQ ID NO: 89258 - DNA, 79 bp, Homo sapiens
  chr16:440410-440489
  hypo
taacgggagttcaggcgcgcaccactacacccacctaatttttaaaatttttttgggccgggcgcggtggctctcgcct

SEQ ID NO: 89259 - DNA, 19 bp, Homo sapiens
  chr16:440908-440927
  hypo
acacaatttgttttccaat

SEQ ID NO: 89260 - DNA, 30 bp, Homo sapiens
  chr16:457367-457397
  hypo
ccttttctccaggccgaggctgcagggctg

SEQ ID NO: 89261 - DNA, 181 bp, Homo sapiens
  chr16:460350-460531
  hypo
atgagaagttcttccgggtgggtgcctcgtgcgctctgtgagaagttcttccgggtgggtgcctcgtgcgctctgtgagaagttcttccgggtgggtgccttgtgcgctctgtgagaagttcttccgggtgggtgtactcccagcgggggcctccccctgacggccgcccgctccctgccc

SEQ ID NO: 89262 - DNA, 30 bp, Homo sapiens
  chr16:460731-460761
  hypo
gaaccgggggcaggcgctccaggtgcatgc

SEQ ID NO: 89263 - DNA, 30 bp, Homo sapiens
  chr16:464501-464531
  hypo
ccacggcgcctggccgaggtggagagaaga

SEQ ID NO: 89264 - DNA, 30 bp, Homo sapiens
  chr16:467590-467620
  hypo
aggctgatgcgtctacgtcgtgaagccctc

SEQ ID NO: 89265 - DNA, 38 bp, Homo sapiens
  chr16:501345-501383
  hypo
cacctcaccctccccacgcttcccgtatcagggagctt

SEQ ID NO: 89266 - DNA, 121 bp, Homo sapiens
  chr16:505064-505185
  hypo
aaaactaggctttctttcttttttttttttttcttggccacatgcaccagattgaagaataagctttcttgtctgttctctatacagtgatatgtaaaaatcaccactcagatcaaagaat

SEQ ID NO: 89267 - DNA, 50 bp, Homo sapiens
  chr16:512664-512714
  hypo
gtcccttccccggcaccgtcccttccccagtcccccggcaccgtcccttc

SEQ ID NO: 89268 - DNA, 306 bp, Homo sapiens
  chr16:514975-515281
  hypo
ttggtacttgctgggccggctgggtggtttttatgcatgtgatgggtacgcctgagaggatgcttcttttctaatcattggtcccctgagttcatggaggtgcgagctggagactcacgttagcttggtctcagtcgcagggaggagaaaagccgctcatgaagctggtagctgtgtcgtttttgttttgtatagctgtgtttcgtcttcactcttaagtcaagaattactggatgcaggcttctaggttgatggtgagggagcccggggacccccagaactggttgtcatcggagaggcctcagt

SEQ ID NO: 89269 - DNA, 31 bp, Homo sapiens
  chr16:517376-517407
  hypo
tgcagagtggagtgggcgtcagggaggaggt

SEQ ID NO: 89270 - DNA, 30 bp, Homo sapiens; identical to SEQ ID NO: 28637
  chr16:521260-521290
  hypo

SEQ ID NO: 89271 - DNA, 4 bp, Homo sapiens
  chr16:521899-521903
  hypo
tggt

SEQ ID NO: 89272 - DNA, 228 bp, Homo sapiens; identical to SEQ ID NO: 28639
  chr16:521925-522153
  hypo

SEQ ID NO: 89273 - DNA, 30 bp, Homo sapiens; identical to SEQ ID NO: 28640
  chr16:522594-522624
  hypo

SEQ ID NO: 89274 - DNA, 115 bp, Homo sapiens; identical to SEQ ID NO: 28641
  chr16:524278-524393
  hypo

SEQ ID NO: 89275 - DNA, 436 bp, Homo sapiens
  chr16:525277-525713
  hypo
aacgtttcaacatagcgacgttttccaagatgcactttgattttcaagcgagttcatcttaacattggtaatttgtaaaaatgttaaaaagttggtagcatagacttgatggcttctgggcaaggccaggtcctggctggctggcaaataaaataaactgccggggccggtgtgagctgttactgcattttatccaggaggccgggagtgagcaggcaccgtgctctgaggtacatttttgtctctggaaaggcaggtgatggctgccctggaaaactccatgtagggaggccttgaactgcagaaaccaacccgcagggctgaattgggaagtgagcaggtggggtggctcctgtgagcctcatgagctgtctggaacccccagggcatccagccggccaggggctctgagtatcgatggcgatggcatggaagt

SEQ ID NO: 89276 - DNA, 218 bp, Homo sapiens
  chr16:532453-532671
  hypo
agtgaggtgtggggcgttcgcagttcccctcccagcttgtgcccgctgactgctggcgcactctctcctaggccaacgaggtgacggacagcgcgtacatgggctccgagagcacctacagtgagtgtgagaccttcacggacgaggacaccagcaccctggtgcaccctgagctgcaacctgaaggggacgcagacagtgccggcggctcggccgtg

SEQ ID NO: 89277 - DNA, 142 bp, Homo sapiens
  chr16:533135-533277
  hypo
cgagctagttggggccggagtagagggacgggcagagtctgggagaaggtcagatgaaggaggtgtccagtggctcacgtggacctgctttccgtgttgcccctgctactggaaagtccgctcagcacgctgaagtgtaatt

SEQ ID NO: 89278 - DNA, 164 bp, Homo sapiens; identical to SEQ ID NO: 28644
  chr16:534202-534366
  hypo

SEQ ID NO: 89279 - DNA, 30 bp, Homo sapiens; identical to SEQ ID NO: 28645
  chr16:537657-537687
  hypo

SEQ ID NO: 89280 - DNA, 30 bp, Homo sapiens
  chr16:560096-560126
  hypo
ccgtcccgagtccccgtgcctctgggctct

SEQ ID NO: 89281 - DNA, 46 bp, Homo sapiens
  chr16:567190-567236
  hypo
ccatgacaggcctgctcgacaccgtcaaggtcggaaaacacaggaa

SEQ ID NO: 89282 - DNA, 30 bp, Homo sapiens; identical to SEQ ID NO: 28646
  chr16:569152-569182
  hypo

SEQ ID NO: 89283 - DNA, 538 bp, Homo sapiens
  chr16:571575-572113
  hypo
accacctatgggggccgggcaggagcctctggggcctccactccgacatcaggacctgagatgaccgctgtgtggcgctctctccctgggcagggtggatgccacaggcccctctggctcccaggtgctgcttctccacaggtgcggcctggcccggcctcctaaaggccacaccctccccacgcacttcccaggccagaatccaaacatcgggaaccctgttttcttctgggtgtgtctcacttagaaatcgtggttcttccccgagggtgcatgttgcaggagggagagggcagggaagactcacagcagagcaggagggggcctgtgcttctcggggtctgcaccccaggcacagcggtgtcaccccgcaggaccgcgggcctgccccaacccccagcattcccgggtgggcccagaccccatcaccaagactggccacccgctgcgtgtgtgtgcgcgcgcgtgtacgtgtggccccacatccgccgccttccacgctaggatgtaagaggtcgcctcctattgtacatttggg

SEQ ID NO: 89284 - DNA, 66 bp, Homo sapiens
  chr16:573425-573491
  hypo
gcggactgtgcatctgcggctctcgctctcccgccccccgcgcgagatgcccgcctgcctgtcact

SEQ ID NO: 89285 - DNA, 252 bp, Homo sapiens; identical to SEQ ID NO: 52631
  chr16:577427-577679
  hypo

SEQ ID NO: 89286 - DNA, 466 bp, Homo sapiens
  chr16:584720-585186
  hypo
ggcgcagtggggttgccgtggggcaaggccaggccaccagctgcctggacacaggggcccccgctttccatctgctgccccccacacccccagctcgggcaggggtgacaccggggcatccttgttggggtcgctgtggttcccatggtggcaagatggctctgtgaaagattgacggagatgtagggcccaggagcaggtgctgtgtgagtgggacacgcctgtgtcacctgcggggcaggggagggctcgggggtacagccgtgtacatgattagttagcgagacagtgaggagtgtatgcggagtggacacagctgtgggtgccgcccgcgcaaggctgggggtcgctgtgccagccctgctcccatgtgggctcccagctccccaggtagggacgctgaccccgggaggtgcctttgcctgcatccactggagcctcaggagcatgcgttccgtccccacgg

SEQ ID NO: 89287 - DNA, 73 bp, Homo sapiens; identical to SEQ ID NO: 28650
  chr16:587257-587330
  hypo

SEQ ID NO: 89288 - DNA, 30 bp, Homo sapiens
  chr16:587553-587583
  hypo
agcagcttctgtcccgtggcacctccgcta

SEQ ID NO: 89289 - DNA, 166 bp, Homo sapiens; identical to SEQ ID NO: 28651
  chr16:588069-588235
  hypo

SEQ ID NO: 89290 - DNA, 68 bp, Homo sapiens; identical to SEQ ID NO: 28652
  chr16:588486-588554
  hypo

SEQ ID NO: 89291 - DNA, 577 bp, Homo sapiens
  chr16:594120-594697
  hypo
aaggctgaccggcgccgggctgtggccagaccaggagactgcagcccagctcgagggaggcaccacgcctgcccctcagagcactgagcagagccccccatggtatcccccgccctgggcacagcaggaggagctgccgaccaagtctggcaccccggtgtgccccgagagctgtctgggcacaggttgcggggctgccccggccggacggggcatctgtgtttctcggtgtggcctcagggctctggtggctttgaccgaggccccgggggacagaatgcagcttcctgctcctcacttttcctaagaaaggggccgcctcccaggactggggctgcgccagtcacaggcccgcggcctccacgctccgggtgctgctgtcccggctgcttcagggcgggctctgtcttgcacgcagcgagcggcttcatcacctcccttttgaattggagctgagtgtcggcaacgcccagataactggggcgcgcgggtcttttgtgctggatttttctgtacagttgcctcgatcttccatccagcttggcctctgtgcagtaaggagcggcccgtcgcctcc

SEQ ID NO: 89292 - DNA, 276 bp, Homo sapiens
  chr16:595533-595809
  hypo
tcctgaagtgcagacgtcttcctgacccacctgggttttgccaggatgactccgaaaggtgtctcccagcagacacaccccgctggcgattgtttggtcctggggacccgggttctcattctcctctctggagctggtgaggctgtccttgctagtcggtgacaactacagggccaaagggagggtgtgtcccaggaggcccagcccacctctgcctgcacctgcggtcagcggggtgcagagtctgtgaaggcacctcccggagtgggggctgca

SEQ ID NO: 89293 - DNA, 31 bp, Homo sapiens
  chr16:611329-611360
  hypo
ggatgggttgtggcatcggctggcacagctg

SEQ ID NO: 89294 - DNA, 30 bp, Homo sapiens; identical to SEQ ID NO: 28654
  chr16:612291-612321
  hypo

SEQ ID NO: 89295 - DNA, 136 bp, Homo sapiens; identical to SEQ ID NO: 28655
  chr16:613511-613647
  hypo

SEQ ID NO: 89296 - DNA, 251 bp, Homo sapiens; identical to SEQ ID NO: 28656
  chr16:614837-615088
  hypo

SEQ ID NO: 89297 - DNA, 30 bp, Homo sapiens
  chr16:622800-622830
  hypo
ctgcgacctccaggcgtcccgctctgttcc

SEQ ID NO: 89298 - DNA, 186 bp, Homo sapiens
  chr16:623990-624176
  hypo
tctgtgcaacatcccgcagcccacggtgggggggcagcagcagctctgagccgagcctctcctcttctcttccagcctcccggcatggtgctcaaggccttcttccccacgtgctgcgtctcgacggacagcgggctgctggtgggacggtgggtgccggagcagagcagcgccgtggtcctggcg

SEQ ID NO: 89299 - DNA, 170 bp, Homo sapiens
  chr16:643931-644101
  hypo
agtgtgggtggtgcacgcggcggggaggagaaagctgcagttcaggagcgaacctgcagtcaggctccagggtgtgggccagggtggtgggcccgtgttggcccccaggaaccacccgcacagggtgcacacccttccccaagcccagccgctcccgctctgcagggggc

SEQ ID NO: 89300 - DNA, 30 bp, Homo sapiens
  chr16:649672-649702
  hypo
gtggcatcagtcagcgtggattcgcaaggt

SEQ ID NO: 89301 - DNA, 296 bp, Homo sapiens
  chr16:660722-661018
  hypo
gctcctccctctaccccgccctgccccaccccgtcacctgcttgccctgaccctgcctggataattgagaccttccaggccaagggccccctccccaggatcctgacacctgtccctctgagagtccagaccttttccagagtgacatcctggggccctgtgtggtcagagggctccatgtggtcagtggctgtggcttgctgggaacaagacactcggctgactgtgcttagagaacaggccgctgtttgtgtctaaatggtatccatggggacgttgtttcatagtcttcttac

SEQ ID NO: 89302 - DNA, 243 bp, Homo sapiens; identical to SEQ ID NO: 28659
  chr16:666663-666906
  hypo

SEQ ID NO: 89303 - DNA, 157 bp, Homo sapiens; identical to SEQ ID NO: 28660
  chr16:667407-667564
  hypo

SEQ ID NO: 89304 - DNA, 541 bp, Homo sapiens
  chr16:667863-668404
  hypo
atttcccagaacgtcagcgttgatgagacgtgaatgtccacagggttggggttccccagcctggcaggacagtctcctggagctcccaggctcatgtgaggagcttgctcactccccaggtgggcgggggccccttctgctgcctgcctggctcagcggcacggcgccaggctgctgtgacctgtgcagacaaagccgcttagcacagcctcattggcacctgtcctggccgccccgctcccctcaggacatccaggtgggtcggcagaggagggaaggaggtgagcctctcacagggaccacagtcccggcccctcccctccccgtatgtttcagggacacgtcgggccagggccggttctgcaccatcttcaggtcctactccaggggcgctcaggtaagaccagcaccgctctttccattgcttttcaaaggatgtttctcctgattctttctgaatgtgagttgttgtcctgtcaaactcccaaggactttctttctttataaggatattctcacattggtttgtttatttgtttgt

SEQ ID NO: 89305 - DNA, 30 bp, Homo sapiens; identical to SEQ ID NO: 28662
  chr16:670785-670815
  hypo

SEQ ID NO: 89306 - DNA, 593 bp, Homo sapiens
  chr16:671079-671672
  hypo
tgagctgtcattttccacatgcgaggagcaggttacagacccaggtgcacatgttggtcctgggttgagggtgccaggtgcttccttgccccgggagaagcacctgagtctccaggcgggcctctgaccgccgtgactgagcatttgggccaccccgggagcccagccctgtcctgtgtctctcctgcctggtgagcagcggtgaggtgcgggtgcatccagccgaggtgcagagcccaggtttgcagcagggtttctcccgccgcccctgatgagacacagactagcaaggactgtctgtcccagccgggatttgtcactctgcctccctccgttagagagtggagaggcctggaaggtccccgcggcctgggtcttgcagatggcaccagcaaaggccaccggccactccccgctgccgtcacctgtcacacagcagcagtcccgcggctcttcccgcgaggcccttcacgtgccgccgaaggccgggctccctagacttcatggtcgtgtttgcatattctgttgctgtgatctgagacggcccctctcagaagcgggtgccacaacccgctggtgggatgagtgggtca

SEQ ID NO: 89307 - DNA, 336 bp, Homo sapiens
  chr16:672794-673130
  hypo
cgcctggccgaagtcgctagttttttaaaaatcagatcagttttagaaaacagaaggcagtggaagagtctgtttgtcccgtgctctgccccttgagacacgcagctgagggtgcttagggtgccgttcgttaggcggctgctggtcaccgagagtctccttttggtttctcactccgtggtcatttgggtccctgcggcctcactgtgacccacgccggagcaagcctccgggtcctcctgtgccatcgcccctgcccgtaacccctactcctcagacatggccatcccaggaagtgggggcccgctcagggcagcagccgggaggtgtggccag

SEQ ID NO: 89308 - DNA, 30 bp, Homo sapiens
  chr16:675101-675131
  hypo
agctgcacgtcccccggctgccagaacccc

SEQ ID NO: 89309 - DNA, 30 bp, Homo sapiens
  chr16:676027-676057
  hypo
ctgtgcaacttcaacgtcatcgagtccttc

SEQ ID NO: 89310 - DNA, 121 bp, Homo sapiens
  chr16:677346-677467
  hypo
agcctgcaggacctctgctgccgggccatcgtctcctgcacccccgtgcacctcatcgacaagcttccactgcccgtcaccatcaagagccacctcaagtccttctcgatggccaacggca

SEQ ID NO: 89311 - DNA, 410 bp, Homo sapiens
  chr16:677801-678211
  hypo
ggcgggaggagggggcgcggctgggctgctggtgcttccgggaatcttggtcggaaacaagccgggcctccccagctgcctgggcttgaccggcggggagcctggttggcctttcttatttatatagagaacacttcacttttttgtacatttttaaggggccttcagggaagcctgggtgtggcccggtggtggtgcactggtgacttcatggccacgccagctgcggggacgcacttgggactcctcgagaggggactcgcggccgcgatggcaaggcatcctgtgaattcatgcgctgcgagtggcggggctgcccagaggccgggggagcagacagggccggtgctccctctggaagcttgggtgaccggggccctggctcccacgggatggagggtgtggtcctg

SEQ ID NO: 89312 - DNA, 30 bp, Homo sapiens
  chr16:683837-683867
  hypo
gtacctggaggtgacgctgagtggcatgga

SEQ ID NO: 89313 - DNA, 206 bp, Homo sapiens
  chr16:684416-684622
  hypo
agacaccagcaagccggcagcaggacatgctttattctgagcaggctgggcccttcggccagcggctgagagcacagactgggtggggctgtcgtccacaaggtccggcctagggaggcagggttcgtgcctcacagagcctccggcagggatgcaggtgtgcgggggtgaaggaggggcttagtttttccggaagatcaggcatt

SEQ ID NO: 89314 - DNA, 62 bp, Homo sapiens
  chr16:689009-689071
  hypo
caggaagactctgggccctgccgcccacccgccacagctccgttttcagccacagcatccct

SEQ ID NO: 89315 - DNA, 30 bp, Homo sapiens
  chr16:690453-690483
  hypo
tcacatctgtggggcgggtacaggagcccc

SEQ ID NO: 89316 - DNA, 30 bp, Homo sapiens
  chr16:702571-702601
  hypo
ttggccggctcgagcgctgagtacagaacg

SEQ ID NO: 89317 - DNA, 30 bp, Homo sapiens; identical to SEQ ID NO: 28666
  chr16:704961-704991
  hypo

SEQ ID NO: 89318 - DNA, 84 bp, Homo sapiens
  chr16:712803-712887
  hypo
agggcaccagcacacgtctcatcagtggccacaggagcaaggtgagggacttccagcctgggcagaggcggggcagccgaacct

SEQ ID NO: 89319 - DNA, 30 bp, Homo sapiens
  chr16:714604-714634
  hypo
gcccagggccctcccggggagatggactga

SEQ ID NO: 89320 - DNA, 16 bp, Homo sapiens
  chr16:714969-714985
  hypo
cgcccggctgaactga

SEQ ID NO: 89321 - DNA, 42 bp, Homo sapiens
  chr16:716020-716062
  hypo
cggtgacggctccctgcgcatcttcagcgtctcccgcacggc

SEQ ID NO: 89322 - DNA, 180 bp, Homo sapiens
  chr16:717462-717642
  hypo
ggggactgcccaagactttgccggccacgacaacgcagtgcacctgtgcaggtttacaccgtccgccaggctgctcttcacggccgcccgcaacgagatccttgtgtgggaggtccccggcctctgagatgcagcagggactgtggtggtgggcatcacgcctggtcatgccaggcacct

SEQ ID NO: 89323 - DNA, 51 bp, Homo sapiens; identical to SEQ ID NO: 10451
  chr16:717959-718010
  hypo

SEQ ID NO: 89324 - DNA, 30 bp, Homo sapiens; identical to SEQ ID NO: 28670
  chr16:720868-720898
  hypo

SEQ ID NO: 89325 - DNA, 459 bp, Homo sapiens
  chr16:726553-727012
  hypo
gcaggcagctcctcacggcggtgggtggggggcttgtggatgcggggagctgggtgagcctcacaggcaggggtgccatggggaggtccgtggcccacactcaggcccctgcccccagatcagcagcaagcgctccagcagtttcaagcgggccattgctaacggacagcgggcactgccccgggacgggccgctggatgagccaggcctaggtgtctacaagcggtttgtgcgttacgtggcctacgagatcctgccttgtgaggtggaccgccgctggtacttctaccgtcaccgcagctgcccaccccccgtgttcatggcctcggtcactcttgcccaggtgggccccccggccgctgccccgggagcctcccgcgctcctggccatgaccagcctaacactcgtgtccccagatcatcgtgttcctgtgttacggggcccgcctcaacaagtgg

SEQ ID NO: 89326 - DNA, 120 bp, Homo sapiens
  chr16:728000-728120
  hypo
gaacgtcttcgcctacgacctgctgggcgcccacatccccccaccgccctgaccggctacctgaggctgcacaggccagggctcgggcatgtggtggccgcccaccaggggccttcacgt

SEQ ID NO: 89327 - DNA, 98 bp, Homo sapiens
  chr16:731377-731475
  hypo
ggcctctggggccaggcgggtggactggccagagagtgacgtgaagcccccgttccccagcttacagcctggccaaggagcagcggctgaacttcggg

SEQ ID NO: 89328 - DNA, 30 bp, Homo sapiens
  chr16:732201-732231
  hypo
gctttgagctgatgcgggagccgtgcatca

SEQ ID NO: 89329 - DNA, 30 bp, Homo sapiens
  chr16:732620-732650
  hypo
tcccctctcagcatcgcttttgctgggccg

SEQ ID NO: 89330 - DNA, 30 bp, Homo sapiens
  chr16:733043-733073
  hypo
gggtggaactctggcgtcttctcaggtggg

SEQ ID NO: 89331 - DNA, 1060 bp, Homo sapiens
  chr16:734873-735933
  hypo
cggcacacatgctggcgcagcggtggcacctgggggcgggcgggagggagggtgcctcagcgggggctgctgcgctgcctgcaggcccctgccccacctcccgaccccactgccccacctgtcgcagacccagccccggctgctcatgggccgcttgcagtggctgcagttgacgtgcagggtggtggaggcctggttgaggcagctgacggcgcggctggtgctcagcttgaccacctcgttggacacgttccagaggcggaagcgctgcagcaggtcgatgtaggaagtgtaccagtgctcctgggggagggagcgcccggcagtcaggatctgggtgccaggggcggcgctgcaggggggaggccccgcccaccacacacctgggtctgctcgtcgatgtccttgcgcacccgttcacccaggacgatgagcacagacacagccatctgcacgtcgccctgctcagcgtagaagtgcagcatgtcgcgcaccagcacgccgaagaagtcgggcggcaggcggctgtcgtagagcgcgtgtgagacagacaggagcgagaaggaggagtccacgggggccagggaggccacatccgcctcgctgccgctcacgtgcggggagtcggccttgtcctgcaggtgctcgggcccgggaggcgtgtccacgatctcgtggcgcagcggaaaggcctcctgcggcagcacgcactcagggtcctcggctggaaggcagggaccagcggaggctctgagtctgtcctccatccgcctctgaaccccaccctgcccggacccccactcacggtgcgcgtgttccggatccagcaggtacagctcgtcctcctcaccttccacgtcacccagcaggtagtcggcaggtacgtcgctgccctcggtttcctcgttatctgcccgacaatggggcgggcattcagggtcgtctgggacacccccacccctctcccatcagcacccctacccaccccagcctaccctcattggtgatgagtgtggccgaggagtcgagcagaactgtgtcgctccgtgcatctcctttg

SEQ ID NO: 89332 - DNA, 138 bp, Homo sapiens; identical to SEQ ID NO: 28674
  chr16:736746-736884
  hypo

SEQ ID NO: 89333 - DNA, 661 bp, Homo sapiens
  chr16:740888-741549
  hypo
gtgagccaccgcgcctggcctgttttttaagtctcaatttcagtattttaatgccatcacctattttaatccccaggtccatcatgacatctggtcatccctagacaagttccgagtgcccccagtcttcccctccttcctcactcctcgacctcgggagcagcctcccaacggctttcctgggtccgtctttcccctttgatcagaaacccgcacagaagtcaggcaccaggtcttctgcctgaggcctctggcagctcccactatgctgtgaatgaaccccaactcctggcctccgccttcccctgcccacctccagccatggcagcctccacccccattcccagcccaccaagccctttcctgcctcagggacattgtacgtgcgtgcgatgcctcctccacagagcggacctccctgaccactgccctaatgggcttctccatcactgtggcctccacggcacttgtcaccacccattcgtttgtttactggttgttgtcggtcacatacgagtgtgaattccaccaaggcaggaatcacattctggctcaatccccaccgaatgcccagtgcctgacacacctgttcaaccagttgctctcgttcttttttttaaaaaactttttgagacggagtttcgctcttgttgcccaggct

SEQ ID NO: 89334 - DNA, 30 bp, Homo sapiens
  chr16:746931-746961
  hypo
cacgaactccttctcgccaccaggcagcac

SEQ ID NO: 89335 - DNA, 30 bp, Homo sapiens; identical to SEQ ID NO: 28677
  chr16:747172-747202
  hypo

SEQ ID NO: 89336 - DNA, 112 bp, Homo sapiens; identical to SEQ ID NO: 52643
  chr16:765206-765318
  hypo

SEQ ID NO: 89337 - DNA, 63 bp, Homo sapiens; identical to SEQ ID NO: 52644
  chr16:765585-765648
  hypo

SEQ ID NO: 89338 - DNA, 519 bp, Homo sapiens
  chr16:767026-767545
  hypo
tgccttcccctgaatgcctaccgcagccacatgcctccccacagtaattcacgggatcatccatggggtcacccatgacgtggagctgcaggagtctgtcatcactgtggtggccgcccgtgtcctccgccagacaccgccgctgttccaggcggggcgatccggggaccaggggctgacctccattcgtaccccactgcgctgtggcgtccacccgggcccaggcaccttcctcttcatgggctggagccgctttggggaggcccggctgggctgtgccccacgattccaggagttccgccgtgcctacgaggctgcccgtgctgcccacctccacccctgcgaggtggcgctgcactgaggggctgggtgctggggaggggctggtaggagggagggtgggcccactgctttggaggtgatgggactatcaataagaactctgttcacgcaagctgctgtggacctggtctcctgtgtccagcccagccttgggcctgcctcgcagctgtgaggatg

SEQ ID NO: 89339 - DNA, 444 bp, Homo sapiens
  chr16:771677-772121
  hypo
tctgggctctggcgacggcaggatcgtaagtgcctgcgtctgggtcttcgccgccccacaccgcccacctgctggcgggcgcccctgcccacatcctggttcccacactctcggtgcccacaggtgctggcggcccacaggtgcggcctccgcccggccgtgggctacgagctgaacccctggctggtggcgctggcgcggctgcacgcctggagggccggctgtgccggcagcgtctgctatcgccgcaaggatctctggaaggtaacctggggatccctggccacccgctgacagcccaaggtgcggctgacacctgcgagggctgggggccgggactcggaagctgcgatgacccggtgcccaccaggcctctccccggccggggcgacttctcttccggcaggtgagcctgagggactgccgcaacgtgtctgtgttcct

SEQ ID NO: 89340 - DNA, 30 bp, Homo sapiens; identical to SEQ ID NO: 28681
  chr16:780243-780273
  hypo

SEQ ID NO: 89341 - DNA, 30 bp, Homo sapiens
  chr16:783309-783339
  hypo
cacagtccacatcccgtgtctggtgctcct

SEQ ID NO: 89342 - DNA, 31 bp, Homo sapiens
  chr16:796912-796943
  hypo
tgctattgttggttctcgccatagaacctgg

SEQ ID NO: 89343 - DNA, 30 bp, Homo sapiens
  chr16:798263-798293
  hypo
ccggtgggtggccccgtgcagcctgttatt

SEQ ID NO: 89344 - DNA, 247 bp, Homo sapiens
  chr16:809249-809496
  hypo
cggaccctcccgcatcggcctcccacggtgctggctgaagggtgagcccaggctggccacagcgcgttttcatcattgtccgcagcttgcagtcggctggttcagagcttagccgggcacatgggcccctctgaggctcctgttcagggctcagccgtgtctacggggccctccgagctcttcctggaccctcctcggctccttcagttcagggctcagctgggcacgtgggcgcctccttggctcc

SEQ ID NO: 89345 - DNA, 520 bp, Homo sapiens
  chr16:809705-810225
  hypo
agttcccgcccaagccggctgccttctgtcccctccccagagcccttgggtaactggtttgctacaagagtgtctggaatttttcagttgttctctgcggaagggagtttttaaaaggcccttaatcccttcttgacatttgtaagttgacgcttacacctggcagccttgctgaattctgtgtgcgtgaaggtccgattccaccgcgagtcacgatagaaaacccactctgtggagagaccagagatgaccgccgcgcacacctccgttcagcacacaaacctttgcaggtgttcatagcggaggcagattccgtactggggataagagctcacgacatgctgggaggggtttcaggggcagggagggggcttctgtggccccaggtcaggaggagcagctcttccatcagcagcaggcagccagcccagatgcgtagggaagacagctcccacttcgccaggccagagagcgcccgggggcagctctgttccagtcgaccctgcgagaaaggggtgtg

SEQ ID NO: 89346 - DNA, 30 bp, Homo sapiens
  chr16:815538-815568
  hypo
atggtctgtctccacgatggacgctctgcg

SEQ ID NO: 89347 - DNA, 478 bp, Homo sapiens
  chr16:816635-817113
  hypo
gccacaaggctcctcggcggcccctcccacaggtggccaccctgatcgaccgctttgtgaagggaaggggccagctagacaaagacaccctagacaccctgaccgccttctaccctgggtacctgtgctccctcagccccgaggagctgagctccgtgccccccagcagcatctggtgagtccccagaactctgcccggcaaggtgggtccgtgtgctggcgctcactgtccacccaccgtgtccccagggcggtcaggccccaggacctggacacgtgtgacccaaggcagctggacgtcctctatcccaaggcccgccttgctttccagaacatgaacgggtccgaatacttcgtgaagatccagtccttcctgggtgagccagggagtccctggccagggtgggcaacacaacgggggaagcacagactccactcgggggtgccaggcctttgcctcgccgggccgtctgctgcc

SEQ ID NO: 89348 - DNA, 130 bp, Homo sapiens
  chr16:825061-825191
  hypo
tgcctccaatgcaccgggcccatcctgcccaggcgcccaccagacaggccacagccaccccccacacgctccggcccaccccacccagcgcccaccaggcaggccacagccgcacgccacagggcgaccc

SEQ ID NO: 89349 - DNA, 141 bp, Homo sapiens
  chr16:834384-834525
  hypo
ctcggctgagggcacggtggcagctgcctccagtcgggccccggtggggactccgggtctggaacccgcgtctcggctgaggacacggtggcagctgcctccggtctgggccccggtggggactccgggtctggaacccgc

SEQ ID NO: 89350 - DNA, 31 bp, Homo sapiens
  chr16:835960-835991
  hypo
gttccagcgtccactccgacagccactgcag

SEQ ID NO: 89351 - DNA, 31 bp, Homo sapiens
  chr16:837307-837338
  hypo
gaatcctgagtccccacgccccaccccagga

SEQ ID NO: 89352 - DNA, 30 bp, Homo sapiens; identical to SEQ ID NO: 28684
  chr16:844996-845026
  hypo

SEQ ID NO: 89353 - DNA, 194 bp, Homo sapiens
  chr16:845949-846143
  hypo
agcacacagctgtacagcacccgtgaaaagcaacagctggccagcctggtgggcacgatgctcgcttacagcctgacctaccgccaggagcgcacgcccgatggccagtacatctacaggctggagccgtgagtcccccagtgcctggggtgtgctccagggtcatgctccccggctgtgctccatgttcaggg

SEQ ID NO: 89354 - DNA, 86 bp, Homo sapiens
  chr16:846406-846492
  hypo
catggggcagtggccccggggtcctgctgccccagcgacggcaccaacttgcaggacgctgagtcactctccgtggcagccatcgg

SEQ ID NO: 89355 - DNA, 30 bp, Homo sapiens
  chr16:883607-883637
  hypo
cccggcgcctctcccggagaagcagcctcc

SEQ ID NO: 89356 - DNA, 609 bp, Homo sapiens
  chr16:894557-895166
  hypo
acacacagtggacagcgagctccaacatgtccacgggtgaacatcagcgtggccaccaccaggtccagagcacagtagaccctgtgccgccagtgtccgtcgccttccacacgtggccgcagttctgtgcatggggccgcccgccatcctgccgcctctgacctgggctgtgggctcgtgacacgtgtctgagctttccagtcgtggccgtgacgctctgtgcggaggctccgtccgcgtgctgcctccgtcccctctgccctggacggccactcactacctttgtctctcaccctgggggtttcatgaccccggagcctccacgtcctggtacagagcctgcctctccgggactgggcttcggccgagcagacaccgcctagctgctctttgaccagcgttctctgctctgcgtctggctggcatcggcggcttgctgagtccagcctggcatctcgctggcatcggcggctcgctgggtccagcctggcgctgacacgtttctgtgctcatttcattttacaaatcaactccccaaggtgaggtgggctcgtgccagcaggtgggagccggtcgtgcacgtctgcccagctccgtgctgagtgagga

SEQ ID NO: 89357 - DNA, 371 bp, Homo sapiens
  chr16:898859-899230
  hypo
caaggctcatctgagcgtcggggcctcgctcctctttgcggctgcgtaatgctcatgggtgagcacacctggtctgttcatctgggctgtccccacctctgggctgctgcaaacgttccggtgcaagcacacccaggtccccgtttcccgctctcccgggtctacatgcagatgtggagttgcggggtcacgtggttcccgtttctagctctcccaggtctacgtgcagacgtggagttgcggggtcacgtggtccccgtttctagctctcccgggtctccgtgcagacgtggagttgcggggtcacgtggtcgccgtttctagctctcccgggtctacgtgcagacgtggagttgcggggtcatgtggtc

SEQ ID NO: 89358 - DNA, 30 bp, Homo sapiens
  chr16:900730-900760
  hypo
ccgcatgcgtgggacgatttctcaggttgt

SEQ ID NO: 89359 - DNA, 30 bp, Homo sapiens
  chr16:901019-901049
  hypo
ggccgcatgtgggacgatttctcgggtggt

SEQ ID NO: 89360 - DNA, 30 bp, Homo sapiens
  chr16:902721-902751
  hypo
ggaggacagccgcacgggagggttccgggc

SEQ ID NO: 89361 - DNA, 30 bp, Homo sapiens; identical to SEQ ID NO: 28688
  chr16:903877-903907
  hypo

SEQ ID NO: 89362 - DNA, 30 bp, Homo sapiens
  chr16:905629-905659
  hypo
ctcagcccacagggcggctgctgcctggct

SEQ ID NO: 89363 - DNA, 97 bp, Homo sapiens
  chr16:919966-920063
  hypo
cttgcacttgaactcgtagtcctcccacatggcatcgggggcgctggcgttggagctggctgtgccctgcaggatcacctccgcccgctccttggtg

SEQ ID NO: 89364 - DNA, 30 bp, Homo sapiens
  chr16:925814-925844
  hypo
ggcagcacagcccacgcaggaggtgtgtgg

SEQ ID NO: 89365 - DNA, 30 bp, Homo sapiens
  chr16:928139-928169
  hypo
acacgcgtggggtccggctacatggaaccg

SEQ ID NO: 89366 - DNA, 30 bp, Homo sapiens
  chr16:930013-930043
  hypo
acacctgtaaaccccgtgcccaacttgaga

SEQ ID NO: 89367 - DNA, 30 bp, Homo sapiens
  chr16:938034-938064
  hypo
ctccgtgcccgtcacggggcctgtctgtag

SEQ ID NO: 89368 - DNA, 30 bp, Homo sapiens
  chr16:940182-940212
  hypo
gaaccgcaaagagccgtgtcacggcggtcc

SEQ ID NO: 89369 - DNA, 30 bp, Homo sapiens
  chr16:941933-941963
  hypo
gctgaacctgctctcggacaaagagaggag

SEQ ID NO: 89370 - DNA, 30 bp, Homo sapiens
  chr16:943023-943053
  hypo
tgcaggtgaggtctcgccagcaccggtccc

SEQ ID NO: 89371 - DNA, 240 bp, Homo sapiens
  chr16:943453-943693
  hypo
cctccaggatgagcccaaagtcggagggagcacccagtgcacacgcgtctcagccccgccccctgcggcacaaagggagccgaggcgcaggccccgtgtgtctcccacacactgcagctcgcctgctgtgaggactcctggggcacgggacaggcttccaggggcctgcagagggagccgccagcactggggaaggtgggacttgggcagagaggctgcggggctgggggttggttctgc

SEQ ID NO: 89372 - DNA, 353 bp, Homo sapiens; identical to SEQ ID NO: 28691
  chr16:945416-945769
  hypo

SEQ ID NO: 89373 - DNA, 125 bp, Homo sapiens
  chr16:946575-946700
  hypo
gtccagctgaccgggcggagaaggccccactcctcaaggcgctgcccacacccaggggagctgctgcttctgatgaaatgcacggctccaccgggcaggggcacaaccaccgccactgctccccc

SEQ ID NO: 89374 - DNA, 208 bp, Homo sapiens; identical to SEQ ID NO: 28692
  chr16:947036-947244
  hypo

SEQ ID NO: 89375 - DNA, 30 bp, Homo sapiens; identical to SEQ ID NO: 28693
  chr16:949644-949674
  hypo

SEQ ID NO: 89376 - DNA, 30 bp, Homo sapiens
  chr16:951790-951820
  hypo
ggaaggtggagaggcgccgcctgccccgcc

SEQ ID NO: 89377 - DNA, 30 bp, Homo sapiens
  chr16:958324-958354
  hypo
cgcgatctggatgccgggttgcagctatgc

SEQ ID NO: 89378 - DNA, 30 bp, Homo sapiens
  chr16:961201-961231
  hypo
gacaccagcccgcacgtattagtctcaaca

SEQ ID NO: 89379 - DNA, 651 bp, Homo sapiens
  chr16:962796-963447
  hypo
cttgaggaattccagcagctgcgcggcgtgcacaagggctgccattgttctccgcctcagcgtggcggacaacgcgtccccaggaaagtcaataagcagcacgctgccagggcggcctcagcgccaaggtcagggccagggctctccagacagctctcacccagcaaacaccagcgctgcctgaagcgagccccaggcacccgaacgaggcggcaacacgcagggccacagcacacgctgccactgccggggagaggagccgtcctcgcccccgcctcagtgcctttcccgttgcgcagctgcacgcgctgcctgctgggcgccagcatctgcacgccctgctcttccccagggacctcccttccctttagccagggggacggctccgggagggcccctgctccactccacggctccggcgtcgtttccacctcgtgctgtgctgggccttccgggagactgagcacaccctgtgaggagcctgacgcgttctgcctgggtaacggggcagtagctcttgtggggaacattcacttccacggccgctgctctccttcctgcgacacagacagcgttggcccaatcagcggagaagctgcatgtgcacggtccagggagatgctcctgagccctgcccgctggacagggtgc

SEQ ID NO: 89380 - DNA, 179 bp, Homo sapiens
  chr16:966495-966674
  hypo
actttgcactatcacggaacaggggctgtgggctacagacgcccctggggctggatgatgggggctggggagttcggctctcgctgcgcgccagtggcggggctgggcactggtaggccacacccacatggccccgggacaccaggtggccttgtctgtgatccgcccacatgcagagc

SEQ ID NO: 89381 - DNA, 30 bp, Homo sapiens
  chr16:967603-967633
  hypo
cccgctgacccctccggctcactggagatg

SEQ ID NO: 89382 - DNA, 205 bp, Homo sapiens
  chr16:969278-969483
  hypo
tcacagggaaggaacgtgggggttggcacacctgagaagtgggcgggaatcaccccacatgcccgcggcagggggcagggcagccctgtggcctctgcttcatctctgtcaggacctatggtggacacacacagctcctgccccaccttcatcactgctgagcccccctgggaaagctcatatctccagcgctcgcgtgaggaca

SEQ ID NO: 89383 - DNA, 36 bp, Homo sapiens
  chr16:969857-969893
  hypo
ccccaccccacagctccgccccgggacccccttcct

SEQ ID NO: 89384 - DNA, 30 bp, Homo sapiens
  chr16:979173-979203
  hypo
gaggggccagaaagcgtctccagaagcact

SEQ ID NO: 89385 - DNA, 30 bp, Homo sapiens
  chr16:980007-980037
  hypo
gcagtggtcgcgtccgtgtgaacgggggca

SEQ ID NO: 89386 - DNA, 30 bp, Homo sapiens; identical to SEQ ID NO: 28695
  chr16:981127-981157
  hypo

SEQ ID NO: 89387 - DNA, 918 bp, Homo sapiens; identical to SEQ ID NO: 28696
  chr16:981462-982380
  hypo

SEQ ID NO: 89388 - DNA, 30 bp, Homo sapiens
  chr16:983855-983885
  hypo
aaagtgcccaccagcgtgagtgccgtgagc

SEQ ID NO: 89389 - DNA, 30 bp, Homo sapiens; identical to SEQ ID NO: 28697
  chr16:1017793-1017823
  hypo

SEQ ID NO: 89390 - DNA, 98 bp, Homo sapiens
  chr16:1019651-1019749
  hypo
ccaacgcgtgggcaacgcccggggccagcagctccggagccctctgggacggtgactgcccacgcgccccgctggctgcatctcggcctggcaggctc

SEQ ID NO: 89391 - DNA, 30 bp, Homo sapiens; identical to SEQ ID NO: 28698
  chr16:1021765-1021795
  hypo

SEQ ID NO: 89392 - DNA, 30 bp, Homo sapiens; identical to SEQ ID NO: 28699
  chr16:1022396-1022426
  hypo

SEQ ID NO: 89393 - DNA, 30 bp, Homo sapiens; identical to SEQ ID NO: 52653
  chr16:1031929-1031959
  hypo

SEQ ID NO: 89394 - DNA, 30 bp, Homo sapiens; identical to SEQ ID NO: 52654
  chr16:1032245-1032275
  hypo

SEQ ID NO: 89395 - DNA, 31 bp, Homo sapiens; identical to SEQ ID NO: 28700
  chr16:1038887-1038918
  hypo

SEQ ID NO: 89396 - DNA, 30 bp, Homo sapiens; identical to SEQ ID NO: 28701
  chr16:1053700-1053730
  hypo

SEQ ID NO: 89397 - DNA, 30 bp, Homo sapiens; identical to SEQ ID NO: 28702
  chr16:1056977-1057007
  hypo

SEQ ID NO: 89398 - DNA, 239 bp, Homo sapiens
  chr16:1061203-1061442
  hypo
cggccagggcagagacgtaggacagagacgcagcgcagagcggccagggcagagatgcagggcagagacacagcgtagagcggccagggcagagacgcagggcagagacgcagggcagagacacagggcagagacgcagggcaaagcggcagggcagagacgcagggcaaagcggcagggcagagacgcagggcaaagcggcagggcagagacgcagggcaaagcggcagggcagagac

SEQ ID NO: 89399 - DNA, 30 bp, Homo sapiens; identical to SEQ ID NO: 28703
  chr16:1081653-1081683
  hypo

SEQ ID NO: 89400 - DNA, 837 bp, Homo sapiens
  chr16:1129248-1130085
  hypo
cttctgcctgacagtcatgagcgtggaccgctacctggcagtggtgcacccgctgagctcggcccgctggcgccgcccgcgtgtggccaagctggcgagcgccgcggcctgggtcctgtctctgtgcatgtcgctgccgctcctggtgttcgcggacgtgcaggagggcggtacctgcaacgccagctggccggagcccgtggggctgtggggcgccgtcttcatcatctacacggccgtgctgggcttcttcgcgccgctgctggtcatctgcctgtgctacctgctcatcgtggtgaaggtgagggcggcgggcgtgcgcgtgggctgcgtgcggcggcgctcggagcggaaggtgacgcgcatggtgttggtggtggtgctggtgtttgcgggatgttggctgcccttcttcaccgtcaacatcgtcaacctggccgtggcgctgccccaggagcccgcctccgccggcctctacttcttcgtggtcatcctctcctacgccaacagctgtgccaaccccgtcctctacggcttcctctctgacaacttccgccagagcttccagaaggttctgtgcctccgcaagggctctggtgccaaggacgctgacgccacggagccgcgtccagacaggatccggcagcagcaggaggccacgccacccgcgcaccgcgccgcagccaacgggcttatgcagaccagcaagctgtgagagtgcaggcggggggtgggcggccccgtgtcacccccaggagcggaggttgcactgcggtgacccccacccatgacctgccagtcaggatgctccccggcggtggtgtgaggacagagctg

SEQ ID NO: 89401 - DNA, 31 bp, Homo sapiens; identical to SEQ ID NO: 28704
  chr16:1147812-1147843
  hypo

SEQ ID NO: 89402 - DNA, 30 bp, Homo sapiens; identical to SEQ ID NO: 28705
  chr16:1173375-1173405
  hypo

SEQ ID NO: 89403 - DNA, 30 bp, Homo sapiens
  chr16:1179926-1179956
  hypo
cgcacattacgtgccggtggactgggagcc

SEQ ID NO: 89404 - DNA, 20 bp, Homo sapiens
  chr16:1186710-1186730
  hypo
gttgaaattgaaattggtgg

SEQ ID NO: 89405 - DNA, 340 bp, Homo sapiens
  chr16:1187522-1187862
  hypo
ccactccaccaagagtgaaaacgtccattgcactgaaagctggagcccctcgctccccaccccacccccagaagcggcccccctgctctccatcacggtgggtgaatccgaggccccaggatggcgtgtgagcgggatcagccgcatgcgctgttttcctctggcttctcccacccggcacaatggccttgacattcaccgcacttccgcgtccgcagctcactcatccctggtgcggttgagtcatgtctcatggtctgaacgtccgcggtggtttagctgttctcctgtcggtgaacacgtgggccgtttccagctcggggctactgtaagtcaagct

SEQ ID NO: 89406 - DNA, 110 bp, Homo sapiens
  chr16:1198573-1198683
  hypo
gcccctgcctctcccgtcttccacacagacaactgcgaaggtgagaagggtgagcggcgtctagacggcgctgtccacccagcggcaataaaatcggatgtttccgcaca

SEQ ID NO: 89407 - DNA, 39 bp, Homo sapiens; identical to SEQ ID NO: 28707
  chr16:1199882-1199921
  hypo

SEQ ID NO: 89408 - DNA, 40 bp, Homo sapiens; identical to SEQ ID NO: 52658
  chr16:1202546-1202586
  hypo

SEQ ID NO: 89409 - DNA, 494 bp, Homo sapiens; identical to SEQ ID NO: 52659
  chr16:1203265-1203759
  hypo

SEQ ID NO: 89410 - DNA, 155 bp, Homo sapiens; identical to SEQ ID NO: 10459
  chr16:1203807-1203962
  hypo

SEQ ID NO: 89411 - DNA, 108 bp, Homo sapiens; identical to SEQ ID NO: 10460
  chr16:1204002-1204110
  hypo

SEQ ID NO: 89412 - DNA, 120 bp, Homo sapiens; identical to SEQ ID NO: 10461
  chr16:1204128-1204248
  hypo

SEQ ID NO: 89413 - DNA, 866 bp, Homo sapiens
  chr16:1216477-1217343
  hypo
taatttatccaccacctaactcgccaatgaagggtccaattcggtcgttctccctgtatcctcgcggtggtgcagccccagcagcgatgggttccagaatgctttcctcgccccgagaggaaaccctgcagtcagctgtctcggcgtctcccgctggccttttccgtctccgaggttggcctgttctggacgttccctgtatatgggatcccacgtggtgtggactcctgcaccggcttctctcgagctttgtgcgggccggtcgtccatcctccccgcagagccctgacccttccacggttagatgcgccctcatgtagacgggctgcggtgtttatctcttcaccgctggtggatgtctgggccgtttcaccctttgctgctgttcatggcgctgccgggccgtccctgctccaggttcgggggaaaccctggcttcgtgtctcttggacgtaaatctgggagcaaaattgctgggtcaggcggaaacagtgttgagtcctcggaggaatggccaggctgttttccaaagcggtgcccacctgttgacccacctctcgcccccagcttttgggtccctgagtggtggttcagcagcagtgagtgctgacaaccacacccagccggagtccagggctgtgggagtggacacggcccttcctttcctcgccgaccctttggggcgtctcccatcgggaaatggcagcccctgacctgccccgtggggatgaaacgggctctttgcggggggcctgtggggtatgggcctcctgtcagcagcccgtcccggtgggtggggcttgccggccgcccgcgaatgtcaggaaccttggattcctgacacacgggtgcgggggcgatatcgg

SEQ ID NO: 89414 - DNA, 30 bp, Homo sapiens; identical to SEQ ID NO: 28711
  chr16:1227387-1227417
  hypo

SEQ ID NO: 89415 - DNA, 1100 bp, Homo sapiens
  chr16:1236136-1237236
  hypo
gggcgggtgactagacggtcggcgtgcgtaggggccggaggcggggtgtgtgcagggccagggtgtaccgtgctggtcctcccagggctgcttggggagagcctgtttccttagtggtgttttgaataagaatgcgcggctccctcgaggtgtcccagtggggctgttcagaagctgggcccagggagccctgaaggcaggggtccagcctgccgtgaccgcacaggcccagattcctggacgtttcgctttcgtaattgcacacgcagggcctggattcgccgtgcagaaagccggacgatgccgcggcgtggggtgaacgtcaaagggtcactgtggactctgcccacgtcctgagtgccctcgtcttgtccctctccacggcgttctcatcctccggcgattccctgggaacgtctctgtacctctgcacacgtgcccacacacatgcccctcgagatggcctgcactgtggcttctgtcgtgaatgtggtcacgtgtcctccgtgactcgctcctcctgccccgtgtgccctggacctggctcggtcccgatgcccgtggcaccaccgcctcctcaacgggtggccacgtaatgcttcctggccggtgaatgtgccacggcagtggagatattctgcccttctagctcttctgtatacaagcagtgcgccctggttctcagggccgtgaccaccaccatgaccggcagacttcagggcggtccgtcccactcccgtggcctcgagggtcctttggagctgccgcggttctgagtgggggtggacacggacacagggctggttcccggggatctcctgtaccacccactgactcccagggtctgcggctggcccggcccctcctgggtctcttgatgtgggaccaaagctgttgcttcctctgcggcagaggcgatggagtccctcagagcccgcgaccgtcccctccgcactgcgggctgatagcgcctgtgggaatgggcttccccggtgaatacacataggtcgtcttcttgagcaaattggaaaagtaaggttgagcgttcctgagaatgaggggccgggaggggaggaggcggccagcgccgcgtggggccg

SEQ ID NO: 89416 - DNA, 30 bp, Homo sapiens; identical to SEQ ID NO: 28715
  chr16:1246018-1246048
  hypo

SEQ ID NO: 89417 - DNA, 622 bp, Homo sapiens
  chr16:1248402-1249024
  hypo
agtgtccctggaggccggtggtggtaggaggggagtcccgatcacactaggggtgcgggaaaatcaccagggggtggcccgagtcagtgtgcagtgggcgtggacacccactgtgaacagtggacggggctcgggggtcccgggaggggctgcagccccgaggacactcctgcagggcttagcagtgccaatcctggccctgctgcccacaggcatgcggatcctggtcactctgctgctggatacgctgcccatgctcgggaacgtccttctgctgtgcttcttcgtcttcttcattttcggcatcgttggcgtccagctctgggctggcctcctgcggaaccgctgcttcctggacagtgcctttgtcaggtgcccaggccccacccccgtgaggcccctgcccagatggccctgcccaccatgcagataacgcaccatgtggctccaccgccccacgtggctctgcccaccgtgcagtcacccgccccgccactgctgtccccgtcatggctccgtccaccatgctgtctcccgcccccaccccccatcatggctccgcccagctggcagtcaccgccccacatggctccgcccacggtgcagtcgctgcacatatgcc

SEQ ID NO: 89418 - DNA, 156 bp, Homo sapiens; identical to SEQ ID NO: 28717
  chr16:1250479-1250635
  hypo

SEQ ID NO: 89419 - DNA, 383 bp, Homo sapiens
  chr16:1251772-1252155
  hypo
gtccaacgacagcacgctggccagcttctccgagcctggcagctgctacgaagagctgctgaagtacgtgggccacatattccgcaaggtcaagcggcgcagcttgcgcctctacgcccgctggcagagccgctggcgcaagaaggtggaccccagtgctgtgcaaggccagggtcccgggcaccgccagcgccgggcaggcaggcacacagcctcggtgcaccacctggtctaccaccaccatcaccaccaccaccaccactaccatttcagccatggcagcccccgcaggcccggccccgagccaggcgcctgcgacaccaggctggtccgagctggcgcgcccccctcgccaccttccccaggccgcggaccccccgacg

SEQ ID NO: 89420 - DNA, 30 bp, Homo sapiens
  chr16:1252469-1252499
  hypo
ccccacggaggaggcggtgggacctaggca

SEQ ID NO: 89421 - DNA, 84 bp, Homo sapiens
  chr16:1254184-1254268
  hypo
cgtctatgaattcacgcaggacgtccggcacggtgaccgctgggaccccacgcgaccaccccgtgcgacggacacaccaggccc

SEQ ID NO: 89422 - DNA, 30 bp, Homo sapiens; identical to SEQ ID NO: 28719
  chr16:1259307-1259337
  hypo

SEQ ID NO: 89423 - DNA, 30 bp, Homo sapiens; identical to SEQ ID NO: 28720
  chr16:1260002-1260032
  hypo

SEQ ID NO: 89424 - DNA, 30 bp, Homo sapiens; identical to SEQ ID NO: 28721
  chr16:1260641-1260671
  hypo

SEQ ID NO: 89425 - DNA, 30 bp, Homo sapiens
  chr16:1261651-1261681
  hypo
tggagcgagagggccggcgaccccagctct

SEQ ID NO: 89426 - DNA, 296 bp, Homo sapiens
  chr16:1262511-1262807
  hypo
cactttccccagcccaggtaccggccctgtcccgcatgcctcaggccccgcttctgcggccgctgctcggggaagggcgggcatcccaggcctgctggggtcctccgcagggtgggcacaggcagccggaggtgctgggcgtgtggcgtgaggaggggctgcgctcgcccgccagtgtccgggctgctgtgtgcgtgcacgcgtgcggctctgcccggctcacagtctgcctgcatctccgccgtgcgccgggacacccagagcaacgaggggccgcccacacccctgcaggcttg

SEQ ID NO: 89427 - DNA, 30 bp, Homo sapiens; identical to SEQ ID NO: 28722
  chr16:1263751-1263781
  hypo

SEQ ID NO: 89428 - DNA, 523 bp, Homo sapiens
  chr16:1265049-1265572
  hypo
gcatttgggttccgtcggttcttcaaggacaggtgtgtgtggtggggccgtcttgggttctgggggcccctcagggctctgggggctgggggcaggtgaggccgcaggctttcccacggaggtctgcagaagcaacgctgctgagccgaggcggggaccccagacgtgtgcgctgagcctccggccacacaggtggaaccagctggacctggccatcgtgctgctgtcactcatgggcatcacgctggaggagatagagatgagcgccgcgctgcccatcaaccccaccatcatccgcatcatgcgcgtgcttcgcattgcccgtggtaggtgcccgcgtgcccgccaggttctctctgcgggtggagggtgggggctcagccatgggtgggagtgaggggcggggcggccagggtccccgcgcagcagggagggtccgcccagccctgctgacgctcagctcccggccctagtgctgaagctgctgaagatggctacgggcatgcgcgccctgctggacact

SEQ ID NO: 89429 - DNA, 815 bp, Homo sapiens; identical to SEQ ID NO: 28725
  chr16:1267844-1268659
  hypo

SEQ ID NO: 89430 - DNA, 758 bp, Homo sapiens; identical to SEQ ID NO: 28726
  chr16:1270044-1270802
  hypo

SEQ ID NO: 89431 - DNA, 494 bp, Homo sapiens
  chr16:1271110-1271604
  hypo
gcccggggaggatgacggcccaggccctggttctctgcccagcgaagcaggagtagctgccgggccccacgagcctccgtccgttctggttcgggtttctccgagttttgctaccagccgaggctgtgcgggcaactgggtcagcctcccgtcaggagagaagccgcgtctgtgggacgaagaccgggcacccgccagagaggggaaggtaccaggttgcgtcctttcaggccccgcgttgttacaggacactcgctgggggccctgtgcccttgccggcggcaggttgcagccaccgcggcccaatgtcaccttcactcacagtctgagttcttgtccgcctgtcacgccctcaccaccctccccttccagccaccaccctttccgttccgctcgggccttcccagaagcgtcctgtgactctgggagaggtgacacctcactaaggggccgaccccatggagtaacgcgcccggccccgatgcgaatcaggc

SEQ ID NO: 89432 - DNA, 40 bp, Homo sapiens
  chr16:1273469-1273509
  hypo
tgacccgccgcacacgtgcaccctccgcaggcggaggctg

SEQ ID NO: 89433 - DNA, 30 bp, Homo sapiens
  chr16:1321465-1321495
  hypo
ggtgctggggatggccgtcgtgtagcaggt

SEQ ID NO: 89434 - DNA, 31 bp, Homo sapiens; identical to SEQ ID NO: 28728
  chr16:1323384-1323415
  hypo

SEQ ID NO: 89435 - DNA, 30 bp, Homo sapiens; identical to SEQ ID NO: 28729
  chr16:1330528-1330558
  hypo

SEQ ID NO: 89436 - DNA, 36 bp, Homo sapiens
  chr16:1341418-1341454
  hypo
gtgtggtgcgtttgccgcagtcgtgcgtgtgctcac

SEQ ID NO: 89437 - DNA, 30 bp, Homo sapiens; identical to SEQ ID NO: 28730
  chr16:1362611-1362641
  hypo

SEQ ID NO: 89438 - DNA, 30 bp, Homo sapiens
  chr16:1365862-1365892
  hypo
acagatttggaggtcggctttgatccctga

SEQ ID NO: 89439 - DNA, 30 bp, Homo sapiens; identical to SEQ ID NO: 28731
  chr16:1368105-1368135
  hypo

SEQ ID NO: 89440 - DNA, 257 bp, Homo sapiens
  chr16:1369125-1369382
  hypo
accagcaggcgcagcgtagcaccacggagtggctgccgtgcacctcacccggtggctggaatccgccagcgacgcagcctgcgtgagcagcctggaagcagcacggcttgagggccaacaccgtcaccccacattccacagcagcgcgctcacgcgtgttcgcactcaggacagccacgcagctgctggtgtcgcccgtgtgctcctgcggtgtgggatggtcgcggtgtgggacggtctgcggtggtgtcttcgcg

SEQ ID NO: 89441 - DNA, 101 bp, Homo sapiens
  chr16:1370326-1370427
  hypo
ctcccctccggacacgtgggtctgtggtcattctctgtggctgaggccgagtctcacggtgtctccctttcaaactgctcacacccgtcttgtgtttttgt

SEQ ID NO: 89442 - DNA, 84 bp, Homo sapiens
  chr16:1374350-1374434
  hypo
ggaccagacttggcatcggcaacgatgttgcaggccctggcgtgggccctctgggcctgagccctcctcgcagccctgcgggac

SEQ ID NO: 89443 - DNA, 86 bp, Homo sapiens; identical to SEQ ID NO: 52666
  chr16:1384611-1384697
  hypo

SEQ ID NO: 89444 - DNA, 30 bp, Homo sapiens
  chr16:1391900-1391930
  hypo
atgcacaccttttgcgggggagcaggacgg

SEQ ID NO: 89445 - DNA, 825 bp, Homo sapiens; identical to SEQ ID NO: 28734
  chr16:1397416-1398241
  hypo

SEQ ID NO: 89446 - DNA, 30 bp, Homo sapiens; identical to SEQ ID NO: 28735
  chr16:1399386-1399416
  hypo

SEQ ID NO: 89447 - DNA, 30 bp, Homo sapiens
  chr16:1400818-1400848
  hypo
aaggtggcagcaaacgcttccacgcaggaa

SEQ ID NO: 89448 - DNA, 30 bp, Homo sapiens
  chr16:1406938-1406968
  hypo
ggagtgtgcgggtggcggtctgcgggcagg

SEQ ID NO: 89449 - DNA, 91 bp, Homo sapiens
  chr16:1407452-1407543
  hypo
cagtcacccagcacctcgtgtgtatttcgactttattattattattattattattattagagccgagtgtcgctgtgtcgcccaggctgga

SEQ ID NO: 89450 - DNA, 465 bp, Homo sapiens
  chr16:1407782-1408247
  hypo
ggatgacagtcatgagccaccgcgcctggcctcgactttattattaatacggtaaaactacagagagtttgaaacatcagtctggggcgtcctcctctaaccagtgcacttgctgctgcagcgcaggcccttcaggggacggggatgggggccagtcccctccctgcctccacggcccaagccccagccttccccacagtcctggaggatggcccgtggctgacagtctcggtgggcgctgtgttaaggtggcgtccccagccaggtcccgactccccagcttaaagaacagggtggctgctgtggcttgactcacgagttgccactggccttgatgtgtacacgcccttgctctagcactgcctggggctggcctggctggagggtagggacgctgcacgccttccctcttcccccaggcgctggtgacactgccctgcaaccgtcagcaccatcatctccaca

SEQ ID NO: 89451 - DNA, 30 bp, Homo sapiens; identical to SEQ ID NO: 28736
  chr16:1413144-1413174
  hypo

SEQ ID NO: 89452 - DNA, 57 bp, Homo sapiens; identical to SEQ ID NO: 28737
  chr16:1414644-1414701
  hypo

SEQ ID NO: 89453 - DNA, 146 bp, Homo sapiens
  chr16:1416340-1416486
  hypo
ccgtgggcccgctcccggcaggccacacactgcttggcgcggagctggaagatcacctgcagggccagaacaatgacgggctcaggaggcccctgcccaggctgggccagctggggagccggagggccttccgggcaggactcagc

SEQ ID NO: 89454 - DNA, 282 bp, Homo sapiens
  chr16:1417076-1417358
  hypo
ccagagcaggactcacgccgtccaccgcctccaggtccaggcgcagctgactctgcagcgagtgcagcttcggcaggggaatggtgccgatgtccccacagccccgcagccccggcagtgtggaggctacgcccaggccctccagctcctcctgcagctgcttcacctgtgcctccacctcctccttcttctgcagcgccagctgccggtcgctatcggccacacgggcacgctccttggcctcctgcgcctctcgctgccaggcatcgcagacctgaaacc

SEQ ID NO: 89455 - DNA, 387 bp, Homo sapiens
  chr16:1417674-1418061
  hypo
ggactcctcccactgccggatcttcctcttggcctcgtccagctgccgcctgacccgggccagctcagctccgtttggacttgcactcgaagaggatggggggccggcactcaggatgggggaggggctgggggagaagctgccggaaacaaagtcccagatgctcccggggacaccgttcaaacctgagtgtgaaacggtcgatgacggcccagccctgctgtgctcgcggcctggtgggattggtgggtgctatgccccaggccccaccgctacgtgggcaccctctggggctcacctgccctggcagcaggggtgcagccacgcctgccccttgccccactcctggaccccaccaggctcaggaagaggcgctgacagtgacac

SEQ ID NO: 89456 - DNA, 184 bp, Homo sapiens
  chr16:1424438-1424622
  hypo
tgtcctcacctgggaccgatggtccctccatggccccaggcaaccgcaccccggggaaacctgtcagacccgaccgtgggggtcggcgcgccgggaacctccacagcctggccagcccctgcctggtgctcggttcagacaagctggggcccagcagaagcaaagaggcggtcactgccccacc

SEQ ID NO: 89457 - DNA, 828 bp, Homo sapiens
  chr16:1424907-1425735
  hypo
agggtgacttctgaagaagaacgctgccctagccgcacatgagatttgtcgggaacacagctgtggggcacgtggcctgcacctcacccctctgcccaggcctccgcttctcctccctggaagcagctggcaccagtcagcgccacggggaccatgggagcaaccacagggtggcgggtggcccctcgcccgaggcctggcgctcggcggtcacaccccccgagccccccagggcagccggagtatcctcgtgccgcggtggtggccccagcggagcacaggcagaggctggcgtggacgtggcgcagctggcaggtccgggcctctgaacttcaccccgaatctggccgcgctcagcagccacactgtgtggagaccgtgctccaccacccagagcggcaggcgggagagaagcctggctcgggagtggacggtggactccagaggccgcaaggcagaggccacccccaccccactccaccgcacagcacgacccagactcaaccctcgtccacacgccagccgtgagggaatttccggggcgtggaggccgggctgtggcgccacctggcaacactgtccttccccatcccgtcacagaggcagcagggcccagggcagagaacctgaacccctggggcgtccgggacggcacacggcgcatgcgggagtggcctccactcccacggagacaccgttccaatgaagcttttagggactttcgaaggtcttatccagaaactagagtaacaggttgggggtcggggcagccaggccaagaccccctggggaccaggaacccacagtagcatccgaaaatgcctcagc

SEQ ID NO: 89458 - DNA, 544 bp, Homo sapiens
  chr16:1428224-1428768
  hypo
caccgaccccccaacccgcaggcctgcccacagccccctcatgctcccatacgggggcttgatgacgggcagggccaagcggtttgcccatagtcaggtcagccaggctcgggaacctggacctgccctctgcacccaagtcccaggatcaggatatggcagccccttcagagctcaccgcccctcacacctggcagagatccagaaactcctcatgaaaatcaaagacgcaaagaagttgggggacaggaacggaggcgccttttctccccttggagtggggtgatcccaccaggctccgtgctaagtcggcagaagcttcacccaccagctgcagagtgcgcagcatgtggaggggctaagctgccttcaatgctcacccgacaaactacggctcgcactcaactcagagggcgtcagccaccacctacctcagccaagtcacctgtgctgaagcccgggaagctgcctggagaggggacgttcagggagcgtgtgggtgcccccgagagactccggccccgcttcaaagccaagtgcccct

SEQ ID NO: 89459 - DNA, 244 bp, Homo sapiens; identical to SEQ ID NO: 10465
  chr16:1429036-1429280
  hypo

SEQ ID NO: 89460 - DNA, 249 bp, Homo sapiens
  chr16:1435411-1435660
  hypo
gcgcgcaccccctgcgtggaggaggcagcgccacgtcggcaccctgcagaaagcaccgcgggacggcggccaacttctacgccctggcgaggcccagggagagcttcccagacccggagggactctgaccgcaccgaggagaaacaccaggacggcagggcagcgggctacggtgcacttgggacaggcacagacacctctggggagtgtctcgtgagcttttctgcagaaaacgtttcaggagtagac

SEQ ID NO: 89461 - DNA, 30 bp, Homo sapiens
  chr16:1451539-1451569
  hypo
accgccctcagctgcggccgtggagttacc

SEQ ID NO: 89462 - DNA, 73 bp, Homo sapiens; identical to SEQ ID NO: 28743
  chr16:1462653-1462726
  hypo

SEQ ID NO: 89463 - DNA, 33 bp, Homo sapiens
  chr16:1465336-1465369
  hypo
ttagtggtaggaggccgggcgcggtgtctcacg

SEQ ID NO: 89464 - DNA, 121 bp, Homo sapiens; identical to SEQ ID NO: 28745
  chr16:1472167-1472288
  hypo

SEQ ID NO: 89465 - DNA, 151 bp, Homo sapiens
  chr16:1484607-1484758
  hypo
ccccagccctgaaccccggcccaaaggcccaggaggccgcgccgggatccctgctgcccacctcacagcctggtacacgccccagcagttcatgggcaccaccttgccaggcgccatgtccttgatgaagacccgcggcctcaccagggat

SEQ ID NO: 89466 - DNA, 49 bp, Homo sapiens; identical to SEQ ID NO: 28746
  chr16:1487581-1487630
  hypo

SEQ ID NO: 89467 - DNA, 363 bp, Homo sapiens
  chr16:1493328-1493691
  hypo
gctggacctaggcccgggtctggcacctgcccctggagtccacccagctccggcaccactggcccctgggagctctgggcctgggcagcaggggtgagctgggctccaggcccagaagcagctgcccccaacacccaggaaaggggcagctcgacctgtgggtgggggagccgctcacctccggcgcctccttttcgggggcctgggctgccggccgcgcctcctgctgcaactgcctcagctctgagccctgcagctgcacgcgggcccgcacctggagcagctcccgcagcaggctccgcgtggcgcgctcacagcgctgcttgtgctcccgcaggcaggccacctcggcctgcagctcca

SEQ ID NO: 89468 - DNA, 31 bp, Homo sapiens
  chr16:1496408-1496439
  hypo
ggcctgcgcaaggaggcgccaaggggggaga

SEQ ID NO: 89469 - DNA, 30 bp, Homo sapiens; identical to SEQ ID NO: 28748
  chr16:1497751-1497781
  hypo

SEQ ID NO: 89470 - DNA, 30 bp, Homo sapiens
  chr16:1500552-1500582
  hypo
ccgatgagcagggacgggatgaagaccccg

SEQ ID NO: 89471 - DNA, 30 bp, Homo sapiens
  chr16:1507250-1507280
  hypo
tcaccttgaaatctcgtttcagtgacgttg

SEQ ID NO: 89472 - DNA, 30 bp, Homo sapiens; identical to SEQ ID NO: 28749
  chr16:1510875-1510905
  hypo

SEQ ID NO: 89473 - DNA, 256 bp, Homo sapiens; identical to SEQ ID NO: 28750
  chr16:1511178-1511434
  hypo

SEQ ID NO: 89474 - DNA, 30 bp, Homo sapiens
  chr16:1514398-1514428
  hypo
caaaaaggcagtgccgaaggcgcccacggc

SEQ ID NO: 89475 - DNA, 79 bp, Homo sapiens; identical to SEQ ID NO: 28751
  chr16:1523751-1523830
  hypo

SEQ ID NO: 89476 - DNA, 37 bp, Homo sapiens
  chr16:1536440-1536477
  hypo
ggtgcccaggcggccggaggccgtgcggacccagctg

SEQ ID NO: 89477 - DNA, 30 bp, Homo sapiens
  chr16:1551381-1551411
  hypo
agcctggcggatgccgctgagcctgctccc

SEQ ID NO: 89478 - DNA, 250 bp, Homo sapiens
  chr16:1557498-1557748
  hypo
gtgccaggcagggccgcagcgtgggtggtctgccacactgaggggagtgggaggtctggggtgtggtccctgccgagctcagcccccgccttcttgccggcagctacgtgcgccaggggctgttgtcggccgtctcctccgtcctgctcagcctgcctgctgcgcgcctgctggaggacctgatggacgagctgctggaagcccggtcctggctggcgggtgagtgtcggcctgcggtgtgtgtgtgaga

SEQ ID NO: 89479 - DNA, 233 bp, Homo sapiens
  chr16:1560776-1561009
  hypo
gtcacaccctccgccggcccgggccgctgcgttctcgcccagctctgtcgcgtattccaacacagacatgttttttcccagcaaaaatgctggctttgccacagctgacaaaaaaattccagaagatgcctttctgcagcagcacgctggtcctggggcccaggcccctcaggggtcgtcatctgcctcttccaccacctcctcgtccagctccctggcgtcctccatgctgt

SEQ ID NO: 89480 - DNA, 30 bp, Homo sapiens
  chr16:1570394-1570424
  hypo
agcacaagggaccccgagcaggagctctca

SEQ ID NO: 89481 - DNA, 30 bp, Homo sapiens
  chr16:1573385-1573415
  hypo
cagggggcacccaccgcagccttcctggag

SEQ ID NO: 89482 - DNA, 30 bp, Homo sapiens
  chr16:1574970-1575000
  hypo
gacggcccccaccccgcccctgtgccaccc

SEQ ID NO: 89483 - DNA, 43 bp, Homo sapiens
  chr16:1575250-1575293
  hypo
cgtagagctccagggacggcaggtcctccgacagcatcctggg

SEQ ID NO: 89484 - DNA, 854 bp, Homo sapiens
  chr16:1575856-1576710
  hypo
gcagggaagaggccgcgagggccgcactcactaactgagggcccggctgcagtcggcgctggcctccaggtgcccggcatagcggtggtaggtgctgcgcaggtgcacgcgatcgtggtgctcggctacctggagggcctcctgccaccggcccgcagcctggtagaacttgttcaggaggtcgtggcgcttgcacttcctgtacagctgctcggcgtcctcctgaggaatgaggatgggcaggtgtcgtgcagcctccacacacccacgtctcaaacacactgttccacgccaggccaccggtcaccgcaccttcccacaccgccaagcacactgacacacggggccgctgtgggcacagcaaacgccacacacccacggggcatccccgtcccacggctggagagtgagatgcaccaccaaggggtaccccacctcccacagcccccctcccacagccccccctcccacagcctccccagaagtcccgtgctcagccctgctgacctgggggtctctcgggcgctctgttccaggcccacacacctgacaggcacacaccctggagagccggcggtcgcctagcctccacccacctcacctccaccgccgctgtctgcccagctctcctgggtcatgcctctcggctctgcccacatcagtgcaggctcaggccggtgggcgtgcctcctccttccccagggggccgtggctgtggcaggcgtggtgccttcccacccaccccatggcgggcgcccctcaccagcatgcccagctgcgtggccagcacggccacgcgggcctctagctccggctcctgctccgcctcacgcagcgctcgggccccgcgggca

SEQ ID NO: 89485 - DNA, 47 bp, Homo sapiens
  chr16:1579422-1579469
  hypo
ctggcagcttcctggacgctcagtcggcgctgcggtgaaggtgacac

SEQ ID NO: 89486 - DNA, 321 bp, Homo sapiens; identical to SEQ ID NO: 28754
  chr16:1580444-1580765
  hypo

SEQ ID NO: 89487 - DNA, 68 bp, Homo sapiens
  chr16:1613976-1614044
  hypo
aatacaacaggcagagcgtaccgcagggccagcgcgcccatcttggggctgcccgtttgcagactgag

SEQ ID NO: 89488 - DNA, 252 bp, Homo sapiens
  chr16:1614792-1615044
  hypo
cctgccgggcagcacgacccatggctgctgaagaaggacaggacccggtgctgcaggacatgaagatcccctagtaagccactgcacccagcaatggaggtgccctcacagccacgttcggcaccagtgcagagcagagcagaaagcagggcagaggggcgagtgccatgctccagacaaggcggctctgaggcccagagagcccggggacacaagctggttcccgtgaggtgagaccggcctggtacggga

SEQ ID NO: 89489 - DNA, 30 bp, Homo sapiens
  chr16:1644649-1644679
  hypo
cacagtcgcaactgcgcggcacagacaggt

SEQ ID NO: 89490 - DNA, 177 bp, Homo sapiens
  chr16:1651460-1651637
  hypo
ccctaggcctcaggagagtggcgtctaagcatgtagggctgaagcatcgttatctgtgataaactcacaaatactcaggtaaaatacccacgtagctggagggaaagcagacctggcagtgggaacagcgggcgaatcgacatggagggtggatgcgtgtccttgcactgttctttc

SEQ ID NO: 89491 - DNA, 384 bp, Homo sapiens; identical to SEQ ID NO: 28756
  chr16:1652261-1652645
  hypo

SEQ ID NO: 89492 - DNA, 30 bp, Homo sapiens
  chr16:1659577-1659607
  hypo
gaacaggccctgcgcggatgaaacttagca

SEQ ID NO: 89493 - DNA, 435 bp, Homo sapiens; identical to SEQ ID NO: 52671
  chr16:1660448-1660883
  hypo

SEQ ID NO: 89494 - DNA, 701 bp, Homo sapiens; identical to SEQ ID NO: 52674
  chr16:1664480-1665181
  hypo

SEQ ID NO: 89495 - DNA, 177 bp, Homo sapiens
  chr16:1666425-1666602
  hypo
atgagagcagctacttcaccccgttgaagtgcggctgctaaaatgaaatagtgcattggtgtgaaagcactctcagacgtgtacgtggctacttgtatgtataagtgaagtgctgctgagacgttagtgatcaggtcaatttttggcagttgggacgaggggaggcttgcttttgtt

SEQ ID NO: 89496 - DNA, 197 bp, Homo sapiens; identical to SEQ ID NO: 28758
  chr16:1668008-1668205
  hypo

SEQ ID NO: 89497 - DNA, 30 bp, Homo sapiens; identical to SEQ ID NO: 28759
  chr16:1676661-1676691
  hypo

SEQ ID NO: 89498 - DNA, 151 bp, Homo sapiens; identical to SEQ ID NO: 28760
  chr16:1677032-1677183
  hypo

SEQ ID NO: 89499 - DNA, 119 bp, Homo sapiens
  chr16:1678614-1678733
  hypo
cttgatgtgtggctgactggccggtggcaggtgtgactgtgaaccctcaagctgtggggtgacggtgactgggcacaggcctctgctctgagaagtgcggcttctgccatgttgtcatg

SEQ ID NO: 89500 - DNA, 83 bp, Homo sapiens
  chr16:1681340-1681423
  hypo
ggctcctgcatcctcttctcacgtccccatcgcctgccagtgtattctcgtgtgctggtgccgtcaggcattccagactcagt

SEQ ID NO: 89501 - DNA, 64 bp, Homo sapiens; identical to SEQ ID NO: 28761
  chr16:1682397-1682461
  hypo

SEQ ID NO: 89502 - DNA, 17 bp, Homo sapiens
  chr16:1698314-1698331
  hypo
tagaattgacttgagcc

SEQ ID NO: 89503 - DNA, 30 bp, Homo sapiens
  chr16:1700357-1700387
  hypo
ctcccacgcagcactcgcttcagactcttg

SEQ ID NO: 89504 - DNA, 30 bp, Homo sapiens
  chr16:1700668-1700698
  hypo
gcatccttagaatcacgctctgttctgtag

SEQ ID NO: 89505 - DNA, 129 bp, Homo sapiens; identical to SEQ ID NO: 28763
  chr16:1701257-1701386
  hypo

SEQ ID NO: 89506 - DNA, 30 bp, Homo sapiens
  chr16:1703460-1703490
  hypo
gcttcttggagactcgtggctcgcatatgc

SEQ ID NO: 89507 - DNA, 209 bp, Homo sapiens; identical to SEQ ID NO: 28764
  chr16:1704650-1704859
  hypo

SEQ ID NO: 89508 - DNA, 144 bp, Homo sapiens
  chr16:1705538-1705682
  hypo
gcctgtgtctggcccacggggtgtggccaaagcattcctaccagcaggttgagcaaaacgaccaagggtcagcccagccttcttcacatccatggctggctcccggccctgcctgctccccacataggcgtggtgcgtgtcagg

SEQ ID NO: 89509 - DNA, 30 bp, Homo sapiens
  chr16:1706695-1706725
  hypo
cgcggggcctccgccgtctcagggacagcc

SEQ ID NO: 89510 - DNA, 94 bp, Homo sapiens
  chr16:1708013-1708107
  hypo
ctgctccacacaggccgtcttacagcttctgagtgatgctcacttctgcctgcattccccacgcctcccgctttttttccgctcccacccccag

SEQ ID NO: 89511 - DNA, 40 bp, Homo sapiens
  chr16:1712682-1712722
  hypo
ggggccgggccgcccgcgtgcgagcgtccccgtggtctgg

SEQ ID NO: 89512 - DNA, 30 bp, Homo sapiens
  chr16:1722317-1722347
  hypo
aaagagcagatcagcgtttagcatgagatt

SEQ ID NO: 89513 - DNA, 685 bp, Homo sapiens
  chr16:1730075-1730760
  hypo
atccatggaacagtgattattatgcctaggtctgcaccgatgtgggaccaggagtttaaactagtgctcagagcgaatccggtttctggttcctggtggccagagttttgcaccacccacatcagtggggggagggactgcatccccagccctgtcccagttgtgtgcatttagtacgtttcctttttgtttgtgctgcctggcactggctgcccggtaaatgatggtgtttattatcaccctgagcgacgccgatgtttttatattgactttcacgctccagaagttagctgcacagggccgcactaaagtcatactcacactaccctgggggactggtttctggacaaggtgttgagaaagggagaaaactcttccttttaggatggtgaggaaggaaagccggtctgaactggatgatgaggtatcactggaagcttctgcttggggtccaccagacgctgcacatttgccactcatctgaacggggtcgagtcgcagggcgggcgccttgtaagcgtcacatttagttttgctgtgaagcgagtcaggtggtggctgtaagattacctagccaggttttcctctcctgagacctcacatctctcctttccttgctgagggattgtcttgtgttaaaggggtttcgtaaaagcgttatgctttagccgcgattaacctgagg

SEQ ID NO: 89514 - DNA, 199 bp, Homo sapiens
  chr16:1731568-1731767
  hypo
ctcttccaaattttggagtcccgatggcactaggcgtctgtcacgtcactcacacagacactgaaaccacctgtgcagagctctagctttcctgtttaaacttgaagctcctccggggtaaggacttgctttcctctatctacggcgtctggggaaggattgccaatgataggtgctcgagagatgtgcaagttgaact

SEQ ID NO: 89515 - DNA, 41 bp, Homo sapiens
  chr16:1732071-1732112
  hypo
tatccaagaaaaatcgcagaattggctgggcacagtggctc

SEQ ID NO: 89516 - DNA, 101 bp, Homo sapiens
  chr16:1737554-1737655
  hypo
gagcactccatggaaggcaggcggtaccactttgcccgttccacatggtctcatgcccagtggggagcccggccccttgcggttagtgagccagcctctac

SEQ ID NO: 89517 - DNA, 420 bp, Homo sapiens
  chr16:1737935-1738355
  hypo
gagagtgtgtgtgaccgaccacatcatagccatcgaatgtttatcaattcccattcagtgtttcagtgaatcttcagtagtctctgtgttctttgttagtcacctggtttagatgttccatgaattgttcttcctcttctagcaatgatgaccaacgtctatgaattgttaatatttaccggggactgtgctaagtgctttgcatgtgtatttttcatttggtgttcgctataactaggagtaggttgttttgctcctttcacagaggaggaaacaggcttggaaaaggtcactggcatgcataaatcccaagctagtcagtagcagagctagtcggtagcagaactagtccgtagcagagctagtcggtagcagacctagccggtagcagtgctagtcggtggcagagctagcctttga

SEQ ID NO: 89518 - DNA, 299 bp, Homo sapiens
  chr16:1739990-1740289
  hypo
tgtacacatttctctgcagggcgagtcccgcatatccccaggtgttctgttaccacctgcaaaaggtagacacgcccgcccgaccccccacttgctgtgctctgttatagtcctccttgtcgctgcactctgggcccctagaactggtgtcccagaaagccaccctgctttaggccccgccgcagcagtggggccctcaagcgggtctgaagacgagcaggtgcacagacccccagccgagcctcatctccacgcaagcacacgtgggctcttcatccggttgcttctgtggagcagtg

SEQ ID NO: 89519 - DNA, 322 bp, Homo sapiens; identical to SEQ ID NO: 28770
  chr16:1741720-1742042
  hypo

SEQ ID NO: 89520 - DNA, 69 bp, Homo sapiens
  chr16:1748234-1748303
  hypo
catggtgagtcaccccgggggagtgagccactgctcaggttgagcggcagacttcgactctccccacgg

SEQ ID NO: 89521 - DNA, 145 bp, Homo sapiens
  chr16:1753651-1753796
  hypo
gtaacctttatcgcacgttatttgctggagatggcgccatgctcctttcatggattagctgacattcctaataggctggatattttaggctgttttgcaggcttagaaacagagatttggggccaggcacggtggctcatgcctg

SEQ ID NO: 89522 - DNA, 31 bp, Homo sapiens; identical to SEQ ID NO: 28772
  chr16:1762443-1762474
  hypo

SEQ ID NO: 89523 - DNA, 30 bp, Homo sapiens
  chr16:1782508-1782538
  hypo
ggccaggggcgtgccgtggagcctgcagca

SEQ ID NO: 89524 - DNA, 30 bp, Homo sapiens
  chr16:1782890-1782920
  hypo
gaactacaccggggcgtgtggatgccagct

SEQ ID NO: 89525 - DNA, 18 bp, Homo sapiens
  chr16:1788170-1788188
  hypo
gtccgtgtgagcgtccgt

SEQ ID NO: 89526 - DNA, 30 bp, Homo sapiens; identical to SEQ ID NO: 28773
  chr16:1790385-1790415
  hypo

SEQ ID NO: 89527 - DNA, 107 bp, Homo sapiens
  chr16:1795483-1795590
  hypo
catagctgcagagccacaggccgtctcagacatttctacaaagccactccgggaggcgggctgcgcccgtgtgagggctctccctcggcactgctcatcttttgggg

SEQ ID NO: 89528 - DNA, 1188 bp, Homo sapiens
  chr16:1796143-1797331
  hypo
ttcccacacctcaaggagggccgggggccacgggcaagctctgccatagcgggtgatcaggtcagctaagacgagaacgtttggggctctttttctccagctggttcagtatctttgttaggaaagaccattggaaagaatgtttgtttcgcattccgcattagtcacatagaatgcgctcctccctagcgagcttcctgaggtagacggctggttgcggtttctcgtaatccgggctgcccccaccctccagaatgtcttggtggcgtccctttctgtgagcagggattgtggtttctttgcgcttgctcatgttcaggggtgagctctggtccagtcaagccacagggtcagcaccttctggtcactccctggccctgacctgagcccggggaggaacgtggggcaggcgcgggtgggcccagcctcgagctcttcagcacagtgatggtgacggggcagcggtggcggcacagccagcccttcttgggtccccagtcagagccctctgccctacctgggctggacttgtttctgaacagccacaagctacagggggctgccgctgtgtccctggcgaggcactggcccattacaagcaatcgtctggggagggcaccagtggaaagccccgttccaagccatttcaggagggtggccctgcttccgaggagccggagtcagtggccggataagcagagccactcgggagtggtgaggcccggaagggttagcccggtgggcggcagaggagctctggcccgcagggtgtcgggcgaggcaaagtgcaaagcattggtgcgcggggcctcaggcagccacggcggagccgcaggccagggacctgcagtgactcgctctccctcctccctgtgtttggccttagtgtccacaggatgaaatgtccgagtcaggccagtcctcggcggccgccacacccagcaccacaggcaccaagtccaacacgcccacatcctccgtgccctcggccgccgtcacacccctcaacgagagcctgcagcccctgggggactatggcgtgggctccaagaacagcaagcgtgcccgggagaagcgcgacagccgcaacatggaagtacaggtcacccaggagatgcgcaacgtcagtataggtgggtgcccacctccgggactctgggctccctcgggcaggaggcagggcttggt

SEQ ID NO: 89529 - DNA, 100 bp, Homo sapiens; identical to SEQ ID NO: 28774
  chr16:1804797-1804897
  hypo

SEQ ID NO: 89530 - DNA, 165 bp, Homo sapiens
  chr16:1805217-1805382
  hypo
tatggcatctcaaaccgtggaaaacgggcagatgagtcagtaaatgtactgccttagttgctgctggtgtaaaatgaagtctaagcctgacctccccgtaaacagcagtgatttccaggtggattaaagatctaagtacacaattacgaggacaacagaatgcag

SEQ ID NO: 89531 - DNA, 680 bp, Homo sapiens
  chr16:1807727-1808407
  hypo
cggtgtctccctcgccgctctctccctcgcccacgctggggggcttttggagactgggtacctgccacaccctgccacacacactctcctcttcacaggcctgcatcatgggggctgcggggggcctgccctcctgatgggcgatgggagcagagggcagcaggcttccgggtcagggctcggcaacacagccctgggctggaccacggcgcctgggcctggttccctgcaggcctctgcctgggcacacggggcaccgggacctgctggaggctgctccctctctctcctgccctgcaacatgggagcagccgaatcattgctgggttttctgtaataagaatgtattgttagttccagtccctaattgacctttgtcccttccttcccctgcctctctgtgcgtcgctggactcgccaggggagttctcaggtgagtatctcactctcctgtctgtctcccctctgtgtgacggggggagtgggtggacgggggatgccccgagctatcccgtcaccgtggctgtgtggactgccccccacgtcgccgcagcgcctctgcttctgctcgcagccaccgccgctcggaagcttgttcggtttgctccaccagccacttgacaatgacctggatatccaacccccccagcctgaggagtcccccgcgggccatttctgaa

SEQ ID NO: 89532 - DNA, 110 bp, Homo sapiens
  chr16:1810327-1810437
  hypo
cacgtacctgtatgccgcgcccgtggcactcccatctttctgctttttcaaagaaacgccttgaatgtggtgaagaatgacctgattgccaaggtcgaccagctgtccgg

SEQ ID NO: 89533 - DNA, 193 bp, Homo sapiens
  chr16:1812258-1812451
  hypo
gagatccacctatacgtgtaggcaccccaggaggaagcaggtgtcacccggcctccgagggctggctgagcctctgtgcccctccctccgcaggacaaaatccccatggcccagcgccgccgcttcacgcgggtggagatggcccgtgtgctcatggagcggaaccagtacaaggagcggctgatggagctgc

SEQ ID NO: 89534 - DNA, 1167 bp, Homo sapiens
  chr16:1813335-1814502
  hypo
atgcctgtgccccggcggcactccaggtcccggtctgtggaaccctcagtgactgtggcagcagagcagcctctgggtcgagcaggggccagctgtggcctccaagcccaggggcatagccggtgccaggaaagccacccttcccagctgggcacccagtgccgggaaagccacccttcccagctgggcacccggtggccgggaaaaggcgaggatgggcccaggcgggcctccctgccgtgacctcccccaggacaagcctggggcactgtgggggccgctcaccctggacagagacatcacccatcattcttccactcagcgactgcacgtcctccgcccgtcgagagcagaagcgcgagcagtaccgccaggtgcgtgagcacgtgcgtaacgacgacggccgtctgcaggcctgcggctggagcctgcccgccaagtacaagcaggtgcgggcgggcgctgcggggaccgggcggggccccgcagaggcggggcgggggtaaggggcggggcgctgtggggcggggagagggcggggcagtgctagggggtgggagaggacggcgggtggggcggggcctggcaggttcctagtgagcctcctgggcaggggtctggagggtcggagaaggagccccgcggctcccacgcccccacctgcctccagtcttgaagtggctgtgccgccagaagctggcagccctacctgtctcagatttctggagggatgggtaggagccagggttcgtgcccacggcgcctccctgctccctgcagctgagtcccaacgggggccaggaggacacgcggatgaagaacgtgccggtgccggtgtactgccgccctctggtggagaaggaccccaccatgaaggtgagcccgcgaggaccccgctcaggctggctgggcgagcgggaggctggggagtgccggtgacacccgacctcggccctgcccttgcagctgtggtgtgccgcgggcgtcaacctgagcgggtggaggcccaatgaggacgacgctgggaatggagtcaagccagcgccaggccgcgatcccctgacctgcgaccgcgaaggagacggcgagcccaagagcgcccacacgtctcccgagaagaagaaggtgagcatggccgaggccaccgggcaccctccctggcttagt

SEQ ID NO: 89535 - DNA, 30 bp, Homo sapiens
  chr16:1815139-1815169
  hypo
gtctgcaacgcgcacgtgctgtgcatctcc

SEQ ID NO: 89536 - DNA, 30 bp, Homo sapiens
  chr16:1815953-1815983
  hypo
tccccagcggccagcgacagcgactaccct

SEQ ID NO: 89537 - DNA, 30 bp, Homo sapiens
  chr16:1817733-1817763
  hypo
taggtgaggggccacgccagatggggtggt

SEQ ID NO: 89538 - DNA, 308 bp, Homo sapiens
  chr16:1818406-1818714
  hypo
catcccctgcatgccagtggccgccgcctcccccaggaggccgctgtcctgaatcgcttctgccatcccagggaacgtgctggccaccctgaatgggagtgtgctggacagcccagccgagggccctgggccagctgcccctgcctcggaggtcgagggccagaagctgcggaacgtgctggtgctgagcggcggggagggctacatcgacttccgcattggtgagcggggcccagggacagggctgaggttgggcgcggggggagcctggccgtcactctgctgctttgcccgcaggagacggagag

SEQ ID NO: 89539 - DNA, 31 bp, Homo sapiens; identical to SEQ ID NO: 28781
  chr16:1818974-1819005
  hypo

SEQ ID NO: 89540 - DNA, 30 bp, Homo sapiens
  chr16:1826025-1826055
  hypo
gccccgtccccaggcgccctctcatgcctt

SEQ ID NO: 89541 - DNA, 30 bp, Homo sapiens
  chr16:1826842-1826872
  hypo
caggctctcgtcctcgcagcctcccacaag

SEQ ID NO: 89542 - DNA, 30 bp, Homo sapiens
  chr16:1827242-1827272
  hypo
acctgcttgaggcccggcggcagcggcaga

SEQ ID NO: 89543 - DNA, 228 bp, Homo sapiens
  chr16:1827933-1828161
  hypo
gggcctcacgcacccgtgtaggagaggccccagctgtcctcatccctgcccagcaggctgcagaacgtgtggcggtatttgtccaggtccacatccgacgtcccgatgcccaccatctaggaacaggggccaggcagagggcgcggggctgggctgccggagccaggttccccagaagcaccctgggccgaagcaacttaccatgtcggtgccgtagacgggagaggt

SEQ ID NO: 89544 - DNA, 66 bp, Homo sapiens
  chr16:1839099-1839165
  hypo
gccccctaagggggcgaactgacctcaggcatgttttgtaactgtagaggcgcctgccattaaacg

SEQ ID NO: 89545 - DNA, 31 bp, Homo sapiens
  chr16:1854038-1854069
  hypo
cctaagtgtgtgttctcgtttccatgctagt

SEQ ID NO: 89546 - DNA, 30 bp, Homo sapiens; identical to SEQ ID NO: 28782
  chr16:1859315-1859345
  hypo

SEQ ID NO: 89547 - DNA, 30 bp, Homo sapiens
  chr16:1869143-1869173
  hypo
tccgggcttgctcacgaagtaacaaatgtg

SEQ ID NO: 89548 - DNA, 38 bp, Homo sapiens
  chr16:1881726-1881764
  hypo
gtgagcattcccgcccgagttctgcttcccgtcagatc

SEQ ID NO: 89549 - DNA, 38 bp, Homo sapiens
  chr16:1881883-1881921
  hypo
atcctgaaaccatccccgccccccgacccggcaatccg

SEQ ID NO: 89550 - DNA, 32 bp, Homo sapiens
  chr16:1895225-1895257
  hypo
tacatatataagggaccgggcgcagtggctca

SEQ ID NO: 89551 - DNA, 18 bp, Homo sapiens
  chr16:1919743-1919761
  hypo
gcccggcctcagtgggac

SEQ ID NO: 89552 - DNA, 37 bp, Homo sapiens
  chr16:1938627-1938664
  hypo
ttcgagcgggctctgccgccaacggctgatgctttag

SEQ ID NO: 89553 - DNA, 33 bp, Homo sapiens
  chr16:1944316-1944349
  hypo
tctgccccttctgccatgcgaggacagtgaaaa

SEQ ID NO: 89554 - DNA, 19 bp, Homo sapiens
  chr16:1946540-1946559
  hypo
tggcggtggcagtcccgct

SEQ ID NO: 89555 - DNA, 176 bp, Homo sapiens
  chr16:1946678-1946854
  hypo
gctgcacctggcctacacggcttttaaatcttacattgtgcaccagagaagagtcaaacaaagcaaaattagcggcagaaagcacccccttgcttctctgtacacacgacccaggtgtatcgcagagcaaacacagtgaaagtgtgcacgctcgggaaaggcgcaggaactgacat

SEQ ID NO: 89556 - DNA, 21 bp, Homo sapiens
  chr16:1956107-1956128
  hypo
ccaccgcgcccggcccagaat

SEQ ID NO: 89557 - DNA, 200 bp, Homo sapiens
  chr16:1960051-1960251
  hypo
aaggctaagaggctattaatccgtctccctgtgcacacacccaacactcgctgacctcaccaacactcaggcaattccacaaggctccagaaggaagcgtccactgcgcacctggattccggatgagccaaggtggtgggtgcggacccgactttaatcctgccccaccactccacagcgaggcctgcagcctcactttc

SEQ ID NO: 89558 - DNA, 52 bp, Homo sapiens; identical to SEQ ID NO: 52682
  chr16:1968561-1968613
  hypo

SEQ ID NO: 89559 - DNA, 31 bp, Homo sapiens
  chr16:1982770-1982801
  hypo
gggtcagtcgctgcagcgggcctgctctcac

SEQ ID NO: 89560 - DNA, 19 bp, Homo sapiens
  chr16:1985414-1985433
  hypo
cagtcggcttctgtctatt

SEQ ID NO: 89561 - DNA, 254 bp, Homo sapiens
  chr16:1989323-1989577
  hypo
gagctgaaaagaccagatgcccgactcaggggagtctgtgtaccccattttgttctgacatccacaggagaacccagaatctcttctccctccactcacacggaggacaaataacaacaaaaggacgaaaacatcgcaggtttaccacgcaccagatcctgacaggctgctcgctcaaccccacagcacggtgatggccacaagcgtgtgctgttaacagccccatttcaggcgaggcagtggctcaagcctgt

SEQ ID NO: 89562 - DNA, 111 bp, Homo sapiens
  chr16:1997450-1997561
  hypo
cagcagtgacccctgccgccttccacgcatgcattcattcacaggtgttcccaggatcaggttgcaacccatgtgttgtgctaggcactgcggatccggtgcagaatgagg

SEQ ID NO: 89563 - DNA, 42 bp, Homo sapiens
  chr16:2000905-2000947
  hypo
tgtagctgctttttcccgtctgtgtcccgccacctcttgcag

SEQ ID NO: 89564 - DNA, 516 bp, Homo sapiens
  chr16:2003498-2004014
  hypo
gcgtgagccaccatgcccggcctgcattatttcttacaactacttgtgaatctacgattaaaacaacaaaaactaactatatacataggcgtacatatgaaataatggtacatgaaatagacccgaaatggccaaaaagtgcagatgtcctggcaggtggtttgaaccgagggcttggggcgctggcctttgaatcctagctcctgcgcttaccgccccggtgactggaccaggttcctcactgctttgtgcctcaatgtcctcatctgcgagctggggccatgacagaacccgcccggaagccctgcctgtgctcagcgtccaccccaattcccgggggcgaggcctggtgctccctgggactgtggccctgtctggaccaaaagcgtgagttctggctccgagcatctggaaggttcagccctccccctcccccaagggtcccaactgtgactcactgagccccggccggtgcacctcccgcagggtgtgggtcatgcccgccttgtagcccag

SEQ ID NO: 89565 - DNA, 121 bp, Homo sapiens
  chr16:2007510-2007631
  hypo
gaatgaagctacagaccttcgcggtgttacagctcttaaggcgccgcgcgtctggagttgttcatcctgccagtgggctcgtaatctcactggcttcaggagtgaagctgcaaatcttcgc

SEQ ID NO: 89566 - DNA, 30 bp, Homo sapiens
  chr16:2018543-2018573
  hypo
cctcgcaggtgccgcgtgggaccctggcag

SEQ ID NO: 89567 - DNA, 30 bp, Homo sapiens; identical to SEQ ID NO: 28788
  chr16:2024406-2024436
  hypo

SEQ ID NO: 89568 - DNA, 30 bp, Homo sapiens
  chr16:2025673-2025703
  hypo
tgctctacgaggctcgctccctgcggctgc

SEQ ID NO: 89569 - DNA, 30 bp, Homo sapiens
  chr16:2026310-2026340
  hypo
tctaggtagtgagtcggggctgggcccagg

SEQ ID NO: 89570 - DNA, 602 bp, Homo sapiens
  chr16:2028620-2029222
  hypo
atgaagctccctgtgccggccgccgcccccaccccctgggaaacccataaaggcgcactgccctagccggtccggcctctctccagtccatcctgaacccctggaaaacccataaaggccgctctcctggccggctctgtctctctggactgcagtccagccccccaccctggccaacaccctacctagccagccagaagggcactggagctgatggtctcggccctgccacgcccatcccgcaccctggcctggcagagatccagcccgcggctccgcacgcttagacggtgggggtcatgcagaacaagctttactcagaggaacagcaaatggccccctcccatccctgctggccagggagatccgccctccccgctcctccccagccctgggatggcgcggtccatcccctcatcgggatcctcgcgctcactgctccgtcgtggggtgcggcacagagtccacgcaccctcgagggcggccctggcgccgtgggcgccgctccagggccctgcgtgtgacggtgcagcagcggctctggatggcgcccggcgaaggtcgggtgggcacggtggggggaggggcggtggcctgggagg

SEQ ID NO: 89571 - DNA, 36 bp, Homo sapiens
  chr16:2035810-2035846
  hypo
gcaggggcagtggagccgctgcgtcctctcattctt

SEQ ID NO: 89572 - DNA, 599 bp, Homo sapiens; identical to SEQ ID NO: 52687
  chr16:2041581-2042180
  hypo

SEQ ID NO: 89573 - DNA, 35 bp, Homo sapiens; identical to SEQ ID NO: 52688
  chr16:2042498-2042533
  hypo

SEQ ID NO: 89574 - DNA, 246 bp, Homo sapiens
  chr16:2043000-2043246
  hypo
gacctaccagagcccgcccttcaccgagaccctggacaccagccccaaagggtaccaggtgcccgcctactagcggctggcaggcacagaccagggctccaaggccaccccaccaacgcaggccccagggtctccgggacctcccttgggtccttccagctcagtgccgcggacagagtaggtggccgctttgcgccatccggggccaagagggggtggacccgcgtgtctgggctgcccctgcca

SEQ ID NO: 89575 - DNA, 309 bp, Homo sapiens; identical to SEQ ID NO: 28793
  chr16:2049433-2049742
  hypo

SEQ ID NO: 89576 - DNA, 31 bp, Homo sapiens
  chr16:2051261-2051292
  hypo
ggcccagtgtgtggggcgatcatctggggtc

SEQ ID NO: 89577 - DNA, 30 bp, Homo sapiens
  chr16:2052604-2052634
  hypo
gtccaggtagcgctcgtcacagaacttgca

SEQ ID NO: 89578 - DNA, 30 bp, Homo sapiens
  chr16:2075461-2075491
  hypo
ttaggggcagctgccgggatatgggcaccc

SEQ ID NO: 89579 - DNA, 30 bp, Homo sapiens
  chr16:2099493-2099523
  hypo
agaaacaactaaaacgttcatcaactgatg

SEQ ID NO: 89580 - DNA, 30 bp, Homo sapiens
  chr16:2101039-2101069
  hypo
gccgagcgggggtgcgggggcttatgcctg

SEQ ID NO: 89581 - DNA, 30 bp, Homo sapiens
  chr16:2104107-2104137
  hypo
tcggccggtgcatccggccccctgccctgt

SEQ ID NO: 89582 - DNA, 743 bp, Homo sapiens
  chr16:2104667-2105410
  hypo
gtctctggggcttggggcctccgaacacctctgcaacggcaggagctgggcgagttctgtcactgggaggtggtgctgctgacttggtctcaaccggagcgtactggtcccgtcttcctcctcctttctccactttgtggaccttcctcctgccatcctgtggtgggaggtttccattagtcttgggtctctgtgtcatgattctgggaagtagagaaagaggaggaagagatcggtctgactctggctttgctgttctgtcgcccagaaaagggcctcagtggctgggctgcctgcaggacaggtgccggccaggtgcctaccgtcaggtttcctgtctgaggtgacgtggccggcagccaagtgtgcacacgtctcctccgagccactctctgctgggggtggggaacgcccaggagtctggtgatgtcggcgtctcccagcctcgggttgggccctgagtgtacggcatacacacttctgctgccgcctcggcacagaccctctgtgcagccccaggggcggtagatcctagtgtccgtgcgtagccggcctgccctgggctcccctgagcctcttcgggcccagtgcgtggtctgtctgttgctgccgggggactgatgatggggtttctggcagtgacgggtttggacacactgtcctgcggcgggagggggaggtgagtgggagatgtagattcggcgtcctcgcaaactgccgccgcttctcccccagctgacttt

SEQ ID NO: 89583 - DNA, 251 bp, Homo sapiens
  chr16:2106518-2106769
  hypo
agggtgccatggcagcggggagaggtggcagcgcaggctgaaggaggtgggaaggaagcctgggtgtcctctcctgtggggaggagctggggtaggacgggcgtgagccgtctccctctccaccaggtctccctgcaggtgctggacgccgtggtctgctacaactgcctgccggctgagagcctcccgctgttcatcgttaccctctgtcgcaccatcaacgtcaaggagctctgcgagccttgctggaa

SEQ ID NO: 89584 - DNA, 515 bp, Homo sapiens
  chr16:2106982-2107497
  hypo
tggtggcgagctggccggaccttgggtggctatagggcagcagccaggcggggccagcagcgggactggggctgggggcagggcttatgcctgccagcccctgacacgcattgtgtctcgcagctgatgcggaacctccttggcacccacctgggccacagcgccatctacaacatgtgccacctcatggaggacaggtgagtgtggtgggtggggcgcagggcagtggaggccagcacagccctcggggcagctccagtgtcccttgccaagcacacactggcttagagagtccttgtcctctcgggcagctgttccagaggctgccactagagcgaggcccatgacttctaggatccagcccctgtcctctccttcctctgtcagttcaacagaatatccacacccagctcagtgcctgccccatgctcggacgtcctccagcggtgctccccaactacttagcctgttacaaggcgaggctcggggtcttggcttgacgttgcccttgccct

SEQ ID NO: 89585 - DNA, 426 bp, Homo sapiens; identical to SEQ ID NO: 28798
  chr16:2108516-2108942
  hypo

SEQ ID NO: 89586 - DNA, 30 bp, Homo sapiens
  chr16:2110347-2110377
  hypo
gcacagcttgcagccgaactcagggcagct

SEQ ID NO: 89587 - DNA, 30 bp, Homo sapiens
  chr16:2110673-2110703
  hypo
atggcatgtccgaacgaggtggtgtcctat

SEQ ID NO: 89588 - DNA, 30 bp, Homo sapiens; identical to SEQ ID NO: 28799
  chr16:2113243-2113273
  hypo

SEQ ID NO: 89589 - DNA, 30 bp, Homo sapiens; identical to SEQ ID NO: 28800
  chr16:2123200-2123230
  hypo

SEQ ID NO: 89590 - DNA, 167 bp, Homo sapiens
  chr16:2124088-2124255
  hypo
gacttgctaagcctcggctgttctcccggtggagcactcgaggttggcgaggggtaggcgaggctgcctctgctgcaagcgggtggggcctgaggtgtcctgtctcctgcagcgcgagatggtctactgcctggagcagggcctcatccaccgctgtgccagccagt

SEQ ID NO: 89591 - DNA, 149 bp, Homo sapiens
  chr16:2125860-2126009
  hypo
cgccatctccctgccgtacaccaacccctccaagtgagtggtcgccccaggccctgtgcctcccagccgtggcccccgctaggccttgcggcagaaagccccggcagcctttgtccccaaggcctgagcgcctcggttttttgcacttc

SEQ ID NO: 89592 - DNA, 173 bp, Homo sapiens
  chr16:2126989-2127162
  hypo
gcatttcatttgaacggctttctcctcctgtcccccaccttcctgcccgagctattttggctttccctagatgggaatacggcattttccagcgtgacctcaactcggaagctgttgtctccagcccctgggggccgggggccaagctcggccattacggccagagactactt

SEQ ID NO: 89593 - DNA, 1181 bp, Homo sapiens
  chr16:2128598-2129779
  hypo
cctgcctgagggtgacggtggaaggccacatggggatcccagacctctgtgtgcttgccggaggcagcctgcgggcagaatgcaatctgggcctgtctgtgtggcctccgcctctctgcatgactacaccgtttcgccaggaggccgtaacctagtgctcccgtgggcttcggtgagggggatgtcggtctctagcctcctgagtctgctccgaccagtaggcctggtcttccccacccagcgtctccccgttctctgggacaatgtggtccacgtgattctcaagctgaggctcgctgggccgcccacgccctgttggggtctttccgagcgaggtcctcagccgtgcatgcgttgagctttggcccttggtgataggtggctcggcccgccctacctggcaccctgaccctggtcacggcctctccctccagcaggatacagacgtccctcaccagtgccagcttggggtctgcagatgagaactccgtggcccaggctgacgatagcctgaaaaacctccacctggagctcacggaaacctgtctggacatgatggctcgatacgtcttctccaacttcacggctgtcccgaagaggtccaggcggcactacagggctgggcgggcctgcgggagctccacgggcaagctgggtttcacgctccctgtcttctaggtctcctgtgggcgagttcctcctagcgggtggcaggaccaaaacctggctggttgggaacaagcttgtcactgtgacgacaagcgtgggaaccgggacccggtcgttactaggcctggactcgggggagctgcagtccggcccggagtcgaggtgactgcaccttcctttcctccgcgcctgccagcctcgacaccggctgtcccgagcccaggcccacgtggcaccctcgtaccagcctggggactaagtccaccctgtgcgtgggattctcttctcagctccagccccggggtgcatgtgagacagaccaaggaggcgccggccaagctggagtcccaggctgggcagcaggtgtcccgtggggcccgggatcgggtccgttccatgtcgggtgagccttggccccagccacctccacacaggcaccggggctccctcagttgctgctggtcccagtgttcaggaaggccccgagcccaggggccggggtggctggcttc

SEQ ID NO: 89594 - DNA, 88 bp, Homo sapiens
  chr16:2131678-2131766
  hypo
tctaacgccctcatggcggctgagcgcttcaaggagcaccgggacacagccctgtacaagtcactgtcggtgccggcagccagcacgg

SEQ ID NO: 89595 - DNA, 30 bp, Homo sapiens
  chr16:2134433-2134463
  hypo
aggccgacgtgggccggctgagccctgagg

SEQ ID NO: 89596 - DNA, 48 bp, Homo sapiens; identical to SEQ ID NO: 28803
  chr16:2135229-2135277
  hypo

SEQ ID NO: 89597 - DNA, 161 bp, Homo sapiens; identical to SEQ ID NO: 28804
  chr16:2135483-2135644
  hypo

SEQ ID NO: 89598 - DNA, 30 bp, Homo sapiens
  chr16:2138071-2138101
  hypo
agcgtggccaagatcgtgtctgaccgcaac

SEQ ID NO: 89599 - DNA, 30 bp, Homo sapiens; identical to SEQ ID NO: 28805
  chr16:2139099-2139129
  hypo

SEQ ID NO: 89600 - DNA, 1201 bp, Homo sapiens
  chr16:2141839-2143040
  hypo
ggctcaggcccagctcctgcacgtagcccccgctgtcatacacggcacaggagccccaggaccatgccctgccggagaggggtggcgtgggtgccgcaccccagcccttccggcaccccggagccaggctggtcaggaggccgcggcactcctggagaactactcccttgtccttggcgtagacgcccggggccctcgctctgctcaccccagcagatccggcgctgaataggcccacgtccccgagccattgtgaggactctcccagccaacgtcgtaatcgctggtgctgaagcctcctgcggccgagcacgtgtggaccctggggccgggagggtctgggtagagtgctgaaacacacagagccccaggccggggccagggcctcatcaaaacccaacaggagtgtttcctgctggccagctcgcctgagctctggttcggcgccaccccagggaaccctcccagcagccatcaattagacaacgttaccatctctcatatacagagaaggaaacggcggtgttaagagggcaaaggtcacacagctagggagcagggctgatgccagagctccgctaaaggctgctctctcaacaagaggaacgatttaagtcttggggcacgccctgccagctcaccttcctgcagccgcacctgccgcagccgtgggggccccagctctgggctggactggttcccgtggacgtagggcagcagcacgtgggccatccatggccagagctcctcagacctgccacagcatcagtcacacgctccagcccctactgccccatgcccgcctcgagtgagcggccaccagagacccagggaacatggctcccactgccctgctggccacggctagacctgggcttctcagccttatcctggggatgttctggggcagacagttgtctgtcatgggcccgtcctgtgcactgcaagacacggacctgtgtccctcccctctgcctactgatgccagcagcacctacctccagttctagcagccacaaaggtatctacacatgtccacatgtcccctagggtctggctggactaaaggcaaaactaaagcccagaagacagaccagtgcaccggatgcccgtaccgcgtgatggccaggaaggcccggctgtgcagctcctgcttgatggcgctttgcagacggtaggcgtgcccatggcatgaggcatc

SEQ ID NO: 89601 - DNA, 72 bp, Homo sapiens
  chr16:2144842-2144914
  hypo
caactgcgagacgccgagtcccgggctctcaggacgctctcccgtacctgcgccctcgtcagcccatcaccg

SEQ ID NO: 89602 - DNA, 112 bp, Homo sapiens; identical to SEQ ID NO: 28809
  chr16:2146357-2146469
  hypo

SEQ ID NO: 89603 - DNA, 30 bp, Homo sapiens
  chr16:2162904-2162934
  hypo
ccgctccacggttacgttgtagttcacggt

SEQ ID NO: 89604 - DNA, 51 bp, Homo sapiens
  chr16:2193199-2193250
  hypo
gcacttggtgcagtccggggtagtcagtgattgttacggttacgcaggggt

SEQ ID NO: 89605 - DNA, 244 bp, Homo sapiens
  chr16:2212715-2212959
  hypo
tcctcatggggtgctgcgcatgggcctcgaggtggacagtgcaggtgggcccggggcaggagtcctgggcacgtggccttcctccccacagggagctcagcttcaagccggggctcggctgcgctatccgctgccagcaggagacagggctgtcccagctgcattctgccaggctcctggcttccaggctgcccaagtcctgaaagtgggacctgctcgggaggaggggcgcctgctgacagag

SEQ ID NO: 89606 - DNA, 764 bp, Homo sapiens
  chr16:2213240-2214004
  hypo
tgtgggtgacctgcacgggttccaggggcgggctcatctctctcctgtgcttttttccgtgcagtgcggtttgtgtggagttgggctccggtgactcaccctgcaggttctttctctggggtgtggctggtgtctccccgctgcagcctggtgctggctgggtcctgaccgcacctgtcgtggcaggaaacacattcgtcgtgccttggctggtccctgtgtgactgcgtcccgccacgtgggccacaccctgggcctacccaccaaggcccagccttggccccagggacattcagcctggaggtgactggctgtgactcaggacccagaggagtagagggagccaggcaggggtccctccacctcggggaagagctggatgggctcttcgggagctcagaaaggctaagccttgagggacggtgacgcagagccgcctgcctgcccgggcctctgcatacctgggatcggggtgaaggacctttgcctcctagaggcctgcctgagccggggctggtggtggaaggctgctgcggcggccccacggtgccccacagcaggtctgcacacttgcagcagcccgtctgactcacaggggcctgggctccatctctcaagcccctcatttgtgctccacccacaggaggtgcttcccaaggaccgtagatgcctctctagagcatgagctcaggcaagagtgcccgctacaaccgcttctccggggggcccagcaatcttcccaccccagacgtcaccacaggggt

SEQ ID NO: 89607 - DNA, 30 bp, Homo sapiens
  chr16:2222622-2222652
  hypo
tgggccggggtgggcgcaggccctccacag

SEQ ID NO: 89608 - DNA, 30 bp, Homo sapiens
  chr16:2223173-2223203
  hypo
tccccgcaggtgcacgttcatcgggaacca

SEQ ID NO: 89609 - DNA, 30 bp, Homo sapiens; identical to SEQ ID NO: 28813
  chr16:2223517-2223547
  hypo

SEQ ID NO: 89610 - DNA, 30 bp, Homo sapiens
  chr16:2226065-2226095
  hypo
ccaaggagcaggtgcggaccctcacgggcc

SEQ ID NO: 89611 - DNA, 30 bp, Homo sapiens
  chr16:2228335-2228365
  hypo
ggaggacccgcgggcgcagggtctgcctag

SEQ ID NO: 89612 - DNA, 1731 bp, Homo sapiens
  chr16:2229594-2231325
  hypo
tgggctgccagggcctggcagcggcaccttcttggaggtgggtgtgggcgagccctggagcttgggcacaggctgcgtcaggacgggcttgggagagacaggcggcttggccggcttccgggcttcgccctcgggcgggggcaatgggggtaggtgcgccaggtcggtgggcgggggttcggcaggcgggggcggtggaggcagctccggaggcccagcctgctccgaggccggtcggcggcgcacggtgccagtgccattatggtacacggacagtggcggtggtggctcaggcccggcctcccgctccttggccttgggcctgcgcttgaccgtgtcagactcggtcaggatgaacttgacgttctcctgctggttctgcttggcccggatgcgcctcttgagtgtggcgctggcttccaccttggccaagggcgggccttcgacacccgcctcgcccttggagggaccccgaggccgctgccggccagtgccatcctccacaaaggggcctgggtctgccgactccccaggcccccggcgggcagtggccagaagtccggtgactggcccgctgagcgtgcggcgccggttcaccacctccccgccaggcccgatggcctctttgtgtttcactgaggccagcacggtggccacccggcccggctctgggctggcagggcggggagtggggtggccctcaggaggcctgcgggcagcccggcccccacccccaatggaggacagctccagcatggccgcgatgctcttcacactgccggcactacccgtgtccacgctgccggccaggtcactggcccgccggcactgtgcccggacccccagcaggccatcctcaggctcggcgtcaggcaccggctcatccgccaggttggcactagccagggccgagctggagcgcttgggtgggggcggcgggggccccttctttcggggccgcacggcaaaggactggctgcggttgacgttcttgtcggcacctgcgggcgccctcactgagtggctgcggcccacgcgccgctggaccgtggcataggggccggcagccgcaggcaccagcagctcgtcccgctccggctcgctgtcggacgccgcatagcgattcaggctgtgggcccgcttcttgggccgccccggctccgcgtcggcctcagggggcaggcacagtgtgggcacagccgtcggcacgggtgggggcgcaggccccggggcagccggccccacctcgccctccacgggctggggcagcacgtaggcaaagccgcggtgcgtcggtgactgaggcagggagcggggtgacatggggcgctctgtcggcggcagcagctgcggggtgggcttcaccttggccgtagctggggctggaccatgaggtcccccaagggcctggggagagcctggtcgggttttggtgggcgtctgggggggcgtgaagtggctagtgcctggtgggaggacctgccgtggcttgccaggcacggggggcacgctggccctcttgatgctgtggccgtggcggccgggccgggcctccctgggcggggtgccgggggcggggccctcatccaggaggtactcctggcttcgagacatggggctgctgggcccagggggcccatctcccagcagctcctgcgagctgctcatgtgccgtgcccgaccacccaggctggagtcctgccgcgtggtggccctcggggtgggtggcag

SEQ ID NO: 89613 - DNA, 43 bp, Homo sapiens; identical to SEQ ID NO: 28815
  chr16:2232745-2232788
  hypo

SEQ ID NO: 89614 - DNA, 102 bp, Homo sapiens; identical to SEQ ID NO: 28816
  chr16:2233087-2233189
  hypo

SEQ ID NO: 89615 - DNA, 747 bp, Homo sapiens
  chr16:2234441-2235188
  hypo
ccgtgcccatgcacacgctgcaccatctcatacccatccccttccacctgtacacagacacgcgtgcccagctcgcagtcccaccatcacacacacacacgcacacacagaggcacaggttggcccacacgcacagcctgcacaatgacgacacccgtacacacaggcagacacacacacaacacacagactgacagacagaggagagggtctggcctggcaatgcccccgaccccgccgctgccaggccaggcaggccgtgtaagcacccatcagcccatcggccttacagcctctccccggagcccacgctgagaacacccccaagccctgtaccttgccctccgatgctggctccagcttcttgggcggctgctccccatagacctgcccggcgtgggccactggaggctgggaccgggccacacctgaggacgagagtgggtgggggacaagggctgtcgggctgctttcctccatcgggctgcgtggcagcacccttgctcttacctgcagagccttccggaggcttggcggggctgtcccccgggccggactcagagacggacttctgggaaagcaccgttgccaggagctgcaacccagaaaccccggcttgtcacctgctcccagccctggccaccctggccctggccactaccccacctaccttgacgccttcagagcccgcgtgtagggcgtgacccccgctgccccggccgccagccatgccgctaatgctgccgc

SEQ ID NO: 89616 - DNA, 31 bp, Homo sapiens; identical to SEQ ID NO: 28817
  chr16:2241313-2241344
  hypo

SEQ ID NO: 89617 - DNA, 342 bp, Homo sapiens
  chr16:2260755-2261097
  hypo
tgctgcaggagtaacgggaggcactcacccctgtaggcccaggtttggggcgctcagcacagcagcttgctggttccatcctgcagcccctgctcacaatgtgccgattgtctgcgtcccttgtctgcagccttggccaggggaaactcagaacagaacccctcccctcctgaccctgcgcctccccctcagctctggatctgatatccaggtcagagccaggacagcccctcctcccacctgggggatgcctgtcaccaggcccggctccagacacctggcctgtgcagactggagctcagggtctgggaggcgtagggctcggccgcgtggaaatccagt

SEQ ID NO: 89618 - DNA, 495 bp, Homo sapiens
  chr16:2278290-2278785
  hypo
agggctggaggaaaagccagacggagccctggctgcccagcctccgccttcccaggccctgctgacagcaggctcgttgcagatgaggacgatgtgcacagatgcggccgctgccaggcagagttcaccgccttggaggattttgttcagcacaagattcagaaggcctgccagcgggcccctccggaggccctgcctgccacccctgccaccacagcgttgctgggccaggaggtgagccctcacccactcccccatcccctcccgggttcacctgacaggtgggggaggtggccgcgcttcaggatggacctgtgcagccggttccgggggccacgtgggcgggcagagggcaggcacctggctgcggtgtgggagggtccgggtgtgtgagcctgtggtgctctggggcgtcctggagggcctgcggtggcccagccttcttggcagcctctggtcgaagcccgtgctgttgggggccgggatctcttcttt

SEQ ID NO: 89619 - DNA, 30 bp, Homo sapiens
  chr16:2280431-2280461
  hypo
ctaggtgtgcagacgcgagggaaggagctg

SEQ ID NO: 89620 - DNA, 956 bp, Homo sapiens
  chr16:2280800-2281756
  hypo
atgtgggaggtggggcgggctctggccttgacctggcgtttggtttctgggatggtggcgtcacctgggagcatgaactccttaggttctggcggggtctctgggctgggtctctggccagccaggcccctttccacccacctaaactctagcagcctccagccctaggctcagcacccctccctgtgcttcagcagcccctcttggcacccctgccactctggcacccctgggattttcccctttgcgggcatcctgggtactctgtgtgtgcccttggccagtcagcaggcccggtgggcttagtccagggctgctagctctcctgttggcctctagtggagatggcagagggtcctgcctgctggtggccaagggctggggcgtgccaggtcctgtctttgcgggtgcaggggtgcggtcagctgtgtgggcagttggaacccacctccaggccctcctgccgcttcgcggaaaaagttcgcgtctcctctggcctcgcagcagccatgttcccccaggtcctccccatcagaggcctctgtcctttggaagatcactcctggggcatcgagcgtgtaagggctcgggcaggagaggctcttaattgtttctgagtcaccacgcttttgtcgtgtttcaagagaacagcttgtcaaaacaagacgccagccggactgaggtggtttctaagcagtggcttcacagctgtttcccacttgtcatctttatgagcagaaaacctgaactgtgtttacaacctagctttgcacattgtcagatttttcccagcatcctccagaagtgcaaaagcccagcttcctcgcctcaggctgtcccgggtgtctggagagcgttcactctcccaggccaagcctgccttgggacggggctctggccaggcctgcctgccctgctgcagtggcccagcccatctcctccgatggaagagtggc

SEQ ID NO: 89621 - DNA, 34 bp, Homo sapiens; identical to SEQ ID NO: 28822
  chr16:2282208-2282242
  hypo

SEQ ID NO: 89622 - DNA, 824 bp, Homo sapiens; identical to SEQ ID NO: 28823
  chr16:2282326-2283150
  hypo

SEQ ID NO: 89623 - DNA, 50 bp, Homo sapiens
  chr16:2284249-2284299
  hypo
acgtgcgtgagcgccgcttccgctgtggcgactgcgggaagctctacaag

SEQ ID NO: 89624 - DNA, 31 bp, Homo sapiens
  chr16:2286091-2286122
  hypo
tggctggtcctacctgcgctgccttgctttc

SEQ ID NO: 89625 - DNA, 30 bp, Homo sapiens
  chr16:2289963-2289993
  hypo
tgtggcagcccaatcgttagcctttttctt

SEQ ID NO: 89626 - DNA, 31 bp, Homo sapiens
  chr16:2294361-2294392
  hypo
ggcccagaacagccagcgaggccacctggga

SEQ ID NO: 89627 - DNA, 30 bp, Homo sapiens; identical to SEQ ID NO: 28824
  chr16:2294624-2294654
  hypo

SEQ ID NO: 89628 - DNA, 121 bp, Homo sapiens
  chr16:2306143-2306264
  hypo
cacagaaataacatcatgactaatgtttcatgaggaaaagaggcataaaaactaacaggacacaccaatctccacgtgtcgaggcagcctcccaggtcaagagtcatccaagtcaagagct

SEQ ID NO: 89629 - DNA, 25 bp, Homo sapiens
  chr16:2310496-2310521
  hypo
aataaaaaaccggcctcctattttg

SEQ ID NO: 89630 - DNA, 95 bp, Homo sapiens; identical to SEQ ID NO: 28826
  chr16:2314152-2314247
  hypo

SEQ ID NO: 89631 - DNA, 30 bp, Homo sapiens
  chr16:2326065-2326095
  hypo
gagatgctgtgggacggtgcccggcttcgc

SEQ ID NO: 89632 - DNA, 30 bp, Homo sapiens
  chr16:2334949-2334979
  hypo
atgtggccgtcccgcgtgaaggcacgcacg

SEQ ID NO: 89633 - DNA, 186 bp, Homo sapiens
  chr16:2338096-2338282
  hypo
cagctgggaggtcccgggaactgagaagggcacgacggttctgccgtactcgcccaaggtcagcctcagcatggggtcgtcgaagagctccgaggagtagttgatggccaggagggccagggtgacgcaggtcagaggcaccaggacctgtgccgccaccattttccactcgcgccagctgtatgc

SEQ ID NO: 89634 - DNA, 161 bp, Homo sapiens
  chr16:2339390-2339551
  hypo
gctcgcccttcccccgccacccgcccacccacctgggcactcaccccagtgttgagcttgacagcggtgcgctcctcctcgatgagggctccaatgccgtcggaggggtccatggccccacagaggttgctgtccacagcccagtcgctggcgcgcctctc

SEQ ID NO: 89635 - DNA, 30 bp, Homo sapiens
  chr16:2341613-2341643
  hypo
cccctcacgtgtgccgccgtttcccacgca

SEQ ID NO: 89636 - DNA, 30 bp, Homo sapiens
  chr16:2347552-2347582
  hypo
acacagtctcgcgacgctggtagagccaca

SEQ ID NO: 89637 - DNA, 541 bp, Homo sapiens
  chr16:2358231-2358772
  hypo
cacctcctgctgtgccgtggagctgggcttccctcgcccggggccgtgtccagctatccagcccacactcagcgctgtatgcggatgctgctgccttcagtggtcccaactgcctgccaaccgtcccaggtggagccttgctgctggcggctcttgtggttgggtgctctcgaaggttactgattcggaaagaacaggctggacaaggcaaacactcacctttcgcctcaaatttcccaatgagctgggctcccattgccatggcgacattagacaggaggcaggagcagagcttctggctcagagtcatccagttgtaccgaggggccacgaagaagtaggggatgtaggtgaagaagtagaggaagcctccgaaggctgctgccatgttggctgcaggtgttggaagacccggggggcgtgagcgtcagtgccctcaaaaggggcttgggctccccgaggtacaggcaaccccctactcctggggccgagccacccaacctgctcctggcacttgccatctacacgggacacaagctcc

SEQ ID NO: 89638 - DNA, 31 bp, Homo sapiens
  chr16:2380700-2380731
  hypo
tttttttttttttttttgagacggagtctta

SEQ ID NO: 89639 - DNA, 622 bp, Homo sapiens
  chr16:2382127-2382749
  hypo
tgttgtcagctcaagagccatcggctgtgccagttaacaagcgctgtggctcttcaggcggccagtgctcagcagcaaattggagaaatcccaaactcctccatttcttttttttttttccttgaaactttaaaatccttcaaaatctgtttattatacaggtgaattttgatagtcacgatgggcttatcggtaggatttctagtagcgagcacaggcaccagggcttctaaactttttggactcgcagggacggggatcagctaccagcagggtccggtcatacaggatgaggatgtctttgatctccttcttggaagcctcatccatatacttctggtaataggccaccagggctttggagatggactgacgggtagcataaatctgggccacatgaccaccaccctccacacggacacgaatgtccacaccagcaaatcgctccttgctgagaagcaaaactggctccagcagcttgtactgtagcgtgggcggctcaatcttctccaggggccgcccgttcaccttgatgagaccattgccgcgtttgcagtgtgccacagctgtggctgtcttcttgtgtccaaagacccgcaccgattgcctcctccatttcttt

SEQ ID NO: 89640 - DNA, 30 bp, Homo sapiens
  chr16:2475042-2475072
  hypo
tgggcgaagttgagcgcacatttttgacgt

SEQ ID NO: 89641 - DNA, 150 bp, Homo sapiens
  chr16:2475884-2476034
  hypo
ccctgggtttccagggcgtacagaggcagctctcgacctagctagctcagcacagggctgtccccctaactgcagtgcacggagcagagtggggcccactggagaacttaagaggcccgctggagaacccaggtgcgtttccttagaaag

SEQ ID NO: 89642 - DNA, 30 bp, Homo sapiens
  chr16:2482760-2482790
  hypo
acctcagagaaactcgtttctgggctcttt

SEQ ID NO: 89643 - DNA, 384 bp, Homo sapiens
  chr16:2486060-2486444
  hypo
tgactttgcaggttacgaaagtcgcctcttgttttagcaaaccctttaatttcagttggcaaagagtgactgagccagagcctcagcacgggggctgtttgggctccctgccctgtgcgccatgagcacgcagacctgcctgtggatgctggccctctccttggccatcctcttagaactctcgagacagagttcagcgtgccctgtaacacagagccaggcttctaaacgggaagcaggtacaggcaggttagaactggcctggtgcctggatcccttcatccccagaggccaggtgctccttgaaagaaacttgcgcagccttttcttctaccagttaactgcttatctgctcagcaccccaaggaacgagcccatgatctg

SEQ ID NO: 89644 - DNA, 332 bp, Homo sapiens
  chr16:2497818-2498150
  hypo
caccagccatctcacaccccacgctgggctctcattggccactgacatcttgtctttttggcgtctgcagcccccacgctggcaggtgtagtccctgcgcctcttgtcctcttggtcaagtgaatgacgcatgcaacctgcagagtccccaggacagagcagccaagggacttggcctcagtccaaggggaaggtgccttgcggggggccgctggagcagcgtgttccctgatagttggcgctggttgacaacagagaacagggtgaccatcgcctagagacagtcaggattcctgcggccacacagtgccgggcacagactttccaacaac

SEQ ID NO: 89645 - DNA, 30 bp, Homo sapiens
  chr16:2501132-2501162
  hypo
catgaagtccctaccgtggtccaggcgctg

SEQ ID NO: 89646 - DNA, 100 bp, Homo sapiens; identical to SEQ ID NO: 28829
  chr16:2508555-2508655
  hypo

SEQ ID NO: 89647 - DNA, 30 bp, Homo sapiens; identical to SEQ ID NO: 52706
  chr16:2521644-2521674
  hypo

SEQ ID NO: 89648 - DNA, 224 bp, Homo sapiens; identical to SEQ ID NO: 28830
  chr16:2531016-2531240
  hypo

SEQ ID NO: 89649 - DNA, 69 bp, Homo sapiens
  chr16:2531803-2531872
  hypo
cagccacagttaggcacgtttgcacttccaaccatcacaggcaggcgggccaaccggcccatggtgtgg

SEQ ID NO: 89650 - DNA, 30 bp, Homo sapiens
  chr16:2539918-2539948
  hypo
ttggaatataatccacgggggcttgtgggt

SEQ ID NO: 89651 - DNA, 577 bp, Homo sapiens
  chr16:2540426-2541003
  hypo
gttcatggcgagcagcgattcgctcggaccccagaggccacaggaagatggcttcccccacaggaggcaccctcacagggccctgctggcactgtctgccttgggctgcctgaacccggagagagagtgggatagactgttcatggggtgtcacccttatgtcacctgcaccccaccctgtcagtccagagtgaggctcaacccacaggggttgcttgggaactgttgcccgtgaggagttgggtgttattatcggctccgctctgcagacatggcaaccgcaggttagggaagatgcacggcttgtccgcatttcaagcaaacaagtggcagagctggactttgtggccaggcctgtctaactgcaaagctgccccgtttccacagtagcccctgcctcccctctcactccctccccggccaccgcctccggctctgcacctttgtcaggggttgggggactgcagggaacagaggaggccttgtttgctgcgtaggagcaggtgcggcttatgatgtacagcagcagccagccagcagatagacaacagggaaagccactcggccgtgaaagctc

SEQ ID NO: 89652 - DNA, 177 bp, Homo sapiens
  chr16:2544809-2544986
  hypo
ggtatactccaaagtttgtaacggcttctcaaaagtcacttatcttaagtggaagcccttctaatacttacacaaagattaaggcaaataatgtggctgcgcaacgtgactctcactcgtaattccagcatggtgggaagatcacttgaggcctgcggttcaaggccaacctgggtg

SEQ ID NO: 89653 - DNA, 932 bp, Homo sapiens
  chr16:2546127-2547059
  hypo
tcctcccgagcacagcggcgctatggactctccaggatacaactgcttcgtggacaaagacaagatggacgctgccatccaggacctggggcccaaggagctgagctgcactgaactgcaggaactgaagcagctggcgcgccagggctactgggcccaaagccacgccctgcggggaaaggtgtaccagcgcctgatccgggacattccctgccgcacggtcacgcctgacgccagcgtgtacagcgacatcgtgggcaagatcgtgggcaagcacagcagcagctgcctgccgctgcccgagttcgtggacaacacgcaggtgcccagctactgcctgaatgcacgcggcgagggggccgtgcgcaagatcctcctgtgcctggccaaccagttccccgacatctccttctgccccgccctgccggccgtggtggccctgctgctgcactacagcatcgacgaggccgagtgcttcgagaaggcctgccgcatcctggcctgcaatgaccccggcaggaggctgatcgaccagagcttcctggcctttgagtcgtcctgcatgacgtttggggacctggtgaacaagtactgccaggcggcccacaagctgatggtggccgtgtcggaggatgtcctgcaggtctatgcggactggcagcgctggctgtttggggagctgcccctctgctacttcgcccgggtctttgacgtcttcctggtggagggctacaaggtgctgtaccgcgtggcgctggccatcctcaagttcttccacaaggtgagggccgggcagccgctggagtcggacagcgtgaagcaggacatccgcacgttcgtcagagacatcgcgaagacggtgtcccctgagaagctgctggagaaagcgttcgccatccgcctcttctcccgcaaggagatccagctcctgc

SEQ ID NO: 89654 - DNA, 55 bp, Homo sapiens; identical to SEQ ID NO: 28833
  chr16:2579463-2579518
  hypo

SEQ ID NO: 89655 - DNA, 30 bp, Homo sapiens
  chr16:2580058-2580088
  hypo
gttggggtgtgcagcgtggagcccacagcc

SEQ ID NO: 89656 - DNA, 30 bp, Homo sapiens
  chr16:2580818-2580848
  hypo
cccaggaaagcaggcgacggatgtggatcc

SEQ ID NO: 89657 - DNA, 30 bp, Homo sapiens; identical to SEQ ID NO: 28834
  chr16:2635430-2635460
  hypo

SEQ ID NO: 89658 - DNA, 30 bp, Homo sapiens
  chr16:2635847-2635877
  hypo
tgcgtctggaggcacggaggacgtggaagg

SEQ ID NO: 89659 - DNA, 42 bp, Homo sapiens; identical to SEQ ID NO: 28835
  chr16:2642907-2642949
  hypo

SEQ ID NO: 89660 - DNA, 30 bp, Homo sapiens; identical to SEQ ID NO: 28836
  chr16:2645831-2645861
  hypo

SEQ ID NO: 89661 - DNA, 250 bp, Homo sapiens; identical to SEQ ID NO: 28837
  chr16:2648041-2648291
  hypo

SEQ ID NO: 89662 - DNA, 30 bp, Homo sapiens; identical to SEQ ID NO: 28838
  chr16:2661607-2661637
  hypo

SEQ ID NO: 89663 - DNA, 30 bp, Homo sapiens
  chr16:2715058-2715088
  hypo
gcataagtaggaatgcgtagggagggacga

SEQ ID NO: 89664 - DNA, 30 bp, Homo sapiens
  chr16:2716625-2716655
  hypo
gtaggaacagcaatacgtggctctccaggc

SEQ ID NO: 89665 - DNA, 197 bp, Homo sapiens
  chr16:2716890-2717087
  hypo
gccggcccctcatcccgtttccctgatttttaaaaggccgtacaggattgccatcaatatcaaatctggaatggcattgagatgcccagtgaagacccttttggcttcgtgggcatacagcagaaggtggggtgtcttgttgctgaaaagtttctttttgttgttggtggtgatgtaaaggacggccacctgcacgc

SEQ ID NO: 89666 - DNA, 102 bp, Homo sapiens
  chr16:2725741-2725843
  hypo
tccagcctgggcaataagagcaagactccgtcccccaccccccgaaaaaaaatgcagctagaactgagtcatctaaaggctagagcacggccgaaggatgca

SEQ ID NO: 89667 - DNA, 30 bp, Homo sapiens
  chr16:2741055-2741085
  hypo
catgtgggctcacccgagctgggagcacca

SEQ ID NO: 89668 - DNA, 31 bp, Homo sapiens; identical to SEQ ID NO: 28839
  chr16:2760239-2760270
  hypo

SEQ ID NO: 89669 - DNA, 498 bp, Homo sapiens
  chr16:2770027-2770525
  hypo
gagtagggggctgagccggagccccaggcagtgcagcggagcctggtgggggactgcaccaccaggaccctgcaccttcacgactcaccaaaacacagcagcagcaggagcggcaccgccgccggccgcctcatgtcctcaggcctggctggggcgcagggccgtggtcggcggtggcagaagcgttggagcacgagcgaggtgcaggctccatgaagtggagttttatgctggagatgagcacaggcccggctatgcggcccaacccgtcggcccggcctgcccagctcctctcctcaggaaggaagcgcccagagccgactcctccgtgacctagccctgaaccccgagaccccagggcagacccctcaccccagcgcagcacggggtgccgttggcctcggttcctggaccctgagctgacccagaccccccagcagaccccgagctgaccgcggtgcacgcgaagtccgtccagcttcattcattattattatt

SEQ ID NO: 89670 - DNA, 344 bp, Homo sapiens
  chr16:2806255-2806599
  hypo
agcagggacttgggtgtggggcggtaagtggttagtttggggccaggggcctgacccgtgtctccccgctccccctcaggagcggtggtgccccccccgggcacggggccatgtacaacgggatcgggctgccgacgccccggggcagcggcaccaacggctacgtccagcgcaacctgtccctggtgcggggccgccggggtgagcggcctgactacaagggagaggaggaactgcggcgcctggaggctgccctggtgaagcggcctaatcctgacatcctggaccacgagcgcaagcggcgcgtcgagctgcgatgcctcgagctggaggagatgatggaa

SEQ ID NO: 89671 - DNA, 30 bp, Homo sapiens; identical to SEQ ID NO: 28841
  chr16:2807461-2807491
  hypo

SEQ ID NO: 89672 - DNA, 30 bp, Homo sapiens
  chr16:2810160-2810190
  hypo
tgatttgagttgtgcgactaaaggcttttt

SEQ ID NO: 89673 - DNA, 83 bp, Homo sapiens
  chr16:2819592-2819675
  hypo
ctggccaccatcatcttctcccgactctgtccacagcctcctccctgtctccccgtctccacgccattctcttccacatgtag

SEQ ID NO: 89674 - DNA, 26 bp, Homo sapiens
  chr16:2828851-2828877
  hypo
acatcgcctggcgacagagtgagact

SEQ ID NO: 89675 - DNA, 30 bp, Homo sapiens; identical to SEQ ID NO: 28842
  chr16:2849075-2849105
  hypo

SEQ ID NO: 89676 - DNA, 264 bp, Homo sapiens
  chr16:2849391-2849655
  hypo
cattgtgaaccctgacgcacttggggttttacgcaatgacattgccctgctgagactggcctcttctgtcacctacaatgcgtacatccagcccatttgcatcgagtcttccaccttcaacttcgtgcaccggccggactgctgggtgaccggctgggggttaatcagccccagtggcagtgaggctggggatagaccgggtggggtgatgggggtgcggggtgagcattaccctctacccctgttcccgctacacaagcacag

SEQ ID NO: 89677 - DNA, 31 bp, Homo sapiens
  chr16:2861515-2861546
  hypo
cggttcaggggctcagcgtaactcagggttc

SEQ ID NO: 89678 - DNA, 30 bp, Homo sapiens
  chr16:2944428-2944458
  hypo
gccagagggacgtgcgccgtagccaatcag

SEQ ID NO: 89679 - DNA, 31 bp, Homo sapiens
  chr16:2946522-2946553
  hypo
ggcacagaagtcatcccggcagcccccagga

SEQ ID NO: 89680 - DNA, 31 bp, Homo sapiens; identical to SEQ ID NO: 10486
  chr16:2969679-2969710
  hypo

SEQ ID NO: 89681 - DNA, 213 bp, Homo sapiens
  chr16:2974631-2974844
  hypo
cctacgctcctgccacgctgtgggtcacgcaacccccccaggctagtcaaggttcaggcaggtggagacaaagcccggttgctgaggggcctgtggactttaacgggcggagtggcggtgggtcagcatctaccatccaagagcctgaacgggcaagagtgggaacgggtcctcagccttccacaagccggcggtcagggccttttcttgtat

SEQ ID NO: 89682 - DNA, 183 bp, Homo sapiens
  chr16:2975095-2975278
  hypo
ggggtgaacagtgtgcgagtcactgtgccagcctgcatagtctgggaggcctctgtcaggagcaacctggcgtccccatgcctcgccctggctgggagggaggccgggaatcacggcagttctcagggaggtgcctccccaggaacaaaggggactttctccagagggcgggggcctcgcggg

SEQ ID NO: 89683 - DNA, 31 bp, Homo sapiens
  chr16:2979897-2979928
  hypo
ctggccccgccaccctcgccagcaccttgca

SEQ ID NO: 89684 - DNA, 30 bp, Homo sapiens; identical to SEQ ID NO: 28846
  chr16:2983528-2983558
  hypo

SEQ ID NO: 89685 - DNA, 30 bp, Homo sapiens
  chr16:2984392-2984422
  hypo
ttctcctctcggcccgctgttccatagaca

SEQ ID NO: 89686 - DNA, 30 bp, Homo sapiens
  chr16:2986752-2986782
  hypo
tccccagagggccccgggtcattcctctga

SEQ ID NO: 89687 - DNA, 380 bp, Homo sapiens; identical to SEQ ID NO: 28847
  chr16:3021541-3021921
  hypo

SEQ ID NO: 89688 - DNA, 30 bp, Homo sapiens
  chr16:3025740-3025770
  hypo
ggtccttggggccccggaatggtgacatgg

SEQ ID NO: 89689 - DNA, 66 bp, Homo sapiens
  chr16:3051090-3051156
  hypo
ggaacgagggccatcacggactcagttctccatactctgtccctctccccccggtcctctgagaaa

SEQ ID NO: 89690 - DNA, 30 bp, Homo sapiens
  chr16:3060956-3060986
  hypo
cctccagccctgcccgcactggccagtggg

SEQ ID NO: 89691 - DNA, 49 bp, Homo sapiens; identical to SEQ ID NO: 28848
  chr16:3062886-3062935
  hypo

SEQ ID NO: 89692 - DNA, 31 bp, Homo sapiens; identical to SEQ ID NO: 10490
  chr16:3071261-3071292
  hypo

SEQ ID NO: 89693 - DNA, 1432 bp, Homo sapiens; identical to SEQ ID NO: 28850
  chr16:3139012-3140444
  hypo

SEQ ID NO: 89694 - DNA, 31 bp, Homo sapiens; identical to SEQ ID NO: 10494
  chr16:3156726-3156757
  hypo

SEQ ID NO: 89695 - DNA, 23 bp, Homo sapiens
  chr16:3158300-3158323
  hypo
accgcgcccggcctatagtcagt

SEQ ID NO: 89696 - DNA, 62 bp, Homo sapiens
  chr16:3165155-3165217
  hypo
accggcactgtggaggcggcttggtgaatattcctcctcttgccgcccgtccttgctggggt

SEQ ID NO: 89697 - DNA, 134 bp, Homo sapiens
  chr16:3167168-3167302
  hypo
gctgccccaggaagtccgcttttcctgggttcatccgcagggctcactcctatagctccatcttcctttccaagccccaacttcagaggtgtctgagcagcaagcttggcttcggggcccgagggctgcttgcc

SEQ ID NO: 89698 - DNA, 68 bp, Homo sapiens
  chr16:3169008-3169076
  hypo
gtgcacaggtgagggacgggcgcgcgcctttgtctgcgggagtggggcgcagacgcaggccttctggc

SEQ ID NO: 89699 - DNA, 232 bp, Homo sapiens
  chr16:3169369-3169601
  hypo
caggaagcagcctgcggccggagctcagggccggccaaagactccgggcagccggctgagccagatcgcaccccggatgcagctccgccagaccccagtcccacggagccccaggagtaccgcgtcccggagaagcccaacgaggaggagaagggcgccccggagagtggcgaggagggcctggcccctgacagtgaggtgggcaggaagagctaccggtgcgagcagtgcg

SEQ ID NO: 89700 - DNA, 30 bp, Homo sapiens
  chr16:3170089-3170119
  hypo
cactgcctcgactgcggcaagagcttcagc

SEQ ID NO: 89701 - DNA, 129 bp, Homo sapiens
  chr16:3170503-3170632
  hypo
ggccttggacttgaagcgcccgcctacacagctttgtctcctggtgccctggcgctgattccccgagcgtgggggagctcctgggctaatcccctgtcctcattgaggcatccccgcatcaccactctt

SEQ ID NO: 89702 - DNA, 31 bp, Homo sapiens; identical to SEQ ID NO: 28853
  chr16:3170903-3170934
  hypo

SEQ ID NO: 89703 - DNA, 22 bp, Homo sapiens
  chr16:3171178-3171200
  hypo
cagagtcttgctctgtcgccca

SEQ ID NO: 89704 - DNA, 30 bp, Homo sapiens
  chr16:3177219-3177249
  hypo
accttctgttttttcgttttgttttgtttt

SEQ ID NO: 89705 - DNA, 30 bp, Homo sapiens
  chr16:3183110-3183140
  hypo
ggaccttatggggacgctacatcaagctgt

SEQ ID NO: 89706 - DNA, 37 bp, Homo sapiens; identical to SEQ ID NO: 28854
  chr16:3189116-3189153
  hypo

SEQ ID NO: 89707 - DNA, 30 bp, Homo sapiens
  chr16:3193395-3193425
  hypo
tggctgaggggaggcgggggccggtggaca

SEQ ID NO: 89708 - DNA, 30 bp, Homo sapiens
  chr16:3196500-3196530
  hypo
gaaaagggcttctggccgggtgcagtggct

SEQ ID NO: 89709 - DNA, 323 bp, Homo sapiens; identical to SEQ ID NO: 52736
  chr16:3200662-3200985
  hypo

SEQ ID NO: 89710 - DNA, 561 bp, Homo sapiens; identical to SEQ ID NO: 52738
  chr16:3208812-3209373
  hypo

SEQ ID NO: 89711 - DNA, 171 bp, Homo sapiens
  chr16:3211578-3211749
  hypo
ggcacttcaggtccccgggaaagcgggcacagaggtggccacccctgttcccctcctggcaccatgatggtcaggaccgccgggagcccatgcccacctccctcagctcccgtggtgcgcccgggggaaatgtggttggaaatcgcggcggccgggcatggtggctcacgc

SEQ ID NO: 89712 - DNA, 121 bp, Homo sapiens
  chr16:3211808-3211929
  hypo
gcccagcctggacaacgtagtgaaaccccacctctgcaaaacaattttaaaagttagcagggcgtggtggtgcgcgcctgtgatccaagctactcctgtgtctgaggcaggaggatcgctt

SEQ ID NO: 89713 - DNA, 331 bp, Homo sapiens; identical to SEQ ID NO: 52745
  chr16:3232685-3233016
  hypo

SEQ ID NO: 89714 - DNA, 132 bp, Homo sapiens; identical to SEQ ID NO: 10504
  chr16:3233198-3233330
  hypo

SEQ ID NO: 89715 - DNA, 669 bp, Homo sapiens; identical to SEQ ID NO: 10505
  chr16:3233434-3234103
  hypo

SEQ ID NO: 89716 - DNA, 184 bp, Homo sapiens
  chr16:3286264-3286448
  hypo
tatccacactcggttcgttccccagtgacgcactgatcagggttcggacaacttgtgggcagggatggccttatttctcgatgtaataccagcctccagaaagttgacaaaagtaaaaatataaatgaatgcctcttcttaaagttaattatacctgactaatggctgacgatggcttaaaata

SEQ ID NO: 89717 - DNA, 29 bp, Homo sapiens
  chr16:3315201-3315230
  hypo
tttctttcttcttttttgagacggagtct

SEQ ID NO: 89718 - DNA, 88 bp, Homo sapiens; identical to SEQ ID NO: 28864
  chr16:3315529-3315617
  hypo

SEQ ID NO: 89719 - DNA, 28 bp, Homo sapiens
  chr16:3331212-3331240
  hypo
agccagcgcacctagcctaaattcatct

SEQ ID NO: 89720 - DNA, 30 bp, Homo sapiens
  chr16:3439765-3439795
  hypo
ttttgcttctccaccgcctcacccttcacc

SEQ ID NO: 89721 - DNA, 43 bp, Homo sapiens
  chr16:3492712-3492755
  hypo
actgtggtatgcgcgcctctcagatactcgagaggctgaggcg

SEQ ID NO: 89722 - DNA, 30 bp, Homo sapiens; identical to SEQ ID NO: 28867
  chr16:3516084-3516114
  hypo

SEQ ID NO: 89723 - DNA, 89 bp, Homo sapiens
  chr16:3552080-3552169
  hypo
gctggtaaggagaagggagctcgaattcctttgctaagagggtggggaagtggaagaacgaggctaagagtgttggttacggctgggcg

SEQ ID NO: 89724 - DNA, 38 bp, Homo sapiens; identical to SEQ ID NO: 28869
  chr16:3552774-3552812
  hypo

SEQ ID NO: 89725 - DNA, 30 bp, Homo sapiens
  chr16:3591713-3591743
  hypo
tgctgagcaagcagcgttcccagctcccag

SEQ ID NO: 89726 - DNA, 147 bp, Homo sapiens
  chr16:3599067-3599214
  hypo
ccgtcagcccaggctcggtgtgggtgtggtcatggcatgaacagcctgtggagtcacaggcccccaccacgtactccaggttcttcagggtgctgttggcgcagagggcatgagcgatggcctgggctccctcgggactgatggagt

SEQ ID NO: 89727 - DNA, 30 bp, Homo sapiens; identical to SEQ ID NO: 28870
  chr16:3610567-3610597
  hypo

SEQ ID NO: 89728 - DNA, 31 bp, Homo sapiens
  chr16:3613740-3613771
  hypo
tgtccccaccatcttgcggccaccatgggcc

SEQ ID NO: 89729 - DNA, 30 bp, Homo sapiens
  chr16:3614585-3614615
  hypo
ggtgcccgcccccgcgggtggcctccacct

SEQ ID NO: 89730 - DNA, 119 bp, Homo sapiens
  chr16:3635038-3635157
  hypo
ttcccaatgatagcatcggtgacacgcactgaggaccacaccttgtataacacgggtgccgggtgaacagagctcctggggccactgaacccaacagcccggcacgtgactaaaactta

SEQ ID NO: 89731 - DNA, 192 bp, Homo sapiens
  chr16:3696693-3696885
  hypo
tctaattacacatttgcgagatgttctgagagctgtggggacggctgggacatgtacctggaagcagggcagccaaagggagaggcagtgatgacgggtggtatggaggctgcagaatctggaggacgtgcaggctcagggtgcatggtgcgggcggggctgagggggagcggggcctaggatgatctcagg

SEQ ID NO: 89732 - DNA, 30 bp, Homo sapiens
  chr16:3701712-3701742
  hypo
gcccagccccaggacgaggcccaggcagca

SEQ ID NO: 89733 - DNA, 122 bp, Homo sapiens
  chr16:3704779-3704901
  hypo
gttttctgcactctcaggtgacggctcacatttgccccagggaaggtcacagctgcctgaacttttaaaactcccagacacgcactgcctgtgcaggatccggagcccagcagcactgccag

SEQ ID NO: 89734 - DNA, 70 bp, Homo sapiens
  chr16:3706728-3706798
  hypo
tgtcaggttcttctcccggttcacaggtgggtgctgcctgggccagggtggggctcggcttggcgcttat

SEQ ID NO: 89735 - DNA, 166 bp, Homo sapiens
  chr16:3707024-3707190
  hypo
cctgcatgcggccccgggggacgcagtagccgagatcgacgctctctatgacgtctacctggatgtccaagagaaatggggcttggaggtgaggccctcccaggggcagtgggcaccagcggcctccgcatgtcccagggccacaggcagcgtttcctggtaggac

SEQ ID NO: 89736 - DNA, 31 bp, Homo sapiens
  chr16:3721594-3721625
  hypo
gcaggccgggcttccccgaccacctctgctc

SEQ ID NO: 89737 - DNA, 30 bp, Homo sapiens
  chr16:3722616-3722646
  hypo
gaatggaatcagcacggtccctcacagatg

SEQ ID NO: 89738 - DNA, 30 bp, Homo sapiens
  chr16:3724611-3724641
  hypo
gcggtggtctcaggcgtagacccctctcca

SEQ ID NO: 89739 - DNA, 384 bp, Homo sapiens
  chr16:3741881-3742265
  hypo
ccagtgggctgagaaagttgccggcagagcccagcgagggaggaaagcagccaatgtgtccccagccgcacgcagttcaccgacgcaggcccagaaaccagacactttcactccaacacaggactggaccgacccaacaccaacacccactgaccccagggaccacataccaggaccctgccttggtcagtagatttgcaatacgtgatggtgtcaaggatatgtggccagccagccacgccgtgtcaaagtctaagcctaaatgaaccgcatctaactgggagcctctcctgttcttcacaaatttgtaacaagtagaaaggaaagacaacagaatatccaggaatcaaggttttaaaaatcagcatatcagccaggggtgcg

SEQ ID NO: 89740 - DNA, 228 bp, Homo sapiens
  chr16:3772841-3773069
  hypo
acaatttagatcaacggcaaagcactgtcatctactcatcaaagctcctcagaatctactttgctagtctgggcattacactcacttaaatttcttcagtatcttataagggacctatgttttcccacctctgcctatttattatgaagtgtatacaagtaattcatgtggaattaacacataaaatccatacgtccatgaggctgcgatgtcttcatggtctgagat

SEQ ID NO: 89741 - DNA, 355 bp, Homo sapiens; identical to SEQ ID NO: 28873
  chr16:3776073-3776428
  hypo

SEQ ID NO: 89742 - DNA, 147 bp, Homo sapiens
  chr16:3777134-3777281
  hypo
atagatgtgtgtgggtgtgtacgtgtgtgcacgccggagtcaattcctatcatccagggtaatactgggagacgcccacagagttcactatagaaaaaaatcttcccgaaacatcacaaagttatcgggatacattataagcttgca

SEQ ID NO: 89743 - DNA, 30 bp, Homo sapiens; identical to SEQ ID NO: 28874
  chr16:3777731-3777761
  hypo

SEQ ID NO: 89744 - DNA, 132 bp, Homo sapiens
  chr16:3781041-3781173
  hypo
gccttctgccttgtgacgctgtcctagttctggaggagtcagtgcagccaccatcaggtacagacaccaacccgggcacccatgcaaagggacaggatgcttcgtcagaccccaggccggctgtgggggtgg

SEQ ID NO: 89745 - DNA, 1165 bp, Homo sapiens; identical to SEQ ID NO: 52760
  chr16:3781397-3782562
  hypo

SEQ ID NO: 89746 - DNA, 28 bp, Homo sapiens
  chr16:3783073-3783101
  hypo
aacaatccagccgggcggggtggctcac

SEQ ID NO: 89747 - DNA, 925 bp, Homo sapiens; identical to SEQ ID NO: 28876
  chr16:3784365-3785290
  hypo

SEQ ID NO: 89748 - DNA, 183 bp, Homo sapiens
  chr16:3785795-3785978
  hypo
tcctctcttccctctccgagtctaagtggacccccagctccccagagcatccactgtgcagagagtgcagagcccacactgctgcccaccaacgccctgtgctgcaggtggtgtcgacgtgcatgtgtgaacggagacaccaccacaggaaggacctaacagtcgacacgcgcctcccagcct

SEQ ID NO: 89749 - DNA, 30 bp, Homo sapiens
  chr16:3790973-3791003
  hypo
acgtgaacgtggaacgttctagggctaacc

SEQ ID NO: 89750 - DNA, 153 bp, Homo sapiens; identical to SEQ ID NO: 28878
  chr16:3802011-3802164
  hypo

SEQ ID NO: 89751 - DNA, 208 bp, Homo sapiens
  chr16:3811571-3811779
  hypo
ctcttgaccaacctccgcagacaccgcctcctctccagggcacgtggctgcttcagacctctgacagcagcctgaggtccgggcaaccaggtaaaaaccccgacgcagcactccccacgcacacggtccccagcacttgaaggtgcaaaggcctggtccagggtgcagacgtgcccttcacagtgggaagcgtcggaaacacacagcc

SEQ ID NO: 89752 - DNA, 210 bp, Homo sapiens; identical to SEQ ID NO: 28880
  chr16:3812493-3812703
  hypo

SEQ ID NO: 89753 - DNA, 30 bp, Homo sapiens; identical to SEQ ID NO: 28881
  chr16:3868173-3868203
  hypo

SEQ ID NO: 89754 - DNA, 31 bp, Homo sapiens; identical to SEQ ID NO: 28882
  chr16:3892676-3892707
  hypo

SEQ ID NO: 89755 - DNA, 149 bp, Homo sapiens
  chr16:3900217-3900366
  hypo
cgtggtcccattttacgcattactcggagggaaagcccgcggttaggtaggaagtattgaaagtgcttcagttcacttaccttggccatgcctcctgcctgtgcggtgttcagtcccgcgtgaccagtcatttgcggggaaacctgcgt

SEQ ID NO: 89756 - DNA, 220 bp, Homo sapiens; identical to SEQ ID NO: 52761
  chr16:3931081-3931301
  hypo

SEQ ID NO: 89757 - DNA, 29 bp, Homo sapiens
  chr16:3951109-3951138
  hypo
aaaaaagttaaaaaaatttaccggccggg

SEQ ID NO: 89758 - DNA, 30 bp, Homo sapiens; identical to SEQ ID NO: 52762
  chr16:3989146-3989176
  hypo

SEQ ID NO: 89759 - DNA, 31 bp, Homo sapiens; identical to SEQ ID NO: 28885
  chr16:3997064-3997095
  hypo

SEQ ID NO: 89760 - DNA, 149 bp, Homo sapiens; identical to SEQ ID NO: 28886
  chr16:3998688-3998837
  hypo

SEQ ID NO: 89761 - DNA, 76 bp, Homo sapiens
  chr16:4016325-4016401
  hypo
ggcccatggttgaagccgacgcggagcttgaagttgaaccacagcatgttgttgttgaagtcgtccaccacgcgca

SEQ ID NO: 89762 - DNA, 30 bp, Homo sapiens
  chr16:4016705-4016735
  hypo
cagctgctcagccacgtggtaggggatgat

SEQ ID NO: 89763 - DNA, 177 bp, Homo sapiens
  chr16:4021224-4021401
  hypo
ctggaggaattaagcccatcccgtgtgactctaccgggagaggactcttggaagctggtgccggcttcctccaaacgtcaactcacacacccttccctttgctgattctgccttatgtcttttcgctgtaatcacagcggtgagagagcagattgcggagtcctgagtccacctggg

SEQ ID NO: 89764 - DNA, 30 bp, Homo sapiens
  chr16:4029239-4029269
  hypo
ggtgcaggccatgacgtcctccaggaagaa

SEQ ID NO: 89765 - DNA, 30 bp, Homo sapiens
  chr16:4031216-4031246
  hypo
gcaggcagttccagcgcacctcaccccagc

SEQ ID NO: 89766 - DNA, 31 bp, Homo sapiens
  chr16:4043268-4043299
  hypo
ggaggacccgcgggtgcggagtgctgttacc

SEQ ID NO: 89767 - DNA, 31 bp, Homo sapiens
  chr16:4043834-4043865
  hypo
acagcatggtgaacctcgaaaacattatgct

SEQ ID NO: 89768 - DNA, 31 bp, Homo sapiens
  chr16:4047660-4047691
  hypo
tcccagcaggtttgtccgggaagtgggagta

SEQ ID NO: 89769 - DNA, 1 bp, Homo sapiens
  chr16:4092828-4092829
  hypo
c

SEQ ID NO: 89770 - DNA, 122 bp, Homo sapiens
  chr16:4092845-4092967
  hypo
gttttggtctgctaacttatcaactgtatgatttgggcaagttcctaaacttctctgtgcttcgtttctcccctttgtaaaacaggactaaaaatattaaaactcggccgggcgcagtggct

SEQ ID NO: 89771 - DNA, 30 bp, Homo sapiens; identical to SEQ ID NO: 52763
  chr16:4106772-4106802
  hypo

SEQ ID NO: 89772 - DNA, 30 bp, Homo sapiens
  chr16:4136352-4136382
  hypo
ccgagccctgagatcggagagcctatccca

SEQ ID NO: 89773 - DNA, 29 bp, Homo sapiens
  chr16:4143596-4143625
  hypo
aaaatacaaaaattagtcagtcgtgttgg

SEQ ID NO: 89774 - DNA, 28 bp, Homo sapiens
  chr16:4143744-4143772
  hypo
gccagacgctgtctcaaaataattaatt

SEQ ID NO: 89775 - DNA, 192 bp, Homo sapiens
  chr16:4160069-4160261
  hypo
cagcaggagccccctctaaagcgctccccactcccgaacatactccacaacatttttaactgtgagctcacggaggttgggaactattaacgcaggtcagacgcgccccaaagtggggccgagcccaagagggttcttggctttgcccaggaaataattcaagggtgagccggtggcaggaaagaaaacacc

SEQ ID NO: 89776 - DNA, 409 bp, Homo sapiens
  chr16:4164530-4164939
  hypo
tcacctgggacatgacgaacaggtggaccccgatggcgtggatgcagccgtggagcagccccctgctcagcagctcccagtgcagggccccggctccgggcgaggggaagcaggcttcatcccggaaatggtagccaaaggtctcgaaaaggacagagtaggccacccccagacacaaactcaggtacaaaggtaagtgcatgacggtatagagcaaaaagagcacttcgatgcacatggagaagctccccacttgagataagcaagtatctgtgggccgggctgtggccgtaaggttggagctgtcgccgcgtcctgagacaggcgtcaagacctggaactgcgcagccagggtcagggcgaacaccagcagggtgagagccagcgaggtccacgcgtaatgccgggc

SEQ ID NO: 89777 - DNA, 1109 bp, Homo sapiens; identical to SEQ ID NO: 52764
  chr16:4165871-4166980
  hypo

SEQ ID NO: 89778 - DNA, 80 bp, Homo sapiens
  chr16:4183951-4184031
  hypo
ggctccttaagtctcccgagaaggtgcaaattgcgttaattgccactgctgaggccaggccatggcgccctgctgggggc

SEQ ID NO: 89779 - DNA, 4 bp, Homo sapiens
  chr16:4203634-4203638
  hypo
actg

SEQ ID NO: 89780 - DNA, 200 bp, Homo sapiens
  chr16:4203943-4204143
  hypo
aactgatcaatgagccgccagatgccgagcaccacaccggcaagggctgcggatcgtgaacactggagattcaaacagcagagagaccacctcacaccattctgtcaacccgtgccaagtgcccaggcctgtgccaacgcttggcacacaatgattcaacagaggcagcctcatgcttcacggcccgatgctcgcttgtt

SEQ ID NO: 89781 - DNA, 31 bp, Homo sapiens
  chr16:4228477-4228508
  hypo
ccacacactcgagccccggggatacaagtaa

SEQ ID NO: 89782 - DNA, 30 bp, Homo sapiens; identical to SEQ ID NO: 10515
  chr16:4233231-4233261
  hypo

SEQ ID NO: 89783 - DNA, 81 bp, Homo sapiens; identical to SEQ ID NO: 52766
  chr16:4233704-4233785
  hypo

SEQ ID NO: 89784 - DNA, 92 bp, Homo sapiens; identical to SEQ ID NO: 52767
  chr16:4234086-4234178
  hypo

SEQ ID NO: 89785 - DNA, 30 bp, Homo sapiens
  chr16:4242891-4242921
  hypo
tgttgggtcaaagacgacaaagatgaggtc

SEQ ID NO: 89786 - DNA, 483 bp, Homo sapiens
  chr16:4268165-4268648
  hypo
tggcctcccctttccccaccacgtcccatcccttctgtccagtcactgaagtgaggtgaccccgcacttcaccccaacgcaaacgcgcactcaggaagtttaaacagacccattctaagggccacgtctttctgagaatgggagggaagccctttccgaaggcagaggaccggtaagggcccttcaaagctctctgaaacagcaacacggtcggagggaggtcattagcagtgctgtgtggcttcctcatcctcatggtaagtgagcactgggagtaagacaatcagcccttcagaaaccactcgggcctggagaacgcagccagggctgagccacagagatggggcaggagcagttctggcctccaatatacagcggcgctttgctcctctcgcacaagtgaaatcacagctgatgtctccatggctttgaagagcctcacacacaggcccgctggaccacgtgggccctgctcctccatca

SEQ ID NO: 89787 - DNA, 30 bp, Homo sapiens; identical to SEQ ID NO: 28893
  chr16:4308055-4308085
  hypo

SEQ ID NO: 89788 - DNA, 53 bp, Homo sapiens
  chr16:4312581-4312634
  hypo
ggactggaatcccgcgttgatgctctgcatgcgtctccgctcgttgctgttgg

SEQ ID NO: 89789 - DNA, 154 bp, Homo sapiens
  chr16:4313274-4313428
  hypo
agagcttagaaactatgcagacgacgggtgctggccccagcgtctgactagcaggcccggtggggcccagaaacgtgcgtggtgtgattctgatgcacgcgggatgcagacgacattcagggacgctgtccccgctcctggaacacttctgagt

SEQ ID NO: 89790 - DNA, 30 bp, Homo sapiens; identical to SEQ ID NO: 28895
  chr16:4355449-4355479
  hypo

SEQ ID NO: 89791 - DNA, 31 bp, Homo sapiens; identical to SEQ ID NO: 10521
  chr16:4366576-4366607
  hypo

SEQ ID NO: 89792 - DNA, 463 bp, Homo sapiens
  chr16:4372511-4372974
  hypo
agcaggcatgctgaccgggcgccgacccgcagggctcccacctccccaaggctcttcaccccatatccatgaggctgacccggatctgtgcccaaccccctgcaggagcagccccccccctacactgtttctcccaccccaccttggtcggggcaccctcaaggtccggttcgatctagcagggcctggcgttggaatgcatgaatgcgtggttggagaaccgaggcaggagggcaggccaaggtccaccgcccgccttacccactcctgctctcggagttggcgggtgccgttcccagtggacctggtacctggccccaggcaggggaggcgtgggccacgggcctgccccgaccccccaggacttaggagctccttgtgggatctgcctgcagccaggcgtggcttgggaggcgcggtgtttccttcgctctggggacccggcctcatccctgctctcccc

SEQ ID NO: 89793 - DNA, 30 bp, Homo sapiens
  chr16:4382012-4382042
  hypo
atgggaagcagatgcggaatctctgaggag

SEQ ID NO: 89794 - DNA, 30 bp, Homo sapiens
  chr16:4385111-4385141
  hypo
taccatgtcaagcccgagaaggatgcgggg

SEQ ID NO: 89795 - DNA, 57 bp, Homo sapiens; identical to SEQ ID NO: 28897
  chr16:4385340-4385397
  hypo

SEQ ID NO: 89796 - DNA, 31 bp, Homo sapiens; identical to SEQ ID NO: 28898
  chr16:4411851-4411882
  hypo

SEQ ID NO: 89797 - DNA, 45 bp, Homo sapiens
  chr16:4414172-4414217
  hypo
tgagacactgtctcaaaaaaaaaaaaaggccgttcagccggtgaa

SEQ ID NO: 89798 - DNA, 31 bp, Homo sapiens; identical to SEQ ID NO: 28899
  chr16:4414526-4414557
  hypo

SEQ ID NO: 89799 - DNA, 43 bp, Homo sapiens
  chr16:4429223-4429266
  hypo
ggctcttgtgtgagctgcaggcgccactgggcaggatgcttcc

SEQ ID NO: 89800 - DNA, 293 bp, Homo sapiens
  chr16:4431008-4431301
  hypo
ccacggtgccccgagacgtgccacccgacacggtggggctgtacgtctttgagaacggcatcaccatgctcgacgcaggcagctttgccggcctgccgggcctgcagctcctggacctgtcacagaaccagatcgccagcctgcccagcggggtcttccagccactcgccaacctcagcaacctggacctgacagccaacaggctgcatgaaatcaccaatgagaccttccgtggcctgcggcgcctcgagcgcctctacctgggcaagaaccgcatccgccacatccagcct

SEQ ID NO: 89801 - DNA, 1102 bp, Homo sapiens
  chr16:4431613-4432715
  hypo
ctggccggcaacacccgcattgcccagctgcggcccgaggacctggccggcctggctgccctgcaggagctggatgtgagcaacctaagcctgcaggccctgcctggcgacctctcgggcctcttcccccgcctgcggctgctggcagctgcccgcaaccccttcaactgcgtgtgccccctgagctggtttggcccctgggtgcgcgagagccacgtcacactggccagccctgaggagacgcgctgccacttcccgcccaagaacgctggccggctgctcctggagcttgactacgccgactttggctgcccagccaccaccaccacagccacagtgcccaccacgaggcccgtggtgcgggagcccacagccttgtcttctagcttggctcctacctggcttagccccacagagccggccactgaggcccccagcccgccctccactgccccaccgactgtagggcctgtcccccagccccaggactgcccaccgtccacctgcctcaatgggggcacatgccacctggggacacggcaccacctggcgtgcttgtgccccgaaggcttcacgggcctgtactgtgagagccagatggggcaggggacacggcccagccctacaccagtcacgccgaggccaccacggtccctgaccctgggcatcgagccggtgagccccacctccctgcgcgtggggctgcagcgctacctccaggggagctccgtgcagctcaggagcctccgtctcacctatcgcaacctatcgggccctgataagcggctggtgacgctgcgactgcctgcctcgctcgctgagtacacggtcacccagctgcggcccaacgccacttactccgtctgtgtcatgcctttggggcccgggcgggtgccggagggcgaggaggcctgcggggaggcccatacacccccagccgtccactccaaccacgccccagtcacccaggcccgcgagggcaacctgccgctcctcattgcgcccgccctggccgcggtgctcctggccgcgctggctgcggtgggggcagcctactgtgtgcggcgggggcgggccatggcagcagcggctcaggacaaag

SEQ ID NO: 89802 - DNA, 31 bp, Homo sapiens; identical to SEQ ID NO: 28903
  chr16:4451020-4451051
  hypo

SEQ ID NO: 89803 - DNA, 30 bp, Homo sapiens; identical to SEQ ID NO: 28904
  chr16:4478612-4478642
  hypo

SEQ ID NO: 89804 - DNA, 244 bp, Homo sapiens
  chr16:4511758-4512002
  hypo
aaggggccgcgaggcgggcaggtcacagcaggttgaagtcccctttgtgctgttccagccactggtccagcgtcagggccttggggttgagtctcagggtcagctcgatgtcacggtcgggtctcagggcatagaaacggaacatgttggccaggtcccgggcaccgggaaagccaagcttttcgtagtcctcaggagtcatctggaagcagaggagcctgtcgtggccggcgtcctccagtgc

SEQ ID NO: 89805 - DNA, 197 bp, Homo sapiens
  chr16:4513583-4513780
  hypo
gccctggacacaccctccctacgggagctagaaagccctgacaaggatgcctgagtcacctggggcgggaggcccaccttggcatcgtgcacgaccttgcgggtgtgcttggtgagcagggcagcgtactcctcggccgtgtgcctgcaagtgctcagcccgatgttctggccgacgtatttttctggcatcttcaa

SEQ ID NO: 89806 - DNA, 30 bp, Homo sapiens; identical to SEQ ID NO: 28906
  chr16:4606403-4606433
  hypo

SEQ ID NO: 89807 - DNA, 30 bp, Homo sapiens
  chr16:4606717-4606747
  hypo
gctcagcaatgtcttcgaccacgtggtgag

SEQ ID NO: 89808 - DNA, 31 bp, Homo sapiens; identical to SEQ ID NO: 28907
  chr16:4641210-4641241
  hypo

SEQ ID NO: 89809 - DNA, 34 bp, Homo sapiens
  chr16:4644647-4644681
  hypo
gttcgggggcagatcgggtcgggggctccctaac

SEQ ID NO: 89810 - DNA, 30 bp, Homo sapiens; identical to SEQ ID NO: 28908
  chr16:4655418-4655448
  hypo

SEQ ID NO: 89811 - DNA, 31 bp, Homo sapiens; identical to SEQ ID NO: 28909
  chr16:4656032-4656063
  hypo

SEQ ID NO: 89812 - DNA, 30 bp, Homo sapiens
  chr16:4659192-4659222
  hypo
cacagacacggccacgcgcacacatgcgga

SEQ ID NO: 89813 - DNA, 30 bp, Homo sapiens
  chr16:4660333-4660363
  hypo
aggacccacggagccgggactcctgctgac

SEQ ID NO: 89814 - DNA, 30 bp, Homo sapiens
  chr16:4671421-4671451
  hypo
aacttggaccaaatcgggaagggcctgtct

SEQ ID NO: 89815 - DNA, 93 bp, Homo sapiens
  chr16:4689935-4690028
  hypo
ctccgcggctccgacggtgtttgctgcggctcctctgctgcgttgagtccgtctgtgcactcagatggcctgtgcttcgcctttcgcccgcgt

SEQ ID NO: 89816 - DNA, 527 bp, Homo sapiens
  chr16:4704659-4705186
  hypo
ctgtgtcctcagctggaagttcgggtgggtggtgtgaggaggggaccatgtgtcctgtgcacagcccctcgcgtgacaggtgctcttgaaaggagcctgagtgctcgagttgaggggctggtggagacgacttatgtggggaggttcttagggacctgccaccaggtgaggccgcccttgggctctggccttgggctccccggcagccagggctcctcctgtggagcagcactttggggaggaacaggttcctttttctagactttgttctttgaggctctaccttgccccggcacttgattatatttctttaatgacactagtaatgcatgcctgtgtgctatgacaggcgtcgaattcttgggcgtaggagcatttggagtgaccagggcaggcccctctgtcccctccttgcaccccactgcttggggttgagtgtttgacacccacggggcctggtgccctcctcgggcctggccgacatggtggaggagctgggttgtggcgaggtgtccaggggctgccac

SEQ ID NO: 89817 - DNA, 81 bp, Homo sapiens
  chr16:4717968-4718049
  hypo
ttgagtgtgcttgagaccaaccgaggagagttgggttctgtgggtcagcagagggtccccgggctgtgtgttctggaggcc

SEQ ID NO: 89818 - DNA, 101 bp, Homo sapiens
  chr16:4719476-4719577
  hypo
gtagagctctaagctctgggacgacgggtccctgtcttgggtgagcatatatgttttgcgtgcccgccatgtacagggacgcctgcaggccctgagttctg

SEQ ID NO: 89819 - DNA, 30 bp, Homo sapiens; identical to SEQ ID NO: 28912
  chr16:4723492-4723522
  hypo

SEQ ID NO: 89820 - DNA, 68 bp, Homo sapiens
  chr16:4748492-4748560
  hypo
gaggtcctcgcgggcgcggtcctgctccagcaggcagctctccaccacggcgcgcagctcctgctcct

SEQ ID NO: 89821 - DNA, 102 bp, Homo sapiens
  chr16:4748900-4749002
  hypo
cgggcaatggcggacgtcatcttcctcttgggcccaaacagcctgcggggggaatgtgaccaggatatgcctcagcgtcccaagagcgcttacatgagtggg

SEQ ID NO: 89822 - DNA, 201 bp, Homo sapiens
  chr16:4780088-4780289
  hypo
cacatggacaagctgcggttcaggagttccggctcgctggcttcatcgctgagctcggacatcactgaggaggaaggcccaagggttagatctttcctggctggttgttccagggcatgaaacaggctggtcctgcccctgctacaccactgcactagcagactgataacccagtgcagtcaaccccgggagtaactcaga

SEQ ID NO: 89823 - DNA, 292 bp, Homo sapiens
  chr16:4787715-4788007
  hypo
gtggagagtggagagcgggggtggctaggccctcagggctctgcctgctgccttgtcctccaaaagccctctcatttgtccacagtcggactatggggaagaggagctgttcatcttccagcgaaaccaaacctccctgattccagacctgtcggaggagctggctgaagatcctgccgatggcgacaagtccagggcctgggtcgctgcagctgaagagtcccttcccgaggtctgtgggacacagaagagtatacgcctgtgtgtgtgcgatgttagtctaaactgactg

SEQ ID NO: 89824 - DNA, 30 bp, Homo sapiens; identical to SEQ ID NO: 28915
  chr16:4799188-4799218
  hypo

SEQ ID NO: 89825 - DNA, 570 bp, Homo sapiens
  chr16:4802454-4803024
  hypo
gtgcttgtgcaggtcggtgccccggcggaagccccggccacaggccgggcaggtgtagggcttctcacctgtgtgcgtccggcggtgggcgctgaagtgcgagctgttgttgaagcgcttcccgcactgggtgcaggcatagggccgctccccgctgtgtgtcctgcggtggatgaccaggctggagctctggctgaagcgcttcccacactcggggcacgggtagggcttctcgcctgtgtgcaccctctggtgcgtgctgaagttggagcggtcgctaaagcccttcccacagactaggcacttgtaaggccgctcgcccgtgtgtgtgcgctggtgcttggtcaagtgggacgtcttgctgaagcctttgccacattcggggcaggtgtacggcttgtcagccccatgggaagcccgtcttcctggtggggggccgcctcttggctgatcaggcctgaccaagcccctgactggggctggcctctgacctgggagcgggtggccaggcccctggcatcgtgccgagagcactcggtaccactccattctcaacggggcatcctccct

SEQ ID NO: 89826 - DNA, 31 bp, Homo sapiens
  chr16:4807248-4807279
  hypo
acccgaacgggttgcccgtgaatttcatctc

SEQ ID NO: 89827 - DNA, 94 bp, Homo sapiens
  chr16:4845269-4845363
  hypo
tggggagccagggagcgcacctgctgggcctgggccctctcccctgggctgggcggcctctgctggccctggggagggcggggctggttgccaa

SEQ ID NO: 89828 - DNA, 456 bp, Homo sapiens; identical to SEQ ID NO: 28919
  chr16:4845961-4846417
  hypo

SEQ ID NO: 89829 - DNA, 35 bp, Homo sapiens
  chr16:4846716-4846751
  hypo
caaaaaaaaaaaaaaagactcggtggcccaaagtc

SEQ ID NO: 89830 - DNA, 146 bp, Homo sapiens; identical to SEQ ID NO: 52784
  chr16:4852810-4852956
  hypo

SEQ ID NO: 89831 - DNA, 30 bp, Homo sapiens; identical to SEQ ID NO: 52785
  chr16:4853160-4853190
  hypo

SEQ ID NO: 89832 - DNA, 30 bp, Homo sapiens
  chr16:4863863-4863893
  hypo
atagcccaggctcccgggcagatgctcagg

SEQ ID NO: 89833 - DNA, 31 bp, Homo sapiens; identical to SEQ ID NO: 28921
  chr16:4864722-4864753
  hypo

SEQ ID NO: 89834 - DNA, 31 bp, Homo sapiens; identical to SEQ ID NO: 28922
  chr16:4878735-4878766
  hypo

SEQ ID NO: 89835 - DNA, 33 bp, Homo sapiens; identical to SEQ ID NO: 28923
  chr16:4887143-4887176
  hypo

SEQ ID NO: 89836 - DNA, 244 bp, Homo sapiens
  chr16:4900507-4900751
  hypo
ggatttatttccacaacccagcgcatcacaaatatcctgagggccttggagatttcttttagggaaatctcctttaacatcttagtacgtgttgggagatggtcttttgcagcgccagcctgttacactgctaatcgttttgccgcctgattagaattattttaactcttcatttgtagatattttgttcccttatgtgatgttataagttgattttgtgatcataattcgacaaatgaatatt

SEQ ID NO: 89837 - DNA, 638 bp, Homo sapiens; identical to SEQ ID NO: 28925
  chr16:4920095-4920733
  hypo

SEQ ID NO: 89838 - DNA, 159 bp, Homo sapiens
  chr16:4931478-4931637
  hypo
ctccagctaagtgatcaggcacgttgagagtatacggtgtcctcagcacatacacctgtgggaaaacggaccgctcttggctcctgactcccagggtacagcgcccagtaactcatccttcattcagaggtttgctggccttcccggtttcccaaggag

SEQ ID NO: 89839 - DNA, 348 bp, Homo sapiens
  chr16:4931952-4932300
  hypo
ccccacgtaccattgcgcgtgcagctggagcagaataccctcatttttaggaatctagtgatgcctcttgcctcagggaaacgtttctttgatggggagtttgagatttcttttccttgtttatgctttatttgtggtaatgaaagagcgaatgactgaacagccatggcaaggcagacctacaggcgaggccgcagcagagggtggggcagagcagcctcggggtctgggggctgcaggggtttccctggcgcagcgaaagtctctgagcacttaccgggcgtgaccgtttcttaggtgtgagaggggctgtggcttttgtgcagcgactatgttggtgttaggggt

SEQ ID NO: 89840 - DNA, 512 bp, Homo sapiens
  chr16:4933219-4933731
  hypo
agtgcctgtctcatatgtgggcgggactctgagcagcctggcagcgagggtatgtataaaatgcttggcctgcaccagggcaagggagaggacgacaccaaggaggtcactgcgtcgtaggagagggccagcgtctgccgttacgaagagttgcaagagctgtgcctacttctgcccagataccaagaccgccagctcctggatggacatatccttgttgacatagcggtcatactgagcaggggtcagcctgccactctgcagggcctcttcgatggagaacttcttgccagacttcctgtcgtgtatcactgaggactccccattgggacccttcactgagatctcctcccagtcgcactcctggcttctgagtttcacgaacatgttccagtcaatgagcccggcacggtgggcttcctccggggacagctcgcggcctgtgtcagggtggatgactacgatggagcgccgcaggtggttctcccgctgctcccgcttgacggccacgg

SEQ ID NO: 89841 - DNA, 30 bp, Homo sapiens; identical to SEQ ID NO: 28927
  chr16:4934035-4934065
  hypo

SEQ ID NO: 89842 - DNA, 30 bp, Homo sapiens
  chr16:4934460-4934490
  hypo
gctcggtgcgccggcgctgcagccgccgca

SEQ ID NO: 89843 - DNA, 30 bp, Homo sapiens
  chr16:4938138-4938168
  hypo
ggctctcttgctcacgtggcttctccttcc

SEQ ID NO: 89844 - DNA, 31 bp, Homo sapiens; identical to SEQ ID NO: 28928
  chr16:4964117-4964148
  hypo

SEQ ID NO: 89845 - DNA, 158 bp, Homo sapiens; identical to SEQ ID NO: 28929
  chr16:4971734-4971892
  hypo

SEQ ID NO: 89846 - DNA, 168 bp, Homo sapiens; identical to SEQ ID NO: 28930
  chr16:4980310-4980478
  hypo

SEQ ID NO: 89847 - DNA, 272 bp, Homo sapiens
  chr16:4981428-4981700
  hypo
tgaagagagctttgtcccacccggaggcagaaaggggcaccaggtggcctcccgggctccagaggctgcagcacagcaacccatcagaagccgggagaacaaagaccagaggccgtttccccattcgctcccaagacaggccggggcaggcaggctgggaggatgcaaggtggtgccggtaacaccggcacagacctgccgggagcagagagcagctgcacgctgggaagccagggttctcttccccagacgaggagctttggaagctctct

SEQ ID NO: 89848 - DNA, 29 bp, Homo sapiens
  chr16:5004699-5004728
  hypo
tgagccactgtgctcggaccattttgcca

SEQ ID NO: 89849 - DNA, 682 bp, Homo sapiens; identical to SEQ ID NO: 52788
  chr16:5007928-5008610
  hypo

SEQ ID NO: 89850 - DNA, 31 bp, Homo sapiens; identical to SEQ ID NO: 52790
  chr16:5121975-5122006
  hypo

SEQ ID NO: 89851 - DNA, 30 bp, Homo sapiens
  chr16:5138280-5138310
  hypo
acccagtacgtcttcgtgtgctggcttgtt

SEQ ID NO: 89852 - DNA, 79 bp, Homo sapiens
  chr16:5481659-5481738
  hypo
caccgtgcccagccgctggtttattttttattattatttgccactgcgattgtcttgcgggactacccatagtcatgca

SEQ ID NO: 89853 - DNA, 207 bp, Homo sapiens; identical to SEQ ID NO: 28933
  chr16:5628621-5628828
  hypo

SEQ ID NO: 89854 - DNA, 30 bp, Homo sapiens; identical to SEQ ID NO: 28934
  chr16:6744841-6744871
  hypo

SEQ ID NO: 89855 - DNA, 31 bp, Homo sapiens; identical to SEQ ID NO: 28935
  chr16:7823780-7823811
  hypo

SEQ ID NO: 89856 - DNA, 33 bp, Homo sapiens
  chr16:8410250-8410283
  hypo
ttttttttttagacagagtctcgctttgtcgcc

SEQ ID NO: 89857 - DNA, 253 bp, Homo sapiens; identical to SEQ ID NO: 28936
  chr16:8722898-8723151
  hypo

SEQ ID NO: 89858 - DNA, 27 bp, Homo sapiens
  chr16:8755213-8755240
  hypo
ttaccgttggccgggcgcggtggctca

SEQ ID NO: 89859 - DNA, 737 bp, Homo sapiens; identical to SEQ ID NO: 52803
  chr16:8767885-8768622
  hypo

SEQ ID NO: 89860 - DNA, 31 bp, Homo sapiens
  chr16:8870108-8870139
  hypo
tcttcaagagaggaggcggggcgcctggggt

SEQ ID NO: 89861 - DNA, 30 bp, Homo sapiens; identical to SEQ ID NO: 28938
  chr16:8941732-8941762
  hypo

SEQ ID NO: 89862 - DNA, 30 bp, Homo sapiens; identical to SEQ ID NO: 28939
  chr16:8942325-8942355
  hypo

SEQ ID NO: 89863 - DNA, 27 bp, Homo sapiens
  chr16:8963898-8963925
  hypo
tacttgaggccgggtgcggtggctcac

SEQ ID NO: 89864 - DNA, 31 bp, Homo sapiens; identical to SEQ ID NO: 28940
  chr16:8995325-8995356
  hypo

SEQ ID NO: 89865 - DNA, 30 bp, Homo sapiens
  chr16:8995969-8995999
  hypo
actagcagccagctcgggatcaactgtttc

SEQ ID NO: 89866 - DNA, 91 bp, Homo sapiens; identical to SEQ ID NO: 28941
  chr16:8996300-8996391
  hypo

SEQ ID NO: 89867 - DNA, 30 bp, Homo sapiens
  chr16:9004609-9004639
  hypo
catgttccccagcgtcgtatttattgtccc

SEQ ID NO: 89868 - DNA, 502 bp, Homo sapiens
  chr16:9005256-9005758
  hypo
gtaacattaagagtgaaagggcgagccacatgctgagtgacaagctctcaatccaacacggaattgtatatccagagtgtatggagagctcgtcctgctccggtcatgaaggaaaaacgcaactgcacaacactgaaaacagcgctgtcacgctccggacacatgcggtacaggacagggatccctgaagggacaaatgagagccccgtgatgggcccagctctgctgaaagtttacaggctgcagcccggagaaggcaaacccagacagagccaagaagtgagaatgagaggagctcaagggagcgggaacctgctgggcagagtagcctaaagcagaatgctgcccagaaagcgagatctggggatgtgcagtttcttccgaagctgtcagtgagaactgatcagtgaactcgaggaaattacctggggcaaggaaaagaaccagcaagaggatgaggattggggggaacaaccttcagagctcacgacaggctgggaag

SEQ ID NO: 89869 - DNA, 200 bp, Homo sapiens
  chr16:9009859-9010059
  hypo
tgtgtgtgtgcttctgcgtcttttatcacaactggaagaatgaggatttgctagtgattagtgatggcgcggggagagtaatcaccgcatgctgaggtctgctcaatgagaacctcgctgcacaggaggggtctggacactggagtaacaacagaagtcaccactgtacagtgactcaggaccaacgggacagccaacaa

SEQ ID NO: 89870 - DNA, 32 bp, Homo sapiens
  chr16:9016041-9016073
  hypo
acattaaagaaaatgaaagtacggccaggtgc

SEQ ID NO: 89871 - DNA, 31 bp, Homo sapiens; identical to SEQ ID NO: 28944
  chr16:9019562-9019593
  hypo

SEQ ID NO: 89872 - DNA, 31 bp, Homo sapiens; identical to SEQ ID NO: 28945
  chr16:9020778-9020809
  hypo

SEQ ID NO: 89873 - DNA, 31 bp, Homo sapiens; identical to SEQ ID NO: 10534
  chr16:9022848-9022879
  hypo

SEQ ID NO: 89874 - DNA, 121 bp, Homo sapiens
  chr16:9062110-9062231
  hypo
caaccttttctaattctggattcttatcagggaaatgggaaaacagtctacctgaaaccataaaatatcaaacgcttcaaaatccacaggttggccagtgcattcgctcacgcctgtaatc

SEQ ID NO: 89875 - DNA, 26 bp, Homo sapiens
  chr16:9063641-9063667
  hypo
gtatagtggttggagtcgtgttcatt

SEQ ID NO: 89876 - DNA, 328 bp, Homo sapiens; identical to SEQ ID NO: 10537
  chr16:9186866-9187194
  hypo

SEQ ID NO: 89877 - DNA, 136 bp, Homo sapiens
  chr16:9218838-9218974
  hypo
agtgaaaaagctaaggattaccgagtgcttaatgcctttgccaaccccatcgggcaggttctgatatctccattcacgcgatgagacggtctgtgtgacccaacggcgcccctacgtggccccaggctggatactg

SEQ ID NO: 89878 - DNA, 81 bp, Homo sapiens; identical to SEQ ID NO: 28948
  chr16:9222466-9222547
  hypo

SEQ ID NO: 89879 - DNA, 30 bp, Homo sapiens
  chr16:9231661-9231691
  hypo
tgcccaggctggtctcgaactcttggtctc

SEQ ID NO: 89880 - DNA, 31 bp, Homo sapiens
  chr16:9242311-9242342
  hypo
agttcacaatagggttcgagctatgacgatc

SEQ ID NO: 89881 - DNA, 31 bp, Homo sapiens
  chr16:10617155-10617186
  hypo
catcttgtggtgatggcggtggttttctttt

SEQ ID NO: 89882 - DNA, 31 bp, Homo sapiens
  chr16:10625824-10625855
  hypo
atgtagacagctgtggcgatggaggccaagg

SEQ ID NO: 89883 - DNA, 187 bp, Homo sapiens
  chr16:10631324-10631511
  hypo
gcaagactccatggggcgtggccctgcctgccctgctggttcacttcccactgcactccagccccactgggcagctctccgtccctcctgtcacagggcttccgtcatgctgttccctctacccaggacactgttccctcctctctctattgagacacaacactgtcgacagcgactcctactcacc

SEQ ID NO: 89884 - DNA, 645 bp, Homo sapiens; identical to SEQ ID NO: 52817
  chr16:10674032-10674677
  hypo

SEQ ID NO: 89885 - DNA, 30 bp, Homo sapiens
  chr16:10721520-10721550
  hypo
gttggccttgatggcgagctcgtgctccag

SEQ ID NO: 89886 - DNA, 31 bp, Homo sapiens
  chr16:10823652-10823683
  hypo
caagcacgggaggcaacgtgatattccgagg

SEQ ID NO: 89887 - DNA, 30 bp, Homo sapiens
  chr16:10856150-10856180
  hypo
gcaccgggacagaccggaacgcggatcact

SEQ ID NO: 89888 - DNA, 165 bp, Homo sapiens; identical to SEQ ID NO: 28951
  chr16:10868651-10868816
  hypo

SEQ ID NO: 89889 - DNA, 30 bp, Homo sapiens; identical to SEQ ID NO: 28952
  chr16:11001017-11001047
  hypo

SEQ ID NO: 89890 - DNA, 115 bp, Homo sapiens; identical to SEQ ID NO: 10545
  chr16:11035551-11035666
  hypo

SEQ ID NO: 89891 - DNA, 55 bp, Homo sapiens
  chr16:11072430-11072485
  hypo
gactgaggctttgagccggagggagactcctttcaaagcacgctgcttttccttt

SEQ ID NO: 89892 - DNA, 235 bp, Homo sapiens
  chr16:11072843-11073078
  hypo
cctcctggaggcctctcctgccggggcgtccagtgccccagctggtacaaatgaacgtgcttggtaacttaaggagcaagttctcgtgggtcagcctctcatccgtgagtaatggtgaaaggtttctcagatggaaaaatagtgtccttgcaaacagtattgagtgggattttgcggagtggacttttgagtagcaccaagaaaggacagccctagggccgtggaggaagtcagt

SEQ ID NO: 89893 - DNA, 30 bp, Homo sapiens
  chr16:11084194-11084224
  hypo
tgcaacatgaggtccggtactaaggagcgt

SEQ ID NO: 89894 - DNA, 43 bp, Homo sapiens
  chr16:11085623-11085666
  hypo
tccttgaaactggttttgctgcgggatgctttgcctgatggga

SEQ ID NO: 89895 - DNA, 17 bp, Homo sapiens
  chr16:11102884-11102901
  hypo
tataaccatcaccacca

SEQ ID NO: 89896 - DNA, 30 bp, Homo sapiens; identical to SEQ ID NO: 28956
  chr16:11103441-11103471
  hypo

SEQ ID NO: 89897 - DNA, 31 bp, Homo sapiens; identical to SEQ ID NO: 28957
  chr16:11114091-11114122
  hypo

SEQ ID NO: 89898 - DNA, 286 bp, Homo sapiens
  chr16:11118476-11118762
  hypo
ttcccctctggatagcggcttccgcaggcagagcctgtctctcatttgtctgtgtcctcagtgcgtggtgctggaccaggcacacagttgtggcctaaagagctgtgtcaaaggcagctagcaccccatgtgcaggttagagaggggaggtgttcacccttgtgcaccgtgaggctcatacatgcccctcctcttttccagacccttcctggatatggtgtaccacgcgctggacagcccggatgatgattaccatgccctgttcgtgctctgcctcctctatgcc

SEQ ID NO: 89899 - DNA, 30 bp, Homo sapiens; identical to SEQ ID NO: 28959
  chr16:11132914-11132944
  hypo

SEQ ID NO: 89900 - DNA, 292 bp, Homo sapiens; identical to SEQ ID NO: 28960
  chr16:11151101-11151393
  hypo

SEQ ID NO: 89901 - DNA, 187 bp, Homo sapiens; identical to SEQ ID NO: 28961
  chr16:11174342-11174529
  hypo

SEQ ID NO: 89902 - DNA, 100 bp, Homo sapiens; identical to SEQ ID NO: 28962
  chr16:11178649-11178749
  hypo

SEQ ID NO: 89903 - DNA, 30 bp, Homo sapiens
  chr16:11189368-11189398
  hypo
gagtaagacaggagctacagccgggcacga

SEQ ID NO: 89904 - DNA, 201 bp, Homo sapiens
  chr16:11192362-11192563
  hypo
agctgagcgtgagggcgttagtgtggccatccataatggtatttgggatctgacaagtctccaaaccacttgtccatagaccctccagggccctgcaccctgagaaccagcctggtggggctggagtcctaaaatctgcactttgtcccagtaccgggtgccccaggctgccaatgggcctcccttcgaggaaccctggat

SEQ ID NO: 89905 - DNA, 347 bp, Homo sapiens; identical to SEQ ID NO: 28963
  chr16:11192847-11193194
  hypo

SEQ ID NO: 89906 - DNA, 617 bp, Homo sapiens
  chr16:11219552-11220169
  hypo
cagcttccattccactcgaggagcccaggctcaaacccctttctccttggtctcaaccttggcccgaagccctcacttggcttccgcttgtgcgttgagcctcagtgggaactttgatgttccactggtctctgcagcttgaggctgcctgccgcccacttggcgtctcccaagtgatgtgcctggcagggccacagccactacgatgtccccccccccaaattctcaccacccccctctatcccacatgctcagagtgaaccatgctattgtttgaccgtagccctcctggacctcccaatccagcccaccactgaagtcctggggtttggactcggctcctccacctccactcagcacctgcctttccgcttctacgaccaggggcgccggggcagcagcgaccccacagtgcagcgctccgtgtttgcatcggtggacaaggtgccaggtgagccagccccccgccctgcgccacagctcgttcatcatggtgggcgttcaaggtctttctctctgtggagcctgtgtgagctgcccttcctctctcagaagccccgtcggctggcagcaccagcttcttagaatttgtcaaagcacagcgcaagattaaacac

SEQ ID NO: 89907 - DNA, 30 bp, Homo sapiens
  chr16:11225772-11225802
  hypo
cagggcctctgttttcgtgcttccctccgc

SEQ ID NO: 89908 - DNA, 30 bp, Homo sapiens
  chr16:11226083-11226113
  hypo
cccacccaccccccccgcccccgcccccat

SEQ ID NO: 89909 - DNA, 334 bp, Homo sapiens
  chr16:11232439-11232773
  hypo
ggtgatgcccgtgggcggatgagaaaagtcccacaggctggggtgcggccttccttacctttctctggccatttgccacttacttgtactataggattatattgcttgtttcaaaaaacctaaatgaccactgttttcactcaacagcgtatcctggagtgtttttcattttagttcgcaggcgcaccctcattcgattttgactgctgcgatcatctggtcaaaccactgttcattgagccagtcccctactgatggatgtttaggtggtggccaattttttgtcctttaacaaataggcatctccaagtgcccttgcgcaagggtttcctca

SEQ ID NO: 89910 - DNA, 30 bp, Homo sapiens
  chr16:11242100-11242130
  hypo
gctagatggtatgccggcaaccacgtccaa

SEQ ID NO: 89911 - DNA, 105 bp, Homo sapiens; identical to SEQ ID NO: 28966
  chr16:11265076-11265181
  hypo

SEQ ID NO: 89912 - DNA, 135 bp, Homo sapiens
  chr16:11267977-11268112
  hypo
tttctatgatctgtcgctgtgttttccctctagtcaggagtggcaggaaaggacgccgacgagtgttcagcctgtcggaggccgacagtcatggcggccactgggtttagtgctccgaacggcagctgccacggc

SEQ ID NO: 89913 - DNA, 30 bp, Homo sapiens
  chr16:11268359-11268389
  hypo
gtccttcaccttcgcgacagtccttctgag

SEQ ID NO: 89914 - DNA, 30 bp, Homo sapiens
  chr16:11271037-11271067
  hypo
tgtttttaaacacccggcatctgaagtgct

SEQ ID NO: 89915 - DNA, 30 bp, Homo sapiens
  chr16:11272232-11272262
  hypo
gaccagttggtaatcgtcaacgaaacggaa

SEQ ID NO: 89916 - DNA, 30 bp, Homo sapiens
  chr16:11320424-11320454
  hypo
gatctagcacatcaccgcgtcacttcatcc

SEQ ID NO: 89917 - DNA, 120 bp, Homo sapiens
  chr16:11323717-11323837
  hypo
gttattcccatttttcagctgcgacgcaagagctcaagaagtgaactggctcccattggcacggcagaaggagccgtggtgggactctgatgtggagccgccttgagctgcagagccagg

SEQ ID NO: 89918 - DNA, 31 bp, Homo sapiens
  chr16:11342006-11342037
  hypo
cagtgtgacccaagcccgttatttaaccctg

SEQ ID NO: 89919 - DNA, 30 bp, Homo sapiens; identical to SEQ ID NO: 28967
  chr16:11343450-11343480
  hypo

SEQ ID NO: 89920 - DNA, 30 bp, Homo sapiens; identical to SEQ ID NO: 28968
  chr16:11343686-11343716
  hypo

SEQ ID NO: 89921 - DNA, 53 bp, Homo sapiens
  chr16:11370334-11370387
  hypo
tctgcaaggctccccgggagcttgtatataaagggggcgcccactatgactct

SEQ ID NO: 89922 - DNA, 388 bp, Homo sapiens
  chr16:11398034-11398422
  hypo
tctcccccacccctccacatgcgttatgtttcagttgccggaattgaaatcacgttgccgttccctctgcctggaatgcttttctgcattagggcatggctgatgccttcctagcttccagatctcagcaaagtgtcctggggctgctgtgcctggaagggacacattttgggtgcctccttacattatccgcccataccactggacaatcgggtgctctgtcttgcctctctgtgtgctagctgcttctctccaccaaatcacaatatccttaagaacaaggacgttgttttgttcatggcttcagtcccagcacctagcaagtcgtaagtgcttagaaaataatgtgttcagaggccaggcgcggtggctcacacctgtaatccca

SEQ ID NO: 89923 - DNA, 48 bp, Homo sapiens
  chr16:11443252-11443300
  hypo
caatttgtcccatcgcgtgccttcgagttcatccggctggctgtgtgt

SEQ ID NO: 89924 - DNA, 29 bp, Homo sapiens
  chr16:11500579-11500608
  hypo
gcccggccttcccccggattttcaaatgg

SEQ ID NO: 89925 - DNA, 122 bp, Homo sapiens
  chr16:11541943-11542065
  hypo
aggctgaagagagggacgggccagcaggaccaagctgcagacctgccttgcaggaaggcaagaggtagccccccacaacctgcccatcacccccagaaatgactatccgagaatggctactg

SEQ ID NO: 89926 - DNA, 30 bp, Homo sapiens
  chr16:11582788-11582818
  hypo
gagaaaagaccctcccgacccccatcccag

SEQ ID NO: 89927 - DNA, 30 bp, Homo sapiens
  chr16:11588517-11588547
  hypo
ctggccgcagggcccgtccagagaagcaca

SEQ ID NO: 89928 - DNA, 161 bp, Homo sapiens
  chr16:11622038-11622199
  hypo
ggcccattttaaccacttttaagtattcagttgagtggcgtcgtgtccactcatgacattgcgcaaccatcactactgtctagttgtgtagtctgacattgggtttgtctttcccagtgctcaggttaggaaaagccaacgggaggcctgacttagcaagg

SEQ ID NO: 89929 - DNA, 31 bp, Homo sapiens; identical to SEQ ID NO: 28972
  chr16:11703493-11703524
  hypo

SEQ ID NO: 89930 - DNA, 48 bp, Homo sapiens
  chr16:11712501-11712549
  hypo
tttctgggggtggggagggggcgcttcatagagctgcaaattaaaaac

SEQ ID NO: 89931 - DNA, 187 bp, Homo sapiens
  chr16:11770869-11771056
  hypo
gagttactgcagggaagctaccggacctgcctgggagccagtgaagggcgagtcagggcacgcgtcctggaggctgccagcgtccttgtagcagagcagtttcttgccgcttgggtcttcagcacgccaagccccccaccaaccctccaccccgagtgaaggcttcgctgaaattgctttggtcctc

SEQ ID NO: 89932 - DNA, 215 bp, Homo sapiens
  chr16:11775049-11775264
  hypo
ccacaacaactgaaaacacatcgtggccctgtcaagtgggcccatggaagaataccagacgctggacctgcccccacgttctgcggcacaagcctggtcttgtaaggcagagtaaacgtgaattacttcccagaaaaagctgccaagatccctcaggatgtctacctccagacatttacaggacagtgacatccgtgagcatgctatctgctaac

SEQ ID NO: 89933 - DNA, 19 bp, Homo sapiens
  chr16:11784713-11784732
  hypo
ccactgctttctctttaag

SEQ ID NO: 89934 - DNA, 30 bp, Homo sapiens
  chr16:11786029-11786059
  hypo
atccatggtcaactccggttcaaaaatact

SEQ ID NO: 89935 - DNA, 188 bp, Homo sapiens
  chr16:11792616-11792804
  hypo
ccaagggcagcatggagcctccgtgcggcacaggctgtctgttctgctcacctgtatcctccgggcctagacgaacaccaggcacacagcaggaactcaacacatgtcttcagcaatcaaaaatgacctaaacttgcacaaggccacggatcatattttacgtgtacgaataaatgaaagagacacct

SEQ ID NO: 89936 - DNA, 181 bp, Homo sapiens; identical to SEQ ID NO: 28977
  chr16:11831274-11831455
  hypo

SEQ ID NO: 89937 - DNA, 46 bp, Homo sapiens
  chr16:11851040-11851086
  hypo
gtggcaaaatttgttcccagccgggcacggtggctcacgcctgtaa

SEQ ID NO: 89938 - DNA, 30 bp, Homo sapiens
  chr16:11853229-11853259
  hypo
gcttagcatctgtcacgtttttcagagttt

SEQ ID NO: 89939 - DNA, 45 bp, Homo sapiens; identical to SEQ ID NO: 28978
  chr16:11853663-11853708
  hypo

SEQ ID NO: 89940 - DNA, 154 bp, Homo sapiens
  chr16:11879767-11879921
  hypo
cctggccgttttgtgtttttttaaagtgacgggtaggtatatatattgacatatgcttgtgtaaacataaaatagtcccagatggaatcatgggagactacagcagtagtagaagactgaggctggaaaaggggtaggacgaggtcttttcaat

SEQ ID NO: 89941 - DNA, 40 bp, Homo sapiens; identical to SEQ ID NO: 28980
  chr16:11900210-11900250
  hypo

SEQ ID NO: 89942 - DNA, 41 bp, Homo sapiens; identical to SEQ ID NO: 28981
  chr16:11968753-11968794
  hypo

SEQ ID NO: 89943 - DNA, 90 bp, Homo sapiens; identical to SEQ ID NO: 28982
  chr16:11974693-11974783
  hypo

SEQ ID NO: 89944 - DNA, 45 bp, Homo sapiens
  chr16:11989478-11989523
  hypo
ctttacacctttttttccccacgagacggaatcttgctccgttgc

SEQ ID NO: 89945 - DNA, 181 bp, Homo sapiens; identical to SEQ ID NO: 28983
  chr16:12011432-12011613
  hypo

SEQ ID NO: 89946 - DNA, 40 bp, Homo sapiens
  chr16:12012092-12012132
  hypo
cttatcggtgtgagccaccacacccggcagagtttgcctc

SEQ ID NO: 89947 - DNA, 53 bp, Homo sapiens
  chr16:12018077-12018130
  hypo
gggattacaggcgtgagccactgcgcctggccgattgccaattgccaatgcct

SEQ ID NO: 89948 - DNA, 37 bp, Homo sapiens
  chr16:12042327-12042364
  hypo
gtaaaatggaaacttactgggcgcagtggctcacacc

SEQ ID NO: 89949 - DNA, 30 bp, Homo sapiens
  chr16:12050239-12050269
  hypo
aaatgatctcttgccgggagcagtggctca

SEQ ID NO: 89950 - DNA, 208 bp, Homo sapiens; identical to SEQ ID NO: 28984
  chr16:12084489-12084697
  hypo

SEQ ID NO: 89951 - DNA, 30 bp, Homo sapiens; identical to SEQ ID NO: 28985
  chr16:12088022-12088052
  hypo

SEQ ID NO: 89952 - DNA, 103 bp, Homo sapiens
  chr16:12118316-12118419
  hypo
atgaccagtagatacgtgctcagatccaaactggaggtggaaagggcatatggggagggtgttaagtagaacggcctttggcgaggaaggcatcatagtgatc

SEQ ID NO: 89953 - DNA, 167 bp, Homo sapiens; identical to SEQ ID NO: 28986
  chr16:12132680-12132847
  hypo

SEQ ID NO: 89954 - DNA, 30 bp, Homo sapiens; identical to SEQ ID NO: 28987
  chr16:12136807-12136837
  hypo

SEQ ID NO: 89955 - DNA, 30 bp, Homo sapiens; identical to SEQ ID NO: 28988
  chr16:12142320-12142350
  hypo

SEQ ID NO: 89956 - DNA, 31 bp, Homo sapiens; identical to SEQ ID NO: 28989
  chr16:12142576-12142607
  hypo

SEQ ID NO: 89957 - DNA, 30 bp, Homo sapiens
  chr16:12146059-12146089
  hypo
cactcggagtcgcccgagaagtaagtttgt

SEQ ID NO: 89958 - DNA, 247 bp, Homo sapiens
  chr16:12172488-12172735
  hypo
ggttacaaataaattttagtgcgtagatgaatttccaaatacggaatctgcagataacgaggcctgactaatttccaatgactgcctctatcccttctagtagaggtaccggagtaaaccgacctctgctagtttttggaatggtgagggtgtgtactttcagtggccgagtgtaacttcctcctgcctgctttttcctagtgtggaagccagctctccaggccacggaagtcctctgagcagcctg

SEQ ID NO: 89959 - DNA, 383 bp, Homo sapiens
  chr16:12210601-12210984
  hypo
catgcttcaacacagatgaaccgtggaaacaggcttagtcaatacctgcttcaacgcggacgaaccgtggaaacaggcttagtcaatacgtgcttcaacgaggacgaaccatggaaacaggcttagtcaatacctgcttcaacgcggacgaaccgtggaaacaggcacggtcaatacgtgcttcaacgaggacgaaccatggaaacaggagtggtcaatacgtgcttcaatgcggatgaaccatggaaacaggcgtggtcaatacgtgcttcagtgcggacgaaccatggaaacaggcgtgttcaatacgtgcttcaatgcggacgaaccatggaaacaggcgtggtcaatacgtgcttcagtgcggacgaaccatggaaaca

SEQ ID NO: 89960 - DNA, 151 bp, Homo sapiens; identical to SEQ ID NO: 52824
  chr16:12211190-12211341
  hypo

SEQ ID NO: 89961 - DNA, 197 bp, Homo sapiens
  chr16:12237124-12237321
  hypo
attacaggcatgagccactgcgcctggccggccacaagcaaagattttaaccttcagtctgacagctccaggagttccattttcgtggggctactctgagcaggaagtgtcgtatggggcaggtgtggacttgagtcctgcttctcagggttagggcaagggtgagacaagtgaggcacctacgctgcttaatttaa

SEQ ID NO: 89962 - DNA, 182 bp, Homo sapiens
  chr16:12264696-12264878
  hypo
agtgtatgaggagtgtctgtgcgcgcgcgcgtgctgtttacagggcctccgagacatcccggaggccctgatggctggagagagagccgtaggatttactgacgacctggagcccaggagaaaaatcccggccagcgtgtttagggtgttaggggcgcagcgtgattttacatatcttagat

SEQ ID NO: 89963 - DNA, 138 bp, Homo sapiens
  chr16:12289442-12289580
  hypo
catctgtgcaggagtcttaaccgcccaagagattctgcagacctgtgctcgttttctcacgcaatttttcaaggccttacgttttcaatgttgccctgttcacttaattcgctaaacgtgtataatgtaataggagac

SEQ ID NO: 89964 - DNA, 189 bp, Homo sapiens
  chr16:12293538-12293727
  hypo
aggtgagggggagcctgagcccgggttgggaggggccgggcttttccattaacacctgtacgtggcacgcaatagacactcaatgtgtgacgagtgcatatgtggatggattagaataatggtgctgctcagcgttccagaaaattaatcaggtggaaaacctgatgcgtatccctgcaacatgcataa

SEQ ID NO: 89965 - DNA, 85 bp, Homo sapiens
  chr16:12390746-12390831
  hypo
tgacattttggaccacataatcgtttgtcatgggggctttcctgtgtgtagtaggatgtttcacggcatgcctggctgctgcccg

SEQ ID NO: 89966 - DNA, 31 bp, Homo sapiens; identical to SEQ ID NO: 28992
  chr16:12410419-12410450
  hypo

SEQ ID NO: 89967 - DNA, 359 bp, Homo sapiens
  chr16:12412004-12412363
  hypo
ttcttccagagagggcggcagagccaggattgaaattcacatcttgctccgagctcatgcacacctgggagcctgcatgttcttgctagattttacagccagcaggcctttgttgaaccgtaagcagcagcggccttgatcaggctggtttttctgcccagaggcccctttggcatcgtgactcaaaattttctctgggtattttgccttcttgctgatgcatcgtttgccggatgggaaccagcaggtagagagtgttggctttctgcctccggtcagagtcgggaacgtgacttggatacaaactcagcatggagggaggcatgacttgggagggcagaacccggcagcttcattcc

SEQ ID NO: 89968 - DNA, 30 bp, Homo sapiens
  chr16:12412562-12412592
  hypo
tttttttttctgtaacgaggtacagggaga

SEQ ID NO: 89969 - DNA, 81 bp, Homo sapiens
  chr16:12497523-12497604
  hypo
tgcccagaggccttgccgaagaagtctgtggctttcagttgggcagggggatacggtgggcctcttcgtgccagtcaggct

SEQ ID NO: 89970 - DNA, 166 bp, Homo sapiens
  chr16:12498044-12498210
  hypo
atggatactggacaagcgggacctgtagacatcgcctctgcttccttggggtacggatagccgcacccaggtgggcattgagtgtctggggcagcgaaatgtgtgtctgcttaggaggtgattttacccaatcaaggggactccagttctccgtctcctctctgat

SEQ ID NO: 89971 - DNA, 31 bp, Homo sapiens; identical to SEQ ID NO: 28993
  chr16:12506196-12506227
  hypo

SEQ ID NO: 89972 - DNA, 273 bp, Homo sapiens
  chr16:12609441-12609714
  hypo
atcttcaggtgacctccgaagtcacctcctcccaggtgccttcctgtcctagccacccaagccaagtccatctctgtgccagcactctttatgatgtattcacgtatctgcttgttggctctactggatctaagctccggagggcaggggtcacatctgtttgccaatacgttccttcaaggcacggtgccttggacatatgcaggcatgcggcagatagtcactgagtgaaccatgcaggagccagcacaattaacgcgagtgccagtaacc

SEQ ID NO: 89973 - DNA, 30 bp, Homo sapiens
  chr16:12620498-12620528
  hypo
gggaattagcctctcgcggagtcatcacgc

SEQ ID NO: 89974 - DNA, 86 bp, Homo sapiens
  chr16:12758794-12758880
  hypo
agctcatctagactgtagtatcggtgaacaattttctcggcggtgaccaccacgactcggagcccgtgggggtctctgcccagctg

SEQ ID NO: 89975 - DNA, 57 bp, Homo sapiens
  chr16:12777324-12777381
  hypo
aatcatttcccagccaacaatcggttcctaggcttcgtggacctctcttctggacat

SEQ ID NO: 89976 - DNA, 36 bp, Homo sapiens
  chr16:12782488-12782524
  hypo
cagcccctactccacgacttctgcattaagtgtaat

SEQ ID NO: 89977 - DNA, 30 bp, Homo sapiens
  chr16:12798577-12798607
  hypo
gatgtgctggaagacgatggcatgctggca

SEQ ID NO: 89978 - DNA, 92 bp, Homo sapiens
  chr16:12800829-12800921
  hypo
gctgggggttcattcacctaccgtctgcatcgaaggtgccattgattgacattgcttctttagccgaacccggactgcaggcatctgtgctg

SEQ ID NO: 89979 - DNA, 129 bp, Homo sapiens
  chr16:12850874-12851003
  hypo
taggaccctattatagcacctcgaggtgaccaactaagttatagcacctcgaggatgaccaactaagttacagcaccttgagggtgaccaactaagttacagcacctcgagggtgaccaattaagttat

SEQ ID NO: 89980 - DNA, 565 bp, Homo sapiens; identical to SEQ ID NO: 52825
  chr16:12897344-12897909
  hypo

SEQ ID NO: 89981 - DNA, 1239 bp, Homo sapiens; identical to SEQ ID NO: 52826
  chr16:12994564-12995803
  hypo

SEQ ID NO: 89982 - DNA, 1203 bp, Homo sapiens; identical to SEQ ID NO: 52827
  chr16:12996073-12997276
  hypo

SEQ ID NO: 89983 - DNA, 30 bp, Homo sapiens
  chr16:13491910-13491940
  hypo
tgctgtggcatctgtcggtgtgctcttttg

SEQ ID NO: 89984 - DNA, 19 bp, Homo sapiens
  chr16:13648595-13648614
  hypo
gcttcggcctcccaaagag

SEQ ID NO: 89985 - DNA, 46 bp, Homo sapiens
  chr16:13740877-13740923
  hypo
agaagcacagaattgggaggccgaggcgtgcggatcactaggtcag

SEQ ID NO: 89986 - DNA, 178 bp, Homo sapiens; identical to SEQ ID NO: 52830
  chr16:13877529-13877707
  hypo

SEQ ID NO: 89987 - DNA, 31 bp, Homo sapiens
  chr16:14095398-14095429
  hypo
agtagtgaacaatgatcgcccagagcaaaat

SEQ ID NO: 89988 - DNA, 30 bp, Homo sapiens
  chr16:14169295-14169325
  hypo
tcctgggcaatgcacgtgaacatataaaaa

SEQ ID NO: 89989 - DNA, 30 bp, Homo sapiens
  chr16:14357873-14357903
  hypo
gaccggactcagtgcgtgtgatggtgagtg

SEQ ID NO: 89990 - DNA, 30 bp, Homo sapiens; identical to SEQ ID NO: 10554
  chr16:14397059-14397089
  hypo

SEQ ID NO: 89991 - DNA, 82 bp, Homo sapiens
  chr16:14494053-14494135
  hypo
ggaatccacaggccccgggctgaacgtggaactaatttgggaggcaatgagaaagagcggaacataacgcggagcccgggag

SEQ ID NO: 89992 - DNA, 78 bp, Homo sapiens
  chr16:14632541-14632619
  hypo
cataggccctaaaaccgaagtcgccaatctgtactgatctatgttccctggcatgttaggaaccaggctgcacagcag

SEQ ID NO: 89993 - DNA, 31 bp, Homo sapiens
  chr16:14642089-14642120
  hypo
gcaagactccgtctcaaaaaaaaaaaaaaat

SEQ ID NO: 89994 - DNA, 181 bp, Homo sapiens
  chr16:14725659-14725840
  hypo
aagacctattttcaaaatctatctcagccacttattagttctggaatgcattaaaccttcctaaacctcaatttcctgggattgtattgaggctcagtggtgctaatgaatgtgaactgggaagcagcgtattaataaatctgtataaataactgtttaatgggggcctggcgccatgact

SEQ ID NO: 89995 - DNA, 30 bp, Homo sapiens; identical to SEQ ID NO: 29001
  chr16:14729418-14729448
  hypo

SEQ ID NO: 89996 - DNA, 23 bp, Homo sapiens
  chr16:14729655-14729678
  hypo
ttttaatatttttagtagatacg

SEQ ID NO: 89997 - DNA, 87 bp, Homo sapiens
  chr16:14734690-14734777
  hypo
actgccttctagaaacatggacgtaccatacacaaacgcaagcgtggcacagaattcagacttcccgaggcatctctccagatacca

SEQ ID NO: 89998 - DNA, 39 bp, Homo sapiens; identical to SEQ ID NO: 29002
  chr16:14735317-14735356
  hypo

SEQ ID NO: 89999 - DNA, 221 bp, Homo sapiens
  chr16:14761336-14761557
  hypo
gtaggcagaggtctcaggcaccggggacagaagacaaggacattcagcacgggcagccatgctcttcccagcacccagaaaaggcccagggcccggactcctgggtgtggtcatgagaagcgcctccgattcagcctcttctcttcttgtttcaggaccgtgcctcagaggatgtggagccatttctggaaagtatcaacgcaggggctttttgtggccat

SEQ ID NO: 90000 - DNA, 153 bp, Homo sapiens; identical to SEQ ID NO: 29004
  chr16:14763026-14763179
  hypo

SEQ ID NO: 90001 - DNA, 30 bp, Homo sapiens; identical to SEQ ID NO: 29005
  chr16:15051574-15051604
  hypo

SEQ ID NO: 90002 - DNA, 39 bp, Homo sapiens
  chr16:15055594-15055633
  hypo
gttgatgttgagatgaagtctcgctctattccccagtct

SEQ ID NO: 90003 - DNA, 30 bp, Homo sapiens
  chr16:15126912-15126942
  hypo
cccttagcgggctagcgcctctcgggctgg

SEQ ID NO: 90004 - DNA, 30 bp, Homo sapiens
  chr16:15127168-15127198
  hypo
tgtcggcatggcgagcgacaacgtcgatgc

SEQ ID NO: 90005 - DNA, 143 bp, Homo sapiens; identical to SEQ ID NO: 29006
  chr16:15129341-15129484
  hypo

SEQ ID NO: 90006 - DNA, 30 bp, Homo sapiens
  chr16:15130663-15130693
  hypo
cagctactgctcttcgtggagacttagtaa

SEQ ID NO: 90007 - DNA, 30 bp, Homo sapiens
  chr16:15148377-15148407
  hypo
ggacagtaacacaacgcaaggataaagtga

SEQ ID NO: 90008 - DNA, 31 bp, Homo sapiens
  chr16:15191524-15191555
  hypo
acacctgtgaacatatcgcccaatttaagaa

SEQ ID NO: 90009 - DNA, 192 bp, Homo sapiens
  chr16:15541439-15541631
  hypo
tctcagtaaatggtggcgatcatgttaatagaagaggatgtgaagtgggaattgacctgatagtatctgaatagttggagagaaggaagagagagaagttaaatttaagtgggtgaacctcaaggaagaatggaggtgacgatgagcgtggagatttctggaggcgtgcatgagcttcgctgcattggagga

SEQ ID NO: 90010 - DNA, 76 bp, Homo sapiens
  chr16:15604260-15604336
  hypo
cttgctggcttatggcgaggattaaaagaggtgatgggcagagcaggtgcggcggtcataacgagggcaattgcaa

SEQ ID NO: 90011 - DNA, 315 bp, Homo sapiens; identical to SEQ ID NO: 29007
  chr16:15606939-15607254
  hypo

SEQ ID NO: 90012 - DNA, 19 bp, Homo sapiens
  chr16:15607464-15607483
  hypo
gtgtctgcccaggcgcggt

SEQ ID NO: 90013 - DNA, 83 bp, Homo sapiens; identical to SEQ ID NO: 29009
  chr16:15607782-15607865
  hypo

SEQ ID NO: 90014 - DNA, 163 bp, Homo sapiens
  chr16:15608919-15609082
  hypo
cagagccagactccgtctaaaaacaaaacaaaacaaagcaaacgaagtaaattactttggaaaacacattttctggttcccaaagggtgtgctcacgaatacacatttgtggcacaggctgaagtctgtcctcaaggtgtatgatggtcgcagagcaaggctg

SEQ ID NO: 90015 - DNA, 30 bp, Homo sapiens
  chr16:15610771-15610801
  hypo
agctcactgcagcctcgaactcctgaaagc

SEQ ID NO: 90016 - DNA, 23 bp, Homo sapiens
  chr16:15623169-15623192
  hypo
accgcgcccggcggtgtttgttg

SEQ ID NO: 90017 - DNA, 44 bp, Homo sapiens
  chr16:15626663-15626707
  hypo
agtgttgggattacaggcgtgagccaccgcgcctggccagatcc

SEQ ID NO: 90018 - DNA, 92 bp, Homo sapiens; identical to SEQ ID NO: 29011
  chr16:15649665-15649757
  hypo

SEQ ID NO: 90019 - DNA, 31 bp, Homo sapiens
  chr16:15680991-15681022
  hypo
gctgtatctaacccaccgtgtgaatgaactg

SEQ ID NO: 90020 - DNA, 30 bp, Homo sapiens
  chr16:15692836-15692866
  hypo
agtcgtcggtcaggcggagaagctcctgct

SEQ ID NO: 90021 - DNA, 69 bp, Homo sapiens
  chr16:15693240-15693309
  hypo
cctgggcctggttccgtggcttcctagctgctgactctgggtgagctgtaatacgtgactgcctgagat

SEQ ID NO: 90022 - DNA, 31 bp, Homo sapiens; identical to SEQ ID NO: 29013
  chr16:15704351-15704382
  hypo

SEQ ID NO: 90023 - DNA, 84 bp, Homo sapiens
  chr16:15707173-15707257
  hypo
aaaaaggtataagtaatcaaacggaaatctttatagaaaggtggagaggcttgctggtcgcggcggctcatgcctgtaatccca

SEQ ID NO: 90024 - DNA, 10 bp, Homo sapiens
  chr16:15708035-15708045
  hypo
ttttttttaa

SEQ ID NO: 90025 - DNA, 20 bp, Homo sapiens
  chr16:15709469-15709489
  hypo
gactccgtctcaaaaaaaat

SEQ ID NO: 90026 - DNA, 30 bp, Homo sapiens
  chr16:15710112-15710142
  hypo
tccaagtcagttacgcgtctgcttccacat

SEQ ID NO: 90027 - DNA, 46 bp, Homo sapiens
  chr16:15710352-15710398
  hypo
ccctcctcacgtttacgtttctaaaatgtagcgcaaacacacattt

SEQ ID NO: 90028 - DNA, 261 bp, Homo sapiens
  chr16:15723201-15723462
  hypo
gagtttcaacttaagccagaccgcagggggcttgttgggtatcggggacacaggtgactagcaggcaagtgccggaatcaggatacccggggcccactctcttaactgctgcaatcaccaatgacacgtttactttttctaagagctgatttctttctcccttaaatgaagactttgcatgagatcatgtctaacgtacttctgtaactctcagttattaaattatatgtgaagactttcatttaacgtatgggattgccc

SEQ ID NO: 90029 - DNA, 30 bp, Homo sapiens
  chr16:15723815-15723845
  hypo
gtatgtgagaaccctcgccatattctctac

SEQ ID NO: 90030 - DNA, 105 bp, Homo sapiens
  chr16:15728111-15728216
  hypo
aaagggtgaagctgttactgtcgttgattttgagttaacgctgcattaacatctgatttaatattttaaaaatgttttcaaaacgtcgcattaactactttttag

SEQ ID NO: 90031 - DNA, 128 bp, Homo sapiens
  chr16:15729536-15729664
  hypo
aagtgagccctttaaacaaaccggaggtaccacattaaggtgcaaagagttggtgcacaagtgaggcgttagctccgactgtgaaatgtgctcttccaaatgccctggagccccgcttgtgaaatcag

SEQ ID NO: 90032 - DNA, 182 bp, Homo sapiens
  chr16:15729932-15730114
  hypo
gtctaacagtgcgcccgggtgaatcaagctactggtacctccgctaccgccaccaccaccaccaaaacgcattggcgaagtggagggttcattagggcaatgagcacagcagcttactttggggacagaagaaagctgtattttaggctgctgaagagaacgaatatcaggaagtgggactg

SEQ ID NO: 90033 - DNA, 17 bp, Homo sapiens
  chr16:15738993-15739010
  hypo
ctcgaactcctagcctc

SEQ ID NO: 90034 - DNA, 102 bp, Homo sapiens
  chr16:15746762-15746864
  hypo
tccttccgcctcagcctcccaacgtgccggggtgggagagagccaccgcgcctggcctaagctttttaaaatctctaaagcgatctatgcttactgtatata

SEQ ID NO: 90035 - DNA, 100 bp, Homo sapiens
  chr16:15747493-15747593
  hypo
taaaatcagaggtgtgtgtctcgagtgtattttcagacttttttgttagctttaatcatgtaaaacatgcaaaaaaaaaaaaagcatgtggaaacaattt

SEQ ID NO: 90036 - DNA, 95 bp, Homo sapiens
  chr16:15762689-15762784
  hypo
gttgacattggagcccggatcatcctccgttgggagggactgaggtttgctttgtgggttttttgtttgtttgttttgtatttttgagatggagt

SEQ ID NO: 90037 - DNA, 56 bp, Homo sapiens
  chr16:15767614-15767670
  hypo
ccacctgaggtgctgggattgcggcatgaggcaccgcacctggctctgggtgtttg

SEQ ID NO: 90038 - DNA, 137 bp, Homo sapiens
  chr16:15798617-15798754
  hypo
tgatcgtggaacataccgcacatggcgtaaaacaggtgcccagtgaatattagaaaaggaaattatacgtgttaatccaaggtggattattttattaaattgagatgaggtcttgatattgttgcccaggctggtct

SEQ ID NO: 90039 - DNA, 83 bp, Homo sapiens; identical to SEQ ID NO: 29018
  chr16:15799466-15799549
  hypo

SEQ ID NO: 90040 - DNA, 79 bp, Homo sapiens
  chr16:15808721-15808800
  hypo
tctggcctgagagacggggtcctcccgggccacgggctcctcacctgagcttgctcttgagtgcgttcacctcgcggcc

SEQ ID NO: 90041 - DNA, 30 bp, Homo sapiens
  chr16:15814791-15814821
  hypo
cagccgcagtttggcgtcctccgtggcttg

SEQ ID NO: 90042 - DNA, 323 bp, Homo sapiens
  chr16:15820542-15820865
  hypo
ttaattgaacagggagatcatcgcctctcctccaggaacgcaactagaggaaaggacttgccttgcagcaagagagacctcagcgagccgggaagaggctcctccccacagaactgggcaccacccagcactgcccaccacaccaccgcgccacctcctcacctgcagcttgtggactttgtcattgagctccgcccgggcccgctccccatcgctgcacttggactgcagctcctgcacctgcgcctccagcttcttcttcttatgttccacctcctgcttggcctggcccaggacccgcagctccccggccaggtctgcgt

SEQ ID NO: 90043 - DNA, 30 bp, Homo sapiens
  chr16:15826453-15826483
  hypo
ctccaccgcctgtgcgtgtttctgcctcat

SEQ ID NO: 90044 - DNA, 30 bp, Homo sapiens; identical to SEQ ID NO: 52841
  chr16:15952259-15952289
  hypo

SEQ ID NO: 90045 - DNA, 84 bp, Homo sapiens
  chr16:15979201-15979285
  hypo
caaacctttgataatccacaacgctttagggagtgaaaaggtgttgggtttttcattgttgttattttgaaacaatctcgctct

SEQ ID NO: 90046 - DNA, 20 bp, Homo sapiens
  chr16:16022602-16022622
  hypo
gcacacgcacacgcacacgc

SEQ ID NO: 90047 - DNA, 30 bp, Homo sapiens
  chr16:16041984-16042014
  hypo
tacactctgcggcctcgccctagctcctct

SEQ ID NO: 90048 - DNA, 31 bp, Homo sapiens; identical to SEQ ID NO: 29020
  chr16:16047431-16047462
  hypo

SEQ ID NO: 90049 - DNA, 31 bp, Homo sapiens; identical to SEQ ID NO: 29021
  chr16:16080203-16080234
  hypo

SEQ ID NO: 90050 - DNA, 40 bp, Homo sapiens
  chr16:16090900-16090940
  hypo
gaagcctctgttggagggagccgggagctggggaggacat

SEQ ID NO: 90051 - DNA, 30 bp, Homo sapiens
  chr16:16095331-16095361
  hypo
caagcgtgagccaccgcgcccagccagggt

SEQ ID NO: 90052 - DNA, 196 bp, Homo sapiens; identical to SEQ ID NO: 29022
  chr16:16103292-16103488
  hypo

SEQ ID NO: 90053 - DNA, 30 bp, Homo sapiens; identical to SEQ ID NO: 29023
  chr16:16184284-16184314
  hypo

SEQ ID NO: 90054 - DNA, 307 bp, Homo sapiens
  chr16:16208593-16208900
  hypo
tgtggagttttaactccgagtgtctgcagggatcgccgtgtttggctactccatggccgtgtccatcggggggatcttggcttcccgctgtctgcacgtggacctgctgcacagcatcctgcggtcacccatgagcttctttgagcggacccccagtgggaacctggtgaaccgcttctccaaggagctggacacagtggactccatgatcccggaggtcatcaagatgttcatgggctccctgttcaacgtcattggtgcctgcatcgttatcctgctggccacgcccatcgccgccatcatcatc

SEQ ID NO: 90055 - DNA, 207 bp, Homo sapiens; identical to SEQ ID NO: 29025
  chr16:16219543-16219750
  hypo

SEQ ID NO: 90056 - DNA, 225 bp, Homo sapiens
  chr16:16227958-16228183
  hypo
ctctagtaacttataaaaagccgagtcattccttttgggagcctggcaaagggaagagagtccttcttgaccttcggccgaaacacccttaaaggagtgtctctgggcagcgcgcaagggagagggctgtcgagttgggttgaccagatgactgatgcctgaggtggggccgagatgagggcactttggggcagggacaagtccggatgccagcattcccaccac

SEQ ID NO: 90057 - DNA, 280 bp, Homo sapiens
  chr16:16259431-16259711
  hypo
ctgagttgacctcagccggtcccggaagcctccctgacctctccgtacctgaaacccagcgtagaggagaaacagtggcaggatggccacagtggccagtggggtagccactgccaccaccaggctgacctccaggagtccaaaggcgtacatcagcagggaccggagtttgtctggaatgtccacgtcaaccgtgtctgtctccttggagaagcggtttagcaggtgaccaatgggtgtccgctcaaagaagctgatgggagatcgcaccacatcccac

SEQ ID NO: 90058 - DNA, 187 bp, Homo sapiens
  chr16:16282898-16283085
  hypo
agctgtggtgcctgcacggtccatgtggcccacccgccatgtccgcatgtgcttccctccgtagatcccactcccagtcctgctaacacatgtcctctccgcagtcataagctacataaggctctctctaaagacacagcgcattgctaatggtgatgagtgcgcagccccacggctctaggcatca

SEQ ID NO: 90059 - DNA, 22 bp, Homo sapiens
  chr16:16574095-16574117
  hypo
cggccctgaattcacttttgtg

SEQ ID NO: 90060 - DNA, 27 bp, Homo sapiens
  chr16:16663219-16663246
  hypo
tttgttgttgagaggaagtctcgctct

SEQ ID NO: 90061 - DNA, 22 bp, Homo sapiens
  chr16:17078108-17078130
  hypo
gaagtcacttaatacaaatgcc

SEQ ID NO: 90062 - DNA, 76 bp, Homo sapiens
  chr16:17294378-17294454
  hypo
atggccttgaacatgcgctgcaactgccgagaggcacggccgtggaccaccaggacaaaggcgattctgaccgggt

SEQ ID NO: 90063 - DNA, 30 bp, Homo sapiens
  chr16:17357448-17357478
  hypo
gagaggcgcagtcagcgagaattggaggcc

SEQ ID NO: 90064 - DNA, 30 bp, Homo sapiens; identical to SEQ ID NO: 10557
  chr16:17481113-17481143
  hypo

SEQ ID NO: 90065 - DNA, 43 bp, Homo sapiens; identical to SEQ ID NO: 29029
  chr16:17754965-17755008
  hypo

SEQ ID NO: 90066 - DNA, 51 bp, Homo sapiens
  chr16:18076375-18076426
  hypo
ttcatcagaggcaagacgctaggcccagcccatactcgaggggaggaaatc

SEQ ID NO: 90067 - DNA, 30 bp, Homo sapiens; identical to SEQ ID NO: 10559
  chr16:18178839-18178869
  hypo

SEQ ID NO: 90068 - DNA, 198 bp, Homo sapiens
  chr16:18802482-18802680
  hypo
tttttaattaaaaagttaagttcagacaaaagtcacccaacagttgtttactgagcacccatgtaccagacgctagcaaggccctggggtacgaggtgcccacacaggcaccatttagccagttctgtccctgccggttcttccagcttcgtcctctctcacacgtcaatgcccctgctcattcgttgcatttcctct

SEQ ID NO: 90069 - DNA, 250 bp, Homo sapiens
  chr16:18804299-18804549
  hypo
taaaagcaagaattcaattaacgctgggtaagaaaagtcaaaacactaatgagttgtccatgaagccaactgctaagaacgcgctcaactatacgcgacatgaagacactatgcacgaagccttacttggcgagtctgaatttctattaactaagggcagagtgagggagaacaaagagctacttccgtaacattttagtatccagatagtacagcagaaacggttcccggggcaatgggtgctgcatta

SEQ ID NO: 90070 - DNA, 29 bp, Homo sapiens
  chr16:18814226-18814255
  hypo
cttgacacgacctttcttccattagaggt

SEQ ID NO: 90071 - DNA, 34 bp, Homo sapiens; identical to SEQ ID NO: 29032
  chr16:18950991-18951025
  hypo

SEQ ID NO: 90072 - DNA, 31 bp, Homo sapiens
  chr16:19026859-19026890
  hypo
agcaacaatgctgctacgaacactcaagaca

SEQ ID NO: 90073 - DNA, 21 bp, Homo sapiens
  chr16:19040620-19040641
  hypo
ccggcacgagatttgcacttc

SEQ ID NO: 90074 - DNA, 161 bp, Homo sapiens
  chr16:19051021-19051182
  hypo
gatactttaaattgcccgtttatacagaatacatgggtcttcttatacatccctttaataaatccagtagatcctggttttcttcctgcacagtactagatacctctttttgaatatctgaagaaggagatggcggccgggcgaggtggctcatgcctgta

SEQ ID NO: 90075 - DNA, 20 bp, Homo sapiens
  chr16:19075686-19075706
  hypo
gtgtgtgtgtttgagacgaa

SEQ ID NO: 90076 - DNA, 43 bp, Homo sapiens; identical to SEQ ID NO: 29034
  chr16:19184225-19184268
  hypo

SEQ ID NO: 90077 - DNA, 356 bp, Homo sapiens
  chr16:19185276-19185632
  hypo
ttccatccaagtcagcgtgacaagattccctagcacttagcccagggcctgcacatagtaaaagctcgataaatatccattgcatggatgggtagacggaatgaacaaacaagtgcctttttgctgctccgaacaagaacttcagaaacagggaagcagaaaagcacctccaggctccatcctgtcctccaacgctgtttatgttctctctggcatctttcgttttatttctaatttgctctcctcccgcgcctgcatacaacatctccatctgccagtcgctcagatattttgggaacgcagttttgaagcttctcagccacgtgcctggtccacctctccgtgactgagagagg

SEQ ID NO: 90078 - DNA, 90 bp, Homo sapiens
  chr16:19252127-19252217
  hypo
ccctcctcagcctccccgtcatacttgctggcacccaaagtctggaaggggccgaggcatcagggggctgtcatgtcagcactaccccaa

SEQ ID NO: 90079 - DNA, 31 bp, Homo sapiens
  chr16:19252578-19252609
  hypo
agttctgactttgctccgagttaggagtggg

SEQ ID NO: 90080 - DNA, 30 bp, Homo sapiens; identical to SEQ ID NO: 29036
  chr16:19412005-19412035
  hypo

SEQ ID NO: 90081 - DNA, 136 bp, Homo sapiens
  chr16:19431053-19431189
  hypo
ttattgtcatactttgccagaaaaggtcctgtccccagaagacagggtcaagttcaagctatagagtatcttcataaacacttaatgaataacgcaatgaatcatatttgccaagatttttcgggatgacgtggca

SEQ ID NO: 90082 - DNA, 31 bp, Homo sapiens
  chr16:19456420-19456451
  hypo
agcctgggcagtagagcgagactctgttaaa

SEQ ID NO: 90083 - DNA, 31 bp, Homo sapiens
  chr16:19498384-19498415
  hypo
acctgtgacctggtggcgcttaaagctgggg

SEQ ID NO: 90084 - DNA, 131 bp, Homo sapiens
  chr16:19528377-19528508
  hypo
tcaaatgtcaaatcacacaatcgcccagtcccatcagtcgtcctatctactgtgttatcgtgcattaagacaggaatcccgtcagaagtaaactcaatgtccaactccacgcctgttgctccattcttagc

SEQ ID NO: 90085 - DNA, 153 bp, Homo sapiens
  chr16:19606511-19606664
  hypo
cagaggagggaggtgatcccacgtgggatttaacaggctccgtgttgagactagactgtagggcgggggtagagcccggagcctgtggcagcacttgcggtgagaggcaggggtggcttggccccgggaggcggtggagatggtgaggagaga

SEQ ID NO: 90086 - DNA, 242 bp, Homo sapiens
  chr16:19708366-19708608
  hypo
aatgaaggcagagcaggtggtcgccagccagtttgcgagtccgtgcccagcaggtgccagcccgcgtgccctgtgccaaagcgcttttctcttgtagcccgcgggcctgggcgcccacagcacaacctgctccctgatgattgggctctttgccgtcggctctgctgcttctgtgactgtcgctgctctaggctgttgccaaggcaggctcaattttgcccggagtggggaggggaggtgcc

SEQ ID NO: 90087 - DNA, 225 bp, Homo sapiens; identical to SEQ ID NO: 29038
  chr16:19719065-19719290
  hypo

SEQ ID NO: 90088 - DNA, 101 bp, Homo sapiens
  chr16:19743741-19743842
  hypo
tgaacaggcagagagtcggtattttgggattgggcggtggcggcaggagggtctctaaatcaactttttctttctttctttttgagacagggtcttactct

SEQ ID NO: 90089 - DNA, 186 bp, Homo sapiens; identical to SEQ ID NO: 29039
  chr16:19845504-19845690
  hypo

SEQ ID NO: 90090 - DNA, 23 bp, Homo sapiens
  chr16:19848129-19848152
  hypo
ggctgatgcggaatgcttttgaa

SEQ ID NO: 90091 - DNA, 147 bp, Homo sapiens; identical to SEQ ID NO: 29041
  chr16:19883197-19883344
  hypo

SEQ ID NO: 90092 - DNA, 344 bp, Homo sapiens
  chr16:19904163-19904507
  hypo
caaacctgatctccagttactcgttattcctttggtgagtacgaatgcggtgaaaacatgaaaatatgcctgtttctttctactctctttcctcaatgtaccaagtggttcttgaagtgttgtccagagaacctctctggaggtctgcaggatcaaaactgtttgcataatagcactaagaccttattttccgcttttaccgtcattctctcacgagtgtacagtggagtttcccagtggcttttggagatgtgatgttgcaacaggccgatggcgggagcaggcgtgacagtcccgctgtcctctattaagtcagatatttcggaggttctcaaaaatgtaaa

SEQ ID NO: 90093 - DNA, 36 bp, Homo sapiens
  chr16:20702407-20702443
  hypo
attctgataaagaccggcagcgcagctgtgaagggg

SEQ ID NO: 90094 - DNA, 30 bp, Homo sapiens
  chr16:20709533-20709563
  hypo
acaaaccacgtatacgaagtcacctccaat

SEQ ID NO: 90095 - DNA, 165 bp, Homo sapiens
  chr16:20754569-20754734
  hypo
ttgttttttcccctcgcgcatttcccacatagaacagttactcaaaaggcttccagtaaattccatttcagcctcaattttccaggctatgtttctatttcacttaaaaccaaggatgttggctggtgttgtttcatgctgctttcgttgcggccttttatccat

SEQ ID NO: 90096 - DNA, 40 bp, Homo sapiens; identical to SEQ ID NO: 29045
  chr16:20803221-20803261
  hypo

SEQ ID NO: 90097 - DNA, 12 bp, Homo sapiens
  chr16:20816461-20816473
  hypo
actaggccaggc

SEQ ID NO: 90098 - DNA, 212 bp, Homo sapiens; identical to SEQ ID NO: 52865
  chr16:20817421-20817633
  hypo

SEQ ID NO: 90099 - DNA, 31 bp, Homo sapiens
  chr16:20822088-20822119
  hypo
caatccttattgctgccgctgacccaccctc

SEQ ID NO: 90100 - DNA, 101 bp, Homo sapiens
  chr16:20823437-20823538
  hypo
ctctgaggtgacttttattttcgtttctctgtatcatttattttacaattctctgttaatgagtcttttgtaacaaacacgaattactttattaaacaaat

SEQ ID NO: 90101 - DNA, 24 bp, Homo sapiens
  chr16:20902610-20902634
  hypo
gccgattttctttaattagttttt

SEQ ID NO: 90102 - DNA, 158 bp, Homo sapiens
  chr16:21174563-21174721
  hypo
aaaggatgaaacaggaaggctcggtgtcaccttgcttgacctcagctgggaatgtacgtggcaggtgactccactttttgctgttgtggacgtgtccactaatgacctcaaaagcactgcaggccaggcgtggtagctcacacctgtaatcctagtac

SEQ ID NO: 90103 - DNA, 54 bp, Homo sapiens
  chr16:21178769-21178823
  hypo
ggaaacccatctttgcggatttgcctatggccagctctgcgttaaagcagtctc

SEQ ID NO: 90104 - DNA, 32 bp, Homo sapiens
  chr16:21179023-21179055
  hypo
tttttttgaaaaggagacttgcggtggggcgc

SEQ ID NO: 90105 - DNA, 49 bp, Homo sapiens; identical to SEQ ID NO: 29050
  chr16:21515477-21515526
  hypo

SEQ ID NO: 90106 - DNA, 237 bp, Homo sapiens; identical to SEQ ID NO: 29051
  chr16:21569155-21569392
  hypo

SEQ ID NO: 90107 - DNA, 24 bp, Homo sapiens
  chr16:21609382-21609406
  hypo
gctgttgggccaggtgcggtggct

SEQ ID NO: 90108 - DNA, 41 bp, Homo sapiens; identical to SEQ ID NO: 29052
  chr16:21633193-21633234
  hypo

SEQ ID NO: 90109 - DNA, 81 bp, Homo sapiens
  chr16:21635697-21635778
  hypo
cttgtaaaggaaacttcgtatgtgttgagatttggaaataggtgaaatgctaaatttaaagaaatatgggccagtcgtggt

SEQ ID NO: 90110 - DNA, 128 bp, Homo sapiens
  chr16:21666677-21666805
  hypo
atacctgtgtgaaggcgacatgtataatgactactacgttctggatgacgctgtctttgttctcaaaccagtataaacacgtggaggtcgaagtcttcagagtccgcaccctccgggatgtgcccttg

SEQ ID NO: 90111 - DNA, 430 bp, Homo sapiens; identical to SEQ ID NO: 52874
  chr16:21831534-21831964
  hypo

SEQ ID NO: 90112 - DNA, 81 bp, Homo sapiens; identical to SEQ ID NO: 29056
  chr16:22083798-22083879
  hypo

SEQ ID NO: 90113 - DNA, 17 bp, Homo sapiens
  chr16:22084118-22084135
  hypo
ctccatctcaaaaaaaa

SEQ ID NO: 90114 - DNA, 30 bp, Homo sapiens
  chr16:22176858-22176888
  hypo
ttcccacaggtggtcggtttctgggtctgc

SEQ ID NO: 90115 - DNA, 44 bp, Homo sapiens
  chr16:22216592-22216636
  hypo
ttttttgtttttgtttttttgcgacggagtctcattccttcacc

SEQ ID NO: 90116 - DNA, 43 bp, Homo sapiens
  chr16:22216815-22216858
  hypo
cctcaggtgatctgccggcctcggcctcccaaagtgctgggaa

SEQ ID NO: 90117 - DNA, 231 bp, Homo sapiens; identical to SEQ ID NO: 52881
  chr16:22217231-22217462
  hypo

SEQ ID NO: 90118 - DNA, 124 bp, Homo sapiens
  chr16:22236966-22237090
  hypo
ccttgtaggaccttcgcctctgcatttgtccagtaactctggctgtgccggatactgcttgggtaaaacgggcaccccaggaacatggcagacgaagatctcatcttccgcctggaaggcgttg

SEQ ID NO: 90119 - DNA, 30 bp, Homo sapiens
  chr16:22277955-22277985
  hypo
gtgcggctttggcccgccagacagccaggc

SEQ ID NO: 90120 - DNA, 91 bp, Homo sapiens; identical to SEQ ID NO: 29058
  chr16:22285048-22285139
  hypo

SEQ ID NO: 90121 - DNA, 731 bp, Homo sapiens
  chr16:22325982-22326713
  hypo
tgtttggaagcccttgaggaccggggaacacgggcgtaatggacatggaggtggcgcagggagctcatcctgttctctccgtagcttattaggaccttagaaactcccttccgctctggggaacttagaaaaggcatcctgggcctgtctgctttaaggactctgctggctctggcgcctgggactctaatccccctcaagcctctgggctgggcaggcacgagcaagtataagccgttccctggcgtgtgcaggcagctctgggagggacacggttggaacggaatttaaacgacctgtgctaggaaaggaagggagagtggaaaacccctatacggagttctctggtcttctggcaggggctgagacggcagtccagcaagggtcacaggcctgacggtatgacctcttccccttcccaccgcaggtgcggttctcccggccggagtcagagcaggcccgccagcgccgtgtgcagtcctatgagttcctgcagaagaagcacgcagaggagccctgggtccacctgcattactatggcctgagggtgagcggggcttcgtggggtcctgggggaaacacctcggtgcccggaagggtcatggtgtggcctccgtgtctcaccttgaacttaagtcaaattcatgagtcatagccacagatagaggatcgagtcctgtgggcagtttacacttcactccagccgagccacttagcgtgggccccaggag

SEQ ID NO: 90122 - DNA, 30 bp, Homo sapiens; identical to SEQ ID NO: 29060
  chr16:22333249-22333279
  hypo

SEQ ID NO: 90123 - DNA, 193 bp, Homo sapiens; identical to SEQ ID NO: 29061
  chr16:22358430-22358623
  hypo

SEQ ID NO: 90124 - DNA, 30 bp, Homo sapiens; identical to SEQ ID NO: 29062
  chr16:22398760-22398790
  hypo

SEQ ID NO: 90125 - DNA, 30 bp, Homo sapiens
  chr16:22435187-22435217
  hypo
atgcagtgcacacacgcatacccgcacacg

SEQ ID NO: 90126 - DNA, 67 bp, Homo sapiens
  chr16:22792475-22792542
  hypo
gggttatgcttacatctgaggcggaaggtcgggaggagactagggcggagtatgtgcctggggtgac

SEQ ID NO: 90127 - DNA, 465 bp, Homo sapiens; identical to SEQ ID NO: 52887
  chr16:22825885-22826350
  hypo

SEQ ID NO: 90128 - DNA, 30 bp, Homo sapiens
  chr16:23093084-23093114
  hypo
ctgctcccagcctctcgtgcaggctgtgct

SEQ ID NO: 90129 - DNA, 30 bp, Homo sapiens
  chr16:23093853-23093883
  hypo
aacgccaggcatcatcgggggcaagctgaa

SEQ ID NO: 90130 - DNA, 203 bp, Homo sapiens; identical to SEQ ID NO: 52889
  chr16:23193695-23193898
  hypo

SEQ ID NO: 90131 - DNA, 204 bp, Homo sapiens; identical to SEQ ID NO: 52890
  chr16:23194200-23194404
  hypo

SEQ ID NO: 90132 - DNA, 30 bp, Homo sapiens; identical to SEQ ID NO: 52891
  chr16:23194607-23194637
  hypo

SEQ ID NO: 90133 - DNA, 361 bp, Homo sapiens; identical to SEQ ID NO: 52892
  chr16:23313377-23313738
  hypo

SEQ ID NO: 90134 - DNA, 297 bp, Homo sapiens; identical to SEQ ID NO: 52893
  chr16:23313779-23314076
  hypo

SEQ ID NO: 90135 - DNA, 97 bp, Homo sapiens
  chr16:23332277-23332374
  hypo
gaacttgagagtggtggtggccggatctagatgagtgagcttaaggagatcagagattatgaattgctgaattctcttcctggactttattttattt

SEQ ID NO: 90136 - DNA, 30 bp, Homo sapiens; identical to SEQ ID NO: 29065
  chr16:23383324-23383354
  hypo

SEQ ID NO: 90137 - DNA, 185 bp, Homo sapiens; identical to SEQ ID NO: 29066
  chr16:23402108-23402293
  hypo

SEQ ID NO: 90138 - DNA, 156 bp, Homo sapiens
  chr16:23402870-23403026
  hypo
tgcaaaacaagagccagaagccggttgagcctggctcagccctgtggtcactgaggacgaagctctggctgtgtccccagggagctgatctttcaggcttctaccacccgctctcctgaccaccccgagaggtgcgttaggctaaagagcagacaa

SEQ ID NO: 90139 - DNA, 30 bp, Homo sapiens; identical to SEQ ID NO: 29067
  chr16:23420552-23420582
  hypo

SEQ ID NO: 90140 - DNA, 54 bp, Homo sapiens
  chr16:23444900-23444954
  hypo
caagcaaggcatcatagagtccggtaagctgccggtccagggataggtcacttt

SEQ ID NO: 90141 - DNA, 30 bp, Homo sapiens
  chr16:23494240-23494270
  hypo
taccgagtgcatcatcgtcatcagtggtgt

SEQ ID NO: 90142 - DNA, 31 bp, Homo sapiens
  chr16:23496846-23496877
  hypo
cataagaaatgaaaatcgatgttcacacaaa

SEQ ID NO: 90143 - DNA, 36 bp, Homo sapiens
  chr16:23510925-23510961
  hypo
aatcccagaactttgagaggccgaggcgggaagatc

SEQ ID NO: 90144 - DNA, 73 bp, Homo sapiens
  chr16:23511602-23511675
  hypo
gcaagggaaggcccaagctaccggagaggagccaggagccgagctgcctcacggggaacatgctgagctgttg

SEQ ID NO: 90145 - DNA, 43 bp, Homo sapiens
  chr16:23539289-23539332
  hypo
aggtgaacaggtcatgcaggccgagcccttatgcacagatgag

SEQ ID NO: 90146 - DNA, 36 bp, Homo sapiens
  chr16:23551962-23551998
  hypo
aacataaaggtttgggctgagcgcagtggctcatgc

SEQ ID NO: 90147 - DNA, 211 bp, Homo sapiens
  chr16:23595587-23595798
  hypo
aaaaaaaagaaacccagtgcccgtcagcagtcactccccatcctccctagctctggcaaccacccgtgtactttctatctctggatttgcctcttcttgacatttcatgtaaatggtatataacgtgtcatcttctgtgtctggcttctttcactcggcacgttctcaaggttcgtgtgctgtaacacacgtcacccatgcattttttttt

SEQ ID NO: 90148 - DNA, 30 bp, Homo sapiens
  chr16:23641371-23641401
  hypo
ggatgaagaaaggcccgtctttgtatgctg

SEQ ID NO: 90149 - DNA, 42 bp, Homo sapiens; identical to SEQ ID NO: 29068
  chr16:23689210-23689252
  hypo

SEQ ID NO: 90150 - DNA, 173 bp, Homo sapiens
  chr16:23702178-23702351
  hypo
cctcctggcctctgagtctggcgggtagtagggcaggaagaggctctcagaggcgcagctcctcatggctcggtgcgtgtggaggagcagccgtgggaagcggtttgtgaagtactggacgaagccatcagggacttggccgagtgcctgtcgcacctcaactgggagctccc

SEQ ID NO: 90151 - DNA, 580 bp, Homo sapiens; identical to SEQ ID NO: 52900
  chr16:23765897-23766477
  hypo

SEQ ID NO: 90152 - DNA, 291 bp, Homo sapiens; identical to SEQ ID NO: 52901
  chr16:23846762-23847053
  hypo

SEQ ID NO: 90153 - DNA, 201 bp, Homo sapiens; identical to SEQ ID NO: 10585
  chr16:23847310-23847511
  hypo

SEQ ID NO: 90154 - DNA, 86 bp, Homo sapiens; identical to SEQ ID NO: 10586
  chr16:23847788-23847874
  hypo

SEQ ID NO: 90155 - DNA, 544 bp, Homo sapiens; identical to SEQ ID NO: 52904
  chr16:23847933-23848477
  hypo

SEQ ID NO: 90156 - DNA, 87 bp, Homo sapiens
  chr16:24079283-24079370
  hypo
agagagagagagctgaggaagaggttattttccatgcaggttggggtcacccttctggtggtgatcgagctcactgtgtgctggttt

SEQ ID NO: 90157 - DNA, 143 bp, Homo sapiens; identical to SEQ ID NO: 29074
  chr16:24118920-24119063
  hypo

SEQ ID NO: 90158 - DNA, 63 bp, Homo sapiens
  chr16:24131610-24131673
  hypo
caaaatctacagaactgtgcacgtgagattggtgcactttgcggtgcccacctcaagtttcaa

SEQ ID NO: 90159 - DNA, 43 bp, Homo sapiens
  chr16:24288801-24288844
  hypo
aaaggtaaagggagctgagtgcggtggcttacacccgtgatcc

SEQ ID NO: 90160 - DNA, 45 bp, Homo sapiens; identical to SEQ ID NO: 10589
  chr16:24354627-24354672
  hypo

SEQ ID NO: 90161 - DNA, 233 bp, Homo sapiens
  chr16:24372757-24372990
  hypo
ctatggttggtccttttatttcggagccttctctttcatcatcgcagaaattgtaggagtggttgccgtgcacatctatattgaaaaacatcagcagttacgagccaaatcccactcggagttcctgaagaaatctacttttgcccgcctcccaccctacaggtatcgattccggaggcggtcaagttctcgctccaccgagcccagatcccgagacctgtcccccatcagca

SEQ ID NO: 90162 - DNA, 30 bp, Homo sapiens; identical to SEQ ID NO: 29076
  chr16:24547942-24547972
  hypo

SEQ ID NO: 90163 - DNA, 2 bp, Homo sapiens
  chr16:24587542-24587544
  hypo
tg

SEQ ID NO: 90164 - DNA, 164 bp, Homo sapiens
  chr16:24739329-24739493
  hypo
agtcataatcagttaacgttttggtgcatatgtttcatgactttctgtgcattcattcactagcttaacctatcggagaggacaggaacccaacatgtctagggaagttttgtttgtttttaacgggagagattcaagcatgttgtaaagccagttgaagctgg

SEQ ID NO: 90165 - DNA, 30 bp, Homo sapiens
  chr16:24758307-24758337
  hypo
aaacgcattcttgaacggtacaagtaaatc

SEQ ID NO: 90166 - DNA, 81 bp, Homo sapiens; identical to SEQ ID NO: 29077
  chr16:24772183-24772264
  hypo

SEQ ID NO: 90167 - DNA, 21 bp, Homo sapiens
  chr16:24813085-24813106
  hypo
gtgctcagctgctactactct

SEQ ID NO: 90168 - DNA, 30 bp, Homo sapiens
  chr16:24834904-24834934
  hypo
actcattctccagccggaccgatctcaatc

SEQ ID NO: 90169 - DNA, 762 bp, Homo sapiens; identical to SEQ ID NO: 29079
  chr16:24837122-24837884
  hypo

SEQ ID NO: 90170 - DNA, 31 bp, Homo sapiens
  chr16:24937029-24937060
  hypo
cattatcacatgagaacgagcatatgatgta

SEQ ID NO: 90171 - DNA, 30 bp, Homo sapiens
  chr16:24946780-24946810
  hypo
ggctgcttacctcggcgcagtgtatgcggg

SEQ ID NO: 90172 - DNA, 154 bp, Homo sapiens; identical to SEQ ID NO: 29080
  chr16:25006924-25007078
  hypo

SEQ ID NO: 90173 - DNA, 126 bp, Homo sapiens
  chr16:25009669-25009795
  hypo
gaggggaggctggcaaggcagcgcccaggacagcggcacaggtggcggggccttggacagagggtggggtccaggcaggtgggtggtgacggcaaccatgaccacgggtcaacctgggcctcagac

SEQ ID NO: 90174 - DNA, 19 bp, Homo sapiens
  chr16:25018660-25018679
  hypo
agaaagtagttcattacga

SEQ ID NO: 90175 - DNA, 30 bp, Homo sapiens
  chr16:25104120-25104150
  hypo
agggcctccgccgggcgcggtggctcatgc

SEQ ID NO: 90176 - DNA, 30 bp, Homo sapiens
  chr16:25152007-25152037
  hypo
ggagatgcgggtcagcgtatctggttgcgc

SEQ ID NO: 90177 - DNA, 85 bp, Homo sapiens
  chr16:25168833-25168918
  hypo
cctgggtgatacaatgcaacgctgtctcaaaaaaaaccagcaacaacaataaaaaaaaaactgattaggacgataaagtatataa

SEQ ID NO: 90178 - DNA, 30 bp, Homo sapiens; identical to SEQ ID NO: 29081
  chr16:25266538-25266568
  hypo

SEQ ID NO: 90179 - DNA, 30 bp, Homo sapiens; identical to SEQ ID NO: 29082
  chr16:25531745-25531775
  hypo

SEQ ID NO: 90180 - DNA, 575 bp, Homo sapiens; identical to SEQ ID NO: 52912
  chr16:25702789-25703364
  hypo

SEQ ID NO: 90181 - DNA, 495 bp, Homo sapiens; identical to SEQ ID NO: 52913
  chr16:25703627-25704122
  hypo

SEQ ID NO: 90182 - DNA, 31 bp, Homo sapiens
  chr16:25824622-25824653
  hypo
ttaggatgtggagcaactgggcggaacatta

SEQ ID NO: 90183 - DNA, 21 bp, Homo sapiens
  chr16:26176739-26176760
  hypo
aaaattgtgccataggctggg

SEQ ID NO: 90184 - DNA, 31 bp, Homo sapiens
  chr16:26977613-26977644
  hypo
gagagattccgtctcaaaaaaaaaaaaaaaa

SEQ ID NO: 90185 - DNA, 30 bp, Homo sapiens
  chr16:27063191-27063221
  hypo
ccctctgctctgccccgggggtcagtacca

SEQ ID NO: 90186 - DNA, 159 bp, Homo sapiens
  chr16:27063489-27063648
  hypo
gagaatgccgggagccgaatcactgccgtgctggtaataagtccaaatgaaagatattatgtcaccgcgtttgaattaaacagatgaactatagtcctagaccattacaaatgaaccaatctgctggacggcttccaagtgctccgcgctgagcgcccc

SEQ ID NO: 90187 - DNA, 144 bp, Homo sapiens; identical to SEQ ID NO: 10593
  chr16:27121250-27121394
  hypo

SEQ ID NO: 90188 - DNA, 31 bp, Homo sapiens
  chr16:27186525-27186556
  hypo
gttctcctgtctagcccgccactactggact

SEQ ID NO: 90189 - DNA, 30 bp, Homo sapiens
  chr16:27219625-27219655
  hypo
ctacaaagccgcacacgtgaggccaccttg

SEQ ID NO: 90190 - DNA, 30 bp, Homo sapiens
  chr16:27230271-27230301
  hypo
ccgcccacagatcccggagttgaagcagga

SEQ ID NO: 90191 - DNA, 33 bp, Homo sapiens
  chr16:27242668-27242701
  hypo
ggcctgtggccgggcacgctggctcacgcctgt

SEQ ID NO: 90192 - DNA, 478 bp, Homo sapiens
  chr16:27244719-27245197
  hypo
ggtcgccttgcctcacggctggcctcggaggcagtgagagagagacacggcaggcaggaaccgctggggaagacaggttcctgcacacgcaggtgtgtgctcagctcagcacctgctcctcaaccttggtggctaataatccccaggagaagatctaaaaggaatgattccaccgcctggttctcagagatttggattcaacagatcgtgagtggggctgaaatgtctgaattatttttcacctctgcagttattatcattgcatctaggcctgagaaccactcttagccatgtgtttgagcagaaggctgagcaaatagctctgaagcctggtagaacagtacctgtcaaatgtgcacgtgcaaaggattcagtgggcacctggcaaaaatgcagattcggactcagcagtctagagtggggactgggaccgggcctttctaacaagctcccaggcgatgctgctgctgctgccttt

SEQ ID NO: 90193 - DNA, 166 bp, Homo sapiens
  chr16:27268603-27268769
  hypo
attagaaagatgggcccgtgtaagattgtgaagaggcttgaatgctcagctcaggagtaccggttaacaagttacatggtattgtacctatgtcactggtccctgatcaacacagcaccagagcgccctgggaacagggaaacggtactcacggtcatggaccttg

SEQ ID NO: 90194 - DNA, 259 bp, Homo sapiens; identical to SEQ ID NO: 10595
  chr16:27280120-27280379
  hypo

SEQ ID NO: 90195 - DNA, 31 bp, Homo sapiens
  chr16:27284486-27284517
  hypo
cactcctgatgttttccgttttctccgtaag

SEQ ID NO: 90196 - DNA, 37 bp, Homo sapiens
  chr16:27309234-27309271
  hypo
gtgagccaccgtgtccggacaaaaagactagtttttt

SEQ ID NO: 90197 - DNA, 180 bp, Homo sapiens
  chr16:27356583-27356763
  hypo
taagtgcccaggaaggcgtattgagatgaggtgtgcttgctggaaggcatgcctgctgctgattgaaaaccgaactgggaacattccttccattctgtgtccactggtcagctgctgcggctttggatggtcttgaccgtggaaggctgaccttcttctggtacccggagtccctgcagg

SEQ ID NO: 90198 - DNA, 30 bp, Homo sapiens
  chr16:27474642-27474672
  hypo
gccctcattccaggccgacctgggcactgc

SEQ ID NO: 90199 - DNA, 185 bp, Homo sapiens; identical to SEQ ID NO: 29088
  chr16:27475123-27475308
  hypo

SEQ ID NO: 90200 - DNA, 390 bp, Homo sapiens; identical to SEQ ID NO: 29089
  chr16:27475664-27476054
  hypo

SEQ ID NO: 90201 - DNA, 30 bp, Homo sapiens
  chr16:27481809-27481839
  hypo
agaactaagcaaaacgccccacttcttccc

SEQ ID NO: 90202 - DNA, 30 bp, Homo sapiens; identical to SEQ ID NO: 29090
  chr16:27509978-27510008
  hypo

SEQ ID NO: 90203 - DNA, 339 bp, Homo sapiens
  chr16:27510215-27510554
  hypo
tggtacagctactggcggcaaaattcctcaagtgaccaagcgatcaggctctgccatgggtgccggggctgctcggtcccactgagaaatctggcctggacacagagctgtctccctgcaagtcccttactgggccgtcacagcccactggtctctgttgctacctggagggctgctccgtgcccccttcccactatctgagaatttcccagttgcttgtgagtcctgagggcttccatctggaaaaggtaagcagctttcattaatctacccttgctgagagtggcgtcatgggactcctgccaggcacacgtccaaacaaaccggcagaggatttag

SEQ ID NO: 90204 - DNA, 30 bp, Homo sapiens
  chr16:27511236-27511266
  hypo
gtcacatgcacacgacggaagccccttcca

SEQ ID NO: 90205 - DNA, 30 bp, Homo sapiens; identical to SEQ ID NO: 29092
  chr16:27523535-27523565
  hypo

SEQ ID NO: 90206 - DNA, 19 bp, Homo sapiens
  chr16:27539545-27539564
  hypo
agatcgcaccactgcacta

SEQ ID NO: 90207 - DNA, 56 bp, Homo sapiens; identical to SEQ ID NO: 29094
  chr16:27539975-27540031
  hypo

SEQ ID NO: 90208 - DNA, 184 bp, Homo sapiens; identical to SEQ ID NO: 29095
  chr16:27560715-27560899
  hypo

SEQ ID NO: 90209 - DNA, 93 bp, Homo sapiens
  chr16:27640058-27640151
  hypo
tcaacggtgccaattcggagctgaaatcatcaccgcggaaagctattcactctgacttctccagaagtgcctcccacacggaggggacacacg

SEQ ID NO: 90210 - DNA, 30 bp, Homo sapiens
  chr16:27714665-27714695
  hypo
aaatgatgaaggcacgctctgctgggttta

SEQ ID NO: 90211 - DNA, 31 bp, Homo sapiens
  chr16:27735316-27735347
  hypo
ttctctgatttctgatcgttgaggttgtttg

SEQ ID NO: 90212 - DNA, 219 bp, Homo sapiens
  chr16:27750003-27750222
  hypo
tgtgaagaaatcatccggagaacttgttctgagtccagaagttacctacaggctgccttgaggcagtggtcctcacacggcatcctcctggctcccttccaactgcagctgccgtgaacatgggacagtccccgcatgtggacagtgccctgcctcaggtgctcgtggggtgctctgccgtgggagcacactcagctcgtgcatgtgttggggcatcag

SEQ ID NO: 90213 - DNA, 30 bp, Homo sapiens
  chr16:27761074-27761104
  hypo
agcagccggcacagcgacttgcccccctcc

SEQ ID NO: 90214 - DNA, 636 bp, Homo sapiens
  chr16:27780833-27781469
  hypo
tactagtggtgcacatggaagcgcctgagtccatgcccttgacctccatctcatgccgccccaggccgctgcagctgttgaggtgggcgaggccttggccaagtcacgtgccacccctgaaagccgtggaccagtgtccgctgtagcagggggctcgcctgtcttgtcctctgctacctgcccagcgcccacacagcacctgatatgggaaatggacctcggtcaggtggctctgcgaaaggctccccatggtgagcacagctgccagcagctccggtcacgtcagcaccgcttctgtccccacatggcctgcctcccttcagtcatgttatttcttttgtttgccaggccaagattgtccacgtctccctggatggcctgtgcgtctccccgccagagggctttctcatccggaaggggccaggcaactgccactttgattttgctcaagaaatcctcttcgtggactacctacgggctcagctgctgccccagccggccaggaggtgaggagaaagtgggcgccacacacagcccctcccggcccctgggcccgcttgctttgcaagttgctctgatgtacattccgaaagggttttgaaacgatgatcaaacgcattgcttttcaacttagtc

SEQ ID NO: 90215 - DNA, 31 bp, Homo sapiens
  chr16:27786949-27786980
  hypo
cctcatggtgagaagacgtggttggttgtgg

SEQ ID NO: 90216 - DNA, 30 bp, Homo sapiens; identical to SEQ ID NO: 29096
  chr16:27788240-27788270
  hypo

SEQ ID NO: 90217 - DNA, 126 bp, Homo sapiens
  chr16:27791100-27791226
  hypo
tcccagtagtgggtaatttctcgttgcaaatattaatccgttgtttttctggcgcccagcccggcccgccgcagtactgtactcgaggtacgttcctatgcaaccgagagccccggcaaatacttc

SEQ ID NO: 90218 - DNA, 43 bp, Homo sapiens
  chr16:27945906-27945949
  hypo
atttccaaggaaaggagaatacggaagagagagtggagaagtt

SEQ ID NO: 90219 - DNA, 173 bp, Homo sapiens
  chr16:28043669-28043842
  hypo
gaaaattagaaaattacaaaacgaataacaaacacgaatgacaacatgcagagctggcgtagtgagagtgagacaaatagattcatacgttgatgtatgcacgacgcgctcttccaggcgtctcagcccatcctggggctggcggcttctccgttgatgtctccagcctgatc

SEQ ID NO: 90220 - DNA, 14 bp, Homo sapiens
  chr16:28074027-28074041
  hypo
ggaggagggggcga

SEQ ID NO: 90221 - DNA, 149 bp, Homo sapiens; identical to SEQ ID NO: 52923
  chr16:28074076-28074225
  hypo

SEQ ID NO: 90222 - DNA, 519 bp, Homo sapiens; identical to SEQ ID NO: 10599
  chr16:28074417-28074936
  hypo

SEQ ID NO: 90223 - DNA, 299 bp, Homo sapiens; identical to SEQ ID NO: 10600
  chr16:28074955-28075254
  hypo

SEQ ID NO: 90224 - DNA, 135 bp, Homo sapiens; identical to SEQ ID NO: 29101
  chr16:28104121-28104256
  hypo

SEQ ID NO: 90225 - DNA, 157 bp, Homo sapiens; identical to SEQ ID NO: 29102
  chr16:28116152-28116309
  hypo

SEQ ID NO: 90226 - DNA, 30 bp, Homo sapiens; identical to SEQ ID NO: 29103
  chr16:28128324-28128354
  hypo

SEQ ID NO: 90227 - DNA, 165 bp, Homo sapiens; identical to SEQ ID NO: 29104
  chr16:28128686-28128851
  hypo

SEQ ID NO: 90228 - DNA, 30 bp, Homo sapiens
  chr16:28224119-28224149
  hypo
gctgaggttgagcccgcgggtgtgcctact

SEQ ID NO: 90229 - DNA, 30 bp, Homo sapiens; identical to SEQ ID NO: 29105
  chr16:28224647-28224677
  hypo

SEQ ID NO: 90230 - DNA, 31 bp, Homo sapiens
  chr16:28229877-28229908
  hypo
acaagggaaccgggcacggtggctcacgcct

SEQ ID NO: 90231 - DNA, 30 bp, Homo sapiens
  chr16:28237436-28237466
  hypo
gtgagccactgcgcccgacctaaggttcta

SEQ ID NO: 90232 - DNA, 30 bp, Homo sapiens
  chr16:28331434-28331464
  hypo
gcagctgggcctggcgctggacttcatgca

SEQ ID NO: 90233 - DNA, 30 bp, Homo sapiens; identical to SEQ ID NO: 29107
  chr16:28331856-28331886
  hypo

SEQ ID NO: 90234 - DNA, 142 bp, Homo sapiens
  chr16:28332353-28332495
  hypo
tagactaggcaggacgcggcccggcacctggtccgtccccggcgggctggtgagggggccaccaaagacccctagcgcggcctggtgagcgggggcttggcccagaggagccaagccgcacagacccgagaattcggaggcc

SEQ ID NO: 90235 - DNA, 25 bp, Homo sapiens
  chr16:28344914-28344939
  hypo
gaccctgtctcgaaaaaaaaaaaaa

SEQ ID NO: 90236 - DNA, 30 bp, Homo sapiens; identical to SEQ ID NO: 29110
  chr16:28583870-28583900
  hypo

SEQ ID NO: 90237 - DNA, 112 bp, Homo sapiens
  chr16:28585538-28585650
  hypo
gtgctgaggtccagtgcggtgtttaaccttgatcctaggacattctaggaccaaggctggcccttttcccatgattcttccctcacggcgagctgcccgcatgcacagtgtg

SEQ ID NO: 90238 - DNA, 121 bp, Homo sapiens
  chr16:28822779-28822900
  hypo
agagaccattatgtagtgctttttctctcatagccagaatacaagtcagaatcaaggagagatattagatctcgttcttctcgctgtttttttttcttttcttttcttttttgagacaaag

SEQ ID NO: 90239 - DNA, 130 bp, Homo sapiens
  chr16:28845817-28845947
  hypo
ctcttccaggctcccttcctccgcagcgctcggaccaacaccagccagcctcagccccgccgatgatgcaggccgccgcggctgctggcccgcctctggtggctgccacgccctattcttcctacatccc

SEQ ID NO: 90240 - DNA, 30 bp, Homo sapiens; identical to SEQ ID NO: 29112
  chr16:28877866-28877896
  hypo

SEQ ID NO: 90241 - DNA, 219 bp, Homo sapiens
  chr16:28878636-28878855
  hypo
tttctcctgacttaggcctctcggccccgactcagcatcccctgctcttctatcacagacgtccggacaaccacagccctggagatgcctgaccgggagaacacgtttgtggttaaggtaggaattcaacttcccagccgccggcagtgcttgtgttaaggagaaagccctcagcgcatttaagcaagtggcgtcgccgaaaggaggtatatatatgtg

SEQ ID NO: 90242 - DNA, 31 bp, Homo sapiens
  chr16:28880885-28880916
  hypo
aataatcatgaccccacgcaggccccaagca

SEQ ID NO: 90243 - DNA, 30 bp, Homo sapiens
  chr16:28884315-28884345
  hypo
acccatcctggcctcgtctttgccctccgt

SEQ ID NO: 90244 - DNA, 30 bp, Homo sapiens; identical to SEQ ID NO: 29113
  chr16:28887815-28887845
  hypo

SEQ ID NO: 90245 - DNA, 30 bp, Homo sapiens
  chr16:28912154-28912184
  hypo
cctgctgcttcgcccgtgtggagccctcgc

SEQ ID NO: 90246 - DNA, 232 bp, Homo sapiens
  chr16:28914704-28914936
  hypo
tgccagtcattgggctcgacgaaatcctcaagttcgttgctcggaactacctagagggtaaggagtgccctctctgtcccaagccctggccccaccacagccccttccccatgacgccgcccccgccccgccccgtactttgcaggtggtaagtttctcagccctggcaggacctgtgtccgccccgttccccctgcgcctgcaggggccacatctccggggcagccccact

SEQ ID NO: 90247 - DNA, 30 bp, Homo sapiens; identical to SEQ ID NO: 29115
  chr16:28915181-28915211
  hypo

SEQ ID NO: 90248 - DNA, 75 bp, Homo sapiens
  chr16:28915761-28915836
  hypo
ttgaaaataaacgacggaaaagtctggccttgcctctgtgcaagcttggaggcctgggtcgccgctgtggacaag

SEQ ID NO: 90249 - DNA, 531 bp, Homo sapiens
  chr16:28922054-28922585
  hypo
accctcttacctacctggcaccggttccagggtgtggcctgagcagctggggacaggacaggttccttgacttcccacgtgcccccttccaccacgtgcaactgattcctgctggactcctcgccctcctgccctagggcccccaggtactcaccatctgcagctgcacccgctcctgggcctggctcacggtcccttgcagggtccgcagcagctgctctgagttctggacctgggccaggagcacctgcatctgggttggagggagggcgaaagtgagggcaagggcatgtcagggggcggcaggtagccagaggccggctggggctgcagcagcggcagggacccacctgcttggcacagtcctcattgctccgtctcaggccctcttggagctcgtcccgctcgcgactgacgctctccaggtccttctgcagctgtcggccctgccacagaccctgccttcagcctgcatctcccaggaacttggcccccctcaccacacttctcgtggcccacctctgcagggag

SEQ ID NO: 90250 - DNA, 117 bp, Homo sapiens
  chr16:28925775-28925892
  hypo
agcgaaggcctcagcggctggacccccatctccgctcagctcctccagaggctccagcgggggcgatggatcccgggacaggggcagcaactccgtggagccgtgcagggaaggggc

SEQ ID NO: 90251 - DNA, 12 bp, Homo sapiens
  chr16:28947335-28947347
  hypo
gccaccgcgccc

SEQ ID NO: 90252 - DNA, 30 bp, Homo sapiens; identical to SEQ ID NO: 29119
  chr16:29000905-29000935
  hypo

SEQ ID NO: 90253 - DNA, 114 bp, Homo sapiens; identical to SEQ ID NO: 29120
  chr16:29001661-29001775
  hypo

SEQ ID NO: 90254 - DNA, 30 bp, Homo sapiens; identical to SEQ ID NO: 10605
  chr16:29110443-29110473
  hypo

SEQ ID NO: 90255 - DNA, 41 bp, Homo sapiens
  chr16:29118828-29118869
  hypo
aacaccctggctgccacgccctggcccggcccccccgacct

SEQ ID NO: 90256 - DNA, 30 bp, Homo sapiens; identical to SEQ ID NO: 29122
  chr16:29153312-29153342
  hypo

SEQ ID NO: 90257 - DNA, 30 bp, Homo sapiens
  chr16:29166968-29166998
  hypo
gtgtcttcatggaccgtggaagtgccacat

SEQ ID NO: 90258 - DNA, 445 bp, Homo sapiens
  chr16:29169931-29170376
  hypo
agccagagggctgggaaacagcggagatggcgcgccccacctgggagaacacaggcagctggaggacgtcggcggtgttactgtcacggtcacctggactgggcggttgcaggcggccggatgctggacccgcagcgtgagctccacggccgcagcagggaggcgagagccctcaaccagggacggagccgccctgtccacggagcctccagacccaccagaacgcctgggtcaccgcggctcccgggcgggcctcactgcgctgggacacgtcaggacacgtggcagctcccagcgcggtggaaggcctgagccctgggaacactggctggaaaatggaactcggaggacagagcttgtcgacggcgtctcgtatgaatcctggaggagacgcccgtgtcgagggcaattagaatccaggcgtgagccccggctggctgcgtcc

SEQ ID NO: 90259 - DNA, 189 bp, Homo sapiens
  chr16:29230266-29230455
  hypo
gcgtgcacacagacacggactcacataaatgcaatccacatgcactcacaataggctcttatgcacagaccctcacactcatgtgaacacactcatgcacacgcaagacttacatattcacactcacacccgtgggcacacccagacatggatacacactcatacaggcacacacgtatccagacaccc

SEQ ID NO: 90260 - DNA, 106 bp, Homo sapiens
  chr16:29231512-29231618
  hypo
gctgctgttcctggtccgtcttactgtggagtgtattagactgcgggggcgtccacaaggggggtgtgggtgggcccggagacctttcttccgggaggccaagttt

SEQ ID NO: 90261 - DNA, 31 bp, Homo sapiens
  chr16:29262712-29262743
  hypo
tttcaaatgataagagcgatgtttacttttc

SEQ ID NO: 90262 - DNA, 30 bp, Homo sapiens
  chr16:29268142-29268172
  hypo
gtgtgctgatgtcacgcgtgtggatgtcac

SEQ ID NO: 90263 - DNA, 30 bp, Homo sapiens; identical to SEQ ID NO: 29124
  chr16:29300658-29300688
  hypo

SEQ ID NO: 90264 - DNA, 70 bp, Homo sapiens
  chr16:29324798-29324868
  hypo
cagcgtgcggggggcgtccaggatctcagcgtgcggggggcatccgggatctcagcgtgtgggggctgct

SEQ ID NO: 90265 - DNA, 31 bp, Homo sapiens; identical to SEQ ID NO: 29126
  chr16:29340561-29340592
  hypo

SEQ ID NO: 90266 - DNA, 80 bp, Homo sapiens; identical to SEQ ID NO: 10606
  chr16:29606231-29606311
  hypo

SEQ ID NO: 90267 - DNA, 538 bp, Homo sapiens; identical to SEQ ID NO: 10609
  chr16:29624653-29625191
  hypo

SEQ ID NO: 90268 - DNA, 36 bp, Homo sapiens; identical to SEQ ID NO: 52943
  chr16:29691805-29691841
  hypo

SEQ ID NO: 90269 - DNA, 145 bp, Homo sapiens; identical to SEQ ID NO: 29129
  chr16:29755718-29755863
  hypo

SEQ ID NO: 90270 - DNA, 31 bp, Homo sapiens
  chr16:29797108-29797139
  hypo
aggcaaagggtgtccacgtgggatagactgg

SEQ ID NO: 90271 - DNA, 32 bp, Homo sapiens
  chr16:29820499-29820531
  hypo
taactgggttgagaccgcggggcactggaggg

SEQ ID NO: 90272 - DNA, 339 bp, Homo sapiens
  chr16:29820787-29821126
  hypo
ctaggagatcagccccgtctctggggtctccgcctggctgacccccgccccatcccaatccaccccccaataggcttcaccacggcagcatacctgcgcatccacgcggtgaaggaccacgggctccaggccccgcgggctgaccgcatcctgtgcaagctgtgcagcgtgcactgcaagacccctgcccagctggccggccacatgcagacccatctggggggggccgccccccctgtcccgggagacgccccccagccacagcccacctgctgagggggacccccgcacccaccaggcaaggcgtggggcatggctggggggcgggatggggggtgt

SEQ ID NO: 90273 - DNA, 30 bp, Homo sapiens
  chr16:29821415-29821445
  hypo
caatggcggcggcagcggcagcggcggcag

SEQ ID NO: 90274 - DNA, 31 bp, Homo sapiens; identical to SEQ ID NO: 10612
  chr16:29822267-29822298
  hypo

SEQ ID NO: 90275 - DNA, 217 bp, Homo sapiens; identical to SEQ ID NO: 52949
  chr16:29822514-29822731
  hypo

SEQ ID NO: 90276 - DNA, 220 bp, Homo sapiens; identical to SEQ ID NO: 29132
  chr16:29830865-29831085
  hypo

SEQ ID NO: 90277 - DNA, 121 bp, Homo sapiens; identical to SEQ ID NO: 29133
  chr16:29835152-29835273
  hypo

SEQ ID NO: 90278 - DNA, 137 bp, Homo sapiens; identical to SEQ ID NO: 10615
  chr16:29836030-29836167
  hypo

SEQ ID NO: 90279 - DNA, 218 bp, Homo sapiens
  chr16:29853059-29853277
  hypo
cctccagcccttggcgccccggaacaagacccgtgtggtcagctaccgcgtgccccacaacgctgcggtgcaggtgtacgactaccgagagaagcgagcccggtgagtgctggcagcgcagggtgtagggggtggctctccatgggtctggctctgaccctcggctgtctctgcagcgtggtcttcgggcctgagctggtgtcgctgggtcctgagga

SEQ ID NO: 90280 - DNA, 30 bp, Homo sapiens
  chr16:29854107-29854137
  hypo
aaatccagggaaggcgtgggctcacctcct

SEQ ID NO: 90281 - DNA, 30 bp, Homo sapiens; identical to SEQ ID NO: 29135
  chr16:29856179-29856209
  hypo

SEQ ID NO: 90282 - DNA, 208 bp, Homo sapiens
  chr16:29857082-29857290
  hypo
tctgtcctgggcaccggtttggttggtggccgctgcccttggcgctcctgttcctgctctggccccatgccagcctctcacctgcgctccgtctcctccaggcatgaggctcagagactggagcaggaagcccgcggccggcttgagcggcagaagatcctggaccagtcagaagccgagaaagctcgcaaggaacttttggagctgg

SEQ ID NO: 90283 - DNA, 30 bp, Homo sapiens
  chr16:29884955-29884985
  hypo
gcagcggtactggacgtgggagccaacggg

SEQ ID NO: 90284 - DNA, 169 bp, Homo sapiens; identical to SEQ ID NO: 10617
  chr16:29910604-29910773
  hypo

SEQ ID NO: 90285 - DNA, 31 bp, Homo sapiens; identical to SEQ ID NO: 29138
  chr16:29911101-29911132
  hypo

SEQ ID NO: 90286 - DNA, 403 bp, Homo sapiens; identical to SEQ ID NO: 29139
  chr16:29912934-29913337
  hypo

SEQ ID NO: 90287 - DNA, 31 bp, Homo sapiens; identical to SEQ ID NO: 29140
  chr16:29922300-29922331
  hypo

SEQ ID NO: 90288 - DNA, 216 bp, Homo sapiens
  chr16:29997640-29997856
  hypo
agcacgaggccacgcgggagctggagctgcggcagctccaggccgtgcagcgcacgcgggctgagctcacccgcctgcagcaccagacggagctgggcaaccagctggagtacaacaagcggcgtgagcaagagttgcggcagaagcatgcggcccaggttcgccagcagcccaagagcctcaaagtacgtgcaggccagcgccccccgggccttc

SEQ ID NO: 90289 - DNA, 30 bp, Homo sapiens; identical to SEQ ID NO: 29141
  chr16:29998837-29998867
  hypo

SEQ ID NO: 90290 - DNA, 288 bp, Homo sapiens
  chr16:30000929-30001217
  hypo
tcaagaagcagttccaggagacgtgtaagatccagactcggcagtacaaggctctgcgagcacacttgctggagaccacgcccaaagctcagcacaagagcctccttaagcggctcaaggaagagcagacccgcaagctggcgatcttggcggagcagtatgaccagtccatctcagagatgctcagctcacaggcggtgaggcctggggtccagggagggagtgcgctagaggccaggctctgtactttgctttagagaaatggacggtgcagggcatgcacagagc

SEQ ID NO: 90291 - DNA, 30 bp, Homo sapiens
  chr16:30002433-30002463
  hypo
caggcccgtgagatcgaggccttcgatgcg

SEQ ID NO: 90292 - DNA, 31 bp, Homo sapiens; identical to SEQ ID NO: 29143
  chr16:30010434-30010465
  hypo

SEQ ID NO: 90293 - DNA, 514 bp, Homo sapiens
  chr16:30017147-30017661
  hypo
tcctctgaacctcccctaatccgacctcctccctgttgggggagagggacggggcagcgtggagaggcaggagtgaggagcgcgggggcctggggccgggctctgagcactgcccgggtgtgcagatgatggggggtttgcatatttgcagggactagcgagtcaggcaggaggtttgcatatgtgaatatagaactccgcagcccctcatgagcagacagacccgggtcacggagactcacaaaaataggtagtgcagggtgggggcagcccaccctgtgtaaacgtgcaacacactcgtgcgaaggttgggtactggacccggctcgatgggcctgtgccgggacactgctgtccactcaggctgaggacagagccccggccgcagggggcagctcactggtcagggtgtgccagcgctccagggctgcgtccggctgctgcaggcagtcactccagtgcttccgagcctcgcctcgggcacctggccccagggacacgccacctggggagc

SEQ ID NO: 90294 - DNA, 30 bp, Homo sapiens; identical to SEQ ID NO: 29145
  chr16:30018534-30018564
  hypo

SEQ ID NO: 90295 - DNA, 200 bp, Homo sapiens
  chr16:30061418-30061618
  hypo
ctgcaggccacggacgtgtccaggggccttgccaaggctgaagtctctctgttggcagaatatgcagaatatgtgttcctggaggccttttgtagggctgaggtgagaactggcctcaacttggtcctcaggattccatcagacaataagaccgcccaaggccgggcacagtggttcacgcttgtaatcccagcaattcg

SEQ ID NO: 90296 - DNA, 121 bp, Homo sapiens
  chr16:30073148-30073269
  hypo
gggattacaggcatgagccaccatgtctaaccatccattttctcttttgtaaagaagcccattactcaggattctggtaattaaaaaatataaggctgggcgcggtggctcacacctgtaa

SEQ ID NO: 90297 - DNA, 30 bp, Homo sapiens
  chr16:30080784-30080814
  hypo
accccactacccaccgtgcgcctgctctgc

SEQ ID NO: 90298 - DNA, 30 bp, Homo sapiens; identical to SEQ ID NO: 29147
  chr16:30100415-30100445
  hypo

SEQ ID NO: 90299 - DNA, 202 bp, Homo sapiens; identical to SEQ ID NO: 29148
  chr16:30116120-30116322
  hypo

SEQ ID NO: 90300 - DNA, 46 bp, Homo sapiens
  chr16:30124064-30124110
  hypo
gtgtcagctgacagtcgagctccaggaggtccgagcgctgggccat

SEQ ID NO: 90301 - DNA, 361 bp, Homo sapiens
  chr16:30124533-30124894
  hypo
ccacaccctgccctgccacttcgctctccttctctcttggtccctgccccgtttctagcatgcccccttggacctacccctctgtgctgtccactttggcacctgttctcacccctacccggctcacctcctcggtgggcccccaggcggatgcggaaggtgggagccctgggcgtgtgcagcagatgaggccggcgcaggaagaagatggagagcatggcatagctgcccagggcagggagggcatagtacagcaaaaggctcatgaccgtactcccacagaagctcctgcagccacacgctcagccgtccgcgggactgtgctgcctgcctagccagtgtgggccggctctactactgg

SEQ ID NO: 90302 - DNA, 128 bp, Homo sapiens
  chr16:30125290-30125418
  hypo
gctctccagagccccgtccccagccctgggcagctgggagtgaagggcaccaggcccctgaaagcccaagtcaagtctgtcctcagagccgcacggggcagggcgggggcgtcgcgaacacagacaga

SEQ ID NO: 90303 - DNA, 156 bp, Homo sapiens; identical to SEQ ID NO: 29152
  chr16:30169919-30170075
  hypo

SEQ ID NO: 90304 - DNA, 30 bp, Homo sapiens
  chr16:30198771-30198801
  hypo
accacgggcttcagccgcatgagtgagcgg

SEQ ID NO: 90305 - DNA, 404 bp, Homo sapiens
  chr16:30199142-30199546
  hypo
gtggcaaggtggcctcgtcgggcggggtgggggtgggaggtgggcaggatgggcctggagagggccagggcagtgggcatccgctggtattgaccctccctccacacctgccacctacagggtgacagctcaatccggtactttgagatcacttccgaggcccctttcctgcactatctctccatgttcagttccaaggagtcccagcggggcatgggctacatgcccaaacgtggcctggaggtgaacaagtgtgagatcgccaggtgactgacccccggccctgaccgcagcatgctccttgggcagtgggcagtcccaagcccacccaaccagactgtgggccccgctcaccttccccttcccacaggttctacaagctgcacgagcggaggtgtgagccc

SEQ ID NO: 90306 - DNA, 199 bp, Homo sapiens
  chr16:30354616-30354815
  hypo
cctcttccaggtggaatttgacgatgccaccaaggcatcaggtgagtgccagctggggctcgaggactttctcctctccgctccctgttctgggagcagggtcaggggcttcgcggagaaggcggaggagagctggaaggtgctgctttccttgtgctgctggcgcgccactgcacttcagcctgggagacagagcgag

SEQ ID NO: 90307 - DNA, 31 bp, Homo sapiens
  chr16:30362422-30362453
  hypo
cgggtcccttttgccacgcaaggtaacactt

SEQ ID NO: 90308 - DNA, 30 bp, Homo sapiens
  chr16:30369805-30369835
  hypo
tgcagctccccccgcgtttcccgccacttc

SEQ ID NO: 90309 - DNA, 31 bp, Homo sapiens; identical to SEQ ID NO: 29154
  chr16:30381967-30381998
  hypo

SEQ ID NO: 90310 - DNA, 30 bp, Homo sapiens
  chr16:30386029-30386059
  hypo
ctggggtgggcacccgcagggctaaggtta

SEQ ID NO: 90311 - DNA, 158 bp, Homo sapiens
  chr16:30402327-30402485
  hypo
gggattagaggcgtgagccactgcgcccggccgaataaacttacattctatcttcatctttcactgctttcctaatatgtaaactcacggcacattaaaacggaactattctctattttcctctctgaagataggtcgtaatccatagtcatctttgg

SEQ ID NO: 90312 - DNA, 64 bp, Homo sapiens
  chr16:30430046-30430110
  hypo
tttgtgttggttggaggtgatcgcacacttggcccttggttacgtcctcataaccttagacctg

SEQ ID NO: 90313 - DNA, 53 bp, Homo sapiens
  chr16:30442021-30442074
  hypo
ctccactcacaccagggaatacgcgaggtggcgagtcacagggttgctgcttt

SEQ ID NO: 90314 - DNA, 29 bp, Homo sapiens
  chr16:30476455-30476484
  hypo
atcatatagggccaggcgcagtggctcag

SEQ ID NO: 90315 - DNA, 30 bp, Homo sapiens
  chr16:30535918-30535948
  hypo
cttgtaaggccgctcgccactgtggacccg

SEQ ID NO: 90316 - DNA, 190 bp, Homo sapiens
  chr16:30537528-30537718
  hypo
cgccggcccctccttcgagtcccaggtgtcccagccccgggccctcgctccctccctggagccacagccccttctcctgcgcgcaagtccactcctcggacgggcgctccctcctcacctctgaggtacccttcggggctcctcatttcgtcagaactctgcacatcctggggctcgaggccccacggca

SEQ ID NO: 90317 - DNA, 30 bp, Homo sapiens
  chr16:30543905-30543935
  hypo
acagccccccagggcgccggcccctacgcc

SEQ ID NO: 90318 - DNA, 31 bp, Homo sapiens; identical to SEQ ID NO: 29157
  chr16:30562563-30562594
  hypo

SEQ ID NO: 90319 - DNA, 851 bp, Homo sapiens
  chr16:30566777-30567628
  hypo
gcccgcagtccgggcacgggtagggcttctcgccggtgtgggtgcgcacgtggcgccgcaggtccgaggggtaggcgaaggcgcggccacagtccgggcaggggaagggggtctcgccgctgtgcacgcgccggtgctggtagagggcagagctctggctgaagcggcggccacagtcggcgcagccatagggtttctcgccggtgtggacgcgcaggtgcgaagtcagcgccgagcgctgcgtgaaggcccggccacactccagacagcggtggggccgctccccacgatggatggcccggtgtttgctcagggaggaagcgtggccgaagcccttgccgcagtcagtgcagtggaagggcttctcgccagtgtgactgtagacgtgctccaccagtgtggagcgccaggcaaagctcttcccgcacacgtagcagccatgacgctggtcagctcgggggacaggggggtgggcacagagggaggggcgtccccggtgcggtgccttggacagctgctcccaaccataagggggcccggccgagggggcttggggagacttcagcccaggagacccggcggccacagggtcgggcttctccagggctcccgtcccttccctttgtctttcctttttcttgtttctggaatctgctgagagataaagaggggagagttcaggctcggctcatcctggtccttgaatcccacagcccgcgtggacagggacaggcctgctggatccccggctgctcctgggagatggaggagtgacacctgttcctcggctgcagagccagacagagccgggagggagagaacagcccattccgcctcggggctggggaaat

SEQ ID NO: 90320 - DNA, 112 bp, Homo sapiens
  chr16:30567839-30567951
  hypo
cagcctgcaggtgaacggcaggggtgggtcctgaggtggaggtagagtcaacagagtttaagagactgggcgtgggggctcaaggcggtaatcccagcgctttgggaggtag

SEQ ID NO: 90321 - DNA, 30 bp, Homo sapiens
  chr16:30594461-30594491
  hypo
tgcgctgggagaaacgcgcctgacactggc

SEQ ID NO: 90322 - DNA, 310 bp, Homo sapiens; identical to SEQ ID NO: 52978
  chr16:30596383-30596693
  hypo

SEQ ID NO: 90323 - DNA, 39 bp, Homo sapiens
  chr16:30609412-30609451
  hypo
gattataggcgtgcaccctgtgcccggtcgacaagctat

SEQ ID NO: 90324 - DNA, 31 bp, Homo sapiens; identical to SEQ ID NO: 29159
  chr16:30617002-30617033
  hypo

SEQ ID NO: 90325 - DNA, 31 bp, Homo sapiens; identical to SEQ ID NO: 29160
  chr16:30628279-30628310
  hypo

SEQ ID NO: 90326 - DNA, 30 bp, Homo sapiens
  chr16:30676429-30676459
  hypo
gtgtgtggtgtgggcgtggatgcatccatg

SEQ ID NO: 90327 - DNA, 30 bp, Homo sapiens
  chr16:30681981-30682011
  hypo
cccaaagcagcaggcgcctccaggctgggg

SEQ ID NO: 90328 - DNA, 30 bp, Homo sapiens
  chr16:30683050-30683080
  hypo
tcactgcaacaaagcgaggcacatgaattt

SEQ ID NO: 90329 - DNA, 30 bp, Homo sapiens
  chr16:30685937-30685967
  hypo
agggccaggcgtgccgtctctgcctgtaat

SEQ ID NO: 90330 - DNA, 31 bp, Homo sapiens
  chr16:30700819-30700850
  hypo
tcattttttcataacacgtatcagccattat

SEQ ID NO: 90331 - DNA, 30 bp, Homo sapiens
  chr16:30768660-30768690
  hypo
taaaatctgctacacgccagggagaacagg

SEQ ID NO: 90332 - DNA, 30 bp, Homo sapiens
  chr16:30775643-30775673
  hypo
tagaggcctcagaccgcctacagcgccggg

SEQ ID NO: 90333 - DNA, 116 bp, Homo sapiens
  chr16:30780231-30780347
  hypo
aggatgccctgcggcgcattcggcaggcagaggagcagatagaacacctgcagcgcaagctgggtgccaccaagcaggtgcggcccatgtggtgccctcgcgtcggagcgcaggga

SEQ ID NO: 90334 - DNA, 57 bp, Homo sapiens; identical to SEQ ID NO: 29162
  chr16:30784031-30784088
  hypo

SEQ ID NO: 90335 - DNA, 30 bp, Homo sapiens; identical to SEQ ID NO: 29163
  chr16:30794190-30794220
  hypo

SEQ ID NO: 90336 - DNA, 101 bp, Homo sapiens
  chr16:30794664-30794765
  hypo
gatgaagctcttcccgcactcggtgcagcggtatggcttctcgcccgcgtggatcttctggtgcttgaggaggttgtggttctggccgaagcgcttcccgc

SEQ ID NO: 90337 - DNA, 30 bp, Homo sapiens
  chr16:30795252-30795282
  hypo
ctcgttggcggggacgactggggggctgtt

SEQ ID NO: 90338 - DNA, 30 bp, Homo sapiens
  chr16:30795728-30795758
  hypo
acctctgtgagcatcgttggggctctgttc

SEQ ID NO: 90339 - DNA, 199 bp, Homo sapiens
  chr16:30826378-30826577
  hypo
agggattttggttggttggttggatggagccttacagtttggatgtggtgagcatgaaatgcatacgttcaagaagctgagccgacaaagggcttactctaggtggactgaaaattcgatgtttccaattcaaaacatctgctctccgaggtgtgggtgaaggtatggggggtccaaaaatgtccgagtcccaccacct

SEQ ID NO: 90340 - DNA, 42 bp, Homo sapiens
  chr16:30831398-30831440
  hypo
gggattacaggtgtgagccattgtacccggcctagtttttaa

SEQ ID NO: 90341 - DNA, 119 bp, Homo sapiens
  chr16:30833277-30833396
  hypo
ggagccctctgtatcgtggcctgccgcaaagcagatactcctccggactctgggcttgttgccgttgttggctgcagccatggatgccctccctgccacacagcgcctgctggacaccg

SEQ ID NO: 90342 - DNA, 31 bp, Homo sapiens
  chr16:30835282-30835313
  hypo
ggcttggtcccctggcgtgtgtcatcaggcc

SEQ ID NO: 90343 - DNA, 661 bp, Homo sapiens
  chr16:30845546-30846207
  hypo
tctccacgcctccacccgaggcgggcgcctgggctgaaaggccgcttgtccacatgggttcccaggttggcctgctaggctgacaccctggtggaaccacttgccgtatgtcctcgggcgctggaggtctcccagcgctggcatacataagccctggcgtgcggggcggcttctgcgctggggtctctgcgcgtgcacgggcctcaacatatgcatggacgtccaggtgccacgtgggcatctcgtggtgctgcagaaggcgggaggccggcgggtcccctgcgcttgtccccgccacggcccttgcccgctgtggacccggaggctcagtgccggcaggactcgggactcggcgcctctcccggggtggcaggcgcctcgcatggcacactcagaccgctgggagggtggccgcatgggtgcgtgaggaggtgggcgaggcagcccagtgcacccctcccctaggcctctagcaaggcggcctcaggcactggatgtggtccgagttctgccctaagcccttcccatgcattcgggcgccagtggcgagccagatgggtgctgtggccttaggttcgggcaggtgtggggccgctcgccctccgatgttaccgcggtgggtgagctgggaagctctttccgccctcggggcacaggtagt

SEQ ID NO: 90344 - DNA, 25 bp, Homo sapiens
  chr16:30853903-30853928
  hypo
ttttaaaacagagtctcgctctgtc

SEQ ID NO: 90345 - DNA, 285 bp, Homo sapiens
  chr16:30906985-30907270
  hypo
ttccagcaattgctcacggcaatacacacacccactcacacgaacacacgcacacacatgcacgcgcacatgcacacacgcgcacacctgcacactcacacgcacacaaatccactcgcacacacgcatgctcacacgcacacacgtccgcatgcacgcacacacgcagacacacgcaagcgcacacacacacgggcctcctcgtcttcattcacaaaccccattagcttctgttgtctatgggcttcctcgacagaccgcgagcccctcgcgggggccagaaac

SEQ ID NO: 90346 - DNA, 30 bp, Homo sapiens
  chr16:30922430-30922460
  hypo
ctacacagagcagacgtgggacacacacct

SEQ ID NO: 90347 - DNA, 30 bp, Homo sapiens
  chr16:30937139-30937169
  hypo
gccgggcctgtgtgcgaactgagtgcgggg

SEQ ID NO: 90348 - DNA, 43 bp, Homo sapiens
  chr16:30938665-30938708
  hypo
gggaggctgggaaggaggacacggtggagggagaggaagagaa

SEQ ID NO: 90349 - DNA, 164 bp, Homo sapiens
  chr16:30939037-30939201
  hypo
cctcacccccagcttctgtcccgcctaggattcaggtgaggggcctggccgccgtagggccgacaacggcgaggagggcgccagcttggggagcggatggaagctgacagaggagccaccgcttccaccgcccccgcccaggcgcaagggccccctgcctgccg

SEQ ID NO: 90350 - DNA, 199 bp, Homo sapiens
  chr16:30939778-30939977
  hypo
ccctggtaggtgaaaggaggccgagagaggcacctgaagaaggtgggtggagacgcctgcctcctccgaggatcggacccaggcggcccgggcctgctgccccccagggttctgaatccgagccaggctttctcatcctgccaccctgggctccctcccgagaactgggaggtgtgccggggacctcctccctcccctt

SEQ ID NO: 90351 - DNA, 31 bp, Homo sapiens; identical to SEQ ID NO: 29170
  chr16:30941312-30941343
  hypo

SEQ ID NO: 90352 - DNA, 30 bp, Homo sapiens
  chr16:30941743-30941773
  hypo
cgtggtgcggcccccgcctcgaagccctga

SEQ ID NO: 90353 - DNA, 459 bp, Homo sapiens
  chr16:30958050-30958509
  hypo
ggcaaacagagagccgtggtcggctgcagggggtggcagaactgcgtctggcaggtttggagctgacagatgcctccctgcgtctcctgctgcgtcacgcaccccagctgagcgccctggacctgagccactgcgcccacgtcggggaccccagtgttcacctcctcacggcccccacgtccccactccgcgagaccctggtgcacctcaatcttgctggtaagcacggtcccccatccgtcctgccagcctgtggatccccacggccagtgccaaccccttgctcacctgcctggtctcagctccactgccccatccccaggttgccaccgcctaacggaccactgcctcccgctgttccgccgctgccctcgtctacgccgcctagacctgcgctcctgccgccagctctcacccgaagcttgtgcccggctggcagctgccgggccccctggcccc

SEQ ID NO: 90354 - DNA, 207 bp, Homo sapiens; identical to SEQ ID NO: 10634
  chr16:30959909-30960116
  hypo

SEQ ID NO: 90355 - DNA, 31 bp, Homo sapiens; identical to SEQ ID NO: 10635
  chr16:30964524-30964555
  hypo

SEQ ID NO: 90356 - DNA, 268 bp, Homo sapiens; identical to SEQ ID NO: 52999
  chr16:30964612-30964880
  hypo

SEQ ID NO: 90357 - DNA, 65 bp, Homo sapiens
  chr16:30968111-30968176
  hypo
cccgtgagcatagggcgccatagccaaagaagcgggcagtgggaccatgacgccaggaggacaca

SEQ ID NO: 90358 - DNA, 30 bp, Homo sapiens
  chr16:30989019-30989049
  hypo
ggctgagaccccagcgggtgtctagagcct

SEQ ID NO: 90359 - DNA, 30 bp, Homo sapiens
  chr16:30991712-30991742
  hypo
ctgggtatgctcagcggcgtgggccccgcc

SEQ ID NO: 90360 - DNA, 30 bp, Homo sapiens
  chr16:30993470-30993500
  hypo
caaacctggaggcacggtcgtcttgtgaga

SEQ ID NO: 90361 - DNA, 149 bp, Homo sapiens; identical to SEQ ID NO: 29176
  chr16:30993850-30993999
  hypo

SEQ ID NO: 90362 - DNA, 30 bp, Homo sapiens; identical to SEQ ID NO: 29177
  chr16:30994494-30994524
  hypo

SEQ ID NO: 90363 - DNA, 205 bp, Homo sapiens
  chr16:30995027-30995232
  hypo
cacgacaccatcatcgatgccaccaagtgtggcaacctggccagattcatcaaccactgctgcacggtgcgccaggggccagccggggcaggagttgggggtcggtgggggtggccacggctcacacgcccttccatccgcagcctaactgctacgccaaggtcatcaccatcgagtcccagaagaagatcgtgatctactccaa

SEQ ID NO: 90364 - DNA, 151 bp, Homo sapiens
  chr16:30999437-30999588
  hypo
ctcgtgggaggatagccggacccgtaccattctctgggtacaggccgctacgggttcagcccagtgacggtggggctggggcctggaggcccagatacagcacatccacccaggtcccgagccctcacaccctggacgggaagggacagct

SEQ ID NO: 90365 - DNA, 190 bp, Homo sapiens
  chr16:31000929-31001119
  hypo
tgacacagaaacacacgccaacgcacacggctgcacagcgggcaggggcggttaggggaaagggagccggggccacccatcttgtcctctgcagggcgggctggggggcagggtgaatgcatagaacacatcatgtgtacacgctcagggcgtggcaagagcgtgtgtcgacccacgggtacatgggatg

SEQ ID NO: 90366 - DNA, 31 bp, Homo sapiens
  chr16:31002040-31002071
  hypo
actgtcctttctcccacgcaccacctacctg

SEQ ID NO: 90367 - DNA, 189 bp, Homo sapiens
  chr16:31012747-31012936
  hypo
ggctggggctgggtgccggggctgaggctgggcggtgggactaggggctggggctgggtgctggggctggggctggggctgggggccttggaggcccattacctgttcaaagaactcatccatgaagtggtcccgatccacgtggaccacctcctcttcatcatcactgtctttcgcctggggacaagg

SEQ ID NO: 90368 - DNA, 105 bp, Homo sapiens
  chr16:31013739-31013844
  hypo
gcacacaggaataggcccccccgacacccacacggagatgcactgatgctggcgttcacccgcacgcagactcacagctgagccgcactgacatgtgtggacaca

SEQ ID NO: 90369 - DNA, 30 bp, Homo sapiens; identical to SEQ ID NO: 29179
  chr16:31053308-31053338
  hypo

SEQ ID NO: 90370 - DNA, 30 bp, Homo sapiens
  chr16:31072199-31072229
  hypo
ctcctagacagtcacgtctcagcttctgcc

SEQ ID NO: 90371 - DNA, 30 bp, Homo sapiens
  chr16:31073251-31073281
  hypo
cgcctgtgtgcacacgccggtgcatggcca

SEQ ID NO: 90372 - DNA, 109 bp, Homo sapiens
  chr16:31073552-31073661
  hypo
gctcttcccgcactcggagcagaggaaggggcgctcgccggtgtgggacctgcgggggtgtggaggacttggcatgaaggcgacagacccataacgtgaccccactgcc

SEQ ID NO: 90373 - DNA, 31 bp, Homo sapiens; identical to SEQ ID NO: 10639
  chr16:31075213-31075244
  hypo

SEQ ID NO: 90374 - DNA, 30 bp, Homo sapiens; identical to SEQ ID NO: 29181
  chr16:31099848-31099878
  hypo

SEQ ID NO: 90375 - DNA, 228 bp, Homo sapiens; identical to SEQ ID NO: 10641
  chr16:31117072-31117300
  hypo

SEQ ID NO: 90376 - DNA, 320 bp, Homo sapiens; identical to SEQ ID NO: 29183
  chr16:31131558-31131878
  hypo

SEQ ID NO: 90377 - DNA, 426 bp, Homo sapiens; identical to SEQ ID NO: 29184
  chr16:31138386-31138812
  hypo

SEQ ID NO: 90378 - DNA, 200 bp, Homo sapiens
  chr16:31142806-31143006
  hypo
agcgccagcccagttccggtgggggctcagtcctccggagtccaggagtcagggctcgggggcgctcagcggccagtgggcaagattggggcctttcctgtcctcgaagctgcacaaaggtggccccagcccagaacacagggagagggcagagagatgtgctcatcagtctgggcaggcgggccgggagcagtcttcca

SEQ ID NO: 90379 - DNA, 272 bp, Homo sapiens; identical to SEQ ID NO: 53009
  chr16:31153836-31154108
  hypo

SEQ ID NO: 90380 - DNA, 30 bp, Homo sapiens; identical to SEQ ID NO: 29187
  chr16:31203778-31203808
  hypo

SEQ ID NO: 90381 - DNA, 30 bp, Homo sapiens; identical to SEQ ID NO: 29188
  chr16:31234390-31234420
  hypo

SEQ ID NO: 90382 - DNA, 30 bp, Homo sapiens; identical to SEQ ID NO: 29189
  chr16:31236024-31236054
  hypo

SEQ ID NO: 90383 - DNA, 30 bp, Homo sapiens
  chr16:31374278-31374308
  hypo
cctctgctccgtggacgtagacagcgacgg

SEQ ID NO: 90384 - DNA, 30 bp, Homo sapiens
  chr16:31374537-31374567
  hypo
ggggtcgctttggggcggctctgacagtgc

SEQ ID NO: 90385 - DNA, 31 bp, Homo sapiens
  chr16:31381550-31381581
  hypo
acaggtgtgagccaccgcgtccagccattat

SEQ ID NO: 90386 - DNA, 31 bp, Homo sapiens
  chr16:31408992-31409023
  hypo
tgagtgtcttgggccacgggggggtggggtg

SEQ ID NO: 90387 - DNA, 51 bp, Homo sapiens
  chr16:31438630-31438681
  hypo
gggctcccatgggggctctgccgagctgccggaacttggacaagtcattta

SEQ ID NO: 90388 - DNA, 577 bp, Homo sapiens; identical to SEQ ID NO: 29190
  chr16:31446853-31447430
  hypo

SEQ ID NO: 90389 - DNA, 30 bp, Homo sapiens; identical to SEQ ID NO: 29191
  chr16:31447987-31448017
  hypo

SEQ ID NO: 90390 - DNA, 30 bp, Homo sapiens; identical to SEQ ID NO: 53015
  chr16:31454155-31454185
  hypo

SEQ ID NO: 90391 - DNA, 203 bp, Homo sapiens
  chr16:31464578-31464781
  hypo
gcgctgggaatacaggcgtgagccaccgtaccaagacatcccacagcaccagcctgtgtgtgtctcgccaggctcagagctgggaacctggaacccaggactgggtgagctcagagacataactgtgactgtactggagtcagtcttatgcccagagctaagcagaagcagggccagcccagaggagacgatgttaccgactc

SEQ ID NO: 90392 - DNA, 352 bp, Homo sapiens
  chr16:31475824-31476176
  hypo
ccccgacctcgctgcgggcaccacgcacccaacgcactccgggccgcagccccgccgccgccatcgaggagccttggggacgcgaagggccagccctgctgctgctgtcgcgcttttcccaggcccctgacccaagtggggcacttgtgaccggcccggcgctgtacggcctgctgacctatgtgaccggcgcaccgggcccgcccagcccacgtgcactgcgcattctgtcacgcctcacctgcaaccctgcctgcctcgaggccttcgtgcgcagctatggcgcggcgctgctgcgggcctggctggtgctgggggtggcgcctgacgattggccggcaccacgtgcccg

SEQ ID NO: 90393 - DNA, 30 bp, Homo sapiens; identical to SEQ ID NO: 29192
  chr16:31487138-31487168
  hypo

SEQ ID NO: 90394 - DNA, 31 bp, Homo sapiens
  chr16:31496889-31496920
  hypo
ttggtgcccagggccccggggccatcacctg

SEQ ID NO: 90395 - DNA, 153 bp, Homo sapiens; identical to SEQ ID NO: 29193
  chr16:31497940-31498093
  hypo

SEQ ID NO: 90396 - DNA, 335 bp, Homo sapiens
  chr16:31500430-31500765
  hypo
gtttccttcgcagggcgccttctggggactcatcgggggcctgctgatgggcctggcacgcctgattcccgagttctccttcggctcgggcagctgtgtgcagccctcggcgtgcccagctttcctctgcggcgtgcactacctctacttcgccattgtgctgttcttctgctctggcctcctcaccctcacggtctccctgtgcaccgcgcccatccccagaaagcacgtgagtggccaggtgccccaggcaagcactgtgggacacagcacctaccctctgcttcctggagtgcccagctgggaggacctgaatttctcgactgagggttggg

SEQ ID NO: 90397 - DNA, 30 bp, Homo sapiens
  chr16:31503994-31504024
  hypo
agggtggtttcccacggacagcaaaggtca

SEQ ID NO: 90398 - DNA, 115 bp, Homo sapiens
  chr16:31508171-31508286
  hypo
ggctgctgtccttggctgacacgtcagccatgttgttcctccgagcctggtgcacggtcagggcagcccgagtggccccaccagcaacactcacgatgcactgggtgggagggga

SEQ ID NO: 90399 - DNA, 31 bp, Homo sapiens
  chr16:31548220-31548251
  hypo
gattgcaatgggtaggcgaagtcccaggatt

SEQ ID NO: 90400 - DNA, 30 bp, Homo sapiens; identical to SEQ ID NO: 29195
  chr16:31558002-31558032
  hypo

SEQ ID NO: 90401 - DNA, 61 bp, Homo sapiens
  chr16:31607114-31607175
  hypo
aacacataagaacacactccacgtgtttgcaaattctcacgtttgcaaattcattttagta

SEQ ID NO: 90402 - DNA, 30 bp, Homo sapiens; identical to SEQ ID NO: 29196
  chr16:31722459-31722489
  hypo

SEQ ID NO: 90403 - DNA, 24 bp, Homo sapiens
  chr16:31932457-31932481
  hypo
ggttttttttttgagacggagtct

SEQ ID NO: 90404 - DNA, 199 bp, Homo sapiens
  chr16:32485423-32485622
  hypo
actcgggatggcgcccggcctgagggctgagggcccgggaaaggcacacggtggcggtggggtctctctcaggaaggcgctggctctgcagacagctccgcctggtgacccctctttggcactgagctgggaacatggtgtccgcactcccggctagcaagcagaggcccgtgtggtcaggtggcggctggcagtgtag

SEQ ID NO: 90405 - DNA, 37 bp, Homo sapiens
  chr16:32649133-32649170
  hypo
catgggagggtaggacggggtgcggtaagggcagggt

SEQ ID NO: 90406 - DNA, 176 bp, Homo sapiens
  chr16:34986006-34986182
  hypo
tctggggcttggatgtgggaccgcctggggagaccgggctctggaggcttttggcttcccgctttcttcaggctttctctcgctcgttggcgcaattcccaaccgctccctgactctggctccctcatttctgcccggaccttctcctccgccacgatcctgggcctccaggtggg

SEQ ID NO: 90407 - DNA, 30 bp, Homo sapiens
  chr16:46615071-46615101
  hypo
tatcgctgttttgacgactgcatagctcaa

SEQ ID NO: 90408 - DNA, 478 bp, Homo sapiens; identical to SEQ ID NO: 29198
  chr16:46683355-46683833
  hypo

SEQ ID NO: 90409 - DNA, 23 bp, Homo sapiens
  chr16:46688038-46688061
  hypo
agggagaccgtggggagagggag

SEQ ID NO: 90410 - DNA, 98 bp, Homo sapiens; identical to SEQ ID NO: 29199
  chr16:46717907-46718005
  hypo

SEQ ID NO: 90411 - DNA, 30 bp, Homo sapiens; identical to SEQ ID NO: 29200
  chr16:46726872-46726902
  hypo

SEQ ID NO: 90412 - DNA, 110 bp, Homo sapiens
  chr16:46781698-46781808
  hypo
tttgatttctggaacgtggcccccaccaaagcgatggccctgtccaccgcagccaccatcctgaagagggcctccagcctggcaccgtgctgggccgcatcctgctgcat

SEQ ID NO: 90413 - DNA, 31 bp, Homo sapiens
  chr16:46920967-46920998
  hypo
aacagtgcccttcttgcgagagccacatttc

SEQ ID NO: 90414 - DNA, 247 bp, Homo sapiens
  chr16:46934710-46934957
  hypo
ccaacttgccaggcccctaggcgtgaaatgaatgagtgttcccaggcggccccagcctcaagcggagggtcctgcatgcgaatgggtgtgtgaacgtgtgtgggtggctgacagcacacagagtaaacaaaaaatagcgtcctcttcccactcacaccttgctggcctcgtttattaagcaggcggtgccggtgccacctttaggtgcaagtgcctgcatcatgccgggtgtgggtgctcctcctgg

SEQ ID NO: 90415 - DNA, 138 bp, Homo sapiens; identical to SEQ ID NO: 29203
  chr16:46945508-46945646
  hypo

SEQ ID NO: 90416 - DNA, 79 bp, Homo sapiens; identical to SEQ ID NO: 29204
  chr16:46952489-46952568
  hypo

SEQ ID NO: 90417 - DNA, 31 bp, Homo sapiens; identical to SEQ ID NO: 29205
  chr16:46964712-46964743
  hypo

SEQ ID NO: 90418 - DNA, 35 bp, Homo sapiens; identical to SEQ ID NO: 29206
  chr16:46992084-46992119
  hypo

SEQ ID NO: 90419 - DNA, 45 bp, Homo sapiens; identical to SEQ ID NO: 29207
  chr16:47001891-47001936
  hypo

SEQ ID NO: 90420 - DNA, 30 bp, Homo sapiens
  chr16:47117077-47117107
  hypo
ctggaggctgcgtacgtacacaccctaaga

SEQ ID NO: 90421 - DNA, 810 bp, Homo sapiens; identical to SEQ ID NO: 10649
  chr16:47176766-47177576
  hypo

SEQ ID NO: 90422 - DNA, 118 bp, Homo sapiens; identical to SEQ ID NO: 10650
  chr16:47177628-47177746
  hypo

SEQ ID NO: 90423 - DNA, 624 bp, Homo sapiens; identical to SEQ ID NO: 10651
  chr16:47177805-47178429
  hypo

SEQ ID NO: 90424 - DNA, 20 bp, Homo sapiens
  chr16:47216665-47216685
  hypo
ggtgggaggagccaagatgg

SEQ ID NO: 90425 - DNA, 41 bp, Homo sapiens; identical to SEQ ID NO: 29211
  chr16:47288964-47289005
  hypo

SEQ ID NO: 90426 - DNA, 30 bp, Homo sapiens; identical to SEQ ID NO: 29212
  chr16:47362864-47362894
  hypo

SEQ ID NO: 90427 - DNA, 30 bp, Homo sapiens; identical to SEQ ID NO: 29213
  chr16:47497807-47497837
  hypo

SEQ ID NO: 90428 - DNA, 31 bp, Homo sapiens; identical to SEQ ID NO: 29214
  chr16:47567943-47567974
  hypo

SEQ ID NO: 90429 - DNA, 190 bp, Homo sapiens; identical to SEQ ID NO: 29215
  chr16:48177831-48178021
  hypo

SEQ ID NO: 90430 - DNA, 108 bp, Homo sapiens
  chr16:48209331-48209439
  hypo
tggggcaagaaacaagcggggcctcagtttcctgcatctgcactagcggaagcacagatcgcacctggcgatcacacctgacccgctgccctccgtggcccattcttc

SEQ ID NO: 90431 - DNA, 31 bp, Homo sapiens
  chr16:48243649-48243680
  hypo
gcactctatcgggtcacgggtgcactaaaat

SEQ ID NO: 90432 - DNA, 31 bp, Homo sapiens; identical to SEQ ID NO: 29216
  chr16:48290943-48290974
  hypo

SEQ ID NO: 90433 - DNA, 352 bp, Homo sapiens
  chr16:48381405-48381757
  hypo
tcttctttcaaggtatctcagcgtttgagtcagccaggagtagcaataggtttggcttggactcccttaggtggagaaatcatgttcgtggaggcgagtcgaatggatggcgagggccagttaactctgaccggccagctcggggacgtgatgaaggagtccgcccacctcgctatcagctggctccgcagcaacgcaaagaagtaccagctgaccaatggtaggagcctgcacccggccaggcaggcgtgacccaggaggcggtaccttccatggcggagactggcatgagctcgagactgccagttacacatctagcaaagtacacaccgttttgaacccctgtggaaat

SEQ ID NO: 90434 - DNA, 98 bp, Homo sapiens
  chr16:48420735-48420833
  hypo
gtgagatgtgtttctcgcccccagaacccctgggccgctctgcaagcagtgaaatggatacggactaagagagaacttgccaacgtggcgattaaagt

SEQ ID NO: 90435 - DNA, 154 bp, Homo sapiens
  chr16:48530538-48530692
  hypo
agccggctgagggccgcagctctgccgggatcaggcttcacggtggcgcggccgctgtcccggatgctgcgccggctcctaaggtccaacgccacggagctgcagctcacgggttccggtgatgccgccccgcccgggcgagtccccgcaagct

SEQ ID NO: 90436 - DNA, 87 bp, Homo sapiens
  chr16:48530909-48530996
  hypo
aagagatcctgaccctcgcctggctttttgtgaaggaaggcgtcgaaaagatctggctcatgggcggagagccgctcatccagccgg

SEQ ID NO: 90437 - DNA, 157 bp, Homo sapiens; identical to SEQ ID NO: 29219
  chr16:48577582-48577739
  hypo

SEQ ID NO: 90438 - DNA, 143 bp, Homo sapiens; identical to SEQ ID NO: 29220
  chr16:48641645-48641788
  hypo

SEQ ID NO: 90439 - DNA, 121 bp, Homo sapiens; identical to SEQ ID NO: 29221
  chr16:48642027-48642148
  hypo

SEQ ID NO: 90440 - DNA, 23 bp, Homo sapiens
  chr16:48642207-48642230
  hypo
ccggcctacaatgttttaagtta

SEQ ID NO: 90441 - DNA, 148 bp, Homo sapiens
  chr16:48663528-48663676
  hypo
tatggggcccggaaccgcagcacagacctcactcaagagcttgttagaaatgcacagtgctggctgggcgcggtggctcacacctgtaatgggaggccgaggcgggcggatctcctgagctcagaagttcggaatgaccctgggcaac

SEQ ID NO: 90442 - DNA, 794 bp, Homo sapiens; identical to SEQ ID NO: 53040
  chr16:49315521-49316315
  hypo

SEQ ID NO: 90443 - DNA, 30 bp, Homo sapiens; identical to SEQ ID NO: 29225
  chr16:49358814-49358844
  hypo

SEQ ID NO: 90444 - DNA, 30 bp, Homo sapiens
  chr16:49572212-49572242
  hypo
ccatagcaggaaaacgccccaccgtacagc

SEQ ID NO: 90445 - DNA, 125 bp, Homo sapiens
  chr16:49577673-49577798
  hypo
agtgggaactcaggcacagagcgccagctccagacgcaagccggagtcatatgaccccggtcacagcgaccgccactcacgggctggctgaccttgggcaagtcgctgacctctctgaatctcag

SEQ ID NO: 90446 - DNA, 30 bp, Homo sapiens
  chr16:49671976-49672006
  hypo
gcccagtacagggtcgggactgacactgtg

SEQ ID NO: 90447 - DNA, 31 bp, Homo sapiens
  chr16:49950450-49950481
  hypo
tcaaagaaaagaaggccgagtcccagagaag

SEQ ID NO: 90448 - DNA, 32 bp, Homo sapiens
  chr16:50070328-50070360
  hypo
cataagccaccgtgcctggcctctttaataat

SEQ ID NO: 90449 - DNA, 33 bp, Homo sapiens
  chr16:50218667-50218700
  hypo
cacagtctcactctgttacgcaggctggagtgt

SEQ ID NO: 90450 - DNA, 45 bp, Homo sapiens
  chr16:50227516-50227561
  hypo
gggattacaggtgtgagtcaccgcgcctggccaggtcctggagtc

SEQ ID NO: 90451 - DNA, 31 bp, Homo sapiens; identical to SEQ ID NO: 29227
  chr16:50334491-50334522
  hypo

SEQ ID NO: 90452 - DNA, 215 bp, Homo sapiens
  chr16:50335582-50335797
  hypo
cctggtggctccaggaccccacggtggaggaggcagttccactgccctggccaggtggggcccgccttggcctgtctgctgcccgaccctggcctgcttcagggagtccggcacgtctggccacttctctgtgaatcatccatgaggcttgctcaagaatgtcggcccagccagcgagtggctcctttcactctggtcctcgctatgccttgggg

SEQ ID NO: 90453 - DNA, 275 bp, Homo sapiens
  chr16:50336502-50336777
  hypo
taacttcatttatccacgcagttgaaagttcaaaaggtgtgaagggcgtgttgtagaaagactccttgtccccagccggcacatctcagaggggacctgtgcagtgagtttcttgtattccctccacagggattttcacggacaccgagtgaactgcgagtccccccacccttcttgctaaggtggcagtggcgggccccatggtcgcgcaccctgcatttttcctaccttggggacatccctcctgtgtgcagggtgctcgtctgtagctcctg

SEQ ID NO: 90454 - DNA, 30 bp, Homo sapiens; identical to SEQ ID NO: 29230
  chr16:50338365-50338395
  hypo

SEQ ID NO: 90455 - DNA, 30 bp, Homo sapiens
  chr16:50346865-50346895
  hypo
gttctacacagagtgcgatgtcaacaaaga

SEQ ID NO: 90456 - DNA, 184 bp, Homo sapiens
  chr16:50633342-50633526
  hypo
acccagacctgactgacaactcgagtgagtcacttaacctctctaagcctcagtttcctcatggccaaagtgggggtcatcgcagagcccagcttctagggctgctgggagcacttggtcggtgatgcccctaacgtgcttcatggaacacttggcagatgtcgcacactgactaagactggtt

SEQ ID NO: 90457 - DNA, 73 bp, Homo sapiens
  chr16:50666331-50666404
  hypo
agcaccctgcaatgggcgatgagggcagggcgtggctggacgggccaggcgggccgtgcgggtggtgttcact

SEQ ID NO: 90458 - DNA, 31 bp, Homo sapiens
  chr16:50667597-50667628
  hypo
tgtatgagagccaggccgggcagccggtcca

SEQ ID NO: 90459 - DNA, 30 bp, Homo sapiens
  chr16:50708056-50708086
  hypo
aaagttaaccaggccggtgtaaagcatgcc

SEQ ID NO: 90460 - DNA, 67 bp, Homo sapiens; identical to SEQ ID NO: 10661
  chr16:50773733-50773800
  hypo

SEQ ID NO: 90461 - DNA, 58 bp, Homo sapiens; identical to SEQ ID NO: 29233
  chr16:50897228-50897286
  hypo

SEQ ID NO: 90462 - DNA, 422 bp, Homo sapiens; identical to SEQ ID NO: 10665
  chr16:51185542-51185964
  hypo

SEQ ID NO: 90463 - DNA, 303 bp, Homo sapiens; identical to SEQ ID NO: 10666
  chr16:51186025-51186328
  hypo

SEQ ID NO: 90464 - DNA, 30 bp, Homo sapiens; identical to SEQ ID NO: 53060
  chr16:51189177-51189207
  hypo

SEQ ID NO: 90465 - DNA, 150 bp, Homo sapiens; identical to SEQ ID NO: 53061
  chr16:51189282-51189432
  hypo

SEQ ID NO: 90466 - DNA, 94 bp, Homo sapiens
  chr16:52498847-52498941
  hypo
tagatttgatgctgttcgcttacttagagaagtattatatctcaagacctaagtaagtcttaatgcattctttttttttttttttttttttttt

SEQ ID NO: 90467 - DNA, 30 bp, Homo sapiens; identical to SEQ ID NO: 53067
  chr16:52586325-52586355
  hypo

SEQ ID NO: 90468 - DNA, 30 bp, Homo sapiens; identical to SEQ ID NO: 53068
  chr16:52599172-52599202
  hypo

SEQ ID NO: 90469 - DNA, 31 bp, Homo sapiens
  chr16:52860764-52860795
  hypo
tgcatgtttttcaaaccgtcaaaggactttc

SEQ ID NO: 90470 - DNA, 27 bp, Homo sapiens
  chr16:53218078-53218105
  hypo
atctcctgacctcgtgatcctggctaa

SEQ ID NO: 90471 - DNA, 192 bp, Homo sapiens
  chr16:53337681-53337873
  hypo
tctaggactttgtatcgcattgaacttctaaggaaagtacgggaacaggcccttcgacatccacagttgtttgaacgcttgaagctttgccatccaaatccagatttaccagtctggtgggaatgtggccctcatgatagggatttgcttattggtgctgccaaacacggggtgagccgaacagactatcac

SEQ ID NO: 90472 - DNA, 121 bp, Homo sapiens; identical to SEQ ID NO: 29238
  chr16:53448475-53448596
  hypo

SEQ ID NO: 90473 - DNA, 57 bp, Homo sapiens
  chr16:53467354-53467411
  hypo
caaaaaaaaaaaaaaagtttaattcacgcagagccagctgaacggcagacaggagtt

SEQ ID NO: 90474 - DNA, 484 bp, Homo sapiens
  chr16:53563448-53563932
  hypo
acaaatccttcatatagcaatcggctcctcttatcccccaggcaactggctgcctttcacctccgcggcacagcaattatgtggtgtaatggaggcagcgcaaataagcagaaagattttattaaaccaaatgagcaaatcatctgcgtattattgcgatttgattgacactgacaagtgtcgagcagacgcggatgtgaatatgatacagaagcttgcagcaaagctcttgataatgttactcttgataaagttgcctggccaccctctctaagtaaataaaggggagaggaatatgacgcatattaattcacccagtttgcagcctactggaggacgagaggggaaaaaaaagttgcaatgggttcagcgcgtggcattttatatgaataccaaaattgcattcatgattcacatagactttacgataatatattaatattaaaactaaaggtcattccacgtaacagttaagctgcctgag

SEQ ID NO: 90475 - DNA, 241 bp, Homo sapiens
  chr16:53659273-53659514
  hypo
gcccggccgccaccccgtctgggaactggggggggcgcctcagcctggcggccgccccgtctggggggtggggtggggggtgcctccacccggcagccgccccatctgggggctggggggggcgcgcctccgcccagcggccgccccgtctagggggtgaggggggggcgcctccgcccggcagccaccccgtcttgggggtgggggggcccctctgcccagccgccatgtctgggaagtg

SEQ ID NO: 90476 - DNA, 30 bp, Homo sapiens; identical to SEQ ID NO: 53073
  chr16:53813351-53813381
  hypo

SEQ ID NO: 90477 - DNA, 83 bp, Homo sapiens; identical to SEQ ID NO: 29241
  chr16:53825644-53825727
  hypo

SEQ ID NO: 90478 - DNA, 30 bp, Homo sapiens; identical to SEQ ID NO: 29242
  chr16:53851107-53851137
  hypo

SEQ ID NO: 90479 - DNA, 30 bp, Homo sapiens; identical to SEQ ID NO: 53074
  chr16:53855275-53855305
  hypo

SEQ ID NO: 90480 - DNA, 30 bp, Homo sapiens; identical to SEQ ID NO: 29243
  chr16:54096325-54096355
  hypo

SEQ ID NO: 90481 - DNA, 199 bp, Homo sapiens; identical to SEQ ID NO: 29244
  chr16:54128644-54128843
  hypo

SEQ ID NO: 90482 - DNA, 30 bp, Homo sapiens
  chr16:54150750-54150780
  hypo
tgccccccagatcccggctagaaggaccag

SEQ ID NO: 90483 - DNA, 30 bp, Homo sapiens
  chr16:54155978-54156008
  hypo
acagtcccagggtgcgccgggagccccgcc

SEQ ID NO: 90484 - DNA, 36 bp, Homo sapiens
  chr16:54198161-54198197
  hypo
aaagaaagttctggctgggtgcggtggttcatgcct

SEQ ID NO: 90485 - DNA, 31 bp, Homo sapiens; identical to SEQ ID NO: 29245
  chr16:54201073-54201104
  hypo

SEQ ID NO: 90486 - DNA, 30 bp, Homo sapiens
  chr16:54211522-54211552
  hypo
cccgttggacgatgcgtggagaggactgtg

SEQ ID NO: 90487 - DNA, 30 bp, Homo sapiens
  chr16:54244546-54244576
  hypo
cgccgcctttgtcttcggtctgctctggtg

SEQ ID NO: 90488 - DNA, 213 bp, Homo sapiens
  chr16:55052637-55052850
  hypo
gaaagaaaggcagcttcgaggagtgaaaagttcccactctggcaggggcagaggtagaatttggcaggggcagaggtagaatttgaacccaggtccctcggcctctaaatgtcatgcagcagagtttcctctctggccaagaggttgcaggcagtggcctgcgtcacgccctcccttccccgggcactgcacccactccgggcccttttgaag

SEQ ID NO: 90489 - DNA, 47 bp, Homo sapiens
  chr16:55053596-55053643
  hypo
caccaaactcacacaccgcactcacatacatacgacacacagtcaca

SEQ ID NO: 90490 - DNA, 31 bp, Homo sapiens
  chr16:55189531-55189562
  hypo
tgctgaggacattgaacgcatcatctcattt

SEQ ID NO: 90491 - DNA, 72 bp, Homo sapiens; identical to SEQ ID NO: 53085
  chr16:55357500-55357572
  hypo

SEQ ID NO: 90492 - DNA, 329 bp, Homo sapiens; identical to SEQ ID NO: 10685
  chr16:55357611-55357940
  hypo

SEQ ID NO: 90493 - DNA, 301 bp, Homo sapiens; identical to SEQ ID NO: 53090
  chr16:55362962-55363263
  hypo

SEQ ID NO: 90494 - DNA, 428 bp, Homo sapiens; identical to SEQ ID NO: 53096
  chr16:55512935-55513363
  hypo

SEQ ID NO: 90495 - DNA, 199 bp, Homo sapiens; identical to SEQ ID NO: 10693
  chr16:55513482-55513681
  hypo

SEQ ID NO: 90496 - DNA, 507 bp, Homo sapiens; identical to SEQ ID NO: 53098
  chr16:55513946-55514453
  hypo

SEQ ID NO: 90497 - DNA, 31 bp, Homo sapiens
  chr16:55705894-55705925
  hypo
actacaacgtcatcatcgcctggtcactcta

SEQ ID NO: 90498 - DNA, 211 bp, Homo sapiens; identical to SEQ ID NO: 29251
  chr16:55739210-55739421
  hypo

SEQ ID NO: 90499 - DNA, 350 bp, Homo sapiens; identical to SEQ ID NO: 10698
  chr16:56224482-56224832
  hypo

SEQ ID NO: 90500 - DNA, 1491 bp, Homo sapiens; identical to SEQ ID NO: 53105
  chr16:56224880-56226371
  hypo

SEQ ID NO: 90501 - DNA, 56 bp, Homo sapiens; identical to SEQ ID NO: 53106
  chr16:56227983-56228039
  hypo

SEQ ID NO: 90502 - DNA, 137 bp, Homo sapiens; identical to SEQ ID NO: 53107
  chr16:56228279-56228416
  hypo

SEQ ID NO: 90503 - DNA, 36 bp, Homo sapiens; identical to SEQ ID NO: 10702
  chr16:56228577-56228613
  hypo

SEQ ID NO: 90504 - DNA, 114 bp, Homo sapiens
  chr16:56309860-56309974
  hypo
cttctccggagaagacgtgaaacagtacaagcctgttgtctacagcaacactatccagtccctggcagccatcgtccgggccatggacactttgggcatcgaatatggtgataa

SEQ ID NO: 90505 - DNA, 30 bp, Homo sapiens
  chr16:56322639-56322669
  hypo
agcaggggtggaggcgggtagggtctttgt

SEQ ID NO: 90506 - DNA, 30 bp, Homo sapiens
  chr16:56358203-56358233
  hypo
gggcccccacattagcgtgtgatcctcagg

SEQ ID NO: 90507 - DNA, 58 bp, Homo sapiens
  chr16:56368402-56368460
  hypo
tcccgggagctgcatgcgtagcccttttggctgtgaatgagtgcgtgaggccaagacc

SEQ ID NO: 90508 - DNA, 166 bp, Homo sapiens
  chr16:56368689-56368855
  hypo
gagcaggacatcctccgaaccagggtcaaaaccactggcatcgtagaaacccacttcacattcaagaacctccacttcaggtgaggcccagagaggcccccaggccctggcgagggctaagatgggacatgcccagcctctcagcgcattgcgtttacagcgccca

SEQ ID NO: 90509 - DNA, 254 bp, Homo sapiens
  chr16:56370682-56370936
  hypo
tggatccattgcttcgaggacgtcacggccatcattttctgtgtcgcgctcagcggctatgaccaggtgctccacgaagacgaaaccacggtgagtggcctgggccccccgggcagggggcagcgctgaggagacggccgcaggataggccagccctctgagcactgggcctcgggtgcccacaatggctctggggtccagccagctgttgtggttagaggtttccatcatggacaggccgtgccggcactcca

SEQ ID NO: 90510 - DNA, 30 bp, Homo sapiens
  chr16:56394089-56394119
  hypo
atggctgccagaggcggctcactgcagttg

SEQ ID NO: 90511 - DNA, 30 bp, Homo sapiens
  chr16:56396839-56396869
  hypo
tgaagcctccgttccgcggcggcagccagc

SEQ ID NO: 90512 - DNA, 30 bp, Homo sapiens
  chr16:56397995-56398025
  hypo
ggtccagtggcacacgctcggtctggacac

SEQ ID NO: 90513 - DNA, 31 bp, Homo sapiens; identical to SEQ ID NO: 29258
  chr16:56399063-56399094
  hypo

SEQ ID NO: 90514 - DNA, 30 bp, Homo sapiens
  chr16:56400946-56400976
  hypo
catctcaatggcctcggctccctggagagc

SEQ ID NO: 90515 - DNA, 26 bp, Homo sapiens
  chr16:56605852-56605878
  hypo
tcacttgccccgcggcctggttccta

SEQ ID NO: 90516 - DNA, 30 bp, Homo sapiens; identical to SEQ ID NO: 53114
  chr16:56623200-56623230
  hypo

SEQ ID NO: 90517 - DNA, 218 bp, Homo sapiens; identical to SEQ ID NO: 53115
  chr16:56642230-56642448
  hypo

SEQ ID NO: 90518 - DNA, 634 bp, Homo sapiens; identical to SEQ ID NO: 53117
  chr16:56666027-56666661
  hypo

SEQ ID NO: 90519 - DNA, 30 bp, Homo sapiens; identical to SEQ ID NO: 53123
  chr16:56692018-56692048
  hypo

SEQ ID NO: 90520 - DNA, 28 bp, Homo sapiens
  chr16:56774934-56774962
  hypo
gggagagggagagcgctaaatttctttt

SEQ ID NO: 90521 - DNA, 70 bp, Homo sapiens
  chr16:56782267-56782337
  hypo
cagcaggcgggagagcgcctgcgttcccgtaccctaacacgcacgtcccaggagacggcagatgtcaagg

SEQ ID NO: 90522 - DNA, 30 bp, Homo sapiens
  chr16:56812061-56812091
  hypo
cagaggcgtggaagcggttaataacgaatg

SEQ ID NO: 90523 - DNA, 30 bp, Homo sapiens; identical to SEQ ID NO: 29261
  chr16:56815811-56815841
  hypo

SEQ ID NO: 90524 - DNA, 30 bp, Homo sapiens; identical to SEQ ID NO: 29262
  chr16:56821256-56821286
  hypo

SEQ ID NO: 90525 - DNA, 23 bp, Homo sapiens
  chr16:56848400-56848423
  hypo
ctgcatttcgtttttttctaact

SEQ ID NO: 90526 - DNA, 115 bp, Homo sapiens
  chr16:56857027-56857142
  hypo
agaggaaagaacacccgctcctttcctgggaggcgtcttttgaagggagtgagtgggaaggaaaatgggaggctgtgacgctcaccaagtaacgtaagagcggtggcccctggag

SEQ ID NO: 90527 - DNA, 312 bp, Homo sapiens
  chr16:56857407-56857719
  hypo
ggcaggggtgctcatcggtggatggaactctgaagtctggccagcagagacgcatcttctgcactgagcttaagcctagccgtcacagacagatgacattaacctcatcccccaccacattctgccccctttggaggtcagagtgccacaaagaactagataatttctctggccctgcagcattgtcacatgcagtttcatttatgtgcagagcatttccgacatgtggaccatggtaaaacaaatgacagacgtgttgttgacaccggcaacggatgccctgaagaaccgcagcagcgtggaagtgcgcat

SEQ ID NO: 90528 - DNA, 41 bp, Homo sapiens
  chr16:56869745-56869786
  hypo
atgtcctgttaccagccgggcgcggtggctcacgcctgtaa

SEQ ID NO: 90529 - DNA, 31 bp, Homo sapiens; identical to SEQ ID NO: 29265
  chr16:56925877-56925908
  hypo

SEQ ID NO: 90530 - DNA, 234 bp, Homo sapiens
  chr16:56928255-56928489
  hypo
aaaccctaccccacagagcaccgtgtgcgacttgaattcagtcagccatgttcattatacagatgggtcgactggggtccagcgaggagaggaaggggtttgctaatggcagagcggggcaggaactcacatagtgctctgtcctgagtgtattcttgtcatgactcacggggactctccttgccaggcctcaccctcctcattccctatctccttggccgcaagaggaggtgg

SEQ ID NO: 90531 - DNA, 79 bp, Homo sapiens
  chr16:56951554-56951633
  hypo
agaaggatttctgggcagcagcggtagcttgagcaaaagacagagtgaggattgccccgggcatgtctggagaacaaga

SEQ ID NO: 90532 - DNA, 30 bp, Homo sapiens; identical to SEQ ID NO: 29267
  chr16:57006125-57006155
  hypo

SEQ ID NO: 90533 - DNA, 30 bp, Homo sapiens; identical to SEQ ID NO: 29268
  chr16:57050328-57050358
  hypo

SEQ ID NO: 90534 - DNA, 30 bp, Homo sapiens; identical to SEQ ID NO: 29269
  chr16:57054725-57054755
  hypo

SEQ ID NO: 90535 - DNA, 31 bp, Homo sapiens; identical to SEQ ID NO: 29270
  chr16:57100435-57100466
  hypo

SEQ ID NO: 90536 - DNA, 361 bp, Homo sapiens; identical to SEQ ID NO: 53132
  chr16:57126698-57127059
  hypo

SEQ ID NO: 90537 - DNA, 28 bp, Homo sapiens
  chr16:57138115-57138143
  hypo
caccacgcccggccggaaggcactcttg

SEQ ID NO: 90538 - DNA, 31 bp, Homo sapiens
  chr16:57148714-57148745
  hypo
aatagaaagaattggccgggctctatagctc

SEQ ID NO: 90539 - DNA, 30 bp, Homo sapiens; identical to SEQ ID NO: 29271
  chr16:57180833-57180863
  hypo

SEQ ID NO: 90540 - DNA, 31 bp, Homo sapiens
  chr16:57222225-57222256
  hypo
atggttttccaaatatcgggcaatcatttcc

SEQ ID NO: 90541 - DNA, 30 bp, Homo sapiens
  chr16:57278224-57278254
  hypo
caagactccgtctcaaaaaaataaaaaatg

SEQ ID NO: 90542 - DNA, 169 bp, Homo sapiens
  chr16:57289763-57289932
  hypo
tcacttgtgagaataaaaggccgtgctattctatttatgccagcacaaacagcataaaccaggactgttccagacccagcaagcaggaagtataggcagccttcctccggtcaaagagttcgcaggtggtgctgaacgactccagaacgtgaactgccctacagcaggc

SEQ ID NO: 90543 - DNA, 30 bp, Homo sapiens
  chr16:57290510-57290540
  hypo
gccccagtcttggacgctgaagtcctctaa

SEQ ID NO: 90544 - DNA, 95 bp, Homo sapiens
  chr16:57304015-57304110
  hypo
aggtttttagaaacaacgtaacggccaaaggggccaaggcagcaaatccttccatggcccccgagtccaaacacagtccccgagtctatccacaa

SEQ ID NO: 90545 - DNA, 85 bp, Homo sapiens
  chr16:57304958-57305043
  hypo
ggctatggcaggaggacgatgctggaggtgggggctcagacctggtcctcctccaaggcgttcattgtatcgcttgttattcctg

SEQ ID NO: 90546 - DNA, 19 bp, Homo sapiens
  chr16:57311201-57311220
  hypo
cctattaaagaaattaggg

SEQ ID NO: 90547 - DNA, 456 bp, Homo sapiens; identical to SEQ ID NO: 53134
  chr16:57318161-57318617
  hypo

SEQ ID NO: 90548 - DNA, 32 bp, Homo sapiens; identical to SEQ ID NO: 29273
  chr16:57326588-57326620
  hypo

SEQ ID NO: 90549 - DNA, 30 bp, Homo sapiens
  chr16:57416035-57416065
  hypo
ctaactcgaaatggcggcaccttcgagaag

SEQ ID NO: 90550 - DNA, 30 bp, Homo sapiens
  chr16:57416322-57416352
  hypo
ctccactgccgccacgtggcagagttctgc

SEQ ID NO: 90551 - DNA, 31 bp, Homo sapiens
  chr16:57442423-57442454
  hypo
ggtgatcctccctactcggcctccagagtag

SEQ ID NO: 90552 - DNA, 275 bp, Homo sapiens
  chr16:57537287-57537562
  hypo
acagcacaggctgcccgcacaaccgtgaagctggccttcttggcaagtctcttcctcccagaaaagaggtcttgcaggcgtggagcagcagagaggaggtaagcgtgggaggccagctcggggagcagcccagcccagccatggctcactgccgggtagccggagagcctctggggcctccttgaggctgcctgtcaggctgatggagtggatagatgcggtagaagcagatggggccggtgacctggcagacaggtgcgcgcataacacctctg

SEQ ID NO: 90553 - DNA, 288 bp, Homo sapiens; identical to SEQ ID NO: 29274
  chr16:57559707-57559995
  hypo

SEQ ID NO: 90554 - DNA, 60 bp, Homo sapiens
  chr16:57657364-57657424
  hypo
tgtcttggacctggtcatgctcgcccctcctgtgtgcccggcctttcattctatcatctg

SEQ ID NO: 90555 - DNA, 43 bp, Homo sapiens
  chr16:57674355-57674398
  hypo
ggttttgaggaagcttaaatgcgtgaacatgtgtaaaaagctc

SEQ ID NO: 90556 - DNA, 58 bp, Homo sapiens
  chr16:57686682-57686740
  hypo
ggccgccttagtaggccgcccacgctacctgggcagaggggcccgagcctggagtcag

SEQ ID NO: 90557 - DNA, 102 bp, Homo sapiens
  chr16:57697545-57697647
  hypo
cactgcctgtggcccccgagcccggcccagccccaggccagtcagccgcagactttggaaagcccaacgaccatggagagatgggccgttgccatggtggac

SEQ ID NO: 90558 - DNA, 31 bp, Homo sapiens
  chr16:57716416-57716447
  hypo
cccatccccaacaagccgagtgtgacttgcc

SEQ ID NO: 90559 - DNA, 225 bp, Homo sapiens; identical to SEQ ID NO: 29276
  chr16:57734045-57734270
  hypo

SEQ ID NO: 90560 - DNA, 76 bp, Homo sapiens
  chr16:57737537-57737613
  hypo
aagagaagatggagcacgagctccgccatggcttttggcttcaaaagcctctggctgggcacggtggctcattttg

SEQ ID NO: 90561 - DNA, 208 bp, Homo sapiens
  chr16:57759977-57760185
  hypo
agaaaatcacagagcggttcttccgcaacccagcgaagcccgcggaggaggacgtggcagagcgcgtgtttctggtcgcggaggagcgcatccagctgcgctaccactgccgtgaggaccacatcacggcctccaagcgcgagttcctgcggcgcaccgaggtggacagcaaaggcaacaagatcatcatgacgcccgacatgtgcat

SEQ ID NO: 90562 - DNA, 266 bp, Homo sapiens
  chr16:57935387-57935653
  hypo
ggagcctcccacagccctgagcgtgagggcaccaaaaggtgtacctgaaagagtgcgactttgctaacgatgttgtagttcacgtcgatggcgaggtccagccgcatcttgtctggaagctgcaccatcagctctgactcatctgtgaacaaggcctggcaagggtcagaggcaaggccgggccccaccccagacatacataccggccaagtgcccacctactggctcaccagggcacaccattgccctgccgcatggaaccactc

SEQ ID NO: 90563 - DNA, 30 bp, Homo sapiens
  chr16:57937723-57937753
  hypo
acccagcatgccttgcgagtgccaggtgta

SEQ ID NO: 90564 - DNA, 1326 bp, Homo sapiens
  chr16:58030193-58031519
  hypo
gatgggccacagcaatctggccgcccgcactgcccgctggtgccaggagtacgagcggcacaccctctccctgcctcatacccctgcgtcctcactcccgaggtctcagaacaccgagctgggtggggcccttggtgcaaggcagctgtgaggagctaggctgcgcgaggcctgctgggcccacggcgccgactcaggtcaggctggtaggggccacagccgcagagtcagggcaggcaggcggctacctggtaggcgccctccgctgccgcggcggcggcactgtgctgcgcgctgtgctcctgcaacaaggccacgtctaggaagcgctccccgcaccatacacacttgaactgctgctcgcgggcgtgcacgccctggtgcttgttgagatgctcccgctgcttgaaggccttgtcgcagttggggcacttgtagggcttctcgcctgtgtgtacccgccggtgccgctgcaggtctgacgcgtacttgaagcgtttctcgcagtctgggcacttgagtggcttctcgcgggccggatcgcagcggtgctgcacgaactcggaagaggagaagaagcggcgttcgcaaagcgtgcagcgcaggggcttctctgccgccgcacagtgggccagctggtgcttctgcagggccgacgcgcgcttgtaggccttgttgcacacagggcacttgaagggccgctcggccgcgccgggcaggcacttgtgccgcagcagctcggcagattggtcaaagcctttctggcacacggggcacttgaagagagtctcgagggtgtgcacgtgctggtggtagagcaggtggctgggctgcccaaagcccttctcacataggccgcatttgaagggctcctcggtcttgtgtgtgcgccggtggcgcatcagtgcgtactgctgcttgaagcccatggggcacaggtcgcacttgaagggccgctcggcgctgtgtgtgcgctcatgctgccgcaggtccgagggccgcttgaaggccttctggcactcgccgcagcggaagggccgctccccacttggcgtgcacgggtgctgcagcagctccgacgactccttgaaatgcaactcgcacacgttgcagcggaacaggtggtgctcgcccgagtgcgcgtacatgtggcgcaccaggtgagagcggtgcttgaaggtcttctcgcagactgcgcacttgtagggccgctcggagctgtgcgtgcgcttgtggtgcaccaggtgcgacgactggctgaagcttttgtcacacagcgtgcacttgtagggcttctcaccggtgtggatccgctcatgccgagag

SEQ ID NO: 90565 - DNA, 749 bp, Homo sapiens; identical to SEQ ID NO: 53143
  chr16:58059828-58060577
  hypo

SEQ ID NO: 90566 - DNA, 73 bp, Homo sapiens
  chr16:58062995-58063068
  hypo
tggtgccaccaccaccaaaaccgatccacccgcctttcctcaacaggcccacgagtatcttcctagcccctac

SEQ ID NO: 90567 - DNA, 31 bp, Homo sapiens
  chr16:58075443-58075474
  hypo
cctgtgctgggggccccggggcccagggttc

SEQ ID NO: 90568 - DNA, 68 bp, Homo sapiens
  chr16:58076201-58076269
  hypo
tctggcgtggtctgcccggtgacatcagtgctgcctacgagcgccaagacggtcgttttgtctttttc

SEQ ID NO: 90569 - DNA, 152 bp, Homo sapiens
  chr16:58077137-58077289
  hypo
aagcgaacctggagcccggctacccacagccgctgaccagctatggcctgggcatcccctatgaccgcattgacacggccatctggtgggagcccacaggccacaccttcttcttccaagaggacaggtgagcagtgcgtccctcccctaag

SEQ ID NO: 90570 - DNA, 175 bp, Homo sapiens
  chr16:58078934-58079109
  hypo
ccaaatactggaaattcgacaatgagcgcctgcggatggagcccggctaccccaagtccatcctgcgggacttcatgggctgccaggagcacgtggagccaggcccccgatggcccgacgtggcccggccgcccttcaacccccacgggggtgcagagcccggggcggacagcgc

SEQ ID NO: 90571 - DNA, 30 bp, Homo sapiens; identical to SEQ ID NO: 29281
  chr16:58121034-58121064
  hypo

SEQ ID NO: 90572 - DNA, 30 bp, Homo sapiens
  chr16:58164150-58164180
  hypo
gcgaaacccggtctcaaataaataaataat

SEQ ID NO: 90573 - DNA, 142 bp, Homo sapiens
  chr16:58192178-58192320
  hypo
cgtgatctctctatacgcgttaagacgtttgatttggttcttgttctgcttatggaaaagtgggagaaccgcaacagacctggggaaagagacgggaggagggaaagacgtcattaatcaacctgagcgggcgaggggaggc

SEQ ID NO: 90574 - DNA, 31 bp, Homo sapiens; identical to SEQ ID NO: 29282
  chr16:58192530-58192561
  hypo

SEQ ID NO: 90575 - DNA, 30 bp, Homo sapiens
  chr16:58283174-58283204
  hypo
gatgcacagtgtgacgcatgatgttgctgt

SEQ ID NO: 90576 - DNA, 30 bp, Homo sapiens; identical to SEQ ID NO: 29283
  chr16:58314560-58314590
  hypo

SEQ ID NO: 90577 - DNA, 68 bp, Homo sapiens; identical to SEQ ID NO: 53147
  chr16:58426316-58426384
  hypo

SEQ ID NO: 90578 - DNA, 1300 bp, Homo sapiens; identical to SEQ ID NO: 53149
  chr16:58497469-58498769
  hypo

SEQ ID NO: 90579 - DNA, 31 bp, Homo sapiens
  chr16:58523213-58523244
  hypo
tcacttctctgcttaacgagccatctcagtc

SEQ ID NO: 90580 - DNA, 169 bp, Homo sapiens; identical to SEQ ID NO: 29286
  chr16:58534052-58534221
  hypo

SEQ ID NO: 90581 - DNA, 30 bp, Homo sapiens
  chr16:58554844-58554874
  hypo
cagagatgcagtttcgtctaactggcacct

SEQ ID NO: 90582 - DNA, 102 bp, Homo sapiens; identical to SEQ ID NO: 29287
  chr16:58558293-58558395
  hypo

SEQ ID NO: 90583 - DNA, 29 bp, Homo sapiens
  chr16:58886044-58886073
  hypo
ggagggaatgctggtcaggcacggtggct

SEQ ID NO: 90584 - DNA, 30 bp, Homo sapiens
  chr16:61278306-61278336
  hypo
actcgtttggtcccgcgctggcagctcagc

SEQ ID NO: 90585 - DNA, 31 bp, Homo sapiens; identical to SEQ ID NO: 10725
  chr16:61445875-61445906
  hypo

SEQ ID NO: 90586 - DNA, 134 bp, Homo sapiens
  chr16:61615417-61615551
  hypo
ttttcatgctaaggggcgcctgcaggtccacctggagccacccttagccccgcctcgacctccttcccatgctcattggcacctaaagtccagagggggctgaggttgcagggggccatcgtgtcagcactgcc

SEQ ID NO: 90587 - DNA, 30 bp, Homo sapiens
  chr16:63007819-63007849
  hypo
atgagccactgtgcccggcctttcttaagc

SEQ ID NO: 90588 - DNA, 30 bp, Homo sapiens
  chr16:63737551-63737581
  hypo
atgaagagctgcggccgctcggagatcctg

SEQ ID NO: 90589 - DNA, 30 bp, Homo sapiens; identical to SEQ ID NO: 53159
  chr16:65157413-65157443
  hypo

SEQ ID NO: 90590 - DNA, 30 bp, Homo sapiens; identical to SEQ ID NO: 53160
  chr16:65157648-65157678
  hypo

SEQ ID NO: 90591 - DNA, 30 bp, Homo sapiens; identical to SEQ ID NO: 29290
  chr16:65998387-65998417
  hypo

SEQ ID NO: 90592 - DNA, 20 bp, Homo sapiens
  chr16:66179370-66179390
  hypo
ttgtttgtttttgagacgga

SEQ ID NO: 90593 - DNA, 190 bp, Homo sapiens
  chr16:66420653-66420843
  hypo
acactcacacacagccactgccgcccattcccagctcacgtcacctcttcttttctagatcaagtcaagcgtgagtcgcaagaatgccaagtacctgctcaaaggagaatatgtgggcaaggtcttccgggtcgatgcagagacaggagacgtgttcgccattgagaggctggaccgggagaatatctca

SEQ ID NO: 90594 - DNA, 66 bp, Homo sapiens; identical to SEQ ID NO: 29292
  chr16:66440979-66441045
  hypo

SEQ ID NO: 90595 - DNA, 160 bp, Homo sapiens
  chr16:66579298-66579458
  hypo
aagaaacttgcccaaacgtctaacaactggcaagtggataaacaaagtgcactacagccacgccatgaatactattcagctataggaaaaaatgacatactaatacgtgctacaaggcagatgcatgtcaaaatattatgctaagcaaccaggagcggtg

SEQ ID NO: 90596 - DNA, 619 bp, Homo sapiens
  chr16:66600010-66600629
  hypo
gaggaagagatttccgaagtctgcaccccgcgcagagcactactgtaacttccaagggagcgctgggagcagcgggatcgggttttccggcacccgggcctgggtggcagggaagaatgtgccgggatccgcctcagggatctttgaatctctttactgcctggctggccggcagctccgaggtgtggggttgcagagattttgagttctcgggctaggcggtggcattgcaccccctgtggcaatgagggtggctgaagggctcggcttgtcggtggggcagcgagagccgggtgcacgcgccggggaggtagccaacagccgttgggacgcgacgctggttcccaggggagagccagccgctgccgcggcactggttcagacggccaggccctagggacccaccatggatcctgaacacgccaaacctgagtcatccgaggcaccttcagggaacttgaaacaaccggagactgccgcagccctggcaagtagcggcagcgtagtgagttctgtacccaaggcacagcgcaacatctcagcgaagaccgcaccccggaagcaccccgcagtctcaattcgcagtgcgcagtccgcagccgccgcacgtccccaaggc

SEQ ID NO: 90597 - DNA, 28 bp, Homo sapiens
  chr16:66638193-66638221
  hypo
gggtggccaagaaagtcgcaagaaaact

SEQ ID NO: 90598 - DNA, 185 bp, Homo sapiens; identical to SEQ ID NO: 53165
  chr16:66638268-66638453
  hypo

SEQ ID NO: 90599 - DNA, 30 bp, Homo sapiens; identical to SEQ ID NO: 29296
  chr16:66646880-66646910
  hypo

SEQ ID NO: 90600 - DNA, 15 bp, Homo sapiens
  chr16:66652521-66652536
  hypo
gcaagcaagaattca

SEQ ID NO: 90601 - DNA, 173 bp, Homo sapiens; identical to SEQ ID NO: 29297
  chr16:66652773-66652946
  hypo

SEQ ID NO: 90602 - DNA, 298 bp, Homo sapiens; identical to SEQ ID NO: 53166
  chr16:66730082-66730380
  hypo

SEQ ID NO: 90603 - DNA, 65 bp, Homo sapiens
  chr16:66752186-66752251
  hypo
acagcagcacacagctgcttacgaccacagatgaaaacactctcgattgatacattttccccatc

SEQ ID NO: 90604 - DNA, 17 bp, Homo sapiens
  chr16:66769685-66769702
  hypo
ggcgtgagccaccgcaa

SEQ ID NO: 90605 - DNA, 69 bp, Homo sapiens; identical to SEQ ID NO: 29298
  chr16:66781397-66781466
  hypo

SEQ ID NO: 90606 - DNA, 336 bp, Homo sapiens
  chr16:66835305-66835641
  hypo
agggcctgacggggcggtaagacatcctggccggcccaacccgccttacacaggcgccaacatacagagtttccaagcgcggtaaggcaggacaacaacgcgcgggagcggaggccgtggcgtctaccctcaagcgggagcttccgccctttcttcatcaccgctcacctgccacgacgcacgacagggtttcccgcccagccgaccaggctcacgtccgtgggcgggacttccggccggcagccccgccgcccctgcaaggtgtcttacgcttccgcgggtgccctaggttgccaagggcaatggggtggtcggtgtcccggccgcaagattttt

SEQ ID NO: 90607 - DNA, 30 bp, Homo sapiens
  chr16:66835845-66835875
  hypo
ggcacctcgctaatcgtcaccacagcccca

SEQ ID NO: 90608 - DNA, 30 bp, Homo sapiens
  chr16:66862019-66862049
  hypo
atcaaagtatggcacgtagaagacacctga

SEQ ID NO: 90609 - DNA, 30 bp, Homo sapiens; identical to SEQ ID NO: 29300
  chr16:66919589-66919619
  hypo

SEQ ID NO: 90610 - DNA, 82 bp, Homo sapiens; identical to SEQ ID NO: 29301
  chr16:66942965-66943047
  hypo

SEQ ID NO: 90611 - DNA, 121 bp, Homo sapiens
  chr16:66986332-66986453
  hypo
tcatgcccataatccccgcacttttggatgccgaggtgggcctcctgaacttgagcccaggactttgacgctagcctaggcagcttggagaaacgccatctctacaaaaaaaaaattcaaa

SEQ ID NO: 90612 - DNA, 191 bp, Homo sapiens; identical to SEQ ID NO: 29302
  chr16:67006194-67006385
  hypo

SEQ ID NO: 90613 - DNA, 44 bp, Homo sapiens
  chr16:67138795-67138839
  hypo
ggattacaggcgtgagccaccacgcctgggctggtgtgttgctt

SEQ ID NO: 90614 - DNA, 145 bp, Homo sapiens; identical to SEQ ID NO: 29303
  chr16:67175551-67175696
  hypo

SEQ ID NO: 90615 - DNA, 30 bp, Homo sapiens
  chr16:67182988-67183018
  hypo
gggtcaccattacacgggtttcaactggtt

SEQ ID NO: 90616 - DNA, 71 bp, Homo sapiens; identical to SEQ ID NO: 53172
  chr16:67184511-67184582
  hypo

SEQ ID NO: 90617 - DNA, 633 bp, Homo sapiens; identical to SEQ ID NO: 10737
  chr16:67189017-67189650
  hypo

SEQ ID NO: 90618 - DNA, 31 bp, Homo sapiens; identical to SEQ ID NO: 10739
  chr16:67203649-67203680
  hypo

SEQ ID NO: 90619 - DNA, 31 bp, Homo sapiens
  chr16:67214547-67214578
  hypo
caactccccacactgtcgacctctggggaca

SEQ ID NO: 90620 - DNA, 195 bp, Homo sapiens
  chr16:67221090-67221285
  hypo
ctgatcccccatgtcccgctgccccaaaggcactgaccccaggtacacatgcagtgcccagtgcagcaaggcgaaggcatccgcagcttctagctcaggccctgcaaggaggttctgcaggctgcggcgcaaaccactatgcagcgtgtgggcccatagctggaccacgttgtactgtggcgggcagcaaggcgc

SEQ ID NO: 90621 - DNA, 42 bp, Homo sapiens
  chr16:67235495-67235537
  hypo
tggggctgctggagccgcgcatgcggacgcccctggacccct

SEQ ID NO: 90622 - DNA, 30 bp, Homo sapiens
  chr16:67236343-67236373
  hypo
gaccagagcttccacgagctcttctgtgtg

SEQ ID NO: 90623 - DNA, 175 bp, Homo sapiens
  chr16:67241602-67241777
  hypo
tgttgatgccagggcacgtggccacatccaacacccggagctgcctgcacgcctgcccaatagcatccagtgtcctgtggggaggccacctgatgagtgcctggcccggtgtgggacccagcccagcccctgcaccgtggctccatctgcctggtgtcatcggacacacttactg

SEQ ID NO: 90624 - DNA, 232 bp, Homo sapiens; identical to SEQ ID NO: 29307
  chr16:67270957-67271189
  hypo

SEQ ID NO: 90625 - DNA, 216 bp, Homo sapiens; identical to SEQ ID NO: 10744
  chr16:67280007-67280223
  hypo

SEQ ID NO: 90626 - DNA, 458 bp, Homo sapiens; identical to SEQ ID NO: 10746
  chr16:67281139-67281597
  hypo

SEQ ID NO: 90627 - DNA, 30 bp, Homo sapiens
  chr16:67290834-67290864
  hypo
tgctgaatcagttccggctagtccctctgg

SEQ ID NO: 90628 - DNA, 26 bp, Homo sapiens
  chr16:67309946-67309972
  hypo
tgcgcccggccgtagtcaacagttta

SEQ ID NO: 90629 - DNA, 344 bp, Homo sapiens
  chr16:67313744-67314088
  hypo
gagggacacccttaacgttattccctcttcccaggcctgaattgcagttcctgtgccctggcactaagactggcacctcctgcggcccatgcccttcgcctgcattgcccactgagtcccactcgactgtcttcagcgcggttcacactgagacccagccctctcccgctggccccgagcaggcccacctttaggagggcgtgatggaaaggcccctggagaatggggatgagtccccagactctcagggccatgccaccgactggagatttgctgtgtgcagtttcagggatgcctgggaagaggaggaacctgcttcccagatgcacgttaaggacccaggt

SEQ ID NO: 90630 - DNA, 31 bp, Homo sapiens
  chr16:67321789-67321820
  hypo
tctccacccagaggtgcgcatggctgagatg

SEQ ID NO: 90631 - DNA, 31 bp, Homo sapiens; identical to SEQ ID NO: 29310
  chr16:67363908-67363939
  hypo

SEQ ID NO: 90632 - DNA, 31 bp, Homo sapiens
  chr16:67446022-67446053
  hypo
aaacaaaaaaaggctgcggggatggatagat

SEQ ID NO: 90633 - DNA, 31 bp, Homo sapiens
  chr16:67456091-67456122
  hypo
gcacccaaagagtgctcgatgggtagtaatc

SEQ ID NO: 90634 - DNA, 369 bp, Homo sapiens; identical to SEQ ID NO: 29311
  chr16:67469688-67470057
  hypo

SEQ ID NO: 90635 - DNA, 50 bp, Homo sapiens; identical to SEQ ID NO: 29312
  chr16:67470487-67470537
  hypo

SEQ ID NO: 90636 - DNA, 123 bp, Homo sapiens; identical to SEQ ID NO: 29313
  chr16:67470862-67470985
  hypo

SEQ ID NO: 90637 - DNA, 80 bp, Homo sapiens; identical to SEQ ID NO: 29314
  chr16:67472274-67472354
  hypo

SEQ ID NO: 90638 - DNA, 219 bp, Homo sapiens
  chr16:67478340-67478559
  hypo
gggtcgccccccagcgggtccacaaaccccaccctgatgcgctgatgctgacaccactgcccacctcccatgaccaccacagcggctcaccaagaggcgtgtccaccagaatggcattgtagagctcagcaggtgtctgagcaatgttcacggcctccatctgctcgaagctgcctagtgggtggcacttgggcacgagctcagcgatggagcgctggt

SEQ ID NO: 90639 - DNA, 42 bp, Homo sapiens; identical to SEQ ID NO: 29315
  chr16:67511576-67511618
  hypo

SEQ ID NO: 90640 - DNA, 30 bp, Homo sapiens; identical to SEQ ID NO: 29316
  chr16:67513453-67513483
  hypo

SEQ ID NO: 90641 - DNA, 65 bp, Homo sapiens; identical to SEQ ID NO: 29317
  chr16:67518129-67518194
  hypo

SEQ ID NO: 90642 - DNA, 146 bp, Homo sapiens; identical to SEQ ID NO: 53196
  chr16:67564102-67564248
  hypo

SEQ ID NO: 90643 - DNA, 30 bp, Homo sapiens; identical to SEQ ID NO: 53197
  chr16:67564457-67564487
  hypo

SEQ ID NO: 90644 - DNA, 120 bp, Homo sapiens; identical to SEQ ID NO: 10752
  chr16:67571883-67572003
  hypo

SEQ ID NO: 90645 - DNA, 67 bp, Homo sapiens
  chr16:67574478-67574545
  hypo
cagatctgcatgaaatatgggcgtcagcgctggaaactacggggccgaattgagggtagtggaaagc

SEQ ID NO: 90646 - DNA, 108 bp, Homo sapiens
  chr16:67578606-67578714
  hypo
acatttgggcccctgcgctgccaggaggcatgggccctggagcggctgctgcgggaagcccgagtactggaggcagtatgcgagttcagcaggcggtgggagatcccg

SEQ ID NO: 90647 - DNA, 26 bp, Homo sapiens
  chr16:67593738-67593764
  hypo
attagacatgagaaaacttgccgggc

SEQ ID NO: 90648 - DNA, 289 bp, Homo sapiens; identical to SEQ ID NO: 53200
  chr16:67678717-67679006
  hypo

SEQ ID NO: 90649 - DNA, 83 bp, Homo sapiens
  chr16:67681543-67681626
  hypo
gaggaggtgagacccacgtggctgttcccaccccccaaggcatgactgcactcagcagacacctcgagcgttgtccaggagcc

SEQ ID NO: 90650 - DNA, 30 bp, Homo sapiens
  chr16:67691165-67691195
  hypo
cccccgtcctcaaacgcaggccaaaactcg

SEQ ID NO: 90651 - DNA, 30 bp, Homo sapiens
  chr16:67691471-67691501
  hypo
agcagagtgtggagcggtatctgtcctgcg

SEQ ID NO: 90652 - DNA, 31 bp, Homo sapiens; identical to SEQ ID NO: 29320
  chr16:67700331-67700362
  hypo

SEQ ID NO: 90653 - DNA, 30 bp, Homo sapiens; identical to SEQ ID NO: 53201
  chr16:67700712-67700742
  hypo

SEQ ID NO: 90654 - DNA, 81 bp, Homo sapiens; identical to SEQ ID NO: 53202
  chr16:67700945-67701026
  hypo

SEQ ID NO: 90655 - DNA, 290 bp, Homo sapiens; identical to SEQ ID NO: 29321
  chr16:67709088-67709378
  hypo

SEQ ID NO: 90656 - DNA, 30 bp, Homo sapiens; identical to SEQ ID NO: 29322
  chr16:67825195-67825225
  hypo

SEQ ID NO: 90657 - DNA, 31 bp, Homo sapiens
  chr16:67848830-67848861
  hypo
tcactccggatctctccgccattcctctttt

SEQ ID NO: 90658 - DNA, 30 bp, Homo sapiens
  chr16:67875250-67875280
  hypo
ttggtattttcctacgcttggccctacccg

SEQ ID NO: 90659 - DNA, 203 bp, Homo sapiens
  chr16:67920021-67920224
  hypo
catgttcgggagcgcggcacaggctccgaaaccaaccaggagacgctgcgggctacagcgcctgcactccccatggcccctgcgcccccactgctggcggctgctctggctctggcctacctcctgaggcctctggcctagcttgttgggttgggtagcagcgcccgtacctccagccctgctctggcggtggttgtccaggc

SEQ ID NO: 90660 - DNA, 30 bp, Homo sapiens
  chr16:67943082-67943112
  hypo
tgcgtgtgctgcgtcgggtgcgtcatgcca

SEQ ID NO: 90661 - DNA, 141 bp, Homo sapiens; identical to SEQ ID NO: 29324
  chr16:67965741-67965882
  hypo

SEQ ID NO: 90662 - DNA, 30 bp, Homo sapiens
  chr16:67966241-67966271
  hypo
tcgcagtggttcctcgtccatttggaacag

SEQ ID NO: 90663 - DNA, 31 bp, Homo sapiens
  chr16:67982232-67982263
  hypo
actgtggaggagtcctcggagccagatcgca

SEQ ID NO: 90664 - DNA, 342 bp, Homo sapiens; identical to SEQ ID NO: 53214
  chr16:68118297-68118639
  hypo

SEQ ID NO: 90665 - DNA, 311 bp, Homo sapiens; identical to SEQ ID NO: 10758
  chr16:68118759-68119070
  hypo

SEQ ID NO: 90666 - DNA, 26 bp, Homo sapiens
  chr16:68126066-68126092
  hypo
atgtgtgaggctgggcgcggtggctc

SEQ ID NO: 90667 - DNA, 40 bp, Homo sapiens
  chr16:68250712-68250752
  hypo
ggtgtgagccactacacccggccaagaagaggtttcttaa

SEQ ID NO: 90668 - DNA, 72 bp, Homo sapiens; identical to SEQ ID NO: 10759
  chr16:68269812-68269884
  hypo

SEQ ID NO: 90669 - DNA, 111 bp, Homo sapiens; identical to SEQ ID NO: 10760
  chr16:68269896-68270007
  hypo

SEQ ID NO: 90670 - DNA, 281 bp, Homo sapiens; identical to SEQ ID NO: 10761
  chr16:68270022-68270303
  hypo

SEQ ID NO: 90671 - DNA, 487 bp, Homo sapiens; identical to SEQ ID NO: 53219
  chr16:68271017-68271504
  hypo

SEQ ID NO: 90672 - DNA, 58 bp, Homo sapiens; identical to SEQ ID NO: 10763
  chr16:68298828-68298886
  hypo

SEQ ID NO: 90673 - DNA, 2 bp, Homo sapiens
  chr16:68314936-68314938
  hypo
gc

SEQ ID NO: 90674 - DNA, 40 bp, Homo sapiens
  chr16:68385560-68385600
  hypo
ggccgttcaggctcctcgctgtgcacgtgttcatttactc

SEQ ID NO: 90675 - DNA, 46 bp, Homo sapiens; identical to SEQ ID NO: 29332
  chr16:68386059-68386105
  hypo

SEQ ID NO: 90676 - DNA, 138 bp, Homo sapiens
  chr16:68386174-68386312
  hypo
ttcttcactaccagcctgctgccgtggcacaacctctacttctggtacgtgcggaccgctgtggaccagcacctggggccaggtgccatggtgatgccccaggcagcctcgctgcacgctgtggttgtggagttcagg

SEQ ID NO: 90677 - DNA, 30 bp, Homo sapiens
  chr16:68394714-68394744
  hypo
agggtgcaggcatgcgagacgacattggca

SEQ ID NO: 90678 - DNA, 810 bp, Homo sapiens; identical to SEQ ID NO: 53222
  chr16:68481955-68482765
  hypo

SEQ ID NO: 90679 - DNA, 120 bp, Homo sapiens
  chr16:68525557-68525677
  hypo
tacgtgagtccaggggggcagcgaagaagaggccgaaggagcagtggggcaggggtcgcgggtctctgtggtgtggagggggcagcgccgggaatgtgcggggaagcctggaggcctggg

SEQ ID NO: 90680 - DNA, 232 bp, Homo sapiens
  chr16:68526074-68526306
  hypo
agctgggagggcacttagacacgtccaccgaaacctttatttgatatatgaaatggagatcccgaggggaggaacagccaccgaggccctggctagaagtggtcaagcttgtccgcatgggctccgagggctcccagggaccgcaacgcttcagccttctaggccacactgcagggtacacccagtggtcgctgccctggtcactgccaccgccttggcctgttccttgccc

SEQ ID NO: 90681 - DNA, 31 bp, Homo sapiens
  chr16:68560873-68560904
  hypo
tgcctgaacctccccccgccccaggctcctg

SEQ ID NO: 90682 - DNA, 92 bp, Homo sapiens; identical to SEQ ID NO: 53224
  chr16:68564223-68564315
  hypo

SEQ ID NO: 90683 - DNA, 31 bp, Homo sapiens
  chr16:68672309-68672340
  hypo
atcaagtggaaagctccgaagggcctagagg

SEQ ID NO: 90684 - DNA, 36 bp, Homo sapiens
  chr16:68697406-68697442
  hypo
gattacaggcgtgagccaccacgcctggccgaaagt

SEQ ID NO: 90685 - DNA, 31 bp, Homo sapiens; identical to SEQ ID NO: 29335
  chr16:68721866-68721897
  hypo

SEQ ID NO: 90686 - DNA, 30 bp, Homo sapiens; identical to SEQ ID NO: 29336
  chr16:68731681-68731711
  hypo

SEQ ID NO: 90687 - DNA, 192 bp, Homo sapiens
  chr16:68737003-68737195
  hypo
accatgccttttccctcgtcactgacccaacgatctttttttcttcccaaagggactaaaggggctacagataggccctgtccccacagtgcgctttcccagtccctagagaggcctgaggagggtggcatgctctcattcctagacagttggtgaggagctggggccccgaattcccggccccccatttct

SEQ ID NO: 90688 - DNA, 35 bp, Homo sapiens
  chr16:68739593-68739628
  hypo
ggattacaggcgtgagccgccgtgcccagccccaa

SEQ ID NO: 90689 - DNA, 121 bp, Homo sapiens
  chr16:68743255-68743376
  hypo
cgagcccctgcacccggcgcagaagcactcttgtcaattagagtgctggcaagcaagagaggcaagctcaaaaggtgaccggagaagggttcatggaggtgcagtctacagtggggtgagc

SEQ ID NO: 90690 - DNA, 18 bp, Homo sapiens
  chr16:68761399-68761417
  hypo
atctgtaaaatggtcacg

SEQ ID NO: 90691 - DNA, 30 bp, Homo sapiens
  chr16:68767774-68767804
  hypo
ggagaaggacttgccgagaagtctgaagaa

SEQ ID NO: 90692 - DNA, 23 bp, Homo sapiens
  chr16:68769450-68769473
  hypo
caggactccgtctcaaaaaaaaa

SEQ ID NO: 90693 - DNA, 20 bp, Homo sapiens
  chr16:68770856-68770876
  hypo
caaaacgaacaaacaaaaaa

SEQ ID NO: 90694 - DNA, 21 bp, Homo sapiens
  chr16:68780831-68780852
  hypo
acagagcgatactccatctca

SEQ ID NO: 90695 - DNA, 89 bp, Homo sapiens
  chr16:68782326-68782415
  hypo
tttaatttctgtgggtacaaagttggtgtgtatatttatggggtacgttcttttattttctttttatagctatgcggtatggatgcacc

SEQ ID NO: 90696 - DNA, 30 bp, Homo sapiens
  chr16:68792435-68792465
  hypo
catgctgattgtgcccgtgaatagttactg

SEQ ID NO: 90697 - DNA, 30 bp, Homo sapiens; identical to SEQ ID NO: 53233
  chr16:68820930-68820960
  hypo

SEQ ID NO: 90698 - DNA, 19 bp, Homo sapiens
  chr16:68829771-68829790
  hypo
aaagctaaatgcaggccgg

SEQ ID NO: 90699 - DNA, 38 bp, Homo sapiens
  chr16:68838287-68838325
  hypo
ttacaggtgtgagccactgcgcccggccctatctgcct

SEQ ID NO: 90700 - DNA, 168 bp, Homo sapiens
  chr16:68849365-68849533
  hypo
ctaacacaaaatgtttcgttttgtttttaacttcattgtttctgctctctagggcttggattttgaggccaagcagcagtacattctacacgtagcagtgacgaatgtggtaccttttgaggtctctctcaccacctccacagccaccgtcaccgtggatgtgctgga

SEQ ID NO: 90701 - DNA, 19 bp, Homo sapiens
  chr16:68849942-68849961
  hypo
tggagtctcactttgtcgc

SEQ ID NO: 90702 - DNA, 18 bp, Homo sapiens
  chr16:68850200-68850218
  hypo
caccgcacccagcccata

SEQ ID NO: 90703 - DNA, 141 bp, Homo sapiens
  chr16:68854967-68855108
  hypo
tctgttgttttgtatccgtatcgtatactaatattgatgatagttccctgggtaccaatttttcctactaccatatgctccgtgttgtgtcaagatataaaagaaatgcaaacagaagtgtggatgggctgggcgcagtgg

SEQ ID NO: 90704 - DNA, 225 bp, Homo sapiens
  chr16:68856756-68856981
  hypo
ggtaaaaccctgggtgcgatggaagtcactctggccctggagaagaacctgaactggacccttttggatcttcatgccttgggttccacctgcacagacccccatatctgtgacttcctggagagccacttcctagatgaaaaagtaaaactcatcaagaagataggtgaccacctgaccaaccttcacaggccagccggcctccaggccgggctgggcaaaaag

SEQ ID NO: 90705 - DNA, 30 bp, Homo sapiens
  chr16:68866427-68866457
  hypo
tatataaagaaaaggccgggtgcagtggct

SEQ ID NO: 90706 - DNA, 155 bp, Homo sapiens
  chr16:68876699-68876854
  hypo
aaaacagaacacagatcgaacttttactgggaactttactaagttcactgaaaaaaaaaatcatattacccataacaacatttgtagctttacattcacgatggatatatatgcgtgtgtacgtctgtacttaggttttgtttgtttgtttgttt

SEQ ID NO: 90707 - DNA, 78 bp, Homo sapiens
  chr16:68942209-68942287
  hypo
cttacctcccatgttcacacccgtccccgtgcccagcaatactctttctaaatcacgttccaaggggatgtgctctta

SEQ ID NO: 90708 - DNA, 31 bp, Homo sapiens
  chr16:68955370-68955401
  hypo
acgctcggccggaatcatttttcttaagttg

SEQ ID NO: 90709 - DNA, 21 bp, Homo sapiens
  chr16:68970520-68970541
  hypo
agccaccgcaccctgcctata

SEQ ID NO: 90710 - DNA, 35 bp, Homo sapiens
  chr16:69077093-69077128
  hypo
acttcagtctgggcgacagagagagactctgtaag

SEQ ID NO: 90711 - DNA, 28 bp, Homo sapiens
  chr16:69098023-69098051
  hypo
ccaccacgcccagctctacagccatact

SEQ ID NO: 90712 - DNA, 27 bp, Homo sapiens
  chr16:69107558-69107585
  hypo
ggttagaaagggcactcgaagccaggc

SEQ ID NO: 90713 - DNA, 30 bp, Homo sapiens
  chr16:69117664-69117694
  hypo
gcatggctgaccctcggggtggttttatgg

SEQ ID NO: 90714 - DNA, 135 bp, Homo sapiens; identical to SEQ ID NO: 29347
  chr16:69129257-69129392
  hypo

SEQ ID NO: 90715 - DNA, 139 bp, Homo sapiens
  chr16:69133539-69133678
  hypo
attttaaagaaaacaacaacataaatgcaggtatgcatacataacgattgtgtctcctgttcgttacttaacactgcatcgtaggtgtctggagtattcctccattgtcctcatgaacgtgtttttttagtagctgcac

SEQ ID NO: 90716 - DNA, 30 bp, Homo sapiens; identical to SEQ ID NO: 29349
  chr16:69136641-69136671
  hypo

SEQ ID NO: 90717 - DNA, 1079 bp, Homo sapiens; identical to SEQ ID NO: 53234
  chr16:69139466-69140545
  hypo

SEQ ID NO: 90718 - DNA, 726 bp, Homo sapiens
  chr16:69143287-69144013
  hypo
tctctcgccagatgccggtgcagctgacgacagccctgcgtgtggtgggcaccagcctgtttgccctggcagtgctgggtggcatcctggcagcctatgtgacgggctaccagttcatccacacggaaaagcactacctgtccttcggcctgtacggcgccatcctgggcctgcacctgctcattcagagcctttttgccttcctggagcaccggcgcatgcgacgtgccggccaggccctgaagctgccctccccgcggcggggctcggtggcactgtgcattgccgcataccaggaggaccctgactacttgcgcaagtgcctgcgctcggcccagcgcatctccttccctgacctcaaggtggtcatggtggtggatggcaaccgccaggaggacgcctacatgctggacatcttccacgaggtgctgggcggcaccgagcaggccggcttctttgtgtggcgcagcaacttccatgaggcaggcgagggtgagacggaggccagcctgcaggagggcatggaccgtgtgcgggatgtggtgcgggccagcaccttctcgtgcatcatgcagaagtggggaggcaagcgcgaggtcatgtacacggccttcaaggccctcggcgattcggtggactacatccaggtaagggcgcctccctaggagcgtgtgtacatggggataagtctggacagcctggcaaactctccgccaagaatctgag

SEQ ID NO: 90719 - DNA, 279 bp, Homo sapiens
  chr16:69264948-69265227
  hypo
acccgtttcttatgcaaactgcctttctcattgcggctggcttagtgaaaatgaaattaaataaagtcttatcttttctaatcctatatagagtctaaacttttttactgtcactgtcaacaatcttctcatttgctttgtgtgttttgaagtaagcagaaggatacaaaacaagttgtaacattgtttcacataaagcagtgctgctttttaggggagagaagtataaagcgtagaattgacttttaaaaaagatgtggcccgcggacgaggtggctc

SEQ ID NO: 90720 - DNA, 20 bp, Homo sapiens
  chr16:69293158-69293178
  hypo
tttttttttgagacagagtt

SEQ ID NO: 90721 - DNA, 27 bp, Homo sapiens
  chr16:69296280-69296307
  hypo
tcactgcaagctcggcctcccgggttg

SEQ ID NO: 90722 - DNA, 19 bp, Homo sapiens
  chr16:69298857-69298876
  hypo
aattacatctattggccgg

SEQ ID NO: 90723 - DNA, 36 bp, Homo sapiens
  chr16:69344403-69344439
  hypo
ttgtttcttaatttagcgacgaggtcttactatgtt

SEQ ID NO: 90724 - DNA, 35 bp, Homo sapiens
  chr16:69344498-69344533
  hypo
ctggaattacaggcgtgggccagtacacccagccc

SEQ ID NO: 90725 - DNA, 816 bp, Homo sapiens
  chr16:69352179-69352995
  hypo
ctgtgagagccactgcaggtggcctcccagagtatgaggtgtgagtcaccgcacctggcctgggctgctctttaagtccagctgaagcacatttcccttacggccttcaggagagggccgacccggattcccatctgctccgcgaagaaacagggcgggttataggagtgtttgctgggggggtcctgaagtgagctgctgagagcattggcccaaatgtccctgaagtacttgcttgagtcacacggcactgttaagccaggaaggcttcgttccttaaccagtgtgcaggcagcggagcctggacttgctgggagcacctctgtgctccaggctgaagggccagcttgtgactttccgtctcccttcccagcagtgacagtgacagtgaaggggataatccggagaaaaagaaactgcaagaacagctgatgggtaagtggctcgcggccctgtggcagcggcaggggatgagagtgggtccgctgctgggttggctcatgccccttggccgggcccgggcccgggccggcctccctctcgcaggtgccgtcgtgatggagaagcccaacatacggtggaacgacgtggccgggctggagggggccaaggaggccctcaaagaagctgtcattttgccaatcaaattcccacacttgttcacaggtgagagttgagccatttcaaaccccaatgtaaaaattccaggcttccgcagggctggcactccgaggcacccgggagtcagtggcgactcagcccccggggcctgcagagggccaggcctggctgctcgctggtgtccacaacactgct

SEQ ID NO: 90726 - DNA, 470 bp, Homo sapiens
  chr16:69354848-69355318
  hypo
tggcccatgaaatgcgtccgtttcactcaaatcttcgtgcctccccttccgtgaataccattccatcatccgctgtcaactcctgccgtgtgctgggctctctaggtttgaaaaacgaatttatatccccttgccggaggaagctgcccgcgcccagatgttccggttgcatctcgggagcactccccacaacctcacggatgcaaacatccacgagctggcccggaagacggaaggctactcgggcgcggacatcagcatcatcgtgcgggactctctcatgcagcccgtgaggaaggtgcagtcggccacacacttcaaaaaggtgagtgcccgcggccactgctgagaaaaatctcatagtaagagcgggatgttcggttttttttttcccagctcctggtcctgctccccggctgctcaggtgacacagtctctgaggcctcctggagagccgagggccagtgcca

SEQ ID NO: 90727 - DNA, 30 bp, Homo sapiens; identical to SEQ ID NO: 29354
  chr16:69358565-69358595
  hypo

SEQ ID NO: 90728 - DNA, 90 bp, Homo sapiens; identical to SEQ ID NO: 53235
  chr16:69373054-69373144
  hypo

SEQ ID NO: 90729 - DNA, 186 bp, Homo sapiens; identical to SEQ ID NO: 29356
  chr16:69383485-69383671
  hypo

SEQ ID NO: 90730 - DNA, 30 bp, Homo sapiens; identical to SEQ ID NO: 29357
  chr16:69386176-69386206
  hypo

SEQ ID NO: 90731 - DNA, 101 bp, Homo sapiens
  chr16:69391671-69391772
  hypo
agtgctttacaaacaggcatccgtaaatgctggctagtgatgcgtttcaagctcttcagtaaaatcaacatcgttttcttttttttttttttttttttgag

SEQ ID NO: 90732 - DNA, 33 bp, Homo sapiens
  chr16:69397587-69397620
  hypo
acagttgggagcagtggctcacgtctgtaatcc

SEQ ID NO: 90733 - DNA, 31 bp, Homo sapiens; identical to SEQ ID NO: 29358
  chr16:69400784-69400815
  hypo

SEQ ID NO: 90734 - DNA, 30 bp, Homo sapiens; identical to SEQ ID NO: 29359
  chr16:69439230-69439260
  hypo

SEQ ID NO: 90735 - DNA, 23 bp, Homo sapiens
  chr16:69485566-69485589
  hypo
aaagttggccgggggcggtgact

SEQ ID NO: 90736 - DNA, 23 bp, Homo sapiens
  chr16:69485828-69485851
  hypo
aagcgagacgccgtctcaaaaaa

SEQ ID NO: 90737 - DNA, 25 bp, Homo sapiens
  chr16:69494916-69494941
  hypo
gtactaaagaaattttctggccggc

SEQ ID NO: 90738 - DNA, 85 bp, Homo sapiens
  chr16:69495120-69495205
  hypo
aaagaaagaaagaaattttctccttcaatgttttctcaaggatcctacttttggattcttcagtctcttgcggttactcttcaag

SEQ ID NO: 90739 - DNA, 30 bp, Homo sapiens
  chr16:69557095-69557125
  hypo
tgctgtcgatgaaagcggcattctacagcc

SEQ ID NO: 90740 - DNA, 167 bp, Homo sapiens
  chr16:69557608-69557775
  hypo
ggggcagatcaaagccggatttcccagcacaggtagcaagcatggcaggaatctgggagacctctcacccagtccccaacccacgctcacagatggaaagccacaccattattggtcacacctttgcgcattgccagcacgcaggcgtttgtgacaaatcttttata

SEQ ID NO: 90741 - DNA, 31 bp, Homo sapiens
  chr16:69560242-69560273
  hypo
tctgtgccctctaggtcgctatctccacaat

SEQ ID NO: 90742 - DNA, 135 bp, Homo sapiens
  chr16:69560822-69560957
  hypo
ccctgccaatccaggcgtgccaggagggcgtatggaattgccaggttgtcattgcacaaggggaggggtgtacggctcagaattgagggaaatgctaagggtcactcataggcttgagcacgaagctcaccaggt

SEQ ID NO: 90743 - DNA, 42 bp, Homo sapiens
  chr16:69613047-69613089
  hypo
attacaggcgccggccactgcgcctggccataagttttaata

SEQ ID NO: 90744 - DNA, 30 bp, Homo sapiens
  chr16:69630322-69630352
  hypo
cttaaaaaaagaaaagaaggccgggtgcag

SEQ ID NO: 90745 - DNA, 20 bp, Homo sapiens
  chr16:69632633-69632653
  hypo
aatgtcagcgtaggccgggc

SEQ ID NO: 90746 - DNA, 31 bp, Homo sapiens; identical to SEQ ID NO: 29365
  chr16:69641962-69641993
  hypo

SEQ ID NO: 90747 - DNA, 39 bp, Homo sapiens
  chr16:69642740-69642779
  hypo
ctggccaggtgtggtggctcacgcctgtaattccagcac

SEQ ID NO: 90748 - DNA, 26 bp, Homo sapiens
  chr16:69694309-69694335
  hypo
gcagcagactgcgactgtctcaaaaa

SEQ ID NO: 90749 - DNA, 31 bp, Homo sapiens
  chr16:69746590-69746621
  hypo
aattcccctgaaggttcgttgaaaatgaggt

SEQ ID NO: 90750 - DNA, 241 bp, Homo sapiens
  chr16:69757713-69757954
  hypo
aacaaaaagatgcttgtgaataggcaatttaaaagttttctgggccctggagggttcattttcccttcctgccacttaactagctgagcaacatgacctgggaggagttagactattagagtttaccctgagagaggccacaagatgcacacacggataacctcttcagggtacaatggcattagtgtgttaggagaggtaagggacaaagttcaacagaaggctgggtgtggtggctcat

SEQ ID NO: 90751 - DNA, 241 bp, Homo sapiens
  chr16:69761436-69761677
  hypo
gaagtgagactccgtctcaaaaaaaactctataaagtaaaagttactgtaaagaaggagatatactctcagtaggtgaaggaaaaagaactagagctttaaagtggtaattaaccatcagaagaatcacagatgggggaggtgaggatgacacagggcccttccgttgtccctccagtgcaaaagttaaggaggcaccagaaaactggtttccaactcccgacctcaggtgatcctaccgc

SEQ ID NO: 90752 - DNA, 31 bp, Homo sapiens; identical to SEQ ID NO: 29368
  chr16:69789089-69789120
  hypo

SEQ ID NO: 90753 - DNA, 183 bp, Homo sapiens
  chr16:69825949-69826132
  hypo
ataaccatttaaatagcgtaggtggttctttttcccgtgcatttcatgaagaaagctgatagtgtaacctgtggggtgtgactgcgcggtttccagttcccttgtgcctgcccacagtgtgatcctggtgttttaaggtatatttttaaatgcatcgaggcccttaaacgtaggacagctatt

SEQ ID NO: 90754 - DNA, 30 bp, Homo sapiens; identical to SEQ ID NO: 29370
  chr16:69833186-69833216
  hypo

SEQ ID NO: 90755 - DNA, 339 bp, Homo sapiens; identical to SEQ ID NO: 29371
  chr16:69833661-69834000
  hypo

SEQ ID NO: 90756 - DNA, 125 bp, Homo sapiens; identical to SEQ ID NO: 29372
  chr16:69906917-69907042
  hypo

SEQ ID NO: 90757 - DNA, 208 bp, Homo sapiens; identical to SEQ ID NO: 29373
  chr16:69921951-69922159
  hypo

SEQ ID NO: 90758 - DNA, 30 bp, Homo sapiens; identical to SEQ ID NO: 29374
  chr16:69922491-69922521
  hypo

SEQ ID NO: 90759 - DNA, 30 bp, Homo sapiens
  chr16:69965631-69965661
  hypo
tcccctgtccctcccgcccctgcctgctgt

SEQ ID NO: 90760 - DNA, 30 bp, Homo sapiens; identical to SEQ ID NO: 29375
  chr16:69972986-69973016
  hypo

SEQ ID NO: 90761 - DNA, 151 bp, Homo sapiens; identical to SEQ ID NO: 29376
  chr16:70151412-70151563
  hypo

SEQ ID NO: 90762 - DNA, 290 bp, Homo sapiens; identical to SEQ ID NO: 29377
  chr16:70196487-70196777
  hypo

SEQ ID NO: 90763 - DNA, 131 bp, Homo sapiens
  chr16:70286314-70286445
  hypo
ctctgcagcaaaaacgattcctacttgctgacgcggaaagctcaggtctggagagccgttatctatagatgcgagcgtgacgatcaacagcaatgcggggttagtggttctagaccgatggcactgacgtg

SEQ ID NO: 90764 - DNA, 177 bp, Homo sapiens
  chr16:70328601-70328778
  hypo
cagagttcctggggcgcgtgcccgagcgctgtaccgtcccctcagctgattggctgacaggatttccaggcctcagccaatgaggctccggcttggccagtgccaagagcagcggttgttggagtgtaactgccatgctcagccgcgatggctggggctgccgggcgcgtccaagat

SEQ ID NO: 90765 - DNA, 31 bp, Homo sapiens; identical to SEQ ID NO: 29380
  chr16:70346138-70346169
  hypo

SEQ ID NO: 90766 - DNA, 55 bp, Homo sapiens; identical to SEQ ID NO: 29381
  chr16:70399210-70399265
  hypo

SEQ ID NO: 90767 - DNA, 29 bp, Homo sapiens
  chr16:70416195-70416224
  hypo
tctttttcaagacagcgtctcattctgtc

SEQ ID NO: 90768 - DNA, 30 bp, Homo sapiens; identical to SEQ ID NO: 29382
  chr16:70426253-70426283
  hypo

SEQ ID NO: 90769 - DNA, 87 bp, Homo sapiens
  chr16:70433900-70433987
  hypo
ctcgactgtggattatcgatgaggtattgctgggtccactcaatgaaccatgaacagtcctgtcagctccgccgttgggggagaacc

SEQ ID NO: 90770 - DNA, 27 bp, Homo sapiens
  chr16:70439952-70439979
  hypo
gactccgtctcaaaaaaaaaaaaagcc

SEQ ID NO: 90771 - DNA, 377 bp, Homo sapiens; identical to SEQ ID NO: 10776
  chr16:70472226-70472603
  hypo

SEQ ID NO: 90772 - DNA, 30 bp, Homo sapiens
  chr16:70505181-70505211
  hypo
agggacaccacacgcggctacacggctccc

SEQ ID NO: 90773 - DNA, 51 bp, Homo sapiens
  chr16:70507079-70507130
  hypo
agccgtgcctggatcgggctgccacgctggcctctcgccgggacctgttct

SEQ ID NO: 90774 - DNA, 41 bp, Homo sapiens; identical to SEQ ID NO: 29386
  chr16:70508777-70508818
  hypo

SEQ ID NO: 90775 - DNA, 22 bp, Homo sapiens
  chr16:70510200-70510222
  hypo
cggcctgtgctgtgcctctcat

SEQ ID NO: 90776 - DNA, 30 bp, Homo sapiens
  chr16:70514649-70514679
  hypo
tgctcgctgcctgccgtggctttcccacct

SEQ ID NO: 90777 - DNA, 103 bp, Homo sapiens
  chr16:70595194-70595297
  hypo
attacaggcatgagccaccgcacctggccttcattccatttaattcttgcagctgtccagccttgtggtactgttttcattttacacacgtggaagcaggctt

SEQ ID NO: 90778 - DNA, 178 bp, Homo sapiens; identical to SEQ ID NO: 29387
  chr16:70595529-70595707
  hypo

SEQ ID NO: 90779 - DNA, 31 bp, Homo sapiens
  chr16:70632022-70632053
  hypo
acaggcataaggcaccgcgcctggttgaagg

SEQ ID NO: 90780 - DNA, 30 bp, Homo sapiens; identical to SEQ ID NO: 29388
  chr16:70680616-70680646
  hypo

SEQ ID NO: 90781 - DNA, 30 bp, Homo sapiens; identical to SEQ ID NO: 29389
  chr16:70713552-70713582
  hypo

SEQ ID NO: 90782 - DNA, 30 bp, Homo sapiens; identical to SEQ ID NO: 29390
  chr16:70714363-70714393
  hypo

SEQ ID NO: 90783 - DNA, 30 bp, Homo sapiens; identical to SEQ ID NO: 29391
  chr16:70727986-70728016
  hypo

SEQ ID NO: 90784 - DNA, 30 bp, Homo sapiens; identical to SEQ ID NO: 29392
  chr16:70733219-70733249
  hypo

SEQ ID NO: 90785 - DNA, 119 bp, Homo sapiens
  chr16:70754282-70754401
  hypo
ttgaggctgccacaccgctttgatcaggacgaggaaagaagacacatctggggtgctgaagcatgtgttatgtggtaagaaagggagaacgcttcccggggagacggcaagaccaagct

SEQ ID NO: 90786 - DNA, 399 bp, Homo sapiens
  chr16:70754643-70755042
  hypo
cctggggtactgaggaggccccgatggccccatgttggggctatccgcccatgtggtctggagctggagctcaagactggggccggggcaggtcacaccccttctgagggaataaagagacacaaaacttagcacttaaggaagcagcttgcgaaaaaggaaagtgagagacggggctcaaaacagactggtggaggaccagaaaaaatgagcgctgacttgagtgcacttgaatcatctcagcttggcttcaaagaggccaaagtggatgatgcgagccactgcgataagccaggggaaaaacacatccctgagaagagggggtgacacatgtcctattgagcaagagtcaaaagggagattcagacctggagagatgttcaccgtcaaagtgccagg

SEQ ID NO: 90787 - DNA, 30 bp, Homo sapiens; identical to SEQ ID NO: 29393
  chr16:70783729-70783759
  hypo

SEQ ID NO: 90788 - DNA, 30 bp, Homo sapiens
  chr16:70794584-70794614
  hypo
aatggactgcatctccgcctgctccctttc

SEQ ID NO: 90789 - DNA, 117 bp, Homo sapiens
  chr16:70795367-70795484
  hypo
gatggagggatgggatgctgccgtgcaatgggcacgcgcagctgcaaaccctgccgcttggctgggaggcaggggaacccggtaaaggaacaccacgcaatgggcatggctgagaat

SEQ ID NO: 90790 - DNA, 38 bp, Homo sapiens
  chr16:70796477-70796515
  hypo
tgggaaagaggctgtccgtgtgccggaacatctggagg

SEQ ID NO: 90791 - DNA, 394 bp, Homo sapiens
  chr16:70807991-70808385
  hypo
tcaaacccagaaggttaacttcgatacactaccattaactaaatgattaccctaatttgaacatcacgagtttttccattcctggccttttgttccaggatctcacactgcatttagctaaactgtcttctttgtctcctccaatctgttgcagcccctcaatctgtgtgtctttcataaacttgacacttttgaagcgctggtcactctgcagaatgtctccccgtttgggttggtctcacgttttctcacgagtagggagttgcgcatcattggagggatgtcacggaagtgctgcgcctcagtgcaccctatcgggggaacgtgttgtctgttagcctcattactggtgacgttaacctcatcgcctgacgcacagtgtctgctgggtttc

SEQ ID NO: 90792 - DNA, 323 bp, Homo sapiens
  chr16:70811507-70811830
  hypo
caggccaagggggagtcggagcaagtgaagaggcacagatgaggggctgccctgactggaggtcctgtggttagaggaggagggagaagatgcggaggtggggcaggggtgcaaatatgcacacacacaaaggttcttgcccggaggtgtgccatgaggaacgtggtgctgtcggcggatcagcacaagtaaacaaagaaggccaggcatgaggtcctgtctccagccaggtggaccagagtgggaacagagggagcagagagggaagagtgagcaggagaggctgtgatgaacttgtccctgaccagcgaagctatctgtcc

SEQ ID NO: 90793 - DNA, 31 bp, Homo sapiens
  chr16:70825254-70825285
  hypo
ctaattccttctcatgcgtgattcctacctc

SEQ ID NO: 90794 - DNA, 46 bp, Homo sapiens; identical to SEQ ID NO: 29396
  chr16:71324584-71324630
  hypo

SEQ ID NO: 90795 - DNA, 132 bp, Homo sapiens; identical to SEQ ID NO: 10779
  chr16:71459956-71460088
  hypo

SEQ ID NO: 90796 - DNA, 231 bp, Homo sapiens; identical to SEQ ID NO: 53252
  chr16:71460270-71460501
  hypo

SEQ ID NO: 90797 - DNA, 183 bp, Homo sapiens
  chr16:71537484-71537667
  hypo
tccgtgttagggagcacgtacggatataggagtaggatgctgtccaatgatctaacaatgcacctgtggagattgccactcacggtgttctccgctttcctagagtctggagactctctcttcttactttcacagctctttggccatccacaaatccatttgcccacacgcttcctggttcct

SEQ ID NO: 90798 - DNA, 93 bp, Homo sapiens
  chr16:71661395-71661488
  hypo
gactccgtctcaaaaaaaaaaaaaaaagtcagatgggagacgctacatttttaaccaaagaacaaagtctacgtaaaattctcccactgaagg

SEQ ID NO: 90799 - DNA, 30 bp, Homo sapiens
  chr16:71674611-71674641
  hypo
cttcagcctcctagcggcagtgggctactg

SEQ ID NO: 90800 - DNA, 31 bp, Homo sapiens; identical to SEQ ID NO: 29399
  chr16:71705862-71705893
  hypo

SEQ ID NO: 90801 - DNA, 171 bp, Homo sapiens
  chr16:71715645-71715816
  hypo
ccacatacttgtagagtgtatcgaggcctccgggtctttctaactgcatgaagttgtgtcgcaagttgaggtaggtaatatcttgactatagaagagatgctcaggaacctcctcgaggctgtaacacgagagatccacggtactgattcgctgggacaccacctgaataa

SEQ ID NO: 90802 - DNA, 43 bp, Homo sapiens
  chr16:71716352-71716395
  hypo
tgggattacaggcgtgagtcacagcacccggtcgcaagaagtt

SEQ ID NO: 90803 - DNA, 27 bp, Homo sapiens
  chr16:71716784-71716811
  hypo
gtcattcatggctaggcgtggtggctc

SEQ ID NO: 90804 - DNA, 25 bp, Homo sapiens
  chr16:71741956-71741981
  hypo
tctttaaggtgtccacgccgcccct

SEQ ID NO: 90805 - DNA, 137 bp, Homo sapiens
  chr16:71748845-71748982
  hypo
ctatcatgctcattcgtaataactcagataacttaattttctttactgctgtctgtgtttccatccatcatcttcgttgacctctcttttccttgtgttttcagaaacgtgtcaagaataacgaaacagcgggttgc

SEQ ID NO: 90806 - DNA, 138 bp, Homo sapiens; identical to SEQ ID NO: 29403
  chr16:71754749-71754887
  hypo

SEQ ID NO: 90807 - DNA, 36 bp, Homo sapiens
  chr16:71756039-71756075
  hypo
caaaactgtatgaggccgggcgtggtggctcatcct

SEQ ID NO: 90808 - DNA, 46 bp, Homo sapiens; identical to SEQ ID NO: 29404
  chr16:71870743-71870789
  hypo

SEQ ID NO: 90809 - DNA, 90 bp, Homo sapiens
  chr16:71878715-71878805
  hypo
accgcgcctggcccaattgttatttattgaacagagtttgaagaaactgaaagtctccatttcggtggccaaaaccgcaattacttttgc

SEQ ID NO: 90810 - DNA, 231 bp, Homo sapiens
  chr16:71894093-71894324
  hypo
gcctcctcttgagccgcttggcctctcgctctcggatgagccgggcctgccgcttttccggggtttcattggcccgcttcagcctcatggcctcccgatcccgctgcagccggcgtgcccgctgctcgtctgtctcctgcatgcgctgcaagcgcttggcttcacggtccctcatgcgcctcacctcccgctcctcgggggtctcattgtcccgccggctcttcttggccg

SEQ ID NO: 90811 - DNA, 35 bp, Homo sapiens
  chr16:71948331-71948366
  hypo
ggattacagatgtgagccgccgcacccagcaagga

SEQ ID NO: 90812 - DNA, 39 bp, Homo sapiens
  chr16:72018726-72018765
  hypo
cagcctgggcgacagatcgagaatctgtctcaaaaaaag

SEQ ID NO: 90813 - DNA, 30 bp, Homo sapiens
  chr16:72038744-72038774
  hypo
gcgttcaactgtggcggttgcctggtcccc

SEQ ID NO: 90814 - DNA, 31 bp, Homo sapiens; identical to SEQ ID NO: 29406
  chr16:72056268-72056299
  hypo

SEQ ID NO: 90815 - DNA, 31 bp, Homo sapiens
  chr16:72060654-72060685
  hypo
ggggccatgtggtgtgcggatacctattttt

SEQ ID NO: 90816 - DNA, 30 bp, Homo sapiens
  chr16:72130744-72130774
  hypo
gactccatcccatccgggtggtgtgagcga

SEQ ID NO: 90817 - DNA, 30 bp, Homo sapiens
  chr16:72146498-72146528
  hypo
atctgtgcatatcacggccccccagggcag

SEQ ID NO: 90818 - DNA, 54 bp, Homo sapiens; identical to SEQ ID NO: 29407
  chr16:72460075-72460129
  hypo

SEQ ID NO: 90819 - DNA, 501 bp, Homo sapiens
  chr16:72461281-72461782
  hypo
tacttacgttgtctgcgttgctgtggatcctgaaaggtgttctgttggcaccgggcgctgagccaggggcaggcgctggaaacaaaagggagagacaaaaaaataaagtgattcaatgggaatattaattgctgctcttgtggattttacaaaacacataaactgttttctttttctttcttaaaaaaaaatgtggattggcgcgtgtcccttttgcatggaatatacaagtagtatgggatttacagcccagttacgggactcaggattagctgcgctggcatcttttgggcatattcttccttttaatgaatgagctttcgctgttaatgaggaataatcgtttggctaatgagctttgaaacattaagagaaaagaggttttttccgttaatcgctctggtgcgactgcatggatggattacaaaagacagcaataggaacgcagtacaaagggggggacctctcctgcagtgggagaagcaccgagatgggtgatgt

SEQ ID NO: 90820 - DNA, 209 bp, Homo sapiens; identical to SEQ ID NO: 53261
  chr16:72699009-72699218
  hypo

SEQ ID NO: 90821 - DNA, 30 bp, Homo sapiens
  chr16:72823677-72823707
  hypo
atctgcgggagaaacgaccatcttcttttc

SEQ ID NO: 90822 - DNA, 31 bp, Homo sapiens
  chr16:72829265-72829296
  hypo
gtgcactgggagcttccgccagctttggttt

SEQ ID NO: 90823 - DNA, 31 bp, Homo sapiens
  chr16:72835834-72835865
  hypo
cccccacctcctttctcggttgtagctgcaa

SEQ ID NO: 90824 - DNA, 31 bp, Homo sapiens; identical to SEQ ID NO: 29410
  chr16:72893758-72893789
  hypo

SEQ ID NO: 90825 - DNA, 149 bp, Homo sapiens
  chr16:72906616-72906765
  hypo
caaagtgctcagattagaggcatgggccacgtgcctggccatgtatttgttttaaataaatctatgatattcacactcacctacacgcctttcaaaagatggtggggggtgggggatgggcaaaactagacttccgaaagatggaagaa

SEQ ID NO: 90826 - DNA, 199 bp, Homo sapiens
  chr16:72916140-72916339
  hypo
ttctcccagtgggcagcgttgggcacgtgctgccacccactcatgaagatagcatggaagacagcctggagcccttgaccaagaacaacactaaccagaagggcagtgtacagctggtgccacgtgtcatatgctgaaacaacacgcacaaaaccctggtagcttcatcatcccagaaaaataacgcaacgaatgaatg

SEQ ID NO: 90827 - DNA, 31 bp, Homo sapiens
  chr16:72919232-72919263
  hypo
gcctctcaaggagttacgtagccagtcatgg

SEQ ID NO: 90828 - DNA, 116 bp, Homo sapiens
  chr16:72945690-72945806
  hypo
agaaagttctagtggacggtgctgaattctagaccaacaatcacatctagttacctggattaagtagaaagcagagggcagggggagagggatgcgggagacgtcacactgccact

SEQ ID NO: 90829 - DNA, 213 bp, Homo sapiens
  chr16:72949232-72949445
  hypo
tcttccatcaacacctagactcgcagaacacatcaaacagaaggctctcgacacccagtgtccgggatcagcgtggcgggcctctgctccaacctgtccacccaactagatctcaagaggaaaacagaattgccacctctcaagactgaggctacgtgcagtggctcacacttgtaaccccggcactcctggatgccaaggctcaagaggagc

SEQ ID NO: 90830 - DNA, 194 bp, Homo sapiens
  chr16:72957738-72957932
  hypo
tcatcctactttgaattgcctcgtcctaccacgttcaagacgcggctactgggcaggtccacgtctttaagttgtgtacaatgcctggttcacaacacgattactcattacatgtcaaaataataattatcacagatggcgaattcacaagtgggttagccgtcggctgtaacgggctagctagcacttgcccc

SEQ ID NO: 90831 - DNA, 105 bp, Homo sapiens
  chr16:72963491-72963596
  hypo
ctgtgttctgaaaggtggcctcgccctgtggctcttgccccagaggatgcctggggccacgcgggctgcgacagggccctccacgcaagctggctgtacataaac

SEQ ID NO: 90832 - DNA, 31 bp, Homo sapiens
  chr16:72966921-72966952
  hypo
tgggtttcctttaagacgcatggacatccta

SEQ ID NO: 90833 - DNA, 30 bp, Homo sapiens; identical to SEQ ID NO: 29414
  chr16:72967611-72967641
  hypo

SEQ ID NO: 90834 - DNA, 30 bp, Homo sapiens; identical to SEQ ID NO: 29415
  chr16:72984457-72984487
  hypo

SEQ ID NO: 90835 - DNA, 102 bp, Homo sapiens
  chr16:72984702-72984804
  hypo
gcatgtccaggttgtccgtcgtgaacttgttgcagacggcgcactggaagagcttcagcgacgggtcgttggtctggatgaagctctcgcccaggttcatca

SEQ ID NO: 90836 - DNA, 31 bp, Homo sapiens
  chr16:72989875-72989906
  hypo
ctggtgacaaataagacgaccagtgcttgtg

SEQ ID NO: 90837 - DNA, 31 bp, Homo sapiens
  chr16:72991202-72991233
  hypo
ttacacaaaaaccactcgagaagaccagagt

SEQ ID NO: 90838 - DNA, 489 bp, Homo sapiens
  chr16:72991938-72992427
  hypo
gacacaggagccccccggctccgggtgcttctccttcatgtgtgcctccagggtctgctggtacttatagtgccagttgcacttggggcacttgagtgtcttacacgagttacgagaatgcatcatggtcatgtggccgcccagcgagcgggaggagcccaggaccgtgtcgcatttggggcactccacgccactccccgaggggcactccccaaccccaagctcgcagagggagccagcgtgctggtgatggggaacgaagcccccatcgtcaccctctgtgctttcatttggttctggtgctgtggcattgtctttattggcactttcgtcagcgaagtccagcctcctgccgccctctgccacattggccctgacgccctcactgttaaagcttaaacgattcctcctgttcgcaccatcaaagacaacaaaggaagaagcagaattagaactagtagaagctgtgcccctcgacagggtctggag

SEQ ID NO: 90839 - DNA, 1014 bp, Homo sapiens
  chr16:72993524-72994538
  hypo
gagagttcaggaaaagcgaggggagaggcccactgccactgccactcccacaggcgcccccgccctgggtcagctggctcaggctctccacaatgtacgcggagccgtccggctggtagacgatctccccggccaggttctccacgtcactctcctcgtccccctcctcaccggtgtcgctggcgctctcctctctcaggggtggcggggggcgcgcgctggggcagtggtgctccatgtaggtctggaggctggcaaaggaggccgaacattcgttgcaggtgacctccttgctggcgggctcggaggggggcccggccgacgcggtgctctccgcgaggcgctcattgaagggggccctcaggctgtccaagggcccgtggctctcgcctgtggactgctccatgctactgggtttgtcagggaggtgggtgctgttgagttcagtccattgctggtgctgagggataccgcacccattgtccttccccgagacgacgggcgagtcacagccttccatggtaaggcctgcgtggagctttcattgcacccagtacggaggctcggacctgaagggcagaggcaaggggggaggagggagagaggggaaagagagagagaaaggaaagaggttaggagggccgaggctgaggtcctaccgcacggagcgctctaagaggcttctgtccacaacacagagacacagggcggagggcgggcctggggacactgccccacacggtccagcacacaggggtggcatggccgggtcaacagcctgagcgagggatatggggaaagaaggccaggaacagccctcttcggcttcgaattgtcaccgctctgcccctgaagactagcgggaatttccattctttgccagcatagcttcgatgggccacagtggagaacggacgcgtcatctctccagccctctacgaggtcacagccacagccctaccacttatggacagctcacacgaagtcagccccgactccgcgcactgtctgtgg

SEQ ID NO: 90840 - DNA, 193 bp, Homo sapiens
  chr16:72997029-72997222
  hypo
gaacccagtgggtccccgcacttttccaagcagccctgccagcctgacacgcacacctctcttcaggctccctccacgttctgtgccccttcccagtacttccctagtgccagggctagctggtacaggttcacacccctcctcccttcctgcagcccgcttctctgctggtggcacccggaactccctctaa

SEQ ID NO: 90841 - DNA, 31 bp, Homo sapiens
  chr16:73000124-73000155
  hypo
caattaaaatgctcaacggtggaatcaagac

SEQ ID NO: 90842 - DNA, 87 bp, Homo sapiens; identical to SEQ ID NO: 29419
  chr16:73007795-73007882
  hypo

SEQ ID NO: 90843 - DNA, 31 bp, Homo sapiens
  chr16:73026745-73026776
  hypo
tgcagaaaggccaggcgcgatggcccctgcc

SEQ ID NO: 90844 - DNA, 31 bp, Homo sapiens; identical to SEQ ID NO: 29420
  chr16:73063563-73063594
  hypo

SEQ ID NO: 90845 - DNA, 30 bp, Homo sapiens; identical to SEQ ID NO: 29421
  chr16:73083848-73083878
  hypo

SEQ ID NO: 90846 - DNA, 328 bp, Homo sapiens; identical to SEQ ID NO: 53262
  chr16:73091556-73091884
  hypo

SEQ ID NO: 90847 - DNA, 217 bp, Homo sapiens; identical to SEQ ID NO: 53263
  chr16:73091900-73092117
  hypo

SEQ ID NO: 90848 - DNA, 66 bp, Homo sapiens; identical to SEQ ID NO: 53264
  chr16:73092480-73092546
  hypo

SEQ ID NO: 90849 - DNA, 31 bp, Homo sapiens; identical to SEQ ID NO: 29423
  chr16:73162952-73162983
  hypo

SEQ ID NO: 90850 - DNA, 95 bp, Homo sapiens
  chr16:73208570-73208665
  hypo
ctgccccattgcagtccgctcatcaatgagcgacccagagggatcctttaaaaacccaaatcagggccgagcacagtggcttatgcctataatcc

SEQ ID NO: 90851 - DNA, 37 bp, Homo sapiens
  chr16:73222729-73222766
  hypo
tttacagggaggctagcgtctggatatttctttttct

SEQ ID NO: 90852 - DNA, 31 bp, Homo sapiens; identical to SEQ ID NO: 29424
  chr16:73232149-73232180
  hypo

SEQ ID NO: 90853 - DNA, 159 bp, Homo sapiens
  chr16:73675852-73676011
  hypo
gggcagggatggagacgctggtccacatgctcctccgactcctccctgcagagaatactgaattcaggcagtgtgagggacgcttccaccaaatttgtttctctttaaggcagctgcttaaagagggaaggtggtccgtggcctcgaggacatcaggtc

SEQ ID NO: 90854 - DNA, 30 bp, Homo sapiens; identical to SEQ ID NO: 29425
  chr16:74483679-74483709
  hypo

SEQ ID NO: 90855 - DNA, 31 bp, Homo sapiens; identical to SEQ ID NO: 29426
  chr16:74490226-74490257
  hypo

SEQ ID NO: 90856 - DNA, 90 bp, Homo sapiens; identical to SEQ ID NO: 29427
  chr16:74490376-74490466
  hypo

SEQ ID NO: 90857 - DNA, 46 bp, Homo sapiens
  chr16:74511567-74511613
  hypo
cagaataaaaattaaatgttgcggccaggtgcggtggctcacgcat

SEQ ID NO: 90858 - DNA, 206 bp, Homo sapiens
  chr16:74554954-74555160
  hypo
gagaaggaaaatgaatagccacgaaagatgaatgttccatgtggaaagaatagcgaatgcaaaagtcccgagtcaggaacattttctgagtatctgaagaatagcaaggaggacactgtggcttaagtagaggtggcaaggggcaacggtcgtaggagaagaggtcagagagttggtatttgcacgcttgcagggcacaaagattt

SEQ ID NO: 90859 - DNA, 214 bp, Homo sapiens; identical to SEQ ID NO: 10793
  chr16:74659411-74659625
  hypo

SEQ ID NO: 90860 - DNA, 33 bp, Homo sapiens
  chr16:74694093-74694126
  hypo
ctgaacaaagccctctctgagcggagatcgcac

SEQ ID NO: 90861 - DNA, 33 bp, Homo sapiens; identical to SEQ ID NO: 29430
  chr16:74694365-74694398
  hypo

SEQ ID NO: 90862 - DNA, 30 bp, Homo sapiens; identical to SEQ ID NO: 29431
  chr16:74716546-74716576
  hypo

SEQ ID NO: 90863 - DNA, 30 bp, Homo sapiens; identical to SEQ ID NO: 29432
  chr16:74752750-74752780
  hypo

SEQ ID NO: 90864 - DNA, 31 bp, Homo sapiens; identical to SEQ ID NO: 29433
  chr16:74767604-74767635
  hypo

SEQ ID NO: 90865 - DNA, 30 bp, Homo sapiens; identical to SEQ ID NO: 29434
  chr16:74782625-74782655
  hypo

SEQ ID NO: 90866 - DNA, 31 bp, Homo sapiens
  chr16:74886037-74886068
  hypo
gaaaaaaaagaaaagactggccgggtgcggt

SEQ ID NO: 90867 - DNA, 4 bp, Homo sapiens
  chr16:74901399-74901403
  hypo
tccc

SEQ ID NO: 90868 - DNA, 31 bp, Homo sapiens
  chr16:74901815-74901846
  hypo
ttgctgagtagcattccgcaggacagaggct

SEQ ID NO: 90869 - DNA, 38 bp, Homo sapiens; identical to SEQ ID NO: 29435
  chr16:74909077-74909115
  hypo

SEQ ID NO: 90870 - DNA, 30 bp, Homo sapiens; identical to SEQ ID NO: 29436
  chr16:74911730-74911760
  hypo

SEQ ID NO: 90871 - DNA, 104 bp, Homo sapiens
  chr16:74917221-74917325
  hypo
caccccggtttttaatctcactgtcaaagccacgtccagaggtccctgagccacgtgagggttctgcagtgttttgtacttccgacaacagttcagggttcagc

SEQ ID NO: 90872 - DNA, 128 bp, Homo sapiens; identical to SEQ ID NO: 29437
  chr16:74984547-74984675
  hypo

SEQ ID NO: 90873 - DNA, 41 bp, Homo sapiens; identical to SEQ ID NO: 10795
  chr16:75018962-75019003
  hypo

SEQ ID NO: 90874 - DNA, 30 bp, Homo sapiens; identical to SEQ ID NO: 53275
  chr16:75019006-75019036
  hypo

SEQ ID NO: 90875 - DNA, 149 bp, Homo sapiens
  chr16:75019625-75019774
  hypo
ccgtctcggaaaaaaaaagaaaaaagaaaaatcaaagctcgtgcaaaccgaagatacctcttctcctgatgcctatcccatcgagatatttaaaagtctgaatgtgcaatttattgtttcatacaatacagcagcgcctcccgtaacaa

SEQ ID NO: 90876 - DNA, 27 bp, Homo sapiens
  chr16:75022279-75022306
  hypo
tacaaagaacaacgtatagccaatcag

SEQ ID NO: 90877 - DNA, 20 bp, Homo sapiens
  chr16:75027319-75027339
  hypo
cagagcgaaactccatctca

SEQ ID NO: 90878 - DNA, 39 bp, Homo sapiens; identical to SEQ ID NO: 53278
  chr16:75033798-75033837
  hypo

SEQ ID NO: 90879 - DNA, 17 bp, Homo sapiens
  chr16:75041238-75041255
  hypo
gacgatgccagacccca

SEQ ID NO: 90880 - DNA, 44 bp, Homo sapiens; identical to SEQ ID NO: 29441
  chr16:75057286-75057330
  hypo

SEQ ID NO: 90881 - DNA, 29 bp, Homo sapiens
  chr16:75065306-75065335
  hypo
ggagccaccgtgcccggccatgtccaaat

SEQ ID NO: 90882 - DNA, 33 bp, Homo sapiens
  chr16:75075661-75075694
  hypo
aattctctcaggagttcgagaccagcctggcca

SEQ ID NO: 90883 - DNA, 45 bp, Homo sapiens
  chr16:75113380-75113425
  hypo
acaaaaacaagaaacctccttttgacccatcggtcaggccctcac

SEQ ID NO: 90884 - DNA, 41 bp, Homo sapiens
  chr16:75113749-75113790
  hypo
gcctgtagtgtagctgcgtgccaggaccccagcctgagttg

SEQ ID NO: 90885 - DNA, 31 bp, Homo sapiens
  chr16:75122962-75122993
  hypo
catgtgatttcccactcgcataatagacacc

SEQ ID NO: 90886 - DNA, 196 bp, Homo sapiens
  chr16:75127913-75128109
  hypo
agccaggtgtcctccacggcttagcagaggggcccagagcaagcacccgccctccttggggaggtgggggctgtgtgctggtggcatgcatagagtgctgggaagctggtcgtctccttgtcacgttcgaactcggacgaacacctgatttagtcctatgagtccacaccagagagcttgacgggggactatgtgt

SEQ ID NO: 90887 - DNA, 380 bp, Homo sapiens
  chr16:75136325-75136705
  hypo
tgtcattggcagtgttcgggacagttaagttcctttagtgacggagaagggatcctgccacaagctctgccttcttcacagctgagacactgctctcctgatatttctcctgtggcttggaggacttctgggtcgccttttgttcacgtcgcctcttttcacctgcccttcaaatattcatgtcggcctgggtttgtcttctgccttctttggattttggtctgaactttctccctggactgcctctttatcccacatccatgcctggcacccatgtctctgttccaaacctcagctctaggcttcagcagcctcctggaggtctccatcagctggccgggcctcctcccacccaactcagaatccgtcccttccttctc

SEQ ID NO: 90888 - DNA, 31 bp, Homo sapiens
  chr16:75136946-75136977
  hypo
ctcagccctgggcctgcgcgtgagaagatgt

SEQ ID NO: 90889 - DNA, 298 bp, Homo sapiens
  chr16:75138820-75139118
  hypo
ccacctcccagaggggcggacccccatctccagccattctgtctcctttggttatgggatgacctctcccccgacctctggctccgagcgggtaagggcagaggccatcagacaggtgtccactgtgccggcgggaaggtgcgagcatcccaagtgcagagcagagtggagttgccagaggtgtgctctggtttgagggctcaggtggtgggagctgatggggagacccgtagagcctcacaggttggaggagcttcggatcccactgggaaggttggttctccgtctgtctccctgc

SEQ ID NO: 90890 - DNA, 30 bp, Homo sapiens
  chr16:75147485-75147515
  hypo
tccaaagccggctgcgctcctcggcctcct

SEQ ID NO: 90891 - DNA, 540 bp, Homo sapiens; identical to SEQ ID NO: 29447
  chr16:75148496-75149036
  hypo

SEQ ID NO: 90892 - DNA, 22 bp, Homo sapiens
  chr16:75183605-75183627
  hypo
gccaccgcgtccggccagacac

SEQ ID NO: 90893 - DNA, 57 bp, Homo sapiens
  chr16:75227136-75227193
  hypo
ccaggccatggtgaaaccctgcgacggaagatcagcgctcttttgaagtgccttgta

SEQ ID NO: 90894 - DNA, 13 bp, Homo sapiens
  chr16:75263536-75263549
  hypo
tggccacgatgcc

SEQ ID NO: 90895 - DNA, 30 bp, Homo sapiens; identical to SEQ ID NO: 29448
  chr16:75269207-75269237
  hypo

SEQ ID NO: 90896 - DNA, 30 bp, Homo sapiens; identical to SEQ ID NO: 29449
  chr16:75295355-75295385
  hypo

SEQ ID NO: 90897 - DNA, 306 bp, Homo sapiens; identical to SEQ ID NO: 53286
  chr16:75299750-75300056
  hypo

SEQ ID NO: 90898 - DNA, 30 bp, Homo sapiens; identical to SEQ ID NO: 29451
  chr16:75300846-75300876
  hypo

SEQ ID NO: 90899 - DNA, 30 bp, Homo sapiens; identical to SEQ ID NO: 29452
  chr16:75328778-75328808
  hypo

SEQ ID NO: 90900 - DNA, 26 bp, Homo sapiens
  chr16:75427934-75427960
  hypo
agagcgagactccacctcaaaaaaaa

SEQ ID NO: 90901 - DNA, 42 bp, Homo sapiens
  chr16:75458365-75458407
  hypo
aaaggctgccagacgcggtggctcacgcctataatcccagca

SEQ ID NO: 90902 - DNA, 31 bp, Homo sapiens; identical to SEQ ID NO: 29453
  chr16:75464994-75465025
  hypo

SEQ ID NO: 90903 - DNA, 15 bp, Homo sapiens
  chr16:75469089-75469104
  hypo
cgtgagccaccgcgc

SEQ ID NO: 90904 - DNA, 45 bp, Homo sapiens
  chr16:75479779-75479824
  hypo
gatgtcagatttatggccaggcgcggtggctcacgcctgtaatcc

SEQ ID NO: 90905 - DNA, 77 bp, Homo sapiens; identical to SEQ ID NO: 29454
  chr16:75495228-75495305
  hypo

SEQ ID NO: 90906 - DNA, 458 bp, Homo sapiens
  chr16:75513118-75513576
  hypo
tcgcgcaccaggtgcacgatgcgtaggttgagcgcggggtcgctgagcagcgggtagagcacctgcaggttgaagaagcgcacctccttgagcaccacgtggctgtaggagcggcaggcctcccgggccagggtgaaggactgccgcgcgcacagtggcttgcacacggcctcgctgctgatggcgcctcggggaaaggcactgcaggcgggtggcgagcacagtgcacggctcacggcccactggaagaggtcggacaggttgcggcgccaaggcagataggcatcaaacacgtccatgtcgcacaggaagacggagcgcaccaggtcgcgcacagccatgtgcagcgttgcggcgctgccctgcgacagggtggtccacacgtgccacgcgggctccattaggtagaagacgtcggggtgctggttgaagagttggcccacgaaggacgagcccga

SEQ ID NO: 90907 - DNA, 35 bp, Homo sapiens
  chr16:75527395-75527430
  hypo
cagagcgagactccgtatcaaaaaaaaaaaaaaaa

SEQ ID NO: 90908 - DNA, 96 bp, Homo sapiens; identical to SEQ ID NO: 53290
  chr16:75529238-75529334
  hypo

SEQ ID NO: 90909 - DNA, 177 bp, Homo sapiens; identical to SEQ ID NO: 53291
  chr16:75529726-75529903
  hypo

SEQ ID NO: 90910 - DNA, 36 bp, Homo sapiens; identical to SEQ ID NO: 29457
  chr16:75549846-75549882
  hypo

SEQ ID NO: 90911 - DNA, 13 bp, Homo sapiens
  chr16:75551616-75551629
  hypo
attctcaggccgg

SEQ ID NO: 90912 - DNA, 405 bp, Homo sapiens
  chr16:75563099-75563504
  hypo
ccagggtgaggtcacgctgctggtccgcagagtacacaggccggtagcccagcagctgcagcgcgccggcgcacacctcctgcacgcgcaggatcttagtgaagggcaacgcgtggcgccaggcctgggagacgttgcgcgcattcctagacgaagtatggaaggcctcgattggcttgccgatccccgacccgtgggtgatgttgtggatccaggcctcgagctgtggcgtgagggtcaggccggtgaaggcgtagagtgcgcggatctctgccagcggctcccgcgccaggtcctcgaagcgcaccaggcggtagcggccgcgcaggaagggtggcggcttgagtgtggcggcctcggcgatgcgcacgtggctgcggcacacctcgcgaatcaggcgcaggt

SEQ ID NO: 90913 - DNA, 30 bp, Homo sapiens
  chr16:75563886-75563916
  hypo
gtaggcatcaaacacgtccatgtcgcacaa

SEQ ID NO: 90914 - DNA, 139 bp, Homo sapiens; identical to SEQ ID NO: 29458
  chr16:75606234-75606373
  hypo

SEQ ID NO: 90915 - DNA, 89 bp, Homo sapiens; identical to SEQ ID NO: 29459
  chr16:75622684-75622773
  hypo

SEQ ID NO: 90916 - DNA, 21 bp, Homo sapiens
  chr16:75658339-75658360
  hypo
gagtctcaatattttaaaaaa

SEQ ID NO: 90917 - DNA, 31 bp, Homo sapiens; identical to SEQ ID NO: 10808
  chr16:76507679-76507710
  hypo

SEQ ID NO: 90918 - DNA, 314 bp, Homo sapiens; identical to SEQ ID NO: 29462
  chr16:77227370-77227684
  hypo

SEQ ID NO: 90919 - DNA, 581 bp, Homo sapiens; identical to SEQ ID NO: 29463
  chr16:77228258-77228839
  hypo

SEQ ID NO: 90920 - DNA, 44 bp, Homo sapiens; identical to SEQ ID NO: 29464
  chr16:77229452-77229496
  hypo

SEQ ID NO: 90921 - DNA, 371 bp, Homo sapiens
  chr16:77232997-77233368
  hypo
acatagcacatgcacgtctgtcccagactttgacaacctgcacaagacaagcagcctaaagcaggagagacctccctagggttttgtgtgtgtgcacactaccctcactccccaactggccattaccctagttctgcccttgtttgtggagttacagcctcaaggttgtagcatgtgtgctggcaatcagggccgcagtgtgttctgcgcctgcccagagctgactcctgatttaaccgctggcgtaaccgcgggttgcacgcatgcgtgctgaaaagcctttcaccctcacgtggtttcttttttaaccagtcatcaagcgaggctcgcgcgcaggccccgcgttggaaaatggcggggaagctgaaacc

SEQ ID NO: 90922 - DNA, 1029 bp, Homo sapiens; identical to SEQ ID NO: 53298
  chr16:77245983-77247012
  hypo

SEQ ID NO: 90923 - DNA, 413 bp, Homo sapiens; identical to SEQ ID NO: 10810
  chr16:77247376-77247789
  hypo

SEQ ID NO: 90924 - DNA, 30 bp, Homo sapiens; identical to SEQ ID NO: 29468
  chr16:77248178-77248208
  hypo

SEQ ID NO: 90925 - DNA, 202 bp, Homo sapiens; identical to SEQ ID NO: 10811
  chr16:77468255-77468457
  hypo

SEQ ID NO: 90926 - DNA, 153 bp, Homo sapiens; identical to SEQ ID NO: 53301
  chr16:77469028-77469181
  hypo

SEQ ID NO: 90927 - DNA, 30 bp, Homo sapiens; identical to SEQ ID NO: 53302
  chr16:77547051-77547081
  hypo

SEQ ID NO: 90928 - DNA, 30 bp, Homo sapiens; identical to SEQ ID NO: 53303
  chr16:77579671-77579701
  hypo

SEQ ID NO: 90929 - DNA, 30 bp, Homo sapiens; identical to SEQ ID NO: 53304
  chr16:77586643-77586673
  hypo

SEQ ID NO: 90930 - DNA, 30 bp, Homo sapiens; identical to SEQ ID NO: 53305
  chr16:77587954-77587984
  hypo

SEQ ID NO: 90931 - DNA, 30 bp, Homo sapiens; identical to SEQ ID NO: 53306
  chr16:77602331-77602361
  hypo

SEQ ID NO: 90932 - DNA, 30 bp, Homo sapiens; identical to SEQ ID NO: 53307
  chr16:77616137-77616167
  hypo

SEQ ID NO: 90933 - DNA, 30 bp, Homo sapiens; identical to SEQ ID NO: 53308
  chr16:77648978-77649008
  hypo

SEQ ID NO: 90934 - DNA, 30 bp, Homo sapiens; identical to SEQ ID NO: 53309
  chr16:77671843-77671873
  hypo

SEQ ID NO: 90935 - DNA, 30 bp, Homo sapiens; identical to SEQ ID NO: 53310
  chr16:77724574-77724604
  hypo

SEQ ID NO: 90936 - DNA, 256 bp, Homo sapiens; identical to SEQ ID NO: 53311
  chr16:77747178-77747434
  hypo

SEQ ID NO: 90937 - DNA, 30 bp, Homo sapiens; identical to SEQ ID NO: 29471
  chr16:77752391-77752421
  hypo

SEQ ID NO: 90938 - DNA, 271 bp, Homo sapiens
  chr16:77752673-77752944
  hypo
attataaatattagagcgatatttctttaatatcacagcatgtaagccctgtgtgtaaacactggatattataaatatcacagcgatatttcgctgatatcacagtgtgtaaccactgggtattgtaaatatcacagtgatgtttcaccaatatcacaacgtgttactagtggatattggaaatatcacagcgatgttttgccaatatcacagtgtgtaaccactggaaattgtaaatatcacagtgatatttcgccgatatcacagtgtg

SEQ ID NO: 90939 - DNA, 768 bp, Homo sapiens
  chr16:77753303-77754071
  hypo
ttataaatataacaccgatatttccttaatatcatgatgtgtaaacactagatattataaatattgcatcgatatttcattaatatcatggcgtgtaaacactatgtgtgaacactggatattagaaatatcacaacatttcattaatatcacggtgtgcaaacactgtgtgtaaacaatggatattatgaaaatcacagcgatatttcattaatgtcacagtgtgtaagcactgtgtgcaaacactggatattatgaatatcatagcgatattttattaatatcgcagtgtgtaagcactgtgtggaaacactggatattatgaatatcacagcgatatttcgttaatgtcacagtgcgtaagcactgtgtgtaaatactggatattatgaatatcacagtgatatttcattaacgtaacagcgtgtaagcactgtgtaaacactggatattatgagtgtcacagtgatatttcattaatttcacacgggatattataaaaatcacaacgatatttaacatcatagtgtgtaaacactttgtgtaaacatcgggtattataaatatcacagcgatgtttcatcggtatcacagtttgtaaaccttggatattataaacatcacagcgatatttcatttatatcacgatgtgtaaacactggatactataaatatcacagcgatgtttgcttaatatcacggtgtgtaaacactgtatattacaaatatcacagccatattttattaatatcacggtgtgtacacact

SEQ ID NO: 90940 - DNA, 31 bp, Homo sapiens; identical to SEQ ID NO: 29474
  chr16:77762012-77762043
  hypo

SEQ ID NO: 90941 - DNA, 30 bp, Homo sapiens; identical to SEQ ID NO: 53313
  chr16:77762427-77762457
  hypo

SEQ ID NO: 90942 - DNA, 30 bp, Homo sapiens; identical to SEQ ID NO: 53314
  chr16:77763011-77763041
  hypo

SEQ ID NO: 90943 - DNA, 1201 bp, Homo sapiens; identical to SEQ ID NO: 53315
  chr16:77822119-77823320
  hypo

SEQ ID NO: 90944 - DNA, 30 bp, Homo sapiens; identical to SEQ ID NO: 53316
  chr16:77823708-77823738
  hypo

SEQ ID NO: 90945 - DNA, 30 bp, Homo sapiens; identical to SEQ ID NO: 53317
  chr16:77899998-77900028
  hypo

SEQ ID NO: 90946 - DNA, 30 bp, Homo sapiens; identical to SEQ ID NO: 53318
  chr16:77927454-77927484
  hypo

SEQ ID NO: 90947 - DNA, 30 bp, Homo sapiens; identical to SEQ ID NO: 53319
  chr16:77962994-77963024
  hypo

SEQ ID NO: 90948 - DNA, 30 bp, Homo sapiens; identical to SEQ ID NO: 53320
  chr16:77971144-77971174
  hypo

SEQ ID NO: 90949 - DNA, 30 bp, Homo sapiens; identical to SEQ ID NO: 53322
  chr16:78105624-78105654
  hypo

SEQ ID NO: 90950 - DNA, 30 bp, Homo sapiens
  chr16:78130277-78130307
  hypo
ggagcctggaccagccggccagatttccac

SEQ ID NO: 90951 - DNA, 30 bp, Homo sapiens; identical to SEQ ID NO: 53323
  chr16:78136813-78136843
  hypo

SEQ ID NO: 90952 - DNA, 30 bp, Homo sapiens; identical to SEQ ID NO: 53324
  chr16:78139042-78139072
  hypo

SEQ ID NO: 90953 - DNA, 30 bp, Homo sapiens; identical to SEQ ID NO: 53325
  chr16:78139972-78140002
  hypo

SEQ ID NO: 90954 - DNA, 34 bp, Homo sapiens; identical to SEQ ID NO: 29476
  chr16:78159168-78159202
  hypo

SEQ ID NO: 90955 - DNA, 30 bp, Homo sapiens; identical to SEQ ID NO: 53326
  chr16:78162151-78162181
  hypo

SEQ ID NO: 90956 - DNA, 30 bp, Homo sapiens; identical to SEQ ID NO: 53327
  chr16:78190461-78190491
  hypo

SEQ ID NO: 90957 - DNA, 30 bp, Homo sapiens; identical to SEQ ID NO: 53328
  chr16:78211269-78211299
  hypo

SEQ ID NO: 90958 - DNA, 30 bp, Homo sapiens; identical to SEQ ID NO: 53329
  chr16:78224740-78224770
  hypo

SEQ ID NO: 90959 - DNA, 30 bp, Homo sapiens; identical to SEQ ID NO: 53330
  chr16:78232227-78232257
  hypo

SEQ ID NO: 90960 - DNA, 17 bp, Homo sapiens
  chr16:78244367-78244384
  hypo
cctgacacacacacgcg

SEQ ID NO: 90961 - DNA, 30 bp, Homo sapiens; identical to SEQ ID NO: 53332
  chr16:78279709-78279739
  hypo

SEQ ID NO: 90962 - DNA, 30 bp, Homo sapiens; identical to SEQ ID NO: 53333
  chr16:78305114-78305144
  hypo

SEQ ID NO: 90963 - DNA, 30 bp, Homo sapiens; identical to SEQ ID NO: 53334
  chr16:78315504-78315534
  hypo

SEQ ID NO: 90964 - DNA, 30 bp, Homo sapiens; identical to SEQ ID NO: 53335
  chr16:78322867-78322897
  hypo

SEQ ID NO: 90965 - DNA, 30 bp, Homo sapiens; identical to SEQ ID NO: 53336
  chr16:78353748-78353778
  hypo

SEQ ID NO: 90966 - DNA, 30 bp, Homo sapiens; identical to SEQ ID NO: 53337
  chr16:78389209-78389239
  hypo

SEQ ID NO: 90967 - DNA, 175 bp, Homo sapiens
  chr16:78409035-78409210
  hypo
ctctgaaagatttatctctttcgattcatctgtaaagtaaaaataaccgtcgtcgtcatttctcaagcgtgacgatactgttacacgtttactgcatattctgcataccaagcacatatccgtcacacgcagtgtggccaacttccgagaggccggcattcagccaaacagcctg

SEQ ID NO: 90968 - DNA, 33 bp, Homo sapiens; identical to SEQ ID NO: 53338
  chr16:78425002-78425035
  hypo

SEQ ID NO: 90969 - DNA, 30 bp, Homo sapiens; identical to SEQ ID NO: 53339
  chr16:78426875-78426905
  hypo

SEQ ID NO: 90970 - DNA, 30 bp, Homo sapiens; identical to SEQ ID NO: 53340
  chr16:78427365-78427395
  hypo

SEQ ID NO: 90971 - DNA, 30 bp, Homo sapiens; identical to SEQ ID NO: 53341
  chr16:78440058-78440088
  hypo

SEQ ID NO: 90972 - DNA, 30 bp, Homo sapiens; identical to SEQ ID NO: 53342
  chr16:78469105-78469135
  hypo

SEQ ID NO: 90973 - DNA, 30 bp, Homo sapiens; identical to SEQ ID NO: 53343
  chr16:78472794-78472824
  hypo

SEQ ID NO: 90974 - DNA, 30 bp, Homo sapiens; identical to SEQ ID NO: 53344
  chr16:78498424-78498454
  hypo

SEQ ID NO: 90975 - DNA, 30 bp, Homo sapiens; identical to SEQ ID NO: 53345
  chr16:78536379-78536409
  hypo

SEQ ID NO: 90976 - DNA, 30 bp, Homo sapiens; identical to SEQ ID NO: 53346
  chr16:78553779-78553809
  hypo

SEQ ID NO: 90977 - DNA, 17 bp, Homo sapiens
  chr16:78562210-78562227
  hypo
tacatgggtattctaac

SEQ ID NO: 90978 - DNA, 31 bp, Homo sapiens; identical to SEQ ID NO: 53347
  chr16:78601896-78601927
  hypo

SEQ ID NO: 90979 - DNA, 30 bp, Homo sapiens; identical to SEQ ID NO: 53348
  chr16:78623286-78623316
  hypo

SEQ ID NO: 90980 - DNA, 30 bp, Homo sapiens; identical to SEQ ID NO: 53349
  chr16:78630606-78630636
  hypo

SEQ ID NO: 90981 - DNA, 30 bp, Homo sapiens; identical to SEQ ID NO: 53350
  chr16:78642781-78642811
  hypo

SEQ ID NO: 90982 - DNA, 30 bp, Homo sapiens; identical to SEQ ID NO: 53351
  chr16:78654270-78654300
  hypo

SEQ ID NO: 90983 - DNA, 30 bp, Homo sapiens; identical to SEQ ID NO: 53352
  chr16:78669362-78669392
  hypo

SEQ ID NO: 90984 - DNA, 30 bp, Homo sapiens; identical to SEQ ID NO: 53353
  chr16:78765279-78765309
  hypo

SEQ ID NO: 90985 - DNA, 30 bp, Homo sapiens; identical to SEQ ID NO: 53354
  chr16:78769948-78769978
  hypo

SEQ ID NO: 90986 - DNA, 30 bp, Homo sapiens; identical to SEQ ID NO: 53355
  chr16:78781892-78781922
  hypo

SEQ ID NO: 90987 - DNA, 30 bp, Homo sapiens; identical to SEQ ID NO: 53356
  chr16:78791482-78791512
  hypo

SEQ ID NO: 90988 - DNA, 30 bp, Homo sapiens; identical to SEQ ID NO: 53357
  chr16:78859167-78859197
  hypo

SEQ ID NO: 90989 - DNA, 30 bp, Homo sapiens; identical to SEQ ID NO: 53358
  chr16:78923314-78923344
  hypo

SEQ ID NO: 90990 - DNA, 30 bp, Homo sapiens; identical to SEQ ID NO: 53359
  chr16:78949111-78949141
  hypo

SEQ ID NO: 90991 - DNA, 30 bp, Homo sapiens; identical to SEQ ID NO: 53360
  chr16:78974715-78974745
  hypo

SEQ ID NO: 90992 - DNA, 30 bp, Homo sapiens; identical to SEQ ID NO: 10816
  chr16:79048507-79048537
  hypo

SEQ ID NO: 90993 - DNA, 31 bp, Homo sapiens
  chr16:79077924-79077955
  hypo
agccaggaagaggcttcggccctgcccagac

SEQ ID NO: 90994 - DNA, 30 bp, Homo sapiens; identical to SEQ ID NO: 53362
  chr16:79125383-79125413
  hypo

SEQ ID NO: 90995 - DNA, 30 bp, Homo sapiens; identical to SEQ ID NO: 53363
  chr16:79128792-79128822
  hypo

SEQ ID NO: 90996 - DNA, 104 bp, Homo sapiens; identical to SEQ ID NO: 10822
  chr16:79636190-79636294
  hypo

SEQ ID NO: 90997 - DNA, 134 bp, Homo sapiens; identical to SEQ ID NO: 53370
  chr16:79804423-79804557
  hypo

SEQ ID NO: 90998 - DNA, 102 bp, Homo sapiens; identical to SEQ ID NO: 53371
  chr16:79804596-79804698
  hypo

SEQ ID NO: 90999 - DNA, 30 bp, Homo sapiens; identical to SEQ ID NO: 53372
  chr16:80471689-80471719
  hypo

SEQ ID NO: 91000 - DNA, 527 bp, Homo sapiens
  chr16:80641601-80642128
  hypo
cagctttctctagtcatcttccggatgggttcaatactttttatccttattggccgctgcttctcgtttctttgaaagctatagatgttttgcgtttttgtggtgtttaggactttctttgaaagcagtgacgctaccctagagtatccatctctcctgtgaggtttctctgcctggagatgatggacaatttgtaataatgctgactgtctccctctgattgaagctgtcaatactgagaaaaggcatttgttaaattgcaaagggtcttttgcttattccctgtgcgacctctagcaagtcagtgaagccctctgagccttgctgtcttcatgtgtaaaatgggtctatcaaaaggacaagcacgcaggaggcgcaggaactcaccacggcactgcaggatgccatctccttgacccgcagcatgacctcctggctgaacgtggtgggccagaagacctgcgacaccagccccctgctgcaggcctcctgggcggtgagcttccgcccacagaacagcatctcat

SEQ ID NO: 91001 - DNA, 30 bp, Homo sapiens; identical to SEQ ID NO: 53374
  chr16:80650789-80650819
  hypo

SEQ ID NO: 91002 - DNA, 82 bp, Homo sapiens
  chr16:80654696-80654778
  hypo
ggtcgctggacaaccggccaattaggtaggaataatccaggccgctgcagaacacgctccccactgcgctgaggagcagcag

SEQ ID NO: 91003 - DNA, 65 bp, Homo sapiens; identical to SEQ ID NO: 10824
  chr16:80837506-80837571
  hypo

SEQ ID NO: 91004 - DNA, 37 bp, Homo sapiens
  chr16:80931967-80932004
  hypo
gaaaccaaggaacaaacgggaccgtggcaaggcagcg

SEQ ID NO: 91005 - DNA, 23 bp, Homo sapiens
  chr16:80964426-80964449
  hypo
aacaacggcctaaggccgggcgc

SEQ ID NO: 91006 - DNA, 31 bp, Homo sapiens
  chr16:81094193-81094224
  hypo
cgtaagccactgtgcccggcctggagttttt

SEQ ID NO: 91007 - DNA, 26 bp, Homo sapiens
  chr16:81177463-81177489
  hypo
ctcccggtcaagagtcactttttaaa

SEQ ID NO: 91008 - DNA, 30 bp, Homo sapiens
  chr16:81309590-81309620
  hypo
gcgctgtgtgaggcccgaggttcgtgtgca

SEQ ID NO: 91009 - DNA, 199 bp, Homo sapiens
  chr16:81315518-81315717
  hypo
ccccagaatataagcccgtgaggcgagaattgtgttgctgtgctcacagcgtatcagcagcacatgacacaaaggctggcatagagaggtctgtgttccatacgccaaagtgcagaatgaatggacttgtccaaggagactcagctagagagtgggacagagtgcatttcaactgagcgcattggctgggcacggtggc

SEQ ID NO: 91010 - DNA, 202 bp, Homo sapiens
  chr16:81323323-81323525
  hypo
ccatcattcaggagatactctcggcaaccctgtggagtgtaggtgagattatcgcatctctacagatgaagagactgaggctccgagaggtcaagggactggcccagccaagggtagaaccaggttttctggtttgttcattcgtttgtttgttcgtttgttttgaggccgtgtttcactccgtcacccaggctggaatgca

SEQ ID NO: 91011 - DNA, 192 bp, Homo sapiens
  chr16:81335172-81335364
  hypo
actttctgtgtgcatgcgtgttctcaaggacagtagaatccacagcttgcttcagattctcaatagggaagtgaagcacttctgcactgccccagctctgaggattcggtgattctgtgactggtgatatatggctgaaattcacaggccgcacacagctcagaaaggaaaggcggtcgtgtgacaggtgtg

SEQ ID NO: 91012 - DNA, 31 bp, Homo sapiens; identical to SEQ ID NO: 29485
  chr16:81453687-81453718
  hypo

SEQ ID NO: 91013 - DNA, 189 bp, Homo sapiens
  chr16:81492929-81493118
  hypo
tcttcttgggtgtgcccgtggccctgtgctgtgaccctgcgctgtgaccccgtgccgtgaccctgctccgtgacctcgctccgtgacctcaggcaccattatttggaatgggctctcagcccctgtcctaaccccagccaccaagctcccaacccaagcaagatggaaacccgccgttgggaggattaa

SEQ ID NO: 91014 - DNA, 251 bp, Homo sapiens
  chr16:81505616-81505867
  hypo
gcaggtgcacacacagattcacggacatgtacatgcatatgcactcaatgtatatgccgtgtacacacacactcacgcacatgcacatgtgctctcagtatacacatgtatgcacgtgcacacaggtacatcctcacccgccatctttgaaatctcacttattgcatttgtgtttctgatgtatatgtaactttgggcaagttgtgtgacgtctctgcctcagtttcctcgtctataagatgagattagca

SEQ ID NO: 91015 - DNA, 255 bp, Homo sapiens
  chr16:81533314-81533569
  hypo
gtggaggagactcagcttccccgtccagtcctttacccctcctttacccagcagcgccctctgaatctgaaacagttttgggggcggcagctccggtcctgcccagcaactcgcagttgttgcctgtggcattcagattcaagtctgggcttgtcagcccgggcgagactctcctattttggccctatgggaggcatccaaactcctctgcccttgccttccggggcgccccacgcactctgggcttcacctggc

SEQ ID NO: 91016 - DNA, 599 bp, Homo sapiens
  chr16:81557009-81557608
  hypo
accccctgtcacacagaaggacgtggggcccacagtcacacggccgcaaggtgggtctggtaccctcccagcacattttggttggactccagaagcagggcttccctcacgatacctcaagcttacctgggccccggccaagcaactgactcatccagtctgacaaatccaaattctcgagtcactcagcccaaccgtggttgcctcatttagatcccagccaaacccccttcccgcgaaaagccatggtggcctagaacgaagtctggaaaagaaccaagaggacagcatcttttgtctggagagcaccgtgcctgttctccaaccacctcgtagcccctggtggagcctccctcctcccccaggaagaaggtgagctgagtcaccaccaggtaaccctgaacctcgctcagacacagcttcctttagctaggagcctggatgtaacacccagctcatcccttggctccctccaaacgtcaaggcgtcttgaactaaaagccagcgcctgcacaccggcagaactttgcagctcctggctcctgagttgtaggtgtttttgccaggtgtgcctgtacgtgtgtatgtgtgcccatggg

SEQ ID NO: 91017 - DNA, 884 bp, Homo sapiens
  chr16:81563918-81564802
  hypo
aaatcccagtaaaggtggatccggatccctcagggacctaggtgcagttcctgttcctcccgtctcgcctctgttgcgctgcaaggtggggtgtgtagtgagtatcactgtaacctgtacttttctaaagtcaaacagatttctcttggtgggaggacgtgtcttttgtgggatcggtgtagcccgtctgagtcagtgactcacctggcacccctggcagctgactttcctggcagttcactcgagtctcttgcctctgctcacaaaagcctgcgcctttattcagctttcctcaccgcttcccaaggcagagcagagcctctcccgcccgcctcccacatctctcccttagctgggtgcccgcgtggctgctacctccgaggcttctgtgtcaccgggtagtggaaatgtcaccgagtgtcagagcttcgagcctcctccagatccatccaaggtggcatcactaagtggcatttgtgtgctaggcacgtaccctcttttacatacattatcttcgatcagttcagcttcttctgcataaaaaagaaatttctctaccgtcccagggagaataattggaaaagcgagccctgagtactcagcccacccgcccttctcctgctgaactgtcgaacgtagccaccagctagcctgagcttgttctgatgtcttctgggatcgtcattgttatgggttgaactgtagccttcaaaaggcacgtttacgctgtagtctctgtacctgtgagcatgaccttctttggaaatagggactttgcagatgcgaccaagttaagatcatgctggaggtcatgcgggaggtcatgctggaggagagtgggcccaaatccagtgactgtgtccgtaaaagatgagggaaactta

SEQ ID NO: 91018 - DNA, 641 bp, Homo sapiens
  chr16:81565568-81566209
  hypo
catacttctaaaactgtcctgcgatttgatagcttccatttcatggcgcttcttctggatgtcaggcactaagtcgggcgctttattctgtagttctcctagcaatctggtgagctccactctacagataaggaaatcgaggccaaggacagctaaagaagcgaggtgcgcaaggtgcccaggtccgaagtgtttccgctgctttcagactgcagtcccagggctcaggagtccatgctttctgcgtatcttcacgctggccacggatcacctcatcattagatgtcgaagttgaacaagtggtgttcacattcggacgtgtgttaggtagaagtgtgtgtgcacctgcgtgtgcgtgtatgttccacacgctgatgcaggaggtatacgcacagatataattgtcttttagaagattgactatcactaattttgaaaaatttcctgaatgacctttcctgccaggccaatacattgagcccaacagataaatccctgaacttattcgcagtctctaagtacctttagaatcccgggggtcgccctgagcctccccagggactagcgctgttgccctcgctcagtctcgccaccacaggaggcctcggcttgcccagcagctgagtcgggagaacctttcc

SEQ ID NO: 91019 - DNA, 159 bp, Homo sapiens; identical to SEQ ID NO: 29492
  chr16:81580486-81580645
  hypo

SEQ ID NO: 91020 - DNA, 32 bp, Homo sapiens
  chr16:81581958-81581990
  hypo
gaactcctgagctgaagcggtcctcttgtctc

SEQ ID NO: 91021 - DNA, 31 bp, Homo sapiens; identical to SEQ ID NO: 29493
  chr16:81596519-81596550
  hypo

SEQ ID NO: 91022 - DNA, 30 bp, Homo sapiens
  chr16:81606080-81606110
  hypo
taacagtgagtggacggggccagtgttctt

SEQ ID NO: 91023 - DNA, 419 bp, Homo sapiens
  chr16:81626930-81627349
  hypo
tgtaggcttggttgagattggcgagaggtggtgttgtgcctagcctggggggttggagggcggggggagtttctgctctgcagccctgtgatgcgcaggtgccatcgggtctctgaccccaggccatcaagagctgtgcgacctgcttgccatccatcatgtggagctggtcggtcaccccatgcaccaggccgactccaagccggagctttcctctccgctcttttcggagtaatccgtggatgatggaggagcttggcaagcatttcagcaaagctcttttttcttgttgaggcttgaaagtaatcgcctccgtgtattgagtgcccgccgaccacctggcgcgtctgggcattgagctcattggccgctggcacaaatggatcctcgcctcacccggtgcctgcctgtagcctctc

SEQ ID NO: 91024 - DNA, 227 bp, Homo sapiens
  chr16:81632814-81633041
  hypo
cagtaataataacaacagccccggggcaaggagaggtcatattacctgagggaaaccaggggagggagagtgtgaacggcatttgagatttcttctgggaccaaggcccaaaccggcccttctaggatcatatcgttacctgccactttgcgtttgctgtatgactttccgtttgtgagattaaaaagaacatgaaatattttgacgggccttccccaaatgagcat

SEQ ID NO: 91025 - DNA, 30 bp, Homo sapiens; identical to SEQ ID NO: 29496
  chr16:81685109-81685139
  hypo

SEQ ID NO: 91026 - DNA, 541 bp, Homo sapiens
  chr16:81694539-81695080
  hypo
ttcttttgcaaggtacgggattgctgagctggggctgtggctgcaggaagtaacctccctctgtgcgcataccagggattgggtttgcacagaaaggccaaaaacctgggccccaccgtcttgggtcacggtcccagacacaggcggagagggcatgcccggcacccattcttagggctacacccacgtctctgccagacaggtgacaaagagtcacaaggggaacatcttgcttttccttggaatcacttcccggctgtcttaggagacaggttgctgcagatttcctgggctcatgacgtcagagctgggttattattagccaaggttcctctgcgcagtggctggcccacggtggggtgcggctgtggggctttccctgaacacgggaggcagcacggtgctccaggttagcttagaggagctgtggagcagggcatccgctgccgggcacccggcgccagccttgcagtgggattcacataggacatgtccagggcacatctttgtggctcaggccgaaccatcacacaaacctgtt

SEQ ID NO: 91027 - DNA, 285 bp, Homo sapiens
  chr16:81703546-81703831
  hypo
tggaagcgcgggtgtcgcagtgctattctttgaagtagacgccacctgtgctttccagagggttggtgtctccccattgccttccacatcaacagctccaggcagagctcggtcccgcccttctttctggtgtcctggctgccctgggctcctgccctgcctagcaccgtcccgactcctgtcctctgctgtctccacaggactttgggaagtgcccgcgactgaggctgtttactcaggagtacatccttgccttgaacgagctcaacgcggggatggaagtgg

SEQ ID NO: 91028 - DNA, 30 bp, Homo sapiens
  chr16:81726238-81726268
  hypo
ccagtacttgaggccggagaaatccacctc

SEQ ID NO: 91029 - DNA, 31 bp, Homo sapiens; identical to SEQ ID NO: 29497
  chr16:81730091-81730122
  hypo

SEQ ID NO: 91030 - DNA, 290 bp, Homo sapiens
  chr16:81741645-81741935
  hypo
ccatgtcagggacagggacaccgaggtgtggctgccacagtccccttccgggggatagtccctcctggcaggcacaggcaagctcagcaaaccaaggcgggcagagggcctggtggggccaggagggacagtcggtagagagcgaggtccaagagaggacgtatgggacacagaaggtggcaggggcacagccagcagatcacccatcccagcgtttagacctcagccctcagggtggcgtctgcagaccagcaccctcggcaccactcgggggccaacagaaatgcagg

SEQ ID NO: 91031 - DNA, 31 bp, Homo sapiens; identical to SEQ ID NO: 53388
  chr16:81813435-81813466
  hypo

SEQ ID NO: 91032 - DNA, 30 bp, Homo sapiens
  chr16:81927331-81927361
  hypo
gctgcggagcgagtcgtccccagaagctta

SEQ ID NO: 91033 - DNA, 174 bp, Homo sapiens
  chr16:81958724-81958898
  hypo
gacaggcagttctctgaatttcgaaggctcttgtcttaagagactgtcagaagtccctttggcaagggactgtgggcaaaccgcccagcggctgtggtcaattcctctctctgatggcagtagtgctacctagggggccgcctgggtgaaaccggcttttttgcatacttccaa

SEQ ID NO: 91034 - DNA, 30 bp, Homo sapiens; identical to SEQ ID NO: 29498
  chr16:81970155-81970185
  hypo

SEQ ID NO: 91035 - DNA, 31 bp, Homo sapiens; identical to SEQ ID NO: 29499
  chr16:82054048-82054079
  hypo

SEQ ID NO: 91036 - DNA, 208 bp, Homo sapiens; identical to SEQ ID NO: 29500
  chr16:82172389-82172597
  hypo

SEQ ID NO: 91037 - DNA, 30 bp, Homo sapiens; identical to SEQ ID NO: 29501
  chr16:83541955-83541985
  hypo

SEQ ID NO: 91038 - DNA, 30 bp, Homo sapiens
  chr16:83749996-83750026
  hypo
gaactctaaatatcccgtgtgctccacccg

SEQ ID NO: 91039 - DNA, 30 bp, Homo sapiens
  chr16:83842874-83842904
  hypo
gagatgttggcacgcgttgtctttaacttc

SEQ ID NO: 91040 - DNA, 45 bp, Homo sapiens
  chr16:83862927-83862972
  hypo
ctaagtgatgggattacaggcctgagccaccgctcctggccctcg

SEQ ID NO: 91041 - DNA, 454 bp, Homo sapiens; identical to SEQ ID NO: 29502
  chr16:83863589-83864043
  hypo

SEQ ID NO: 91042 - DNA, 30 bp, Homo sapiens; identical to SEQ ID NO: 29503
  chr16:83941416-83941446
  hypo

SEQ ID NO: 91043 - DNA, 151 bp, Homo sapiens; identical to SEQ ID NO: 29504
  chr16:83941758-83941909
  hypo

SEQ ID NO: 91044 - DNA, 30 bp, Homo sapiens
  chr16:83945609-83945639
  hypo
gacccccaggcacgcggtggagtcgcctcc

SEQ ID NO: 91045 - DNA, 127 bp, Homo sapiens
  chr16:83945866-83945993
  hypo
caaaatcactgctgcgatcttttattccatcagcttgacccagcagggactccaaggggtggagctgggaacattcctcataaagcgagtcgtcaaggagttgcaggtaagcgacacgcagggagcc

SEQ ID NO: 91046 - DNA, 30 bp, Homo sapiens
  chr16:83947898-83947928
  hypo
ccccgttctgcacccgccgtggtgtggccg

SEQ ID NO: 91047 - DNA, 30 bp, Homo sapiens
  chr16:83948803-83948833
  hypo
ctgatgaggctgtgcgcctggtacctgtat

SEQ ID NO: 91048 - DNA, 30 bp, Homo sapiens
  chr16:83957598-83957628
  hypo
gcttctctcaaacccgggcatgcacagtgc

SEQ ID NO: 91049 - DNA, 30 bp, Homo sapiens
  chr16:83968887-83968917
  hypo
tcactgaggcagcgtcgtgtgggcgtctga

SEQ ID NO: 91050 - DNA, 143 bp, Homo sapiens
  chr16:83974848-83974991
  hypo
aggcacaagagagaacgtcctgcgcggttccatctatgccaacatcgagaacaggcacaactgatgtatgggacggaagtcagaaaaggggttgactgctgagccgggcccggtggctcacgcttgtaatcccagcacgggag

SEQ ID NO: 91051 - DNA, 30 bp, Homo sapiens
  chr16:83999168-83999198
  hypo
aagatgctgtaccccgagtaccacaaggtg

SEQ ID NO: 91052 - DNA, 42 bp, Homo sapiens; identical to SEQ ID NO: 29506
  chr16:83999490-83999532
  hypo

SEQ ID NO: 91053 - DNA, 40 bp, Homo sapiens
  chr16:84004406-84004446
  hypo
gtgctggtgggcagggcgccgtggctcacgcctgtaatcc

SEQ ID NO: 91054 - DNA, 181 bp, Homo sapiens
  chr16:84017888-84018069
  hypo
cgcgcccggcggaatatttttaaacaaaactgccctgggcatagtcgtttttacaatcagtcatgcatggaatgttttatgattatttttaaaaatctaaaacattgtttgacacacgcaggcacttaatgcacattaagttcaataaaagatctgctgccgctcacggtggctcacgcct

SEQ ID NO: 91055 - DNA, 31 bp, Homo sapiens
  chr16:84031862-84031893
  hypo
gtttctggactctctgcgccagtatctgcgg

SEQ ID NO: 91056 - DNA, 31 bp, Homo sapiens; identical to SEQ ID NO: 29508
  chr16:84061605-84061636
  hypo

SEQ ID NO: 91057 - DNA, 153 bp, Homo sapiens
  chr16:84085874-84086027
  hypo
cgggctgcgtgtgacgccctacacccttgggacagcaacgaatgcctcaggggacctcagcaacacattcggattctcgaagcaatgtgggcagagtgcagtgagagctgcaagatgagcacgtgacctgccgcggacgaaaagaactgcaag

SEQ ID NO: 91058 - DNA, 30 bp, Homo sapiens; identical to SEQ ID NO: 29509
  chr16:84093195-84093225
  hypo

SEQ ID NO: 91059 - DNA, 156 bp, Homo sapiens
  chr16:84129238-84129394
  hypo
tgcagtgtctgggcaacctggcgcgggatggctctcagcagccgtctgctcgaatgccttcccgtagcatgccagaagccagagcccagggagaggctggctcttcgcaggggacgtgatgattgccacttctggctccaccgggtttcattgcag

SEQ ID NO: 91060 - DNA, 620 bp, Homo sapiens
  chr16:84132211-84132831
  hypo
caaaaaaataaataaataaaaaggaaaagaaaaaataaaacacacactgagagaagcgaaatgcaaggaagaagcagacacaaggacgcgtctttcagcacgagaaggcggccgcagccttgaagtctgaaggctttgagatgaagctggcgaaaatcgcttccaacagaaacaaagatcactaccatctactactgcaaaccctcagattttcttctaccagaacagtacgaagtctctttttaaaaaataattctgcccccccaacaccgaccctgcgcactaaacaaaactaaactaaaaaattcctaccaggaaaatgttcacaattagcaaactagatggaaggatgcggatactcactgtactatttttcaactactctgcagtttgagattttcaaagtaaacagcagagagaaatttgcctacagtcacaatactcacattcagcatacttgagggaacgaaagacttttcgttggggcgtgacccgtttgatgtttggatgatcttcaagtgttagcagccccgctttctgtttttcttttatctgaatcacctcaaaatcactagggtagtcactggatggattgtttcgaggtataattctccaattgt

SEQ ID NO: 91061 - DNA, 20 bp, Homo sapiens
  chr16:84133094-84133114
  hypo
aatgatctatatggggctgg

SEQ ID NO: 91062 - DNA, 227 bp, Homo sapiens
  chr16:84153010-84153237
  hypo
gttctcgggcaagatcgcacctgagtcactgctgctcaatccgcacccagaggagacgtccctggagacgtctccagcctctcgctatactcactgcagcctcgcccaccagcacatctcaggtgtcagtggctttttcaaggacaacttcatgctcctggtgctggagctctgccacctgagacctctcatggagttgcacacggggagagcgctaagcctgaggg

SEQ ID NO: 91063 - DNA, 31 bp, Homo sapiens; identical to SEQ ID NO: 29511
  chr16:84163868-84163899
  hypo

SEQ ID NO: 91064 - DNA, 157 bp, Homo sapiens
  chr16:84191395-84191552
  hypo
ctagtttagaactgcagcacacggtgagaatagaaagctctattatattataatccccccgtttgttcgtttttgttttggctggggttgccataagtaccgggtggcttaaccaatacaaatttattttctcgtggccaggcacagtggctcacgc

SEQ ID NO: 91065 - DNA, 30 bp, Homo sapiens; identical to SEQ ID NO: 29512
  chr16:84213818-84213848
  hypo

SEQ ID NO: 91066 - DNA, 30 bp, Homo sapiens
  chr16:84224886-84224916
  hypo
ccgcctggctgcatcgttgcagatcagccc

SEQ ID NO: 91067 - DNA, 31 bp, Homo sapiens; identical to SEQ ID NO: 29513
  chr16:84229845-84229876
  hypo

SEQ ID NO: 91068 - DNA, 31 bp, Homo sapiens
  chr16:84270490-84270521
  hypo
cccagcgcgaggagtgcgaggcggggcggcg

SEQ ID NO: 91069 - DNA, 195 bp, Homo sapiens
  chr16:84296329-84296524
  hypo
ctgggtctgtagcaagcggatcagtaaatgttgacctccattattgttgccaagggtagagcgtcaaagggtgaccctcaaaagatgtgtccacctagaatgccagaatgtgagattttccatccaagtactaaccaggcctgaccctgcttcgcttccgggatcagatgagattgggcacgttcagggtggtat

SEQ ID NO: 91070 - DNA, 30 bp, Homo sapiens
  chr16:84352836-84352866
  hypo
tttgtgggtgtgcacgtgtgccacatgccg

SEQ ID NO: 91071 - DNA, 114 bp, Homo sapiens
  chr16:84423861-84423975
  hypo
tgagggaggctgttcgcccggaggtgccgctggctcccttgctctggagtgagctcacagctccaactcacctttcagcaagggccatacgtgcacttcgtggtcccctcggga

SEQ ID NO: 91072 - DNA, 203 bp, Homo sapiens; identical to SEQ ID NO: 29515
  chr16:84483541-84483744
  hypo

SEQ ID NO: 91073 - DNA, 31 bp, Homo sapiens
  chr16:84484209-84484240
  hypo
gcgccagcgtcattggcgcagtgtcatgact

SEQ ID NO: 91074 - DNA, 30 bp, Homo sapiens; identical to SEQ ID NO: 29516
  chr16:84485584-84485614
  hypo

SEQ ID NO: 91075 - DNA, 255 bp, Homo sapiens
  chr16:84535225-84535480
  hypo
gagccaggctggcaacgccactttttcaagcaggagagaggaggttgcatgggaggccccagtaggaaccccagggctggtgccagtgaggtgggaaggtgggcagcccctaagaacacagcgctgtccacagcactgccattcttagtacctgcagagtgctggtgaagggacacgtctcagaacggctcaaggacagcccgtctcctttgagagccccgtgccaggcaagataaagaaatggcaatggtgtgg

SEQ ID NO: 91076 - DNA, 143 bp, Homo sapiens; identical to SEQ ID NO: 29518
  chr16:84535779-84535922
  hypo

SEQ ID NO: 91077 - DNA, 170 bp, Homo sapiens
  chr16:84593078-84593248
  hypo
agactccctcagagacgattaaaagggtggaggactcagggtaacggggtcaagcagctgggttggaagagccagacaggtggacaggcgcacgggatagctgtcctccagggccagccctggggcagagccagaggcaagagccagcacccaggcggagaaagccagaa

SEQ ID NO: 91078 - DNA, 105 bp, Homo sapiens
  chr16:84602923-84603028
  hypo
tcaaaataaataaataaacataaaaaggttcattttatgttaaatgaattccaccacaattaaaaaataaaaaacaaaaaagtcgccatattgccaagaatgatg

SEQ ID NO: 91079 - DNA, 43 bp, Homo sapiens
  chr16:84607967-84608010
  hypo
catgtgtcagtctgggggcaccgtcacctgtggctgaagaaag

SEQ ID NO: 91080 - DNA, 856 bp, Homo sapiens; identical to SEQ ID NO: 53399
  chr16:84650975-84651831
  hypo

SEQ ID NO: 91081 - DNA, 30 bp, Homo sapiens
  chr16:84662540-84662570
  hypo
ttaccgaaagtagcacgccatgctagactt

SEQ ID NO: 91082 - DNA, 22 bp, Homo sapiens
  chr16:84670542-84670564
  hypo
cggccacattcacttctactac

SEQ ID NO: 91083 - DNA, 255 bp, Homo sapiens
  chr16:84683894-84684149
  hypo
atttttaaagtgtgatactctcgaacccgggcctcattcagcagcgtgtcatggtgatggatccaggttttgaagctggacagaccgaggcgtgattctcggccgtttactagctttgtgaccatgagatcaatatcctcatctgtgaaatgaaataagtgatatcagcctggccaagtataatctttgtgggggttaaatgagatggcacacttaagtcacttagcttggttcgagggctgtagtctgggctcc

SEQ ID NO: 91084 - DNA, 30 bp, Homo sapiens
  chr16:84684794-84684824
  hypo
caacttgactcattcgttaacccaaggagg

SEQ ID NO: 91085 - DNA, 30 bp, Homo sapiens
  chr16:84690539-84690569
  hypo
gggctcttctgcgacgtcgtcctggtggcc

SEQ ID NO: 91086 - DNA, 30 bp, Homo sapiens; identical to SEQ ID NO: 29522
  chr16:84695178-84695208
  hypo

SEQ ID NO: 91087 - DNA, 31 bp, Homo sapiens; identical to SEQ ID NO: 29523
  chr16:84701645-84701676
  hypo

SEQ ID NO: 91088 - DNA, 186 bp, Homo sapiens; identical to SEQ ID NO: 29524
  chr16:84749466-84749652
  hypo

SEQ ID NO: 91089 - DNA, 144 bp, Homo sapiens; identical to SEQ ID NO: 29525
  chr16:84780617-84780761
  hypo

SEQ ID NO: 91090 - DNA, 30 bp, Homo sapiens; identical to SEQ ID NO: 29526
  chr16:84799780-84799810
  hypo

SEQ ID NO: 91091 - DNA, 31 bp, Homo sapiens; identical to SEQ ID NO: 29527
  chr16:84800117-84800148
  hypo

SEQ ID NO: 91092 - DNA, 232 bp, Homo sapiens
  chr16:84800548-84800780
  hypo
cccgcctttcttccccggtgccacctttgctaaaacacaggaccactgaatcaagagggcttcttgattctccaccagctctcatgagcggtttccccactactgtatccctctccagaaccaggggaactgttgtcactgaagtcttcaaactgtaaaggagcatggagatgcgtaattaaaccctggacagaaaagcttttagcgagctcttcaccgcatctgttctgga

SEQ ID NO: 91093 - DNA, 64 bp, Homo sapiens; identical to SEQ ID NO: 29528
  chr16:84812704-84812768
  hypo

SEQ ID NO: 91094 - DNA, 362 bp, Homo sapiens; identical to SEQ ID NO: 29529
  chr16:84813521-84813883
  hypo

SEQ ID NO: 91095 - DNA, 168 bp, Homo sapiens
  chr16:84824663-84824831
  hypo
ttctgcaatggacagtttttacgtttcaaacgggaaactcttttctccttccgtgtctccatgcaagcccagagacgccagcatcatgtctgtctcccatcctccacttctctgacgaccaaaggtcctgggttctctgaggcctgcgcctgggccttgttacaaccc

SEQ ID NO: 91096 - DNA, 70 bp, Homo sapiens
  chr16:84868031-84868101
  hypo
ggcagtgtgggccagggctgccgggcactgcccctgtgaactgggcctcggccaattggtttgtggcttt

SEQ ID NO: 91097 - DNA, 149 bp, Homo sapiens
  chr16:84886290-84886439
  hypo
agggggattcccaacccgacaaggggtggggtgggtgtgtacacagagggccttgtgtgtgagggaaggtacttcacggtgctattcaaaaattaaggagactggccagtgcggtggctcatgcctgtaatcccagcctcctttggccg

SEQ ID NO: 91098 - DNA, 159 bp, Homo sapiens
  chr16:84904247-84904406
  hypo
ttccaaatattcttcacgcacttcatgcttagtgactgcctgatactctgacacacgactgtacatgaatgtgtttagccattgctttgccacctgctggcttatttccagcttttcaccattataaacagttgcggccaggtacggtggctcaagcct

SEQ ID NO: 91099 - DNA, 30 bp, Homo sapiens; identical to SEQ ID NO: 29530
  chr16:84906600-84906630
  hypo

SEQ ID NO: 91100 - DNA, 31 bp, Homo sapiens; identical to SEQ ID NO: 29531
  chr16:84912366-84912397
  hypo

SEQ ID NO: 91101 - DNA, 46 bp, Homo sapiens
  chr16:84954214-84954260
  hypo
tgatccacatccacagcgagacctctgtgaccgaccatgtcatctg

SEQ ID NO: 91102 - DNA, 24 bp, Homo sapiens
  chr16:84955095-84955119
  hypo
gcgccattgcgaccaccctcagtt

SEQ ID NO: 91103 - DNA, 183 bp, Homo sapiens; identical to SEQ ID NO: 29533
  chr16:84965069-84965252
  hypo

SEQ ID NO: 91104 - DNA, 199 bp, Homo sapiens
  chr16:84974273-84974472
  hypo
ctggagagatggcctgcggcgaggccccatgcatcccagggaaggttccggaacaccctgcacacgcacagtctccaccatcctctctaggcctggcctcgcatcagacagggcccttgtgagagctgcctcaaatgtgacatttccaccagagccccggcccccgtgcccgccttgccagcctcggcctgtgggggct

SEQ ID NO: 91105 - DNA, 31 bp, Homo sapiens; identical to SEQ ID NO: 29534
  chr16:84974955-84974986
  hypo

SEQ ID NO: 91106 - DNA, 278 bp, Homo sapiens
  chr16:84987802-84988080
  hypo
cttgccatagggagggtaacccgggtcatccaggtggacctaatcgagtcacacgagtccttagaatcagagaacctttctgagctgcggtcggagggagccgtggtggaacctttctgagctgtggtcagagggagccgtgatagaacctttccgagggtgctgtgattaccgaagcagcagcagagatgcaacattgccggctctgaaggtggacgaagcggccaggagccatgggatgccagtgacctctggacgctggaaaaggcagggaaaca

SEQ ID NO: 91107 - DNA, 315 bp, Homo sapiens; identical to SEQ ID NO: 29536
  chr16:84998379-84998694
  hypo

SEQ ID NO: 91108 - DNA, 245 bp, Homo sapiens
  chr16:85001516-85001761
  hypo
atactgggtggataacggcgatacaggcgcaaacacgtgatgctgtcgtgttctgccataaaaaggcatgaagtctggacacgcgctaccacatgggcagaacctgaaagcataatgccgagtgaaagaagccagacacagaaggacacgttttgcaagattccgtttctatgaaatgtccagaacagacagattcatagaaacagagtagacgagtcggggccaggggccgggggaggagacgg

SEQ ID NO: 91109 - DNA, 567 bp, Homo sapiens
  chr16:85007506-85008073
  hypo
cccggctcaggtgtgcgcctccgtgttcgagtctccttctcatttccgcgtgtctggaatgccaccaggagccccaaggcacagcacgtgcgaggcagggctgcggcacacactgaccatctggcctctgaaaggtaagcgaggcagggctgcggcacacactgaccatctggcctctggaaggtaagtgggcattttggttccctcagtgcaaatgttagacaaatttgttgaatgaattaaaatcaaattgtaggtacttgagattctgaactgtggagattttgaaacattgtttttatttcaacgtgcactaaaaaaaggactaagtaaaacgatgggagtcgaattaaacattcaacaagcaacagtactcactgggcaacatttgtgagtcgcgcttgagtgcccaggtcacttgtcatgggcacaaaagcatttagagtttctggaaactgtttgggagtgaccttaacagcctggggctgggcccacgaagcacggaaaggcaccccctgaaaacaccaccatccaggaagaacgggcgctttggaagccatttgagaa

SEQ ID NO: 91110 - DNA, 144 bp, Homo sapiens; identical to SEQ ID NO: 29539
  chr16:85008290-85008434
  hypo

SEQ ID NO: 91111 - DNA, 187 bp, Homo sapiens
  chr16:85008677-85008864
  hypo
aaggcaaggccccacgaggggagctgttggctttctggcataattttaagctccgcaccaaggatcctattttatcacctgtgccgtgggtggagaagaaaacgtaaaagctaaccaaaaactccaacaagagggcgccatcctggccattcccgactggagcgctgcctgcggtggcacagtcgcc

SEQ ID NO: 91112 - DNA, 30 bp, Homo sapiens
  chr16:85009479-85009509
  hypo
aatcgagaccaaaacgtctttctatgtaaa

SEQ ID NO: 91113 - DNA, 443 bp, Homo sapiens
  chr16:85009980-85010423
  hypo
gtctcgtgggcagtcgcctaaatcggaagcccacaaagggattcatccagaggagtgaggggggccccccaaagacggacttcatcccttcccatcgcagcctccgctcccatgtgggcttctcacttttcaatcgctcgatctcctggaagcagaaagaaaagcaagtggcagcggctccaggaagctcggcagaccccaccaagcctcagaatcacaccgtgctcaagcacagtgtgggctcgatggagggtaggtgagtgaactctccttcccagctctgccccgatccagaccccgtggcctctgtgagcccagcccggctgcagccacgtggccagcccagactaccacaatggccctcccagccaggcaccaacatttgtcgctcgttagttactgtgtacagacatttactgagcgccactccaggcctgcagagc

SEQ ID NO: 91114 - DNA, 119 bp, Homo sapiens
  chr16:85011213-85011332
  hypo
tgcatatctaaggtaggataacgagcacctattttcactacacttgcttagggtcggtcactcacgtaagcaacgtgaagcctgctttgaacaatggcgagctagctgaccagcagaca

SEQ ID NO: 91115 - DNA, 73 bp, Homo sapiens
  chr16:85013862-85013935
  hypo
acccgcccatagcgtcaccttcttcttattcattgaccttggctccctgcccgacctccacagcacctgactt

SEQ ID NO: 91116 - DNA, 30 bp, Homo sapiens
  chr16:85015452-85015482
  hypo
gtttaatacagcagcgcacgtacctgcagt

SEQ ID NO: 91117 - DNA, 30 bp, Homo sapiens; identical to SEQ ID NO: 29541
  chr16:85018907-85018937
  hypo

SEQ ID NO: 91118 - DNA, 200 bp, Homo sapiens
  chr16:85020010-85020210
  hypo
gcagagctcctggacagcagtcgcggccccatgaaggctacctccggaaggcactcgcacggctgccgagaaggctcgtaggcatccacggggctggcattgaagacacaggctctaacaagtaaagggatgcagggcccagggccgtgggtggccttcctccctcccagccctctcacgatcccaaagtgaagcctggg

SEQ ID NO: 91119 - DNA, 144 bp, Homo sapiens
  chr16:85024469-85024613
  hypo
caaaacctatctatggccagccgtggccacatacaaagattatggaaagcacaagctagacgcgaagtcccagcactgggttccccggcagcgtggagaggagctctgctgtatcactgctgcgcctgctcccctgagccccac

SEQ ID NO: 91120 - DNA, 30 bp, Homo sapiens
  chr16:85027659-85027689
  hypo
ctgaagccctgggcacgctcaccagctctc

SEQ ID NO: 91121 - DNA, 29 bp, Homo sapiens
  chr16:85028921-85028950
  hypo
accacacaagcaaaaactttccgtttcag

SEQ ID NO: 91122 - DNA, 148 bp, Homo sapiens
  chr16:85029249-85029397
  hypo
aaaccaaaccactttccatttcaggtggaaagcggggtattcccctcatcttgtgatactggccaagaactcatcaattcaattcatggagtcccctccacagatacaccctccttttaggaccggaaggcagcgggtgaaaaggaag

SEQ ID NO: 91123 - DNA, 30 bp, Homo sapiens
  chr16:85029687-85029717
  hypo
gattaatttttggagcgtaacatttgacgc

SEQ ID NO: 91124 - DNA, 17 bp, Homo sapiens
  chr16:85032654-85032671
  hypo
ccagcctaaatgcagca

SEQ ID NO: 91125 - DNA, 124 bp, Homo sapiens; identical to SEQ ID NO: 29543
  chr16:85033821-85033945
  hypo

SEQ ID NO: 91126 - DNA, 86 bp, Homo sapiens
  chr16:85036999-85037085
  hypo
tccctcaactcacaaaaggagcgcagcactcagctgacccactgcagtgagctgatggcgactgcgctcctaagtgctcttgccat

SEQ ID NO: 91127 - DNA, 22 bp, Homo sapiens
  chr16:85043916-85043938
  hypo
gagccaccgcgtgcgtaccagg

SEQ ID NO: 91128 - DNA, 16 bp, Homo sapiens
  chr16:85052352-85052368
  hypo
gctggtgtcttctcta

SEQ ID NO: 91129 - DNA, 30 bp, Homo sapiens
  chr16:85075511-85075541
  hypo
tcttgaaacgattcccgggattccgagcgt

SEQ ID NO: 91130 - DNA, 256 bp, Homo sapiens; identical to SEQ ID NO: 29545
  chr16:85083542-85083798
  hypo

SEQ ID NO: 91131 - DNA, 29 bp, Homo sapiens
  chr16:85091971-85092000
  hypo
tgttttggccggacgcgttggctcatgcc

SEQ ID NO: 91132 - DNA, 30 bp, Homo sapiens
  chr16:85112610-85112640
  hypo
taaggccgagcccgcggcttcccgtcaccc

SEQ ID NO: 91133 - DNA, 30 bp, Homo sapiens
  chr16:85141798-85141828
  hypo
tgtccagagctgtgcggcgggaggtggagc

SEQ ID NO: 91134 - DNA, 65 bp, Homo sapiens; identical to SEQ ID NO: 53405
  chr16:85143909-85143974
  hypo

SEQ ID NO: 91135 - DNA, 47 bp, Homo sapiens
  chr16:85147114-85147161
  hypo
gcccaggctggtggcggcttccctctgtgaccgatccccaggtgccc

SEQ ID NO: 91136 - DNA, 209 bp, Homo sapiens
  chr16:85196721-85196930
  hypo
ttactactgagcaccgactgtatgccgggtgccttcgtggcacttctcggttgcacgctggttagtattgagcaccgactgcatgccgggtgccctcacggcacttctcggttgcacgctggttagtattgggcgccgactgcatgccgggtgccctcacggcacttctcggttgcacgctggttagtattgggcgccgactgcatgcc

SEQ ID NO: 91137 - DNA, 267 bp, Homo sapiens; identical to SEQ ID NO: 53406
  chr16:85202617-85202884
  hypo

SEQ ID NO: 91138 - DNA, 174 bp, Homo sapiens; identical to SEQ ID NO: 29548
  chr16:85214270-85214444
  hypo

SEQ ID NO: 91139 - DNA, 31 bp, Homo sapiens
  chr16:85236875-85236906
  hypo
gcttcgcagggcatagcgccaggctgggcag

SEQ ID NO: 91140 - DNA, 31 bp, Homo sapiens
  chr16:85238637-85238668
  hypo
tgggcatgtacacgtacgtcttggctcactg

SEQ ID NO: 91141 - DNA, 89 bp, Homo sapiens
  chr16:85241882-85241971
  hypo
gcactccgccacgtcgctggcggaaggaatcatcagtgctccctgaacggtctgcggagttctcagccatcgcccgtggcatctcggct

SEQ ID NO: 91142 - DNA, 30 bp, Homo sapiens
  chr16:85242535-85242565
  hypo
cctgtgttggggttcgccgcatgttggggt

SEQ ID NO: 91143 - DNA, 201 bp, Homo sapiens
  chr16:85245558-85245759
  hypo
gcatcacttgaaccatcgcccatcaaatggtttctgactgggggaggactcctgttacaggctgagccatgtccctcaactttgtgtgttgcagccctgacccccagttcctcggaatgtgcctgtgtctgtagatagggtcttcagaaaggtattaataattgggctagaagccgggcgcggtggctcatgcctggaatc

SEQ ID NO: 91144 - DNA, 46 bp, Homo sapiens
  chr16:85283527-85283573
  hypo
agcgatgccagctgggcgcttctccatgcctcggtttccttgtctg

SEQ ID NO: 91145 - DNA, 31 bp, Homo sapiens; identical to SEQ ID NO: 29550
  chr16:85285189-85285220
  hypo

SEQ ID NO: 91146 - DNA, 31 bp, Homo sapiens
  chr16:85289023-85289054
  hypo
ttttttttttttgagacggagtcttgctctg

SEQ ID NO: 91147 - DNA, 31 bp, Homo sapiens
  chr16:85294922-85294953
  hypo
gtgtatgactctgcctcggtgcctcagtgtt

SEQ ID NO: 91148 - DNA, 31 bp, Homo sapiens
  chr16:85299459-85299490
  hypo
tgaggtcccaggtccacggtcacagggctgg

SEQ ID NO: 91149 - DNA, 30 bp, Homo sapiens
  chr16:85317830-85317860
  hypo
tagggcgactcttggcgtgtaatcacagca

SEQ ID NO: 91150 - DNA, 236 bp, Homo sapiens
  chr16:85318199-85318435
  hypo
ctgtattcgagccagcgagggggtggtgagaacctgctaactggatattaaacgcccgctgctgggagagtcgtggtccacagtaggatgtgatcgttcaggctggagggatcgtggggaaaatggtggctcatggaatactaaggggaaggctgtcaggtgcgggcggggctggcacacacagctcaccttcagctgaggaagctgcctgctccgctgccgtcctggcagtcagt

SEQ ID NO: 91151 - DNA, 30 bp, Homo sapiens
  chr16:85321550-85321580
  hypo
aataagcgctattggccgggcacggtggct

SEQ ID NO: 91152 - DNA, 170 bp, Homo sapiens
  chr16:85327231-85327401
  hypo
ggaatcagggtgtcagcgggacggcttccttctgctggagctagagtgggaatctgtccgggcctttcttccagtttctggcattgcccacagtccttggggttccttggctcctagaagccatctctccgatcactgaacttcatcgctgtgatcgctgcctctgccat

SEQ ID NO: 91153 - DNA, 173 bp, Homo sapiens
  chr16:85329622-85329795
  hypo
caccacagctctcctcggagccagtttggatcagctttgcaggctgagaaccaggaggccggcttgggaaatgtagggatgaaagctgtttcaaggctgaggggggatgtgggagcggagaggaggtgatttctgaactgcacaaggtacgaaaggcacgctagggaagggga

SEQ ID NO: 91154 - DNA, 45 bp, Homo sapiens; identical to SEQ ID NO: 29553
  chr16:85332744-85332789
  hypo

SEQ ID NO: 91155 - DNA, 210 bp, Homo sapiens; identical to SEQ ID NO: 29554
  chr16:85336378-85336588
  hypo

SEQ ID NO: 91156 - DNA, 195 bp, Homo sapiens
  chr16:85351333-85351528
  hypo
cctgcgctggctcattcgctttcctgccgcgctgcccaccagtgtatccagcactcccctcctaagtgtgggacctgagctctgagctcagctccttgcctcgtccgcttctgggagagcccagactaagagggaaactatcgtgtgaatcgtcaggtgttttggacatctgcctcagcccggggttcctggggg

SEQ ID NO: 91157 - DNA, 183 bp, Homo sapiens; identical to SEQ ID NO: 29555
  chr16:85364086-85364269
  hypo

SEQ ID NO: 91158 - DNA, 31 bp, Homo sapiens
  chr16:85365428-85365459
  hypo
caggcatgagtcaccgcgcccagctactccc

SEQ ID NO: 91159 - DNA, 30 bp, Homo sapiens
  chr16:85365912-85365942
  hypo
tgggtcgaattcctccgtctccataatcac

SEQ ID NO: 91160 - DNA, 84 bp, Homo sapiens
  chr16:85369410-85369494
  hypo
tgtctgaggcctccaagcagccgggcgcgctgggagcagggcgggacacccttcagacctgacgtccagtgtggagtttccctg

SEQ ID NO: 91161 - DNA, 31 bp, Homo sapiens
  chr16:85376257-85376288
  hypo
tcttcaggctgtctgacgtttggcagtctgt

SEQ ID NO: 91162 - DNA, 30 bp, Homo sapiens; identical to SEQ ID NO: 29557
  chr16:85399727-85399757
  hypo

SEQ ID NO: 91163 - DNA, 299 bp, Homo sapiens
  chr16:85407685-85407984
  hypo
ctgtatgtgttggtgtgtgcacgcgtggccctcagtgtgtagtgtgtgtcagtgtgcatgtgcgtggttgcatgtggccctcggtgtgcagtgtgtgtcagtgtgcctctgtgtgttcacgcgtggccctcggtgtgcagtgtgtgtcattgtgcctgtgcatggtcgtgcgtggtcctcggtgtgcagtgtgtgtcagtgtgtatgtgcgtggttgtgtgtggccctcggtgtgcagtgtgtgtcagtgtgcctctgtgtggtcgcgcgtggccctcggtgtgcagtgtgtgtcattg

SEQ ID NO: 91164 - DNA, 162 bp, Homo sapiens
  chr16:85410441-85410603
  hypo
gctgggaaaagaggctgtgtccgtggtgccataggcctctctgcacacccctccgcacaccgcacaccgcacacccggccccgcgttacccgacggcccctcctgttgtgcaggttgcacgctgtgcagtcgcgggtggccgtttggccagagttgcccagt

SEQ ID NO: 91165 - DNA, 154 bp, Homo sapiens
  chr16:85417767-85417921
  hypo
agggaggtgctattgtgaacacggacaggtgactgcccagcccaggcttcctgatgggggccccgagaccctctccgagaggagcaagaaacacacgtgccttgctctgtgtgggtgcggccgggtggcgagcggcccatcctgggagggctgg

SEQ ID NO: 91166 - DNA, 117 bp, Homo sapiens; identical to SEQ ID NO: 29561
  chr16:85423784-85423901
  hypo

SEQ ID NO: 91167 - DNA, 172 bp, Homo sapiens; identical to SEQ ID NO: 29562
  chr16:85426316-85426488
  hypo

SEQ ID NO: 91168 - DNA, 30 bp, Homo sapiens; identical to SEQ ID NO: 29563
  chr16:85428080-85428110
  hypo

SEQ ID NO: 91169 - DNA, 165 bp, Homo sapiens
  chr16:85428773-85428938
  hypo
catgccaggctattggcttctcgaacgttaccctgaatccctgggaatggaatggaaccgaatgaacaggtaaaatctatacgaggcccagaaaaatccaagccccgagctgctgaggtgtcagggcagtggcgcctgctgagcgtgttagaaaggagggagaag

SEQ ID NO: 91170 - DNA, 49 bp, Homo sapiens; identical to SEQ ID NO: 29564
  chr16:85432510-85432559
  hypo

SEQ ID NO: 91171 - DNA, 31 bp, Homo sapiens
  chr16:85446736-85446767
  hypo
gaagcctgtgtgtttccgcacaccctgcaac

SEQ ID NO: 91172 - DNA, 33 bp, Homo sapiens
  chr16:85457901-85457934
  hypo
gcttgaggttcttggcgacggcagggtcgccgc

SEQ ID NO: 91173 - DNA, 30 bp, Homo sapiens
  chr16:85458429-85458459
  hypo
ttccagcgctgcccgcgcagctgtcactta

SEQ ID NO: 91174 - DNA, 30 bp, Homo sapiens
  chr16:85464292-85464322
  hypo
tgggcacagggcggcggcagtctagggcat

SEQ ID NO: 91175 - DNA, 30 bp, Homo sapiens
  chr16:85464584-85464614
  hypo
aacatttccagccccgccgcaaggccctgg

SEQ ID NO: 91176 - DNA, 202 bp, Homo sapiens; identical to SEQ ID NO: 29565
  chr16:85465096-85465298
  hypo

SEQ ID NO: 91177 - DNA, 292 bp, Homo sapiens
  chr16:85485675-85485967
  hypo
ctgaagatgcatctttgtccccgccagagagacccgtgtccggcgcgaataattggattttaatgaaacgaatgggagtgctgaagccgtttgccaccctggcctgcatcggggccccgcaattaagccgattatgttttgagagtcaagctgtctgactcctcgcgtccctaatgtgatgatgtttgatggccctgccagcgcggttatttatttatttacccaaccctcatgagctgggacgtgccagtgggccccggtaattaacagcgggtgctgagcctgtgtgttc

SEQ ID NO: 91178 - DNA, 309 bp, Homo sapiens
  chr16:85497296-85497605
  hypo
gaactcctggcatcaaggcctcgcatcactggcacagttaggcagcgagagggtaagagtcacagagcccgccgagggtggggagcgccatgagtcccatcggagagagggtgagcgggactctgaggcctggggcagtgccacaggtgcgggtgtgaagctggcggtgggccactgaggtcctcaggctgaggggcggccagagtgagggatggagagaagccttccatgaacagcaactcaggctaccaaggtccctttggggtggctccagtgacagagaatgggcggggacgctggcctcaggac

SEQ ID NO: 91179 - DNA, 31 bp, Homo sapiens
  chr16:85507602-85507633
  hypo
ctgaaaccagcacaggcgggcagggtgtgac

SEQ ID NO: 91180 - DNA, 30 bp, Homo sapiens
  chr16:85515579-85515609
  hypo
gtggccgatgccctcgccgggactacgccc

SEQ ID NO: 91181 - DNA, 630 bp, Homo sapiens
  chr16:85517148-85517778
  hypo
gctcccttctcttccaccaggcgatgcccaggcccccggccactgtctccgccctcttggtaggccctgtgggatcaagtgtctccgaggcggcgggctgagacggatgggcctcctggccgcacacctgagaacatgctggcaaaagcgtttgcttaattaattgactttgagcgagggagcccgtccccgtgtaaacctagcagcaggctcggtgcttgccgccgggatgctgcgaatgcaaggctagactttaaataagggtgtgattattgtgtgaataattgaagaatgttggggagcttgcagtcctcggtgtaccgtcccctgccagcaggcctctgggccctgcccgtcacgggtacaactctgctgccatcctctcagctgggacagtgggggactttcagacctaagcgttggaggaaacctcctcagcgaccctccccgagaggtgcgtccctgttttccagatggggaaactgaggcagagctggggttaccccagaagaccctcagattcgcggtaggatgacgtcccacacttggtgactttatgtggctcccggaccagttatgccgtgcaggaatatgccccttcatagaaccgcagtgaggtttttccatcct

SEQ ID NO: 91182 - DNA, 30 bp, Homo sapiens
  chr16:85520323-85520353
  hypo
tgcccgggacggagcgggcatctgtcctgt

SEQ ID NO: 91183 - DNA, 42 bp, Homo sapiens; identical to SEQ ID NO: 29569
  chr16:85523183-85523225
  hypo

SEQ ID NO: 91184 - DNA, 414 bp, Homo sapiens
  chr16:85529539-85529953
  hypo
acctggggtgattcatcgagcatccctcggtctcagactcctcatttgtcaaaagccgcggggggacctgcctcagagcgtcacagggaacctcgggaatcgattgttctgcaagccagagctggatcccgggtgcagaatccatccgagcactctgtatgggggcacagctcggagcagggtctccggcttcatttccccagggcccgagcctgcggtgacagtgacttgacctcgctccccagaggtgagaggtgcccactttgcagccaatggcaattcccagaaccatccatctcccgccaccccgtgcctccaaggccgtcgtcagggatgagcgatgggccgcccctcgcgggcccgaccgggatggttacaacaggtttatgctgcgtgagcgatggcgtttgcatg

SEQ ID NO: 91185 - DNA, 108 bp, Homo sapiens; identical to SEQ ID NO: 29571
  chr16:85535587-85535695
  hypo

SEQ ID NO: 91186 - DNA, 30 bp, Homo sapiens; identical to SEQ ID NO: 29572
  chr16:85537512-85537542
  hypo

SEQ ID NO: 91187 - DNA, 160 bp, Homo sapiens
  chr16:85541367-85541527
  hypo
gtcacattctgaggcccgggggctgggatgtcagcgtgtcaattttcgcaggacacaaatcagcctataataggtgtcattttccctctttttcaatttgaaatggatgcgtcatattcatcagaagagttgcgagcacacgcctcgtgtgtttctatgg

SEQ ID NO: 91188 - DNA, 30 bp, Homo sapiens
  chr16:85542734-85542764
  hypo
aaggccgggcagagcggggttatcgtgtga

SEQ ID NO: 91189 - DNA, 186 bp, Homo sapiens
  chr16:85543125-85543311
  hypo
agctccgtttggccagcgacccctggccctcgctgtcatcagcttgcctggtgctttgcgggtgcctgatgactgtggagtgacgttgaatggaaaggccaggaggctccatctgaggatgtatgctggccctgaaggccagcgtggggaacaagagccgaatggccatgccgggtgggagacgtg

SEQ ID NO: 91190 - DNA, 71 bp, Homo sapiens
  chr16:85543642-85543713
  hypo
attaggccaagccgcgctgagcaggtggggccccgggggccaagcacccccatgccgccaccatcagatgt

SEQ ID NO: 91191 - DNA, 25 bp, Homo sapiens
  chr16:85550409-85550434
  hypo
ttttttttttttgagacggagtctc

SEQ ID NO: 91192 - DNA, 31 bp, Homo sapiens
  chr16:85553675-85553706
  hypo
gtggcttaacaaccatcgaaatgtactgctt

SEQ ID NO: 91193 - DNA, 31 bp, Homo sapiens
  chr16:85564298-85564329
  hypo
tcacagagcacccagccggggaatccaagtt

SEQ ID NO: 91194 - DNA, 42 bp, Homo sapiens
  chr16:85586222-85586264
  hypo
ccaccgcgctcagtctcaggtggacctcgatggctgtctcca

SEQ ID NO: 91195 - DNA, 806 bp, Homo sapiens; identical to SEQ ID NO: 53410
  chr16:85589832-85590638
  hypo

SEQ ID NO: 91196 - DNA, 30 bp, Homo sapiens
  chr16:85615834-85615864
  hypo
cctcccccgaggtgtcggcaccccctggat

SEQ ID NO: 91197 - DNA, 522 bp, Homo sapiens
  chr16:85616218-85616740
  hypo
ctgacacccagttcccccttacgcagccgcctggggtgcctggagctcagtcctccccgtgttgataaattgagcttctcttctccacggttcagggcgtcggggtggggacggggccatcctgcacaaccccccctcgcctcttaatgccttttcacccctgagagcctgtctgcacagcctgcggttggtcggccgccttgtcatttagctgttccgagccagtgatcgggaggcagcacaaactgtggcatttgctgagcgtaaaaattcaattaattccagaaggcagattaaatataagtgagttttaataatttgctgtaaagtcggaggattactgtgggcacggggagggaagccacacatgcgtgcttgagcaggctggcacagtctcggggatgccagccagggtggcttcctggagccactcattcctccccgcagggtacacccccagctctccagaggacaccctcctgcgagggtggtgtcctgggggtctcccgctggaattctggg

SEQ ID NO: 91198 - DNA, 87 bp, Homo sapiens
  chr16:85617691-85617778
  hypo
acggggacacaggctcgccagctgcacagcccgcagactggccttgggtctttgtgtgcgtgcgtgccggtgcgtgggcccctgtct

SEQ ID NO: 91199 - DNA, 133 bp, Homo sapiens
  chr16:85618088-85618221
  hypo
tgtattacctgtctccgtgaggtttgggagatccaggatgctgctttgagaacgcctgcgaagcagtaggatcggggaggtggagcagtttcccccacccctccctctccccgcacgcgttctttctcagatg

SEQ ID NO: 91200 - DNA, 30 bp, Homo sapiens; identical to SEQ ID NO: 29579
  chr16:85619959-85619989
  hypo

SEQ ID NO: 91201 - DNA, 35 bp, Homo sapiens; identical to SEQ ID NO: 29580
  chr16:85661741-85661776
  hypo

SEQ ID NO: 91202 - DNA, 30 bp, Homo sapiens
  chr16:85667834-85667864
  hypo
cgtctttcccacgccgtgtgctctgcatgg

SEQ ID NO: 91203 - DNA, 180 bp, Homo sapiens
  chr16:85671082-85671262
  hypo
agcagtggctatgtatcgagtccccccttgatcgcggcagtggctatgtattgagtccccccttgatcgcggcagtggctgtgtatcgagcgcctgctgtgcccctggcgggctcgctgtgcttctcacacacccttcgcctctggtggatgagaactgagcctccggcttgcccgggtc

SEQ ID NO: 91204 - DNA, 325 bp, Homo sapiens
  chr16:85671745-85672070
  hypo
ttcgccatctgactgcgattgcctccgcgtctctcctctcattgtgtctcaagggtgtagtttaaaaattcaattcagacgaagctgtggcatgcgctgccctgggagaaaggctgggaaggagaggaagaggaggccctcgctgggatttatttttctggaggcgctgagacgtcttctcttcttcaaagctcagtcacccgcccaccagcgcgggccagacacccttccccagggccagcctgaccctttaacctactcacctactcactgccgaggctggggcgctttgggcaagggcagacgcttgcgaatcgccgatgca

SEQ ID NO: 91205 - DNA, 175 bp, Homo sapiens
  chr16:85672903-85673078
  hypo
ccctcctcggaatggcggcctggccaccgcctccctccctgcctctcctaccaggacctcttctgcacagacacccaaccacccccataggcatctgaaacctcagcctaggagtcccaagactggggggatgggtcccagccctgtgtcccaccccctgcgctggacagattct

SEQ ID NO: 91206 - DNA, 997 bp, Homo sapiens
  chr16:85673485-85674482
  hypo
ccgggggcggaggtacggggagccttgcgtgtcctcagctgctccaggaggcacaggcagcacctgggaccaggcaccccctccctgggaaacagttgggggcgatcgtgctgcgggcctttgctctgggaggccggcgctttgggaacagggtggctccagagccttcccaggtgggctggagagccgccgtctggaggacagttctgagcaggtgctcctggctggcgaggaagccccacctcaccccagcaccacccatggtgcagggagctggggttgggcgcacaagagtctgagcccgttcccaccccgcctccttgtcaccagcccggtggccgggactcatggcttccctgcccacacttcgctcccttaacaccggccgggggctcatggtacctgccctggaagctgccagaggcctctccaagcaggtgttggccgctgtgttacctgcggcaggggtggcccagccacccatagcccggcttgggccacagggacggggccgacaggtggtggcagtggggctggaactgctctcttgtcatcgaggcccgcggggccctgtgccgccttcccctggtggtgtctgctggctgcctgcctcgtcttgtcactggctttgcaggcaagaggggaggcagatccggttactgtcctgtccctggtgccacctgaaaccgagatcccagctgagtgagtggggactacgtgtgcggggaccacggagcagggaccacagacccatcctcatgagctgccgtgggaatgcttccaccgtggagccggcctgggcgggggagaggctccccctttctgccgctgcctcggaaatctgcctctcaaagaaaacagcaaaacaaacacggaggaaggatcccgcctggcaggcgcgcctcgcgtgggtgtcagtctgcggcggcggcggctctgcaggcgtctggagcccgtctgtctcccgcgcaggtgtgagcgccgcgggcgtcctcat

SEQ ID NO: 91207 - DNA, 31 bp, Homo sapiens; identical to SEQ ID NO: 29586
  chr16:85678804-85678835
  hypo

SEQ ID NO: 91208 - DNA, 135 bp, Homo sapiens
  chr16:85679248-85679383
  hypo
cagttttctttggtgaatgtgcgcgtgcccactccggacacagtgaaggggagatgaggctgcttctgcccccggaaccaaggccaggtctgaacagaagtcgggcaggatgccgggagctgatgggctggggtc

SEQ ID NO: 91209 - DNA, 55 bp, Homo sapiens
  chr16:85682502-85682557
  hypo
aacgtgagggtgacagcggcaccctcctggaggccctgtgcgggtgagtacatcg

SEQ ID NO: 91210 - DNA, 153 bp, Homo sapiens
  chr16:85682760-85682913
  hypo
gacaccagtcagctggtttagcgcccaccctaatgtccttattctcattcggtcacctctttaaagaccgtgtctccaaatgcagttccgttctgaggccctgggcatcagggctctaacacggatttgggcgggggtggcagtccagttcaa

SEQ ID NO: 91211 - DNA, 193 bp, Homo sapiens
  chr16:85683112-85683305
  hypo
atgtctgtgggcccctcgctctgcactgactggggcctgcctgtgtggaaggagctggcactgggagctgctcttctgccgctgcctggggcctgtgcgccctcaggtgggtacctgcagctctcccggccccccacccctggcgcgcagcctggagtgggcccttcctaattaagagcgattctcaggggct

SEQ ID NO: 91212 - DNA, 491 bp, Homo sapiens; identical to SEQ ID NO: 29589
  chr16:85684057-85684548
  hypo

SEQ ID NO: 91213 - DNA, 31 bp, Homo sapiens; identical to SEQ ID NO: 29590
  chr16:85694658-85694689
  hypo

SEQ ID NO: 91214 - DNA, 30 bp, Homo sapiens
  chr16:85695256-85695286
  hypo
gtgccacgggcccccgaccctgcctacatc

SEQ ID NO: 91215 - DNA, 30 bp, Homo sapiens; identical to SEQ ID NO: 29591
  chr16:85696642-85696672
  hypo

SEQ ID NO: 91216 - DNA, 445 bp, Homo sapiens
  chr16:85699440-85699885
  hypo
ttacttaaatgttccccgggtcttggttctttgcgctaggtctttgttaagtgtaagctctagagaccaggatctgcgtgctggacactcagcctgttaacttgcatttcttaatattttccttcactttgtctctaaaagaaccagccacgcagcaagcctctctggatgtggagaagccggttggtgttgctgcttccttgtctgacatcccaaaggccgcggagcctgggaagctggaacaggtccggccccaggagctgtcgagagtccaggagctagctcctgccagcggggagaaggccaggctgagcgaggcccctggaggcaaaaagagtctgagcatgcttcactatatccggggcgctgcacccaaggacattcctgtgccgctgtcccacagcaccaatgggaagagcaagccgtgggagccctttgtggcaga

SEQ ID NO: 91217 - DNA, 30 bp, Homo sapiens
  chr16:85700197-85700227
  hypo
agggacgcatcgatcggtaagaggtaaagg

SEQ ID NO: 91218 - DNA, 80 bp, Homo sapiens; identical to SEQ ID NO: 29594
  chr16:85704415-85704495
  hypo

SEQ ID NO: 91219 - DNA, 30 bp, Homo sapiens; identical to SEQ ID NO: 29595
  chr16:85711739-85711769
  hypo

SEQ ID NO: 91220 - DNA, 156 bp, Homo sapiens
  chr16:85741438-85741594
  hypo
aagtggacaggctggattcctcgctggtcctgccacgtctctctgagcggaggcccgggttcgctcagttcccatccagggtattcagcacacctgctccaggcagccacgcccccggacacctgaagccgggccgctggagcaggagccagccag

SEQ ID NO: 91221 - DNA, 138 bp, Homo sapiens
  chr16:85849283-85849421
  hypo
ttcacacagcactgtgctttgcgtgggagaccactagagcctgaacgtgcaggtcagggagccggtggctagaagtatgagtggctccactcacgatcacccataataaccacttacgtgatttatttatgtttatta

SEQ ID NO: 91222 - DNA, 30 bp, Homo sapiens; identical to SEQ ID NO: 29597
  chr16:85877228-85877258
  hypo

SEQ ID NO: 91223 - DNA, 861 bp, Homo sapiens; identical to SEQ ID NO: 10843
  chr16:85932119-85932980
  hypo

SEQ ID NO: 91224 - DNA, 30 bp, Homo sapiens
  chr16:85954879-85954909
  hypo
accgtctaagtgcgtcgcttgggcgcccca

SEQ ID NO: 91225 - DNA, 31 bp, Homo sapiens
  chr16:85959633-85959664
  hypo
gtgtgcttttgagttccggtgaacggggtgc

SEQ ID NO: 91226 - DNA, 421 bp, Homo sapiens
  chr16:85966400-85966821
  hypo
gttggccctgtcaatcgagagggccggtctcccacgggtcgccctagtgcacacggtaatgggcagcacgagggtttccgtggctccgtatcctcactaacactcagtactttcagtcgtttatgttttagccatcctggtgggcggagcggtgctcattttggtttaaatttgcacttttccgatgaccggtggggttgggctccttgcctgtttcttggtgaagtgccgctttaggctgtccagcttctccactgcatttcatccttccctggtggacacatgggtgttcccggggatcagaaagggggcccacaccgtgctgcagagctggcatctgctcgagtggctgctgcctgcagctaagtattttgaatatccgcctgcctactctgtgtgcgtcctcttggtaaatagaagc

SEQ ID NO: 91227 - DNA, 31 bp, Homo sapiens
  chr16:86078363-86078394
  hypo
gtttaccgaggagcagcggagatgttatgag

SEQ ID NO: 91228 - DNA, 171 bp, Homo sapiens
  chr16:86096479-86096650
  hypo
ccttcacagggatctgggtcacgtgggtggagcccgatagtgtctgtgccatcagtttctagaacgctcaccgccactaggattttagcgctcccgggtggctgtactgttcacagctgagcccccggaagcaaggacacatgtgccaccggtttgctgggtgactttatt

SEQ ID NO: 91229 - DNA, 485 bp, Homo sapiens; identical to SEQ ID NO: 29600
  chr16:86101895-86102380
  hypo

SEQ ID NO: 91230 - DNA, 30 bp, Homo sapiens; identical to SEQ ID NO: 10846
  chr16:86542407-86542437
  hypo

SEQ ID NO: 91231 - DNA, 79 bp, Homo sapiens; identical to SEQ ID NO: 53429
  chr16:86542774-86542853
  hypo

SEQ ID NO: 91232 - DNA, 396 bp, Homo sapiens; identical to SEQ ID NO: 53430
  chr16:86543368-86543764
  hypo

SEQ ID NO: 91233 - DNA, 585 bp, Homo sapiens; identical to SEQ ID NO: 53431
  chr16:86543972-86544557
  hypo

SEQ ID NO: 91234 - DNA, 358 bp, Homo sapiens
  chr16:86560977-86561335
  hypo
ctattccctttttaatggaaacgatggcctccgagtccctttgtgactcctgtatgaacatgtccaccacggctagcacgtgtctcaagatgctgatgttcggcagctccttgttgcctgctcgtatctgtagacgaggcccagactcctgccacaggtgtgtggagaagccctggctcagatgctgcctccgcagcccagggacgtcctcctgtcgtgtttctgaatgctggtgcggtcttgccttccacaccgggcttggctgtggcttgccaccgcctggtctccagaactctcgtcttactgctcacagattttctttctccctacacatcacgtcttctaatacaaatgttga

SEQ ID NO: 91235 - DNA, 123 bp, Homo sapiens
  chr16:86562410-86562533
  hypo
gagggatgaagcagctgccaccgcacacccaccgcaccacacggcggcagcactgacgctgaaagccacgtctgctggcttccgaagctcctgttgttaatcgtggctatgtttcaaaactgc

SEQ ID NO: 91236 - DNA, 30 bp, Homo sapiens; identical to SEQ ID NO: 10847
  chr16:86567476-86567506
  hypo

SEQ ID NO: 91237 - DNA, 30 bp, Homo sapiens
  chr16:86570328-86570358
  hypo
agcttccatctgcacgccttggctcctgcc

SEQ ID NO: 91238 - DNA, 383 bp, Homo sapiens; identical to SEQ ID NO: 53437
  chr16:86600294-86600677
  hypo

SEQ ID NO: 91239 - DNA, 928 bp, Homo sapiens; identical to SEQ ID NO: 53438
  chr16:86600888-86601816
  hypo

SEQ ID NO: 91240 - DNA, 372 bp, Homo sapiens; identical to SEQ ID NO: 53439
  chr16:86602037-86602409
  hypo

SEQ ID NO: 91241 - DNA, 257 bp, Homo sapiens; identical to SEQ ID NO: 53440
  chr16:86609789-86610046
  hypo

SEQ ID NO: 91242 - DNA, 30 bp, Homo sapiens; identical to SEQ ID NO: 29607
  chr16:86618820-86618850
  hypo

SEQ ID NO: 91243 - DNA, 261 bp, Homo sapiens
  chr16:86665869-86666130
  hypo
actcctccctccctgtgcctccgcacaagcccatgactgtgacgttagccacgcagtgacggctaaggctaagccatcaaagacctccaaccggacatgttgcgatgctcacttttggaaagtagccaccgtgctgtgaggagggcacgctgccacacggaaaggccacctacaggtgtcctgatgcacgggaggtcccggccaacacgaaccagtagccaggagagtgaggggaccttcggatgattccagcttccagcc

SEQ ID NO: 91244 - DNA, 30 bp, Homo sapiens; identical to SEQ ID NO: 29608
  chr16:86735107-86735137
  hypo

SEQ ID NO: 91245 - DNA, 72 bp, Homo sapiens
  chr16:86903434-86903506
  hypo
ctgcgtagaggtgacggcggcgcaggcgcagtttagaactgcggagaggtgatggccgcgcaggcgcagttt

SEQ ID NO: 91246 - DNA, 30 bp, Homo sapiens
  chr16:86991472-86991502
  hypo
atgcccacccctcaccggctgccctgataa

SEQ ID NO: 91247 - DNA, 197 bp, Homo sapiens; identical to SEQ ID NO: 29610
  chr16:87022631-87022828
  hypo

SEQ ID NO: 91248 - DNA, 176 bp, Homo sapiens; identical to SEQ ID NO: 29611
  chr16:87092491-87092667
  hypo

SEQ ID NO: 91249 - DNA, 36 bp, Homo sapiens
  chr16:87146939-87146975
  hypo
acagagcaagactccgtctcaaaaaaaacaaataaa

SEQ ID NO: 91250 - DNA, 30 bp, Homo sapiens
  chr16:87174188-87174218
  hypo
cgtgggcttgggaccggtgacagaaggcct

SEQ ID NO: 91251 - DNA, 30 bp, Homo sapiens; identical to SEQ ID NO: 29612
  chr16:87219427-87219457
  hypo

SEQ ID NO: 91252 - DNA, 118 bp, Homo sapiens
  chr16:87219676-87219794
  hypo
ccacctaggagggacggtggacctggaggccacagagccgaggcccaccgtcctgaccagccaggaggcatgggcacccgcctctcaccacggggctccctccgtgttgaagatgtcc

SEQ ID NO: 91253 - DNA, 302 bp, Homo sapiens
  chr16:87250076-87250378
  hypo
gtggccaacaagaatgagggccgccgagaactggaagccggggacaatatctgctctgttctggcgcatagcagatgccagcgcggcttctgactttatagctttttcttggcctgtgcggatgaaggaggctgattgaaaccgggccggcgctggatggggaacagcctccccgaatgtggcacaggaccttgcagccaggctgtcctcctcgccgactctggctccgctggccacgcacgacaggcgggcggatctctcactctctcgggctcgacgacgggaccccaggccaggctgag

SEQ ID NO: 91254 - DNA, 30 bp, Homo sapiens
  chr16:87253133-87253163
  hypo
tgagtatatgtgtacgtgaagaatgcataa

SEQ ID NO: 91255 - DNA, 26 bp, Homo sapiens
  chr16:87300170-87300196
  hypo
gtgctgcttaaaaaattctgacgtca

SEQ ID NO: 91256 - DNA, 38 bp, Homo sapiens; identical to SEQ ID NO: 29614
  chr16:87310541-87310579
  hypo

SEQ ID NO: 91257 - DNA, 219 bp, Homo sapiens
  chr16:87311852-87312071
  hypo
caacaggaccaacatcccagtcgaagcaggggtgtcccaggcagcaggccaggaccacgccgcatgttcacaggctcagttatagccgtcgaccacgccacggcgcccaaccacgccacggagcccgaccacgcctcgaccatgccacggcgcctgaacttttatctccatttctcaggtgaggacctgaggctcgggtggccccgtcactttcctagg

SEQ ID NO: 91258 - DNA, 290 bp, Homo sapiens
  chr16:87356603-87356893
  hypo
gtcagtgttcactgccgcgtgcccagtgcttagcactgtttgccgcatgggagatgcaggtcacaacccggtagcgcctagtggcccgggggacacctggcttgtctgggcctgttggctgacaggtaggagggactgccatccattgttggggcaaaggatgctgctcaacctcccacaacgcatggagcggcccggcgcacgactcacccggccccaaacaccaactgtgccgaggtgatgccctgccctgaggcgagcgtacaaggcttgagcgtcgagaacactgc

SEQ ID NO: 91259 - DNA, 31 bp, Homo sapiens; identical to SEQ ID NO: 29615
  chr16:87366016-87366047
  hypo

SEQ ID NO: 91260 - DNA, 30 bp, Homo sapiens; identical to SEQ ID NO: 29616
  chr16:87367706-87367736
  hypo

SEQ ID NO: 91261 - DNA, 30 bp, Homo sapiens; identical to SEQ ID NO: 29617
  chr16:87368190-87368220
  hypo

SEQ ID NO: 91262 - DNA, 30 bp, Homo sapiens
  chr16:87379847-87379877
  hypo
ctttgcccgcaggccggggccagggcctct

SEQ ID NO: 91263 - DNA, 30 bp, Homo sapiens
  chr16:87386671-87386701
  hypo
atgagctctatttccgtcagccgaggcgtg

SEQ ID NO: 91264 - DNA, 105 bp, Homo sapiens; identical to SEQ ID NO: 29618
  chr16:87391986-87392091
  hypo

SEQ ID NO: 91265 - DNA, 31 bp, Homo sapiens; identical to SEQ ID NO: 29619
  chr16:87404802-87404833
  hypo

SEQ ID NO: 91266 - DNA, 442 bp, Homo sapiens; identical to SEQ ID NO: 53444
  chr16:87417757-87418199
  hypo

SEQ ID NO: 91267 - DNA, 30 bp, Homo sapiens
  chr16:87419660-87419690
  hypo
gctcatgtagtaggcgaggccaggaaggga

SEQ ID NO: 91268 - DNA, 142 bp, Homo sapiens
  chr16:87420751-87420893
  hypo
gaaagaaaagaatgaccgtgagcgcttcagcaatacctgttggtgggaaggaacccaaggggaaagacagtgccagcagaaaactactacacattgaatcctgacagctgaatacgtccttggaacacgtttacaatccttt

SEQ ID NO: 91269 - DNA, 26 bp, Homo sapiens
  chr16:87421120-87421146
  hypo
aaccatgttaactgggcagggcgcgg

SEQ ID NO: 91270 - DNA, 20 bp, Homo sapiens
  chr16:87435733-87435753
  hypo
cctggccctgatgactattt

SEQ ID NO: 91271 - DNA, 49 bp, Homo sapiens
  chr16:87443506-87443555
  hypo
gagaactccaagctcggttctcgattcagaccacgtgtagctgccctgg

SEQ ID NO: 91272 - DNA, 30 bp, Homo sapiens; identical to SEQ ID NO: 29622
  chr16:87444918-87444948
  hypo

SEQ ID NO: 91273 - DNA, 48 bp, Homo sapiens; identical to SEQ ID NO: 29623
  chr16:87447845-87447893
  hypo

SEQ ID NO: 91274 - DNA, 30 bp, Homo sapiens
  chr16:87450911-87450941
  hypo
tccgcaaagcccaccgtctcccttaagaac

SEQ ID NO: 91275 - DNA, 30 bp, Homo sapiens
  chr16:87452102-87452132
  hypo
cagctacccagggcccgtgcggacagagga

SEQ ID NO: 91276 - DNA, 179 bp, Homo sapiens
  chr16:87465350-87465529
  hypo
aaggaaggtgtcacacgcgaccactgcaaaatgtcagcaaatacctaggatcactgggaccgctgctgggttccagggcactcagagggcccctgtggtctttccctgggctccgcctgggctgcacgacatgagacccagaaactccgtgggcgccgagactccggcactaccatcac

SEQ ID NO: 91277 - DNA, 118 bp, Homo sapiens
  chr16:87465794-87465912
  hypo
agagcagtcagcactcgatgcacatgtggtccaaggagaatgtccccctgtcagggttcctgacagagccctgactgggagctcggcaccatcagccgggacacatttcccagccttt

SEQ ID NO: 91278 - DNA, 1093 bp, Homo sapiens; identical to SEQ ID NO: 10854
  chr16:87525991-87527084
  hypo

SEQ ID NO: 91279 - DNA, 31 bp, Homo sapiens
  chr16:87584286-87584317
  hypo
ccattcccccagtccacgtgcttatggggcc

SEQ ID NO: 91280 - DNA, 30 bp, Homo sapiens
  chr16:87584694-87584724
  hypo
ccatgggcaggctgcgtggcctctcaagtg

SEQ ID NO: 91281 - DNA, 31 bp, Homo sapiens
  chr16:87585846-87585877
  hypo
ggccaggtgggcagctcgggctgggagcaga

SEQ ID NO: 91282 - DNA, 240 bp, Homo sapiens
  chr16:87594870-87595110
  hypo
cagagcctggttttcacagggcgccttcatctttcgtcaacatctgtccaaatagtacctttaaaaatcattgccaaagcgtttgctcctaaggattggaaacgaccatcggcaggggacgggttaaaccgattaaggtgactgacaccgcgcagtgatgcgcagccagtgtaacggccctgtggaggacatctaggtgcatcgtctggtagaaggtacgagggcagacagcatggtctg

SEQ ID NO: 91283 - DNA, 20 bp, Homo sapiens
  chr16:87596283-87596303
  hypo
ttttttttttttgattcgga

SEQ ID NO: 91284 - DNA, 31 bp, Homo sapiens
  chr16:87597530-87597561
  hypo
tgtgctggggtgtgtgcgtgtgcacatttgt

SEQ ID NO: 91285 - DNA, 170 bp, Homo sapiens
  chr16:87625739-87625909
  hypo
acacccccacatcagcgaggacgctggatgcccccacaccggcaaggatgctgaatgctcccacactggcgagaacgctggatggacgccctcacaccggcaaggatgctggacgccctcacactggtgaggacactggatggacgccctcacaccggtgaggagactgg

SEQ ID NO: 91286 - DNA, 171 bp, Homo sapiens; identical to SEQ ID NO: 53449
  chr16:87635642-87635813
  hypo

SEQ ID NO: 91287 - DNA, 30 bp, Homo sapiens; identical to SEQ ID NO: 53450
  chr16:87636088-87636118
  hypo

SEQ ID NO: 91288 - DNA, 118 bp, Homo sapiens; identical to SEQ ID NO: 53451
  chr16:87636372-87636490
  hypo

SEQ ID NO: 91289 - DNA, 701 bp, Homo sapiens; identical to SEQ ID NO: 10857
  chr16:87636626-87637327
  hypo

SEQ ID NO: 91290 - DNA, 30 bp, Homo sapiens
  chr16:87638586-87638616
  hypo
gtgtgtgtgtgtgcgcgcgcgtgcaggcac

SEQ ID NO: 91291 - DNA, 31 bp, Homo sapiens; identical to SEQ ID NO: 29628
  chr16:87670945-87670976
  hypo

SEQ ID NO: 91292 - DNA, 31 bp, Homo sapiens
  chr16:87678207-87678238
  hypo
tcctttcgcagcgaggcgggcatgagcaccg

SEQ ID NO: 91293 - DNA, 311 bp, Homo sapiens; identical to SEQ ID NO: 29629
  chr16:87681105-87681416
  hypo

SEQ ID NO: 91294 - DNA, 1037 bp, Homo sapiens; identical to SEQ ID NO: 53454
  chr16:87723126-87724163
  hypo

SEQ ID NO: 91295 - DNA, 101 bp, Homo sapiens
  chr16:87724406-87724507
  hypo
gatccctgcgctccccgcaacgtgctcaaccccagctgctccaagagtctgtgcccctggtcagtagccttgggccgtgagatgaccgcttgagtgtcctg

SEQ ID NO: 91296 - DNA, 30 bp, Homo sapiens
  chr16:87724748-87724778
  hypo
cccctgggctagactcggcgcgaggctggg

SEQ ID NO: 91297 - DNA, 30 bp, Homo sapiens
  chr16:87731567-87731597
  hypo
tgtgcccggggaggcgctgcagggattccc

SEQ ID NO: 91298 - DNA, 30 bp, Homo sapiens
  chr16:87737855-87737885
  hypo
gggagggtcctgaacgtcacggggaaggag

SEQ ID NO: 91299 - DNA, 538 bp, Homo sapiens
  chr16:87738499-87739037
  hypo
tcatcctcacacagagcatggcgcgcatgggcggcagggggagcatggagaacaagacgattcatcctttaaaatcccacaaagccctgcgaggaggagctgtggccctgctgccaagcgggccggccagagtgcctcccctggtacgcccgcccaccctgcagtcaggggtctgggggccgtgtgggagggccgcagccgagggaaaggcttcctaacagccagcagctcaccacagcgaggaactgggcaagaacgtggcaccgagtacggcgtgtcccagccgcgccgcgccagcagctcccgggagacagaggccctgggctttcgtgccggccgctcacgccctacggtggctatctggccaccaagtagttcggtaaactgggccccggcagacagagcagaccacaggcccgtggggcaggcagagctccgcccaggaatccaccaccctgtgttgtgttccgcgtctcccacggttccacactgaaggggccctgttttcatcacggccgtgacagccactccatgctgg

SEQ ID NO: 91300 - DNA, 536 bp, Homo sapiens
  chr16:87739313-87739849
  hypo
gagcaggagggaagaaagaaccggccacacaatggcgtccatcttctggacaagggctggagccgcagagccgggcagggcctgggcgggggcgggggcgggggcgctgctgcctgcgctctggcttctcaaccctgtccgagcctcttccaaccagcttagctgagagtgtgaggaaaggaccttgattgcccagcactcagacaaagtgcccagaccggccgccaaagccggcgcaacgcaacacaagctgcagccctgtgcggggtcggtgcaacacaaacacaagctgcagctctcagggggttggcacaaggcaacacaacctgcagcctgaggggaggaggggtcggcggaacgcaaacacaagctgtagcccttgcggggggcgggcgggctgccggcgcaaaagcaaacacaagctgcagccctcgcgggggggtcagcgtaatgcaaacacaagctgcagccctcgggggggggtcagcgtaatgcaaacacaagctgcagccctcgggggggggtcagcgcaatgc

SEQ ID NO: 91301 - DNA, 166 bp, Homo sapiens
  chr16:87740742-87740908
  hypo
caattatgcaaatccgaattggccttcagtcttggactggagcaggcctaggttgggagttagcgcaccacagccttcgggggcaaggaggccgcagcgctgaagccaggaggagctggatggggacacctggtggcagccatgtggggacgttgggagccctcgc

SEQ ID NO: 91302 - DNA, 30 bp, Homo sapiens; identical to SEQ ID NO: 29632
  chr16:87741567-87741597
  hypo

SEQ ID NO: 91303 - DNA, 30 bp, Homo sapiens
  chr16:87741896-87741926
  hypo
tgaaaagcctttcacgaacacccagcagcc

SEQ ID NO: 91304 - DNA, 30 bp, Homo sapiens
  chr16:87742290-87742320
  hypo
aagcacccccataacggagcggctggccaa

SEQ ID NO: 91305 - DNA, 30 bp, Homo sapiens; identical to SEQ ID NO: 29633
  chr16:87742587-87742617
  hypo

SEQ ID NO: 91306 - DNA, 444 bp, Homo sapiens
  chr16:87744568-87745012
  hypo
gggccggggaggtcccgggcacctcagcccagggcaactggcttctgaggtagcagccccgccagcatccaggacagactaaggggaccgtgaccaagggctctccaagcctagtcacccaggacagtcagagacggaaccctcgcccctcttgagagagctcatgggctttgggggccccaataccaaaaggtgctggaggaaggcagtggtggcagggacccaagttagggctgcgcaccacggcgcatgctactcagaggttgcactaccttcagctgtccctcaaaccaacggttcctggtggcgtcgtagaagtacagatcgttgaagaactcgcccgacaggctctcctcctcttcctcgtcacagacacccccgaagaacagtgtctggtgattcggggccatggccacggaaaagccagaccgtggggtgggcttg

SEQ ID NO: 91307 - DNA, 179 bp, Homo sapiens
  chr16:87756598-87756777
  hypo
ctctggcctgggccgcgcagcagcacagcacagctgggtcatgccaagaggacagagcatggcgggtgagggtgtaatggcgccagagcaaggacgagcttcccccagccccaagctcaggtacgggccatgtaccaaagtttctatcagttcgtgcacactgccgcttcagccatggc

SEQ ID NO: 91308 - DNA, 31 bp, Homo sapiens; identical to SEQ ID NO: 29635
  chr16:87774174-87774205
  hypo

SEQ ID NO: 91309 - DNA, 222 bp, Homo sapiens
  chr16:87776439-87776661
  hypo
cacggcccctccagacgagttgccctaacgccttcctatcagggaagggaagactcattctgcaaggcgccgcagctgtagtccagtgtctgccacaggtatgaagtgacgacgagcacggagaacacttgaggaaaactgtgaaacaggagcacctgcacaggcatcacgccaagagtcagccctccacacgccagcaccggcaccaactggaggcttttg

SEQ ID NO: 91310 - DNA, 98 bp, Homo sapiens; identical to SEQ ID NO: 29637
  chr16:87782715-87782813
  hypo

SEQ ID NO: 91311 - DNA, 43 bp, Homo sapiens
  chr16:87784653-87784696
  hypo
tagagttttaaactatcatctcgggaagactattcaatgccac

SEQ ID NO: 91312 - DNA, 31 bp, Homo sapiens
  chr16:87810850-87810881
  hypo
ggaaattgttgactaacgactttataagtca

SEQ ID NO: 91313 - DNA, 30 bp, Homo sapiens
  chr16:87860542-87860572
  hypo
cccaaggggcccggccgccgctcactcggg

SEQ ID NO: 91314 - DNA, 190 bp, Homo sapiens
  chr16:87864416-87864606
  hypo
aggcaagtgcgtgccgtcgagaggccgccggctccctgtatccttgaggcatgtccacgtcccagagcaggaggttggaacagaacggcatcccgaggacccctagccgaggcgggaaggtaagaggctgacgtcgtgcgtgggccccgccggccccagtgggaagcagtggtgcgtgcctccagggagc

SEQ ID NO: 91315 - DNA, 30 bp, Homo sapiens
  chr16:87864925-87864955
  hypo
tcaagcaagagagacggacatctggtcctg

SEQ ID NO: 91316 - DNA, 30 bp, Homo sapiens
  chr16:87868050-87868080
  hypo
tttccaccagaccccgaagaagtagacggg

SEQ ID NO: 91317 - DNA, 216 bp, Homo sapiens
  chr16:87874191-87874407
  hypo
gctgggctggaaagcggacctggagtgggagggagctcagcctcctgcgtgttccggggggtccctgctaccccttccaggccctcccgcacattccctgcctgttcgccctactggggtgattctcaggtccctgtgaggcccgcctgagcgcaggagtcaggctggggacctggaggaaaggggccgcagggctcagccgcctccacctgccac

SEQ ID NO: 91318 - DNA, 152 bp, Homo sapiens; identical to SEQ ID NO: 29639
  chr16:87895431-87895583
  hypo

SEQ ID NO: 91319 - DNA, 47 bp, Homo sapiens
  chr16:87911933-87911980
  hypo
gcagaactgtgctcccagggccggccgaatgcctggcttccaccctc

SEQ ID NO: 91320 - DNA, 86 bp, Homo sapiens; identical to SEQ ID NO: 29640
  chr16:87916231-87916317
  hypo

SEQ ID NO: 91321 - DNA, 30 bp, Homo sapiens; identical to SEQ ID NO: 29641
  chr16:87923993-87924023
  hypo

SEQ ID NO: 91322 - DNA, 168 bp, Homo sapiens
  chr16:87934226-87934394
  hypo
tcagctgatcttggagaaaggcgacactgttgtccccaccatcttttcgagctgcgctggatacagggaagcctatggatcgctgggcggagagctgcggtttgggcaggtttctctccgcccttgggcttggggtcggacagggacgttcaaggagagtgctgggtg

SEQ ID NO: 91323 - DNA, 46 bp, Homo sapiens
  chr16:87934807-87934853
  hypo
cctgagtgacagagggagactcctcgaaaaaataaaaaagaaaaga

SEQ ID NO: 91324 - DNA, 12 bp, Homo sapiens
  chr16:87962761-87962773
  hypo
agatgtatagcc

SEQ ID NO: 91325 - DNA, 30 bp, Homo sapiens
  chr16:87991107-87991137
  hypo
ttgaggcaagctcacggaggcctgccgcag

SEQ ID NO: 91326 - DNA, 30 bp, Homo sapiens; identical to SEQ ID NO: 29642
  chr16:87992493-87992523
  hypo

SEQ ID NO: 91327 - DNA, 19 bp, Homo sapiens
  chr16:88007066-88007085
  hypo
aagaaattctagagctgag

SEQ ID NO: 91328 - DNA, 131 bp, Homo sapiens; identical to SEQ ID NO: 53458
  chr16:88031993-88032124
  hypo

SEQ ID NO: 91329 - DNA, 365 bp, Homo sapiens; identical to SEQ ID NO: 29643
  chr16:88037885-88038250
  hypo

SEQ ID NO: 91330 - DNA, 31 bp, Homo sapiens; identical to SEQ ID NO: 29644
  chr16:88039775-88039806
  hypo

SEQ ID NO: 91331 - DNA, 178 bp, Homo sapiens
  chr16:88047824-88048002
  hypo
gagctggggcagctccgtgtggggtggagggcacggccagccttgggtgcactgggtctggacatttgcacactggccctcagtgagtcctgagcctgccagaggatgagcttagcggctgccccgacactgccttgaggtggagcctggggaggacggaggtggtgggtggcagcac

SEQ ID NO: 91332 - DNA, 31 bp, Homo sapiens
  chr16:88048325-88048356
  hypo
tgggtgggtgatggtcggggaggctggtggc

SEQ ID NO: 91333 - DNA, 301 bp, Homo sapiens; identical to SEQ ID NO: 29646
  chr16:88049612-88049913
  hypo

SEQ ID NO: 91334 - DNA, 30 bp, Homo sapiens
  chr16:88051817-88051847
  hypo
gggggtggtgggatcgtgtctgttccgcgt

SEQ ID NO: 91335 - DNA, 30 bp, Homo sapiens
  chr16:88057646-88057676
  hypo
ccttgtgtcctgggcgctgctgcaggggag

SEQ ID NO: 91336 - DNA, 45 bp, Homo sapiens; identical to SEQ ID NO: 53459
  chr16:88061031-88061076
  hypo

SEQ ID NO: 91337 - DNA, 190 bp, Homo sapiens; identical to SEQ ID NO: 29647
  chr16:88073664-88073854
  hypo

SEQ ID NO: 91338 - DNA, 50 bp, Homo sapiens
  chr16:88078971-88079021
  hypo
cgtgcgtgcacttgagcgtttcttgcaggagaggccggggccaaaggaac

SEQ ID NO: 91339 - DNA, 51 bp, Homo sapiens
  chr16:88084705-88084756
  hypo
cagccaagctgttgaccgcagcacccgggtccctcccgtgtagtggcgggc

SEQ ID NO: 91340 - DNA, 472 bp, Homo sapiens
  chr16:88091518-88091990
  hypo
gttccgacaagccaggcgccgaggctcggtgtgggcccgtgggcctgattgaagtcacactcctgcccccttaaactatgaaacggcggagttacacgggaagaaagggttcaagcgtaatataatttcctacctttttttcactctgagagtgaaccgctgagtggctgttaaattcattgtgtatttacgaggaatctttcatctagagactgtagatgcaggactgtgcccgtgcctggttaaaacgttgaagctggtgctaaagtgtgttgaggtgcctgaaagagaagcttttgttttttgactcactggcctttgggaaactgaaggacagtgcgaacaaagatccctttcttcctcaaatgggagcttgggatttgttgggtttcacgcaggtgggcccgaggaggacggcaggcagggccgggacgtgctgatgtcaggcgccttcgtcgactgagctccttcc

SEQ ID NO: 91341 - DNA, 30 bp, Homo sapiens
  chr16:88093862-88093892
  hypo
cagagcccacctgacgaggggtctctctgg

SEQ ID NO: 91342 - DNA, 311 bp, Homo sapiens
  chr16:88096549-88096860
  hypo
tgtagggaccctggcgtgacctcatttttgctgcttcacgtttaagatctgactgctgagttgtcctcatcaccaatttcaaatcaagcccaaatccacaaactatatctcagcctcctgtgtgttttaagaggctgcgccgtgcatggaggtgccctcagcctgcagcagcgcagccaagcggagggcgcaccgcggccttctgtgtgactgttctcagagcacgctgtgccttcatttctgcgtgtttcacggcgttgcccttgtggtatctgctgaccccggttcccttatttctaggcccagtgcct

SEQ ID NO: 91343 - DNA, 30 bp, Homo sapiens
  chr16:88100998-88101028
  hypo
tcagggaggagactcgagctggaaccaggc

SEQ ID NO: 91344 - DNA, 846 bp, Homo sapiens
  chr16:88101487-88102333
  hypo
gagccttgccttcccgcagttacacgttgcacggggcctccccgtagcatccactgtgtcaatgccccctccgtccccaacagacccgccctccccccactgtctgcctccttgtgtcgtcagtccgtgacacgccacgtgtgtgatgaggaggtgcttggagtggcactgctctgcgtgtggccacgcacttcgtttccattttcacacgtagttcagagctgggtgtccgacagaggtgcccgaggtggaaagcgtcgtgcactcgtcccacctgtggcccctgcagagctccggctgtgtggcacgggctcctgagagctggggatggaggaggtgcgggcttaccgtgtgctcctctgctgctcgccccaggcttgggtttcctggcggtcacctggttggcgtgaaccttgggcgtgcgccagggtccctgtgctgtcgtggagtgcaggcaggtgggcaggcgcttgggagttaccagtcaagtccctgcaccgcgcagaccattgcctggtgttcaggagttttcaaggcctcggcctggtgggaatagttgagaaacgctggttcaggcagcttgctttattcacagccctgagacacctctgggacagcccctgaggatatttttcccggaactttctcggggccaggagtgtgcctgtgctgtgatgagtgggaaacgcagtttgtgcagggcctcacagaagagcccactggtgcgggtgctggctgcctcctccagtgggcgccagctcggggtctgtggcaggaacgtgggtggctgcggatccacccaggacagagtgactgcctgggcgcgtggtggaactgagtgcagaa

SEQ ID NO: 91345 - DNA, 30 bp, Homo sapiens; identical to SEQ ID NO: 29651
  chr16:88105821-88105851
  hypo

SEQ ID NO: 91346 - DNA, 371 bp, Homo sapiens
  chr16:88106131-88106502
  hypo
gagcatgggggcccctttagccggagagctccctgccccactcgttgaaggtctcagctcggggcagagccagtacctcgggctgctgtggccctagcgtccacgaaaacaaagcgcagggctgctgtgctctgtggatggcccagcgggcccaggccagcatctccatacctcgcaggcagaagcccccgagggtgaggccgtgccgaaatctccagcgtggccgaggcccagacaagagccccgtgatgccgtgggctgtttgctctgaacactggaggcagaaggtggccctgcatccgggagcagtcttggccccgcagcctccgtgccacctgctttgggaacgtgcccagcggggacgttgtcct

SEQ ID NO: 91347 - DNA, 134 bp, Homo sapiens
  chr16:88106972-88107106
  hypo
tgtgcccatgggcacggtggcccctgcagaggcacgccctgtactctgcccatgggcgcggtggcccccgcagaggcgcgccctgtactctgcgtggtgtttggttccacattgtcgccgacctcactggagat

SEQ ID NO: 91348 - DNA, 478 bp, Homo sapiens
  chr16:88109978-88110456
  hypo
ggagcctccctgggcgccagggtcgtgggcgcgtcgttccgctgggagccaggcgttgtgtaccaagtcgggtgagccttggggccgtcagggctccttcgcgctcctgtgtgcgtgtttctcattctgccttaaagtcactggctgttcatgacaccccctggccatgcagtgctgggtatttttctagaaagtccctcctttctcccttttgcagacggccgaagccctgcagcccacgctacagccggagatgcagctcgagcacggggccatccagattcagtgagcggtgcccatggcaccaggagcccctcgccggctccgcctacggcccggcccccacgcgccctgctctcacggcctcggcacaggcagcggctgcacgtgttctgctgaagtgcgtctgaaggccgctgcctccgcggggaacagcatcctatcaactgaaagagcagccgccgccgcccccagccgg

SEQ ID NO: 91349 - DNA, 370 bp, Homo sapiens
  chr16:88111277-88111647
  hypo
gttgaatccctggtgaccagccgggcctggactgcttcacctacaccgttgtggcagttgcgttaggggcttgggaagggcctacgtgaagccgtgttcgctgacttagagcggggcctctctgggctttctctgggaggagttccgcgttgccatccagacggtcgtagctccagcctgctccaccccgtcaggatcctgggctgggtccccttgggggtgagggtctgggatgagctgctctcgaaagggggatggcgctcatgggttctgcgtctccatcgtggtggggccgcctctgaagatggccaccacaaggagccgggccgaggcctcccaggaggtcaccggagcttggccactctccagg

SEQ ID NO: 91350 - DNA, 30 bp, Homo sapiens; identical to SEQ ID NO: 29656
  chr16:88154177-88154207
  hypo

SEQ ID NO: 91351 - DNA, 388 bp, Homo sapiens
  chr16:88164300-88164688
  hypo
aaactctgtgtcaaaaaaaaaaaaaaaaaaaaagaggcacctaataaaaacggcagcgcagcctcccacgcactcagtggttcagacacacgaagacagcaatacagatgttacctcggctggtctcagcgcagcaccggcgctgggaaacgacgctgcctgggatggcgggcgcgtgggaaggccccgcggagtgggggtgtgaagtggccgcggggtgtcggcagagacaggcggaagtggcgtcccgatgaggacgaggtgcccgggcagccggggacgggggtgcgaggggcgtgtgcttctcctgttcctgcgtggctcggttccacggcgggcagcgcggcgttcgcctggcatttctggcgggtgaaattgcacaaaggta

SEQ ID NO: 91352 - DNA, 30 bp, Homo sapiens
  chr16:88165707-88165737
  hypo
ccatgtgtggacatcgctgtctgtggcccc

SEQ ID NO: 91353 - DNA, 31 bp, Homo sapiens
  chr16:88237695-88237726
  hypo
gcagccggaggtgccccgtaaccccacagag

SEQ ID NO: 91354 - DNA, 30 bp, Homo sapiens; identical to SEQ ID NO: 29657
  chr16:88242366-88242396
  hypo

SEQ ID NO: 91355 - DNA, 72 bp, Homo sapiens; identical to SEQ ID NO: 29658
  chr16:88260675-88260747
  hypo

SEQ ID NO: 91356 - DNA, 30 bp, Homo sapiens
  chr16:88325086-88325116
  hypo
ctcgtctcttcgcatcgggcagccatcatc

SEQ ID NO: 91357 - DNA, 328 bp, Homo sapiens
  chr16:88338948-88339276
  hypo
cacacatgcacacacatgctcacaggcacacgcatgcacaccctcacatgtgcacacacacgctcacaggcacacatgcacgccctcacacacgtgcacacatgctcatagacacacacgcacaccctcacacgtgcacacatggtcacaggcacacacgcacaccctcacacacatgcacacacacgctcacaggcacacatgtgtgcacaccctcacacgtgcacacacgctcacaggcacacacgcacaccctcacacatgcacacacaccctcacgtgcacacacattctcacaggcacacacgcatgcacaccttcacataca

SEQ ID NO: 91358 - DNA, 237 bp, Homo sapiens
  chr16:88356031-88356268
  hypo
gtcagtgtcccggccgtgttcatcctgaagctccacagccgcagccacccatggcagtggggagccaactgcagtatgctctgatcaaaccgtatctcatggctccagcacagatggcgggagctacggcaagtccggtgatgctggagggggtgtgactgacgaggagggtttgtgccagagcaggcggcaccaccactcctcggagactgtgtgggacccgagcgacccctccat

SEQ ID NO: 91359 - DNA, 30 bp, Homo sapiens; identical to SEQ ID NO: 29660
  chr16:88368452-88368482
  hypo

SEQ ID NO: 91360 - DNA, 31 bp, Homo sapiens
  chr16:88375503-88375534
  hypo
ggccatctgggaaggccgtgagaaggagctg

SEQ ID NO: 91361 - DNA, 30 bp, Homo sapiens
  chr16:88378453-88378483
  hypo
ggctctgggtcccgcgtgtcgaacccgtca

SEQ ID NO: 91362 - DNA, 269 bp, Homo sapiens
  chr16:88385553-88385822
  hypo
gaagggaggcccctccgccccgaggagaaatatgatggtgacgctcaccacgacacagagaaacctgcaggtggtgcagccacaacaggccacacatggtgggattccgtttctagggaacacccggaacaggcacacacagaaagcgggtccatgggtgcgaggggctgggggcgggggatggagagtgactacccagaggaacaggtttccttctagggttaggaaaaagctccaaaaccagcgagaggggacgggtgcacaatgcc

SEQ ID NO: 91363 - DNA, 30 bp, Homo sapiens
  chr16:88386283-88386313
  hypo
ctggctggtagcagccgtggggacgtggcg

SEQ ID NO: 91364 - DNA, 30 bp, Homo sapiens
  chr16:88388216-88388246
  hypo
ggcgcttctcaccgcgcccggcccccagct

SEQ ID NO: 91365 - DNA, 30 bp, Homo sapiens; identical to SEQ ID NO: 29661
  chr16:88473698-88473728
  hypo

SEQ ID NO: 91366 - DNA, 30 bp, Homo sapiens; identical to SEQ ID NO: 29662
  chr16:88476234-88476264
  hypo

SEQ ID NO: 91367 - DNA, 738 bp, Homo sapiens; identical to SEQ ID NO: 29663
  chr16:88480928-88481666
  hypo

SEQ ID NO: 91368 - DNA, 30 bp, Homo sapiens; identical to SEQ ID NO: 29664
  chr16:88492853-88492883
  hypo

SEQ ID NO: 91369 - DNA, 190 bp, Homo sapiens
  chr16:88493598-88493788
  hypo
gcatcccttctaagcgcggagcttctgtgatggctgcacgcagcctcttctgcttctggcccggccacacccgcatggagagcctagaagctccctgtctaggcgagggccacccagcccctctgccccactcacccctgacctttccttccaggctccactcaggaccatgagcgcaggcttccctggg

SEQ ID NO: 91370 - DNA, 37 bp, Homo sapiens
  chr16:88495642-88495679
  hypo
agcgagtccccactgccgtcaccggccaccaacacgg

SEQ ID NO: 91371 - DNA, 61 bp, Homo sapiens; identical to SEQ ID NO: 29666
  chr16:88498086-88498147
  hypo

SEQ ID NO: 91372 - DNA, 30 bp, Homo sapiens
  chr16:88502994-88503024
  hypo
gccgctccgtgccacggactttgaggtgct

SEQ ID NO: 91373 - DNA, 299 bp, Homo sapiens
  chr16:88504016-88504315
  hypo
tgctggcacacctgggcggggcgcacgggctgctggagcggccggagctgcagcacacgccgctgtatgcctgcgagctctgcgccacggttatgcgcatcatcaagaagtccttcgcctgcagctcctgcaactacaccttcgccaagaaggagcagttcgaccgccacatgaacaagcacctcaggggggggcggcagcccttcgcgttccgcggcgtgcggaggccgggagcgccgggacagaaggcccgggccctcgagggcacactgcccagcaaacggcgcagggtggccatg

SEQ ID NO: 91374 - DNA, 30 bp, Homo sapiens
  chr16:88505078-88505108
  hypo
gcagtggaagccctcgccccggcaccaaga

SEQ ID NO: 91375 - DNA, 30 bp, Homo sapiens; identical to SEQ ID NO: 29668
  chr16:88506673-88506703
  hypo

SEQ ID NO: 91376 - DNA, 416 bp, Homo sapiens; identical to SEQ ID NO: 29669
  chr16:88512480-88512896
  hypo

SEQ ID NO: 91377 - DNA, 84 bp, Homo sapiens
  chr16:88513363-88513447
  hypo
gcagccactgcgtcccgcagctgtgcgcagcccctgcctccgctcacccacgttcgtctgcaccatctacgcccgtgtcacaaa

SEQ ID NO: 91378 - DNA, 30 bp, Homo sapiens; identical to SEQ ID NO: 29670
  chr16:88516210-88516240
  hypo

SEQ ID NO: 91379 - DNA, 30 bp, Homo sapiens; identical to SEQ ID NO: 10859
  chr16:88519207-88519237
  hypo

SEQ ID NO: 91380 - DNA, 30 bp, Homo sapiens; identical to SEQ ID NO: 29672
  chr16:88534570-88534600
  hypo

SEQ ID NO: 91381 - DNA, 46 bp, Homo sapiens; identical to SEQ ID NO: 29673
  chr16:88537674-88537720
  hypo

SEQ ID NO: 91382 - DNA, 395 bp, Homo sapiens
  chr16:88545422-88545817
  hypo
taggtgggtaggcacagaaggcgccgtctgctccgggctctcccaggctctgcgcccactccctcagctgccctagtgcctggaagtcagtctggctgcttgatggattgcgcgtgaggtactggccacttggtcctgagggtgtgggcggtgagtcccgagtcccaaccgcggggccgggctccccacgcaggtggtgctgggctggtgtcgccagcagaccccactttgatggcggggctgggctgctgctaccactgctctctgtgcttcggtttccctgcttggcgagattcacgggatgagagatgctcctagctgggccagggggtgtggacagcatcagccactcaccagggacctgggagggcgccgcttggctggaggtcatgctg

SEQ ID NO: 91383 - DNA, 87 bp, Homo sapiens
  chr16:88547818-88547905
  hypo
caccacccccacccccaccaccgctgcctcctcgccgggggccgtggacagggcagctcgcaagtcggccttgctgggccttggttt

SEQ ID NO: 91384 - DNA, 155 bp, Homo sapiens
  chr16:88550335-88550490
  hypo
tcacagcatttctccttctctcgcatcttcgggggtctctgacatgagcctctgaacctggcgttggacgctggcgggtggcacgtttcttactggctgggcaggtgtttcgggcgttagcaggctccacctccgaccagcccatctccctccca

SEQ ID NO: 91385 - DNA, 949 bp, Homo sapiens
  chr16:88550902-88551851
  hypo
tgctgtgaccatggggcttggcggccgcaggacctggggtctgggctcaggagggccacggcccctcccactcctgagtgtgtcgggaggctctgcccccatcgtgcttcacacaggacagtagaaggctgggcgggtcaggccttgtggagtatgggtgcagagggggcagtcgcagcacgcaggctgagtcagggcctggggacctggggagcagtcaaacaggatatggaagggcacctctgtcctctgttcacactggacaccatcacccatcaccagccccgccggcggatgtcagcacacacacctgcactcagcgccactccacagccactgtggggtccggagcagctgcccccgcacttgggccgcgtggccttgtctcagtctgccttgtcacctgtcaggtggactcctggagttcccccaccccgatgtgtgagtctctgagggacccaggccctgaggcactccacccccaggtgctgcagacacctgtgccctgcttggtttgttcgctcgacaagtctgtgagcgcctcctttgtgctgggtgagggtgtcaccccagggagttcccagaccgagggaatgagtgtgagggaagtgcacggggactgggcccctgggcggggcactggcaggtgatgccaggcggaggccgtggcgacggcgaccctcagggcctggatggacgctgggcctacagtacagggagggcccactcgcagctccagggctgccagagcaggtgggggcctgtcccctggtgctggggggagcaggtgggaaagagacacggggtccgcggcccttctctggcaagagtggaatccgtgggcgtggtggaggccaagggtcacggcaggtaagggtgggcggaggcgaccctgcagctttggaaatgttgcagagggtgggggttcgtcaagaatcatcaggtcttt

SEQ ID NO: 91386 - DNA, 31 bp, Homo sapiens; identical to SEQ ID NO: 29677
  chr16:88597829-88597860
  hypo

SEQ ID NO: 91387 - DNA, 31 bp, Homo sapiens
  chr16:88601648-88601679
  hypo
acaggccactgcggcccggagtggctgggcc

SEQ ID NO: 91388 - DNA, 31 bp, Homo sapiens; identical to SEQ ID NO: 29678
  chr16:88602844-88602875
  hypo

SEQ ID NO: 91389 - DNA, 31 bp, Homo sapiens
  chr16:88623968-88623999
  hypo
caaggcacgggagccacggatgcctgaggcc

SEQ ID NO: 91390 - DNA, 34 bp, Homo sapiens
  chr16:88624842-88624876
  hypo
gagtcgcgcatccccccgtcggggggtgagtcgc

SEQ ID NO: 91391 - DNA, 45 bp, Homo sapiens; identical to SEQ ID NO: 29679
  chr16:88642724-88642769
  hypo

SEQ ID NO: 91392 - DNA, 30 bp, Homo sapiens
  chr16:88644355-88644385
  hypo
ggtttccgtggccctcggccggccagctgg

SEQ ID NO: 91393 - DNA, 30 bp, Homo sapiens
  chr16:88644981-88645011
  hypo
tatggggagtcattgcggtgaagagtgtct

SEQ ID NO: 91394 - DNA, 145 bp, Homo sapiens; identical to SEQ ID NO: 29680
  chr16:88645406-88645551
  hypo

SEQ ID NO: 91395 - DNA, 40 bp, Homo sapiens; identical to SEQ ID NO: 29681
  chr16:88647116-88647156
  hypo

SEQ ID NO: 91396 - DNA, 186 bp, Homo sapiens; identical to SEQ ID NO: 29682
  chr16:88647912-88648098
  hypo

SEQ ID NO: 91397 - DNA, 199 bp, Homo sapiens; identical to SEQ ID NO: 29683
  chr16:88649039-88649238
  hypo

SEQ ID NO: 91398 - DNA, 30 bp, Homo sapiens
  chr16:88664843-88664873
  hypo
tcggctgcttctgtcgtcccgagtggaagc

SEQ ID NO: 91399 - DNA, 30 bp, Homo sapiens
  chr16:88680765-88680795
  hypo
ctcctcatcttgtccgtgtggctggacgac

SEQ ID NO: 91400 - DNA, 226 bp, Homo sapiens
  chr16:88683206-88683432
  hypo
gctaccaagcagaacacgaatgaggggctctgcagtgtccagcacggctgcaccagggctaggccttgcatgggggctacaccctagtgaagcgcagtcacttttgtttggtctgaagcgcggcccaggctcgttatagcaggcacttcaccaccccaagcttcacgagagggggcacagtcgtgcagcgggaggagcgagagtcggccactgtttgggtgccatg

SEQ ID NO: 91401 - DNA, 241 bp, Homo sapiens
  chr16:88683701-88683942
  hypo
acctgcggctggagacggagttgtgccgctctctccgtcctagtttgccttttgaggcttacccactcctccacctgggctgttttaaaatgattagagcagaacctttcaatcaattctatcaaatgcatctgtagagctaagggggcggtcccttatgtgaaacctaatctttatagctaggccgatgggtgtgctcaccgccgaggcacgtcattacgatgctctttggctagtcatt

SEQ ID NO: 91402 - DNA, 30 bp, Homo sapiens
  chr16:88684173-88684203
  hypo
gtaagttccggacaccgcagagtccgcacc

SEQ ID NO: 91403 - DNA, 30 bp, Homo sapiens
  chr16:88688729-88688759
  hypo
ccccgagccgggctcgaaggcgtcggaaaa

SEQ ID NO: 91404 - DNA, 65 bp, Homo sapiens
  chr16:88689148-88689213
  hypo
gttgcccctccacctacggtcctggtctcagcacacaggagcccggctcccgagtgagggatgat

SEQ ID NO: 91405 - DNA, 39 bp, Homo sapiens; identical to SEQ ID NO: 29687
  chr16:88690943-88690982
  hypo

SEQ ID NO: 91406 - DNA, 30 bp, Homo sapiens; identical to SEQ ID NO: 29688
  chr16:88697680-88697710
  hypo

SEQ ID NO: 91407 - DNA, 125 bp, Homo sapiens
  chr16:88698501-88698626
  hypo
ccccccgggaggaccggctgtggagcagctcctgccttcagacccagcccaggagagcattgcgcctcagtttccccattcgtggggctgggttggggcttccttggtccgtgaggtggaggtac

SEQ ID NO: 91408 - DNA, 164 bp, Homo sapiens
  chr16:88699818-88699982
  hypo
tctgcagtgactgtctctttacggccaggagcggacaggtgagcccaccacagctcaacggccaggagcagacaggtgaacccaccacagctcacctgtggactgggaccaggcgaggtcccctctgcggctgctcagcccccggccacagccctaggcacctc

SEQ ID NO: 91409 - DNA, 362 bp, Homo sapiens
  chr16:88702401-88702763
  hypo
cactgtacccatggggagagccgctctcctccctcctttttccattctgtgttatttacagagcaccctcctgtatgccctgcactactctcaaccctgggtacacagatggggctgccacagacgtggccctcaaggcgctcaggccgccttttggggagggccgtgaggggctggaatttttctgagacagccaagcgcccgtgcagagaggcctgtatcagcccagcctaaggcagggccaacccacacaggagcacctgtcctgctggggatgcagtgggttctgctgtgtcctggaaaaggctctacccacaccctaacccaacctgtgaacgcgcgctcatttggaaaaggggctt

SEQ ID NO: 91410 - DNA, 183 bp, Homo sapiens
  chr16:88712155-88712338
  hypo
agcctgataatgggacccaagcgcaggcacggtcttcggccggctgcgtgaccccaggccagtcacagcacctccctgagcctccgcatctttgtctgtaaagtggggaccccagtacccctcccagggctgtggtgcgggttaatgaggaaatgcaaggaaatgacccgacacactagacac

SEQ ID NO: 91411 - DNA, 30 bp, Homo sapiens
  chr16:88721950-88721980
  hypo
cttggcggggctgccgcaggtgtgagaaca

SEQ ID NO: 91412 - DNA, 776 bp, Homo sapiens
  chr16:88722260-88723036
  hypo
tgcctgaccacagaggcctcccggccacagcaggggtgacgcaggggcaacttccagatcccagcgggtggtggcgcccgccgcatgggagcggttcctgagcactcaaccacgcttctgttccttcagcccccgctgaccccaggagccaagcaaagcctggatggacgccttcgctcctgctcccggcagcagccctgactagggacagaggccaccgggctgctgctccacccgccccaccccactcaccacaaggatgagcacgcggagttcaggccagtgtgactcgggggccacttgccgagcgatgctgtccttcccgtcggcctgctctcccatctgccactccacaaagcccccatacaggctccggcaggcgctgcctgagccccggcgagccacttctgagaggtcactctccacgccgtagacacgggccagggtgtaggctgcaggcatgcggattcagggagggtcctcagagctgcctgcgctgtgctccctgacagctcaccgccccaggaacgtcccacaccccacggcaaatggggatttccagatgacagggcttctgggccatcagcctttgaggccagcattcaccggcccagccgtctgtcccccacctccgctagttccactctcggacactctctgttcacggcctgcagagcttgcggcccgcgacaagggcaacaaaaggtacctgcggcagagcaggaagccccatggaaggcgggagaaaggcccccgaggacacccaagctgggctt

SEQ ID NO: 91413 - DNA, 511 bp, Homo sapiens; identical to SEQ ID NO: 29693
  chr16:88725338-88725849
  hypo

SEQ ID NO: 91414 - DNA, 128 bp, Homo sapiens; identical to SEQ ID NO: 29694
  chr16:88738305-88738433
  hypo

SEQ ID NO: 91415 - DNA, 231 bp, Homo sapiens
  chr16:88757492-88757723
  hypo
ggagcccttgggcctgcggcagatgaggtgagacttgagccatcaagcagcgaggcagcgtgcgtgtgagtctgcaggccacaggcgtgttcgtgcgtgtgtccatgggcgtatgcgtgtgggaagtcgcagtagctgctctgaggtgacatggaggctgggcatcagcgggtaagtcccgggcaccaggagagggatctgtggggtccccggcatcgtcctgccgagttg

SEQ ID NO: 91416 - DNA, 30 bp, Homo sapiens
  chr16:88763129-88763159
  hypo
ggccccttctctgccggccccgcctctgct

SEQ ID NO: 91417 - DNA, 307 bp, Homo sapiens
  chr16:88780637-88780944
  hypo
gtgggtgtgtgtgggtgtgtgcggggggtgcgcgggtgtgtgctgtgcgcgggtgtgtgcgggtggtgagctcaccactcgtgctcaggccagggcttagggtggagccccagcccgtgtgattcacctgctcctcccacaatccggccacaggacaagtgagaagctggtgaagggcccccgggatggccctgctgctggcgactccggcccccgctgcctcctctgcatgtgtgccctggacgtcgacgccgctggtctgtgtttcatgctcttggggtgatgcggggagggagccagggagtgg

SEQ ID NO: 91418 - DNA, 30 bp, Homo sapiens
  chr16:88781892-88781922
  hypo
tgcatcacagctggcggccttggacggggc

SEQ ID NO: 91419 - DNA, 30 bp, Homo sapiens
  chr16:88783340-88783370
  hypo
tgagcgtggaggagcggctgggggtggtgc

SEQ ID NO: 91420 - DNA, 30 bp, Homo sapiens
  chr16:88783630-88783660
  hypo
cgacacaggtcatacgctcagctctgccct

SEQ ID NO: 91421 - DNA, 30 bp, Homo sapiens
  chr16:88786961-88786991
  hypo
ctgggcccagtacccgcctccccaccccca

SEQ ID NO: 91422 - DNA, 102 bp, Homo sapiens; identical to SEQ ID NO: 29696
  chr16:88787976-88788078
  hypo

SEQ ID NO: 91423 - DNA, 63 bp, Homo sapiens; identical to SEQ ID NO: 29697
  chr16:88788383-88788446
  hypo

SEQ ID NO: 91424 - DNA, 30 bp, Homo sapiens
  chr16:88789079-88789109
  hypo
cctgtgcacttcgccgccctgcagggcaca

SEQ ID NO: 91425 - DNA, 30 bp, Homo sapiens; identical to SEQ ID NO: 29698
  chr16:88789604-88789634
  hypo

SEQ ID NO: 91426 - DNA, 1398 bp, Homo sapiens
  chr16:88792743-88794141
  hypo
aatggctaaggaagacgcggcgctgcagcagcaggaagaagaagcagacgctgtcccagatgatgccagcctcctccacaggcagcaggcagtcctggtctctgtccatcatctccttggctgcaaggcaggcaccggcaagggtcaggcccagggcccaggagcagggggcttccccacgccctcccccgccaccgtcctggccactcacggtcatagtagcccttgacggtgcatacaaggctgaagagctggatgacccagcagaagccggtctgcatctgctccacgaagacgcaggccaggagctgggggagagcagggtcagcggggccagcggggccccagggcggtgggtgcgggggggccggaggctcaccgacagcatgttcttggagatgatgacggtgacgttgtacagaatgaggcagtcccacagcacgaggcgggcccgtgtgtccctctgcagcagggccgtgccgaagagcagcaggtagaagcaggccagcaggtagcccagcccgaagatgctgatgcgggtggcccccgtgacaaacaccaccaccagcaccagccagaacaggtatcggaagacggccaccttcagcatgtcaaggtaggacctgccaggccggagcgtcagggcgggcgccccggccacccctcccagaaggttccccgtggagggtgacgtggaacccacctgcagtggataaagttgggcacggggttgggctccccccgcagcggctccaggcggtcggtgttgacgccagccatgcgctgccactcctctgtgcgctcagctgagaacacctgccactgctgggaggcgcacagcagcaggagaaagtcgcctgcaggacacaggagccgccgctgtgccacacggggacccacacgaggtgggcacggcgcataaatcccacctcccaccccaggcctgtcggcgtgcagccgctgggagcggacacacgtctgcctgggtgagtggccgggtgtccctgggggagccccggtgtgagggcatctgcacaagggctgccgtgcacacaggctgaggtctgcgtgcgtgcgtgcgaggtcagggcctgcaggccgccatgtgcctgaccacacctccgcccgtgcacgcctgtgtgcacacttgtgagcagatttgggggcgtgaatgtactctgagggtcctctgcagaggcgggggtggtggggggcactcactgatgaggttggtggagttgggggcccggaagaaatcaggcaggtacagccacttgatgagtgcggagttcatggggacggcccggctccagcgccagggataatctgggggaaggggtgtcatgtcaggaagggccgggcctgcctggggcctgagacacccggtccccacccgtt

SEQ ID NO: 91427 - DNA, 447 bp, Homo sapiens
  chr16:88794359-88794806
  hypo
catgataggacagtgcgtgtgataggacagctctgaaaacaacggccagaagctgcacggacgcctgcagccaggaaaagttcaacctgcagcaaccacagctgggaacgcgctgctcagcacgtgggaccgggatccatgcgacagcctagacagacctcagtgtgctctgccaagtgaaagaagccagacctaaaggccacctgctgggagtcctgctgacgtggcgttctgataggaccacgtgctggggatgggagcggccggggcctgctggggagggagccgtggcactgccggcccccggccacacttcctgggaggcgtgtgaggcagggagggtcggtccctaaggactgagggcatggatgtgactccacgcatctgcgaaacccacagccccatctgccacagagggaacctcgcgacacaaaaacaaagtgaccc

SEQ ID NO: 91428 - DNA, 429 bp, Homo sapiens
  chr16:88797396-88797825
  hypo
cccctgagccggccacgtgcacaaatgtgactccccatctcagaccgcagggtgctgtgtgccttgagcagacctgcagcaccaggacagccacgcaaatccagtctcacggcgtcagcaacgctaccggcctccctccggaacttcccaagagacaggagaggcgggggcggcttagacccaagacaagagactagagcaaacatcagaccagatcccgtctgaaaaccaaatggccacaaagaagggtgctgaggccggggctgtttgaatgcagaggacacgtttgacgatggcactgccaggagacgggaccacgggtgtggggctgtgggctcagacaccctcacccaggagacgcatgctcgaggcagcacttgggtgtgaggcatcacggccgacccgcacggggcccggagaggacgcagt

SEQ ID NO: 91429 - DNA, 30 bp, Homo sapiens
  chr16:88800088-88800118
  hypo
gacgtccgagaagccggctgccagctccag

SEQ ID NO: 91430 - DNA, 131 bp, Homo sapiens
  chr16:88800799-88800930
  hypo
gacacgtgctccatgtcggtgagctgcatgaagggcctgtggaagtagtgcagctgcaggatgcaggccaggaggaagaagccgggcaccaggatgctggagaagagctcggacacgctgaactgctccag

SEQ ID NO: 91431 - DNA, 107 bp, Homo sapiens
  chr16:88802728-88802835
  hypo
gttggtggcggctgcgcaccgtccagatgaggcaggcccagagcagcagtacgaaggtcagccagctgtggtaggtgatgctccatacctgcgcggcagagagggct

SEQ ID NO: 91432 - DNA, 30 bp, Homo sapiens; identical to SEQ ID NO: 29702
  chr16:88803267-88803297
  hypo

SEQ ID NO: 91433 - DNA, 30 bp, Homo sapiens; identical to SEQ ID NO: 29703
  chr16:88804702-88804732
  hypo

SEQ ID NO: 91434 - DNA, 886 bp, Homo sapiens
  chr16:88805796-88806682
  hypo
ccaggtgtggtggaaagaacacggctgtcgtcagatgccctggctctggcctggctgccaccggcccagtgtccccatctgtgactcgggggctctcctggtggctgaggcgccaggtgcccgggctgagaccgcaggctgtggggctggacgataggccccaccccagctctgacagtctccgtgctctgcaggccgaggcaagtcacagcctctcggagcctattccccttctgtcaaatgggatgggggcttgacgggacagatgaaccagaccagtcctgtcctcacaggcctccagggctgcaggggctgctgggaggctccgaggccagggtaacagggagatcagggcaggagaggcccaggccctgagcccacccctctcagagaccacacagcagctgggggcgaggctggatcagaacgcagggcgccatcgctcaccccacccacagcctggccctggccctggccctgggaaatcttctgagcagagccgtgaaaaatgagcatttctgggagtggaaagaacagaggcagctgctgtgagagaacaggtgtgaggccaccgaggggcaggcccggccctgacttggggtatgaggccaccgaggggcaggcccggccctgacttggggtgtgaggccaccgaggggcaggcccggccctgacttgggccccacgtgccgcagccatgctgcagacgcccctcaccctcctctagcggccagcacccctcgggctggctggcacactccgtcgcatgcctgcaaacacgtgtgtgtgttgcccatatgtgggagtgagggtcgcccgggggccctgccaggccgggtcatggggcttctagatctttcggaacggtatcctgcaggtgcctggt

SEQ ID NO: 91435 - DNA, 30 bp, Homo sapiens
  chr16:88808966-88808996
  hypo
cccatcaggcaggccggccagccccactcc

SEQ ID NO: 91436 - DNA, 81 bp, Homo sapiens
  chr16:88810534-88810615
  hypo
accagccaggggccccgcgcccccgcctctgtacagcagggtcaccgtggggtgacatgagaacaccgacccagggaatgg

SEQ ID NO: 91437 - DNA, 30 bp, Homo sapiens; identical to SEQ ID NO: 29706
  chr16:88816007-88816037
  hypo

SEQ ID NO: 91438 - DNA, 383 bp, Homo sapiens
  chr16:88821277-88821660
  hypo
cgagctgggggcatcgtgtgaacgaacgccccggcgtgccgtcccgctccacgcctgcacaggagctgaaagctggggccccaggcccagcagctgaacctcccacccgaggacacctgttgcgccccagggagaggagaggcctaaccagagggtggacacacctgcggccatcaggtcaccgccgcggccatcacgtcaccgccgcccccagtgcaggcacggggctgggtgatctgtcccgtacagtcctgtggcactagccgaggaccacgactgtcacctccacattgcagacgaggagatggagcaagcctgggatgcggcgaacagccgcccccgccgcccccgccatgtggctcgggcctagctggctgtgggga

SEQ ID NO: 91439 - DNA, 77 bp, Homo sapiens; identical to SEQ ID NO: 29707
  chr16:88826507-88826584
  hypo

SEQ ID NO: 91440 - DNA, 63 bp, Homo sapiens
  chr16:88827014-88827077
  hypo
agcccaggacaggcaggggcccgaggggagccacccgtcttcgaggcagcagcacccaggaag

SEQ ID NO: 91441 - DNA, 31 bp, Homo sapiens
  chr16:88827320-88827351
  hypo
gctcatctgacctacacggggcagggtcctg

SEQ ID NO: 91442 - DNA, 224 bp, Homo sapiens
  chr16:88831170-88831394
  hypo
aaaaagaaagaaaaaaggaatgcccctgccacggcctgcctttgactcccagcatcatgccgtgacctcccaaaacgaggactccgccctcggcaccaggggcagacactggcgaccactccaaccatggccccagcaactcaccccagagaggcaacaagggcttcctaagaagcctggccattgaaaacctcccggtagccgcctctcaggagcactgcctt

SEQ ID NO: 91443 - DNA, 115 bp, Homo sapiens; identical to SEQ ID NO: 10866
  chr16:88851817-88851932
  hypo

SEQ ID NO: 91444 - DNA, 30 bp, Homo sapiens
  chr16:88871972-88872002
  hypo
gcatgctccacaaccgctccgagacgccca

SEQ ID NO: 91445 - DNA, 30 bp, Homo sapiens
  chr16:88873714-88873744
  hypo
gctggcacagatgacgcggtgcccggagca

SEQ ID NO: 91446 - DNA, 30 bp, Homo sapiens; identical to SEQ ID NO: 29710
  chr16:88875968-88875998
  hypo

SEQ ID NO: 91447 - DNA, 508 bp, Homo sapiens; identical to SEQ ID NO: 53477
  chr16:88878526-88879034
  hypo

SEQ ID NO: 91448 - DNA, 681 bp, Homo sapiens
  chr16:88883068-88883749
  hypo
ctctcctgttacatccgccggcccacgctgtggctccctggctgttcagagccaccaccttccttcccacggcacggcgggcacccagcggctcccacgctgcagccgggtctggccctggaaagaggcttcagctgggccttttcgcccgcacagcaggagcccaggctgaagtctgcagctgccgaggggccttcttcccgaatcctgcgcggcagatccaggggctgtgggcagccacgcccagcccgtgtaaacaggtgagcgacggcccaggggcctcgaggctgggctcggccatctccactgtgctcggtgggctctgggcacccaggagcgacaccgcagacctgtgtgtggctcgtttttgccgactagagcgagggccgcacgtgtcccatctgaaggagctgtgaagacctgccctgctgggacccacatcagctgtgctgggaaacaggcctttgcggccactgcacacgcgggatggctgggccgtccacatgccaccctatgggacccccaagcaggggacagaaaagctgctcctgagaggccctgactgctgcggcccccagggctggacaagacgacgacgcatcctttgtggcctgaacacagacttcagtgaaactttggaggcacgtctgtgcttgtgtttctggccgatgctggcgtgat

SEQ ID NO: 91449 - DNA, 30 bp, Homo sapiens
  chr16:88884300-88884330
  hypo
gaggcggggaagcacgcctgcctctgccct

SEQ ID NO: 91450 - DNA, 30 bp, Homo sapiens
  chr16:88887306-88887336
  hypo
tgcaatctgctccccgtggtccccctggga

SEQ ID NO: 91451 - DNA, 31 bp, Homo sapiens
  chr16:88891674-88891705
  hypo
tgggtgtttgggcagccggggctggggtgcc

SEQ ID NO: 91452 - DNA, 158 bp, Homo sapiens
  chr16:88892176-88892334
  hypo
gacgcagctgggcaccgtctctccccacagtgaccaaccacttgtgccaggtctcgagaggggacaagtgagcaaaactccctctacccggccccagatagccggaggcggcagctgccttgggccgtccccaccttgcttcccgttgagcctttgga

SEQ ID NO: 91453 - DNA, 255 bp, Homo sapiens
  chr16:88892587-88892842
  hypo
ggaacaggggtggggcgggcaggggcggcgtgtgcccaggtacaggcaggcaacaggggtggggcaggcaggggtggcatgtgcccgggctgcaggcagggaacaggggtggggcggacaggggcggcgtgtgtctgggtacaggcagggaacaggggtgcggcggacaggggtggcgtgtgtctgggtacaggcagggaacaggggtggggcgggcaggggcggcatgtgcccgggtacaggcagggatgaggc

SEQ ID NO: 91454 - DNA, 30 bp, Homo sapiens
  chr16:88893162-88893192
  hypo
ggccctgtcgctgggcggcgtcaggcccgc

SEQ ID NO: 91455 - DNA, 30 bp, Homo sapiens; identical to SEQ ID NO: 29713
  chr16:88893558-88893588
  hypo

SEQ ID NO: 91456 - DNA, 67 bp, Homo sapiens
  chr16:88894326-88894393
  hypo
aggggcaccctcgccgcctgcagccagctcctcgctagggcagacggcgatcgccagcttctccaac

SEQ ID NO: 91457 - DNA, 47 bp, Homo sapiens
  chr16:88897187-88897234
  hypo
gtccgcaccccatgcggcagacagacaccaacggtctcgtgtcgggc

SEQ ID NO: 91458 - DNA, 401 bp, Homo sapiens
  chr16:88898118-88898519
  hypo
aggagagcggtgaggccgagcacggggtgcgtggggaggagagcggtgaggccgagcacggggtgcgtggggaggagagcggtgaggccgagcacggggagcgtggggaggagggtggtgaggctgagcatggggtgcgtggaggctgagcacagggtgcgtggggaggagagcggtgaggatgagcacggggtgcatgggggaggtggccagtgaggggcgcacacaccctgggatggctgcaggcctggacctgctgcccggcagaccggtggacgctgactcacctggcctgcagtgacgtgccctggccaccatgcgagggcaggctccctcatccctccttcaaacgtggtctgcttcccacacagaaaggggccgttgctgccacctgggagaga

SEQ ID NO: 91459 - DNA, 30 bp, Homo sapiens
  chr16:88901670-88901700
  hypo
acgaaggtgttgtccgcgacgtgcaggtct

SEQ ID NO: 91460 - DNA, 30 bp, Homo sapiens
  chr16:88922237-88922267
  hypo
gggtctctgctggtcggagccagcacacag

SEQ ID NO: 91461 - DNA, 240 bp, Homo sapiens
  chr16:88927320-88927560
  hypo
gggcctttgataacatggtgacgtcgatgatgatacaggtgtgctgagtgagctgtgctgccagccatcgcagaggagcccgcgcacgactgtggtggggccgtcggtctgttctggttgcctcttcctgaatgggacgcctggggctttcagggcaggcagctgtgcatgttctctcaactaaaggtcttgtgagaggagatttggctttttccttccgtgtcagccaaggatttaatt

SEQ ID NO: 91462 - DNA, 150 bp, Homo sapiens
  chr16:88933925-88934075
  hypo
ccgcacctggtctgggtcatcttttaggtgggagccacttccatgaggccagaattattctgctgtggggcgggggctccgtggggagtgacggcgtgagttattgtggggcggggtctccgtggggagtgacggcgtgagttactgtgg

SEQ ID NO: 91463 - DNA, 162 bp, Homo sapiens
  chr16:88935300-88935462
  hypo
ggtgagcggagggtaacgttagctctgtcctttgtcccatacctgggaagataagctgctagatcacactatctgggtgggatccagcagaactgtttcagagccaagatcttgggacccacaaggaatttccctgtaagcgcgatgcgaggaggcacaggc

SEQ ID NO: 91464 - DNA, 31 bp, Homo sapiens; identical to SEQ ID NO: 10868
  chr16:88938185-88938216
  hypo

SEQ ID NO: 91465 - DNA, 30 bp, Homo sapiens
  chr16:88940926-88940956
  hypo
cccaaatcccagaccggtccttgcttctct

SEQ ID NO: 91466 - DNA, 30 bp, Homo sapiens
  chr16:88942078-88942108
  hypo
gaggacgggctggccgagaagcagtgtttc

SEQ ID NO: 91467 - DNA, 53 bp, Homo sapiens; identical to SEQ ID NO: 29719
  chr16:88942320-88942373
  hypo

SEQ ID NO: 91468 - DNA, 480 bp, Homo sapiens; identical to SEQ ID NO: 29720
  chr16:88943176-88943656
  hypo

SEQ ID NO: 91469 - DNA, 30 bp, Homo sapiens; identical to SEQ ID NO: 29721
  chr16:88944984-88945014
  hypo

SEQ ID NO: 91470 - DNA, 857 bp, Homo sapiens
  chr16:88945515-88946372
  hypo
gctgataaagcacagtgtgggcggggatggcgtgcctgctgcaggatgcccgtgacaactgtgctgatgccacgtggaggctcagaatcctcatgggggtggcgtgggaccgcacgggagccgaggcaggggatgggtgtcagcgtggccgggtggccctacctcgctggagtcctcctgctggttgatgaccgtcagggcgtcctcggaggcctgccgcttcgcctcggccagggcccgctccatcttggcacgctccgtggtgatgagctcgtgcgctttgcgctccgcgtccgacacggctttctgcagctccgacatggcctgccgcttcacctcattcacggcctcttctgcaaaggacatgggcagggctggcggtcacatgggccatcccagatgggtctctggacttcctacgcgtggccacaacctggggacaggggctgtgtgcagctgaacacacgtaccatctgtgcacacaaaggcacatgttgatggggctgtaggcagctgaacacacgtagcatctgtgcacacacagacacacgttgatggccctcatgcctgtgcagacaagtgcatgcaaataaacacaggcatcccaggcatgtgtgtgcaaagctgggtcacgtggtgtcacaagtcaaagcttgcactctaccgcagcggctccccaggcactgcacccctgcagggcaagggcgaggcccaccccagggcctggtcagccaggggcgcacccggaatctgcattcctaacgcgagccgggggagctgctgctgacctgaagcacttggataactctgccgttccgccttcacctctggccccacccagacgcagcccaggaagc

SEQ ID NO: 91471 - DNA, 308 bp, Homo sapiens
  chr16:88948323-88948631
  hypo
ctgaggagcccagttccgggccgtccccgaacacgtcctgcctcaaagaggcctcggcactgcttttgcccacacttcttgcaagactcaggatagactctgggaagagccagtgagcagaaagtaagtggagggaagcaaggcccgccatgagggttttaggaatcctcctccctgggcctctcgagatgcctgggctgcgctgacagctgggaggaggggggctcaggtgaaggacccagccgctgcgcagggacggcgcaggccacacaggagggcactgagctcaggggcgcccacacagccct

SEQ ID NO: 91472 - DNA, 382 bp, Homo sapiens; identical to SEQ ID NO: 53479
  chr16:88950010-88950392
  hypo

SEQ ID NO: 91473 - DNA, 30 bp, Homo sapiens
  chr16:88951649-88951679
  hypo
gtcgcggtctgacccgttctctttggtcct

SEQ ID NO: 91474 - DNA, 369 bp, Homo sapiens
  chr16:88952173-88952542
  hypo
agcccactggggtgtccgcccgtgcagccaccaagcctgctggccctagtacacctcgccacgctccctcagcccgagagagccggccgggctggctgcagccccagaggaggttccctctcttacccagaggggagcagggtgagccgcgtgtccacggcacccccagcccagatccccggagcccacaggtacctgtcgggcgtcctcctcttgccgttctcgttgacttccagtagcagctctgaggagtcgatgggggaggaggcgctggcgtccagcaggagctgctcatgctgggccaagtactgggcgggcgtctgcttggccaggcgtgcacagtgcaggagctcccgctgcagcaagggc

SEQ ID NO: 91475 - DNA, 161 bp, Homo sapiens
  chr16:88955207-88955368
  hypo
gccccgggtgggggcacgaggtgggctggccctgagctccagctaccccacacaggccgtgggatcccctgtgtaccaaggggagactgaggtggacacggccctcacgagagccgggccgcgggcggcacctgctggggcgtggccgggggacaccaggg

SEQ ID NO: 91476 - DNA, 793 bp, Homo sapiens
  chr16:88956087-88956880
  hypo
gcactcctcctcctccagggacgacaccccgcgattcctcctcctccagggacacttcaaatccctggacgacgccccgcgattcctcctcctccagggacgacgccacgcgattcctcctcctccagggacacttcaaatccctggacgatgccccgcgattcctcctcctccagggacacttcaaatccctggacgacgccccgcgattcctcctccttcagggacgacgccccgcgattcctcctcctccagggacgacgccgtgcgattcctcctcctccagggacgacgccccgtgattcctcctcctccaggggacgtttcaaatccctggacgatgccccgcgattcctcctcctccaggggacgtttcaaatccctggacgatgccccgcgattcctcctcctccaggggacgtttcaaatccctggacgatgccccgcgtgaatctagaacatgcctcacctccctgtagtccccgctacctgggaggctgaggtggaagattcccctgagcccgggagtgaggccccgttctttccgcgtgtccctccacgctgtctcctcaacagcctgaggatgattccattttgcagatacagaaaccgaagcacagaggaactggcctcacccaggggccaacagctgctaagtggcaggctcgggctcaagccagggagcatctggtctggtctgtcctctggacccccgaggggaggcctggcccagcagagatggagcccacagcagtacgggcagtgctcaggctgggcccgaaggtgtggccag

SEQ ID NO: 91477 - DNA, 552 bp, Homo sapiens; identical to SEQ ID NO: 29727
  chr16:88957436-88957988
  hypo

SEQ ID NO: 91478 - DNA, 290 bp, Homo sapiens; identical to SEQ ID NO: 29728
  chr16:88958252-88958542
  hypo

SEQ ID NO: 91479 - DNA, 31 bp, Homo sapiens
  chr16:88958891-88958922
  hypo
cactgcaggagggaagcggacatgaggacac

SEQ ID NO: 91480 - DNA, 30 bp, Homo sapiens
  chr16:88961827-88961857
  hypo
gcacacaggctgcgcggttatcacacacat

SEQ ID NO: 91481 - DNA, 30 bp, Homo sapiens; identical to SEQ ID NO: 29729
  chr16:88963723-88963753
  hypo

SEQ ID NO: 91482 - DNA, 30 bp, Homo sapiens
  chr16:88964513-88964543
  hypo
gccatgaaaacggccgtggggcagcgtcgc

SEQ ID NO: 91483 - DNA, 499 bp, Homo sapiens
  chr16:88966331-88966830
  hypo
gtagagagacggcccgtggtttgtaccagaccggagggctcttccgaagagagggaagggtgatcccagcccggccacatcgccgtgtgacaaggacatgtgagaaaaagcccagccagcctctcactagaaaccgtggccagctccgcagagccaggacctgcacgctgggcccgccgtcccccaggacctgcaaaatcgtgagtgcggcgtcccgactctctgaggcagggccggccccgcgggtgcagggagtagccgttaggctgtttggctcctactgagtgccgggcacatttccagctgtacctgcctctgggcggcacacctgggggcaccccattgctgggccaccccattccccaaccaagtcgggaggctgactcggagccaacatcctacaaacagggccgcaaatctgctgcctgaccgcacagccagtgctctctccagatggaggggagatgatggccaaagccctcggcggagcaggccccca

SEQ ID NO: 91484 - DNA, 30 bp, Homo sapiens
  chr16:88968000-88968030
  hypo
tgcgtcttcacctccgctggggagtccggc

SEQ ID NO: 91485 - DNA, 171 bp, Homo sapiens
  chr16:88970442-88970613
  hypo
gggccgtcatgccacggcgcaaggagtcaccacagccgtcacccaacaagggctcatggccaccacctgcgtgctcacggccaccacctgcgtgctcgtgacactctggatcccgaagctagagcagacagtgccctgccggcgccctgagcagtcggggacttcatgtgg

SEQ ID NO: 91486 - DNA, 30 bp, Homo sapiens; identical to SEQ ID NO: 29732
  chr16:88973336-88973366
  hypo

SEQ ID NO: 91487 - DNA, 30 bp, Homo sapiens
  chr16:88975836-88975866
  hypo
ccaggcaaccccagcggcggctgggacgga

SEQ ID NO: 91488 - DNA, 589 bp, Homo sapiens; identical to SEQ ID NO: 29733
  chr16:88978018-88978607
  hypo

SEQ ID NO: 91489 - DNA, 30 bp, Homo sapiens; identical to SEQ ID NO: 29734
  chr16:88985908-88985938
  hypo

SEQ ID NO: 91490 - DNA, 557 bp, Homo sapiens; identical to SEQ ID NO: 29735
  chr16:88994176-88994733
  hypo

SEQ ID NO: 91491 - DNA, 139 bp, Homo sapiens
  chr16:88997822-88997961
  hypo
gcgctcacaaggaccggtctgtggcaagtgacaagtgacctttccaacccgaaggtctcctcggcagaagccccttcatgtgccaaggacgagccagaggtggagaagggccgtgggccggccccgtggacgagccaga

SEQ ID NO: 91492 - DNA, 30 bp, Homo sapiens; identical to SEQ ID NO: 29736
  chr16:89000143-89000173
  hypo

SEQ ID NO: 91493 - DNA, 117 bp, Homo sapiens
  chr16:89004836-89004953
  hypo
gtggagtgactgtacctctcccggcgtcggagacggggaacgctccacggccctcgtgggtgttacagggacgcgacagtgcgtgtaagccccagcgctgttgtaggctctaagacc

SEQ ID NO: 91494 - DNA, 1437 bp, Homo sapiens; identical to SEQ ID NO: 10870
  chr16:89007176-89008613
  hypo

SEQ ID NO: 91495 - DNA, 54 bp, Homo sapiens
  chr16:89010262-89010316
  hypo
atgtctgcagtctgtccgacaaggccagcgtcacctgtgcgggagacagaccac

SEQ ID NO: 91496 - DNA, 179 bp, Homo sapiens
  chr16:89016793-89016972
  hypo
tccgggtcagttcacccgtcccctggaccggcaccggcacagagggtcagagtgttggcacctgtcttccggatctgttcacccctcccccggaccggcaccgccacagagggtcaggagtgttggcacctgtcttccgggtcagttcacccgtcccctggaccggcaccgccacagag

SEQ ID NO: 91497 - DNA, 30 bp, Homo sapiens
  chr16:89022673-89022703
  hypo
gaagacctgcatcacgggagaaccccacgc

SEQ ID NO: 91498 - DNA, 31 bp, Homo sapiens
  chr16:89025941-89025972
  hypo
acctgtaaaagccaggcgcagtagagaatgt

SEQ ID NO: 91499 - DNA, 36 bp, Homo sapiens
  chr16:89029033-89029069
  hypo
cgagtcccctggaccacgtttcggggggagacagcc

SEQ ID NO: 91500 - DNA, 30 bp, Homo sapiens
  chr16:89032980-89033010
  hypo
caggccctgcccagcgcccagcttcccagc

SEQ ID NO: 91501 - DNA, 30 bp, Homo sapiens
  chr16:89066999-89067029
  hypo
accaaccttgaaagcggactccaggcagac

SEQ ID NO: 91502 - DNA, 31 bp, Homo sapiens
  chr16:89100279-89100310
  hypo
gagggcacccagggagcgtgtgtgctgccat

SEQ ID NO: 91503 - DNA, 30 bp, Homo sapiens; identical to SEQ ID NO: 29739
  chr16:89108904-89108934
  hypo

SEQ ID NO: 91504 - DNA, 422 bp, Homo sapiens
  chr16:89109379-89109801
  hypo
gagtgggcccaggcatgagggcgtcttggaactcatctaacccaggtggcaaacaggggccgcccgactgccagggagaattgacgagcagtggcgtcctggaattcccgtgaggtggcgggagaagattctatgattgatccgtcatgcctgccgtggctcaggatgggaccggcctctcaagctacagatcaagaaactgagaagggagtagcctaaagtcaccatgagagtggccaggtctgggccggcctggcctccaccccgcagagaccatctcagctctgctcgctcagcctcgtccccgcctctgacatccttccattcccgctcatggccctctctgtctgccaccaccctccccgccatgggtgcttaaagcccccggcagctgccctcccgtcccccaacatggcccttcc

SEQ ID NO: 91505 - DNA, 30 bp, Homo sapiens
  chr16:89119941-89119971
  hypo
tgttggggacagagccggcggtcatagcct

SEQ ID NO: 91506 - DNA, 274 bp, Homo sapiens
  chr16:89120180-89120454
  hypo
gtgcagagagaaggccgggcgggtgctggggggcccatctccccgagccttgcaaatagtgcagtgcagggagaaggccgggcgggtgctggggggcccgtctccctgtgactcgtggacggtgcggtgcagggagaagggcgggcaggtgctggaggactgagtgaggcccctccaggatggctccctgcccctccatgcgctgggtcctcgggccaggacaggttgcatctgggtcaccagccccctcacacccgctcgcctgaaggcggcc

SEQ ID NO: 91507 - DNA, 157 bp, Homo sapiens
  chr16:89120707-89120864
  hypo
ctgctccccagaacctcgtcgtcttcccggtgccctgcggcaggaacacagggctggagccgacccccagggcatggctgggagctgcgggagtgaacggggagttaacccccagggcatggctgggagctgcgggagtgaacggggagctgcctgt

SEQ ID NO: 91508 - DNA, 262 bp, Homo sapiens
  chr16:89129269-89129531
  hypo
tgtggtcacctttgacccctgcggcctggctgctcctgacagcatgagttgattcaaggacaaagccaggacccctggcttggagggacagtcccacaacccctgggtcccaggctggcacacgtgcctcctgggccacccccacctgccccccaccgctagcaccccactctctaccctcccaggccagcgcactgcctcctgggccagcacccccacctgcccccaccgccggcgccccgctctctaccctcccaggcca

SEQ ID NO: 91509 - DNA, 794 bp, Homo sapiens
  chr16:89130511-89131305
  hypo
aggggcacagaggagcctccccgggcctcagcctgggtcttgcctctgggctgcgggagccggggagcctcggccgtgttctgggctccacacagtcccgagccccacaagatcagccctggcttggttctgtacgttgcttcctgcaggggaggggagggggaggggaatggccaacagctggtgttcagggtgccctgtgggatggcatggcccctcaggtatcagggagtcccgttagactaggctcctaaccaggacctgggcaggggagcatcacagcgctggggccccagactgctgcccaccggctgcctgggttcctctctgaacctcagtctcctcatcggcctggcgggaacagctgctcgctcctgttctttccccgtcaggcgtgtgagacgtgtctcctttctctccgccaagagtgaactccctttgaccaggcctcgtggtggttcagggagagatgttcgtgaagcaagggcgtcccgtgagcctggcccgtcacccgacctctaggcttcacaaaccttcagatctgagcaacacacagtcgtgaccctgtggctccagagctccctctccaagtggcttctccgggtcccgcagagcaggccctgcagatccaaggccaacctcctaggaccccggcctcccacccacaggagggttttccctcggtcctaagcggccctccttccagcacggcagggagacctggggctgcagggatttgccgggagagcccggggccaccagcaccgtcctgcgaaggatgtagcctcaggcca

SEQ ID NO: 91510 - DNA, 278 bp, Homo sapiens
  chr16:89132010-89132288
  hypo
tcagagggagcattgattctgcggccaatcagagggagcgttgattctgcggccaatcagagggagcgtttggcgcccgagggatgggtttccacctgggcttccaggttccccggaggcctcttgggggcatggctgccgtgggtagggtctggtggccagggcccctgttctcagcactccacgagtcttcactcagcaccctgagaggcagctgtcctttttactaacccctccccttttcaggacaggaaaccgaggcacagaggcagagtcag

SEQ ID NO: 91511 - DNA, 146 bp, Homo sapiens
  chr16:89137984-89138130
  hypo
ccagtcagccaacccagcctccgcgagagacagaggaaagacagacacggcgttggctgcgcgggggcctgcatccctcccgaccttctcatttgatcctcctgccctatgcggttggtgccaacgttcatcccattttacagatg

SEQ ID NO: 91512 - DNA, 253 bp, Homo sapiens
  chr16:89139239-89139492
  hypo
ggctgctgggaggacgagtaagaaaagcgggtgaagcacagagcccaaggctccgtgtggcccccccagtcagctgaagtcgtgaccctcaccgcagcctccgccccgcgccaagcctgactgtggtggcttccgatgggtgtcctcctgggcttcccaaagcaggaggtgaggtgcaggacaacgctggcgcaggctggctcagaggcacagcagagccgggtcctgcacggccaggcgcatcgggagtggc

SEQ ID NO: 91513 - DNA, 597 bp, Homo sapiens; identical to SEQ ID NO: 29745
  chr16:89139897-89140494
  hypo

SEQ ID NO: 91514 - DNA, 192 bp, Homo sapiens
  chr16:89141924-89142116
  hypo
gacaggcctccagccggggcacctcccaacaactctgcacccttgattgaaatgcaatgtctgcggctgacggccacgtgactgcaacccaccctcccggctgccgattaattttaccttttgtgctgccagctgcagtgggttcatggtgagagctgagttgatgcatgcgagtgcgagggtgtgttaatg

SEQ ID NO: 91515 - DNA, 241 bp, Homo sapiens
  chr16:89147080-89147321
  hypo
gcccccatcgtgcccgtgtccagtgtgtggccccaacagtcagcgttgttgacgtcaccttctgggagggaggtcggcctcggggccaatggcccggagcttgtgtgtatggctctgtgtgcgtgtgcaatgcactcagcatctaagctacggtcaggccctctggaggctcctgcaaactttgagggcctgcccagaactctctccaagcccaggtggggcaaacgcttccaggtcaaat

SEQ ID NO: 91516 - DNA, 30 bp, Homo sapiens
  chr16:89152677-89152707
  hypo
cgtggctcgattcccgccttcgtggagtat

SEQ ID NO: 91517 - DNA, 31 bp, Homo sapiens
  chr16:89162715-89162746
  hypo
gtgatggggagccccacggtagaaggggtcc

SEQ ID NO: 91518 - DNA, 190 bp, Homo sapiens
  chr16:89165590-89165780
  hypo
tccgcatcctggggcggtgtcccgtgggcagtgtcctctggctgcagaatgcatgttgcagaattggaccagccctcacgcgtcaggagcgttgggcccacaggcggaggcaccctggcttcttctcggtctcctttctctgaatgaagaattccagtggacggcgggcccgcgcgacccctcccaggga

SEQ ID NO: 91519 - DNA, 248 bp, Homo sapiens
  chr16:89169167-89169415
  hypo
gtgagttggggtcagggctctcggttgcaccctcagactaggcgcctttcccctgtcggggccagggctctcagccgcgccctcagcctaagcgcctttcgctggttggggtcagggctctcggccgcgccctcagactaggcatcttttcctggtgtgcagtcgcccctatccacaggggacgtgccaatgccgagaccctgggtagcatggaaccctgtacctacgatgctttttgctatacatac

SEQ ID NO: 91520 - DNA, 627 bp, Homo sapiens; identical to SEQ ID NO: 29748
  chr16:89169474-89170101
  hypo

SEQ ID NO: 91521 - DNA, 192 bp, Homo sapiens
  chr16:89172067-89172259
  hypo
gaacctctgttgggggctgcccgggcgctgacggtggctggtctaccatggtcacttgggcagaggcagcaacggccattgtcgtggaccgtgccagggcgagatgcagctggcaggggcagaggcagaacatctcccagggagctgagggcaggttggttccatcgtcccggagggcaggttggttccatc

SEQ ID NO: 91522 - DNA, 183 bp, Homo sapiens
  chr16:89179654-89179837
  hypo
gatgtgtgtgtctgtggctgccgcgcgctcctcccagtccccaggaagtgcacagggaagcggcacctttgttcctggagagaattccgggttgtccaaggcacatgtctgaaccgcttcgctctctttgccgttcccttgccccttttctgtgaggccaccggagcccatggttttgctgct

SEQ ID NO: 91523 - DNA, 506 bp, Homo sapiens; identical to SEQ ID NO: 53482
  chr16:89189484-89189990
  hypo

SEQ ID NO: 91524 - DNA, 30 bp, Homo sapiens
  chr16:89190842-89190872
  hypo
atgtgtgtgatacccgtgcgtactctgcgc

SEQ ID NO: 91525 - DNA, 270 bp, Homo sapiens; identical to SEQ ID NO: 29751
  chr16:89198317-89198587
  hypo

SEQ ID NO: 91526 - DNA, 62 bp, Homo sapiens; identical to SEQ ID NO: 29752
  chr16:89202504-89202566
  hypo

SEQ ID NO: 91527 - DNA, 274 bp, Homo sapiens
  chr16:89203067-89203341
  hypo
tcctccgggtcaggatgagaggagaggttgccagctttgatgccagccgctcctgcctcccccacctgcctctgtgcctacagcccgcttctgcctcaagatcacacagcgggcttgtgaggccaggggtctccgctgctgctcaaggagatggcaaaggtctgtttcaggtaactcctctgacggccacaacgatgtcttcagacgtcaaaggtctgtctcaggtaactcctctgacggccacaacgatgtcttcagacgtcaaaggtctgtc

SEQ ID NO: 91528 - DNA, 31 bp, Homo sapiens; identical to SEQ ID NO: 29754
  chr16:89206302-89206333
  hypo

SEQ ID NO: 91529 - DNA, 30 bp, Homo sapiens
  chr16:89207538-89207568
  hypo
tcccgcggggtgtccgacccgctcttgctt

SEQ ID NO: 91530 - DNA, 3 bp, Homo sapiens
  chr16:89215967-89215970
  hypo
ccc

SEQ ID NO: 91531 - DNA, 459 bp, Homo sapiens
  chr16:89216595-89217054
  hypo
tccaccctgacttgccgtctcctgagcactgaagatatttttggcttgtccgatgtgactccacagacagcagaaacgcttgcttgatcagggcagcatcagggcaccacacatgcctgggcttgcacaacacagcgggagcactgccactcagcagcagctgctgctttcattaaacagttaccttgagaagaaaagataggtgtcgagggctgagagctgtgctagagtttcagggtccgagttggcaggaactgaagtcccgatgctcctcagcccttggctgtcctcagggctgccctctgcgtggggacaccaggccgcccctgcccagggacaccaggccgcctgctcctgctctgtgcatctctcacatcaggctcctcacccagcattgtttgggctatgacagtggctgtgacaagaccctaagacgggaagctgcgtgcagggcacttg

SEQ ID NO: 91532 - DNA, 24 bp, Homo sapiens
  chr16:89219171-89219195
  hypo
tgacgcatacctgtagcacttcgg

SEQ ID NO: 91533 - DNA, 444 bp, Homo sapiens
  chr16:89219254-89219698
  hypo
tctggcccaggcaacagtgagatcctgtcctagaaagaaaagagaaaaaaagaaaaatgcgatttggaaatgtggaggtcgaggttgacagcgacaccgaggtcgaagccagttgcccctggagagcgagagactgggctgggccgactcccacctctgtcgcgagaggcctacgggcaggggcaggtgggcagggggactgtgctgggtctctggccgcgtctggacggcaggcgacactttctccacaaaaagcgtcaagaaaccacgacacttggtttctggacttttccgcggaacagtaaccagaacaatcgccatgaaggttcgtttctgtcatggctcagtgcagcctggacgccctggaccagcccctcctgcgcctgggccacggccgctgccttcagggcatcactggtgggcggcacaaccatcctccctttg

SEQ ID NO: 91534 - DNA, 797 bp, Homo sapiens
  chr16:89220237-89221034
  hypo
cgcccaaggcctgcacgcaccatggcttctgtggtaccagtgataacaccatgccgggcacctcctgcagtcaccacccctgggctgctagggcagagacagctgcggtggcccggtgcacctgcctggcctcaggatggccgaggcgcctggcaaggctgcagggtcccaggggcacctgtccgtactgctgggcgcctgagttcctcctgctgggcactgtcagggcagtgcgcctcaggctgtgcttgtctctgcagaaatgtcctggccccgtacgcggtgccctcggagctggtgctggtggaggagatcccgcggaaccagatgggcaagattgacaagaaggcgctcatcaggcacttccacccctcatgacccggcagactgggactgcgggtctggtggggagcagcagacgtccccttcacaccgagaaccacgggggcccgtccaagacctggcctcccttaaacctgaaccccccaaatcaggtcacgtagaatcaagaactgtttgggatgaaatcaccatgtggggtccccagcctcgggccagttgttgcagctcaaggagaccgtccctggtgtcacctctgcctggtcaccgccgacctcatctgtgcagcgcggtgcagccagcccctggccccacgtgctgaggcacctcccgccccacagtgccctgcagttgccaggctctccagggcaggtcccagaggtttcccacaaaaaacaaagactccactggaggaaacaagcccctgtcccacgccgtctgcacgtgcctgtgcctca

SEQ ID NO: 91535 - DNA, 30 bp, Homo sapiens
  chr16:89224246-89224276
  hypo
gtatgtaagtcacacgcctgcatgtcacat

SEQ ID NO: 91536 - DNA, 341 bp, Homo sapiens
  chr16:89225868-89226209
  hypo
ccgtctgagggtgggcggagggcgctgccgcaggtccccacatacccagcgcacgctcaccccacactggaggcacctgccgggttctgacacccctcgaggtgccttcccagggttctcacacccactgaaggcagcgcgctcagcctgctttgcacatgagccgctgaggcaggcgagttgagggcgagggtgtgaatcacgagcttggggccaaagcccaaggtcgtcccctctggccggcaagctcaggctcacacggggagccaccaggctggactgggtgcagcttacggacgtggcgcgtgctgtgggcgtcgggccgcggctcctccatgcag

SEQ ID NO: 91537 - DNA, 30 bp, Homo sapiens; identical to SEQ ID NO: 29758
  chr16:89242920-89242950
  hypo

SEQ ID NO: 91538 - DNA, 376 bp, Homo sapiens; identical to SEQ ID NO: 29759
  chr16:89254537-89254913
  hypo

SEQ ID NO: 91539 - DNA, 12 bp, Homo sapiens
  chr16:89255152-89255164
  hypo
cacacacagatg

SEQ ID NO: 91540 - DNA, 378 bp, Homo sapiens; identical to SEQ ID NO: 29760
  chr16:89260392-89260770
  hypo

SEQ ID NO: 91541 - DNA, 422 bp, Homo sapiens; identical to SEQ ID NO: 53485
  chr16:89267402-89267824
  hypo

SEQ ID NO: 91542 - DNA, 147 bp, Homo sapiens; identical to SEQ ID NO: 53486
  chr16:89267957-89268104
  hypo

SEQ ID NO: 91543 - DNA, 26 bp, Homo sapiens
  chr16:89290251-89290277
  hypo
agcctgggtgacagagcgagactcca

SEQ ID NO: 91544 - DNA, 17 bp, Homo sapiens
  chr16:89294243-89294260
  hypo
gcgctcaggcctcacta

SEQ ID NO: 91545 - DNA, 30 bp, Homo sapiens; identical to SEQ ID NO: 29763
  chr16:89296731-89296761
  hypo

SEQ ID NO: 91546 - DNA, 27 bp, Homo sapiens
  chr16:89321911-89321938
  hypo
ggcatgagccaccgcgcccagccgggt

SEQ ID NO: 91547 - DNA, 30 bp, Homo sapiens
  chr16:89332250-89332280
  hypo
ggctgtttgggagtcgcatgtgcggcatct

SEQ ID NO: 91548 - DNA, 30 bp, Homo sapiens
  chr16:89337319-89337349
  hypo
gtggaaaccaaacacgggagtttcatcagg

SEQ ID NO: 91549 - DNA, 30 bp, Homo sapiens
  chr16:89344158-89344188
  hypo
gtggggcccgagggcgcccgctcctggatc

SEQ ID NO: 91550 - DNA, 43 bp, Homo sapiens
  chr16:89347100-89347143
  hypo
cactcaacgggctcctcggtgatgacggcgctgaagggaccct

SEQ ID NO: 91551 - DNA, 30 bp, Homo sapiens
  chr16:89350053-89350083
  hypo
ccctgccgtccctgcgctccttgcagctct

SEQ ID NO: 91552 - DNA, 64 bp, Homo sapiens; identical to SEQ ID NO: 29765
  chr16:89354319-89354383
  hypo

SEQ ID NO: 91553 - DNA, 241 bp, Homo sapiens
  chr16:89354779-89355020
  hypo
gacagagggcacagctcggccttgagggtgggcaaggcgaaaactcgctttcctgtgccccacatcatggaaccggctagctacggggaaacaaagctacagaaccacccagatgccaggacaggccggatgtgtgaagaacggggggatgccaaccttgtagtgcccgttgttggcagcgtcgtgcaaaggcgtgtcgtcatctaggcccttggtgttcacctccgcacctgcagccagc

SEQ ID NO: 91554 - DNA, 294 bp, Homo sapiens; identical to SEQ ID NO: 29766
  chr16:89357462-89357756
  hypo

SEQ ID NO: 91555 - DNA, 30 bp, Homo sapiens; identical to SEQ ID NO: 29767
  chr16:89358217-89358247
  hypo

SEQ ID NO: 91556 - DNA, 350 bp, Homo sapiens
  chr16:89358981-89359331
  hypo
aaggcacacacctggccacatcgacctgcgtcacactcatgggcaaaaccccaagtactgcaggctgccatcgccaccaccagctagtctgtaaacagtcctcaacgcacagatctgagaaagcacttgagctttggccccagcccctcatagaacctggcaaacacggtggttggggaggcagcctcgccaccggccaatgagccccagcctacagccatcattggcgtagccacaccttagcagtgagcttgggtcacaggcgcttggctgtgggtctctgcgtgcgccccatgctttccctgcaccctccatgctgcccgggggccggccctccccaggcttgcttc

SEQ ID NO: 91557 - DNA, 80 bp, Homo sapiens
  chr16:89360275-89360355
  hypo
caggcagaggcaaaggcgttccttagaagtcagtctttaggctggcaggccaggagcccacgctgcgtccccgctctgag

SEQ ID NO: 91558 - DNA, 174 bp, Homo sapiens
  chr16:89366814-89366988
  hypo
ctggccagaggctcccaggggcgccatgctctccaggcacctgccccgcctgcgagcacagcctggcccctgctgcactctgctctctctgcccgctcgggtccactgcagctgagcgggtgggagaagcctcttcaacttcacacacttgtcgcctctagcactgggcaaggt

SEQ ID NO: 91559 - DNA, 30 bp, Homo sapiens; identical to SEQ ID NO: 29769
  chr16:89367308-89367338
  hypo

SEQ ID NO: 91560 - DNA, 30 bp, Homo sapiens
  chr16:89384922-89384952
  hypo
atctcgctcatgcacgaagtatggcttttg

SEQ ID NO: 91561 - DNA, 52 bp, Homo sapiens
  chr16:89389595-89389647
  hypo
cacagggagagaagtctccaacggactgagcggaggaaaaaagaaaaaagga

SEQ ID NO: 91562 - DNA, 434 bp, Homo sapiens
  chr16:89409897-89410331
  hypo
tgtgtgagtgagtgagcgagcaaatgagacagagctcgaggtgggctggaggcatgtgagggtgcacgcgaaacacagtgcctcctcttggagttgccagaattcacctcgttcagaacctcaccccagtcagaaaacacaaggcagcaactggccggaacttggtcagtcacatccataaaccaccaattaccttcacagaccacgactaacaggtttattacagatgagtcacagctcatgttttcaaggaagggtctccaactgagcagtcaccagtgcagcctgcgtcagggcgcgcctccctccagcggtccccgcgtcgcccatgtctgacacagtttatgcttcgcaggcggtaaggctccgctcctcactcccatggaccaacagagtagggaaaacgaaggcacgttggaaactacggatcacgg

SEQ ID NO: 91563 - DNA, 31 bp, Homo sapiens
  chr16:89410650-89410681
  hypo
gtgctttactttcatacgttattttatttgg

SEQ ID NO: 91564 - DNA, 30 bp, Homo sapiens; identical to SEQ ID NO: 29772
  chr16:89436823-89436853
  hypo

SEQ ID NO: 91565 - DNA, 133 bp, Homo sapiens
  chr16:89437486-89437619
  hypo
ttcaactgcgcgctcgcttactgaaaaccgccgagggggaagacgggacgagcgtcttgactttcagggtgcacgtaagtggctggtcccaccaaggaagtgccagaaaaagatgcaacgactctcactacct

SEQ ID NO: 91566 - DNA, 325 bp, Homo sapiens
  chr16:89438582-89438907
  hypo
aggaggaaaagcagcggcagcgcacggcaagatggatcctgacactcagagctggggaaagagccacacgtcctcctgcagcccgagcctctcactgagattaagaggggctctggggcaggcggaggcggcggcagcgcccagcgacggatgcggccaccactgcagggcctgccgccggtgtggagagcccgagtcacggagccccatgctgcccctcacagcacggacggggtcgacaaggcagtggcaggcggagtgagaggcggctcagggcaccagctgcccactgagtcactgtgagaagagcgaaggccaaggcttg

SEQ ID NO: 91567 - DNA, 30 bp, Homo sapiens; identical to SEQ ID NO: 29774
  chr16:89439273-89439303
  hypo

SEQ ID NO: 91568 - DNA, 121 bp, Homo sapiens
  chr16:89442144-89442265
  hypo
tgagccactgcacccagccgactccgtctcttaaaaaaaaaaaaaaaaaaaaagcctcttgcagttctcaagtctttttcattgtgtttactcaataccataaaccctaaatgacaccaca

SEQ ID NO: 91569 - DNA, 137 bp, Homo sapiens
  chr16:89442324-89442461
  hypo
gagttgtgactttaggaaaagctaaacttgcgtgacacgccgcagcctgtgctctgctgtggatgcttttcaaaatcgataaatccagcagaagggccatcacaaaaaaagaacaggacatccgtgaagccatcacc

SEQ ID NO: 91570 - DNA, 296 bp, Homo sapiens
  chr16:89445364-89445660
  hypo
ctttttgggtcaaggttctgacggcacactggggagcgtcaagacgcctcctgcagtcgtagacaagccgggctgaggcattcactgtcgcttagaactgaaaacttagggtcgtccatgcccagaacgtcggcagtgcggaccagccccaggaaggcctttctcactggcttctagaaggtggggccggcccccatgcctgccccggcacacggccattctgggagctgctggcagccggcgggctagaaggggtgcacaccgtctgtatgtgcgtcacaggctcatgctttttt

SEQ ID NO: 91571 - DNA, 78 bp, Homo sapiens; identical to SEQ ID NO: 29777
  chr16:89446068-89446146
  hypo

SEQ ID NO: 91572 - DNA, 30 bp, Homo sapiens; identical to SEQ ID NO: 29778
  chr16:89456313-89456343
  hypo

SEQ ID NO: 91573 - DNA, 30 bp, Homo sapiens
  chr16:89466377-89466407
  hypo
ccccaggcttcctgcgctgggggccggtca

SEQ ID NO: 91574 - DNA, 272 bp, Homo sapiens
  chr16:89468694-89468966
  hypo
cgaggcttgtctcagcgatactaatgtacagttcacatgaactcctaaccttagccagccacaataaggtatctgggattgagcgcttatttaaatcggtaggcacatcaatttaaatttaggtagtagctcagcctgtacctaacacatgaggaagccgaggcgggaagatcggttgactccaagagttcaagagcatcctgggaatgacagggagaccccgcctctagaaaaacatttaaaaattgctgcgtatggtgccgcacaccagc

SEQ ID NO: 91575 - DNA, 71 bp, Homo sapiens
  chr16:89471628-89471699
  hypo
tggaaggaggtaccacatatgcggtctgttgtggaacaaaatgccgttacgtggggcatgactgtattctg

SEQ ID NO: 91576 - DNA, 31 bp, Homo sapiens; identical to SEQ ID NO: 29779
  chr16:89472192-89472223
  hypo

SEQ ID NO: 91577 - DNA, 24 bp, Homo sapiens
  chr16:89494916-89494940
  hypo
agcgagactacatctcaaaatgaa

SEQ ID NO: 91578 - DNA, 242 bp, Homo sapiens; identical to SEQ ID NO: 29780
  chr16:89500004-89500246
  hypo

SEQ ID NO: 91579 - DNA, 30 bp, Homo sapiens
  chr16:89504227-89504257
  hypo
tccagggcacctcgacgctatgcccagttc

SEQ ID NO: 91580 - DNA, 77 bp, Homo sapiens
  chr16:89504485-89504562
  hypo
tggccaggagggcaccgcaagcttggacacagcaggggcactggagatgggtccacgaaccgcgtgcgcagcccagg

SEQ ID NO: 91581 - DNA, 18 bp, Homo sapiens
  chr16:89524936-89524954
  hypo
atttcatttcttaggaat

SEQ ID NO: 91582 - DNA, 209 bp, Homo sapiens
  chr16:89531900-89532109
  hypo
ctgtgccacaccgcccgcccgcacacatccgcggaaagcctgctttcagctgctcagcaggtgggaacacttgctcctccagcattccaccatgagacaaaggaaaaagtcgcttctgtgtgtccaccagcacacgactcccatgtactcctgcacgtcacgtggacgagctaaagaagactcctctgctccacagccaccatcacact

SEQ ID NO: 91583 - DNA, 30 bp, Homo sapiens; identical to SEQ ID NO: 29783
  chr16:89545062-89545092
  hypo

SEQ ID NO: 91584 - DNA, 30 bp, Homo sapiens; identical to SEQ ID NO: 29784
  chr16:89548160-89548190
  hypo

SEQ ID NO: 91585 - DNA, 33 bp, Homo sapiens
  chr16:89553883-89553916
  hypo
taaaaaggcacaaaaagaggccgggcgcggtgg

SEQ ID NO: 91586 - DNA, 191 bp, Homo sapiens
  chr16:89558581-89558772
  hypo
cttctctaggcagccagatttcgggctccacccacaactagtcacgccattggatgaggggtgagcgcctgataaaaacagccggcgtatgcgctgatgtgcgttcacgaagaggtgatccaagtgtttccatatttgcctcactggacgaagtatttggtaaaattgacgaaattcagagtcctggaccc

SEQ ID NO: 91587 - DNA, 12 bp, Homo sapiens
  chr16:89575951-89575963
  hypo
ccggccataaaa

SEQ ID NO: 91588 - DNA, 101 bp, Homo sapiens; identical to SEQ ID NO: 29787
  chr16:89577031-89577132
  hypo

SEQ ID NO: 91589 - DNA, 40 bp, Homo sapiens
  chr16:89584296-89584336
  hypo
gattataggcgtgagccaccacgcccggccaagtgattgt

SEQ ID NO: 91590 - DNA, 30 bp, Homo sapiens
  chr16:89584633-89584663
  hypo
ccttaaatgaaagaacgatactgaatgtgg

SEQ ID NO: 91591 - DNA, 209 bp, Homo sapiens
  chr16:89588831-89589040
  hypo
ccggctgctgggtccgtggcggtttgtccgcaggcgcaggtgttctggaaatgacgtcgttaccaccgctgggtctgtggcggtttgtccgcaggcgctggtgttctggaaatgacgtcgttcccgccgctgggtccgtggcgctgtgtccgcaggcgcaggggcgcaggtgttctggagatgatgtcgttcccgctgctgtgtccgtg

SEQ ID NO: 91592 - DNA, 160 bp, Homo sapiens
  chr16:89597144-89597304
  hypo
gtcagcttcaaagacgtggcaggaatgcacgaagccaaactggaagtccgcgagtttgtggattatctgaaggtgaaagcagcgtgggccgggagggaggtgtgagcagaggccggccgtcctcctctcccagaagggctcctgcgggacctggaattcc

SEQ ID NO: 91593 - DNA, 114 bp, Homo sapiens
  chr16:89603718-89603832
  hypo
agcactggaggcaccgccggcgatggacgtccaggtcccggctcctgtgctggaaagcgttgatggggagcgtcggcgctgaccacacgcgggagctgcggaagcccagcggtt

SEQ ID NO: 91594 - DNA, 30 bp, Homo sapiens
  chr16:89613888-89613918
  hypo
gctcctggcgccggcgcctgccgctctccc

SEQ ID NO: 91595 - DNA, 226 bp, Homo sapiens; identical to SEQ ID NO: 53489
  chr16:89614906-89615132
  hypo

SEQ ID NO: 91596 - DNA, 30 bp, Homo sapiens
  chr16:89619158-89619188
  hypo
gagaagacacttcccggcagtgtgtgaaca

SEQ ID NO: 91597 - DNA, 30 bp, Homo sapiens; identical to SEQ ID NO: 29789
  chr16:89619387-89619417
  hypo

SEQ ID NO: 91598 - DNA, 30 bp, Homo sapiens
  chr16:89620171-89620201
  hypo
ggatgcctctgtctcgaccccgccctccag

SEQ ID NO: 91599 - DNA, 154 bp, Homo sapiens; identical to SEQ ID NO: 53491
  chr16:89627716-89627870
  hypo

SEQ ID NO: 91600 - DNA, 162 bp, Homo sapiens
  chr16:89647542-89647704
  hypo
cacccatcacatggaacatcccgtcacccgtcacacggaacattccgtctcccgctgacacggaatatctgatcacccatcacatggaacatcccatcacccactcacacggaacatccgatcacccgtcacacggaacatcctgtcaccagtcacacagaa

SEQ ID NO: 91601 - DNA, 291 bp, Homo sapiens
  chr16:89647763-89648054
  hypo
ccatcacacggaacatcccgtcacccgcagctgcccctgcccctttgtggccagctccccgcctggttcgtctcttctggaattccacgtccatgaatcacagcgcgtgttctccctgctgtggaattcttttacccaacataatgtctgcgtgactcatccccctgcagcctcggtcggagctggcgtgccatcgatcctgttgtcctccccattttttagataaggaaactgagagttagggagggcacagatggaagaggatggcacggacacagaaatatggacatg

SEQ ID NO: 91602 - DNA, 159 bp, Homo sapiens
  chr16:89649561-89649720
  hypo
tgctccttggcaccttcgaagaggagtgggcggtggggtcctgggccggcacctcgctcacaccctttctgccgcccgtggctacgtggacatgctgggcgtgagggtccggggccgtttgagctgcctcgcctctgcttctgcgggttctcacctggg

SEQ ID NO: 91603 - DNA, 30 bp, Homo sapiens
  chr16:89650516-89650546
  hypo
gcaggtgccgggcacgcctggctcaggctg

SEQ ID NO: 91604 - DNA, 31 bp, Homo sapiens
  chr16:89656477-89656508
  hypo
ggattggggtgcaaagcgggaaccccagcct

SEQ ID NO: 91605 - DNA, 30 bp, Homo sapiens
  chr16:89662778-89662808
  hypo
gggtagtcaccactcggctctggaggatga

SEQ ID NO: 91606 - DNA, 103 bp, Homo sapiens
  chr16:89688128-89688231
  hypo
cgtgtgtctgtgtgcacgtggaggtatctgagtgtgcgtttactcatcccgtgggaaagtctgcacatgtctgttctaggtacgcggacgtatctgaccgtgt

SEQ ID NO: 91607 - DNA, 147 bp, Homo sapiens; identical to SEQ ID NO: 29794
  chr16:89697116-89697263
  hypo

SEQ ID NO: 91608 - DNA, 30 bp, Homo sapiens; identical to SEQ ID NO: 29795
  chr16:89702747-89702777
  hypo

SEQ ID NO: 91609 - DNA, 343 bp, Homo sapiens
  chr16:89713324-89713667
  hypo
catgcctgctgccgcgggtggacatctttccacacctctgcatgcttgtctgccatccgagcctccccacaaggagccaggtgcctgcaggaggcccccgccgccctgcccaccctacctgtcagggtcctggcagggacccagcacagaggatgcttggtgacgtcagggagcaaccacaggtatgcagagacagcacgtcagcctgtgagccacccctcccgatgagctgcccacacacgctccttgtccccaggccacagccccaagggtaggggccacataccgatgtatggacgtccaggttctgcacctgctgctcgaacctgtccatcactgagga

SEQ ID NO: 91610 - DNA, 30 bp, Homo sapiens
  chr16:89714834-89714864
  hypo
gaaaaggccgccgacgtggggtctccagga

SEQ ID NO: 91611 - DNA, 30 bp, Homo sapiens; identical to SEQ ID NO: 29797
  chr16:89715824-89715854
  hypo

SEQ ID NO: 91612 - DNA, 30 bp, Homo sapiens; identical to SEQ ID NO: 29798
  chr16:89718568-89718598
  hypo

SEQ ID NO: 91613 - DNA, 24 bp, Homo sapiens
  chr16:89720015-89720039
  hypo
gtgagacgccgtctcaaaaaaaaa

SEQ ID NO: 91614 - DNA, 30 bp, Homo sapiens; identical to SEQ ID NO: 29799
  chr16:89736775-89736805
  hypo

SEQ ID NO: 91615 - DNA, 66 bp, Homo sapiens; identical to SEQ ID NO: 29800
  chr16:89755907-89755973
  hypo

SEQ ID NO: 91616 - DNA, 30 bp, Homo sapiens
  chr16:89757942-89757972
  hypo
cacctggagaggtacgtggtctcctggtct

SEQ ID NO: 91617 - DNA, 98 bp, Homo sapiens
  chr16:89762086-89762184
  hypo
gctgtaaaccctgacggtgggcctggcacacgcctgtattcccacaccaggtcttccgatcagtggtgtctgtgaagggtgccgcgagccaggctgac

SEQ ID NO: 91618 - DNA, 853 bp, Homo sapiens
  chr16:89763790-89764643
  hypo
cgctgtagccacaagcgccgctgggcgtcgccaagcagcacacgcagcgagtggcctggacggcaggcgggcagggctgcacagtgggcagcatgcagctggcgacaggtgtcgcagcagagggtgggcagggcgccaggggacaggcagctgtgtgcctggtagcctgggggctccgagacagacctataggctgaggctggtaccccctctgcccgaatacgcctcgggctggccgctgcagagctttcaggggtggccaggtccccaggcctactcagctcacggcgcagagagaggaaggagaaggcggaaggttcaggttccagcccctcctccaaggccccatatggtgggctgctggcctgcggcagctcctcagctgggggctcccaggcccggcccccagtgccccacagtttggcactctgctcccagagtggtggcctgtaggccagctccgccgggggcgagtcagggcctggtgacggctccccatacaggctggcgtcctccgacccctcgtcttcctgcaagtcccggtataagtccagtggggccctgtaagcagcaggggagcctcgggggggcaggggtggcggctcctcatcctgggccagccgctgctgcagccaggccacacaggaggccacgtccccgctggcacgccgtgcctgcagcagctcctcagctggcagcacactggtgcccagctgggccagcacctcacccaggatctcacactccagccggagggcgaagcagcccagggccacctgcaccagctggcaggcggggggcagggcggtcaccatgagccgatggctgtctctgcgtacgtagcccatcttct

SEQ ID NO: 91619 - DNA, 181 bp, Homo sapiens
  chr16:89770173-89770354
  hypo
cagcatggggacggactaacacaccctcagaacccagccactagagtgagaaggccacggccgtgtgcagagcttttggcctgcaacttcgacctgcgactcacattcacctgcagcctattcttgggacttttttggaaatagtttttccagacaaaaatcaagatgagtttgttctggg

SEQ ID NO: 91620 - DNA, 30 bp, Homo sapiens
  chr16:89775668-89775698
  hypo
caggaccagcagtccgagctcctgggccgc

SEQ ID NO: 91621 - DNA, 30 bp, Homo sapiens
  chr16:89777100-89777130
  hypo
tccaggtcctcgaacgagctgtccttgtct

SEQ ID NO: 91622 - DNA, 30 bp, Homo sapiens
  chr16:89795766-89795796
  hypo
gcgacctagacacccgcctgtgctccaggg

SEQ ID NO: 91623 - DNA, 76 bp, Homo sapiens; identical to SEQ ID NO: 29802
  chr16:89800298-89800374
  hypo

SEQ ID NO: 91624 - DNA, 43 bp, Homo sapiens; identical to SEQ ID NO: 29803
  chr16:89807743-89807786
  hypo

SEQ ID NO: 91625 - DNA, 103 bp, Homo sapiens; identical to SEQ ID NO: 29804
  chr16:89815124-89815227
  hypo

SEQ ID NO: 91626 - DNA, 39 bp, Homo sapiens; identical to SEQ ID NO: 29805
  chr16:89830046-89830085
  hypo

SEQ ID NO: 91627 - DNA, 318 bp, Homo sapiens
  chr16:89884021-89884339
  hypo
gaggccctggagacccgtccgcatcctctggcagtggccttggaaccaccgaagggattcagccgaagggccgcgttcccggcaggcgtctttattgtgttgattacgtagatggcgtagatgacgtagatgacgttcagcaccacaaacgaagagccgaggcacagagtggggccttggattcatgagatggggatggagcagaaatgagaattcggagtccatgaaacccccacaaagactcctgcacggcccgactcggacactttgcaatctgctggttgagggggatggtgtgaactcagggaacagcctgag

SEQ ID NO: 91628 - DNA, 30 bp, Homo sapiens; identical to SEQ ID NO: 29807
  chr16:89888802-89888832
  hypo

SEQ ID NO: 91629 - DNA, 238 bp, Homo sapiens; identical to SEQ ID NO: 53501
  chr16:89894334-89894572
  hypo

SEQ ID NO: 91630 - DNA, 30 bp, Homo sapiens
  chr16:89898368-89898398
  hypo
gcagcacggggcaccgtgtccacgtccaga

SEQ ID NO: 91631 - DNA, 309 bp, Homo sapiens
  chr16:89899918-89900227
  hypo
gcaggttcagctcagcccctacgccctgctgggctcaggggcaggttcagctcaggcctacggcctgctgggcttgagaagcttcgcctttgtgcctcggtttccttctccgtgaaatgggaggtgcagcgtggtgctaacgtctgtgcagccctgggcacgcctggctccggaagcactggccagtggaggtggcagcaagggatctgcacctgtgcactcgctggacctgccttggggagcagcacgtgtgggtccaggctgcgaatcccgaccggattctcagggaggggttctgcaaggtgcacc

SEQ ID NO: 91632 - DNA, 1202 bp, Homo sapiens
  chr16:89900472-89901674
  hypo
gagacatctgtgaacctgcctgcgctcgcggttggccgtcgtagaagcatggataagcatagcccgtgtgaatctgtgaacctgcctgcgctcgcggttggccgtcgtagaagcctggataagcatagcccgtgtgaatctgtgaacctgcctgtgctcacggttggccgtcgtagaagcatggataagcatagcccgtgtgaatctgtgaacctgcccgcgctcgcggttggccgtcgtagaaggccccataagcatagcccgtgtgaatctgtgaacctgcctgtgctcacggttggccgtcgtagaagcctggataagcatagcccgtgtgaatctgtgaacctgcccgcactcgcggttggccatcgtagaagcctggataagcatagcccgtgtgaatctgtgaacctgcccgcactcgcggttggccatcgtagaagtgtggataagcatagcccatgtgaatctgtgaacctgcccgcattcgcggttggccgtcgtagaaggccccataagcatagcccgtgtgaatctgtgaacctgcccgcactcgcggttggccgttgtagaagcctggataagcatagcccgtgtgaatctgtgaacctgcccgcactcgcggttggccgtcgtagaagcctggataagcatagcccgtgtgaatctgtgaacctgcccgcactcgcggttggccatcgtagaagtgtggataagcatagcccatgtgaatctgtgaacctgcccgcattcgcggttggccgtcgtagaaggccccataagcatagcccgtgtgaatctgtgaacctgcccgcactcgcagctggccgtcgtagaaggccccacaagcatagcccgtgtgaatctgtgaacctgcccgcactcgcggctggccgtcgtagaaggccccataagcatagcccgggtgaatctgtgaacctgcccgcactcgcggttggccgtcgtagaagcgtggataagcatagcccgtgtgaatctgtgaacctgcccgcactcgcagttggccgtcgtagaagcctagataagcatagcccgtgtgaatctgtgaacctgcccgcactcacggttggccgtcgtagaagcgtggataagcatagcccgtgtgaatctgtgaacctgcctgcgctcgcggttggccgtcttagaagcgtggataagcatagcccgtgtgatttttcgct

SEQ ID NO: 91633 - DNA, 30 bp, Homo sapiens
  chr16:89921033-89921063
  hypo
ggaactacaagctgcgcaaggtcatggtga

SEQ ID NO: 91634 - DNA, 88 bp, Homo sapiens
  chr16:89926089-89926177
  hypo
gggagccgtgtgtccgtggggagccggctgggctcgcagcacatggctctggaacctgagccgtgattccttcgactccttttcgcgc

SEQ ID NO: 91635 - DNA, 30 bp, Homo sapiens; identical to SEQ ID NO: 29811
  chr16:89936470-89936500
  hypo

SEQ ID NO: 91636 - DNA, 172 bp, Homo sapiens; identical to SEQ ID NO: 29812
  chr16:89947430-89947602
  hypo

SEQ ID NO: 91637 - DNA, 30 bp, Homo sapiens
  chr16:89949812-89949842
  hypo
tgtgcgctcacagacgctgtggcaccaggg

SEQ ID NO: 91638 - DNA, 30 bp, Homo sapiens
  chr16:89950204-89950234
  hypo
ctcctagccgaccgcgcacgtgtgtgcctc

SEQ ID NO: 91639 - DNA, 30 bp, Homo sapiens
  chr16:89960169-89960199
  hypo
cctctccttctttgcgtttgagcacagtga

SEQ ID NO: 91640 - DNA, 209 bp, Homo sapiens
  chr16:89960586-89960795
  hypo
cggctcagtgcaggcgagcagctcagattcccggcccccgtgcagcccccggacggcccccacacggccccggacggcccccgcgcagccccagacagccccggacctggacagtccccgtacagccccggtgcaaccctggacagccctcatgcagcccctggacagctccccttgcagccccggacggcccccgcgcagccccagac

SEQ ID NO: 91641 - DNA, 311 bp, Homo sapiens
  chr16:89966589-89966900
  hypo
gaaaggcaagagaaactggcacggtggtagactgctcggaaactcgcgtggcgggctgctctcggaaactcgcgcggcagtgggctgctctcacagactcgcgcgggggtgggctgctctcgtctgtaaattttccacattgagagcaccaactgctcagcttcagagaggagcctgggcggcaggtgggaccctcactccccacggtgtcctcgctccggctcagtctacttctcaggccctcccacgtcctctgtatcttctgcatgcggaaagccccccaggtggacgttttaagttatctttatgct

SEQ ID NO: 91642 - DNA, 38 bp, Homo sapiens
  chr16:89970850-89970888
  hypo
gggtgccaggcgtggcggcacatgcctgtaatctcagc

SEQ ID NO: 91643 - DNA, 85 bp, Homo sapiens
  chr16:89971007-89971092
  hypo
ggagcaaacacaggagaaagtgcacgccttggggtcatcccctggccctccagggctcgccctgtgtgcacgcagatggacccgc

SEQ ID NO: 91644 - DNA, 1573 bp, Homo sapiens
  chr16:89971725-89973298
  hypo
tgttcccgggtgcctcgggctggagtggtgccttcgggtcttgcagtgtttccacatgagctgtgagatgatgacgagtctctcacagcagcatcttgggagtaaagaaatctggcagagacgagaaagagtctcctgtcctgtgtgtgaacacttcggaggctcatgccctaatatgctgcaactgacaggcatccccttgctgttcttgtctcgtttgtctgcgcccttggccctgtgctagttctgtgcatcagcaccgtggctctgtgcagtggtgtggccaggctcaggaccgcctgggagtggtgcccatttgcatctccacagtgaagtctgtgtgccgcggacatgaggtgtgcccgggggtgcccaagaggcgctggtgcccccagccgctggcagtcatgggcccgtccgcgtgtctgctgtccccactggactggacattctcatggacaggagcattttgttccctgtactgctctccaagagcgatttccagcagggaccagtgcctgtgcctgtagccgtagcagtgacgatggtgacacacccaggtgtcccttcatggagatgaactcagtgacttcccacaagaagccactggctacggctctcatcgttcttgttctttggatgaagaggctgagtcactggccatgtggctgggattggtccccagaggctccccagccgcaggccagggaccagccatggtgcctctgctcgagagtaaagtgtacagtttttgcagccaccagagatgcagcgagatgcctcgtgctgggtgggggtgggggccgaggctccatggcggttaccatttcatttgctgtgctttatctgctgtgccttgtttctccccggccctaggcggaaggtgctctaccagcgtgcacccaggaatatccaccgccatgtgatcctctctgagatcaaggaagccgtcgctgccctgcccccggtaagggagaaaggctgaaatgggagctctgtgtaagccggtcacatgcacgtcccttctgctccgggcggtccacatgcaggcgtgcgtggtgcgggctccctcagcagcccagccccgccacggcaggggcagggtctagtgcagagggctcctcctttcctggcagcccgggttcggatgcttgttgttttgagagagaaatcctttggggctcagagcacaagctgagtcgtcaccgtggtgagctgctccatccgtggtcttgtgagcgcgtggtgcggctgctgggggattctctgtagtcgtggggtgtagtcctgctctgacgcctcctgtgctggaggtgccgtttctgtctcaaaacctaaggagtttgtactgttgttaagggataagatagaacgagtgagaaaaccagcaagtcagagggtcgcaggaccgtggaccgtccactggggacagcttagtgcctcctggtttaacttcagctgctctgcgggcccttatgaccggcatggctggctttgtctggggctgtgagcttctgactctcctcagtagagtggcagcacgtggcactgtgcaacccgagggcagctcagg

SEQ ID NO: 91645 - DNA, 30 bp, Homo sapiens; identical to SEQ ID NO: 29817
  chr16:89973701-89973731
  hypo

SEQ ID NO: 91646 - DNA, 30 bp, Homo sapiens
  chr16:89977637-89977667
  hypo
tgggactgagcgtccgcagaggtgaccgaa

SEQ ID NO: 91647 - DNA, 240 bp, Homo sapiens
  chr16:89985960-89986200
  hypo
ctcctgctggaggccggtgcactggtggcccgggctgcggtgctgcagcagctggacaatgtcattgacgtgatcacctgcagctccatgctgtccagcctctgcttcctgggcgccatcgccgtggaccgctacatctccatcttctacgcactgcgctaccacagcatcgtgaccctgccgcgggcgcggcgagccgttgcggccatctgggtggccagtgtcgtcttcagcacgctc

SEQ ID NO: 91648 - DNA, 43 bp, Homo sapiens
  chr16:90037834-90037877
  hypo
tgtccttgttgctgggagctgcgctgttcatcttgaagtgggg

SEQ ID NO: 91649 - DNA, 31 bp, Homo sapiens; identical to SEQ ID NO: 29819
  chr16:90039697-90039728
  hypo

SEQ ID NO: 91650 - DNA, 67 bp, Homo sapiens
  chr16:90044786-90044853
  hypo
gaggagggaaaactggcgtctctctcactttctctatatcgtcttgacagtacggttgcttttcttg

SEQ ID NO: 91651 - DNA, 81 bp, Homo sapiens
  chr16:90053008-90053089
  hypo
ccaccgcccccggccgacacttggtcattctaagcttccagtggctctcatattatcttggatttccgctgcatcgtatgt

SEQ ID NO: 91652 - DNA, 190 bp, Homo sapiens
  chr16:90053306-90053496
  hypo
tgtaaaaattggaatcgtagtggtgtgggcggtttctttgagacgtatgtttaagcacagagtaggggctgcagtggggtgagagaaggtgaggcaggtagaattctggagattctctctcagattctagtggcagggcccgaagtgcctgtggtctcctgctggatggagctcccggatgtcatctggg

SEQ ID NO: 91653 - DNA, 136 bp, Homo sapiens; identical to SEQ ID NO: 29822
  chr16:90059131-90059267
  hypo

SEQ ID NO: 91654 - DNA, 464 bp, Homo sapiens
  chr16:90066581-90067045
  hypo
ggtggagaagctgtacggcgaggcaagcgcccagctccttgatgacgaggtccggcacctcgtcagtgccacctacaggtgcaccctggacctgctgacacggtgccgggagcatgtggagaaggtgagtgtggcctctgcccagacaggtcgtgggtcccatgttgagtcacggtcatgccacacccgaaggccacacccgtccttcagcttgcttaggtttgggctgtgatcatgtcctcagagccgtctgacaggtgggccgttgtttccaggtgggccagcggctcctggagaaggaagtactggagaaggcagacatggtggagctgctgggcccccggcccttctcggagaagtctacctatgaggagtttgtagagggcgtgggcagcctggaggaggacacatcccttcccgaggggctgaagggttggaaccgcggacaggaggaggaagatgtg

SEQ ID NO: 91655 - DNA, 30 bp, Homo sapiens; identical to SEQ ID NO: 29824
  chr16:90068350-90068380
  hypo

SEQ ID NO: 91656 - DNA, 462 bp, Homo sapiens
  chr16:90072248-90072710
  hypo
tagccactaccaaacccgcctctggcttctgagcttggcagcacaggaaaacgcggaggttggagcacccccaggagttcctggagtggctgtcacaggcctgggtccccttcaccccaaggccgccgtgggccactccattcctcagcacgttcctggcagtgactccgtgacgctgtcttcctgactcggggcccaggaacgagctggacgtaaggccactgggctgtgcttgtgctggggctcccagaggcatccgggggccccgtgtgtcccccaggaaagccggctggtctccaagtgaggcgaagacccgtgcccagcagacaaggccggtctcggggctggcagagagctgcccccagggtgtgtgtcaggaggtgacggctggagcctcgtgggcgggtgaagtgtgtctgctgggtcagcactgcccagatctgccatcgtgttcggacccca

SEQ ID NO: 91657 - DNA, 30 bp, Homo sapiens; identical to SEQ ID NO: 29826
  chr16:90088473-90088503
  hypo

SEQ ID NO: 91658 - DNA, 31 bp, Homo sapiens
  chr16:90104654-90104685
  hypo
ctggtcctcacactggcgagttttatgggct

SEQ ID NO: 91659 - DNA, 31 bp, Homo sapiens; identical to SEQ ID NO: 29827
  chr16:90109400-90109431
  hypo

SEQ ID NO: 91660 - DNA, 207 bp, Homo sapiens
  chr16:90109928-90110135
  hypo
cctcacccatggtgtccctgtcgctcccttccctgggtgccgcacgtccagcctgtgtccaggcctactccctggtctcacctccgaccacagtcggcggcaccttctcagagtgccccgcactcacctgggggttggggcagtgccgcgctgtgctgcctgtcttcgcgccactgttgtcccaccgaatggacagctttgcaggtg

SEQ ID NO: 91661 - DNA, 30 bp, Homo sapiens
  chr17:422466-422496
  hypo
ccccgagggcggtgcggggagccgctggcg

SEQ ID NO: 91662 - DNA, 30 bp, Homo sapiens
  chr17:507567-507597
  hypo
gggtaggaagaagtcgagcctactctcgct

SEQ ID NO: 91663 - DNA, 153 bp, Homo sapiens; identical to SEQ ID NO: 29828
  chr17:512962-513115
  hypo

SEQ ID NO: 91664 - DNA, 30 bp, Homo sapiens
  chr17:523201-523231
  hypo
aggcgtgcgccaccacgccccgctagtatt

SEQ ID NO: 91665 - DNA, 384 bp, Homo sapiens; identical to SEQ ID NO: 53513
  chr17:523543-523927
  hypo

SEQ ID NO: 91666 - DNA, 266 bp, Homo sapiens
  chr17:536282-536548
  hypo
aggccagtactcaacagtggccgtgagtgtactaggagctcaagaactgtgcgtgtacttgaatgcaagggcagaaaggagaagcggctaggatggaaagcggctatggatcataccccacgatcaatcacgccccgcaatggatcaggccccgcaatcacgtcccgcaatcgatcacgccccacaatcgatcgcatgctgtgcatcccccacgagctgcctgatgttggtggccaccgtgcaccggccagccttgcagagagaga

SEQ ID NO: 91667 - DNA, 30 bp, Homo sapiens
  chr17:556417-556447
  hypo
agctgccggatctgcggaatccccatatac

SEQ ID NO: 91668 - DNA, 30 bp, Homo sapiens; identical to SEQ ID NO: 29831
  chr17:568197-568227
  hypo

SEQ ID NO: 91669 - DNA, 28 bp, Homo sapiens
  chr17:570989-571017
  hypo
tgggccagcaccagtccgtggcctgttg

SEQ ID NO: 91670 - DNA, 468 bp, Homo sapiens; identical to SEQ ID NO: 10887
  chr17:576351-576819
  hypo

SEQ ID NO: 91671 - DNA, 50 bp, Homo sapiens; identical to SEQ ID NO: 29834
  chr17:591790-591840
  hypo

SEQ ID NO: 91672 - DNA, 30 bp, Homo sapiens; identical to SEQ ID NO: 29835
  chr17:597090-597120
  hypo

SEQ ID NO: 91673 - DNA, 153 bp, Homo sapiens; identical to SEQ ID NO: 29836
  chr17:597508-597661
  hypo

SEQ ID NO: 91674 - DNA, 30 bp, Homo sapiens
  chr17:621524-621554
  hypo
actcaagctaggtgccgggaattcagcagt

SEQ ID NO: 91675 - DNA, 279 bp, Homo sapiens
  chr17:633610-633889
  hypo
ggcctttacttgctattttctatacatgaaacatcggttgttttgttttcaactcataaagatgccttacagcttcttgtgtaggggagactggttcccaccactcaaaggtgccagcatactcactgccaagctgctgctccctttaaggagggaaggcagggaggacttgtaaccacctgtcactctctggaaacactggcgctggaggtcactgtgataaatgcttaggaaagagacagtggactgcacagagtcgttttcctggagagaatggag

SEQ ID NO: 91676 - DNA, 264 bp, Homo sapiens
  chr17:634275-634539
  hypo
agttcctacatcactaactgccgtgttaaagtaatttaactggcacctaacagaaatcatctgccactttgtaaaagtcatagactcataagaatctagagctggaagaccgttaaagagctagtgatccagcctccctctcatttcacggaccagcaaatcgtggcccagagagccgagcccagctgttccgaagtcctcatacgggattttggtcagcattttgcatgacggtgatctgaggagacccgtcatacctttcat

SEQ ID NO: 91677 - DNA, 79 bp, Homo sapiens; identical to SEQ ID NO: 53515
  chr17:635475-635554
  hypo

SEQ ID NO: 91678 - DNA, 138 bp, Homo sapiens; identical to SEQ ID NO: 53516
  chr17:635797-635935
  hypo

SEQ ID NO: 91679 - DNA, 299 bp, Homo sapiens; identical to SEQ ID NO: 53517
  chr17:635959-636258
  hypo

SEQ ID NO: 91680 - DNA, 30 bp, Homo sapiens
  chr17:660240-660270
  hypo
tctggcaacacggccgttctaagtcttccc

SEQ ID NO: 91681 - DNA, 258 bp, Homo sapiens; identical to SEQ ID NO: 29839
  chr17:662965-663223
  hypo

SEQ ID NO: 91682 - DNA, 1 bp, Homo sapiens
  chr17:664091-664092
  hypo
t

SEQ ID NO: 91683 - DNA, 18 bp, Homo sapiens
  chr17:664151-664169
  hypo
ccccgtctcatatacata

SEQ ID NO: 91684 - DNA, 37 bp, Homo sapiens
  chr17:684165-684202
  hypo
ttttttttttttgagacggagttttgctttcgtcatc

SEQ ID NO: 91685 - DNA, 442 bp, Homo sapiens; identical to SEQ ID NO: 29842
  chr17:692537-692979
  hypo

SEQ ID NO: 91686 - DNA, 465 bp, Homo sapiens
  chr17:693366-693831
  hypo
gacttgcgctaacaagctgtgcgggggagggtgggaggccatgcagtcactgcgaggccccaccctcggccactctcccagcccgcccgtggtgaggagccgcccctgggaaaggccaggcgtcgcaggctgctgccggggttgcctcttgcctcattgcctcatctctagagtgttccctgctccggtgcagactgaacgttgaagcccaatgggtcttgatgaaactatagatctgattctgtcactgctttgcttaagatccctcaatggcatgatactgtcttctgataaaatgccaaactcctcagcttcccataggaggcctcctccgtgttggcctgcccacctcccacctcctgtgccactacagccccagcgctgattgaccggctcactgcctgtgccaccacacccccacccgctgattggctggctcacctcctgtgccgccacagcgccacc

SEQ ID NO: 91687 - DNA, 30 bp, Homo sapiens; identical to SEQ ID NO: 29845
  chr17:694247-694277
  hypo

SEQ ID NO: 91688 - DNA, 20 bp, Homo sapiens
  chr17:696346-696366
  hypo
ttaagcactgctggccaggt

SEQ ID NO: 91689 - DNA, 30 bp, Homo sapiens
  chr17:708395-708425
  hypo
ctcccggcagtcctcgtcgttcagcacctc

SEQ ID NO: 91690 - DNA, 30 bp, Homo sapiens
  chr17:722822-722852
  hypo
ccccactgcaccaacgctgaatcctcccac

SEQ ID NO: 91691 - DNA, 104 bp, Homo sapiens
  chr17:730081-730185
  hypo
gttggctgtgcacacggtcagaggtccagggtctaagaggaataaagctgacaaaatgtcaatgcaaagcccagggctggaagccaagcgtgggcggcctctgt

SEQ ID NO: 91692 - DNA, 34 bp, Homo sapiens
  chr17:744616-744650
  hypo
acggtgcatctcacgccggcgagcaggtcccccc

SEQ ID NO: 91693 - DNA, 31 bp, Homo sapiens
  chr17:761089-761120
  hypo
ttttgtagttttctttcggtccttccaatta

SEQ ID NO: 91694 - DNA, 35 bp, Homo sapiens
  chr17:797965-798000
  hypo
ctggtgtccgcagggacgggcggagacatgacgga

SEQ ID NO: 91695 - DNA, 30 bp, Homo sapiens; identical to SEQ ID NO: 53519
  chr17:800577-800607
  hypo

SEQ ID NO: 91696 - DNA, 97 bp, Homo sapiens
  chr17:817715-817812
  hypo
aagattctttttaaggcgagaagtatgcaatgagacagtagaggcaaggtcaaaggcaaacaccgaggtctgtaattggtagcgcaagcaaggttcc

SEQ ID NO: 91697 - DNA, 31 bp, Homo sapiens
  chr17:830915-830946
  hypo
agacagcgatggtttgcgggaggagcagaag

SEQ ID NO: 91698 - DNA, 151 bp, Homo sapiens
  chr17:835882-836033
  hypo
tcagcagcaaggacccatcaccggaagaggcttctgagaggcaccgacttttgccatcagtgggcagcgagtgggctgtgtggtccccggacaagcagctgagtgggtggggagtgccttgttgtggccggcttcgcataagtcatctgcg

SEQ ID NO: 91699 - DNA, 90 bp, Homo sapiens; identical to SEQ ID NO: 29846
  chr17:836152-836242
  hypo

SEQ ID NO: 91700 - DNA, 30 bp, Homo sapiens; identical to SEQ ID NO: 29847
  chr17:851918-851948
  hypo

SEQ ID NO: 91701 - DNA, 33 bp, Homo sapiens; identical to SEQ ID NO: 29848
  chr17:864607-864640
  hypo

SEQ ID NO: 91702 - DNA, 85 bp, Homo sapiens; identical to SEQ ID NO: 53522
  chr17:883201-883286
  hypo

SEQ ID NO: 91703 - DNA, 30 bp, Homo sapiens; identical to SEQ ID NO: 29849
  chr17:909967-909997
  hypo

SEQ ID NO: 91704 - DNA, 30 bp, Homo sapiens; identical to SEQ ID NO: 29850
  chr17:910376-910406
  hypo

SEQ ID NO: 91705 - DNA, 460 bp, Homo sapiens; identical to SEQ ID NO: 29851
  chr17:915564-916024
  hypo

SEQ ID NO: 91706 - DNA, 30 bp, Homo sapiens; identical to SEQ ID NO: 29852
  chr17:916257-916287
  hypo

SEQ ID NO: 91707 - DNA, 31 bp, Homo sapiens
  chr17:926392-926423
  hypo
gcctctgccggccccacgtccactccagcgc

SEQ ID NO: 91708 - DNA, 30 bp, Homo sapiens; identical to SEQ ID NO: 29853
  chr17:927442-927472
  hypo

SEQ ID NO: 91709 - DNA, 31 bp, Homo sapiens; identical to SEQ ID NO: 29854
  chr17:930920-930951
  hypo

SEQ ID NO: 91710 - DNA, 30 bp, Homo sapiens
  chr17:933164-933194
  hypo
agcgctgacccctgcgtccacgacacggac

SEQ ID NO: 91711 - DNA, 565 bp, Homo sapiens
  chr17:951704-952269
  hypo
atgcttcctgctaaaaagcatcgttcagctccctgttgtagacggagccatcgcagcctgcgcctggatcacctcttgggccacggtcaagaagctcggcgcccagctgcgcctggatcacgtccggggccacggtcaagaagctcggcgcccagctgcgcctggatcacgtccggggccacggtcaagaagctcggcgcccagctgccgcctggatcacctccggggccacggtcaagaagctcggcgcccagctgcgcctggatcacgtccggggccacggtcaagaagctcggcgcccagctgcgcctggatcacgtccggggccacggtcaagaagctcggcgcccagctgtgcctggatcacgtctgcggccactgtcaagaagctcagcacgcccaacgcccgaggctcaacctcagtacgggtcagttaccgtctcccttcatttcatggtcacagaatctacccccaaaccagaccacttgcggcacagcacgaggccacacgaggtaccagacgggagtgtgagcggctccaccacgtcacgccttttcccgctcc

SEQ ID NO: 91712 - DNA, 67 bp, Homo sapiens
  chr17:952744-952811
  hypo
acccagagtccccacccgaagccacagactcccaacgcagctgagtaaggtccggccaccctaacaa

SEQ ID NO: 91713 - DNA, 30 bp, Homo sapiens
  chr17:973169-973199
  hypo
cccctcccccgccccgtgcccctggactca

SEQ ID NO: 91714 - DNA, 30 bp, Homo sapiens
  chr17:975851-975881
  hypo
acctcccccttgggcgttgtcactgcagtc

SEQ ID NO: 91715 - DNA, 82 bp, Homo sapiens
  chr17:995005-995087
  hypo
ggatcttgtagaagatggtctcgatctgctggatggtgagcacgggctgggaggtggtggcggtggccttcaggggtttcat

SEQ ID NO: 91716 - DNA, 66 bp, Homo sapiens
  chr17:1043598-1043664
  hypo
tgtggatctgggaggccggcaaccctgaaccagggaactggccagcggaagcgaggctgccacttc

SEQ ID NO: 91717 - DNA, 138 bp, Homo sapiens
  chr17:1094002-1094140
  hypo
agcagtttctaggtgggtgcccgtcccgtctgctctcgccgtctgctgggattccgagaaagaagatgctggttgctcacggtatgctcaacccctctgccccacggcgctgcaggcgaagctgtgagtcaccagctc

SEQ ID NO: 91718 - DNA, 31 bp, Homo sapiens; identical to SEQ ID NO: 29855
  chr17:1112805-1112836
  hypo

SEQ ID NO: 91719 - DNA, 54 bp, Homo sapiens
  chr17:1208266-1208320
  hypo
cacagtctgcgaggccgtcctgggcagacctgcccgctacgccttgttggggtc

SEQ ID NO: 91720 - DNA, 99 bp, Homo sapiens
  chr17:1244356-1244455
  hypo
tctaatacactggtgaatatgcgtattgcagcttttccaagacacgtattaatcatgaaacatgtactgacctcgaaaatgtggccgcgcgcggtagct

SEQ ID NO: 91721 - DNA, 95 bp, Homo sapiens
  chr17:1244960-1245055
  hypo
gctcacctgattattattgagcgcttacgtgtgagattccagacattgcttagtaacgagcacagtgcctggtgcaaagctggtacgcaatgtta

SEQ ID NO: 91722 - DNA, 16 bp, Homo sapiens
  chr17:1330599-1330615
  hypo
aatcttggccgggcgc

SEQ ID NO: 91723 - DNA, 18 bp, Homo sapiens
  chr17:1331214-1331232
  hypo
ccgcgcccagcctatatt

SEQ ID NO: 91724 - DNA, 209 bp, Homo sapiens
  chr17:1352362-1352571
  hypo
gcatgtagctcttcactacctcgagggagtatcacaaactattaccaccctagcttctgtcccacgccttcaaaatgaagcacgttttatgcccccctccacccactagcgcaacaggtcggatgagcaggtaacaggaggcaccatcttatttccaagtgctggacccgaggtcctttcacacttacggatgcactccacccaggcac

SEQ ID NO: 91725 - DNA, 236 bp, Homo sapiens
  chr17:1375238-1375474
  hypo
gccggctctgcgcacgcgcaggttttccaacagccccaggtacttcacctggtggcggatcagcacctcgtcaaagcggcctggggtagggggagcgccgtggtcagcgggctggcgctgacggcctgtctcctgcaggggaggcccggccccgaagtcccccgtgggaggggcctaccgggctgtttggcatcattgggtttgatgcagcggacgtaggcgggctccttagactg

SEQ ID NO: 91726 - DNA, 82 bp, Homo sapiens; identical to SEQ ID NO: 29858
  chr17:1376038-1376120
  hypo

SEQ ID NO: 91727 - DNA, 25 bp, Homo sapiens
  chr17:1380149-1380174
  hypo
ggggttgaagtctcactctgtcgct

SEQ ID NO: 91728 - DNA, 30 bp, Homo sapiens
  chr17:1381749-1381779
  hypo
gaaccgtggtgctccgccagctggggctct

SEQ ID NO: 91729 - DNA, 236 bp, Homo sapiens
  chr17:1386237-1386473
  hypo
gcagcagcctcttggtggcctcggtcttgcctgccccgctctccccagagatcatcacagcctggtcccgacgctccgtgcgcagtgctcggtacacagtgtccgccacggcaaacctggggcggaggctcgtcagggagtttggggaggggggccaagcagagccccacgagagtcccgctcccacatctgggtggagtcctcttgtgggagtcgaatacacccttgaggatggg

SEQ ID NO: 91730 - DNA, 136 bp, Homo sapiens; identical to SEQ ID NO: 29860
  chr17:1386689-1386825
  hypo

SEQ ID NO: 91731 - DNA, 117 bp, Homo sapiens
  chr17:1387480-1387597
  hypo
gatgaaggcggcctcgctggtgaagttctccagcagcacgaaatcctgcacccccacccggtcacgggcggtgagcgcactctccatggtcacccgaaccccgtcactgcccagggc

SEQ ID NO: 91732 - DNA, 30 bp, Homo sapiens; identical to SEQ ID NO: 29862
  chr17:1398390-1398420
  hypo

SEQ ID NO: 91733 - DNA, 295 bp, Homo sapiens
  chr17:1407884-1408179
  hypo
gttccaatcctcgtgcgatgaagaagcctgttactccttacttatatattctttgagactcagttgctttccttgtaaacaggcaataataacactgtttacctaacgaggacatggtaggaactgatacaggcaaagccttggcgcacacctgcacgccaatcacaatgagctgttatttggaaataggtgcgtgcctcctccttagcgggagtctgccttcctcaccgtgccatcctttttcctcttgctggcaaggatgaccatgaatcctgaggtacgatgggcttgagga

SEQ ID NO: 91734 - DNA, 30 bp, Homo sapiens; identical to SEQ ID NO: 29864
  chr17:1409913-1409943
  hypo

SEQ ID NO: 91735 - DNA, 165 bp, Homo sapiens; identical to SEQ ID NO: 29865
  chr17:1410271-1410436
  hypo

SEQ ID NO: 91736 - DNA, 296 bp, Homo sapiens
  chr17:1412247-1412543
  hypo
agcgtggggcagagggcggggaacagtctgcagacccaggctcactcgtggcggtcagcgtggggcagagggcggggaacagtctgcagacccaggctcactcgtgggggtcagcgtggggcagagggcggggagcggtctgcagacccaggctcactcgtgggggttagtgggggttagcgtggggcagagggcggggaacggtctgccagacccaggctcactcgtggtccaggatgtttgggatgtctcgcccctcacaattctgcatctccaggatccggtcaaagtgctcc

SEQ ID NO: 91737 - DNA, 68 bp, Homo sapiens
  chr17:1437269-1437337
  hypo
gtagcagacactgacgtgttcccagaactacaggatggtgctctcggtgaagcgccccagcaaaacag

SEQ ID NO: 91738 - DNA, 30 bp, Homo sapiens
  chr17:1438598-1438628
  hypo
catacccatgggtacgcaagtaacaacggg

SEQ ID NO: 91739 - DNA, 31 bp, Homo sapiens; identical to SEQ ID NO: 29867
  chr17:1446392-1446423
  hypo

SEQ ID NO: 91740 - DNA, 31 bp, Homo sapiens; identical to SEQ ID NO: 29868
  chr17:1446645-1446676
  hypo

SEQ ID NO: 91741 - DNA, 66 bp, Homo sapiens; identical to SEQ ID NO: 29869
  chr17:1451500-1451566
  hypo

SEQ ID NO: 91742 - DNA, 325 bp, Homo sapiens; identical to SEQ ID NO: 29870
  chr17:1454050-1454375
  hypo

SEQ ID NO: 91743 - DNA, 225 bp, Homo sapiens
  chr17:1462628-1462853
  hypo
aacctattggagaagccgtggccggcaaagtctccgccagggccagaaccccacagaggtgccagggctagcagcacttctccaggtgccgtgcatgtgaaatgcagaccaagagccacccccagttcaaagctgtgaggcgggagagctaagacaaaaactcttggttttacccatacaagtccagccagtttccaagcttagacgttcggtccccagaccctt

SEQ ID NO: 91744 - DNA, 27 bp, Homo sapiens
  chr17:1473751-1473778
  hypo
tcctgggcactgaaaacgatgctacca

SEQ ID NO: 91745 - DNA, 30 bp, Homo sapiens
  chr17:1505288-1505318
  hypo
gagactaccccagacgtgtaccgccctccc

SEQ ID NO: 91746 - DNA, 198 bp, Homo sapiens
  chr17:1523770-1523968
  hypo
ttcccatcttttaccctggagcgactacacacaggggcagggaccttgcacgtaggccaacagccttctcgtcttaaacaaatccctgccgatggggccaccaggccctctgcccggccgcctgcctccaggccgtcccgtccagcaacagaggcgcctggggccggggaggtgagcggcttctccttctgcttgtgg

SEQ ID NO: 91747 - DNA, 30 bp, Homo sapiens
  chr17:1540156-1540186
  hypo
gactccagatcaggcgcctgcaggacctga

SEQ ID NO: 91748 - DNA, 31 bp, Homo sapiens
  chr17:1544545-1544576
  hypo
cagattctcataggagcgccagtcctattgt

SEQ ID NO: 91749 - DNA, 29 bp, Homo sapiens
  chr17:1545292-1545321
  hypo
ggcgtgagccaccgcgcccagccagggat

SEQ ID NO: 91750 - DNA, 24 bp, Homo sapiens
  chr17:1545975-1545999
  hypo
acctggggcaacaaagcgttttta

SEQ ID NO: 91751 - DNA, 144 bp, Homo sapiens
  chr17:1546298-1546442
  hypo
ttttcccctttctcgttcctctgctttgtatgttttttgagaggagcaccgcgaagccctgacccctcctcccggcgccccgccgcggccacctgtctccgctccgccccgcccgctcacaggtctccgcgcagcctcgctcac

SEQ ID NO: 91752 - DNA, 184 bp, Homo sapiens; identical to SEQ ID NO: 10899
  chr17:1588081-1588265
  hypo

SEQ ID NO: 91753 - DNA, 604 bp, Homo sapiens; identical to SEQ ID NO: 53542
  chr17:1613423-1614027
  hypo

SEQ ID NO: 91754 - DNA, 30 bp, Homo sapiens; identical to SEQ ID NO: 29875
  chr17:1659909-1659939
  hypo

SEQ ID NO: 91755 - DNA, 18 bp, Homo sapiens
  chr17:1683761-1683779
  hypo
cagcgtctcaaagtactg

SEQ ID NO: 91756 - DNA, 121 bp, Homo sapiens
  chr17:1694043-1694164
  hypo
cgtgatccacccaccttggcctcccaaagtgctggctaagccatgcccatccctggtgcatttaaactgggattcaagtaaagaaaaaagattcatgccgggcgcggtggctcacgcctgt

SEQ ID NO: 91757 - DNA, 157 bp, Homo sapiens; identical to SEQ ID NO: 29877
  chr17:1694899-1695056
  hypo

SEQ ID NO: 91758 - DNA, 125 bp, Homo sapiens
  chr17:1703924-1704049
  hypo
ggagaatatcttttgtggcaacgagacagcgaccttttaaaggatctacgcataagccgatggatgatgaggcattggaaagttgttcattctcctccctcagcgctgcatcctcaagggttttg

SEQ ID NO: 91759 - DNA, 205 bp, Homo sapiens; identical to SEQ ID NO: 29878
  chr17:1756125-1756330
  hypo

SEQ ID NO: 91760 - DNA, 298 bp, Homo sapiens; identical to SEQ ID NO: 29879
  chr17:1775555-1775853
  hypo

SEQ ID NO: 91761 - DNA, 30 bp, Homo sapiens; identical to SEQ ID NO: 29880
  chr17:1783893-1783923
  hypo

SEQ ID NO: 91762 - DNA, 108 bp, Homo sapiens; identical to SEQ ID NO: 29881
  chr17:1784181-1784289
  hypo

SEQ ID NO: 91763 - DNA, 30 bp, Homo sapiens; identical to SEQ ID NO: 29882
  chr17:1784834-1784864
  hypo

SEQ ID NO: 91764 - DNA, 30 bp, Homo sapiens
  chr17:1787063-1787093
  hypo
tcacatcaagcgctcgtcatcgttattcgt

SEQ ID NO: 91765 - DNA, 162 bp, Homo sapiens; identical to SEQ ID NO: 29883
  chr17:1792140-1792302
  hypo

SEQ ID NO: 91766 - DNA, 30 bp, Homo sapiens
  chr17:1799254-1799284
  hypo
ggcatgagccaccgcgcccagcttagttat

SEQ ID NO: 91767 - DNA, 467 bp, Homo sapiens
  chr17:1801622-1802089
  hypo
tctaacaccaaccacgctttgaaatgtgtacagacagtgagctggtaagaaaacagtaattatgctagtgggcctttcagtcagcaaaagcatgctcgctctgtgtgttcctaatcatattaattatctatccggtggctgcaacacaccgcctgccattggccgcacatctcgccgtcgtaccccggcagtgcggcggtcactctgcagccagaggacctgctgttcatcactgcacatgccgcctgcggaggcttttggatatggggagtgatggtgtcctgtctgtctcccccctcggtgtctgccgttgacataggggccagccagccctagacgggatgacttccgttcctgaggacagacacagagggactcctgctcagcctcactaattgtttagacacattccttcctacccttctctagtctcaggagatggtaactgggtcgcatttcagtctctg

SEQ ID NO: 91768 - DNA, 59 bp, Homo sapiens
  chr17:1802317-1802376
  hypo
gtaccaggacaggacgtgtccagggaacgctgacacctgtcctcgcgccttctcagtgg

SEQ ID NO: 91769 - DNA, 14 bp, Homo sapiens
  chr17:1809509-1809523
  hypo
ggattggctggccg

SEQ ID NO: 91770 - DNA, 30 bp, Homo sapiens; identical to SEQ ID NO: 29886
  chr17:1833078-1833108
  hypo

SEQ ID NO: 91771 - DNA, 53 bp, Homo sapiens
  chr17:1837749-1837802
  hypo
aatcatgatctgtgcgggcaagggaagtgccacgaaacggagcaccagggtgt

SEQ ID NO: 91772 - DNA, 30 bp, Homo sapiens
  chr17:1841193-1841223
  hypo
tcttggctgagctccgtgagagccttgtcc

SEQ ID NO: 91773 - DNA, 30 bp, Homo sapiens; identical to SEQ ID NO: 29888
  chr17:1843094-1843124
  hypo

SEQ ID NO: 91774 - DNA, 31 bp, Homo sapiens
  chr17:1849980-1850011
  hypo
tgaatgtgtgtgtgcacggggtctgtgtgtg

SEQ ID NO: 91775 - DNA, 30 bp, Homo sapiens; identical to SEQ ID NO: 29889
  chr17:1850524-1850554
  hypo

SEQ ID NO: 91776 - DNA, 31 bp, Homo sapiens; identical to SEQ ID NO: 29890
  chr17:1890004-1890035
  hypo

SEQ ID NO: 91777 - DNA, 31 bp, Homo sapiens
  chr17:1918318-1918349
  hypo
agggcactgtggaatccggccgctgtgtaag

SEQ ID NO: 91778 - DNA, 175 bp, Homo sapiens; identical to SEQ ID NO: 29891
  chr17:1938561-1938736
  hypo

SEQ ID NO: 91779 - DNA, 54 bp, Homo sapiens; identical to SEQ ID NO: 29892
  chr17:1940205-1940259
  hypo

SEQ ID NO: 91780 - DNA, 176 bp, Homo sapiens
  chr17:1990504-1990680
  hypo
acagtaggctcacagtaaagacggacagcccagggaagctcggctgggtaccacagagagcagatgaagcaggcatgacccatgttctctaagacagtggaaataaatgagcaccgctgtgcaggctggctgcccaggaaagtgcggcacacaccggtcaactgtgtgctctgtgg

SEQ ID NO: 91781 - DNA, 61 bp, Homo sapiens; identical to SEQ ID NO: 53554
  chr17:2014967-2015028
  hypo

SEQ ID NO: 91782 - DNA, 32 bp, Homo sapiens; identical to SEQ ID NO: 29894
  chr17:2015468-2015500
  hypo

SEQ ID NO: 91783 - DNA, 23 bp, Homo sapiens
  chr17:2049867-2049890
  hypo
tctgccactcaggctacagtgcg

SEQ ID NO: 91784 - DNA, 51 bp, Homo sapiens
  chr17:2135565-2135616
  hypo
ttagatcaataggtcaccctccggcaccacgtcaaccaatgagatgactac

SEQ ID NO: 91785 - DNA, 149 bp, Homo sapiens
  chr17:2146554-2146703
  hypo
taagcacactttctagtccaccgcccgtggagcagagtttcttccagtggaaccaagcctttccgcttctcaaaaaagttaactacaacggtatgtggaaactgacatagcccctacctccactaagagagccttctaggccgggcgtg

SEQ ID NO: 91786 - DNA, 157 bp, Homo sapiens; identical to SEQ ID NO: 29896
  chr17:2182383-2182540
  hypo

SEQ ID NO: 91787 - DNA, 121 bp, Homo sapiens; identical to SEQ ID NO: 29897
  chr17:2207846-2207967
  hypo

SEQ ID NO: 91788 - DNA, 37 bp, Homo sapiens; identical to SEQ ID NO: 29898
  chr17:2208026-2208063
  hypo

SEQ ID NO: 91789 - DNA, 77 bp, Homo sapiens
  chr17:2220982-2221059
  hypo
cggagactccatctcaaaaaaataaaaaataaagatgcacatgagatatttaagaggtaaatcgataagatttggtg

SEQ ID NO: 91790 - DNA, 39 bp, Homo sapiens
  chr17:2263306-2263345
  hypo
tcatggagaggagcatgtggacgcttaagccaaagattt

SEQ ID NO: 91791 - DNA, 30 bp, Homo sapiens
  chr17:2265495-2265525
  hypo
atgggtacgcacggcgctcatcgagaaagt

SEQ ID NO: 91792 - DNA, 30 bp, Homo sapiens
  chr17:2268533-2268563
  hypo
aacgaagcagcattcgctccgtggatatgg

SEQ ID NO: 91793 - DNA, 30 bp, Homo sapiens
  chr17:2276186-2276216
  hypo
acccagctgggccacggtgactgtggaggc

SEQ ID NO: 91794 - DNA, 422 bp, Homo sapiens
  chr17:2278749-2279171
  hypo
gagtgcaggtggagccgccctgtgttcaccccccaggtgtttatctcagtggatgatctggaacccccggagccccaggaccctgaagattccagaccaaaacctgagcaggaagcaggacccgggactccgggcaccgccgtggtggagcagcagcattccgtggagttcgactctccagactcaggactgccctcctctcgcaattactccgtggcctcgggcatccagtcaagcctagatgaggggcagagcgtgggcttcgaagaggaggacggcggtggggaggaaggctccagtgggcccggccctgcagctcacactttgagggagccccaggatcccagccaggagaagcctcaggccggagaactggaggccggagaggagcttgcggctgtgtgtgcggctgcctacactgt

SEQ ID NO: 91795 - DNA, 276 bp, Homo sapiens
  chr17:2291778-2292054
  hypo
actaggcagtgacacgccctcgccccatctcatctccaggactcgcctccctcctggctgctggtctgcacctgctccccgaccccctaggcgactctccactgtgcccgcctgtgacgcttctcgacgaggctccatttacatgctgctccccatcaccctgcccactcccctccagactccctgggctgaacaacccccaagcctaggaacgtgccccctgtacttgggctaaaccgatccatgagaaatggctgttgcgtcccatgacccagc

SEQ ID NO: 91796 - DNA, 30 bp, Homo sapiens
  chr17:2298222-2298252
  hypo
ttcagggtccccagcgtgggtgggggcggc

SEQ ID NO: 91797 - DNA, 51 bp, Homo sapiens; identical to SEQ ID NO: 53557
  chr17:2302238-2302289
  hypo

SEQ ID NO: 91798 - DNA, 30 bp, Homo sapiens
  chr17:2309070-2309100
  hypo
ggacccagagggcgccgccatgctcatttc

SEQ ID NO: 91799 - DNA, 30 bp, Homo sapiens
  chr17:2309695-2309725
  hypo
gggcgcggtggctcacgccctaagttccag

SEQ ID NO: 91800 - DNA, 30 bp, Homo sapiens; identical to SEQ ID NO: 29902
  chr17:2324846-2324876
  hypo

SEQ ID NO: 91801 - DNA, 203 bp, Homo sapiens; identical to SEQ ID NO: 29903
  chr17:2326290-2326493
  hypo

SEQ ID NO: 91802 - DNA, 40 bp, Homo sapiens; identical to SEQ ID NO: 29904
  chr17:2326809-2326849
  hypo

SEQ ID NO: 91803 - DNA, 17 bp, Homo sapiens
  chr17:2388074-2388091
  hypo
accgcgcctggtgacca

SEQ ID NO: 91804 - DNA, 121 bp, Homo sapiens; identical to SEQ ID NO: 29906
  chr17:2388545-2388666
  hypo

SEQ ID NO: 91805 - DNA, 22 bp, Homo sapiens
  chr17:2495604-2495626
  hypo
tcagaaccccaaatctcgcttt

SEQ ID NO: 91806 - DNA, 30 bp, Homo sapiens
  chr17:2515377-2515407
  hypo
gtatcttggtgtgacgatttaaaaggtatt

SEQ ID NO: 91807 - DNA, 27 bp, Homo sapiens
  chr17:2529854-2529881
  hypo
cccccccccccgaggcggagtcttgtt

SEQ ID NO: 91808 - DNA, 30 bp, Homo sapiens
  chr17:2588049-2588079
  hypo
tagtgttagcaagtcgtcccgggctgggga

SEQ ID NO: 91809 - DNA, 204 bp, Homo sapiens
  chr17:2595623-2595827
  hypo
ggccttggcgtttggacgggcggcccctcacctgagggccaccttgagggccttgggcccgtggtacttggtgctgacggccagcgcgttctccaggaagcgcagcgacaggtcgtactccatcaccccgtgcagcaccagcccgatgttgttctgggggcaggcggtggggggccctggtcagctcccggtcccctgggatgg

SEQ ID NO: 91810 - DNA, 30 bp, Homo sapiens
  chr17:2598506-2598536
  hypo
ggcacctgtaagtacgtcttgaagatgtgc

SEQ ID NO: 91811 - DNA, 236 bp, Homo sapiens
  chr17:2599037-2599273
  hypo
gaagcagaggtgcccgcttgggggcactacttgacccccagccccgtgtcctgaggcttggaggccacggtgttgggggagcacccagcatcctggaaccagacacagagcctgcgggaggaggaggaggatgggcagcccccactgagctctggccccgtcccccagccatgccaccatccagggctcagaagactggattaccagctgccagcccacacggtgggctcagcagg

SEQ ID NO: 91812 - DNA, 30 bp, Homo sapiens
  chr17:2599808-2599838
  hypo
tcacctcccggctccgagggtctgctgtgg

SEQ ID NO: 91813 - DNA, 30 bp, Homo sapiens
  chr17:2601964-2601994
  hypo
accgcggaggcaaccgggcctgccttggaa

SEQ ID NO: 91814 - DNA, 86 bp, Homo sapiens
  chr17:2603724-2603810
  hypo
ggcagctccctcgtcgtctgcagctcctcattccagtctcgggtctgcagagagatcagggagggaaaaacgagctcagcctgtgc

SEQ ID NO: 91815 - DNA, 35 bp, Homo sapiens
  chr17:2616131-2616166
  hypo
cttctcggccgggcggtgcagcggctcacgcctgt

SEQ ID NO: 91816 - DNA, 30 bp, Homo sapiens
  chr17:2619563-2619593
  hypo
gtcagcatggggatcggtgaccagtttgtc

SEQ ID NO: 91817 - DNA, 31 bp, Homo sapiens
  chr17:2624047-2624078
  hypo
cgaggtgtggtggggccgagtgcccaatgca

SEQ ID NO: 91818 - DNA, 222 bp, Homo sapiens; identical to SEQ ID NO: 53561
  chr17:2627361-2627583
  hypo

SEQ ID NO: 91819 - DNA, 538 bp, Homo sapiens; identical to SEQ ID NO: 53562
  chr17:2627798-2628336
  hypo

SEQ ID NO: 91820 - DNA, 19 bp, Homo sapiens
  chr17:2671310-2671329
  hypo
ccaccgtacgtggccaatt

SEQ ID NO: 91821 - DNA, 30 bp, Homo sapiens
  chr17:2682719-2682749
  hypo
ctaaagacccctcccggtcataggacctgg

SEQ ID NO: 91822 - DNA, 45 bp, Homo sapiens; identical to SEQ ID NO: 29912
  chr17:2684789-2684834
  hypo

SEQ ID NO: 91823 - DNA, 241 bp, Homo sapiens; identical to SEQ ID NO: 29913
  chr17:2684893-2685134
  hypo

SEQ ID NO: 91824 - DNA, 45 bp, Homo sapiens; identical to SEQ ID NO: 29914
  chr17:2685193-2685238
  hypo

SEQ ID NO: 91825 - DNA, 96 bp, Homo sapiens
  chr17:2708583-2708679
  hypo
ggagctccttgaaggagcagccggaacgggaggatctgagctgggagcctccgagacactcctcttgtcctttatttcttttttgagaccgcgtct

SEQ ID NO: 91826 - DNA, 974 bp, Homo sapiens; identical to SEQ ID NO: 53566
  chr17:2756326-2757300
  hypo

SEQ ID NO: 91827 - DNA, 30 bp, Homo sapiens
  chr17:2825512-2825542
  hypo
aggacagaagggattcgctagtccctcagg

SEQ ID NO: 91828 - DNA, 3 bp, Homo sapiens
  chr17:2830753-2830756
  hypo
tct

SEQ ID NO: 91829 - DNA, 146 bp, Homo sapiens
  chr17:2868865-2869011
  hypo
cctggggaacttgatcctgtccgtcaagtgcgaggaagcagaggggatcgagtacctccgggtcatccttaggtagggctgttgcgctgcttgaggccacttctcttccaggcagggctctcatcggtggtgtgggggctgggatg

SEQ ID NO: 91830 - DNA, 288 bp, Homo sapiens
  chr17:2908448-2908736
  hypo
gcagatgagaggctgcggatggccccacaccgtccggccccacttctaggaacagggtcagggcctgtgctggcgatgctcacaggagtattttgtttgtgttctgggaagaggaggagggagaaggtgagtagctttgtaaggagcgtggctcccgtaggggcagcgctcgtctcttccctccaggtccgtaccatgactctgtttcactcaggtctctgtcactgcgcgggaagatgtgcccacctttggtccacctctgcccagtccccccgttttccagaaggt

SEQ ID NO: 91831 - DNA, 30 bp, Homo sapiens
  chr17:2909113-2909143
  hypo
aaatgatccgctgtcggaagggacttttca

SEQ ID NO: 91832 - DNA, 30 bp, Homo sapiens
  chr17:3374889-3374919
  hypo
aagaggctccagtccgagttgagacgctct

SEQ ID NO: 91833 - DNA, 36 bp, Homo sapiens
  chr17:3375580-3375616
  hypo
ggaaggcggagagccgtcagcgaggcagcgccgggg

SEQ ID NO: 91834 - DNA, 87 bp, Homo sapiens
  chr17:3474664-3474751
  hypo
tatgtgctcatggccgacgtcaggagctgccacagcgcccgggtcctggggggatgaggaacccggcaaggcgtggggaacctgcaa

SEQ ID NO: 91835 - DNA, 163 bp, Homo sapiens
  chr17:3486361-3486524
  hypo
tgcccctgtaatcaaatactccgttccgtggagtggctggagtgtctactttcaagcttgcctgccttgggcctgtggagacgccctgagcaccctcccgccccgcggtgactgactgaagggctctcatcttcacctctgcgtctctcagctccccaagtag

SEQ ID NO: 91836 - DNA, 39 bp, Homo sapiens
  chr17:3500359-3500398
  hypo
gcactagcaggagtcgctgtggacgcccttcggcactca

SEQ ID NO: 91837 - DNA, 30 bp, Homo sapiens
  chr17:3525615-3525645
  hypo
acaacataggcagccgtgatcaagtccagc

SEQ ID NO: 91838 - DNA, 30 bp, Homo sapiens
  chr17:3558793-3558823
  hypo
cggagagcctgggtcggattcccgtgctgg

SEQ ID NO: 91839 - DNA, 30 bp, Homo sapiens
  chr17:3560591-3560621
  hypo
gggcccgcgtgcaggcggagacacctgtat

SEQ ID NO: 91840 - DNA, 122 bp, Homo sapiens
  chr17:3560846-3560968
  hypo
cagggaaaggcaaggcgaggggacagattcctgagatcctcaggctgctgccgggtcgtgggacgagtcagtacctggctgggagaggcaccaggccaccagagttccgaccccacgtctcc

SEQ ID NO: 91841 - DNA, 30 bp, Homo sapiens
  chr17:3561597-3561627
  hypo
gagcccagcgggagcggggcggtggggagg

SEQ ID NO: 91842 - DNA, 130 bp, Homo sapiens
  chr17:3562848-3562978
  hypo
gccccagggatgtggaggagacggggaaggccgcatcggccccgcctctgctggagctgtgaggtgtggggggtgcggggcctttgcttgctgtacatgcagatgagacgcctacccccaggaccaccca

SEQ ID NO: 91843 - DNA, 30 bp, Homo sapiens
  chr17:3566606-3566636
  hypo
gcggtgtggacacacgagggctggggggca

SEQ ID NO: 91844 - DNA, 31 bp, Homo sapiens; identical to SEQ ID NO: 29919
  chr17:3576583-3576614
  hypo

SEQ ID NO: 91845 - DNA, 44 bp, Homo sapiens
  chr17:3577298-3577342
  hypo
ccccatttaaaagccagtttccggccaggcgcggtggctcatgc

SEQ ID NO: 91846 - DNA, 43 bp, Homo sapiens
  chr17:3585001-3585044
  hypo
ctcctcccactgctgccgaggccgaatccggttctgtagagca

SEQ ID NO: 91847 - DNA, 141 bp, Homo sapiens; identical to SEQ ID NO: 53573
  chr17:3599031-3599172
  hypo

SEQ ID NO: 91848 - DNA, 429 bp, Homo sapiens; identical to SEQ ID NO: 53574
  chr17:3599244-3599673
  hypo

SEQ ID NO: 91849 - DNA, 191 bp, Homo sapiens
  chr17:3653521-3653712
  hypo
cctgtgcccacaaccacggtgctggctccctccctcagtgcctaatgtctgcatggagctatttagagcagggcaaatgggtgaggctgggcctgggaccccagaaagcaggacagaaccctaccggaacacaaccgcctggcccagagtgcccacggtgatgtcggcaaggccgtcgccactaatatcaa

SEQ ID NO: 91850 - DNA, 100 bp, Homo sapiens
  chr17:3660154-3660254
  hypo
gaagagctgaggttcagggagatgatgggagttgctcagagaaaccacatgaagatgggacagaggccgggctggagcataggctcgggcctcctgcggt

SEQ ID NO: 91851 - DNA, 68 bp, Homo sapiens; identical to SEQ ID NO: 29921
  chr17:3664935-3665003
  hypo

SEQ ID NO: 91852 - DNA, 159 bp, Homo sapiens
  chr17:3711311-3711470
  hypo
aatcagttgtttgggccattccgctggcccctccttcactccatgagcatagacaagagggcgggcccgggcaagctcatgcctctgctgcacctgcggcctgcctcagttcccaagctccccaaaagtgatcttctcgcctaaatgtggttctaacac

SEQ ID NO: 91853 - DNA, 30 bp, Homo sapiens
  chr17:3714243-3714273
  hypo
catgccagctgggacgctgaccacaagaca

SEQ ID NO: 91854 - DNA, 610 bp, Homo sapiens; identical to SEQ ID NO: 29922
  chr17:3716184-3716794
  hypo

SEQ ID NO: 91855 - DNA, 74 bp, Homo sapiens; identical to SEQ ID NO: 29923
  chr17:3721568-3721642
  hypo

SEQ ID NO: 91856 - DNA, 251 bp, Homo sapiens
  chr17:3741552-3741803
  hypo
cacagaatgaaaggcatgagccgtatcagaggcaagccgcctcaaggaatgctctcgggaccagaggtcgacaggtgtgataaagctatgacgccctcgcggtagagttgtgagagagactcacaggtatgcttgcgcccggctgtgcaggcacatgaaggtcaagccacacctggccttcacaggacttctcctcaaacagaaaccccgcccatgagggaagcaagggcgtgtttctgacttgaactggt

SEQ ID NO: 91857 - DNA, 31 bp, Homo sapiens
  chr17:3755003-3755034
  hypo
ttcctgagaccacacacgctctgctgtgatc

SEQ ID NO: 91858 - DNA, 30 bp, Homo sapiens; identical to SEQ ID NO: 29924
  chr17:3769713-3769743
  hypo

SEQ ID NO: 91859 - DNA, 156 bp, Homo sapiens; identical to SEQ ID NO: 53575
  chr17:3778890-3779046
  hypo

SEQ ID NO: 91860 - DNA, 31 bp, Homo sapiens
  chr17:3793475-3793506
  hypo
tgccctccgcagctcccgcccccacccggga

SEQ ID NO: 91861 - DNA, 30 bp, Homo sapiens
  chr17:3831294-3831324
  hypo
agcagctctgacagcgagacgatgctgtgt

SEQ ID NO: 91862 - DNA, 30 bp, Homo sapiens
  chr17:3833858-3833888
  hypo
tgggctggggatcccgggaggggtgcgggg

SEQ ID NO: 91863 - DNA, 176 bp, Homo sapiens
  chr17:3844262-3844438
  hypo
accatagcagtgatctcgttaaaggactgcaggttctccacgatgcgggacttgtgtgcgggctccacgcgggcgaagcagcgggcggtgcggcaggcctggcgctgctgctcggggctgaggtcatcaaactcgcggcccgtgtaggccttgcccgccacgtcttccgtgtcccc

SEQ ID NO: 91864 - DNA, 35 bp, Homo sapiens; identical to SEQ ID NO: 29926
  chr17:3844906-3844941
  hypo

SEQ ID NO: 91865 - DNA, 30 bp, Homo sapiens
  chr17:3850754-3850784
  hypo
agggtctccacggacggcaggcttcgcacg

SEQ ID NO: 91866 - DNA, 30 bp, Homo sapiens
  chr17:3851095-3851125
  hypo
caggccggtggccacggccacacccaccgc

SEQ ID NO: 91867 - DNA, 243 bp, Homo sapiens; identical to SEQ ID NO: 10917
  chr17:3866999-3867242
  hypo

SEQ ID NO: 91868 - DNA, 92 bp, Homo sapiens; identical to SEQ ID NO: 29928
  chr17:3884834-3884926
  hypo

SEQ ID NO: 91869 - DNA, 30 bp, Homo sapiens
  chr17:3885531-3885561
  hypo
ccggccgcgggctgcggctcaggataggaa

SEQ ID NO: 91870 - DNA, 31 bp, Homo sapiens; identical to SEQ ID NO: 29929
  chr17:3904902-3904933
  hypo

SEQ ID NO: 91871 - DNA, 30 bp, Homo sapiens; identical to SEQ ID NO: 29930
  chr17:3912355-3912385
  hypo

SEQ ID NO: 91872 - DNA, 29 bp, Homo sapiens
  chr17:3921576-3921605
  hypo
ttttttttagagatgacgtgttggagcta

SEQ ID NO: 91873 - DNA, 28 bp, Homo sapiens
  chr17:3921664-3921692
  hypo
tccctagtagctgcgattacaggctcat

SEQ ID NO: 91874 - DNA, 559 bp, Homo sapiens
  chr17:3980236-3980795
  hypo
aagggattccaaaatcgctctcatgcttgccagaaactggcccacatctaccgaaacaaagaaaataattaatatattatatagtagaaatgtcacatgcttggttatcaccacagacaagaataaagagactccagaagctgcagagggggttccacagcgaagaccacaaggccagcaagtgccgtcctaatgcattcctcctggaggaagaagcagtgcgaatttcagtacaagactcacttttaaagggatttttttttgtcttttgatgaagtagaggagcacttgtagaagtgaaattccatgcctgactaacccagctgtcagcctctccttttccttctgtttacaatgagcccgtgcattaggtgtaccaatctaacaggccaagctctaggtggcaggacccaatataagtgttttcgtcacagctgctgggaccaagtttgatggaactacattttccacgtataatttgtcagcacccgttgggtttcatataattttctgtgagtttacagaacatgaatctaattattctcggtaatcagcaatg

SEQ ID NO: 91875 - DNA, 31 bp, Homo sapiens
  chr17:3982361-3982392
  hypo
ggtatatacaattatgcgaaattctcttggg

SEQ ID NO: 91876 - DNA, 116 bp, Homo sapiens
  chr17:3985687-3985803
  hypo
aagatttgagttatccgacaattaaaaagaacgatcagcttacctaaaatacgtgcacagtgaacggaaagtgagctgcagggactgcttgtgctcctgctcggtgacattcttct

SEQ ID NO: 91877 - DNA, 32 bp, Homo sapiens; identical to SEQ ID NO: 29934
  chr17:4039290-4039322
  hypo

SEQ ID NO: 91878 - DNA, 32 bp, Homo sapiens; identical to SEQ ID NO: 29935
  chr17:4039621-4039653
  hypo

SEQ ID NO: 91879 - DNA, 346 bp, Homo sapiens
  chr17:4048746-4049092
  hypo
aggcagttttcgttgcgctgccctgctgcgtgctgtgggagctgtcgttggatgtttgcacaagtgtgggcataaaaccttcgatgtctggagtgctttttatttttcagtgtgctctgctgtttactgagctcccgtgttctggtattcattgaccatctttatttaccactacctaccttgtgtcaggggctgtggaatccaagatgtctgcaacatgctccccaccgcccacacagtctagttgggaagcagttatgtccacgtattcgttcattcagtattttatttctcattgagatgtaattcacgtgatgtaaagtccttttaacgtatacaattcagt

SEQ ID NO: 91880 - DNA, 289 bp, Homo sapiens
  chr17:4074111-4074400
  hypo
gcggcacaagttggcgttccctttcatgtatgccaggagcagcactggaaaacaaaagcacgcgcagggctacttcccacccggcccagcccggcagccacagacggagggcggaggacagccaagggcagaacagaccgctggcaggaaatctgttcacaaagtccccacagacatacgggggccccgaggctctggagagaactgtggacaacctgtagcatcttccaataaaggatgtggccacgagccaaagaattctagagcagctgccgtttccaagacacag

SEQ ID NO: 91881 - DNA, 86 bp, Homo sapiens; identical to SEQ ID NO: 29936
  chr17:4076473-4076559
  hypo

SEQ ID NO: 91882 - DNA, 30 bp, Homo sapiens
  chr17:4098163-4098193
  hypo
tcctcatagtatgccgttcagtttctaaat

SEQ ID NO: 91883 - DNA, 80 bp, Homo sapiens
  chr17:4145029-4145109
  hypo
caatgctatcaccatgactcccgcactctttgctgaagataagcagtgaacgagagacacaaatcttgcctcgggcccgg

SEQ ID NO: 91884 - DNA, 46 bp, Homo sapiens; identical to SEQ ID NO: 29937
  chr17:4161525-4161571
  hypo

SEQ ID NO: 91885 - DNA, 17 bp, Homo sapiens
  chr17:4170522-4170539
  hypo
agcccttgtcttttgag

SEQ ID NO: 91886 - DNA, 30 bp, Homo sapiens; identical to SEQ ID NO: 29938
  chr17:4170806-4170836
  hypo

SEQ ID NO: 91887 - DNA, 142 bp, Homo sapiens
  chr17:4215640-4215782
  hypo
ataaactgcaggggatgtaaccgaatgaattctagaaaatattaacaactgagaaacaaaaaacaggaggcggcacaaggtaaactgagaaaggtaagccagtgaaatagggaggccgaggcaggcggatcacgaggtcaag

SEQ ID NO: 91888 - DNA, 143 bp, Homo sapiens; identical to SEQ ID NO: 29940
  chr17:4236550-4236693
  hypo

SEQ ID NO: 91889 - DNA, 121 bp, Homo sapiens
  chr17:4250032-4250153
  hypo
cttacattttcaatagaagtcaagaaaggaagacagaggaaacttaaactctgtgattcattcaaaatatatttgctgagtatctatatatgcccagtattgtgttatgtgctagtgatat

SEQ ID NO: 91890 - DNA, 25 bp, Homo sapiens
  chr17:4256508-4256533
  hypo
tctcgaaaacaacaacaacaacaac

SEQ ID NO: 91891 - DNA, 37 bp, Homo sapiens; identical to SEQ ID NO: 29942
  chr17:4273439-4273476
  hypo

SEQ ID NO: 91892 - DNA, 38 bp, Homo sapiens
  chr17:4289152-4289190
  hypo
tgggattacaggtgtgagacaccgcgcctggccattca

SEQ ID NO: 91893 - DNA, 31 bp, Homo sapiens
  chr17:4350841-4350872
  hypo
ggagccagcccagtgccggggagctggcgtg

SEQ ID NO: 91894 - DNA, 378 bp, Homo sapiens; identical to SEQ ID NO: 29943
  chr17:4392107-4392485
  hypo

SEQ ID NO: 91895 - DNA, 256 bp, Homo sapiens
  chr17:4446257-4446513
  hypo
cctgtgtctcatgcacgcagccctcagcagtgttgcccttcaagacccggagcaggtagagagaggcgttgaagtggtagagggcggtgggggagtcgggctggcggccagcctgctgcaccaaccgctccacctgggcgtgcagggcccctgcgcgctcacccaagtcgtggcagtagcgccgggcacggcacaggtggtgcctgtgggtggtgaggacgagagctggtcagaacattctcggtccaccctgctc

SEQ ID NO: 91896 - DNA, 30 bp, Homo sapiens; identical to SEQ ID NO: 29944
  chr17:4456054-4456084
  hypo

SEQ ID NO: 91897 - DNA, 88 bp, Homo sapiens
  chr17:4461985-4462073
  hypo
aggtctgaggtgggagcgagggctgcgctgcgaagcacagctgccagttgtgggttggtggctcgggccccagcgcccaggggtgtcc

SEQ ID NO: 91898 - DNA, 562 bp, Homo sapiens; identical to SEQ ID NO: 29946
  chr17:4500075-4500637
  hypo

SEQ ID NO: 91899 - DNA, 30 bp, Homo sapiens
  chr17:4608971-4609001
  hypo
aactgtagtgaacacgctaatacctctatg

SEQ ID NO: 91900 - DNA, 31 bp, Homo sapiens; identical to SEQ ID NO: 10922
  chr17:4642753-4642784
  hypo

SEQ ID NO: 91901 - DNA, 123 bp, Homo sapiens
  chr17:4643850-4643973
  hypo
ttgtgtctggataccgggatgagttccttgatttcactgcccttctcttcggctggttccgaaagtttgtggcagagcgtggagctgtagggactagccttgagggccgctgccggcagctgg

SEQ ID NO: 91902 - DNA, 43 bp, Homo sapiens; identical to SEQ ID NO: 53589
  chr17:4647511-4647554
  hypo

SEQ ID NO: 91903 - DNA, 26 bp, Homo sapiens
  chr17:4685354-4685380
  hypo
gacaggtgcagaaacagagtccgaat

SEQ ID NO: 91904 - DNA, 265 bp, Homo sapiens
  chr17:4685679-4685944
  hypo
aatacattttaacaacccgactggagcagatttcgataatgcgtgggggctggcgctgagcgtcgtcacccacaggtggggagattgggccttacctccccttccacaccacatccagatgctgcgctcggtcttctcctcggcgttcggggtgcttggtgccatctactgcctctcggtgtctggagctgggctccgaaatggacccagatgcttaatgaacggcgagtggggctaccacttcgaagacaccgcgtaaggttta

SEQ ID NO: 91905 - DNA, 31 bp, Homo sapiens; identical to SEQ ID NO: 29948
  chr17:4713424-4713455
  hypo

SEQ ID NO: 91906 - DNA, 22 bp, Homo sapiens
  chr17:4758213-4758235
  hypo
agtccaggctgggcgcggtggc

SEQ ID NO: 91907 - DNA, 30 bp, Homo sapiens; identical to SEQ ID NO: 29949
  chr17:4764489-4764519
  hypo

SEQ ID NO: 91908 - DNA, 26 bp, Homo sapiens
  chr17:4769466-4769492
  hypo
ttagaaagtttttgggccagacgcgg

SEQ ID NO: 91909 - DNA, 542 bp, Homo sapiens
  chr17:4795535-4796077
  hypo
cctgggtagggcaacgcctgggtgaggtctgagggcagcctagggagtagggggggcacagggactttaccagcctacccgcctgggggtgggaaagccccagccccatcacctcagcgcccccccgccgccccctcggcacccctgtgctcccttcacagacctcgcagcaactccgcctggcaaatctatctgcaaaggcgggcagagcggggcaccccaaagcctccagggccccctgctcagccccctggcccgcccaacgcctctaggtaatagagttgtcccccaactcactctcacctctcacttctgccacccgcttccctggtgatggctccctctgcagtgcagctcagcaccccagagaagggagcaccgtgcctccctgaccctgactctgcccccccaacagtaaccccgacctcaggaggagcgaccctggctgggaacgctcggacagcgtccttccagcctctcacgggcacctcccccaggctggctcactggagcggaaccgcgtgggaggtatgtgagccagg

SEQ ID NO: 91910 - DNA, 30 bp, Homo sapiens; identical to SEQ ID NO: 29951
  chr17:4799588-4799618
  hypo

SEQ ID NO: 91911 - DNA, 30 bp, Homo sapiens
  chr17:4799817-4799847
  hypo
tcaacacgtacgggcgcatcattaaggatg

SEQ ID NO: 91912 - DNA, 329 bp, Homo sapiens; identical to SEQ ID NO: 10924
  chr17:4853392-4853721
  hypo

SEQ ID NO: 91913 - DNA, 30 bp, Homo sapiens; identical to SEQ ID NO: 29953
  chr17:4863100-4863130
  hypo

SEQ ID NO: 91914 - DNA, 29 bp, Homo sapiens
  chr17:4869516-4869545
  hypo
tccgccgcggcctcccaaagtggtggtat

SEQ ID NO: 91915 - DNA, 31 bp, Homo sapiens
  chr17:4880336-4880367
  hypo
agggctgggtactcaccgtccagtgacagcc

SEQ ID NO: 91916 - DNA, 359 bp, Homo sapiens; identical to SEQ ID NO: 53598
  chr17:4890352-4890711
  hypo

SEQ ID NO: 91917 - DNA, 31 bp, Homo sapiens; identical to SEQ ID NO: 10926
  chr17:4900808-4900839
  hypo

SEQ ID NO: 91918 - DNA, 119 bp, Homo sapiens; identical to SEQ ID NO: 10927
  chr17:4901560-4901679
  hypo

SEQ ID NO: 91919 - DNA, 158 bp, Homo sapiens
  chr17:4916075-4916233
  hypo
atgggggtacagaggcagcgtcgcctgtacgccatccagagtactgcccagcaagggcagggctgttataatggaaacaagtcaggagaaggtgctgtgggagaagggaatgggccgggttttcagcacagagcagcgtaacaatcactcaggtgttc

SEQ ID NO: 91920 - DNA, 30 bp, Homo sapiens
  chr17:4925731-4925761
  hypo
tatggcaagccagacggccccggagacgcc

SEQ ID NO: 91921 - DNA, 32 bp, Homo sapiens
  chr17:4928166-4928198
  hypo
cctgtctcttccttcagggtgcgcagcccgat

SEQ ID NO: 91922 - DNA, 31 bp, Homo sapiens
  chr17:4950114-4950145
  hypo
tgtagattggccaggcgcggtggctcacacc

SEQ ID NO: 91923 - DNA, 170 bp, Homo sapiens; identical to SEQ ID NO: 10928
  chr17:4981378-4981548
  hypo

SEQ ID NO: 91924 - DNA, 89 bp, Homo sapiens; identical to SEQ ID NO: 10929
  chr17:4981951-4982040
  hypo

SEQ ID NO: 91925 - DNA, 534 bp, Homo sapiens; identical to SEQ ID NO: 53604
  chr17:5000401-5000935
  hypo

SEQ ID NO: 91926 - DNA, 31 bp, Homo sapiens
  chr17:5033401-5033432
  hypo
ggcatatggggacaaccggattctctgtcca

SEQ ID NO: 91927 - DNA, 31 bp, Homo sapiens
  chr17:5033760-5033791
  hypo
gaggcctcttccagtgcgccctggtcaaagg

SEQ ID NO: 91928 - DNA, 31 bp, Homo sapiens
  chr17:5080633-5080664
  hypo
agacactaggagggttcggtgaaatacttag

SEQ ID NO: 91929 - DNA, 31 bp, Homo sapiens
  chr17:5131038-5131069
  hypo
tcccccattcccatggcgctttcttcacaat

SEQ ID NO: 91930 - DNA, 36 bp, Homo sapiens
  chr17:5168547-5168583
  hypo
aggcaattaagaatatctggccgggcaaagtagctc

SEQ ID NO: 91931 - DNA, 30 bp, Homo sapiens
  chr17:5209342-5209372
  hypo
catagcgatgcttctcgacttaccatgggg

SEQ ID NO: 91932 - DNA, 30 bp, Homo sapiens
  chr17:5209628-5209658
  hypo
agatacatggtaggccgggcacggtggctc

SEQ ID NO: 91933 - DNA, 248 bp, Homo sapiens; identical to SEQ ID NO: 29960
  chr17:5269053-5269301
  hypo

SEQ ID NO: 91934 - DNA, 18 bp, Homo sapiens
  chr17:5317809-5317827
  hypo
aggccctgaagaaatttc

SEQ ID NO: 91935 - DNA, 30 bp, Homo sapiens; identical to SEQ ID NO: 29962
  chr17:5350269-5350299
  hypo

SEQ ID NO: 91936 - DNA, 32 bp, Homo sapiens
  chr17:5392346-5392378
  hypo
tagcccagtgcagattcgcaaatgcacagaga

SEQ ID NO: 91937 - DNA, 49 bp, Homo sapiens; identical to SEQ ID NO: 29964
  chr17:5404270-5404319
  hypo

SEQ ID NO: 91938 - DNA, 172 bp, Homo sapiens
  chr17:5405103-5405275
  hypo
ttcattggtactgccgcaggctgctgggcactagtatctcctggcgtctctgttgcacctgaggttccacggctggctggtgttccttcctggaatggagggagaacaatcacttggatttatttgagtcccagtagattggagaggtccactggccggctttgttagttgc

SEQ ID NO: 91939 - DNA, 164 bp, Homo sapiens
  chr17:5465215-5465379
  hypo
cagccagcagaggcaaactcccggttccccgagaaacactctgaaggcagggtgggtgactccacccaccaccgcctctcctagccatgcaggccatgtctgctagagcttccagcgcagtggtcctaattctgtctgaatccggctgaggggtgcagcctcct

SEQ ID NO: 91940 - DNA, 30 bp, Homo sapiens; identical to SEQ ID NO: 29966
  chr17:5984243-5984273
  hypo

SEQ ID NO: 91941 - DNA, 31 bp, Homo sapiens
  chr17:6011472-6011503
  hypo
ggccctgcgtcatcttcgcttgcatgggaca

SEQ ID NO: 91942 - DNA, 500 bp, Homo sapiens
  chr17:6023532-6024032
  hypo
accctgcccacttccctctcccgagcagccccccggggaccggcagccctggcagggccagcccccgactctgcatctctcctgtcctcactctagagtggccggactttgtcaacagctacgcctcgtggtggtcctcgcacgtcctggactggctcaagtacgggaagcggctgctggtggtgcactacgaggagctgcggcgcagcctggtgcccacgttacgggagatggtggccttcctcaacgtgtctgtgagcgaggagcggctgctctgcgtggagaacaacaaggagggcagcttccggcggcgcggccggcgctcccacgaccctgagcccttcaccccggagatgaaagacttgatcaatggctacatccggacggtggaccaagccctgcgtgaccacaactggacggggctgcccagggagtatgtgcccagatgataggcctggcccacgccgccgcccccgctgagtgacgcaatcgcaccacgg

SEQ ID NO: 91943 - DNA, 30 bp, Homo sapiens
  chr17:6339069-6339099
  hypo
agactctaagtccccgaggaccccaggcca

SEQ ID NO: 91944 - DNA, 30 bp, Homo sapiens
  chr17:6377818-6377848
  hypo
gaagtcggacacatcgaagtcaaagcggcc

SEQ ID NO: 91945 - DNA, 34 bp, Homo sapiens
  chr17:6420001-6420035
  hypo
aaaacctactcagaaacgtcgcttgaaatttcag

SEQ ID NO: 91946 - DNA, 175 bp, Homo sapiens
  chr17:6456917-6457092
  hypo
ctctgccttttctctccgtgggtgatctactggccagattttaaagggaacatctcacaggtcatggtgcagacccctcattcacaggccgggtgccacagcctccactcctggccttcagcagccctttgttcctgtgtcaccccccgccgccccaccccgccagagtgaaggc

SEQ ID NO: 91947 - DNA, 603 bp, Homo sapiens; identical to SEQ ID NO: 53620
  chr17:6459171-6459774
  hypo

SEQ ID NO: 91948 - DNA, 43 bp, Homo sapiens; identical to SEQ ID NO: 29968
  chr17:6470125-6470168
  hypo

SEQ ID NO: 91949 - DNA, 30 bp, Homo sapiens
  chr17:6482593-6482623
  hypo
tcctgacaggaaatcgccaaagatgcaaaa

SEQ ID NO: 91950 - DNA, 643 bp, Homo sapiens; identical to SEQ ID NO: 53626
  chr17:6616496-6617139
  hypo

SEQ ID NO: 91951 - DNA, 38 bp, Homo sapiens
  chr17:6755546-6755584
  hypo
aatttttttttttttttttttcgagttggagtctcgat

SEQ ID NO: 91952 - DNA, 38 bp, Homo sapiens
  chr17:6755823-6755861
  hypo
attacgccaccatgcccggcccagaatttttttttaat

SEQ ID NO: 91953 - DNA, 24 bp, Homo sapiens
  chr17:6775506-6775530
  hypo
tgcgcaatgggactgttttccttg

SEQ ID NO: 91954 - DNA, 21 bp, Homo sapiens
  chr17:6811262-6811283
  hypo
agccaccgcccctggcctcaa

SEQ ID NO: 91955 - DNA, 19 bp, Homo sapiens
  chr17:6943486-6943505
  hypo
tcttttttctttttcccga

SEQ ID NO: 91956 - DNA, 30 bp, Homo sapiens
  chr17:7044097-7044127
  hypo
gcatctggtggcaatcgcagaaataagaag

SEQ ID NO: 91957 - DNA, 31 bp, Homo sapiens
  chr17:7044663-7044694
  hypo
tgcacgtgactctcgtcgagcttgctgtctc

SEQ ID NO: 91958 - DNA, 40 bp, Homo sapiens
  chr17:7048538-7048578
  hypo
ggacaagaactccagtcgttagatctgtgaaaggaaaata

SEQ ID NO: 91959 - DNA, 160 bp, Homo sapiens
  chr17:7076076-7076236
  hypo
tcttggttgtgtgttcgttgtatctgctacctgtctatgaacactgcttctgtttgctgtaatgaatgcaaaggacaccagtgagtttcattcgaagttgttgaagcactcaacaaattcgggtggttctgccgggggcagtggctcacgcctgtaatcc

SEQ ID NO: 91960 - DNA, 65 bp, Homo sapiens; identical to SEQ ID NO: 29971
  chr17:7077089-7077154
  hypo

SEQ ID NO: 91961 - DNA, 30 bp, Homo sapiens
  chr17:7100206-7100236
  hypo
ggtggatcacaattcgcctcggttctcggg

SEQ ID NO: 91962 - DNA, 31 bp, Homo sapiens; identical to SEQ ID NO: 29972
  chr17:7112808-7112839
  hypo

SEQ ID NO: 91963 - DNA, 35 bp, Homo sapiens
  chr17:7116700-7116735
  hypo
gagccaccgcacccggcacctcctctccttttctt

SEQ ID NO: 91964 - DNA, 212 bp, Homo sapiens
  chr17:7121866-7122078
  hypo
ggcctggaagaggtcgctatgcagcactgtgaggagtgggggtgcccaccgcagcagtgggggtgccaggagccagagggctgacctgggagctagtgagatgcaaggagaattgggacagggaagatgccaacacaggaagatgaacacactgtcacttcatctccccagactgtgcccttcaccccagcccctacggaaagatttgggga

SEQ ID NO: 91965 - DNA, 30 bp, Homo sapiens
  chr17:7128542-7128572
  hypo
agcacttactgcctcgcaaataataaaaat

SEQ ID NO: 91966 - DNA, 30 bp, Homo sapiens
  chr17:7129140-7129170
  hypo
tcacacaccaggagcgcccggcccagcctg

SEQ ID NO: 91967 - DNA, 38 bp, Homo sapiens; identical to SEQ ID NO: 29973
  chr17:7136108-7136146
  hypo

SEQ ID NO: 91968 - DNA, 190 bp, Homo sapiens; identical to SEQ ID NO: 53640
  chr17:7146324-7146514
  hypo

SEQ ID NO: 91969 - DNA, 15 bp, Homo sapiens
  chr17:7146549-7146564
  hypo
cgaagcccggtttct

SEQ ID NO: 91970 - DNA, 30 bp, Homo sapiens
  chr17:7187914-7187944
  hypo
gcagccgtacccaccggcagcccctgatca

SEQ ID NO: 91971 - DNA, 86 bp, Homo sapiens; identical to SEQ ID NO: 29975
  chr17:7188330-7188416
  hypo

SEQ ID NO: 91972 - DNA, 57 bp, Homo sapiens
  chr17:7192898-7192955
  hypo
cctgctgccgtctccgctggaagtaggggcggtttcgtgggcgctggggctcaggcc

SEQ ID NO: 91973 - DNA, 204 bp, Homo sapiens; identical to SEQ ID NO: 53648
  chr17:7199819-7200023
  hypo

SEQ ID NO: 91974 - DNA, 573 bp, Homo sapiens
  chr17:7224752-7225325
  hypo
cgacgaacacccacacggctccccacctaggaccgaggtaggacaaggacggacgatgttcagcccacctctccctgccacctccactcccaacccctcccctgtccctggagccagccacttcacccccagcctctctaggttccggccatagttcatcctctggagctgcccatcacgcctcacttcacagctggataccatccaagtggtcttcgtccggagctctggcagggaaggaggcagccctgggccaccaccgcctgccccgggtcccatctcccccggtgctagtgtggtcagccccagccgcagggaacctgcccacttctcatctagctcttccactttcacctacgagacagagaaaacataagctggccctgtcgtgatgggcctcgcagcccctctgtcacatcactacggcctacctcaaagacttcctcagccctcagctccttggtactgaagacaaggccatgagcatagccagcggcacgcactgccctcgtgccatcctcctctagagtgacgttcttgccgcaagtactgtggaatcggtgagccacgcca

SEQ ID NO: 91975 - DNA, 90 bp, Homo sapiens
  chr17:7227166-7227256
  hypo
tgcgacagttgtggcggagggcggtgcggcccccgttagtgatgactgcgttactgccgtgcagctgatggaagcgcaggtcagagcccc

SEQ ID NO: 91976 - DNA, 1358 bp, Homo sapiens; identical to SEQ ID NO: 53652
  chr17:7254484-7255842
  hypo

SEQ ID NO: 91977 - DNA, 52 bp, Homo sapiens
  chr17:7292300-7292352
  hypo
cttccacctgagtagccggtccagagctgactgctggcgcatcctggagcat

SEQ ID NO: 91978 - DNA, 30 bp, Homo sapiens
  chr17:7296441-7296471
  hypo
cggccccctccctccgcccacctcctggag

SEQ ID NO: 91979 - DNA, 31 bp, Homo sapiens; identical to SEQ ID NO: 10948
  chr17:7307051-7307082
  hypo

SEQ ID NO: 91980 - DNA, 44 bp, Homo sapiens
  chr17:7318436-7318480
  hypo
agctggtggaccaggacgtgcagcctgcccggtatggggtggga

SEQ ID NO: 91981 - DNA, 34 bp, Homo sapiens
  chr17:7318915-7318949
  hypo
actacgacatgctcatcggcgtcaaccagggaga

SEQ ID NO: 91982 - DNA, 324 bp, Homo sapiens
  chr17:7320350-7320674
  hypo
ctgcacataggcctgaagccacgcgtgcgtgacaactaccgcgccaacaaggtggccttctggctggagctcgtgccccacctgcacaacctgcacacggagctcttcaccaccaccacgcgcctgcctccctacgccacgcgctggccgcctcgtccccccgctggcgccccgggcacacgccggcccccgccgcctgccaccctgcctcccgagcccgagcccgagcccggcccaagggcctatgaccgcttccccggggactcacgggactactccacggagctgagcgtcaccgtggccgtgggtgcctccctcctcttc

SEQ ID NO: 91983 - DNA, 31 bp, Homo sapiens
  chr17:7329116-7329147
  hypo
tcaacattggcatcaacgtggcaactatggt

SEQ ID NO: 91984 - DNA, 30 bp, Homo sapiens; identical to SEQ ID NO: 29981
  chr17:7330128-7330158
  hypo

SEQ ID NO: 91985 - DNA, 30 bp, Homo sapiens
  chr17:7330643-7330673
  hypo
ttgtcccactcagccggaatccagggggca

SEQ ID NO: 91986 - DNA, 519 bp, Homo sapiens; identical to SEQ ID NO: 53660
  chr17:7340251-7340770
  hypo

SEQ ID NO: 91987 - DNA, 161 bp, Homo sapiens
  chr17:7367403-7367564
  hypo
cctcagctattccatctgggacgcagcctaactcacggagccttcttctcaagcccaaatggcagaatggggaaacgacttacgaacagggacaccacgtggaaacacaaggccctgctcggaatagtgtaatgactcccggacatgcctgtgctgccaca

SEQ ID NO: 91988 - DNA, 525 bp, Homo sapiens
  chr17:7368874-7369399
  hypo
ctcccacctcagctaaccacagtgctgggattactgcagctagcctagtttcaggataactttctaggccccaagccccacccactgccgcccttgttcctatgaccgctgagtgccagcctccagccgctcccccgccagcctggatcactcacctgcgctcccccgtgtgccacacttcatgcttcgtgcggtactccgccagagcaaacactttctcacaatagcggcaggggtacttcctccgccacgagtgtacattgctgtgtctcttcagactggacagggtcacgtaggaacgctcgcaggccgcgcacacatacagcacgtggccgcccaccaccttcaccacgtgctcggggccccctcggaagcccactggtggaggcagggctgaggcgtccacccctgcaggaccaccagggccagcgcccccagctcccagccctgtagacccccgcgtgctggcccctcgtcggcactgggcctcatgggtctgcagccgtttgggatggatgaagcttt

SEQ ID NO: 91989 - DNA, 285 bp, Homo sapiens
  chr17:7419622-7419907
  hypo
ttggacaatgcccacctatggcggtgcaagagaaccttactcagtctaccgattaaaatgccgacctcttcaagaaacactctcactgacacacccagaaagaatgtttttccagctctctgggcgttccttaactcagtcaagttgacgcgtaccattaaccaccactgtgtgcccaggcatagttttctcatttatcccgtttgagtttccctgagatttttgattctgtaaaattgccttttagcgtatttgggaagtttttagactttttttttttttttt

SEQ ID NO: 91990 - DNA, 30 bp, Homo sapiens; identical to SEQ ID NO: 29984
  chr17:7460470-7460500
  hypo

SEQ ID NO: 91991 - DNA, 30 bp, Homo sapiens; identical to SEQ ID NO: 29985
  chr17:7466806-7466836
  hypo

SEQ ID NO: 91992 - DNA, 30 bp, Homo sapiens
  chr17:7468139-7468169
  hypo
agcacagccccctgcgagaggagcatgtga

SEQ ID NO: 91993 - DNA, 30 bp, Homo sapiens; identical to SEQ ID NO: 29986
  chr17:7480134-7480164
  hypo

SEQ ID NO: 91994 - DNA, 154 bp, Homo sapiens; identical to SEQ ID NO: 53665
  chr17:7486365-7486519
  hypo

SEQ ID NO: 91995 - DNA, 655 bp, Homo sapiens
  chr17:7491924-7492579
  hypo
ttctgggcagacagggtagagcgtgccacccacccagccctggctacccagcccgctgggcgcagcaggcatggaagccgaccccgggatggagagcccgcggccctgttggggcacgctcgggagcgggcttgcgtgctgcacggctgttttcctcttggggagtcaggccaggaaagggcagaatgagctcggcctctccttgccctgggggctgggagaggaagctgggtcacacacaggccagaagcaggggggaaacggggcatctaactaggacacagtcgcatccaggggtcagtcacctgaccctacagggcccaccaccttcagactgagatggaaacgccctctgggagaaccctgatccgccccaccctacacaggccccggaggtactgggcctgcgcccgccacaccttggccgcgagtggcctctgcttgggtgggctcccgtcctccggcatccgcccccaccaaggctccagaagaggggcgcatgggcctccgtcttcggcccgcttcccaggcactcacccatagctgccaggcaggtaggctgtcgagtagctggggggtctgtacccaaagcctctgctcggttgggtggtcgcgtaccccggcccccagagcgggccgccgctggccaggttgc

SEQ ID NO: 91996 - DNA, 217 bp, Homo sapiens
  chr17:7493026-7493243
  hypo
atgccctcccctcaacgtgaagcgtcgatcctgaaaatggaaaggtcttcccagtctggagtcgttgccgaggaacttgggtccttaaaaagtgtattttatccccaagcccagagcttaaaccggagcctttgcttccaacctgttcggcacactttggggagagtcgaatgcaaaatccgctgtctggtgccccggcactgaagaggtgttctga

SEQ ID NO: 91997 - DNA, 86 bp, Homo sapiens; identical to SEQ ID NO: 29989
  chr17:7494080-7494166
  hypo

SEQ ID NO: 91998 - DNA, 31 bp, Homo sapiens; identical to SEQ ID NO: 29990
  chr17:7496152-7496183
  hypo

SEQ ID NO: 91999 - DNA, 42 bp, Homo sapiens
  chr17:7536910-7536952
  hypo
aaacatggagactggccgggcgtggtggctcacgcctgtaat

SEQ ID NO: 92000 - DNA, 17 bp, Homo sapiens
  chr17:7548679-7548696
  hypo
tccgtataaaaaacaaa

SEQ ID NO: 92001 - DNA, 30 bp, Homo sapiens
  chr17:7559129-7559159
  hypo
aacgccgccaacatcgccacagacgatgag

SEQ ID NO: 92002 - DNA, 31 bp, Homo sapiens; identical to SEQ ID NO: 29991
  chr17:7571394-7571425
  hypo

SEQ ID NO: 92003 - DNA, 166 bp, Homo sapiens; identical to SEQ ID NO: 10956
  chr17:7571718-7571884
  hypo

SEQ ID NO: 92004 - DNA, 825 bp, Homo sapiens; identical to SEQ ID NO: 10957
  chr17:7572183-7573008
  hypo

SEQ ID NO: 92005 - DNA, 112 bp, Homo sapiens; identical to SEQ ID NO: 10958
  chr17:7573921-7574033
  hypo

SEQ ID NO: 92006 - DNA, 622 bp, Homo sapiens; identical to SEQ ID NO: 10959
  chr17:7576545-7577167
  hypo

SEQ ID NO: 92007 - DNA, 122 bp, Homo sapiens; identical to SEQ ID NO: 10960
  chr17:7577495-7577617
  hypo

SEQ ID NO: 92008 - DNA, 559 bp, Homo sapiens; identical to SEQ ID NO: 10961
  chr17:7578174-7578733
  hypo

SEQ ID NO: 92009 - DNA, 692 bp, Homo sapiens; identical to SEQ ID NO: 10962
  chr17:7579248-7579940
  hypo

SEQ ID NO: 92010 - DNA, 254 bp, Homo sapiens; identical to SEQ ID NO: 53678
  chr17:7590693-7590947
  hypo

SEQ ID NO: 92011 - DNA, 30 bp, Homo sapiens
  chr17:7604970-7605000
  hypo
ccaggatgagctgacggcagcccattcgct

SEQ ID NO: 92012 - DNA, 207 bp, Homo sapiens
  chr17:7662607-7662814
  hypo
ttcctccaggactcagcgtcctgcgtttccattaaaccaacttgtttccttccctgttggctggttctcacttcccaggatgtgccctgtcttccctgaaaagttctctttttcctccctccatcccatcagattcagcagcagtggatgctgtacatgattcggctggaccgcatgatggaggatgccctgcgcctgaatgtgaag

SEQ ID NO: 92013 - DNA, 198 bp, Homo sapiens
  chr17:7690144-7690342
  hypo
ccgaggagcgtgagcggagggtgcaaggtgagcggctccccggtttcctcatcacccaccatctactcagatgagaaacccgacgagaagtggatcctgttcgatggccccgtggacacactgtggatcgagaacatgaactccgtcatggacgataacaaggtgttgaccctcatcaacggcgagcgcatcgcgatg

SEQ ID NO: 92014 - DNA, 31 bp, Homo sapiens
  chr17:7695958-7695989
  hypo
ccctgctcttccctagcgcccccttctataa

SEQ ID NO: 92015 - DNA, 31 bp, Homo sapiens
  chr17:7699939-7699970
  hypo
ttacctcttcaaccttcgagacatctccaag

SEQ ID NO: 92016 - DNA, 140 bp, Homo sapiens
  chr17:7702406-7702546
  hypo
tggcttctgtccagatccagtcgcatatcatagaccaggcccgggtggagcaggtgcctgagtcatcggacagcctcttcgcctacctcattgaacgcgtgcagaacaacctgcacatcgtgctctgcctcagccccatg

SEQ ID NO: 92017 - DNA, 177 bp, Homo sapiens
  chr17:7710675-7710852
  hypo
caggcctgggggagtgcggatgcacagacccaggtggaaggaggggatgcctggaggtgagggggttggtgggttggtgggcgactcccacagcctgactgtctccccacagctgtatgggcggctatatcgggtggtggagcccaagcgaatccgaatgaacgctgccttggctca

SEQ ID NO: 92018 - DNA, 96 bp, Homo sapiens; identical to SEQ ID NO: 30001
  chr17:7769320-7769416
  hypo

SEQ ID NO: 92019 - DNA, 36 bp, Homo sapiens; identical to SEQ ID NO: 30002
  chr17:7769715-7769751
  hypo

SEQ ID NO: 92020 - DNA, 43 bp, Homo sapiens
  chr17:7797153-7797196
  hypo
ccgagtgcctgatggacgcaagaagcttcggggaaagaaaatg

SEQ ID NO: 92021 - DNA, 31 bp, Homo sapiens
  chr17:7798327-7798358
  hypo
cacatggagtactgccgcgtatgcaaggacg

SEQ ID NO: 92022 - DNA, 185 bp, Homo sapiens
  chr17:7798624-7798809
  hypo
tttcctcctccttgtacgtgtccatcccaaagtgccccgtgctgaagggtcgagtgcagaagatcctacattggcggtggggggagccacctgtagcagtgccagcccctcaacaggcagatggaaatccagatgtcccacccccccgtcctcttcaaggcagatcagagcgagagttctttgtc

SEQ ID NO: 92023 - DNA, 102 bp, Homo sapiens
  chr17:7800248-7800350
  hypo
ttacaggcatgagccaccgtgcctgggccaatccatcctttttcatagctccctttccctgtcccattcctcctgccggcctcttcccggttccttgttgtc

SEQ ID NO: 92024 - DNA, 169 bp, Homo sapiens; identical to SEQ ID NO: 30005
  chr17:7806523-7806692
  hypo

SEQ ID NO: 92025 - DNA, 122 bp, Homo sapiens
  chr17:7807183-7807305
  hypo
aatgaggccatcgctcggctgttggaccggaaccaggatgcaactgaggacactgacgtgcagaacatgaatgagtatctcagctccttcaaggtggcacagtacgtcgtgcgggaagaaga

SEQ ID NO: 92026 - DNA, 31 bp, Homo sapiens
  chr17:7809784-7809815
  hypo
gtcctcagtcatcctcgcgcctccctcactg

SEQ ID NO: 92027 - DNA, 31 bp, Homo sapiens; identical to SEQ ID NO: 30007
  chr17:7810098-7810129
  hypo

SEQ ID NO: 92028 - DNA, 50 bp, Homo sapiens; identical to SEQ ID NO: 30008
  chr17:7811071-7811121
  hypo

SEQ ID NO: 92029 - DNA, 127 bp, Homo sapiens
  chr17:7812553-7812680
  hypo
cacgcccgcttcgccgaggccgagtgcctggccgagagccaccagcacctctccaaggagtcgctggcggggaacaagccggccaacgccgtcctgcacaagggtaagggccgcggcggccccgcgc

SEQ ID NO: 92030 - DNA, 80 bp, Homo sapiens
  chr17:7813719-7813799
  hypo
ttctttctctgtggcccgggccccagttctgaaccagctggaggagttgctgagcgacatgaaggcggacgtgacccgcc

SEQ ID NO: 92031 - DNA, 30 bp, Homo sapiens
  chr17:7832464-7832494
  hypo
tcccgaaaggaaagcggaaggggtgggctg

SEQ ID NO: 92032 - DNA, 10 bp, Homo sapiens
  chr17:7856926-7856936
  hypo
acctcgtgct

SEQ ID NO: 92033 - DNA, 19 bp, Homo sapiens
  chr17:7860533-7860552
  hypo
ccttaactggaattttaaa

SEQ ID NO: 92034 - DNA, 151 bp, Homo sapiens; identical to SEQ ID NO: 30011
  chr17:7892699-7892850
  hypo

SEQ ID NO: 92035 - DNA, 30 bp, Homo sapiens
  chr17:7917932-7917962
  hypo
caagggccggaagacgaacatcattgactc

SEQ ID NO: 92036 - DNA, 236 bp, Homo sapiens
  chr17:7951706-7951942
  hypo
cccctgggcacctatccggatgagcacttcacagaggaggcccctcggcggagcatcgccaccttccagagccgcctggcccagatctcgaggggcatccaggagcggaaccagggcctggtgctgccctacacctacctagaccctcccctcatcgagaacagcgtctccatctaaatcccaggggaacacaggcccagatgacatccctttgaccacatcgctctaggataact

SEQ ID NO: 92037 - DNA, 136 bp, Homo sapiens
  chr17:8012301-8012437
  hypo
caagcccctctctggacggcagctacctgccatttcagaagggaccccaaactcaattcataccctcaagaattccctatgctagggtgtgaaaacacctgaaatccccaggcgccatgagcgcagggaccacaat

SEQ ID NO: 92038 - DNA, 30 bp, Homo sapiens; identical to SEQ ID NO: 30012
  chr17:8045648-8045678
  hypo

SEQ ID NO: 92039 - DNA, 30 bp, Homo sapiens
  chr17:8046616-8046646
  hypo
gggaggtgggggcccggcactgctcccagg

SEQ ID NO: 92040 - DNA, 30 bp, Homo sapiens; identical to SEQ ID NO: 30013
  chr17:8053411-8053441
  hypo

SEQ ID NO: 92041 - DNA, 214 bp, Homo sapiens
  chr17:8064841-8065055
  hypo
tctgggggtgagaggcgaggatcagtaagacaaactatgataccccattcacccacctgtcctccttcctgtccccacccttaccttgaggtttttccaccagtatttgcgcttgagcttggctgcgcttgtttcaaactgggaggcccccgcctggagtgcatctgcacggtcgtccagctccgacagcttctggtctcgctccaggaccttg

SEQ ID NO: 92042 - DNA, 41 bp, Homo sapiens
  chr17:8074474-8074515
  hypo
aaaagaaaatggtggtgctgccgggcgcagtgcctcacgcc

SEQ ID NO: 92043 - DNA, 28 bp, Homo sapiens
  chr17:8104139-8104167
  hypo
gccttaaaccttgcctttggccgggtgc

SEQ ID NO: 92044 - DNA, 541 bp, Homo sapiens
  chr17:8104406-8104947
  hypo
tccagcctgggcaacagagcaagattccgtcttgagaaaaagcaaaaaccttgcctttatctcgtttgaattcttgccctcgagaaaacagaggagagaggttgctgcagagttgcaactccggagtttcccggatagctgcaggcttacccgcaggtaacagtagaagtaggagtcagcgttaaggctgtgggaaaataggtgtccttcattattgccggtgggagtgtaaactgtccaccacttagaggggcatttttggtgatatctatagaccgtttacctgcgtgtacccagcattaccacgtctttctctagatgctggtactctccattgccatgtctttcttcagatgtcccctagaggacaactagagaccatcacaaaggtgcacaggaggcactcaaaagacactggccacagtgcaaagcattggaaataatctgcatgtgcatccagtagaagagctttaaaaaaaaccctagggatatccttattaaaaattataggctgaaaggccgggcgcggtggctcacgcct

SEQ ID NO: 92045 - DNA, 30 bp, Homo sapiens
  chr17:8128711-8128741
  hypo
atcttacattggttcgtgggccatggaatg

SEQ ID NO: 92046 - DNA, 461 bp, Homo sapiens
  chr17:8138409-8138870
  hypo
tagaggggaagtcctaactgacgttcccacaccagctgctcgtacagggaggccccgtaggcttgacgggatgagtgagccccaggcttctgacgagagaagctttgaagcagaacggcgccacggaggcagggggcgagcactggccttcttgtcccccctcccactgactggagcaggtgaacatcctggagctgggggaaagcagagaaaatgaaaaagcagagatgaagaccccaactcaatgaacccaggcagagttaaccgcactttgccactgcctgggttccaggaagacggaaagcaatttctcccacgtgggctggcctcactttccattacaacccactcccgctgcggtcagccttcatctcccatgagctccactcagtcttgctgtgggctgggtggctcctggatgaacagacatggctgaggcttctcaccgggtcgcctgagat

SEQ ID NO: 92047 - DNA, 31 bp, Homo sapiens; identical to SEQ ID NO: 30018
  chr17:8139151-8139182
  hypo

SEQ ID NO: 92048 - DNA, 237 bp, Homo sapiens; identical to SEQ ID NO: 30019
  chr17:8197592-8197829
  hypo

SEQ ID NO: 92049 - DNA, 236 bp, Homo sapiens
  chr17:8296098-8296334
  hypo
gcctccctgaggtgcggctcacgcctgcttcctcaccagcagcacccagggcaggatggcggccaccacggccaccacagcgatgagcgtgatgagcagcagggcccgcgatcggcagcagaaggcgcgggcggagcggggcgccagggaggcctccgagagctctgccaggctgcggcggggcagcacgctgtcctgctcccccaggggcatcccgtggcggctgatgacaaaga

SEQ ID NO: 92050 - DNA, 236 bp, Homo sapiens
  chr17:8311455-8311691
  hypo
ctgtctcaattaattcatgaaacggtacaaactttaattaattaatgcaaacttctaagtataaaaaggttcacttgtgtaccatctgaagtgccactcatgcggactctggcacgagtgggtgagagctggcgcccacgcaggggacagaaacttgggatcccagagctagaaacaggcgactctagaactttccgtggctgagcccaaggcccgggtgaaatgcttgacccgag

SEQ ID NO: 92051 - DNA, 84 bp, Homo sapiens
  chr17:8325970-8326054
  hypo
agtgaagaagtcccgtcgcctaattttcaacggaaaatgttttccatgtaaaggccataaaaccaccttgtaattttctttttt

SEQ ID NO: 92052 - DNA, 31 bp, Homo sapiens; identical to SEQ ID NO: 30022
  chr17:8365272-8365303
  hypo

SEQ ID NO: 92053 - DNA, 88 bp, Homo sapiens
  chr17:8383727-8383815
  hypo
tggtcttgcggaagcggtcgttgagcagctccatgttgctctgctcctcttccagctcctcctccagctgtgcgatccgagcttccag

SEQ ID NO: 92054 - DNA, 418 bp, Homo sapiens
  chr17:8384349-8384767
  hypo
aaagtgaaggcctgcagtgcccgttggcgcaccccacggctcccccctgcggtgtgcagggctcagcaggactggcacgggtgcagtgcccgttagtgcacaccacggctcccacctgcggtgtgcagggctcggcaggactggcacggggtaccatggctgaggcagcccaggcccagcgagggaggagcaaaccacccgctgatgccaggtgtgtggacacctccagccttctcagcagtgcgcgtgcctgagggcgaagaacccacccccggccgtgggagactcacttgccagaggcgctgttggtgatctcgtccgccagctcatctctctcctgctcggcgtgtcggcgggctcgctcagatgaggcaagttcctaagcagtggagactgcgttaagctctggctgtgaata

SEQ ID NO: 92055 - DNA, 31 bp, Homo sapiens; identical to SEQ ID NO: 30024
  chr17:8390694-8390725
  hypo

SEQ ID NO: 92056 - DNA, 45 bp, Homo sapiens
  chr17:8409684-8409729
  hypo
tgagctcatcaatctgcgcctgcagctctgcgatctggtcctgca

SEQ ID NO: 92057 - DNA, 31 bp, Homo sapiens; identical to SEQ ID NO: 30025
  chr17:8424445-8424476
  hypo

SEQ ID NO: 92058 - DNA, 159 bp, Homo sapiens; identical to SEQ ID NO: 30026
  chr17:8438421-8438580
  hypo

SEQ ID NO: 92059 - DNA, 30 bp, Homo sapiens
  chr17:8449168-8449198
  hypo
ctgggtagcactgtccgcctggattcagct

SEQ ID NO: 92060 - DNA, 30 bp, Homo sapiens
  chr17:8449895-8449925
  hypo
cggccgaccttgatccggggagtcaggatg

SEQ ID NO: 92061 - DNA, 31 bp, Homo sapiens
  chr17:8471491-8471522
  hypo
tcaagtggcacgcagccgaacttgggttcag

SEQ ID NO: 92062 - DNA, 20 bp, Homo sapiens
  chr17:8474804-8474824
  hypo
aaatgccagtcaggggccag

SEQ ID NO: 92063 - DNA, 20 bp, Homo sapiens
  chr17:8475063-8475083
  hypo
agagactcatctccaaaaaa

SEQ ID NO: 92064 - DNA, 22 bp, Homo sapiens
  chr17:8567947-8567969
  hypo
cgtctcaaaaaaaaaaaacaaa

SEQ ID NO: 92065 - DNA, 49 bp, Homo sapiens; identical to SEQ ID NO: 30030
  chr17:8700776-8700825
  hypo

SEQ ID NO: 92066 - DNA, 164 bp, Homo sapiens
  chr17:8732017-8732181
  hypo
cagccctgggggcccgtcccagctgccaggcatcaagaagtccaggggccatgcacgcttcttgatgccccctttgcgctgcagcccggctcgctccatctcagggctgccgggtgcaggcagctcatcagcccccgtgggaaggtcccgctcaatgccgctgt

SEQ ID NO: 92067 - DNA, 34 bp, Homo sapiens; identical to SEQ ID NO: 53710
  chr17:8759639-8759673
  hypo

SEQ ID NO: 92068 - DNA, 31 bp, Homo sapiens
  chr17:8794407-8794438
  hypo
ggtttccaggggaaagcgtggggttcactgc

SEQ ID NO: 92069 - DNA, 30 bp, Homo sapiens
  chr17:8814769-8814799
  hypo
ctggatgcggtcctccgtgcatgtcgtggc

SEQ ID NO: 92070 - DNA, 30 bp, Homo sapiens; identical to SEQ ID NO: 30032
  chr17:8817203-8817233
  hypo

SEQ ID NO: 92071 - DNA, 634 bp, Homo sapiens; identical to SEQ ID NO: 53711
  chr17:8868814-8869448
  hypo

SEQ ID NO: 92072 - DNA, 1545 bp, Homo sapiens; identical to SEQ ID NO: 53713
  chr17:8906182-8907727
  hypo

SEQ ID NO: 92073 - DNA, 132 bp, Homo sapiens
  chr17:8977482-8977614
  hypo
tctcgcgaaccagtgcgggagggaagcctgacaggggcgaggtggcttcctgcaagacggcgtgtaagctcagcaactgcatttttctgaggaattagggatgggacgcggccagcccgctctggttggagc

SEQ ID NO: 92074 - DNA, 45 bp, Homo sapiens
  chr17:9041942-9041987
  hypo
gggtgtgctgacagccgcgtgccgggtaccgcgatgaggcagggg

SEQ ID NO: 92075 - DNA, 148 bp, Homo sapiens; identical to SEQ ID NO: 30035
  chr17:9054226-9054374
  hypo

SEQ ID NO: 92076 - DNA, 38 bp, Homo sapiens
  chr17:9065577-9065615
  hypo
tacaacaaagtgccacgggctgggggctgaaacgctag

SEQ ID NO: 92077 - DNA, 99 bp, Homo sapiens
  chr17:9065674-9065773
  hypo
ggttgctctggaggcccttctgcgtggcttgcagatggccgccctctggcaacgtcctcacgggatctctcctccgtgcacatgcgtccctgcgtctct

SEQ ID NO: 92078 - DNA, 31 bp, Homo sapiens
  chr17:9115730-9115761
  hypo
atctggactctctggccgcggagattccatg

SEQ ID NO: 92079 - DNA, 34 bp, Homo sapiens
  chr17:9122495-9122529
  hypo
ctgatggtgctgatggcgccgttgacttgagtgt

SEQ ID NO: 92080 - DNA, 276 bp, Homo sapiens
  chr17:9124885-9125161
  hypo
tgtctgcatcatactgcggggatttgacccgagtccacgtggctcaaagggaagctctctgggcatcagacaagggctgggagctccccggtgcatttccagtgttccgccaggctgtagcggggccgggagtctgcgctgtaaacggctcaccactcattcccatgcaccggaagttccgctgcccagacccatggagcagacagtcctgggggccacctgcagagattgcttgtcacctgtgacctcaggctcccttcccgggaagggtgtgtc

SEQ ID NO: 92081 - DNA, 205 bp, Homo sapiens
  chr17:9127007-9127212
  hypo
ccctcttgtgagatgacgacttgagcaggacgcccaaggctcttgtagctttcctaggctttggacctgggcaccgcagcactgtcctcctagcaaagcggtgggcccagaggagttaatgggtcgcagagggaaagccctgtgcttctcctctccccatccttccctgcacaaggcctaggggtaacctcggcaaggaggtagg

SEQ ID NO: 92082 - DNA, 192 bp, Homo sapiens; identical to SEQ ID NO: 30038
  chr17:9150997-9151189
  hypo

SEQ ID NO: 92083 - DNA, 108 bp, Homo sapiens
  chr17:9153810-9153918
  hypo
gagagcaggttttgcgtaccaaaagggtgttgggcttgcatctgtcattggcaggtgtcactgctggtggtctctttactgccatcagttggtcggccagactgcaac

SEQ ID NO: 92084 - DNA, 91 bp, Homo sapiens; identical to SEQ ID NO: 30039
  chr17:9234038-9234129
  hypo

SEQ ID NO: 92085 - DNA, 30 bp, Homo sapiens
  chr17:9234948-9234978
  hypo
aaaaaatgtgctttccgctctcaatttgca

SEQ ID NO: 92086 - DNA, 30 bp, Homo sapiens
  chr17:9235301-9235331
  hypo
gggcggctaacaatgcgggcaatgattccg

SEQ ID NO: 92087 - DNA, 32 bp, Homo sapiens; identical to SEQ ID NO: 30040
  chr17:9393282-9393314
  hypo

SEQ ID NO: 92088 - DNA, 787 bp, Homo sapiens; identical to SEQ ID NO: 53717
  chr17:9548724-9549511
  hypo

SEQ ID NO: 92089 - DNA, 39 bp, Homo sapiens
  chr17:9576952-9576991
  hypo
acctcaccgacttctacgaaagaacgcaggaatgatatg

SEQ ID NO: 92090 - DNA, 24 bp, Homo sapiens
  chr17:9617703-9617727
  hypo
gaaaaagaatgaaggccgggcaca

SEQ ID NO: 92091 - DNA, 226 bp, Homo sapiens; identical to SEQ ID NO: 30042
  chr17:9631364-9631590
  hypo

SEQ ID NO: 92092 - DNA, 75 bp, Homo sapiens
  chr17:9808107-9808182
  hypo
gagactgaccatgacgatctccagcacttcattcttgctgatggtcccgttaccgtccacgtcgtagagggagaa

SEQ ID NO: 92093 - DNA, 100 bp, Homo sapiens; identical to SEQ ID NO: 30043
  chr17:9893604-9893704
  hypo

SEQ ID NO: 92094 - DNA, 30 bp, Homo sapiens
  chr17:9963846-9963876
  hypo
ccacccagaaagcccgcagtccccaagaca

SEQ ID NO: 92095 - DNA, 268 bp, Homo sapiens; identical to SEQ ID NO: 53718
  chr17:10101179-10101447
  hypo

SEQ ID NO: 92096 - DNA, 342 bp, Homo sapiens; identical to SEQ ID NO: 53719
  chr17:10102264-10102606
  hypo

SEQ ID NO: 92097 - DNA, 31 bp, Homo sapiens; identical to SEQ ID NO: 30046
  chr17:10555783-10555814
  hypo

SEQ ID NO: 92098 - DNA, 65 bp, Homo sapiens
  chr17:10561723-10561788
  hypo
ggtctgcgtgggaccggggaggcagggctgcggtctcagggcaaaggcacgtgtatgaaacatcc

SEQ ID NO: 92099 - DNA, 30 bp, Homo sapiens
  chr17:10584076-10584106
  hypo
agacgatggagaggcggcaaagctgctggg

SEQ ID NO: 92100 - DNA, 30 bp, Homo sapiens
  chr17:10604550-10604580
  hypo
tttctattcaaaagcgaaatatttccttag

SEQ ID NO: 92101 - DNA, 802 bp, Homo sapiens; identical to SEQ ID NO: 53721
  chr17:10632843-10633645
  hypo

SEQ ID NO: 92102 - DNA, 170 bp, Homo sapiens
  chr17:11774904-11775074
  hypo
gaaatggtaggttggaggactcgcttctgaaaacgtgaggtgggcagatgccgtgcagaacttcaaacagcaggaaaggacgttatgtggagacattttacttataacggctttcatttcctaccttggcttcttcacaaagaaataccggcagagcctcctggacagaa

SEQ ID NO: 92103 - DNA, 25 bp, Homo sapiens
  chr17:11791606-11791631
  hypo
ttacgtttttaaaagaaacccaata

SEQ ID NO: 92104 - DNA, 30 bp, Homo sapiens
  chr17:11913750-11913780
  hypo
ccagatggagtcttgctctctcgccagtct

SEQ ID NO: 92105 - DNA, 63 bp, Homo sapiens
  chr17:12018834-12018897
  hypo
aggaggtagaggtgacgggccggagaaagatggaagactaccaggctgcggaggagactgctt

SEQ ID NO: 92106 - DNA, 30 bp, Homo sapiens
  chr17:12019218-12019248
  hypo
cctgtgaccttcctccggtagttcatcttc

SEQ ID NO: 92107 - DNA, 135 bp, Homo sapiens
  chr17:12032508-12032643
  hypo
tcaactaacacaagtcgtgaaaggagatcctccgcagctgagtaattctgaggaaagggaattctccccgagtttcatcaactttgtcaacttgtggtgagtacctgatttatgaatggtcgaacacgcatggcg

SEQ ID NO: 92108 - DNA, 30 bp, Homo sapiens
  chr17:12127671-12127701
  hypo
acttttgcgctgaaacgtggctgagtggga

SEQ ID NO: 92109 - DNA, 30 bp, Homo sapiens; identical to SEQ ID NO: 53724
  chr17:12490863-12490893
  hypo

SEQ ID NO: 92110 - DNA, 204 bp, Homo sapiens; identical to SEQ ID NO: 30049
  chr17:12517841-12518045
  hypo

SEQ ID NO: 92111 - DNA, 45 bp, Homo sapiens; identical to SEQ ID NO: 30050
  chr17:12744162-12744207
  hypo

SEQ ID NO: 92112 - DNA, 134 bp, Homo sapiens; identical to SEQ ID NO: 53727
  chr17:12877185-12877319
  hypo

SEQ ID NO: 92113 - DNA, 131 bp, Homo sapiens; identical to SEQ ID NO: 53728
  chr17:12877650-12877781
  hypo

SEQ ID NO: 92114 - DNA, 30 bp, Homo sapiens
  chr17:12895264-12895294
  hypo
atggaaaccagccccgtgtgccatttctca

SEQ ID NO: 92115 - DNA, 30 bp, Homo sapiens
  chr17:12899438-12899468
  hypo
ggccgagccccctgcgccatggccctgaaa

SEQ ID NO: 92116 - DNA, 243 bp, Homo sapiens
  chr17:12905697-12905940
  hypo
catggagagaaagagaggggacgagagctgggccgacaaggggccggtctgagacactaccttacagcggaaactggtgagcagggggaagatgtccgggtggatgaggttgagctgggtttgaatcttgtggctgcgaaggttgtgaactgaggcacagttctcattcaggaccaagtgctgggtgtcaggcccaaacctgtgaagaaacagacccggcatttgcagcgtctgttaggaggc

SEQ ID NO: 92117 - DNA, 686 bp, Homo sapiens; identical to SEQ ID NO: 10999
  chr17:13505001-13505687
  hypo

SEQ ID NO: 92118 - DNA, 31 bp, Homo sapiens; identical to SEQ ID NO: 30054
  chr17:14109918-14109949
  hypo

SEQ ID NO: 92119 - DNA, 30 bp, Homo sapiens
  chr17:14110396-14110426
  hypo
acgtggacgcagaccgcaggagctcgcgga

SEQ ID NO: 92120 - DNA, 30 bp, Homo sapiens; identical to SEQ ID NO: 30055
  chr17:14111629-14111659
  hypo

SEQ ID NO: 92121 - DNA, 308 bp, Homo sapiens; identical to SEQ ID NO: 53732
  chr17:14200598-14200906
  hypo

SEQ ID NO: 92122 - DNA, 285 bp, Homo sapiens; identical to SEQ ID NO: 53733
  chr17:14200930-14201215
  hypo

SEQ ID NO: 92123 - DNA, 996 bp, Homo sapiens; identical to SEQ ID NO: 53736
  chr17:14204005-14205001
  hypo

SEQ ID NO: 92124 - DNA, 1098 bp, Homo sapiens; identical to SEQ ID NO: 53737
  chr17:14205182-14206280
  hypo

SEQ ID NO: 92125 - DNA, 45 bp, Homo sapiens; identical to SEQ ID NO: 30059
  chr17:14236461-14236506
  hypo

SEQ ID NO: 92126 - DNA, 30 bp, Homo sapiens; identical to SEQ ID NO: 11003
  chr17:14940884-14940914
  hypo

SEQ ID NO: 92127 - DNA, 30 bp, Homo sapiens
  chr17:15134336-15134366
  hypo
ttgagatgccactccgggtgcctcaccgtg

SEQ ID NO: 92128 - DNA, 30 bp, Homo sapiens
  chr17:15268977-15269007
  hypo
ttttttttttttgagacggagtctcgctct

SEQ ID NO: 92129 - DNA, 90 bp, Homo sapiens
  chr17:15411142-15411232
  hypo
actccatctcaaaaaaaagaaaagaaaaaactaaataacaaaaaaaagaaagtctatagcctcttatgcctccatcgtatctgtaaagtg

SEQ ID NO: 92130 - DNA, 154 bp, Homo sapiens
  chr17:15500063-15500217
  hypo
agaagcaaagactcatcgagcccatcaagtcagattctagaaggacttcccgtggcctagcacctccgaagagcaggctcaccaacagctcatgtgcccacagcacagagcgccctgaatacaggtggttgagggagcccgcaatccagaagac

SEQ ID NO: 92131 - DNA, 31 bp, Homo sapiens
  chr17:15500646-15500677
  hypo
atgaagaagttgatgccgggcccagtggctc

SEQ ID NO: 92132 - DNA, 25 bp, Homo sapiens
  chr17:15581232-15581257
  hypo
attataagaaaactatcggctgggt

SEQ ID NO: 92133 - DNA, 30 bp, Homo sapiens
  chr17:15608018-15608048
  hypo
gcaggagtttcatgcggaacagacctccag

SEQ ID NO: 92134 - DNA, 30 bp, Homo sapiens; identical to SEQ ID NO: 30062
  chr17:15646400-15646430
  hypo

SEQ ID NO: 92135 - DNA, 31 bp, Homo sapiens
  chr17:15721506-15721537
  hypo
atgtgagcgcatcccacggggcccaaggcac

SEQ ID NO: 92136 - DNA, 20 bp, Homo sapiens
  chr17:15723963-15723983
  hypo
ttttgagacagagtctcgct

SEQ ID NO: 92137 - DNA, 46 bp, Homo sapiens
  chr17:15843703-15843749
  hypo
acaagtccttggatgtcggagagaagtagaacgttgaggtacagta

SEQ ID NO: 92138 - DNA, 23 bp, Homo sapiens
  chr17:15858714-15858737
  hypo
ttttgtttttttttttcgagaca

SEQ ID NO: 92139 - DNA, 32 bp, Homo sapiens
  chr17:15870825-15870857
  hypo
tgagccaccgcgcccagccaaagggacagatt

SEQ ID NO: 92140 - DNA, 187 bp, Homo sapiens
  chr17:15873030-15873217
  hypo
tcaccctggcccaagccgacgttgtctcgagtcaactaccgaaatagtttcctagctgatctctctgcttttcttctggctcccctaaaattcagtctccgtactctggccaggtgacctttatacaacagaaatcagtaccatcccctgcttaaaagtcttccatgggtcccggtgcctatgaact

SEQ ID NO: 92141 - DNA, 31 bp, Homo sapiens; identical to SEQ ID NO: 30064
  chr17:15945326-15945357
  hypo

SEQ ID NO: 92142 - DNA, 30 bp, Homo sapiens
  chr17:15952211-15952241
  hypo
tttctcatgcacaaccggaacctggggtgg

SEQ ID NO: 92143 - DNA, 212 bp, Homo sapiens
  chr17:15952497-15952709
  hypo
gttactgccacttgacccatgcgcgccccgtggatccaggagtcacgtcatcagacagtgctgcccgggcagcagcagtggcagaagctgcgtccttgaggctccgcatgtccttcaacatcagacaccatctcacccttggctccttagtccaggtgaaacctcaagggttttcctacctattttgagtcgactgaccagttctttcatcg

SEQ ID NO: 92144 - DNA, 23 bp, Homo sapiens
  chr17:16074139-16074162
  hypo
gcgagactccatctcaaaaaaaa

SEQ ID NO: 92145 - DNA, 22 bp, Homo sapiens
  chr17:16138065-16138087
  hypo
aagactccgtctcaaaaataat

SEQ ID NO: 92146 - DNA, 26 bp, Homo sapiens
  chr17:16237435-16237461
  hypo
acaagctaaatttgatgatcacgccg

SEQ ID NO: 92147 - DNA, 25 bp, Homo sapiens
  chr17:16237760-16237785
  hypo
gatcgctttctgcacctagtgatac

SEQ ID NO: 92148 - DNA, 31 bp, Homo sapiens
  chr17:16248028-16248059
  hypo
ggtgaaaacagacaaacggtattctttttta

SEQ ID NO: 92149 - DNA, 103 bp, Homo sapiens; identical to SEQ ID NO: 53745
  chr17:16256922-16257025
  hypo

SEQ ID NO: 92150 - DNA, 28 bp, Homo sapiens
  chr17:16277884-16277912
  hypo
atgcatgtatatatatatacacgtgtat

SEQ ID NO: 92151 - DNA, 391 bp, Homo sapiens
  chr17:16282250-16282641
  hypo
cttgtaggtgaattcccgtttttgaagtggggtttcggctccctaatctgcacttttttttttcctaccagtttggagaaacagctgggaagaactggatttgcaggtattgctggagccagagcgaagcccggccactgtcaccatgggctccagcctcgcctctctgggcctggtggtgagcggcttcagcaacaggtttccggtccccgcagagggtcccactctgaactcccgatttacagactgttctcgggccgtgatgaggattaagacaatgcaactaagagcactctgactacagaagcatgatttaaagctccacaaccctgcaataaccacgaagaaaaataaaaagcggctagtccgccaggcacggtggttcatgcct

SEQ ID NO: 92152 - DNA, 23 bp, Homo sapiens
  chr17:16283543-16283566
  hypo
gcgtttttaaaacatgggagagg

SEQ ID NO: 92153 - DNA, 1162 bp, Homo sapiens; identical to SEQ ID NO: 53747
  chr17:16283956-16285118
  hypo

SEQ ID NO: 92154 - DNA, 31 bp, Homo sapiens; identical to SEQ ID NO: 30070
  chr17:16295226-16295257
  hypo

SEQ ID NO: 92155 - DNA, 41 bp, Homo sapiens
  chr17:16305046-16305087
  hypo
aataattttggccaagcgtggccgggcgtggtggctcacgc

SEQ ID NO: 92156 - DNA, 30 bp, Homo sapiens; identical to SEQ ID NO: 53749
  chr17:16310344-16310374
  hypo

SEQ ID NO: 92157 - DNA, 210 bp, Homo sapiens
  chr17:16369822-16370032
  hypo
tcatgataggtctaaacggtaccacctctaggaactgtgcctgtggacagttcctcatcaggatgtctgggaacaccagcaggtgcacctgagtcactgctggtggggagtgacgctcggagagtgtggctggcctgacaccgagtcactctcggctccctttccgagctgccggacccagcacacagcagcacacggcatttcaaagaa

SEQ ID NO: 92158 - DNA, 30 bp, Homo sapiens; identical to SEQ ID NO: 30071
  chr17:16375606-16375636
  hypo

SEQ ID NO: 92159 - DNA, 30 bp, Homo sapiens; identical to SEQ ID NO: 30072
  chr17:16381204-16381234
  hypo

SEQ ID NO: 92160 - DNA, 122 bp, Homo sapiens
  chr17:16385290-16385412
  hypo
gggtactgccaggtgcgcggtgtctactgggcggtctaggtccagggcaggaattctgactgttacgcttggtgtggggcaggacctcctgggcccttacctgcccccggtgccaatggaga

SEQ ID NO: 92161 - DNA, 173 bp, Homo sapiens; identical to SEQ ID NO: 30074
  chr17:16391198-16391371
  hypo

SEQ ID NO: 92162 - DNA, 58 bp, Homo sapiens; identical to SEQ ID NO: 53752
  chr17:16395228-16395286
  hypo

SEQ ID NO: 92163 - DNA, 201 bp, Homo sapiens
  chr17:16434314-16434515
  hypo
tattttattactccttcgagctgccatttctatgatgtacataagaggaatccccggagcacagaaaatgatgagaaagtttaagccaagttcaacatgaaaatgattggcttattttcctttaaacctcatggcacccaagacgcagcttcatgcgcaccttgttattgttgctcacaaacccaccggtcactctgcttc

SEQ ID NO: 92164 - DNA, 30 bp, Homo sapiens
  chr17:16470885-16470915
  hypo
tcctaaaattctgtcgacaggtctcagtgt

SEQ ID NO: 92165 - DNA, 761 bp, Homo sapiens; identical to SEQ ID NO: 53755
  chr17:16472053-16472814
  hypo

SEQ ID NO: 92166 - DNA, 30 bp, Homo sapiens; identical to SEQ ID NO: 30076
  chr17:16521042-16521072
  hypo

SEQ ID NO: 92167 - DNA, 31 bp, Homo sapiens; identical to SEQ ID NO: 11015
  chr17:16570443-16570474
  hypo

SEQ ID NO: 92168 - DNA, 238 bp, Homo sapiens
  chr17:16923460-16923698
  hypo
gtgatgagccacctccgctctgacctcacctcctcccagctccctgactccttcggcggggggcctggccagcttgttcggccactctgggctccaggctcttcaactggaaagagatgcttgtggagttcctcatggcaagtctgggcaagccagcctgacggccagcctgcgactccttgtccagaactctgtcaactccaccagtgcctgtcacggaaaccgcatggccaccagc

SEQ ID NO: 92169 - DNA, 198 bp, Homo sapiens
  chr17:16927736-16927934
  hypo
cccctttttatgagggcacgggtcatgctggataagggctcacactactgacgtcagtttaacttgatgacctctgtaaagagcccatctccacatagagagagataattattgctcctgttgctgtggctactgatgccatttgggggattcgtggcaagaaggatgaactgagagcgtccgcgacattgggatcca

SEQ ID NO: 92170 - DNA, 45 bp, Homo sapiens
  chr17:16929737-16929782
  hypo
acctgggccacagaacgaggctccgtctcaaaaaaaaaaaaagaa

SEQ ID NO: 92171 - DNA, 30 bp, Homo sapiens; identical to SEQ ID NO: 30079
  chr17:16934640-16934670
  hypo

SEQ ID NO: 92172 - DNA, 30 bp, Homo sapiens
  chr17:16976460-16976490
  hypo
attgctttgatgaacgctgggtggggtgtc

SEQ ID NO: 92173 - DNA, 30 bp, Homo sapiens
  chr17:16994963-16994993
  hypo
ccttgcggtcctcccggccctgcttaaaga

SEQ ID NO: 92174 - DNA, 120 bp, Homo sapiens
  chr17:17012231-17012351
  hypo
aagccaccagtggcagcactccgcccacctgtatgctagcactgcctcttctccagtgcaacttctcccgccggctgtggtgcgcagatttctgaaagcgctcaaacaggctgaagggcc

SEQ ID NO: 92175 - DNA, 151 bp, Homo sapiens
  chr17:17031179-17031330
  hypo
gtccagggccacatggcaaggcgtccaggagccagtgctgggtcccgggggcgctctctgcgggggtgtgctctcccctagagtcctcccctggagagaggcaggtttgcatttctgagcacctggagccgagctggaggagcacttctgt

SEQ ID NO: 92176 - DNA, 395 bp, Homo sapiens
  chr17:17045771-17046166
  hypo
gggtgcaggcagagctcgggtcagctgagcacgtgtctagacaacctcggtgctgtgcaagcctgaggggaatcaggcccgggccaggccgggcatgggaggagtcggctcactgccacctcacagctcacctcactgccacctcagggcctcgtgtcctctcttgcaggaggtcccaggtgattgaaaagtttgaggccttggacattgagaaggcagagcacatggagaccaatgcagtggggccctcaccatccagcgacacacgccagggccgcagcgagaagagggcgttccctaggaagcgggtgagctcctggggctgggcagcacctcaggggtggctcgggggcgggtcagcatgcaccccatgcgccaagtcccctccacacagg

SEQ ID NO: 92177 - DNA, 30 bp, Homo sapiens
  chr17:17046980-17047010
  hypo
acggtgagcccaggcgccgcgtcctccgga

SEQ ID NO: 92178 - DNA, 402 bp, Homo sapiens; identical to SEQ ID NO: 30080
  chr17:17062291-17062693
  hypo

SEQ ID NO: 92179 - DNA, 30 bp, Homo sapiens; identical to SEQ ID NO: 30081
  chr17:17063029-17063059
  hypo

SEQ ID NO: 92180 - DNA, 30 bp, Homo sapiens; identical to SEQ ID NO: 30082
  chr17:17064688-17064718
  hypo

SEQ ID NO: 92181 - DNA, 164 bp, Homo sapiens
  chr17:17067665-17067829
  hypo
gccaagctcaagggcgacctgaagcgggagcagggccgggtccgcgagcagctggaggagcggcaacacagcgaggcggcgctgagcagccagctgagggctagcgagcagaagctcaagagtgctgaggccctgctgctggagaagacgcaggagctacgggg

SEQ ID NO: 92182 - DNA, 30 bp, Homo sapiens
  chr17:17071579-17071609
  hypo
tgccccgggaaccccgtctggcccagtccc

SEQ ID NO: 92183 - DNA, 30 bp, Homo sapiens; identical to SEQ ID NO: 30083
  chr17:17079842-17079872
  hypo

SEQ ID NO: 92184 - DNA, 352 bp, Homo sapiens; identical to SEQ ID NO: 30084
  chr17:17080459-17080811
  hypo

SEQ ID NO: 92185 - DNA, 201 bp, Homo sapiens
  chr17:17083736-17083937
  hypo
ttgtgacactggtgccgcctccaagagatgatgctgcctgctcttgttccccagccaggaagcagtacatctttagtgtgctgtccagagccagccatgcacaggagggcgggcggaggtgggagcggcaccgcgtgtgtttgggattggttgtgtgtctcatgtctgctctctcctctgacagtccgtaattgagcaggt

SEQ ID NO: 92186 - DNA, 30 bp, Homo sapiens
  chr17:17085387-17085417
  hypo
agggcaggatggggccgtgttcgcgctccc

SEQ ID NO: 92187 - DNA, 30 bp, Homo sapiens; identical to SEQ ID NO: 30085
  chr17:17086026-17086056
  hypo

SEQ ID NO: 92188 - DNA, 240 bp, Homo sapiens
  chr17:17104697-17104937
  hypo
caacttcagatgtcatcggagctatctgtatatgacacacacattataaacaaataacctggaacatttcacagtgtacgacacctgttctacctgggaatgcaaaccctgagctgcaaataagaacacagacgtgggagacaccacggcctgaagctgctctcctcttccccgctctcctctcctccggtcccgtgatgggttacgctgagccagcaatgtgcacgcactaactccaca

SEQ ID NO: 92189 - DNA, 226 bp, Homo sapiens
  chr17:17105842-17106068
  hypo
tcatgaaagcaccccgtggcaggtcgtgactgaagttattttggcaaaggagcaagaaaaaggtctggcccgaaataactgacccgaagtaacagaaatttccctttcctaaccttctttagttcaatttagtattctaatagacgagactttagtttaacgatttttttctagtgccgaggtctccctccctcagaacgcacagcagcccgcagggagggctcag

SEQ ID NO: 92190 - DNA, 30 bp, Homo sapiens
  chr17:17116752-17116782
  hypo
attgccatcttcagcgattccaacggctgg

SEQ ID NO: 92191 - DNA, 30 bp, Homo sapiens
  chr17:17120264-17120294
  hypo
cgtgtggtgcacagcggttctgtgctgggc

SEQ ID NO: 92192 - DNA, 261 bp, Homo sapiens
  chr17:17124506-17124767
  hypo
aaaggagcaaagaccgtcgaccaggccaagcacttggctatcacaaaatcgggacgagaagcctttaatcagccagttctctctacagacagcccacctgtgaattttccccacctagctggggaacagattctttcacatggcggtcaaggcaaacgagacaggaaatcacaacaatcacaacaatcacaccgagatcggagggtgagcttcccgaaggctcgttctgggctgattcagagccgcgtttccctccctcag

SEQ ID NO: 92193 - DNA, 30 bp, Homo sapiens; identical to SEQ ID NO: 30088
  chr17:17188364-17188394
  hypo

SEQ ID NO: 92194 - DNA, 180 bp, Homo sapiens
  chr17:17224395-17224575
  hypo
tgtgtgtgtatatatctaaggcgggaggtgccagcacacgtttgaatgaggagtcatggaggaggatagcaagcgggcattcgggaggtgccagcacgtgtttgaatgaggagtcatggagaaggatagcaagcgggcattcgggaggtgccagcatgcgtttgaatgaggttcatggag

SEQ ID NO: 92195 - DNA, 30 bp, Homo sapiens
  chr17:17250659-17250689
  hypo
gaccaggaacccggcgactgaggtgcttcc

SEQ ID NO: 92196 - DNA, 113 bp, Homo sapiens; identical to SEQ ID NO: 30089
  chr17:17251262-17251375
  hypo

SEQ ID NO: 92197 - DNA, 31 bp, Homo sapiens
  chr17:17257801-17257832
  hypo
cgactcaatgcttccccgaaagagcctgagt

SEQ ID NO: 92198 - DNA, 19 bp, Homo sapiens
  chr17:17276195-17276214
  hypo
gcctcgagttgtccctgct

SEQ ID NO: 92199 - DNA, 37 bp, Homo sapiens
  chr17:17303347-17303384
  hypo
tctcagatgtgcctgccgctgacgaccattcccactc

SEQ ID NO: 92200 - DNA, 184 bp, Homo sapiens
  chr17:17325163-17325347
  hypo
tctgcctgccctggaacgcctgggtcctggggtagatgtttgttctgtgatgaccgatattgccagacagttttcctacatggtcgtaccagttcatgtggaagtgttttaactgatgagcagccatcgtattctctgttccctgcaccccagtgctgctctttgtcatcgccattgggcctct

SEQ ID NO: 92201 - DNA, 31 bp, Homo sapiens
  chr17:17328456-17328487
  hypo
ccactgtgtcccctggcggcagctatggaag

SEQ ID NO: 92202 - DNA, 78 bp, Homo sapiens; identical to SEQ ID NO: 30090
  chr17:17330585-17330663
  hypo

SEQ ID NO: 92203 - DNA, 31 bp, Homo sapiens; identical to SEQ ID NO: 30091
  chr17:17352482-17352513
  hypo

SEQ ID NO: 92204 - DNA, 30 bp, Homo sapiens
  chr17:17359806-17359836
  hypo
ggctttggcgactgcggtggagctccctcg

SEQ ID NO: 92205 - DNA, 774 bp, Homo sapiens; identical to SEQ ID NO: 53761
  chr17:17398362-17399136
  hypo

SEQ ID NO: 92206 - DNA, 537 bp, Homo sapiens; identical to SEQ ID NO: 53762
  chr17:17399419-17399956
  hypo

SEQ ID NO: 92207 - DNA, 53 bp, Homo sapiens; identical to SEQ ID NO: 30094
  chr17:17402428-17402481
  hypo

SEQ ID NO: 92208 - DNA, 31 bp, Homo sapiens
  chr17:17413541-17413572
  hypo
gccacaaggcgtcccccggcagagctgctct

SEQ ID NO: 92209 - DNA, 37 bp, Homo sapiens
  chr17:17431919-17431956
  hypo
aaatgtctgagtgagacgtccccggggcagcagggag

SEQ ID NO: 92210 - DNA, 133 bp, Homo sapiens; identical to SEQ ID NO: 30095
  chr17:17447944-17448077
  hypo

SEQ ID NO: 92211 - DNA, 164 bp, Homo sapiens
  chr17:17488194-17488358
  hypo
agaggtgccatgggacgccaggaggattaaatgagaaagtgcaaggaaagcactcagcgcagtgcctggcggggggcatggctagacagacgctggctgtgacaactgtgtcatcgagtcctggtgacaaccctgcgaggcatgcccactcttcagattaagaa

SEQ ID NO: 92212 - DNA, 31 bp, Homo sapiens
  chr17:17492208-17492239
  hypo
gtcagtggggctgcagcgggcacactcctca

SEQ ID NO: 92213 - DNA, 93 bp, Homo sapiens
  chr17:17590234-17590327
  hypo
gcaagcctgtggtccaggcttcgcacccttgaagtctaggggccaggtgaacaatgagcatccggtttctttcttttttttgagatggagtct

SEQ ID NO: 92214 - DNA, 30 bp, Homo sapiens
  chr17:17613277-17613307
  hypo
tcattcacagtacacggacatgctcacctg

SEQ ID NO: 92215 - DNA, 93 bp, Homo sapiens; identical to SEQ ID NO: 30096
  chr17:17618836-17618929
  hypo

SEQ ID NO: 92216 - DNA, 30 bp, Homo sapiens; identical to SEQ ID NO: 30097
  chr17:17632248-17632278
  hypo

SEQ ID NO: 92217 - DNA, 196 bp, Homo sapiens
  chr17:17637993-17638189
  hypo
ccacacctgctttcctatgtgcgggtcagagcgtgtaggtgtattacatgcctgcctgtgtgtctgcgtgtgagctccttggacacacacaggggcacatatctgtgcttgcatgtttgtacatctaagtgtgtgcgtatctgtgtgttctgacaccagctcgcgacaccagctcgccctccacaaagctatttcc

SEQ ID NO: 92218 - DNA, 30 bp, Homo sapiens
  chr17:17697449-17697479
  hypo
caatccctccccaacggatgccaccagctc

SEQ ID NO: 92219 - DNA, 30 bp, Homo sapiens
  chr17:17697717-17697747
  hypo
agcggctactcagccgagcccgcaggcaca

SEQ ID NO: 92220 - DNA, 30 bp, Homo sapiens; identical to SEQ ID NO: 30099
  chr17:17699446-17699476
  hypo

SEQ ID NO: 92221 - DNA, 30 bp, Homo sapiens
  chr17:17700928-17700958
  hypo
gtgccaagcgacgacgacagcagcaggtgc

SEQ ID NO: 92222 - DNA, 30 bp, Homo sapiens
  chr17:17708992-17709022
  hypo
aggggctgagctgccgggacccagcgggga

SEQ ID NO: 92223 - DNA, 30 bp, Homo sapiens
  chr17:17716991-17717021
  hypo
tgggctgctggggccggggccgggggctgc

SEQ ID NO: 92224 - DNA, 30 bp, Homo sapiens
  chr17:17717261-17717291
  hypo
acccgccaccggcccgggagcagctgtcca

SEQ ID NO: 92225 - DNA, 103 bp, Homo sapiens; identical to SEQ ID NO: 30100
  chr17:17717879-17717982
  hypo

SEQ ID NO: 92226 - DNA, 30 bp, Homo sapiens; identical to SEQ ID NO: 30101
  chr17:17747883-17747913
  hypo

SEQ ID NO: 92227 - DNA, 30 bp, Homo sapiens
  chr17:17779995-17780025
  hypo
aagggggcctggagacggctggtgacttac

SEQ ID NO: 92228 - DNA, 183 bp, Homo sapiens
  chr17:17881579-17881762
  hypo
gtggctcaggaccaggcggaccctcactgcttcaatgtcccgtctgtggaatgggatggctgtcatccctgtctcgagcattgggtggggggacaaggtgagacagcacgtgcacagtgcctggctcacacagcaagccaggcacagtaagtgaaggcagaggcagtacgagggcagtgagag

SEQ ID NO: 92229 - DNA, 19 bp, Homo sapiens
  chr17:17894005-17894024
  hypo
ttactttttaaaacatttg

SEQ ID NO: 92230 - DNA, 266 bp, Homo sapiens
  chr17:17910220-17910486
  hypo
ccagccagaatttccgagctcgccttgggcccttaaagtctgtctcccgccgtctgagagcatcagggacgcgccgggcctgctcctcccgggcctttgcttaactcggggctgcacgatggctcagtgccgggacctggagaatcaccaccacgagaagctcctggagatctctatcagcaccctggagaagattgtcgagggcgacctggacgaggacctgcctaacgacctgcgcgcggtaggcggggcgggctgctcggagc

SEQ ID NO: 92231 - DNA, 30 bp, Homo sapiens
  chr17:17910959-17910989
  hypo
ccctggggtctgcacgctaagaaggctctc

SEQ ID NO: 92232 - DNA, 30 bp, Homo sapiens
  chr17:17970519-17970549
  hypo
ccctcaacagcatgcgagcccataccttct

SEQ ID NO: 92233 - DNA, 30 bp, Homo sapiens; identical to SEQ ID NO: 30103
  chr17:18022010-18022040
  hypo

SEQ ID NO: 92234 - DNA, 261 bp, Homo sapiens
  chr17:18024621-18024882
  hypo
cggctcgccgctgccgggctcacccaggccgccctcgccgcccctggggctctgccacagcccgcggcgcagctccctgaatctgccctcgcgcctcccgcacacgtggcggcgcctcagcgagccacccactcgggctgtgaagccgcaagtgcgcctgcccttccaccgaccgcccagggccggggcctggcgggcgcccctggaacaccgggagagcccgcgagaacccgaggactcagagacgccctggactgtgcc

SEQ ID NO: 92235 - DNA, 30 bp, Homo sapiens
  chr17:18070990-18071020
  hypo
gcttcactgcagcatcgcgccaaggaccac

SEQ ID NO: 92236 - DNA, 159 bp, Homo sapiens
  chr17:18083363-18083522
  hypo
aaagagaacaacatacgcaggggccctgaggtgcgcattacttgtagcaggatctgagactgaagaggccggcaaagatggtttcgatagggcttctgggctacattaagaatttaggatttctgggccaggcgcagtggctcatgactgtaatcccgg

SEQ ID NO: 92237 - DNA, 24 bp, Homo sapiens
  chr17:18110682-18110706
  hypo
aaaaaaatgttttggccggcacag

SEQ ID NO: 92238 - DNA, 189 bp, Homo sapiens; identical to SEQ ID NO: 30106
  chr17:18139365-18139554
  hypo

SEQ ID NO: 92239 - DNA, 99 bp, Homo sapiens
  chr17:18144919-18145018
  hypo
cgtccacgtcttctcggtgcctggcctgcggccccaggtgcactattcctgcatccggaaggaggacatcagcggcatcgcttcgtgcgtctttacgcg

SEQ ID NO: 92240 - DNA, 30 bp, Homo sapiens
  chr17:18148225-18148255
  hypo
gagggggcttcacacgtgcactcacactgt

SEQ ID NO: 92241 - DNA, 30 bp, Homo sapiens
  chr17:18149875-18149905
  hypo
tggcctcgggctcgcggggctgccaggcac

SEQ ID NO: 92242 - DNA, 31 bp, Homo sapiens
  chr17:18150295-18150326
  hypo
ttcttgccctccagcacgaaaccctccatgc

SEQ ID NO: 92243 - DNA, 30 bp, Homo sapiens
  chr17:18154709-18154739
  hypo
cggagtagtcaaggcggggcttctccaggc

SEQ ID NO: 92244 - DNA, 261 bp, Homo sapiens
  chr17:18163100-18163361
  hypo
ctcatttgtaaaatactttctaaggttgtcaccatgagcaaattaacaaagaatgcacgtgtagctcgcagcatacagcaggcgctcagtgagtggcaggttattattccgttttgttttgttttgtgcgccaggttattattcccacttagtgtcagcacccctgtgctcgtacccccctacaaagggaggctccagaagagaagcatccgtcttggtccttgctgttcaagggggctcgccctggctgacacatagcag

SEQ ID NO: 92245 - DNA, 30 bp, Homo sapiens
  chr17:18167536-18167566
  hypo
tcgggtgcctgatccggcccagcatggcct

SEQ ID NO: 92246 - DNA, 39 bp, Homo sapiens
  chr17:18278352-18278391
  hypo
aaagattattttaattttttacatcgactaaatttaaca

SEQ ID NO: 92247 - DNA, 140 bp, Homo sapiens
  chr17:18399915-18400055
  hypo
aaaagccttccttggccgtctccaaacccaggagggtcttcagtcccttgggcgaggatgctgtggcccacactcgctttgacaccctgcgttcccagaggccacatctgtactggccaaactcacgtgagacaggtggc

SEQ ID NO: 92248 - DNA, 31 bp, Homo sapiens
  chr17:18575701-18575732
  hypo
gagtgagccgtctgtccggggagctctcgat

SEQ ID NO: 92249 - DNA, 30 bp, Homo sapiens
  chr17:18576457-18576487
  hypo
tcccagtcttgccgcgcccgcctcccagga

SEQ ID NO: 92250 - DNA, 8 bp, Homo sapiens
  chr17:18760394-18760402
  hypo
ccaggact

SEQ ID NO: 92251 - DNA, 30 bp, Homo sapiens
  chr17:18834052-18834082
  hypo
taagagtgactgctcggtgggatggatttc

SEQ ID NO: 92252 - DNA, 30 bp, Homo sapiens
  chr17:18853445-18853475
  hypo
ctgggcttcgggtggcgtttcttctcccgc

SEQ ID NO: 92253 - DNA, 623 bp, Homo sapiens
  chr17:18854647-18855270
  hypo
cgccttcaatggctgcgtaatggcggatggccatttccttgactaggatgagacattgcctactctgcgtggctgctgtgagcgtgaaatgggatcatgtgcggaacagccacgcatggtccgtgaaatgggatcatgtgcagaacagccacgcatggtccttggtgtgtgacagatattgggtccctctgtggtcccaggcagacattgcccggggtgggggccgaatgcatggtcaagttgaggggcctgggactgtttcacgggtctagaaaaagaaagcagaaacgctggaagcaggactttattgtccgacatggggctgcctctgagcctgggctgtgttggctggacgtgagccataatgcaggtgtccccctcccaagccctgctcagtccactcacagcccgatggccaagggaggacatggctgcccgccacggcagtatcttcagaggtgaggcggttgtccctacgctctatgcttcttatacaaattagatataggtgaagccacccattaagcaacccagcctttctgggactatttgggctgcctccgggtccactaaatgcggttcattttccccaagccccctccgagttcaaggaggctccttcc

SEQ ID NO: 92254 - DNA, 65 bp, Homo sapiens
  chr17:18855508-18855573
  hypo
caggacagccatggccgccaactccaccagcgacctccacactcccgggacgcagctgagcgtgg

SEQ ID NO: 92255 - DNA, 30 bp, Homo sapiens; identical to SEQ ID NO: 30109
  chr17:18878121-18878151
  hypo

SEQ ID NO: 92256 - DNA, 95 bp, Homo sapiens
  chr17:18895395-18895490
  hypo
ctcctggtgcccaaacacctccggcatgtctgtccaggggtgtccatatgcacaagccctccagcgccccgcccgatgagcacctcctcccatgc

SEQ ID NO: 92257 - DNA, 31 bp, Homo sapiens
  chr17:18895944-18895975
  hypo
gtcggtccagcaccggcgcccaagctctagg

SEQ ID NO: 92258 - DNA, 30 bp, Homo sapiens
  chr17:18897235-18897265
  hypo
aggggatccacaaacggcagctgcacggac

SEQ ID NO: 92259 - DNA, 31 bp, Homo sapiens
  chr17:18915678-18915709
  hypo
ctgagcctgggaaattcgtgagtcctttcat

SEQ ID NO: 92260 - DNA, 30 bp, Homo sapiens
  chr17:18916385-18916415
  hypo
agaatggctggggacgaggggggcaaggga

SEQ ID NO: 92261 - DNA, 191 bp, Homo sapiens
  chr17:18918296-18918487
  hypo
gcgggaggggttcccggggctgtctcaaggccggacagggtcacacatcccccgtcccaccccaggtctgcgggggctgatgatcgcagtgatgctggcggcgctcatgtcgtcgctgacctccatcttcaacagcagcagcaccctcttcactatggacatctggaggcggctgcgtccccgctccggcg

SEQ ID NO: 92262 - DNA, 329 bp, Homo sapiens; identical to SEQ ID NO: 53777
  chr17:19140729-19141058
  hypo

SEQ ID NO: 92263 - DNA, 326 bp, Homo sapiens
  chr17:19211654-19211980
  hypo
aggattacaggcataagccgccatgcccggcacaattagaacattttaaaatgacccgttaaccatgaaattgaattctgtagttgtccatctgtcgacctgtgcatgcacctgtctgtgcatgcatgtaagcctccacccaacaggtgtttgtcagccaggggtgagtgctacaagggagaggtgcagaggtgcagagtctgacacagcatcaggatggaggggaaggaccaggtccgggaagccgagctctgactacaaaagaggaggtgggtgcgctgagggaacagcctgcacggagacccgggaggaggacagggcaagga

SEQ ID NO: 92264 - DNA, 30 bp, Homo sapiens
  chr17:19232144-19232174
  hypo
aagagcttctgacgcgtggggcgcagtctc

SEQ ID NO: 92265 - DNA, 103 bp, Homo sapiens; identical to SEQ ID NO: 30112
  chr17:19233947-19234050
  hypo

SEQ ID NO: 92266 - DNA, 425 bp, Homo sapiens; identical to SEQ ID NO: 53783
  chr17:19282072-19282497
  hypo

SEQ ID NO: 92267 - DNA, 30 bp, Homo sapiens
  chr17:19284417-19284447
  hypo
agagcttgccaccacgccagcctgtgccct

SEQ ID NO: 92268 - DNA, 30 bp, Homo sapiens
  chr17:19285330-19285360
  hypo
ggactcgaatggcccggcccgcagccccag

SEQ ID NO: 92269 - DNA, 30 bp, Homo sapiens; identical to SEQ ID NO: 30114
  chr17:19287662-19287692
  hypo

SEQ ID NO: 92270 - DNA, 31 bp, Homo sapiens; identical to SEQ ID NO: 11031
  chr17:19391541-19391572
  hypo

SEQ ID NO: 92271 - DNA, 30 bp, Homo sapiens
  chr17:19398453-19398483
  hypo
gttccacagaggatcgagcatgggggcagg

SEQ ID NO: 92272 - DNA, 748 bp, Homo sapiens; identical to SEQ ID NO: 53785
  chr17:19436885-19437633
  hypo

SEQ ID NO: 92273 - DNA, 28 bp, Homo sapiens
  chr17:19513233-19513261
  hypo
tttttttttttgtgacggagtctcgctc

SEQ ID NO: 92274 - DNA, 269 bp, Homo sapiens
  chr17:19606606-19606875
  hypo
gtcacaggccttcatgtcccccgcatctgaggcgttcatttgggctagacagtcttgtaggaagggcagtgtggaaaatgcttccactccagtggttctcagagtgggcggcacgctggcgcagcagcattagcatcacgtgggaacttgttagaaacagattctcagaccctgcctccgacctgctgaaccaaagcctgctggtgaggcccagcaatctgtgaccagccctccaaggggattccagcgcaggctacagcctaagaacc

SEQ ID NO: 92275 - DNA, 91 bp, Homo sapiens
  chr17:19616224-19616315
  hypo
tgccaggaggggcagccgaaacacccaaacacccaggcctcaggatgagggaacttaaattcagagtaacgtggttcgtaagaaaaaaagg

SEQ ID NO: 92276 - DNA, 402 bp, Homo sapiens
  chr17:19617062-19617464
  hypo
gggcatcttcagggtttccctcggcggcccgggtttcccagcaagccccacctccccagccggagcccagcgcacctggacacgtccgggtcctgccggaagagcagcaggatgtgctgggtgttgaggaagagcgcccagcaagggaggcagcagaggagcaggaccagcgcgccccgctgcaggatcacgcccacgtgcttcttgttggggctgccgaagctctgcaaaacagcccgccccgcgtcagccgtttccactgcccgggacattcctaaatcccgcgcggggagcgggctgtcagcggcgccagcggtgtgtggcggacccggcggcctctggtgaccacagcctggcgcccgcagcctgtaatggcacagcggccttcctgagcctgggcct

SEQ ID NO: 92277 - DNA, 78 bp, Homo sapiens
  chr17:19618656-19618734
  hypo
agccagggctggaggtcggatgacctagcccagctcccattctgcgttctgcagctgcagtcacgcctggcctccacg

SEQ ID NO: 92278 - DNA, 149 bp, Homo sapiens
  chr17:19623342-19623491
  hypo
tggagcgatctccccgcgcaccacaggcatctcagtatagagtgacctccccacgcaccacgggcatctcagcatagagtgacctccccatgcaccacgggtatctcagcatggagcgacctccccgtgcaccacgggcatctcagcat

SEQ ID NO: 92279 - DNA, 66 bp, Homo sapiens
  chr17:19641467-19641533
  hypo
gccagtgagggtggtccgcactccgatgggacacagtatggccaggccaggcggagcaacccctcc

SEQ ID NO: 92280 - DNA, 59 bp, Homo sapiens
  chr17:19642883-19642942
  hypo
ggcctcctccaggctgcgcacgcacacgatgggcagcacaggcccgaagatctcctctt

SEQ ID NO: 92281 - DNA, 38 bp, Homo sapiens
  chr17:19643640-19643678
  hypo
tcacgcacctatgtagcgagtggcggcatccccggtgc

SEQ ID NO: 92282 - DNA, 175 bp, Homo sapiens
  chr17:19644759-19644934
  hypo
ccgtgctccctgatcacgcccttgtcctgcacagccaggtgtcactgctactcgggcccccctacatctctggggccacagatgtgggatatggaggtggtcagagccctggctagggtcaggaggtgcagatacgggttctgccccagaccccgagcagcggtggcccttctcc

SEQ ID NO: 92283 - DNA, 31 bp, Homo sapiens
  chr17:19645605-19645636
  hypo
ccaagaccagcagccccgaagctcagcaccc

SEQ ID NO: 92284 - DNA, 375 bp, Homo sapiens
  chr17:19646479-19646854
  hypo
tcctggcttggctccacgctgggggacggtgctcccccagcttcccttcccacagggccatgcacctgcagcgatggcgcccaccatgggctggatggtgaggttgaaggggtagttccaggtgccaatgacgaggaccacgcccagtggctccgagtggatgtagagctcgtcctgctgagtctggggcgtcttctccacgggctcatccgcggcccactcagggagcttctggatcatgtactcgatctcctctaggacgtacaccacctcctcatagtaggcgttccattcattctgcagcgacagagccggagtgagcttccagggccagggcccgcctgcagctggggcgagtggggagccccactgctc

SEQ ID NO: 92285 - DNA, 89 bp, Homo sapiens
  chr17:19650044-19650133
  hypo
tgtgcgtgtgtgtgtgggcgtgcacgctctaacatgcaagaaaggactagaacggtagcccccgacacgatgagacaactgatgggggt

SEQ ID NO: 92286 - DNA, 30 bp, Homo sapiens
  chr17:19675242-19675272
  hypo
gggaggtccgccctgcgcagagagggagtg

SEQ ID NO: 92287 - DNA, 31 bp, Homo sapiens
  chr17:19680416-19680447
  hypo
cctacctacctaactacgtagaatggagtct

SEQ ID NO: 92288 - DNA, 45 bp, Homo sapiens
  chr17:19686486-19686531
  hypo
tgtactagaatgctcacgcctgtaatcctagcactttgggaggca

SEQ ID NO: 92289 - DNA, 105 bp, Homo sapiens
  chr17:19687002-19687107
  hypo
tttctacctccatcagcgtctcctccggcagttcaggggcttcaaaggtgatgagcccctctaggctggggggtgaagcaccgtaaggcacgtatctcaggctgg

SEQ ID NO: 92290 - DNA, 31 bp, Homo sapiens
  chr17:19721310-19721341
  hypo
tgttaaaagagctttccggcagggtgtgaat

SEQ ID NO: 92291 - DNA, 121 bp, Homo sapiens
  chr17:19736606-19736727
  hypo
agtcaatagaaactgtcgtgagggggccaaatgttgaacttaacaaagactttaaagcagttattataaacaaattttttttttttgagacagagtctcgctctgtcgcccatttttaaaa

SEQ ID NO: 92292 - DNA, 30 bp, Homo sapiens
  chr17:19741968-19741998
  hypo
atagtaaactaaaacgtgtatgcggtttca

SEQ ID NO: 92293 - DNA, 76 bp, Homo sapiens
  chr17:19769836-19769912
  hypo
ataaataagaaaagtagcattacttcatccgataagcaacaaagtcagcccacttttaacacgccccttgggcaac

SEQ ID NO: 92294 - DNA, 190 bp, Homo sapiens
  chr17:19771638-19771828
  hypo
ccaaactgccagccttcggacgcctctcggggtttactcgcttaggatccctagagggacggtgacaggcgggattctgcaccttttgggggtcccttgactgcgagaagctggtgacagctcagggccctcttcgcagagaatcgtttctgcacaccgactcagaatcgcacacgttttcaaggttctc

SEQ ID NO: 92295 - DNA, 30 bp, Homo sapiens
  chr17:19772204-19772234
  hypo
actgtgcacgcttacgttatcctgtcctta

SEQ ID NO: 92296 - DNA, 46 bp, Homo sapiens
  chr17:19773272-19773318
  hypo
tgctgggattacaggcgtgagccactgcgcccggccacatgaaggt

SEQ ID NO: 92297 - DNA, 30 bp, Homo sapiens; identical to SEQ ID NO: 30122
  chr17:19842112-19842142
  hypo

SEQ ID NO: 92298 - DNA, 90 bp, Homo sapiens
  chr17:19842321-19842411
  hypo
ggagtgagccaccgtgcccgaccacgaattactttttttacagagtaagaaaagttaaatgaaaagaataccatacgttacagagctggc

SEQ ID NO: 92299 - DNA, 94 bp, Homo sapiens
  chr17:19861687-19861781
  hypo
gtgtgctcttattcgcgaccaagttgttgaatgaaaactttcagcctctaaccaaaatttcaccaaatgctccattcgccgaagttccatgaat

SEQ ID NO: 92300 - DNA, 30 bp, Homo sapiens
  chr17:19989171-19989201
  hypo
actctgggtacccacggcgggatgcagatg

SEQ ID NO: 92301 - DNA, 30 bp, Homo sapiens; identical to SEQ ID NO: 30124
  chr17:20013872-20013902
  hypo

SEQ ID NO: 92302 - DNA, 31 bp, Homo sapiens
  chr17:20014223-20014254
  hypo
ccctgttgatcccttgcgaaggtgggtgtct

SEQ ID NO: 92303 - DNA, 29 bp, Homo sapiens
  chr17:20039442-20039471
  hypo
cattgcactgggcgcggtggctcacactt

SEQ ID NO: 92304 - DNA, 167 bp, Homo sapiens; identical to SEQ ID NO: 11034
  chr17:20059179-20059346
  hypo

SEQ ID NO: 92305 - DNA, 121 bp, Homo sapiens
  chr17:20065369-20065490
  hypo
attgctgggattacaggcatgagccaccgtgccctgctctcatttctgtcacttctgccctcagacttcgggcaaataattttttatttttttatatatatattttttagacagagtctcg

SEQ ID NO: 92306 - DNA, 23 bp, Homo sapiens
  chr17:20065729-20065752
  hypo
attacagacgtgagccaccgcgc

SEQ ID NO: 92307 - DNA, 84 bp, Homo sapiens
  chr17:20087135-20087219
  hypo
gaacccagaaatatggaaggccgactatatcattcttatgaaattttattaaataagaatgatgtcaaccgggcgtggtggctc

SEQ ID NO: 92308 - DNA, 239 bp, Homo sapiens
  chr17:20108088-20108327
  hypo
ctagaggaagaaaaccgggtcctgaaggagaaactgatctatcttgagcactccccaaattcagaaggggcagcaagtcacactggcgacagcagctgcccaacatccataactcaagagtcaagcttcggaagcccaactggaaatcagatgtccagtgacattgatgagtataaaaaaaacatacatggaaatgcattacggacatcaggctcctcaagtagcgatgttaccaaagc

SEQ ID NO: 92309 - DNA, 30 bp, Homo sapiens
  chr17:20108877-20108907
  hypo
ttagaaatgattaaacgtctgaaggaagaa

SEQ ID NO: 92310 - DNA, 30 bp, Homo sapiens; identical to SEQ ID NO: 30126
  chr17:20137404-20137434
  hypo

SEQ ID NO: 92311 - DNA, 79 bp, Homo sapiens
  chr17:20141014-20141093
  hypo
ggcaaaataggaagccatctgcgtgatgtcacattccgaagaagtcagaaggttcggcgagttggagctttactcttgt

SEQ ID NO: 92312 - DNA, 30 bp, Homo sapiens; identical to SEQ ID NO: 30127
  chr17:20170316-20170346
  hypo

SEQ ID NO: 92313 - DNA, 34 bp, Homo sapiens
  chr17:20220060-20220094
  hypo
gtgccagtggcgcgatttcagctcactcaggagt

SEQ ID NO: 92314 - DNA, 30 bp, Homo sapiens; identical to SEQ ID NO: 30128
  chr17:20516157-20516187
  hypo

SEQ ID NO: 92315 - DNA, 154 bp, Homo sapiens
  chr17:20805560-20805714
  hypo
ccggcccccagtaaacgcggattcctgctcgtggccttctacgcccattactggagcagcagccatcagcgtagacgacgacgaagtctcccatgtaggaaaacgtgtctctgctaactggaggcgccggcttcaccctcggcttcatgtgctt

SEQ ID NO: 92316 - DNA, 2 bp, Homo sapiens
  chr17:20817580-20817582
  hypo
ga

SEQ ID NO: 92317 - DNA, 43 bp, Homo sapiens
  chr17:20817881-20817924
  hypo
aaaaaaaaaatgtgactctttcgaaaaaaaaaagagcagatat

SEQ ID NO: 92318 - DNA, 188 bp, Homo sapiens
  chr17:20841353-20841541
  hypo
tgcccagtgcgggtctcgcttcctgacgcaggtgcgccttgggctcccacaggaagcggtcacatccagactcaccaggcctgagatgttggaagatggagaagcctttgccacaggaaaaatcctccatgaacacaatgaaacttggcctgcacctgggacatccttctccacggctagtctacaat

SEQ ID NO: 92319 - DNA, 31 bp, Homo sapiens; identical to SEQ ID NO: 30129
  chr17:20905668-20905699
  hypo

SEQ ID NO: 92320 - DNA, 440 bp, Homo sapiens
  chr17:20908043-20908483
  hypo
gagggagcatttgtggcaccacgtggagcggcctttcctagtggagctgcgggcagccaatagtggagctgcgggcagccaagcgggaagcaggtcagtggcgggggatccgctgggcgccctacaaggcagacaggagcccacccccagctcttggccagaggccctggacacccacaccgctaagcaccacttacttgttgtcattgttgagactgtccgtgggctgctggtactgtccattcatcctgctctctttgctgtaacagacaacggcaggattcagcatcattaaaatcatcaggcccagagacacaaggctctcgtgaaaccaacacttatccaagcttgaccatgcagatgctgcaccgaggtgcactttatgcttcaggcagaaatctccccatgtttcgtgaggacactgacgctcaagctgtgga

SEQ ID NO: 92321 - DNA, 196 bp, Homo sapiens; identical to SEQ ID NO: 30130
  chr17:20914086-20914282
  hypo

SEQ ID NO: 92322 - DNA, 186 bp, Homo sapiens
  chr17:20919059-20919245
  hypo
cccacctttgcagtgtcggtggagcacgtccagggccgcgatgaggaactcgtgggcgtcctgctgctcgtagcctgctaggtgcctcgcgtgggtccacaccaggtgcagcaacttatacgggatgtgaggggaccggtgtccagagtaaaactgccagagggcggggaaggaaaccttgtcagg

SEQ ID NO: 92323 - DNA, 131 bp, Homo sapiens
  chr17:20920702-20920833
  hypo
gctgaggcggcagccgtgaacgccttgctctgaacgctgccatgctctgatgccggggacagaagtggacaggaacgccacacgtgcagcccacaggaacagccaacgtgcagcgcgtagctcatgaggac

SEQ ID NO: 92324 - DNA, 95 bp, Homo sapiens
  chr17:20950573-20950668
  hypo
aagaatcccacagtgtagtgtgcttagtagcaatattgccagcaacattagcgggatgttataggaatataaaactgcagcgataaaggaaagtc

SEQ ID NO: 92325 - DNA, 30 bp, Homo sapiens; identical to SEQ ID NO: 30132
  chr17:21096617-21096647
  hypo

SEQ ID NO: 92326 - DNA, 44 bp, Homo sapiens
  chr17:21100033-21100077
  hypo
aaatattggcctggccaggcacggcagctcacgcctgtaatccc

SEQ ID NO: 92327 - DNA, 30 bp, Homo sapiens
  chr17:21101945-21101975
  hypo
ggtgcccgccagcacggccgtcttgtgcag

SEQ ID NO: 92328 - DNA, 222 bp, Homo sapiens
  chr17:21103995-21104217
  hypo
tggcccatgtacctgaagctccgaatgtgcctgacaggaactagcttcctttcatggctaacgagaagcacagccctcagtgtgcacagacgcgaaggtcccgtccgcccagcctgtcctggcaggcacacctggctgcggtgcagaggagagtcatggggagctgagccacctggccattggccgtaatatgggagtgacgagtgaagacattcataacaa

SEQ ID NO: 92329 - DNA, 42 bp, Homo sapiens
  chr17:21128220-21128262
  hypo
ccactgcactccagcctgggcgacagagtgagactgtctcca

SEQ ID NO: 92330 - DNA, 30 bp, Homo sapiens
  chr17:21144258-21144288
  hypo
gctttaaggcagcccgaggcgaggaggcca

SEQ ID NO: 92331 - DNA, 30 bp, Homo sapiens; identical to SEQ ID NO: 30133
  chr17:21157484-21157514
  hypo

SEQ ID NO: 92332 - DNA, 30 bp, Homo sapiens
  chr17:21160073-21160103
  hypo
tgtagctctcacttgcggcggcctgttgaa

SEQ ID NO: 92333 - DNA, 84 bp, Homo sapiens; identical to SEQ ID NO: 30134
  chr17:21160807-21160891
  hypo

SEQ ID NO: 92334 - DNA, 31 bp, Homo sapiens; identical to SEQ ID NO: 30135
  chr17:21196972-21197003
  hypo

SEQ ID NO: 92335 - DNA, 88 bp, Homo sapiens
  chr17:21204235-21204323
  hypo
cctggacatcaacatgcgcacggtcgactgtttctacactgtcaccttctacggggcactattcagagaggtgcgtccttgcatgatg

SEQ ID NO: 92336 - DNA, 30 bp, Homo sapiens
  chr17:21220792-21220822
  hypo
tgcagcagacaggccgggcgtgttggctca

SEQ ID NO: 92337 - DNA, 48 bp, Homo sapiens; identical to SEQ ID NO: 30136
  chr17:21221774-21221822
  hypo

SEQ ID NO: 92338 - DNA, 182 bp, Homo sapiens; identical to SEQ ID NO: 30137
  chr17:21793591-21793773
  hypo

SEQ ID NO: 92339 - DNA, 216 bp, Homo sapiens
  chr17:21832213-21832429
  hypo
gcccatgggctgctctctcaccggtgggtcgtggttgcggagagtagaacccggaaaattcaggggttgcctgggggtaggtgttaccgtgccactgccctatgtctttgtgcgtttgtgtgtgtgcgtaggtctctctcttatttctctctctctcctctctcgctcttttgctctgtgtccgtctgtgtgtgcgtgtgtgtgtctgttgggaca

SEQ ID NO: 92340 - DNA, 30 bp, Homo sapiens
  chr17:25336165-25336195
  hypo
gttcttgtagctgagcggaaatgcccacag

SEQ ID NO: 92341 - DNA, 26 bp, Homo sapiens
  chr17:25432197-25432223
  hypo
cccccgtggagatttttttaaataaa

SEQ ID NO: 92342 - DNA, 26 bp, Homo sapiens
  chr17:25619930-25619956
  hypo
gagatctcttaaaagcggctatgcag

SEQ ID NO: 92343 - DNA, 460 bp, Homo sapiens
  chr17:25620255-25620715
  hypo
aaaaaaaagcggctatgcaacactctactctgtcccatgaatatctgccacatatttgaattcccagtcttatacgccccaggcctttgcaatgtttagggtccacacgagaagccattaaaatgcaaatacgtcatctgtgaccgggaaccaagctggcatctagcagatactgacacatttatcagtctgatgtgtggacaactaggtgcctcccagaggccttcaggtaaggtggaggaagggccaattctgagctgacacagtgggatccatcttggccaggacagtgggatccatcttggccaggacaaaggcagtccagagaggccccgcggcgcggtgcggcgcgatcacgcccgagtctccttctcgttcccctcggcccttcctaaaacctgctggctcaggtctgaacaatcgcagctggacaggtggtgcacaacgatgttaattttca

SEQ ID NO: 92344 - DNA, 73 bp, Homo sapiens
  chr17:25680100-25680173
  hypo
gaggaaccacatgacagaggacggttctaggtccgccaagtagcaggacttcgttctaaggtggcactactca

SEQ ID NO: 92345 - DNA, 167 bp, Homo sapiens
  chr17:25842423-25842590
  hypo
ctaaggacatgtttctcagaacgtatttctgtcgttacacgccgcatgactgtagtttgagaagacacattttcttctaaacaacttaatgactttttcggtgtggctgggagtctcagtaggctctactgaggtgtggtttgaacggccactttgcctctcatata

SEQ ID NO: 92346 - DNA, 77 bp, Homo sapiens
  chr17:25878806-25878883
  hypo
ctgcctccagcaccacggtccaggccgctgtcacctcctgcagaatctctgcagtggcacctcgccccttgcattcc

SEQ ID NO: 92347 - DNA, 293 bp, Homo sapiens
  chr17:25879108-25879401
  hypo
tctggtgttgagtgttgtcaccgcctccaggcagtcgtccctggtgatgtgatctaaagatcatcccctgcccatcattctcgcctgcgcacctgagtttattttctcaatgacactgaccactttctggagtgacctaaccgatttgttgtctgtggtctgtctgctccccctgggatgcgagcaccatgagacacggccttgctgtttgggtttgtttgccacaaaatccccattgagtgtcgggcccaatatggcagttgcttggttgcgacagatataaaaataaatac

SEQ ID NO: 92348 - DNA, 30 bp, Homo sapiens
  chr17:25898810-25898840
  hypo
agtgtgtttgtatacgtggccggtacagca

SEQ ID NO: 92349 - DNA, 53 bp, Homo sapiens; identical to SEQ ID NO: 30141
  chr17:25904505-25904558
  hypo

SEQ ID NO: 92350 - DNA, 282 bp, Homo sapiens
  chr17:25907594-25907876
  hypo
gcacggtgctgagatcgatgttttcaattcccatcccaccactttcttagctctctggccttgggcagtgtctgtggcctccctgagtcacagtgacctccactgtacactggggagaagaacagatattgcgggagggaggagggaggcagggcttgtgcaatacaggtgcgtcagtcccttctcacaggctgtaaagaaatacctgaaactggattggttatttatttatttatgagacggcctggagtgcagtggcgcgatcttggctcactgcaacct

SEQ ID NO: 92351 - DNA, 30 bp, Homo sapiens; identical to SEQ ID NO: 30143
  chr17:25930890-25930920
  hypo

SEQ ID NO: 92352 - DNA, 32 bp, Homo sapiens
  chr17:25931253-25931285
  hypo
gcatctcaccctcagcgcggtggtaggtatca

SEQ ID NO: 92353 - DNA, 290 bp, Homo sapiens
  chr17:25931552-25931842
  hypo
tgcctattgccatgctatccacgcggcctttcccctagccaggtgtgagtcagagtaagtacctttgtctcagatctctcccgggagtccccgctagctgagagcagagcggtgttcctcaaggtctccttgacaaaccttgtttactcttaggctcgatgaccagccgaaagcagatgtgttggaagctcacgaagcggaggtgagggtgacacacacgtgtccacagatggccccccctcttttttcccttccccatctcagaatgcgcagggggcttgagggtgagt

SEQ ID NO: 92354 - DNA, 35 bp, Homo sapiens; identical to SEQ ID NO: 30146
  chr17:25933866-25933901
  hypo

SEQ ID NO: 92355 - DNA, 229 bp, Homo sapiens; identical to SEQ ID NO: 30147
  chr17:25934803-25935032
  hypo

SEQ ID NO: 92356 - DNA, 323 bp, Homo sapiens
  chr17:25936169-25936492
  hypo
tggcacctccgtcatcgttgcacatcttcactcctcctgatgtgtcctccagggcatgggatatcttcatgccaagggcatcgtacacaaagatctcaaatctaagaacgtcttctatgacaacggcaaggtggtcatcacagacttcgggctgtttgggatctcaggcgtggtccgagagggacggtgagttggtcttgagtgtctgggtgggttgtgggtgctggatggggaagagcagggctgaggtctgggcactttcactgtttgttgctgagctgcagccctccctgcagggaagcccaggtcgctttggtcctgcc

SEQ ID NO: 92357 - DNA, 22 bp, Homo sapiens
  chr17:25947018-25947040
  hypo
cggccttcgggccctgtcttga

SEQ ID NO: 92358 - DNA, 31 bp, Homo sapiens; identical to SEQ ID NO: 30148
  chr17:25948186-25948217
  hypo

SEQ ID NO: 92359 - DNA, 30 bp, Homo sapiens
  chr17:26117800-26117830
  hypo
aaccggtcagaaaccgtttgtcctggtttg

SEQ ID NO: 92360 - DNA, 394 bp, Homo sapiens; identical to SEQ ID NO: 53806
  chr17:26120456-26120850
  hypo

SEQ ID NO: 92361 - DNA, 63 bp, Homo sapiens; identical to SEQ ID NO: 53807
  chr17:26120901-26120964
  hypo

SEQ ID NO: 92362 - DNA, 30 bp, Homo sapiens; identical to SEQ ID NO: 30149
  chr17:26206829-26206859
  hypo

SEQ ID NO: 92363 - DNA, 30 bp, Homo sapiens
  chr17:26216056-26216086
  hypo
gcggggaggtgctgtcgcctctcaaagtgt

SEQ ID NO: 92364 - DNA, 24 bp, Homo sapiens
  chr17:26216333-26216357
  hypo
tttctttttttttttttgagacgg

SEQ ID NO: 92365 - DNA, 22 bp, Homo sapiens
  chr17:26263177-26263199
  hypo
tttgaaaacaagaagaatggcc

SEQ ID NO: 92366 - DNA, 81 bp, Homo sapiens; identical to SEQ ID NO: 30151
  chr17:26263498-26263579
  hypo

SEQ ID NO: 92367 - DNA, 30 bp, Homo sapiens; identical to SEQ ID NO: 30152
  chr17:26292636-26292666
  hypo

SEQ ID NO: 92368 - DNA, 30 bp, Homo sapiens
  chr17:26385532-26385562
  hypo
agagtttcgaagattcgggtcatgtcttag

SEQ ID NO: 92369 - DNA, 30 bp, Homo sapiens
  chr17:26487523-26487553
  hypo
cagcctttaatcatcggccatgtgtccatt

SEQ ID NO: 92370 - DNA, 31 bp, Homo sapiens; identical to SEQ ID NO: 30153
  chr17:26851172-26851203
  hypo

SEQ ID NO: 92371 - DNA, 328 bp, Homo sapiens
  chr17:26851580-26851908
  hypo
tcactgcccccacacagcccccgcattgcgtcaccagggcccgagcaagtccagggccactgcccagccggccccggccctgggcccttcaggctctcaccctcagacaagtatcctggctttggctttgaggaggccgcagcaagcagccctgggcgattcctcaagggcagccacgcgcccttccacccgtacaagcggcctttccatgaggacgtcttcccagaggccgagaccaccctggccctcaaaggacactcctttaagaccccagggccgctggaggccttcgaggagatcccagtggacgtggcggaggccgaggcct

SEQ ID NO: 92372 - DNA, 31 bp, Homo sapiens; identical to SEQ ID NO: 30154
  chr17:26861031-26861062
  hypo

SEQ ID NO: 92373 - DNA, 78 bp, Homo sapiens
  chr17:26862777-26862855
  hypo
aaaaccactctcagctctggagagactgcaaagggctccgtgttctattctatactcgattgtgagtgaccagtagtc

SEQ ID NO: 92374 - DNA, 102 bp, Homo sapiens; identical to SEQ ID NO: 30155
  chr17:26864423-26864525
  hypo

SEQ ID NO: 92375 - DNA, 31 bp, Homo sapiens; identical to SEQ ID NO: 30156
  chr17:26874434-26874465
  hypo

SEQ ID NO: 92376 - DNA, 30 bp, Homo sapiens
  chr17:26902137-26902167
  hypo
caccttgatgcccacgacgatgcccttatc

SEQ ID NO: 92377 - DNA, 31 bp, Homo sapiens; identical to SEQ ID NO: 11043
  chr17:26925397-26925428
  hypo

SEQ ID NO: 92378 - DNA, 332 bp, Homo sapiens; identical to SEQ ID NO: 11044
  chr17:26925693-26926025
  hypo

SEQ ID NO: 92379 - DNA, 342 bp, Homo sapiens; identical to SEQ ID NO: 11045
  chr17:26926083-26926425
  hypo

SEQ ID NO: 92380 - DNA, 26 bp, Homo sapiens
  chr17:26930175-26930201
  hypo
ggatttacaggcgtgagccactgcgc

SEQ ID NO: 92381 - DNA, 136 bp, Homo sapiens; identical to SEQ ID NO: 30160
  chr17:26959954-26960090
  hypo

SEQ ID NO: 92382 - DNA, 239 bp, Homo sapiens; identical to SEQ ID NO: 30161
  chr17:26960858-26961097
  hypo

SEQ ID NO: 92383 - DNA, 176 bp, Homo sapiens; identical to SEQ ID NO: 30162
  chr17:26961701-26961877
  hypo

SEQ ID NO: 92384 - DNA, 192 bp, Homo sapiens; identical to SEQ ID NO: 30163
  chr17:26962145-26962337
  hypo

SEQ ID NO: 92385 - DNA, 31 bp, Homo sapiens; identical to SEQ ID NO: 30164
  chr17:27011596-27011627
  hypo

SEQ ID NO: 92386 - DNA, 20 bp, Homo sapiens
  chr17:27036963-27036983
  hypo
gatatcgtgctactgcactc

SEQ ID NO: 92387 - DNA, 25 bp, Homo sapiens
  chr17:27056851-27056876
  hypo
ccgcgacaggccagaagtgagattt

SEQ ID NO: 92388 - DNA, 129 bp, Homo sapiens
  chr17:27075315-27075444
  hypo
tgtgagaataagtgtggtgcccgcatgatgcggcggctgctggcccagcatgccacctctgagtgccccaagcgcactcagccctgcacctactgcactaaggagttcgtctttgacaccatccaggtg

SEQ ID NO: 92389 - DNA, 30 bp, Homo sapiens
  chr17:27086029-27086059
  hypo
gggacgctgtgggtcgacacccgggtgctt

SEQ ID NO: 92390 - DNA, 36 bp, Homo sapiens
  chr17:27138131-27138167
  hypo
aagataaacctgctccaaacacgtttcgttgaaaat

SEQ ID NO: 92391 - DNA, 30 bp, Homo sapiens; identical to SEQ ID NO: 30167
  chr17:27170972-27171002
  hypo

SEQ ID NO: 92392 - DNA, 97 bp, Homo sapiens
  chr17:27171309-27171406
  hypo
ggcccaagatacaacgtaagggggaaaaagagaagaaaaaaagacaagttgagtgctcaatgaggaatgttaaaaaaatttaaataggccaggtgca

SEQ ID NO: 92393 - DNA, 22 bp, Homo sapiens
  chr17:27174925-27174947
  hypo
cgcctcaaaaaaaaaaaaaaga

SEQ ID NO: 92394 - DNA, 39 bp, Homo sapiens
  chr17:27179809-27179848
  hypo
ctcatgcctgtaaactcgcacttggggaggccaaggcag

SEQ ID NO: 92395 - DNA, 102 bp, Homo sapiens; identical to SEQ ID NO: 30168
  chr17:27181276-27181378
  hypo

SEQ ID NO: 92396 - DNA, 24 bp, Homo sapiens
  chr17:27195634-27195658
  hypo
atcgtgtaagaaagcccctgaatg

SEQ ID NO: 92397 - DNA, 186 bp, Homo sapiens; identical to SEQ ID NO: 30169
  chr17:27207672-27207858
  hypo

SEQ ID NO: 92398 - DNA, 25 bp, Homo sapiens
  chr17:27222572-27222597
  hypo
gcccggccaatagattttcaaggta

SEQ ID NO: 92399 - DNA, 30 bp, Homo sapiens
  chr17:27225755-27225785
  hypo
cccactgaggggctcgatgccctcttgtag

SEQ ID NO: 92400 - DNA, 210 bp, Homo sapiens
  chr17:27228010-27228220
  hypo
ggtgggctgcatagcaggtgacgccagtggcctcaagctggttggcgagctcccgggcaaacagtacattagccagcttagtgtcagcatatgcccgcagctcctgccgccagcccaccactgggcggtccaggcgtttgaagtcaagacgtccccgacagtgggcagctgaggctaccaccaccacgcggctaggggcacatgccttca

SEQ ID NO: 92401 - DNA, 30 bp, Homo sapiens
  chr17:27237349-27237379
  hypo
cttgatcagcttctcgtccagcatatttat

SEQ ID NO: 92402 - DNA, 30 bp, Homo sapiens; identical to SEQ ID NO: 53830
  chr17:27254415-27254445
  hypo

SEQ ID NO: 92403 - DNA, 31 bp, Homo sapiens
  chr17:27301127-27301158
  hypo
gcacgtgccctaatggcgtaacccacagacg

SEQ ID NO: 92404 - DNA, 30 bp, Homo sapiens; identical to SEQ ID NO: 53834
  chr17:27329672-27329702
  hypo

SEQ ID NO: 92405 - DNA, 534 bp, Homo sapiens; identical to SEQ ID NO: 53835
  chr17:27332300-27332834
  hypo

SEQ ID NO: 92406 - DNA, 119 bp, Homo sapiens; identical to SEQ ID NO: 53836
  chr17:27333169-27333288
  hypo

SEQ ID NO: 92407 - DNA, 30 bp, Homo sapiens; identical to SEQ ID NO: 30170
  chr17:27345531-27345561
  hypo

SEQ ID NO: 92408 - DNA, 30 bp, Homo sapiens
  chr17:27402878-27402908
  hypo
tgccccacactcggcgtggtccctggagct

SEQ ID NO: 92409 - DNA, 30 bp, Homo sapiens; identical to SEQ ID NO: 30171
  chr17:27404111-27404141
  hypo

SEQ ID NO: 92410 - DNA, 533 bp, Homo sapiens; identical to SEQ ID NO: 30172
  chr17:27406520-27407053
  hypo

SEQ ID NO: 92411 - DNA, 70 bp, Homo sapiens
  chr17:27407261-27407331
  hypo
gtagctcaagacctcgttgacggcagcctccaggtctgggtccaggtaggagtgacggctgacggagcgg

SEQ ID NO: 92412 - DNA, 67 bp, Homo sapiens; identical to SEQ ID NO: 30174
  chr17:27407716-27407783
  hypo

SEQ ID NO: 92413 - DNA, 61 bp, Homo sapiens; identical to SEQ ID NO: 30175
  chr17:27411025-27411086
  hypo

SEQ ID NO: 92414 - DNA, 374 bp, Homo sapiens; identical to SEQ ID NO: 30176
  chr17:27411532-27411906
  hypo

SEQ ID NO: 92415 - DNA, 30 bp, Homo sapiens
  chr17:27413192-27413222
  hypo
taactcatcttgagcgggcagagctggagg

SEQ ID NO: 92416 - DNA, 137 bp, Homo sapiens; identical to SEQ ID NO: 30177
  chr17:27419325-27419462
  hypo

SEQ ID NO: 92417 - DNA, 37 bp, Homo sapiens
  chr17:27421182-27421219
  hypo
ccctaggctcaggggccgagaacgtccaccagccagt

SEQ ID NO: 92418 - DNA, 109 bp, Homo sapiens; identical to SEQ ID NO: 30178
  chr17:27421467-27421576
  hypo

SEQ ID NO: 92419 - DNA, 30 bp, Homo sapiens; identical to SEQ ID NO: 30179
  chr17:27436900-27436930
  hypo

SEQ ID NO: 92420 - DNA, 30 bp, Homo sapiens
  chr17:27577278-27577308
  hypo
gttttgataatgtccggtccctgaaggtgg

SEQ ID NO: 92421 - DNA, 27 bp, Homo sapiens
  chr17:27686897-27686924
  hypo
tgggcaacagagcgagactgtctcaaa

SEQ ID NO: 92422 - DNA, 81 bp, Homo sapiens
  chr17:27716045-27716126
  hypo
acatacactgtatacacggattgcttaggtctgatcaacatgctccttccttggagcacagatctactatggccagcctgg

SEQ ID NO: 92423 - DNA, 181 bp, Homo sapiens
  chr17:27716185-27716366
  hypo
caggcgtgagccaccgggcccggcccagagttaatttttattcatgaaactcatataacaggtttatttatttcagtcgttttgttggttaaagaaccaagattttttatgactacactttgtgtacacttttaggttctctcttttttttttttttttttgagacgagtctcattctgtc

SEQ ID NO: 92424 - DNA, 54 bp, Homo sapiens; identical to SEQ ID NO: 11055
  chr17:27893140-27893194
  hypo

SEQ ID NO: 92425 - DNA, 402 bp, Homo sapiens; identical to SEQ ID NO: 53841
  chr17:27893344-27893746
  hypo

SEQ ID NO: 92426 - DNA, 134 bp, Homo sapiens; identical to SEQ ID NO: 30184
  chr17:27902813-27902947
  hypo

SEQ ID NO: 92427 - DNA, 200 bp, Homo sapiens; identical to SEQ ID NO: 30185
  chr17:27903153-27903353
  hypo

SEQ ID NO: 92428 - DNA, 30 bp, Homo sapiens
  chr17:27903925-27903955
  hypo
ctggtctgtgtcctcgtcagaggccacgct

SEQ ID NO: 92429 - DNA, 348 bp, Homo sapiens
  chr17:27909035-27909383
  hypo
ctgccttggcagccacgtgcagaggtgtggtgcccttctctgggtggaagaagttggcctgggcacccagggagagcaggcgcagacatgtctccaggttgcctgtccgcacgctcgagtgtagttgctaagaggagcagagtgtgcagtgaatacgcatgtgcgtgaggcgcacctccccacccacaagctgcaccctggctgcccctgggacacctagcagctccaaggaggcctgcccaaaccagactatgtcgggaggacagaggcttcccgctaggggttaatgccaattaataaacgctgccgtcagtcaccatctaccacgtgtgctgtgtgccctgctta

SEQ ID NO: 92430 - DNA, 724 bp, Homo sapiens
  chr17:27934685-27935409
  hypo
cagggctgtctggctccggagggctgcctccgacgtgactggggctttatcttccactcctcctcctcctccaggtggacatcgagcagctggatccccgcggccggactcccctgcacctggccaccacgctggggcaccttgagtgtgcccgtgtgctcctggcgcacggcgcagacgtgggcagggagaatcgcagcggctggacaggtgggcagccctgctcaccccagccccacagccggggcctccccagcatcatagacctatggttggctgaagggtcctgccctgtgaccttgcctcgccctcccccagtgctccaggaggctgtgagtacccgggacctggagctggtgcagctggtgcttcggtaccgggactaccagcgggtggtgaagcggctggcgggcatccccgtgctcctggagaagctgcgcaaggtgaggcccagcctctcagcctccacgggagcccttgagcccttctccagtgcagacttagcctctctccccttcgtcctccaggcccaggacttctacgtggagatgaaatgggagttcactagctggggtaagcgggctgcagcaggtcgcttctgggctctcccactttaggtcctgcgcttgctcccctgcctggaatgtgttctcatagttcttccggcggttccctctatgccttagctcagctcagggccaccgcctcagctaggcctttccag

SEQ ID NO: 92431 - DNA, 31 bp, Homo sapiens; identical to SEQ ID NO: 30187
  chr17:27936394-27936425
  hypo

SEQ ID NO: 92432 - DNA, 96 bp, Homo sapiens
  chr17:27939246-27939342
  hypo
acttcatcaccctgcgtctgcctcctggcttcccagttaagattggtgagaccgcacggccatttctcctgagcccgtggcgggccgaccggggtt

SEQ ID NO: 92433 - DNA, 904 bp, Homo sapiens; identical to SEQ ID NO: 53845
  chr17:27942511-27943415
  hypo

SEQ ID NO: 92434 - DNA, 30 bp, Homo sapiens; identical to SEQ ID NO: 30190
  chr17:27948244-27948274
  hypo

SEQ ID NO: 92435 - DNA, 56 bp, Homo sapiens; identical to SEQ ID NO: 11061
  chr17:28089159-28089215
  hypo

SEQ ID NO: 92436 - DNA, 31 bp, Homo sapiens; identical to SEQ ID NO: 30192
  chr17:28250200-28250231
  hypo

SEQ ID NO: 92437 - DNA, 260 bp, Homo sapiens; identical to SEQ ID NO: 30193
  chr17:28299359-28299619
  hypo

SEQ ID NO: 92438 - DNA, 30 bp, Homo sapiens; identical to SEQ ID NO: 30194
  chr17:28395659-28395689
  hypo

SEQ ID NO: 92439 - DNA, 702 bp, Homo sapiens; identical to SEQ ID NO: 53852
  chr17:28562556-28563258
  hypo

SEQ ID NO: 92440 - DNA, 30 bp, Homo sapiens
  chr17:28701624-28701654
  hypo
ctagacatacctgccgctggatttcataca

SEQ ID NO: 92441 - DNA, 36 bp, Homo sapiens
  chr17:28740013-28740049
  hypo
gagctgttcctattcggccatcttggaagtgactga

SEQ ID NO: 92442 - DNA, 20 bp, Homo sapiens
  chr17:28925643-28925663
  hypo
gtatttatttttgatacgga

SEQ ID NO: 92443 - DNA, 31 bp, Homo sapiens; identical to SEQ ID NO: 30196
  chr17:29094864-29094895
  hypo

SEQ ID NO: 92444 - DNA, 34 bp, Homo sapiens
  chr17:29247878-29247912
  hypo
cacgtgtgtgcttgcgcccgcatgtatgttgaat

SEQ ID NO: 92445 - DNA, 444 bp, Homo sapiens; identical to SEQ ID NO: 11064
  chr17:29421943-29422387
  hypo

SEQ ID NO: 92446 - DNA, 145 bp, Homo sapiens; identical to SEQ ID NO: 11066
  chr17:29482999-29483144
  hypo

SEQ ID NO: 92447 - DNA, 92 bp, Homo sapiens; identical to SEQ ID NO: 11067
  chr17:29486026-29486118
  hypo

SEQ ID NO: 92448 - DNA, 192 bp, Homo sapiens; identical to SEQ ID NO: 11068
  chr17:29490202-29490394
  hypo

SEQ ID NO: 92449 - DNA, 110 bp, Homo sapiens; identical to SEQ ID NO: 11069
  chr17:29496907-29497017
  hypo

SEQ ID NO: 92450 - DNA, 69 bp, Homo sapiens; identical to SEQ ID NO: 11070
  chr17:29508438-29508507
  hypo

SEQ ID NO: 92451 - DNA, 89 bp, Homo sapiens; identical to SEQ ID NO: 11071
  chr17:29508714-29508803
  hypo

SEQ ID NO: 92452 - DNA, 164 bp, Homo sapiens; identical to SEQ ID NO: 11072
  chr17:29509519-29509683
  hypo

SEQ ID NO: 92453 - DNA, 175 bp, Homo sapiens; identical to SEQ ID NO: 11073
  chr17:29527438-29527613
  hypo

SEQ ID NO: 92454 - DNA, 124 bp, Homo sapiens; identical to SEQ ID NO: 11074
  chr17:29528053-29528177
  hypo

SEQ ID NO: 92455 - DNA, 76 bp, Homo sapiens; identical to SEQ ID NO: 11075
  chr17:29528427-29528503
  hypo

SEQ ID NO: 92456 - DNA, 141 bp, Homo sapiens; identical to SEQ ID NO: 11076
  chr17:29533248-29533389
  hypo

SEQ ID NO: 92457 - DNA, 136 bp, Homo sapiens; identical to SEQ ID NO: 11077
  chr17:29541467-29541603
  hypo

SEQ ID NO: 92458 - DNA, 137 bp, Homo sapiens; identical to SEQ ID NO: 11078
  chr17:29546008-29546145
  hypo

SEQ ID NO: 92459 - DNA, 81 bp, Homo sapiens; identical to SEQ ID NO: 11079
  chr17:29548866-29548947
  hypo

SEQ ID NO: 92460 - DNA, 125 bp, Homo sapiens; identical to SEQ ID NO: 11080
  chr17:29550460-29550585
  hypo

SEQ ID NO: 92461 - DNA, 157 bp, Homo sapiens; identical to SEQ ID NO: 11081
  chr17:29552111-29552268
  hypo

SEQ ID NO: 92462 - DNA, 251 bp, Homo sapiens; identical to SEQ ID NO: 11082
  chr17:29553451-29553702
  hypo

SEQ ID NO: 92463 - DNA, 75 bp, Homo sapiens; identical to SEQ ID NO: 11083
  chr17:29554234-29554309
  hypo

SEQ ID NO: 92464 - DNA, 85 bp, Homo sapiens; identical to SEQ ID NO: 11084
  chr17:29554539-29554624
  hypo

SEQ ID NO: 92465 - DNA, 442 bp, Homo sapiens; identical to SEQ ID NO: 11085
  chr17:29556041-29556483
  hypo

SEQ ID NO: 92466 - DNA, 141 bp, Homo sapiens; identical to SEQ ID NO: 11086
  chr17:29556851-29556992
  hypo

SEQ ID NO: 92467 - DNA, 124 bp, Homo sapiens; identical to SEQ ID NO: 11087
  chr17:29557276-29557400
  hypo

SEQ ID NO: 92468 - DNA, 85 bp, Homo sapiens; identical to SEQ ID NO: 11088
  chr17:29557858-29557943
  hypo

SEQ ID NO: 92469 - DNA, 118 bp, Homo sapiens; identical to SEQ ID NO: 11089
  chr17:29559089-29559207
  hypo

SEQ ID NO: 92470 - DNA, 515 bp, Homo sapiens; identical to SEQ ID NO: 11090
  chr17:29559716-29560231
  hypo

SEQ ID NO: 92471 - DNA, 412 bp, Homo sapiens; identical to SEQ ID NO: 11091
  chr17:29562627-29563039
  hypo

SEQ ID NO: 92472 - DNA, 137 bp, Homo sapiens; identical to SEQ ID NO: 11092
  chr17:29576000-29576137
  hypo

SEQ ID NO: 92473 - DNA, 64 bp, Homo sapiens; identical to SEQ ID NO: 11093
  chr17:29579954-29580018
  hypo

SEQ ID NO: 92474 - DNA, 160 bp, Homo sapiens; identical to SEQ ID NO: 11094
  chr17:29585360-29585520
  hypo

SEQ ID NO: 92475 - DNA, 99 bp, Homo sapiens; identical to SEQ ID NO: 11095
  chr17:29586048-29586147
  hypo

SEQ ID NO: 92476 - DNA, 148 bp, Homo sapiens; identical to SEQ ID NO: 11096
  chr17:29587385-29587533
  hypo

SEQ ID NO: 92477 - DNA, 148 bp, Homo sapiens; identical to SEQ ID NO: 11097
  chr17:29588727-29588875
  hypo

SEQ ID NO: 92478 - DNA, 112 bp, Homo sapiens; identical to SEQ ID NO: 11098
  chr17:29592245-29592357
  hypo

SEQ ID NO: 92479 - DNA, 434 bp, Homo sapiens; identical to SEQ ID NO: 11099
  chr17:29652836-29653270
  hypo

SEQ ID NO: 92480 - DNA, 342 bp, Homo sapiens; identical to SEQ ID NO: 11100
  chr17:29654515-29654857
  hypo

SEQ ID NO: 92481 - DNA, 204 bp, Homo sapiens; identical to SEQ ID NO: 11101
  chr17:29657312-29657516
  hypo

SEQ ID NO: 92482 - DNA, 195 bp, Homo sapiens; identical to SEQ ID NO: 11102
  chr17:29661854-29662049
  hypo

SEQ ID NO: 92483 - DNA, 583 bp, Homo sapiens; identical to SEQ ID NO: 11103
  chr17:29663349-29663932
  hypo

SEQ ID NO: 92484 - DNA, 216 bp, Homo sapiens; identical to SEQ ID NO: 11104
  chr17:29664384-29664600
  hypo

SEQ ID NO: 92485 - DNA, 322 bp, Homo sapiens; identical to SEQ ID NO: 11105
  chr17:29664835-29665157
  hypo

SEQ ID NO: 92486 - DNA, 103 bp, Homo sapiens; identical to SEQ ID NO: 11106
  chr17:29665720-29665823
  hypo

SEQ ID NO: 92487 - DNA, 142 bp, Homo sapiens; identical to SEQ ID NO: 11107
  chr17:29667521-29667663
  hypo

SEQ ID NO: 92488 - DNA, 128 bp, Homo sapiens; identical to SEQ ID NO: 11108
  chr17:29670025-29670153
  hypo

SEQ ID NO: 92489 - DNA, 142 bp, Homo sapiens; identical to SEQ ID NO: 11109
  chr17:29676129-29676271
  hypo

SEQ ID NO: 92490 - DNA, 143 bp, Homo sapiens; identical to SEQ ID NO: 11110
  chr17:29677199-29677342
  hypo

SEQ ID NO: 92491 - DNA, 159 bp, Homo sapiens; identical to SEQ ID NO: 11111
  chr17:29679273-29679432
  hypo

SEQ ID NO: 92492 - DNA, 124 bp, Homo sapiens; identical to SEQ ID NO: 11112
  chr17:29683476-29683600
  hypo

SEQ ID NO: 92493 - DNA, 411 bp, Homo sapiens; identical to SEQ ID NO: 11113
  chr17:29683976-29684387
  hypo

SEQ ID NO: 92494 - DNA, 144 bp, Homo sapiens; identical to SEQ ID NO: 11114
  chr17:29685496-29685640
  hypo

SEQ ID NO: 92495 - DNA, 48 bp, Homo sapiens; identical to SEQ ID NO: 11115
  chr17:29685985-29686033
  hypo

SEQ ID NO: 92496 - DNA, 218 bp, Homo sapiens; identical to SEQ ID NO: 11116
  chr17:29687503-29687721
  hypo

SEQ ID NO: 92497 - DNA, 3666 bp, Homo sapiens; identical to SEQ ID NO: 11117
  chr17:29701029-29704695
  hypo

SEQ ID NO: 92498 - DNA, 312 bp, Homo sapiens; identical to SEQ ID NO: 53914
  chr17:29718209-29718521
  hypo

SEQ ID NO: 92499 - DNA, 497 bp, Homo sapiens; identical to SEQ ID NO: 53915
  chr17:29718749-29719246
  hypo

SEQ ID NO: 92500 - DNA, 31 bp, Homo sapiens; identical to SEQ ID NO: 11118
  chr17:29815732-29815763
  hypo

SEQ ID NO: 92501 - DNA, 31 bp, Homo sapiens; identical to SEQ ID NO: 30252
  chr17:29841345-29841376
  hypo

SEQ ID NO: 92502 - DNA, 150 bp, Homo sapiens
  chr17:29855418-29855568
  hypo
tccaggagcggcagcgcatgtctgaccgtctggaggacaccagcctgcggctcaaagatgagatggacctgtacaagcgcatgatggacaagctgcgacagaaccgccttgagttccagaaggagcgggaggcgacgcaggaggtaggtc

SEQ ID NO: 92503 - DNA, 26 bp, Homo sapiens
  chr17:29917505-29917531
  hypo
atagggagttgggatgcgtggttaat

SEQ ID NO: 92504 - DNA, 26 bp, Homo sapiens
  chr17:29917650-29917676
  hypo
gccacggcgcccggctgtcaggtata

SEQ ID NO: 92505 - DNA, 30 bp, Homo sapiens
  chr17:30036567-30036597
  hypo
cctttcaagtcgcccgagagcaaagtggta

SEQ ID NO: 92506 - DNA, 125 bp, Homo sapiens
  chr17:30243838-30243963
  hypo
ctttggcctaggtgcacacaccgcgggctccgctctaggtggggcacaggccttcgcccgccgcatgcaccctgggctgcgcagccccagccagcccgacccgggctcagcgacccctgcccccg

SEQ ID NO: 92507 - DNA, 19 bp, Homo sapiens
  chr17:30301484-30301503
  hypo
gcagcgagccgagatcgca

SEQ ID NO: 92508 - DNA, 121 bp, Homo sapiens
  chr17:30333040-30333161
  hypo
ggcatgagctatcgcgcccggccaagtatttttgtttaaattactttttggttgtcacttatctcaataaatattaacatatgtttacgaaacctttctttttcttttttttttttttttt

SEQ ID NO: 92509 - DNA, 117 bp, Homo sapiens
  chr17:30347606-30347723
  hypo
gtgaattaattatcaaacatgcgacagtttagcgaaaacggcaacattttggaataaatgactgtaacgcgcgtcctgcctgccaccctaactggcgcccattttgcaggtcagttg

SEQ ID NO: 92510 - DNA, 18 bp, Homo sapiens
  chr17:30484575-30484593
  hypo
atccatttgggaggtcga

SEQ ID NO: 92511 - DNA, 150 bp, Homo sapiens; identical to SEQ ID NO: 30256
  chr17:30529220-30529370
  hypo

SEQ ID NO: 92512 - DNA, 41 bp, Homo sapiens
  chr17:30582938-30582979
  hypo
gtgagccaccgcgcccagccgggttattcatattttcaagc

SEQ ID NO: 92513 - DNA, 31 bp, Homo sapiens; identical to SEQ ID NO: 30257
  chr17:30632642-30632673
  hypo

SEQ ID NO: 92514 - DNA, 33 bp, Homo sapiens
  chr17:30684633-30684666
  hypo
gggattacaggcgtgagccgccccacctgactt

SEQ ID NO: 92515 - DNA, 40 bp, Homo sapiens
  chr17:30710916-30710956
  hypo
tcaaaaaacaacaacaaaaaaacatcgactagagcagtgg

SEQ ID NO: 92516 - DNA, 155 bp, Homo sapiens
  chr17:30804368-30804523
  hypo
ggtattcagtacttgcggctcttcttcccgggcgtctgaagaagaacgatggtggggcgggttcttccttttggcagaagttgtgtggacacagcatactgcttatgagacttgggtaaatgttagtgtgcagaataaatcgctttcatggtttg

SEQ ID NO: 92517 - DNA, 90 bp, Homo sapiens; identical to SEQ ID NO: 53921
  chr17:30813421-30813511
  hypo

SEQ ID NO: 92518 - DNA, 50 bp, Homo sapiens
  chr17:30823890-30823940
  hypo
gaatgggctctaaacaggccacgctccacgtcagctcaaaaaaattaaga

SEQ ID NO: 92519 - DNA, 200 bp, Homo sapiens; identical to SEQ ID NO: 30261
  chr17:30844874-30845074
  hypo

SEQ ID NO: 92520 - DNA, 30 bp, Homo sapiens; identical to SEQ ID NO: 30262
  chr17:30856863-30856893
  hypo

SEQ ID NO: 92521 - DNA, 377 bp, Homo sapiens
  chr17:30954288-30954665
  hypo
ggagtgagtaggctagcgcacaccagcacaggcggtgccagacgtcagctgactgtatccattgaggttaccatggaaaccccttcctttgggacactgccatgagggtagggtgctttagaaatggtgatggggcacagaccggcgggcggatggatttcagcagggttcaccctgtacgcattacaaggacaatccatcttccaaacgaaatgatatctttctagcaagtcacgtcaaatagagcaataaagcatgaagtctggcataattacagtccatttacctttacaaaacagtcacatcggttcagataattgtctcttttctctcccctgcttgctttgtattctccacagaacgaaaggaggtatttg

SEQ ID NO: 92522 - DNA, 104 bp, Homo sapiens
  chr17:31048112-31048216
  hypo
ccaagatattctacttggtgccggcagcgttcatcatcaaatatctgtggagatttcttgtcattgggtttgatgcaacgaacgtaatatggttcctaaagaaa

SEQ ID NO: 92523 - DNA, 31 bp, Homo sapiens
  chr17:31104659-31104690
  hypo
ttttagaaaatgaatcctgttcggccgggcg

SEQ ID NO: 92524 - DNA, 30 bp, Homo sapiens
  chr17:31104929-31104959
  hypo
ccacagagcgagactccatctcaaaaaaag

SEQ ID NO: 92525 - DNA, 109 bp, Homo sapiens; identical to SEQ ID NO: 53924
  chr17:31203739-31203848
  hypo

SEQ ID NO: 92526 - DNA, 31 bp, Homo sapiens
  chr17:31214019-31214050
  hypo
ataaagccctggtttacgtccctcctggcac

SEQ ID NO: 92527 - DNA, 2004 bp, Homo sapiens; identical to SEQ ID NO: 53927
  chr17:31618439-31620443
  hypo

SEQ ID NO: 92528 - DNA, 43 bp, Homo sapiens
  chr17:32520157-32520200
  hypo
acttatgacaagagattactgcgctttaatcctaaagagctct

SEQ ID NO: 92529 - DNA, 1206 bp, Homo sapiens; identical to SEQ ID NO: 53930
  chr17:32906598-32907804
  hypo

SEQ ID NO: 92530 - DNA, 273 bp, Homo sapiens; identical to SEQ ID NO: 11134
  chr17:32907873-32908146
  hypo

SEQ ID NO: 92531 - DNA, 1137 bp, Homo sapiens; identical to SEQ ID NO: 53932
  chr17:32908170-32909307
  hypo

SEQ ID NO: 92532 - DNA, 30 bp, Homo sapiens
  chr17:33230985-33231015
  hypo
ctgaagccagccagccgccacccccggaga

SEQ ID NO: 92533 - DNA, 23 bp, Homo sapiens
  chr17:33327282-33327305
  hypo
tgttttgtttttgagacggagtt

SEQ ID NO: 92534 - DNA, 275 bp, Homo sapiens; identical to SEQ ID NO: 30271
  chr17:33344313-33344588
  hypo

SEQ ID NO: 92535 - DNA, 67 bp, Homo sapiens
  chr17:33351139-33351206
  hypo
catcacagaactggccgtggcgcctcaggccgacaccacccttcaaggatgccgtgtgcagggttct

SEQ ID NO: 92536 - DNA, 35 bp, Homo sapiens
  chr17:33354437-33354472
  hypo
gtaggtttattaagaagtgttcggagccaggcgca

SEQ ID NO: 92537 - DNA, 31 bp, Homo sapiens
  chr17:33521041-33521072
  hypo
cagaagggggtcgccacgcagtttaagtagc

SEQ ID NO: 92538 - DNA, 30 bp, Homo sapiens; identical to SEQ ID NO: 30273
  chr17:33568554-33568584
  hypo

SEQ ID NO: 92539 - DNA, 30 bp, Homo sapiens; identical to SEQ ID NO: 30274
  chr17:33568823-33568853
  hypo

SEQ ID NO: 92540 - DNA, 78 bp, Homo sapiens
  chr17:33578344-33578422
  hypo
actagctctaggctcattccccgcctgacctcatggtttctcatgcaacacaaacattactaatttggggtttttttt

SEQ ID NO: 92541 - DNA, 30 bp, Homo sapiens
  chr17:33734466-33734496
  hypo
cttcactgaagcgacgaccagtcttcactt

SEQ ID NO: 92542 - DNA, 30 bp, Homo sapiens; identical to SEQ ID NO: 11140
  chr17:33814581-33814611
  hypo

SEQ ID NO: 92543 - DNA, 35 bp, Homo sapiens
  chr17:33898170-33898205
  hypo
gtgcgaaccactgcgcctgacctagttttcctctt

SEQ ID NO: 92544 - DNA, 45 bp, Homo sapiens; identical to SEQ ID NO: 30276
  chr17:33917230-33917275
  hypo

SEQ ID NO: 92545 - DNA, 30 bp, Homo sapiens
  chr17:33924128-33924158
  hypo
gcgacctccggaagcggagactgtccccac

SEQ ID NO: 92546 - DNA, 30 bp, Homo sapiens; identical to SEQ ID NO: 30277
  chr17:34261795-34261825
  hypo

SEQ ID NO: 92547 - DNA, 30 bp, Homo sapiens; identical to SEQ ID NO: 30278
  chr17:34345377-34345407
  hypo

SEQ ID NO: 92548 - DNA, 30 bp, Homo sapiens
  chr17:35062452-35062482
  hypo
aagcgcagcttctggcgattaaacaaggga

SEQ ID NO: 92549 - DNA, 30 bp, Homo sapiens; identical to SEQ ID NO: 11144
  chr17:35082280-35082310
  hypo

SEQ ID NO: 92550 - DNA, 118 bp, Homo sapiens
  chr17:35099226-35099344
  hypo
attctacctggagtcaggacacgtgagggttttcgttaatgttttcttgtgaaaaatttcaaacattaaaagccggagagagcatttaatgaaccccgagtacccactactcagttgc

SEQ ID NO: 92551 - DNA, 30 bp, Homo sapiens; identical to SEQ ID NO: 53947
  chr17:35165594-35165624
  hypo

SEQ ID NO: 92552 - DNA, 32 bp, Homo sapiens; identical to SEQ ID NO: 11145
  chr17:35165829-35165861
  hypo

SEQ ID NO: 92553 - DNA, 1699 bp, Homo sapiens; identical to SEQ ID NO: 53951
  chr17:35290199-35291898
  hypo

SEQ ID NO: 92554 - DNA, 799 bp, Homo sapiens; identical to SEQ ID NO: 11147
  chr17:35291920-35292719
  hypo

SEQ ID NO: 92555 - DNA, 30 bp, Homo sapiens; identical to SEQ ID NO: 30283
  chr17:35336278-35336308
  hypo

SEQ ID NO: 92556 - DNA, 36 bp, Homo sapiens; identical to SEQ ID NO: 30284
  chr17:35414065-35414101
  hypo

SEQ ID NO: 92557 - DNA, 165 bp, Homo sapiens
  chr17:35488970-35489135
  hypo
tgatacactgatctctcggtcactcagctttctgctctgctgagtccatattactaataacacctccgccacggccagtttacctcatgaaggcaggagcacatcattacaaaataaactcataactttgacattctagcaaatacacgccgtttgttattttta

SEQ ID NO: 92558 - DNA, 172 bp, Homo sapiens
  chr17:35545257-35545429
  hypo
tatccaagtaatagccagactcgtttgtcaggaagaggcggatgggaattgcttttccagttggcgtcaggcgaatgttgattttcagttctgcctggaggacgcgcaatttccacaggcgacttccataccgcattaccatgctccgcacggattcctcaatctgacacag

SEQ ID NO: 92559 - DNA, 30 bp, Homo sapiens; identical to SEQ ID NO: 30285
  chr17:35577338-35577368
  hypo

SEQ ID NO: 92560 - DNA, 30 bp, Homo sapiens; identical to SEQ ID NO: 30286
  chr17:35631393-35631423
  hypo

SEQ ID NO: 92561 - DNA, 282 bp, Homo sapiens; identical to SEQ ID NO: 53964
  chr17:35716578-35716860
  hypo

SEQ ID NO: 92562 - DNA, 30 bp, Homo sapiens
  chr17:35719624-35719654
  hypo
tagggtgcgccaggcgcggtggctcacgcc

SEQ ID NO: 92563 - DNA, 39 bp, Homo sapiens; identical to SEQ ID NO: 30287
  chr17:35802038-35802077
  hypo

SEQ ID NO: 92564 - DNA, 19 bp, Homo sapiens
  chr17:35810278-35810297
  hypo
caggttggataagcttggc

SEQ ID NO: 92565 - DNA, 31 bp, Homo sapiens; identical to SEQ ID NO: 53965
  chr17:35816364-35816395
  hypo

SEQ ID NO: 92566 - DNA, 27 bp, Homo sapiens
  chr17:35845111-35845138
  hypo
aactccgtctcaaaaaaaaaaaaaaaa

SEQ ID NO: 92567 - DNA, 32 bp, Homo sapiens; identical to SEQ ID NO: 30290
  chr17:35845346-35845378
  hypo

SEQ ID NO: 92568 - DNA, 183 bp, Homo sapiens; identical to SEQ ID NO: 30291
  chr17:35872840-35873023
  hypo

SEQ ID NO: 92569 - DNA, 30 bp, Homo sapiens
  chr17:35896115-35896145
  hypo
tattccatactttatcgatgtccttcagca

SEQ ID NO: 92570 - DNA, 31 bp, Homo sapiens
  chr17:35915514-35915545
  hypo
tacagcacccggcccaaggcctgtgattctt

SEQ ID NO: 92571 - DNA, 83 bp, Homo sapiens
  chr17:36076476-36076559
  hypo
gattgaaggcatgagccactgcgcccggcctcaagtgttgtgtttttaatcctgtttttcccgtaagccctgtggttcttatc

SEQ ID NO: 92572 - DNA, 19 bp, Homo sapiens
  chr17:36083034-36083053
  hypo
taattaaaaaagaaaaatg

SEQ ID NO: 92573 - DNA, 31 bp, Homo sapiens
  chr17:36089510-36089541
  hypo
ataggatctattacaccgcagaaagatccac

SEQ ID NO: 92574 - DNA, 30 bp, Homo sapiens; identical to SEQ ID NO: 53968
  chr17:36093006-36093036
  hypo

SEQ ID NO: 92575 - DNA, 30 bp, Homo sapiens; identical to SEQ ID NO: 53969
  chr17:36096499-36096529
  hypo

SEQ ID NO: 92576 - DNA, 30 bp, Homo sapiens; identical to SEQ ID NO: 53970
  chr17:36098024-36098054
  hypo

SEQ ID NO: 92577 - DNA, 30 bp, Homo sapiens; identical to SEQ ID NO: 53971
  chr17:36099824-36099854
  hypo

SEQ ID NO: 92578 - DNA, 2022 bp, Homo sapiens; identical to SEQ ID NO: 11158
  chr17:36102012-36104034
  hypo

SEQ ID NO: 92579 - DNA, 333 bp, Homo sapiens; identical to SEQ ID NO: 11159
  chr17:36104217-36104550
  hypo

SEQ ID NO: 92580 - DNA, 706 bp, Homo sapiens; identical to SEQ ID NO: 11160
  chr17:36104643-36105349
  hypo

SEQ ID NO: 92581 - DNA, 30 bp, Homo sapiens; identical to SEQ ID NO: 53980
  chr17:36749381-36749411
  hypo

SEQ ID NO: 92582 - DNA, 30 bp, Homo sapiens; identical to SEQ ID NO: 53981
  chr17:36754365-36754395
  hypo

SEQ ID NO: 92583 - DNA, 30 bp, Homo sapiens; identical to SEQ ID NO: 53982
  chr17:36755706-36755736
  hypo

SEQ ID NO: 92584 - DNA, 46 bp, Homo sapiens; identical to SEQ ID NO: 11164
  chr17:36762362-36762408
  hypo

SEQ ID NO: 92585 - DNA, 31 bp, Homo sapiens
  chr17:36790406-36790437
  hypo
ttaaagttagaatggtcggccaggcgtggtg

SEQ ID NO: 92586 - DNA, 22 bp, Homo sapiens
  chr17:36805645-36805667
  hypo
gtttggttttgttttgtttttc

SEQ ID NO: 92587 - DNA, 43 bp, Homo sapiens
  chr17:36818502-36818545
  hypo
agcaggagtctgagcccgtttgggaacacgcttgtccatccct

SEQ ID NO: 92588 - DNA, 30 bp, Homo sapiens
  chr17:36870557-36870587
  hypo
ctgctgccactggacgtctcatcatttatt

SEQ ID NO: 92589 - DNA, 435 bp, Homo sapiens
  chr17:36875864-36876299
  hypo
gctgggggcaggagggacacccgagggaggagggacggagagaccggcgtgggctggaacccctgggggatacgggagaagggccagaggagcctggagtggtcgggtcgactgaacccaggttccctctggccgcaggtcccccatcagcagcctccccgcactcttcgaccagacagcctctgcaccctgtgggggcggccagttagacccggcggccccagggacgactaacatggagcagcttctggagaagcagggcgacggggaggccggcgtcaacagtgaggaggggtggcgccggtcgggacgcctgccctagggccctaacagtcacctttctccccgaggtccccaagcttctttaaggttccgcccttaggccccgccccagccttgactctcggccaccccgggcctcacctcccatccctg

SEQ ID NO: 92590 - DNA, 141 bp, Homo sapiens
  chr17:36876499-36876640
  hypo
cctccttaggatggcgccgccttttcaagggctgagcactggctcccctccaggccccgcccccggtcccctggccccgcctccgccccctcgcccctccctcaggttcctcgctctctccgcagtcgtggagatgctgaa

SEQ ID NO: 92591 - DNA, 223 bp, Homo sapiens; identical to SEQ ID NO: 11167
  chr17:36886753-36886976
  hypo

SEQ ID NO: 92592 - DNA, 30 bp, Homo sapiens
  chr17:36896562-36896592
  hypo
gatagtggtggcgtcgatgaagtacccccc

SEQ ID NO: 92593 - DNA, 38 bp, Homo sapiens; identical to SEQ ID NO: 11168
  chr17:36904349-36904387
  hypo

SEQ ID NO: 92594 - DNA, 1158 bp, Homo sapiens; identical to SEQ ID NO: 53989
  chr17:36905120-36906278
  hypo

SEQ ID NO: 92595 - DNA, 62 bp, Homo sapiens; identical to SEQ ID NO: 30300
  chr17:36927314-36927376
  hypo

SEQ ID NO: 92596 - DNA, 43 bp, Homo sapiens; identical to SEQ ID NO: 30301
  chr17:36967821-36967864
  hypo

SEQ ID NO: 92597 - DNA, 17 bp, Homo sapiens
  chr17:37001176-37001193
  hypo
agtgtcgctctgtcgcg

SEQ ID NO: 92598 - DNA, 81 bp, Homo sapiens
  chr17:37011089-37011170
  hypo
aaatagtatcgcttctcggccttttggccaagatcaagtgtaaaatataaatagtggccgggccttgtggctcacgcttgt

SEQ ID NO: 92599 - DNA, 121 bp, Homo sapiens
  chr17:37012073-37012194
  hypo
ccacggccgatatctatctatctatctctatctatctctctctctctctctatctctatagagatatatatctatagagatagatagagatatatctatctctatgtatttatctatatta

SEQ ID NO: 92600 - DNA, 30 bp, Homo sapiens; identical to SEQ ID NO: 53994
  chr17:37050591-37050621
  hypo

SEQ ID NO: 92601 - DNA, 196 bp, Homo sapiens
  chr17:37074887-37075083
  hypo
gccgccgacgaggacgaggtctccttccaggacggggacaccatcgtcaacgtgcagcagatcgacgacggctggatgtacgggacggtggagcgcaccggcgacacggggatgctgccggccaactacgtggaggccatctgaacccgcagcgcccccatctgtcttcagcacattccacggcatcgcatccgtc

SEQ ID NO: 92602 - DNA, 152 bp, Homo sapiens
  chr17:37084533-37084685
  hypo
cacaaaaataaaaaataaaataaaaataaataaatacataaactttaggtcctctgtttattctgtcaaatgaaagtgttaggccaaggtcgcattatctctttggaaactacatcgagaacagaattcccatggaacgaactcttaatagt

SEQ ID NO: 92603 - DNA, 32 bp, Homo sapiens
  chr17:37111336-37111368
  hypo
ataaaagtagtataaaagtctcggctgcgcgc

SEQ ID NO: 92604 - DNA, 20 bp, Homo sapiens
  chr17:37169219-37169239
  hypo
gaactcgtgcaggtctgtgg

SEQ ID NO: 92605 - DNA, 30 bp, Homo sapiens; identical to SEQ ID NO: 30303
  chr17:37216806-37216836
  hypo

SEQ ID NO: 92606 - DNA, 543 bp, Homo sapiens; identical to SEQ ID NO: 54001
  chr17:37380886-37381429
  hypo

SEQ ID NO: 92607 - DNA, 156 bp, Homo sapiens; identical to SEQ ID NO: 11179
  chr17:37381570-37381726
  hypo

SEQ ID NO: 92608 - DNA, 500 bp, Homo sapiens; identical to SEQ ID NO: 54003
  chr17:37381825-37382325
  hypo

SEQ ID NO: 92609 - DNA, 31 bp, Homo sapiens
  chr17:37389382-37389413
  hypo
ataggaagagccacctcgcctggcccaatat

SEQ ID NO: 92610 - DNA, 30 bp, Homo sapiens; identical to SEQ ID NO: 54004
  chr17:37395772-37395802
  hypo

SEQ ID NO: 92611 - DNA, 18 bp, Homo sapiens
  chr17:37407230-37407248
  hypo
aattcttgcataagcccg

SEQ ID NO: 92612 - DNA, 30 bp, Homo sapiens; identical to SEQ ID NO: 30308
  chr17:37417640-37417670
  hypo

SEQ ID NO: 92613 - DNA, 40 bp, Homo sapiens; identical to SEQ ID NO: 30309
  chr17:37445219-37445259
  hypo

SEQ ID NO: 92614 - DNA, 35 bp, Homo sapiens; identical to SEQ ID NO: 30310
  chr17:37452477-37452512
  hypo

SEQ ID NO: 92615 - DNA, 32 bp, Homo sapiens; identical to SEQ ID NO: 30311
  chr17:37455740-37455772
  hypo

SEQ ID NO: 92616 - DNA, 86 bp, Homo sapiens
  chr17:37483845-37483931
  hypo
acataagatgtacacacgcaccccccaaaaaccatatatttattaaagtacatccacaaggagactttaaaaaaaatacatctaca

SEQ ID NO: 92617 - DNA, 25 bp, Homo sapiens
  chr17:37484110-37484135
  hypo
gcccgggtaaccaaacatgtatttc

SEQ ID NO: 92618 - DNA, 162 bp, Homo sapiens
  chr17:37583066-37583228
  hypo
atgagccaccgcgcccggcagtctatctctctttatcttttcttgtatcaagggcaaacagaaaataatgtccattaccatagttctttaatttagaaaacttcactttttttttgatcagtaactcactacgttgcccaggctggagtaccatgactattt

SEQ ID NO: 92619 - DNA, 181 bp, Homo sapiens
  chr17:37583287-37583468
  hypo
ccaaacctcccaagtagctaggactacaggcataaactaccaggcccatccttctacactttttaaacaatgagtaagctgattatctcaggtcagatcgtttatatctcttcttatgagttgctcatttacttatttattcaaaagtactttttttctttttttgagatggagtctcgct

SEQ ID NO: 92620 - DNA, 40 bp, Homo sapiens
  chr17:37694843-37694883
  hypo
gaatgaataaatggcaaaccccggctacctgggagcggtg

SEQ ID NO: 92621 - DNA, 34 bp, Homo sapiens
  chr17:37701200-37701234
  hypo
agtttcttattccgaaagatctccagaggagttt

SEQ ID NO: 92622 - DNA, 30 bp, Homo sapiens
  chr17:37705227-37705257
  hypo
ctccccccagcaccccgagcagagcagcag

SEQ ID NO: 92623 - DNA, 30 bp, Homo sapiens
  chr17:37705498-37705528
  hypo
aaatgctagggacaccgtaagtatggagga

SEQ ID NO: 92624 - DNA, 31 bp, Homo sapiens; identical to SEQ ID NO: 30313
  chr17:37736505-37736536
  hypo

SEQ ID NO: 92625 - DNA, 629 bp, Homo sapiens; identical to SEQ ID NO: 54010
  chr17:37761201-37761830
  hypo

SEQ ID NO: 92626 - DNA, 1039 bp, Homo sapiens; identical to SEQ ID NO: 54011
  chr17:37761946-37762985
  hypo

SEQ ID NO: 92627 - DNA, 340 bp, Homo sapiens; identical to SEQ ID NO: 11190
  chr17:37774744-37775084
  hypo

SEQ ID NO: 92628 - DNA, 827 bp, Homo sapiens; identical to SEQ ID NO: 54017
  chr17:37782848-37783675
  hypo

SEQ ID NO: 92629 - DNA, 30 bp, Homo sapiens; identical to SEQ ID NO: 30319
  chr17:37809823-37809853
  hypo

SEQ ID NO: 92630 - DNA, 221 bp, Homo sapiens; identical to SEQ ID NO: 30320
  chr17:37819038-37819259
  hypo

SEQ ID NO: 92631 - DNA, 725 bp, Homo sapiens; identical to SEQ ID NO: 54019
  chr17:37823745-37824470
  hypo

SEQ ID NO: 92632 - DNA, 30 bp, Homo sapiens
  chr17:37826148-37826178
  hypo
aacagaggcctgagcgtagaacagccttga

SEQ ID NO: 92633 - DNA, 30 bp, Homo sapiens
  chr17:37840942-37840972
  hypo
gagaaacgaggccacggccgatgccggctc

SEQ ID NO: 92634 - DNA, 31 bp, Homo sapiens; identical to SEQ ID NO: 11196
  chr17:37844562-37844593
  hypo

SEQ ID NO: 92635 - DNA, 31 bp, Homo sapiens
  chr17:37864743-37864774
  hypo
ctccccaggaggcctgcgggagctgcagctt

SEQ ID NO: 92636 - DNA, 134 bp, Homo sapiens
  chr17:37879779-37879913
  hypo
cctcaccccagctggtggagccgctgacacctagcggagcgatgcccaaccaggcgcagatgcggatcctgaaagagacggagctgaggaaggtgaaggtgcttggatctggcgcttttggcacagtctacaag

SEQ ID NO: 92637 - DNA, 172 bp, Homo sapiens
  chr17:37880945-37881117
  hypo
tcccataccctctcagcgtacccttgtccccaggaagcatacgtgatggctggtgtgggctccccatatgtctcccgccttctgggcatctgcctgacatccacggtgcagctggtgacacagcttatgccctatggctgcctcttagaccatgtccgggaaaaccgcggac

SEQ ID NO: 92638 - DNA, 30 bp, Homo sapiens; identical to SEQ ID NO: 30325
  chr17:37884299-37884329
  hypo

SEQ ID NO: 92639 - DNA, 30 bp, Homo sapiens
  chr17:37885595-37885625
  hypo
tgcccccaaggccacggaatcttctattcc

SEQ ID NO: 92640 - DNA, 30 bp, Homo sapiens; identical to SEQ ID NO: 54028
  chr17:38051332-38051362
  hypo

SEQ ID NO: 92641 - DNA, 25 bp, Homo sapiens
  chr17:38055925-38055950
  hypo
ttttttttttgaacagagtctcgat

SEQ ID NO: 92642 - DNA, 30 bp, Homo sapiens; identical to SEQ ID NO: 30327
  chr17:38073545-38073575
  hypo

SEQ ID NO: 92643 - DNA, 25 bp, Homo sapiens
  chr17:38075014-38075039
  hypo
cttttttttttttttttgagacgga

SEQ ID NO: 92644 - DNA, 121 bp, Homo sapiens
  chr17:38105713-38105834
  hypo
actaccaccacacacgcatatgtgagcacacacacacgtatctgcctcgggcccctgtaatgcagttgatcttccccaatcataatatatatttcagccgggcacagtggctcacgcctgt

SEQ ID NO: 92645 - DNA, 31 bp, Homo sapiens
  chr17:38176410-38176441
  hypo
gggaagggaggggcaccgcaaggccccttcc

SEQ ID NO: 92646 - DNA, 473 bp, Homo sapiens
  chr17:38179104-38179577
  hypo
caggagccaggggcccgggatctggggctcctacaccctgccaccccagcatggctgtccagtaaggcccgcagagggggccccagatgttgctccgcccctcaggctgaatcccagtctctggccagagctccccaaggaggcaactctgaggcgaggcattccggggaggccacctggctcacggcagcctctcagggaagcctggcagaccaggccaggtgtggggagccaggggacaggacccatgtcggcccacagccactccagcccaagtaccttaatcaggttgttgcagaaccagtagacgccgcccatgtgcagcagggtgtcaaagatgtggatggagcggctgtccacccagcccttctccagcaccttggcaaaaatgtccgtcagcacctctttgatgggccgcttggggggcagcaggttccagtagggcattgtgtccaccccggtggagggaaact

SEQ ID NO: 92647 - DNA, 40 bp, Homo sapiens; identical to SEQ ID NO: 11203
  chr17:38228512-38228552
  hypo

SEQ ID NO: 92648 - DNA, 33 bp, Homo sapiens
  chr17:38237910-38237943
  hypo
gtgtttcctttaaaataaaggcgaggctgggtg

SEQ ID NO: 92649 - DNA, 47 bp, Homo sapiens
  chr17:38244540-38244587
  hypo
agatcatgtccctgcgggcggctgtccgctacgaccctgagagcgac

SEQ ID NO: 92650 - DNA, 30 bp, Homo sapiens; identical to SEQ ID NO: 30332
  chr17:38245527-38245557
  hypo

SEQ ID NO: 92651 - DNA, 505 bp, Homo sapiens
  chr17:38249239-38249744
  hypo
ttctggtttgcttttccttttcgtctcgtaaaggagagagaagtgcagagttcgattctgtacaagggggcagcggcagaaggccggccgggcgggtcactgggcgtccacccggaaggacagcagcttctcggaatgcatgttgttcagggtccgcaggtccggcagcttgagcagcagcttggtgaagcgggaagtctccaagggccggttcttcagcaccagagcccgaagagcccgcagcagcgtctcctggagctgctccaccgaagcggaattctccatgcccgagcggtctgtggggaagacgacagcagtgaggcggactccccgagctcctctgaggaggaaccggaggtctgcgaggacctggcaggcaatgcagcctctccctgaagccccccagaaggccgatggggaaggagaaggagtgccataccttctcccaggcctctgccccaagagcaggaggtgcctgaaagctgggagcgtgggctcagcaggg

SEQ ID NO: 92652 - DNA, 165 bp, Homo sapiens
  chr17:38250102-38250267
  hypo
aaggtgtgttgaattgaactgcgtctgcctcctcccccgggtcaggcgagagcctgacctacctgcagagacaagcaccaccgcggtgaagaggcccagctcctcctcggtaagcgccagggagttgagcttctcgctgaagtcgaacatggcactgagcaggtc

SEQ ID NO: 92653 - DNA, 31 bp, Homo sapiens; identical to SEQ ID NO: 30334
  chr17:38251852-38251883
  hypo

SEQ ID NO: 92654 - DNA, 31 bp, Homo sapiens
  chr17:38276291-38276322
  hypo
attacggagctgtcagcgtagagatggtgca

SEQ ID NO: 92655 - DNA, 109 bp, Homo sapiens
  chr17:38335217-38335326
  hypo
ggaggggagaggtggctgggccggcatcatggccctgcagcatccagggtgtccaagcgcctccagcttccacccttcggtggcaggcctcagcacccggctttttttt

SEQ ID NO: 92656 - DNA, 23 bp, Homo sapiens
  chr17:38380135-38380158
  hypo
ccgagaaaattattaaatgttct

SEQ ID NO: 92657 - DNA, 38 bp, Homo sapiens
  chr17:38380417-38380455
  hypo
tggaggctcggtgctcctgggcggacttttggtacagc

SEQ ID NO: 92658 - DNA, 21 bp, Homo sapiens
  chr17:38383815-38383836
  hypo
tgttccaggctggttgcggtg

SEQ ID NO: 92659 - DNA, 21 bp, Homo sapiens
  chr17:38395607-38395628
  hypo
ccactgcgcccagccttggct

SEQ ID NO: 92660 - DNA, 19 bp, Homo sapiens
  chr17:38441077-38441096
  hypo
agatgaaaagtctgttttt

SEQ ID NO: 92661 - DNA, 1097 bp, Homo sapiens; identical to SEQ ID NO: 54046
  chr17:38498083-38499180
  hypo

SEQ ID NO: 92662 - DNA, 30 bp, Homo sapiens; identical to SEQ ID NO: 54047
  chr17:38499536-38499566
  hypo

SEQ ID NO: 92663 - DNA, 50 bp, Homo sapiens; identical to SEQ ID NO: 30338
  chr17:38511679-38511729
  hypo

SEQ ID NO: 92664 - DNA, 92 bp, Homo sapiens; identical to SEQ ID NO: 30339
  chr17:38513564-38513656
  hypo

SEQ ID NO: 92665 - DNA, 31 bp, Homo sapiens; identical to SEQ ID NO: 30340
  chr17:38527562-38527593
  hypo

SEQ ID NO: 92666 - DNA, 20 bp, Homo sapiens
  chr17:38575001-38575021
  hypo
cagagcgaggccacctcaag

SEQ ID NO: 92667 - DNA, 30 bp, Homo sapiens; identical to SEQ ID NO: 30342
  chr17:38631676-38631706
  hypo

SEQ ID NO: 92668 - DNA, 42 bp, Homo sapiens
  chr17:38638672-38638714
  hypo
acagagaagaaagagtgcattcggatagaattccaccttgtg

SEQ ID NO: 92669 - DNA, 30 bp, Homo sapiens
  chr17:38656558-38656588
  hypo
acttttaaggctctgcgtcgcccttggatg

SEQ ID NO: 92670 - DNA, 30 bp, Homo sapiens; identical to SEQ ID NO: 30343
  chr17:38657295-38657325
  hypo

SEQ ID NO: 92671 - DNA, 322 bp, Homo sapiens
  chr17:38668669-38668991
  hypo
ctggacttggtccccaggcctcggtgtggattcaggcctcggtgtggattcaggcttgccactcgggtcatggggtcttgggtggtcacgtctgtggctaaccacgctcacctggccactctggcctttggaccaactcgggcaaggagctgagcttgacggggagggaagccacggattggggtggacggaggcggtgagtgagagtagagtgttctggtctccaggctctgcaggctgagcaggggaggcacccagcacttgttacccagggaaaggaaactatgtcgataatgatttgtcagctatgggtcaaggactg

SEQ ID NO: 92672 - DNA, 22 bp, Homo sapiens
  chr17:38669290-38669312
  hypo
cctggcccgctccaggcacttt

SEQ ID NO: 92673 - DNA, 43 bp, Homo sapiens
  chr17:38692021-38692064
  hypo
gtttttttttttattttgagacggagttttgctctgttgccca

SEQ ID NO: 92674 - DNA, 222 bp, Homo sapiens
  chr17:38774337-38774559
  hypo
ggtttgttatccttcaaagatcgtctcttggaaggacaccagcctctgattacatttccgagcctgcctggaggcagctaagctaatccgacacgatttgggtggattcccttctggcctcatgttctgacacaacctctggcagcagtagggtgggaagatggacaaaataattacgccctatgagttgaaaggagaattaaaattaattccctcgtgcaa

SEQ ID NO: 92675 - DNA, 26 bp, Homo sapiens
  chr17:38782430-38782456
  hypo
atggcgccattacactccagcctggg

SEQ ID NO: 92676 - DNA, 31 bp, Homo sapiens; identical to SEQ ID NO: 30346
  chr17:38786988-38787019
  hypo

SEQ ID NO: 92677 - DNA, 31 bp, Homo sapiens; identical to SEQ ID NO: 30347
  chr17:38821260-38821291
  hypo

SEQ ID NO: 92678 - DNA, 21 bp, Homo sapiens
  chr17:39344858-39344879
  hypo
acacacggccgggcgcggtgg

SEQ ID NO: 92679 - DNA, 30 bp, Homo sapiens; identical to SEQ ID NO: 54055
  chr17:39596539-39596569
  hypo

SEQ ID NO: 92680 - DNA, 31 bp, Homo sapiens; identical to SEQ ID NO: 30349
  chr17:39651771-39651802
  hypo

SEQ ID NO: 92681 - DNA, 340 bp, Homo sapiens
  chr17:39657290-39657630
  hypo
ttgagaaaccaaagcgtatccaggtcagagaggagagagatccgaccggaagagaagagcacagagggcccaccatcaggagagagtcaggacagggggtcctgagagcagagggactgagccttgggtccagcagcccctcctctctcctgcagggaactgccggctctctcctcctctgggtgctgaagacagagggaggggacgccaggcagatttaaggcctacggacatcagaagtgcggcgaccagaggcattagaggtggtggtaacagaggcactagaagtcgtggtaacagaggtgctacgggggctgacgcttcctgggaaacaagagac

SEQ ID NO: 92682 - DNA, 727 bp, Homo sapiens; identical to SEQ ID NO: 30350
  chr17:39658614-39659341
  hypo

SEQ ID NO: 92683 - DNA, 230 bp, Homo sapiens
  chr17:39659564-39659794
  hypo
ctagctcttcattcaggctctcgatctgcatctccaggtcagtcttagacagagtgagctcatccagcacccggcgcaggccgttgatgtcggcctccacgctctggcgcagggccagctcattctcatacctaaaatagtaaaaaaatgaaatgttttttgaaaaagcaagacataaatgatatgagacattctccctacccctgcacgagactccagtacttccagac

SEQ ID NO: 92684 - DNA, 110 bp, Homo sapiens
  chr17:39661339-39661449
  hypo
aggggctgtagtcccgctcagggctagctgggctctgcttcaggtgccagtcacggatcttcacctccaggtcagcgttggcctcctccagggcgcgcaccttctccagg

SEQ ID NO: 92685 - DNA, 30 bp, Homo sapiens
  chr17:39661707-39661737
  hypo
caggtagagacaccacggcctcctcccagc

SEQ ID NO: 92686 - DNA, 30 bp, Homo sapiens
  chr17:39671814-39671844
  hypo
tctgagcctccatctcgcatcggagctcac

SEQ ID NO: 92687 - DNA, 499 bp, Homo sapiens
  chr17:39672144-39672643
  hypo
gctgggactgcagctcgatctccagctcctgcatcgtgcgtctcaggtctgtgatctccgtcttgctggtctggatcatttctgtgttggaggccacctctttgttcagctcctcagtctgtaggtcatgcacaacagaagtgagccccggggcctcctcggagactcagggacctggggcaggaagggcagggcaggatataaggcccaccttgctgaagaaccaggcctcgacatcccggcggttcttctccgccatggcctcgtactgctccctcatctctgccagcacacgggtcaggtccacacccggtgctgcgtccatctccacattgacctggccggccagctggctgctgaactccttcatctcctgcaggatgggagggacccacttagagacggagagcagaagagagacctgagagtctggcgtcacacatgccaatcctggctctgcccgtaacacaccccaaccgctgttccccattgcacatga

SEQ ID NO: 92688 - DNA, 412 bp, Homo sapiens
  chr17:39673043-39673455
  hypo
gggggccagctctcacctcttcgtggttcttcttcaggtaggctagctcctcattcaggccctcgatctgcatctccaggtcagtcctggccagggtcagctcatccaggactcggcgcaagccgttgatgtcagcctcaacgccctggcgcagggccagctcattctcatacctgaggagagggaggccaaagaaggaagtgggaggggtcttggctgcctgagtcagagccaggagaaggccaagtaaagtgggcaatgcaggaagaggagagagacgggggagcgcacttgagcctgaagtcgtccgcagccagcctggcattgtcgatctccaggatgacccgggagttgtcgatggtggtggccatgatctgcaggagacagagtcggtgtctagaggactcctctc

SEQ ID NO: 92689 - DNA, 113 bp, Homo sapiens; identical to SEQ ID NO: 30353
  chr17:39676656-39676769
  hypo

SEQ ID NO: 92690 - DNA, 453 bp, Homo sapiens
  chr17:39680349-39680802
  hypo
agtgtgaattgcacagggaagcggcggcggtggggggacacataccatgctcagctgtgactgcagctcaatctcaagaccctgaagggtgcgccgcaggtcagtaacctcggacctgctcatctggagctgctccgtgtggccagcgacctcccggttcaattcttcagtctgcagagagaggaagaagagggaataagcattgagtcagaccttcgcgtagggaacacaaagccctccccttcctaacccccaaagggtgcctgcttccctctacctacccggctggtgaaccaggcttcagcatccttccggttctgctcggccatgacctcatattggcttcgcatgtcactcaggatcttggcgagatcggtgcccggagcggaatccacctccacactgacctggcctcccacttggcccctcagcgtactgatttcctgtaaagat

SEQ ID NO: 92691 - DNA, 143 bp, Homo sapiens; identical to SEQ ID NO: 30355
  chr17:39681120-39681263
  hypo

SEQ ID NO: 92692 - DNA, 20 bp, Homo sapiens
  chr17:39682232-39682252
  hypo
ggtttttttgagacagagtc

SEQ ID NO: 92693 - DNA, 241 bp, Homo sapiens; identical to SEQ ID NO: 30357
  chr17:39682491-39682732
  hypo

SEQ ID NO: 92694 - DNA, 856 bp, Homo sapiens; identical to SEQ ID NO: 11215
  chr17:39683577-39684433
  hypo

SEQ ID NO: 92695 - DNA, 112 bp, Homo sapiens
  chr17:39694231-39694343
  hypo
ggtcaggaagctggtctgggacggtggtttatctaatccacctccaggaaaggaatcacaccggggccctcctagatctgtgttggaacgcgtcctggcagaattaggttct

SEQ ID NO: 92696 - DNA, 31 bp, Homo sapiens; identical to SEQ ID NO: 30359
  chr17:39702524-39702555
  hypo

SEQ ID NO: 92697 - DNA, 204 bp, Homo sapiens
  chr17:39788200-39788404
  hypo
ctcagtgggcccatctgcatccggcagagacccacccagcccccatctccttgctcgggaggctttgggggcacagcgagggtcggctgtgaaaacacggagagaatgcgtgtagggtgactcgaggcacagccctggtgcgtgctgcgcggcggggttggtgatgaggtgctggctgatcccgaagatcaggagcactgactc

SEQ ID NO: 92698 - DNA, 30 bp, Homo sapiens; identical to SEQ ID NO: 30361
  chr17:39793127-39793157
  hypo

SEQ ID NO: 92699 - DNA, 30 bp, Homo sapiens; identical to SEQ ID NO: 54058
  chr17:39795172-39795202
  hypo

SEQ ID NO: 92700 - DNA, 31 bp, Homo sapiens
  chr17:39803751-39803782
  hypo
cgcccgtaactctttacggcagaagaccaag

SEQ ID NO: 92701 - DNA, 30 bp, Homo sapiens
  chr17:40278776-40278806
  hypo
tgccatgaagatttcgttcacgttcattgc

SEQ ID NO: 92702 - DNA, 30 bp, Homo sapiens
  chr17:40309342-40309372
  hypo
tttttgagcctccgcgcctggcagaatctg

SEQ ID NO: 92703 - DNA, 19 bp, Homo sapiens
  chr17:40313230-40313249
  hypo
ccaccgcgcccggcctatc

SEQ ID NO: 92704 - DNA, 84 bp, Homo sapiens
  chr17:40318345-40318429
  hypo
cacctcaagcgagccggagcagacatagtaatgtgcctgcagggcatccccacggcgcaacaggtactcgcccggagcgcagaa

SEQ ID NO: 92705 - DNA, 30 bp, Homo sapiens
  chr17:40322123-40322153
  hypo
ccgcctatgagcatcgtgcagatggagaag

SEQ ID NO: 92706 - DNA, 137 bp, Homo sapiens
  chr17:40330250-40330387
  hypo
gggaagaaaggtgcagagatacgttggggcacatcccttgcggctggttaggcgaaggcttctgaccattcacactgcccgtccggacttgctgttaccgtgattactgtccccgcggcctccttgggggccaagtc

SEQ ID NO: 92707 - DNA, 415 bp, Homo sapiens; identical to SEQ ID NO: 54062
  chr17:40332755-40333170
  hypo

SEQ ID NO: 92708 - DNA, 119 bp, Homo sapiens; identical to SEQ ID NO: 30362
  chr17:40337519-40337638
  hypo

SEQ ID NO: 92709 - DNA, 106 bp, Homo sapiens; identical to SEQ ID NO: 30363
  chr17:40353735-40353841
  hypo

SEQ ID NO: 92710 - DNA, 204 bp, Homo sapiens
  chr17:40362203-40362407
  hypo
aagcaatggtgatgccgccaatttctgagtcactgaatctcaggaggaaggtcccatctggcttgttaatgagtaggtcatgggcctgttgcttgtttacaaaccccaaaatggccctggatcaccaaggacaaaggacagaagcagagtgtgacttacgatgccagagagaagaccttcagactctgtcggcgccttaagaaa

SEQ ID NO: 92711 - DNA, 22 bp, Homo sapiens
  chr17:40363503-40363525
  hypo
acaagagcgaaactctgtctca

SEQ ID NO: 92712 - DNA, 139 bp, Homo sapiens; identical to SEQ ID NO: 30364
  chr17:40370155-40370294
  hypo

SEQ ID NO: 92713 - DNA, 663 bp, Homo sapiens; identical to SEQ ID NO: 30365
  chr17:40371744-40372407
  hypo

SEQ ID NO: 92714 - DNA, 149 bp, Homo sapiens; identical to SEQ ID NO: 30366
  chr17:40375374-40375523
  hypo

SEQ ID NO: 92715 - DNA, 31 bp, Homo sapiens
  chr17:40376747-40376778
  hypo
gtaagaaaagacttcccgactgccctcccca

SEQ ID NO: 92716 - DNA, 22 bp, Homo sapiens
  chr17:40381601-40381623
  hypo
aagatttggctgggcccggtgg

SEQ ID NO: 92717 - DNA, 21 bp, Homo sapiens
  chr17:40381862-40381883
  hypo
acagagcgagactccatctca

SEQ ID NO: 92718 - DNA, 23 bp, Homo sapiens
  chr17:40387506-40387529
  hypo
ttttttttttttgagacggagtc

SEQ ID NO: 92719 - DNA, 82 bp, Homo sapiens; identical to SEQ ID NO: 30369
  chr17:40387768-40387850
  hypo

SEQ ID NO: 92720 - DNA, 20 bp, Homo sapiens
  chr17:40407743-40407763
  hypo
tggagatggaccaggtgctg

SEQ ID NO: 92721 - DNA, 27 bp, Homo sapiens
  chr17:40408578-40408605
  hypo
taagatagactacattcggccaggcac

SEQ ID NO: 92722 - DNA, 30 bp, Homo sapiens; identical to SEQ ID NO: 11218
  chr17:40427459-40427489
  hypo

SEQ ID NO: 92723 - DNA, 247 bp, Homo sapiens; identical to SEQ ID NO: 54066
  chr17:40429004-40429251
  hypo

SEQ ID NO: 92724 - DNA, 30 bp, Homo sapiens; identical to SEQ ID NO: 30374
  chr17:40445941-40445971
  hypo

SEQ ID NO: 92725 - DNA, 148 bp, Homo sapiens
  chr17:40447591-40447739
  hypo
cccatcctctcttccccgagttatttccattccatctgtctccagtgcagctctccggctgggatcctggttgacgccatgtcccagaagcaccttcagatcaaccagacatttgaggagctgcgactggtcacgcaggacacagaga

SEQ ID NO: 92726 - DNA, 166 bp, Homo sapiens
  chr17:40453234-40453400
  hypo
agagccctttcccctgcgccaacccctcatcgtgtgtctgtccctgtgtcccatgcagcacattcatcattgagaagcagcctcctcaggtcctgaagacccagaccaagtttgcagccaccgtacgcctgctggtgggcgggaagctgaacgtgcacatgaatcc

SEQ ID NO: 92727 - DNA, 37 bp, Homo sapiens
  chr17:40453898-40453935
  hypo
gtgctaggctagatgccgtggcttacccctgtaatcc

SEQ ID NO: 92728 - DNA, 419 bp, Homo sapiens
  chr17:40456104-40456523
  hypo
acatcaatcttggtatcgaggaatttctaatgatagatccagacctcaccactggagaccttgccttgggtgctgggcaccaggttgatggagaagtcagtaacccagaaagacgccaagaaacactcttaggggatacggggcaggggctgctggcagggctgacctgagcgaagaccccagcccgaggtgtggacaggaccatgctcctggcctggggcccatgtggagctgggacccccctctcctttgcagcgagtgcagtggtgagatcctgaacaactgctgcgtgatggagtaccaccaagccacgggcaccctcagtgcccacttcaggaacatggtgaggacggggcccaccctcggagggcaggtctgcccagagctgagtccttgtaagcagccgccatctccctgtt

SEQ ID NO: 92729 - DNA, 160 bp, Homo sapiens
  chr17:40458358-40458518
  hypo
tgaccaaggagaacctcgtgttcctggcgcagaaactgttcaacaacagcagcagccacctggaggactacagtggcctgtccgtgtcctggtcccagttcaacagggtgaggggcccagctgccagccgcccaccagggcccaccggggtctgttgctc

SEQ ID NO: 92730 - DNA, 108 bp, Homo sapiens
  chr17:40459506-40459614
  hypo
aatgatgggtaaggaacgggggctgcagggtcaggggccagctgtgggcgcagagagactgtggctgtggcccagtggtgacgctcaatgctccgtgcacccagggcc

SEQ ID NO: 92731 - DNA, 31 bp, Homo sapiens
  chr17:40461335-40461366
  hypo
cccaagtcagctgccccggcctccctggtgg

SEQ ID NO: 92732 - DNA, 46 bp, Homo sapiens; identical to SEQ ID NO: 30377
  chr17:40477850-40477896
  hypo

SEQ ID NO: 92733 - DNA, 43 bp, Homo sapiens
  chr17:40514601-40514644
  hypo
tccaccacttcgatcacttagcgtgtagctggtgccagttatt

SEQ ID NO: 92734 - DNA, 36 bp, Homo sapiens
  chr17:40533447-40533483
  hypo
aaaggaatttggaaggccaggcgtgctggctcacgc

SEQ ID NO: 92735 - DNA, 108 bp, Homo sapiens; identical to SEQ ID NO: 54073
  chr17:40575274-40575382
  hypo

SEQ ID NO: 92736 - DNA, 43 bp, Homo sapiens
  chr17:40609954-40609997
  hypo
aagacattaattatttgggtgcgtatgtgtgaattaattcttt

SEQ ID NO: 92737 - DNA, 77 bp, Homo sapiens
  chr17:40616718-40616795
  hypo
ccaatgtgcttgtatgtttctatgtgtgtatgcatataatatatatacacacatacgtgattaagctaataaattgt

SEQ ID NO: 92738 - DNA, 30 bp, Homo sapiens
  chr17:40689462-40689492
  hypo
ggtgggactgggcccgctgggagcgagaga

SEQ ID NO: 92739 - DNA, 30 bp, Homo sapiens
  chr17:40695671-40695701
  hypo
ctggccaccagccccgccttccgctacgac

SEQ ID NO: 92740 - DNA, 399 bp, Homo sapiens
  chr17:40699093-40699492
  hypo
gccgctgcccgggaacgcgtgaccgagggccgtgtggatgtgctgggtgagcctcctggaagcatatgggctcctaggagccttctccgccctgcgttgaaaccaacatgtccccaggcccctggagcatgaggggacaggccgtgctgagggtgatgctgaggcgggctggttgggcctctgtccccgcagtgtgtgacacaggcctgggcctgctggggccgctgggggaggacgctgtggcctctgtactggatgtgaatgtagtaggtactgtgcgggtgctgcaggacttcctgccagacatgaagcggccgggttcgggacgcgtgttggtgactgggagcatgggaggattgatgggtgagtggcagggaccgggcccggagctccagattc

SEQ ID NO: 92741 - DNA, 79 bp, Homo sapiens
  chr17:40705258-40705337
  hypo
ccgtggccgctgcccgggaacgcgtgactgagggccgcgtggacgtgctgggtgagcctcctggaagcatatgggctcc

SEQ ID NO: 92742 - DNA, 190 bp, Homo sapiens
  chr17:40705838-40706028
  hypo
ccagcaagttcgcgctcgaaggcttatgcgagagtctggcggttctgctgctgccctttggggtccagtgagtcaacacccccgttccccgaaccctcttaactctgacctagagacgccgagcaccctgtcctgcgggagccgctctggggcgatctccctggccctctctgcccggctcacattagct

SEQ ID NO: 92743 - DNA, 43 bp, Homo sapiens
  chr17:40711056-40711099
  hypo
ttttttttttttctcctgcctcggcctcttgagaagctgggat

SEQ ID NO: 92744 - DNA, 41 bp, Homo sapiens; identical to SEQ ID NO: 30381
  chr17:40804384-40804425
  hypo

SEQ ID NO: 92745 - DNA, 109 bp, Homo sapiens
  chr17:40847765-40847874
  hypo
gggcctgtctacaacgttacgggagaggaggtctccttcagcttcagcaccagctccgcccctgctgtcctgctctacgtcagttcctttgttcgtgactacatggctg

SEQ ID NO: 92746 - DNA, 31 bp, Homo sapiens
  chr17:40897672-40897703
  hypo
aggctggacggagtctcgctttgttacttac

SEQ ID NO: 92747 - DNA, 96 bp, Homo sapiens
  chr17:40929521-40929617
  hypo
actccgtctcagaaaataaaaataataacaataaaaaaaattataaataactttcttcattcagcatctgctatagatgccgaatgagaaacaagg

SEQ ID NO: 92748 - DNA, 36 bp, Homo sapiens
  chr17:40939516-40939552
  hypo
ccagcccttccttttccgccacgccagctactcatc

SEQ ID NO: 92749 - DNA, 212 bp, Homo sapiens; identical to SEQ ID NO: 54091
  chr17:40950644-40950856
  hypo

SEQ ID NO: 92750 - DNA, 132 bp, Homo sapiens
  chr17:40951141-40951273
  hypo
tgtcgccacagagacgattgaagacgccctgcttcacttggcccagcagaatgagcaagcagtgagggaggcttcggggcggctgggccgcttcagggagccccagatcgtgggtgcggctgcagggccggg

SEQ ID NO: 92751 - DNA, 21 bp, Homo sapiens
  chr17:40956812-40956833
  hypo
gactctgtctcaaaaaaacta

SEQ ID NO: 92752 - DNA, 30 bp, Homo sapiens
  chr17:40996871-40996901
  hypo
ccagggctggtggacgcagcccaggctcag

SEQ ID NO: 92753 - DNA, 30 bp, Homo sapiens
  chr17:41051195-41051225
  hypo
ctttcacagtcctccgtgacccaagtgtta

SEQ ID NO: 92754 - DNA, 41 bp, Homo sapiens
  chr17:41131473-41131514
  hypo
tgaagctgaggagatgcggaatactccgtgtggggacatta

SEQ ID NO: 92755 - DNA, 30 bp, Homo sapiens
  chr17:41178009-41178039
  hypo
gcgagctttgagatcgacaagcgccgcatt

SEQ ID NO: 92756 - DNA, 30 bp, Homo sapiens; identical to SEQ ID NO: 30384
  chr17:41180505-41180535
  hypo

SEQ ID NO: 92757 - DNA, 124 bp, Homo sapiens
  chr17:41188428-41188552
  hypo
tgtcctgatgagggacgagcagggaaaaccaatcacttatgatgcaaatgagccgacggctgcagcctcctcacattcactgagtgcttctcttctgcccagagcccggcgccgccccagttgg

SEQ ID NO: 92758 - DNA, 515 bp, Homo sapiens; identical to SEQ ID NO: 54095
  chr17:41196310-41196825
  hypo

SEQ ID NO: 92759 - DNA, 695 bp, Homo sapiens; identical to SEQ ID NO: 54096
  chr17:41197124-41197819
  hypo

SEQ ID NO: 92760 - DNA, 62 bp, Homo sapiens; identical to SEQ ID NO: 54097
  chr17:41199658-41199720
  hypo

SEQ ID NO: 92761 - DNA, 75 bp, Homo sapiens; identical to SEQ ID NO: 54098
  chr17:41201136-41201211
  hypo

SEQ ID NO: 92762 - DNA, 56 bp, Homo sapiens; identical to SEQ ID NO: 54099
  chr17:41203078-41203134
  hypo

SEQ ID NO: 92763 - DNA, 29 bp, Homo sapiens
  chr17:41208244-41208273
  hypo
cagtggcgcaatctccgttcactgtagtc

SEQ ID NO: 92764 - DNA, 85 bp, Homo sapiens; identical to SEQ ID NO: 54100
  chr17:41209067-41209152
  hypo

SEQ ID NO: 92765 - DNA, 42 bp, Homo sapiens; identical to SEQ ID NO: 54101
  chr17:41215348-41215390
  hypo

SEQ ID NO: 92766 - DNA, 79 bp, Homo sapiens; identical to SEQ ID NO: 54102
  chr17:41215889-41215968
  hypo

SEQ ID NO: 92767 - DNA, 89 bp, Homo sapiens; identical to SEQ ID NO: 54103
  chr17:41219623-41219712
  hypo

SEQ ID NO: 92768 - DNA, 312 bp, Homo sapiens; identical to SEQ ID NO: 54104
  chr17:41222943-41223255
  hypo

SEQ ID NO: 92769 - DNA, 192 bp, Homo sapiens; identical to SEQ ID NO: 54105
  chr17:41226346-41226538
  hypo

SEQ ID NO: 92770 - DNA, 128 bp, Homo sapiens; identical to SEQ ID NO: 54106
  chr17:41228503-41228631
  hypo

SEQ ID NO: 92771 - DNA, 173 bp, Homo sapiens; identical to SEQ ID NO: 54107
  chr17:41234419-41234592
  hypo

SEQ ID NO: 92772 - DNA, 90 bp, Homo sapiens; identical to SEQ ID NO: 54108
  chr17:41242959-41243049
  hypo

SEQ ID NO: 92773 - DNA, 3427 bp, Homo sapiens; identical to SEQ ID NO: 54109
  chr17:41243450-41246877
  hypo

SEQ ID NO: 92774 - DNA, 78 bp, Homo sapiens; identical to SEQ ID NO: 54110
  chr17:41247861-41247939
  hypo

SEQ ID NO: 92775 - DNA, 47 bp, Homo sapiens; identical to SEQ ID NO: 54111
  chr17:41249259-41249306
  hypo

SEQ ID NO: 92776 - DNA, 107 bp, Homo sapiens; identical to SEQ ID NO: 54112
  chr17:41251790-41251897
  hypo

SEQ ID NO: 92777 - DNA, 141 bp, Homo sapiens; identical to SEQ ID NO: 54113
  chr17:41256137-41256278
  hypo

SEQ ID NO: 92778 - DNA, 90 bp, Homo sapiens; identical to SEQ ID NO: 54114
  chr17:41256883-41256973
  hypo

SEQ ID NO: 92779 - DNA, 79 bp, Homo sapiens; identical to SEQ ID NO: 54115
  chr17:41258471-41258550
  hypo

SEQ ID NO: 92780 - DNA, 55 bp, Homo sapiens; identical to SEQ ID NO: 54116
  chr17:41267741-41267796
  hypo

SEQ ID NO: 92781 - DNA, 100 bp, Homo sapiens; identical to SEQ ID NO: 54117
  chr17:41276032-41276132
  hypo

SEQ ID NO: 92782 - DNA, 214 bp, Homo sapiens; identical to SEQ ID NO: 54118
  chr17:41277286-41277500
  hypo

SEQ ID NO: 92783 - DNA, 85 bp, Homo sapiens; identical to SEQ ID NO: 30385
  chr17:41278615-41278700
  hypo

SEQ ID NO: 92784 - DNA, 30 bp, Homo sapiens
  chr17:41287571-41287601
  hypo
ctgtagccttcatccgcgtggaaccttccc

SEQ ID NO: 92785 - DNA, 38 bp, Homo sapiens
  chr17:41320358-41320396
  hypo
aataaggtaaattgggctgggcgtggtggctcacgcct

SEQ ID NO: 92786 - DNA, 37 bp, Homo sapiens
  chr17:41320635-41320672
  hypo
acaagagcgaagctccgtctcaaaaataaataaaata

SEQ ID NO: 92787 - DNA, 30 bp, Homo sapiens
  chr17:41327229-41327259
  hypo
ttggcctgtaagttcgtaaaactggtagaa

SEQ ID NO: 92788 - DNA, 148 bp, Homo sapiens
  chr17:41389668-41389816
  hypo
acagacagcaacagctcgtcatggaaagtgtggctgaagacaaagagatgaaaaaggcttcaagaaatttccactttgagtctcaaaaggcaacatagcaagacactgtttctttctttttttttttttttgagacggagtctcgctc

SEQ ID NO: 92789 - DNA, 44 bp, Homo sapiens
  chr17:41399426-41399470
  hypo
gccgagatcgcgccattcgactccaacacgcgaatcaagagcaa

SEQ ID NO: 92790 - DNA, 31 bp, Homo sapiens; identical to SEQ ID NO: 30388
  chr17:41437690-41437721
  hypo

SEQ ID NO: 92791 - DNA, 30 bp, Homo sapiens
  chr17:41440702-41440732
  hypo
ctaaacgaccaaggcgctgccggcattagc

SEQ ID NO: 92792 - DNA, 30 bp, Homo sapiens
  chr17:41444580-41444610
  hypo
caaataaaggtcgggcgcggtggctcaggc

SEQ ID NO: 92793 - DNA, 31 bp, Homo sapiens
  chr17:41451802-41451833
  hypo
tattgtgggatcttagcggtcttacttcttc

SEQ ID NO: 92794 - DNA, 236 bp, Homo sapiens
  chr17:41456126-41456362
  hypo
caagacagtgaccaagcgaaatgggcgtgggcgtcacgaggtgtctgcggaaggaagttggaggagagtggtccgagctcttttgaggaaagccattactgtgaagagcggagcttcagcggtctggctgggtcggaggcgaaagcggagcccatgagccccctctcccccactggggggggacttcccggggccgcagagagaagtccgactgcgactgcgagatcgcgccctga

SEQ ID NO: 92795 - DNA, 31 bp, Homo sapiens; identical to SEQ ID NO: 30389
  chr17:41528541-41528572
  hypo

SEQ ID NO: 92796 - DNA, 43 bp, Homo sapiens; identical to SEQ ID NO: 30390
  chr17:41570141-41570184
  hypo

SEQ ID NO: 92797 - DNA, 30 bp, Homo sapiens; identical to SEQ ID NO: 30391
  chr17:41601290-41601320
  hypo

SEQ ID NO: 92798 - DNA, 31 bp, Homo sapiens
  chr17:41634686-41634717
  hypo
aaggagcccgccatctcgtgatggcattata

SEQ ID NO: 92799 - DNA, 31 bp, Homo sapiens
  chr17:41646432-41646463
  hypo
tgggggcctgtgtgggcgcacgtgtgtagtg

SEQ ID NO: 92800 - DNA, 30 bp, Homo sapiens
  chr17:41651891-41651921
  hypo
gcacaatagcgttcgcgtggcacagtggcg

SEQ ID NO: 92801 - DNA, 42 bp, Homo sapiens; identical to SEQ ID NO: 30392
  chr17:41692629-41692671
  hypo

SEQ ID NO: 92802 - DNA, 30 bp, Homo sapiens; identical to SEQ ID NO: 54126
  chr17:41723521-41723551
  hypo

SEQ ID NO: 92803 - DNA, 31 bp, Homo sapiens; identical to SEQ ID NO: 11230
  chr17:41723871-41723902
  hypo

SEQ ID NO: 92804 - DNA, 22 bp, Homo sapiens
  chr17:41728379-41728401
  hypo
ttctggaatgaaaatgcgtaat

SEQ ID NO: 92805 - DNA, 31 bp, Homo sapiens
  chr17:41729456-41729487
  hypo
gctctaatcaggaggccggggatgcccagag

SEQ ID NO: 92806 - DNA, 22 bp, Homo sapiens
  chr17:41745720-41745742
  hypo
actgcccccctccccacaaccc

SEQ ID NO: 92807 - DNA, 30 bp, Homo sapiens
  chr17:41817622-41817652
  hypo
gaggtcctgcgtcacgggctactgaggcac

SEQ ID NO: 92808 - DNA, 31 bp, Homo sapiens
  chr17:41824096-41824127
  hypo
cgtcaggagacaaattcgggcatcttcctta

SEQ ID NO: 92809 - DNA, 42 bp, Homo sapiens
  chr17:41895346-41895388
  hypo
agcctgaatcctccctcgccctaaccccgggccctccctgga

SEQ ID NO: 92810 - DNA, 31 bp, Homo sapiens
  chr17:41907276-41907307
  hypo
cactagtgctgaggatcgctccctcagtctc

SEQ ID NO: 92811 - DNA, 38 bp, Homo sapiens
  chr17:41915918-41915956
  hypo
ggtagggatacagctttctttcgcttttgttttgagac

SEQ ID NO: 92812 - DNA, 30 bp, Homo sapiens; identical to SEQ ID NO: 11239
  chr17:42005404-42005434
  hypo

SEQ ID NO: 92813 - DNA, 212 bp, Homo sapiens; identical to SEQ ID NO: 54139
  chr17:42015509-42015721
  hypo

SEQ ID NO: 92814 - DNA, 58 bp, Homo sapiens
  chr17:42019593-42019651
  hypo
cgagtgtgcacacacacgtgcagtcagcagacggctcttctagcgtgacaggtctgtc

SEQ ID NO: 92815 - DNA, 506 bp, Homo sapiens; identical to SEQ ID NO: 54140
  chr17:42030244-42030750
  hypo

SEQ ID NO: 92816 - DNA, 846 bp, Homo sapiens; identical to SEQ ID NO: 11243
  chr17:42091702-42092548
  hypo

SEQ ID NO: 92817 - DNA, 325 bp, Homo sapiens
  chr17:42097490-42097815
  hypo
cgtcaccagggagtccggcgcattcataaccagcaatgtttgtaagcatctagattactggggagagaaatattatcccagatggtgaatggaattaatggccacccccaagtgtgtctccccgtccaagcaggtattgccacctgtaggattcgcatacctagagggccccccagggaacaggaagagttctcctataattgtatcgctgtaatgtgtaattgaagtaacaaaggtgctgtgttttgtttgggcaagggcaaaaatagactgtttggttaaaagaagtccaggttggatttcaagtgttatcccgggccaggcg

SEQ ID NO: 92818 - DNA, 30 bp, Homo sapiens
  chr17:42100972-42101002
  hypo
tgcgggccctgtcttcgcttgcgctcagcc

SEQ ID NO: 92819 - DNA, 30 bp, Homo sapiens
  chr17:42109848-42109878
  hypo
ctccaaaggcgtgtgcgtggtggtggcgag

SEQ ID NO: 92820 - DNA, 135 bp, Homo sapiens
  chr17:42110161-42110296
  hypo
gtgagtgttaagcctcgggccttcttccagctccgctaccacaggcaggtggggcactctagacaagtcacttggcctcagtggaactcactctctactctgaaaaatagttttgaaaattatcaaggccaggtg

SEQ ID NO: 92821 - DNA, 25 bp, Homo sapiens
  chr17:42123310-42123335
  hypo
ttttttttttttgagacggagtctc

SEQ ID NO: 92822 - DNA, 4 bp, Homo sapiens
  chr17:42142811-42142815
  hypo
aaaa

SEQ ID NO: 92823 - DNA, 17 bp, Homo sapiens
  chr17:42216973-42216990
  hypo
ttttttttttttgagac

SEQ ID NO: 92824 - DNA, 93 bp, Homo sapiens; identical to SEQ ID NO: 30401
  chr17:42222373-42222466
  hypo

SEQ ID NO: 92825 - DNA, 356 bp, Homo sapiens
  chr17:42254321-42254677
  hypo
acaccaggctgcggcgcgccggctcctggaggctggagctgatgcccgggcggccgggcgcaagcgccacacgccgctgcacaacgcttgtgccaacggctgcgggggcctggccgagctgctgctgcgttacggggcccgcgctgaggtccccaatggggcgggccacacgcccatggactgtgcgctgcaggccgtccaggactcccccaactgggagcctgaagtccttttcgccgcactgctggactacggggcgcagccagtgcgccctgaggtgcgctgggaggccctgacataggaggctcctgtgtgggggagcccgcggctggaactgctccgcttctggggaagac

SEQ ID NO: 92826 - DNA, 30 bp, Homo sapiens; identical to SEQ ID NO: 30404
  chr17:42255094-42255124
  hypo

SEQ ID NO: 92827 - DNA, 30 bp, Homo sapiens; identical to SEQ ID NO: 30405
  chr17:42267975-42268005
  hypo

SEQ ID NO: 92828 - DNA, 118 bp, Homo sapiens; identical to SEQ ID NO: 30406
  chr17:42289049-42289167
  hypo

SEQ ID NO: 92829 - DNA, 30 bp, Homo sapiens; identical to SEQ ID NO: 30407
  chr17:42289754-42289784
  hypo

SEQ ID NO: 92830 - DNA, 30 bp, Homo sapiens
  chr17:42290013-42290043
  hypo
cgcacacacgcacacgcttgcacgccagct

SEQ ID NO: 92831 - DNA, 217 bp, Homo sapiens
  chr17:42292483-42292700
  hypo
cacttcacaggtggacgtggcagtaacagcactggactgggactctggggcactaaatcctgctctagcatcaatagttgtgtcacccgggacacttaaccctcctgcacctcagttccttgcccacaaaactgggataaccttttcctagggttacctttataaagacattgcaagtatcaaatgagaccatgacgggaaacgtcatagagggtga

SEQ ID NO: 92832 - DNA, 405 bp, Homo sapiens; identical to SEQ ID NO: 54153
  chr17:42299065-42299470
  hypo

SEQ ID NO: 92833 - DNA, 121 bp, Homo sapiens
  chr17:42301913-42302034
  hypo
agccactgcgcccggcctgtcccttgttatttttttattgctgtgtaagtcagagatagtaaagtacacatactttaagtatacaacttttttttttgagacggagctttgctcttgtcac

SEQ ID NO: 92834 - DNA, 31 bp, Homo sapiens; identical to SEQ ID NO: 30409
  chr17:42304494-42304525
  hypo

SEQ ID NO: 92835 - DNA, 23 bp, Homo sapiens
  chr17:42318151-42318174
  hypo
aaaataagaccaggcacggtggc

SEQ ID NO: 92836 - DNA, 25 bp, Homo sapiens
  chr17:42331624-42331649
  hypo
tgagccaccgcgcccggccacgttt

SEQ ID NO: 92837 - DNA, 31 bp, Homo sapiens
  chr17:42338003-42338034
  hypo
cttggtgaagactctacgcagctctaggagg

SEQ ID NO: 92838 - DNA, 31 bp, Homo sapiens
  chr17:42395127-42395158
  hypo
ccatgagggcagggaccgtgtcttgtccgtt

SEQ ID NO: 92839 - DNA, 131 bp, Homo sapiens
  chr17:42395459-42395590
  hypo
ccagggaaggaccccacgccctccatgctgggcctctgcggctccctggcctccattcccagctgcaagtccctggcgagcttcaaatccaacgagtgcctggtgagcgacagtcccgagggcagcccagc

SEQ ID NO: 92840 - DNA, 30 bp, Homo sapiens
  chr17:42397590-42397620
  hypo
cggcccggatcctccgcagcagcagccagg

SEQ ID NO: 92841 - DNA, 40 bp, Homo sapiens
  chr17:42401271-42401311
  hypo
cactgggattacaggcgtgagccaccgcacccggcccact

SEQ ID NO: 92842 - DNA, 403 bp, Homo sapiens; identical to SEQ ID NO: 54159
  chr17:42402709-42403112
  hypo

SEQ ID NO: 92843 - DNA, 104 bp, Homo sapiens
  chr17:42427015-42427119
  hypo
gtttctctgtgttccacaggccgtggcatgcggggatggccatcactgctgcccacggggcttccactgcagtgcagacgggcgatcctgcttccaaagatcag

SEQ ID NO: 92844 - DNA, 234 bp, Homo sapiens; identical to SEQ ID NO: 30413
  chr17:42427763-42427997
  hypo

SEQ ID NO: 92845 - DNA, 153 bp, Homo sapiens; identical to SEQ ID NO: 11251
  chr17:42441041-42441194
  hypo

SEQ ID NO: 92846 - DNA, 683 bp, Homo sapiens; identical to SEQ ID NO: 54165
  chr17:42635072-42635755
  hypo

SEQ ID NO: 92847 - DNA, 31 bp, Homo sapiens
  chr17:42662278-42662309
  hypo
taagaaaaatataggccgggcatggtggctc

SEQ ID NO: 92848 - DNA, 96 bp, Homo sapiens; identical to SEQ ID NO: 30416
  chr17:42787527-42787623
  hypo

SEQ ID NO: 92849 - DNA, 31 bp, Homo sapiens
  chr17:42848907-42848938
  hypo
cccggcctcatgccagcgttctgctcactgt

SEQ ID NO: 92850 - DNA, 30 bp, Homo sapiens
  chr17:42854732-42854762
  hypo
ccaatgggcgggcacgtggcaaatgaggtg

SEQ ID NO: 92851 - DNA, 1094 bp, Homo sapiens; identical to SEQ ID NO: 54168
  chr17:42906536-42907630
  hypo

SEQ ID NO: 92852 - DNA, 498 bp, Homo sapiens; identical to SEQ ID NO: 54169
  chr17:42907654-42908152
  hypo

SEQ ID NO: 92853 - DNA, 160 bp, Homo sapiens; identical to SEQ ID NO: 30419
  chr17:42942199-42942359
  hypo

SEQ ID NO: 92854 - DNA, 31 bp, Homo sapiens; identical to SEQ ID NO: 30420
  chr17:42963909-42963940
  hypo

SEQ ID NO: 92855 - DNA, 64 bp, Homo sapiens; identical to SEQ ID NO: 30421
  chr17:42981555-42981619
  hypo

SEQ ID NO: 92856 - DNA, 31 bp, Homo sapiens
  chr17:42981928-42981959
  hypo
gaagacaaagaccatccgggagggcgtgctg

SEQ ID NO: 92857 - DNA, 208 bp, Homo sapiens; identical to SEQ ID NO: 30422
  chr17:42992857-42993065
  hypo

SEQ ID NO: 92858 - DNA, 31 bp, Homo sapiens
  chr17:42999485-42999516
  hypo
caggtgtgagccaccacgctggccctcacat

SEQ ID NO: 92859 - DNA, 30 bp, Homo sapiens
  chr17:43001820-43001850
  hypo
acccaccgccaaggccgtagaagggtggaa

SEQ ID NO: 92860 - DNA, 23 bp, Homo sapiens
  chr17:43028038-43028061
  hypo
gccaccgcgcctggtctactttg

SEQ ID NO: 92861 - DNA, 161 bp, Homo sapiens; identical to SEQ ID NO: 54175
  chr17:43044645-43044806
  hypo

SEQ ID NO: 92862 - DNA, 5 bp, Homo sapiens
  chr17:43044863-43044868
  hypo
cgccg

SEQ ID NO: 92863 - DNA, 227 bp, Homo sapiens; identical to SEQ ID NO: 11263
  chr17:43045038-43045265
  hypo

SEQ ID NO: 92864 - DNA, 201 bp, Homo sapiens; identical to SEQ ID NO: 11264
  chr17:43045371-43045572
  hypo

SEQ ID NO: 92865 - DNA, 30 bp, Homo sapiens
  chr17:43112073-43112103
  hypo
gcatggcagaaggccggaagcgtggggagc

SEQ ID NO: 92866 - DNA, 310 bp, Homo sapiens
  chr17:43121046-43121356
  hypo
acgctcacctactcacgaagctggacttgtccgaatcattctttggtctctcggctccctccggatttgggggaatgtttttctatacaattctgggtttttctcataactccatttccctaaacagtacctccctcctccctccttccacttgtataggccaaaagcctcggaatcctcctggcctctctcacaccctccatccaacccgcagtgcccggccagcgctacctcccacctgcacagcccacaaggagcccccggtgcatgagcgccaccatgtcgctgcggaagccctgcagcagcctct

SEQ ID NO: 92867 - DNA, 140 bp, Homo sapiens; identical to SEQ ID NO: 30429
  chr17:43121665-43121805
  hypo

SEQ ID NO: 92868 - DNA, 86 bp, Homo sapiens; identical to SEQ ID NO: 30430
  chr17:43124005-43124091
  hypo

SEQ ID NO: 92869 - DNA, 34 bp, Homo sapiens; identical to SEQ ID NO: 30431
  chr17:43173432-43173466
  hypo

SEQ ID NO: 92870 - DNA, 186 bp, Homo sapiens; identical to SEQ ID NO: 30432
  chr17:43179706-43179892
  hypo

SEQ ID NO: 92871 - DNA, 259 bp, Homo sapiens
  chr17:43180324-43180583
  hypo
aagacagctgggctgcgaccaatggaaacaaaggacattccagtagtgcaccagctcctcaccaggtacttgaagcaatttcaccttacgcccgtcatgagccaggaggaggtggagcactggttctacccccaggagaatatcatcgacactttcgtggtggaggtgagtcagggagtggtgttccaggtctctaacacgttcccagagaggcacccccctgagtggccgggttcccagggctcgagtgttggcacct

SEQ ID NO: 92872 - DNA, 89 bp, Homo sapiens
  chr17:43181004-43181093
  hypo
gaaacattttgttcccgggccgcagtgccactgtgcatgcttgacattgcctctttattgccttcccttcagaacgcaaacggagaggt

SEQ ID NO: 92873 - DNA, 48 bp, Homo sapiens
  chr17:43193913-43193961
  hypo
agccacagaggtggcacgagcagtgcggggaggcggactcccaccaga

SEQ ID NO: 92874 - DNA, 54 bp, Homo sapiens; identical to SEQ ID NO: 30435
  chr17:43196205-43196259
  hypo

SEQ ID NO: 92875 - DNA, 224 bp, Homo sapiens
  chr17:43208546-43208770
  hypo
tcaggtggaatgagtcgaggtaacaagaaggcaaaactggcaatcaggacccctgaattctgccccaagttctacacggggtccctggcagccttgtccttctgttccggagttccacacctagcctctccatcactgactattctaccaatggcaggtccaacgcagcacttcagtggcgcggtcctttccacgtcagacaacattctcgcacacaccctctc

SEQ ID NO: 92876 - DNA, 31 bp, Homo sapiens; identical to SEQ ID NO: 11266
  chr17:43209588-43209619
  hypo

SEQ ID NO: 92877 - DNA, 32 bp, Homo sapiens
  chr17:43234069-43234101
  hypo
aaaagagaatgttgccaggtacggtggctcac

SEQ ID NO: 92878 - DNA, 92 bp, Homo sapiens
  chr17:43246545-43246637
  hypo
agggggctgctcagcggaggctgtgctggcccggaagaaacaccgtcggcggccatcgaagcgcaaaaggcactggcgaccctacctggagc

SEQ ID NO: 92879 - DNA, 437 bp, Homo sapiens
  chr17:43246868-43247305
  hypo
acggtgagttccagcggaaggacttctctgagacttacgaacgcttccacaccgagagcctgcagggccgcagcaagcaggagctggtgcgagactacctggagctggagaagcggctgtcgcaggcggaggaggagactaggaggctgcagcagctgcaggcgtgcaccggccagcagtcctgccgccaggtggaggagctggctgccgaggtccagaggctccggaccgaaaaccagcggcttcgtcaggagaaccagatgtggaaccgagagggctgccgctgtgatgaggagccgggtacctaggggtgcctcccagcctggtggacccaaggagaaggtcccatttcgtgcacactcaggccagctgggtctcaaggaggcaggtggcagatgaaaaccaccgtcaacaccctgtgcgccctgagaacagct

SEQ ID NO: 92880 - DNA, 147 bp, Homo sapiens; identical to SEQ ID NO: 54188
  chr17:43298738-43298885
  hypo

SEQ ID NO: 92881 - DNA, 30 bp, Homo sapiens; identical to SEQ ID NO: 30438
  chr17:43318030-43318060
  hypo

SEQ ID NO: 92882 - DNA, 253 bp, Homo sapiens
  chr17:43321182-43321435
  hypo
gacttcctggagctgctgatgcgcttcctgcccacagagtatgagcgcagcctcatcacccgctttgagcgggagcagcggccaatggaggagctgtcagaggaggaccgcttcatgctatgcttcagccgcatcccgcgcctgccggagcgcatgaccacactcaccttcctgggcaacttcccggacacagcccagctgctcatgccggtgtgggcggagcgggcagggcggtgtgacttgggaggggatg

SEQ ID NO: 92883 - DNA, 876 bp, Homo sapiens; identical to SEQ ID NO: 54190
  chr17:43324795-43325671
  hypo

SEQ ID NO: 92884 - DNA, 163 bp, Homo sapiens
  chr17:43347688-43347851
  hypo
gggtgccttgctctggacctgcgcccacctgcctcctctgtccacctctgtcttctgccccccgggtcagccagcgtggggctcttcctaccttgctgtagtgcccggttcaccttccctcccagctccgctgcagacacgcggtggatgggctctttcctca

SEQ ID NO: 92885 - DNA, 30 bp, Homo sapiens
  chr17:43361316-43361346
  hypo
acagggagaaggaccgacacctgtaaggtc

SEQ ID NO: 92886 - DNA, 27 bp, Homo sapiens
  chr17:44193884-44193911
  hypo
gactccgtctcaaaaaacaaaaaccaa

SEQ ID NO: 92887 - DNA, 100 bp, Homo sapiens
  chr17:44799503-44799603
  hypo
cttcacgatcttggcgctcgaactgaacatggctttctcctgggagaacttgcagcgcctgcttaggaagagacccaaatctcgcgagagcacgtcaaaa

SEQ ID NO: 92888 - DNA, 572 bp, Homo sapiens; identical to SEQ ID NO: 30442
  chr17:44845575-44846147
  hypo

SEQ ID NO: 92889 - DNA, 31 bp, Homo sapiens
  chr17:44861962-44861993
  hypo
gaaaggtgggctctcccgaaacctcagcccc

SEQ ID NO: 92890 - DNA, 30 bp, Homo sapiens
  chr17:44931762-44931792
  hypo
agggcaggtgaggccgatcttcttgggctc

SEQ ID NO: 92891 - DNA, 31 bp, Homo sapiens
  chr17:44949746-44949777
  hypo
gggacgggacctccagcgggtcagcctgctg

SEQ ID NO: 92892 - DNA, 41 bp, Homo sapiens
  chr17:45022234-45022275
  hypo
ggattactggcataagccaccgcagccggccttaattttta

SEQ ID NO: 92893 - DNA, 78 bp, Homo sapiens
  chr17:45253200-45253278
  hypo
aaatcgattatctgttaagttttttaatcaactataagtagtatgacatgtggattaaagtaccgactctgaagctag

SEQ ID NO: 92894 - DNA, 82 bp, Homo sapiens; identical to SEQ ID NO: 30444
  chr17:45599272-45599354
  hypo

SEQ ID NO: 92895 - DNA, 149 bp, Homo sapiens
  chr17:45689890-45690039
  hypo
acgttagaagaagcccgtcgtcggtttaaggaccacgtggaaggaaaacagattctctccgctgatctgaggagtcctgtaggttttcatcataaattcccttgacttataggtaacatcattttgtgaagcatggaactttttttttt

SEQ ID NO: 92896 - DNA, 22 bp, Homo sapiens
  chr17:45723850-45723872
  hypo
caaaggagaattgcttgaaccc

SEQ ID NO: 92897 - DNA, 22 bp, Homo sapiens
  chr17:45723931-45723953
  hypo
cgagactctgtatcaaaaaaag

SEQ ID NO: 92898 - DNA, 932 bp, Homo sapiens; identical to SEQ ID NO: 54207
  chr17:45810487-45811419
  hypo

SEQ ID NO: 92899 - DNA, 113 bp, Homo sapiens; identical to SEQ ID NO: 30448
  chr17:45885681-45885794
  hypo

SEQ ID NO: 92900 - DNA, 30 bp, Homo sapiens
  chr17:45886227-45886257
  hypo
acctctggtctggccggagtctcgtgtcgg

SEQ ID NO: 92901 - DNA, 104 bp, Homo sapiens
  chr17:45891075-45891179
  hypo
ggacaggtctttgccgatgttgttgcgcagaatgttccacaggctcacgtcagccccaggcccgctggccgccggcaggcagcgacggcggggtggccccatgg

SEQ ID NO: 92902 - DNA, 30 bp, Homo sapiens
  chr17:45892135-45892165
  hypo
gatgcctggcatcacggagtgtgcccagcc

SEQ ID NO: 92903 - DNA, 390 bp, Homo sapiens
  chr17:45894354-45894744
  hypo
cagcacagaggatgcggccgctcaggcagggcgacagagacaactgacatcccagtggaagatgacagccaccctggcagaggcatgggcatggaggaacagagacaatcttgatacagtttggacatgggtaaggggtggggaggaaaccaggcgatgcatggctctccaggaaactgcagcgatgtaggaggaataggacccatcctggggaagtgatgggatcgggggcctgagcaggaccctgtgtgtacccctggatcttacctggtgtgtggggataacaggggctgaggggattcggtgcagggactccaggctctggaggagcctgtgtagttcctggagcttcccctgacactcagagagctctgcggggaaaaagaacaa

SEQ ID NO: 92904 - DNA, 514 bp, Homo sapiens; identical to SEQ ID NO: 54211
  chr17:45928209-45928723
  hypo

SEQ ID NO: 92905 - DNA, 114 bp, Homo sapiens
  chr17:45970934-45971048
  hypo
ttcacaccctgtcctccgccccgtgtgcgcacactttttttttttcacctctgcggtcttcatgatggggcctccaggataggagaagcatagctaccccgtttttctcccaga

SEQ ID NO: 92906 - DNA, 30 bp, Homo sapiens
  chr17:45978979-45979009
  hypo
gtggtgatgagaggcgtgcgctttgaagtt

SEQ ID NO: 92907 - DNA, 30 bp, Homo sapiens
  chr17:45992796-45992826
  hypo
ctggacagactcaccgaaaacactctctct

SEQ ID NO: 92908 - DNA, 38 bp, Homo sapiens
  chr17:46017955-46017993
  hypo
gtttaaaactagaagaggtggcgggcgcggtggctcac

SEQ ID NO: 92909 - DNA, 38 bp, Homo sapiens
  chr17:46018232-46018270
  hypo
cgacagagctagtctccgtctcaaacaaaacaaaacaa

SEQ ID NO: 92910 - DNA, 624 bp, Homo sapiens; identical to SEQ ID NO: 54215
  chr17:46089203-46089827
  hypo

SEQ ID NO: 92911 - DNA, 34 bp, Homo sapiens
  chr17:46123910-46123944
  hypo
gagccactgcgccgggcccagttctatgtttaaa

SEQ ID NO: 92912 - DNA, 207 bp, Homo sapiens; identical to SEQ ID NO: 11284
  chr17:46124762-46124969
  hypo

SEQ ID NO: 92913 - DNA, 307 bp, Homo sapiens; identical to SEQ ID NO: 11285
  chr17:46125006-46125313
  hypo

SEQ ID NO: 92914 - DNA, 30 bp, Homo sapiens; identical to SEQ ID NO: 30453
  chr17:46136635-46136665
  hypo

SEQ ID NO: 92915 - DNA, 30 bp, Homo sapiens
  chr17:46138338-46138368
  hypo
tgtcccgaggtcgtcgtctgctttcttttt

SEQ ID NO: 92916 - DNA, 153 bp, Homo sapiens; identical to SEQ ID NO: 30454
  chr17:46152421-46152574
  hypo

SEQ ID NO: 92917 - DNA, 153 bp, Homo sapiens; identical to SEQ ID NO: 30455
  chr17:46152813-46152966
  hypo

SEQ ID NO: 92918 - DNA, 30 bp, Homo sapiens
  chr17:46176833-46176863
  hypo
gggaaaaccgtaaacgacttcaggtcctcc

SEQ ID NO: 92919 - DNA, 12 bp, Homo sapiens
  chr17:46177206-46177218
  hypo
aagaggtaaaat

SEQ ID NO: 92920 - DNA, 30 bp, Homo sapiens; identical to SEQ ID NO: 30457
  chr17:46199892-46199922
  hypo

SEQ ID NO: 92921 - DNA, 29 bp, Homo sapiens
  chr17:46344159-46344188
  hypo
ccgtgcccggccctgttttccttttctta

SEQ ID NO: 92922 - DNA, 30 bp, Homo sapiens; identical to SEQ ID NO: 54219
  chr17:46411484-46411514
  hypo

SEQ ID NO: 92923 - DNA, 30 bp, Homo sapiens; identical to SEQ ID NO: 54220
  chr17:46500657-46500687
  hypo

SEQ ID NO: 92924 - DNA, 30 bp, Homo sapiens; identical to SEQ ID NO: 54223
  chr17:46570232-46570262
  hypo

SEQ ID NO: 92925 - DNA, 239 bp, Homo sapiens
  chr17:46607011-46607250
  hypo
acccgaccttcctctcgctcgcgcttcttctgcttcattcgtcggttctggaaccaaatcttgacctgtgtttcattgagctccagggtggcggcaatctccaccctccgggcccggctcaggtacttgttgaaatggaactccttttccagttctgtcagctgccttgtggtgaagttggtgcggaggccactgggcgagcccaggcctggctctgacaccttcgctaggggcggggc

SEQ ID NO: 92926 - DNA, 189 bp, Homo sapiens; identical to SEQ ID NO: 11293
  chr17:46659084-46659273
  hypo

SEQ ID NO: 92927 - DNA, 482 bp, Homo sapiens; identical to SEQ ID NO: 11294
  chr17:46659384-46659866
  hypo

SEQ ID NO: 92928 - DNA, 1612 bp, Homo sapiens; identical to SEQ ID NO: 11300
  chr17:46687506-46689118
  hypo

SEQ ID NO: 92929 - DNA, 333 bp, Homo sapiens; identical to SEQ ID NO: 54240
  chr17:46690030-46690363
  hypo

SEQ ID NO: 92930 - DNA, 275 bp, Homo sapiens; identical to SEQ ID NO: 11303
  chr17:46690429-46690704
  hypo

SEQ ID NO: 92931 - DNA, 195 bp, Homo sapiens; identical to SEQ ID NO: 11304
  chr17:46690852-46691047
  hypo

SEQ ID NO: 92932 - DNA, 382 bp, Homo sapiens; identical to SEQ ID NO: 54243
  chr17:46691436-46691818
  hypo

SEQ ID NO: 92933 - DNA, 600 bp, Homo sapiens; identical to SEQ ID NO: 11306
  chr17:46691987-46692587
  hypo

SEQ ID NO: 92934 - DNA, 175 bp, Homo sapiens; identical to SEQ ID NO: 54245
  chr17:46696417-46696592
  hypo

SEQ ID NO: 92935 - DNA, 221 bp, Homo sapiens; identical to SEQ ID NO: 54246
  chr17:46696642-46696863
  hypo

SEQ ID NO: 92936 - DNA, 511 bp, Homo sapiens; identical to SEQ ID NO: 54250
  chr17:46723838-46724349
  hypo

SEQ ID NO: 92937 - DNA, 277 bp, Homo sapiens; identical to SEQ ID NO: 54251
  chr17:46724659-46724936
  hypo

SEQ ID NO: 92938 - DNA, 710 bp, Homo sapiens; identical to SEQ ID NO: 54265
  chr17:46805458-46806168
  hypo

SEQ ID NO: 92939 - DNA, 31 bp, Homo sapiens
  chr17:46872246-46872277
  hypo
ctagcagtcacagctgcgggacctggggcaa

SEQ ID NO: 92940 - DNA, 30 bp, Homo sapiens; identical to SEQ ID NO: 30469
  chr17:46907727-46907757
  hypo

SEQ ID NO: 92941 - DNA, 224 bp, Homo sapiens; identical to SEQ ID NO: 11343
  chr17:47073103-47073327
  hypo

SEQ ID NO: 92942 - DNA, 2061 bp, Homo sapiens; identical to SEQ ID NO: 54290
  chr17:47073388-47075449
  hypo

SEQ ID NO: 92943 - DNA, 31 bp, Homo sapiens
  chr17:47126022-47126053
  hypo
ggccacggactggtaccgggccacacagcag

SEQ ID NO: 92944 - DNA, 20 bp, Homo sapiens
  chr17:47162036-47162056
  hypo
ttttttttttttgagacgga

SEQ ID NO: 92945 - DNA, 30 bp, Homo sapiens; identical to SEQ ID NO: 54293
  chr17:47307922-47307952
  hypo

SEQ ID NO: 92946 - DNA, 31 bp, Homo sapiens; identical to SEQ ID NO: 30473
  chr17:47442692-47442723
  hypo

SEQ ID NO: 92947 - DNA, 1197 bp, Homo sapiens; identical to SEQ ID NO: 54299
  chr17:47573468-47574665
  hypo

SEQ ID NO: 92948 - DNA, 427 bp, Homo sapiens; identical to SEQ ID NO: 11350
  chr17:47574903-47575330
  hypo

SEQ ID NO: 92949 - DNA, 96 bp, Homo sapiens
  chr17:47583839-47583935
  hypo
gcgggctcgggcctcgtgttctcctgccaggacaagcagaacaccgtgtgcgaggagtgccccgacggcacgtattccgacgaggccaaccacgtg

SEQ ID NO: 92950 - DNA, 30 bp, Homo sapiens
  chr17:47629858-47629888
  hypo
atccctcaccctggcgccccgacaactggg

SEQ ID NO: 92951 - DNA, 112 bp, Homo sapiens; identical to SEQ ID NO: 54303
  chr17:47653549-47653661
  hypo

SEQ ID NO: 92952 - DNA, 93 bp, Homo sapiens
  chr17:47657768-47657861
  hypo
aggaagaatttctctgatggccgcaggacatttgcttgagacccaagtggcagggatccaaccgcccttggcgctgatgtttgctgagggctc

SEQ ID NO: 92953 - DNA, 21 bp, Homo sapiens
  chr17:47716149-47716170
  hypo
attcacctgaggtcaggagtt

SEQ ID NO: 92954 - DNA, 21 bp, Homo sapiens
  chr17:47716289-47716310
  hypo
gcttgaacctgggaggtggca

SEQ ID NO: 92955 - DNA, 30 bp, Homo sapiens; identical to SEQ ID NO: 30478
  chr17:47722939-47722969
  hypo

SEQ ID NO: 92956 - DNA, 22 bp, Homo sapiens
  chr17:47724669-47724691
  hypo
cgtcttaaaaaaaaaaaaaaaa

SEQ ID NO: 92957 - DNA, 30 bp, Homo sapiens
  chr17:47795734-47795764
  hypo
ttgtgcctgaggccagctgggcgcagtggc

SEQ ID NO: 92958 - DNA, 18 bp, Homo sapiens
  chr17:47813624-47813642
  hypo
ttttttttttttgagacg

SEQ ID NO: 92959 - DNA, 35 bp, Homo sapiens
  chr17:47851978-47852013
  hypo
caaagtgctgggattacaggcgtgagccaccgtgc

SEQ ID NO: 92960 - DNA, 30 bp, Homo sapiens
  chr17:47863665-47863695
  hypo
tggtatttgtgtgacggatgcaagtcagga

SEQ ID NO: 92961 - DNA, 93 bp, Homo sapiens; identical to SEQ ID NO: 30479
  chr17:47895283-47895376
  hypo

SEQ ID NO: 92962 - DNA, 21 bp, Homo sapiens
  chr17:47899877-47899898
  hypo
ccattgcgcccggcctaagtc

SEQ ID NO: 92963 - DNA, 163 bp, Homo sapiens
  chr17:47911773-47911936
  hypo
tgggattacaggcatgagccgctgcgcccaaccttcttctgctgtcgagatactgctcatcacctgcctgctccagaattcatgtggcttctcattgctcaatggattaagttcatgtttatcctggctttcaagtctttccgtaagctgactcaacctacat

SEQ ID NO: 92964 - DNA, 30 bp, Homo sapiens
  chr17:47915877-47915907
  hypo
gtgtgaagtgccagcgatgaggacaggaga

SEQ ID NO: 92965 - DNA, 30 bp, Homo sapiens; identical to SEQ ID NO: 30482
  chr17:47923460-47923490
  hypo

SEQ ID NO: 92966 - DNA, 212 bp, Homo sapiens; identical to SEQ ID NO: 54307
  chr17:47928287-47928499
  hypo

SEQ ID NO: 92967 - DNA, 64 bp, Homo sapiens
  chr17:47998382-47998446
  hypo
tgtaggctggccaagcgggcaccccaggtccgggcttttctctcccttccgctcacctggaaag

SEQ ID NO: 92968 - DNA, 377 bp, Homo sapiens; identical to SEQ ID NO: 54311
  chr17:48041279-48041656
  hypo

SEQ ID NO: 92969 - DNA, 1486 bp, Homo sapiens; identical to SEQ ID NO: 54320
  chr17:48049109-48050595
  hypo

SEQ ID NO: 92970 - DNA, 695 bp, Homo sapiens; identical to SEQ ID NO: 54321
  chr17:48070683-48071378
  hypo

SEQ ID NO: 92971 - DNA, 30 bp, Homo sapiens; identical to SEQ ID NO: 11365
  chr17:48072550-48072580
  hypo

SEQ ID NO: 92972 - DNA, 43 bp, Homo sapiens; identical to SEQ ID NO: 30488
  chr17:48139109-48139152
  hypo

SEQ ID NO: 92973 - DNA, 114 bp, Homo sapiens
  chr17:48183243-48183357
  hypo
cacaggttcactgacgccctggtcaccatccggaaccggcacaacgacgtggtgcccaccatggcacaaggcgtgcttgagtacaaggacacctacggcgatgaccccgtctcc

SEQ ID NO: 92974 - DNA, 30 bp, Homo sapiens
  chr17:48199560-48199590
  hypo
tggtcacgatacggtcgggatatggtcgcc

SEQ ID NO: 92975 - DNA, 30 bp, Homo sapiens; identical to SEQ ID NO: 30489
  chr17:48243368-48243398
  hypo

SEQ ID NO: 92976 - DNA, 59 bp, Homo sapiens
  chr17:48258116-48258175
  hypo
gcttgacggcagcctcgcattctttcccacgcggcccacgctcacgcctgctccacaca

SEQ ID NO: 92977 - DNA, 197 bp, Homo sapiens
  chr17:48263245-48263442
  hypo
tctgctggtccatgtaggccacgctgttcttgcagtggtaggtgatgttctgggaggcctcggtggacatcaggcgcaggaaggtcagctggatggccacatcggcagggtcggagccctggccgccatactcgaactgcaggggaggggagagagggaagagtgagccgctatgcgggaacctctagtcctgcctg

SEQ ID NO: 92978 - DNA, 34 bp, Homo sapiens
  chr17:48268218-48268252
  hypo
ggccagtcagaccacggacgccatctttgccagg

SEQ ID NO: 92979 - DNA, 31 bp, Homo sapiens; identical to SEQ ID NO: 30491
  chr17:48435304-48435335
  hypo

SEQ ID NO: 92980 - DNA, 160 bp, Homo sapiens
  chr17:48530414-48530574
  hypo
catgggcaggcatggctgtaacgttgaggcagttgcaccgggtcctctgctcctggctcgggtgttcatccgccacgtgatccacttgatctctttgtacttcagcttctttacctgtggaatgggagttcatgatactcacctgcatttttttaaacat

SEQ ID NO: 92981 - DNA, 47 bp, Homo sapiens
  chr17:48539229-48539276
  hypo
tcagacacaaacctggcgtgagtgtgcagggacgggggcatgtgtgt

SEQ ID NO: 92982 - DNA, 41 bp, Homo sapiens; identical to SEQ ID NO: 30492
  chr17:48555661-48555702
  hypo

SEQ ID NO: 92983 - DNA, 326 bp, Homo sapiens
  chr17:48565117-48565443
  hypo
ggggcagcctgtggggtcacccgtgctgctcggggagctgtttcctgagacttcccctgatcttgacattcaagaagcgagcacggggccgaggcaggtgcgccatcagataacctgggaccactcaggtttctcccagctgccagggctcgtgccacttgagacatccgggcgctccctgccaggacacctcataaggcccgtgcagaggagctgggtaggagccagggccaagtcggggtggcacagatcaccttctgtgactcagtctggtctttccttcaccagatgaatcagaagctcccggaggtggagccccagaatct

SEQ ID NO: 92984 - DNA, 98 bp, Homo sapiens
  chr17:48612097-48612195
  hypo
aggcatgttttcaaagcgtggggctgctttgaactgagcccagcactggcggggctggggtggaaggagcgtggaatcgggtgcgagaggacagtctc

SEQ ID NO: 92985 - DNA, 88 bp, Homo sapiens
  chr17:48613865-48613953
  hypo
agccctccacctccggcgggggcgagggccacccacctccaagtctccagccatgacgacctccgcactccggcgccaggtgaagaac

SEQ ID NO: 92986 - DNA, 195 bp, Homo sapiens; identical to SEQ ID NO: 54341
  chr17:48619095-48619290
  hypo

SEQ ID NO: 92987 - DNA, 608 bp, Homo sapiens; identical to SEQ ID NO: 11376
  chr17:48619346-48619954
  hypo

SEQ ID NO: 92988 - DNA, 30 bp, Homo sapiens
  chr17:48626491-48626521
  hypo
aggatggcttgacccgagtcggcttccgca

SEQ ID NO: 92989 - DNA, 30 bp, Homo sapiens; identical to SEQ ID NO: 30497
  chr17:48653114-48653144
  hypo

SEQ ID NO: 92990 - DNA, 31 bp, Homo sapiens
  chr17:48668917-48668948
  hypo
tgaagaccatggacaacgtggccaccttctg

SEQ ID NO: 92991 - DNA, 30 bp, Homo sapiens
  chr17:48672468-48672498
  hypo
gtgcccctccactccgcctccgtgtctctg

SEQ ID NO: 92992 - DNA, 30 bp, Homo sapiens; identical to SEQ ID NO: 30498
  chr17:48677412-48677442
  hypo

SEQ ID NO: 92993 - DNA, 30 bp, Homo sapiens; identical to SEQ ID NO: 30499
  chr17:48680453-48680483
  hypo

SEQ ID NO: 92994 - DNA, 325 bp, Homo sapiens
  chr17:48687013-48687338
  hypo
ggtgcctccctgccccgtgaccctgaccagctagccacattgcttgtcttcctcaagtgccctgtgcccccagcttcgggctggacattcagagccagccacccaatgggctcagcgcaccccacccataggcagagtgaggtgggagctgaggggaagccgcccctgaggggccctgcccagcgcacctggtccggccagtgaccaatgtcgtgtttcgttcttttagatctaatgctggacgatgtaattgcttccggcagctcagccagcgctgcgtcaggtactgcgtctggggtgtgggctcatgcgtgtggggacatgc

SEQ ID NO: 92995 - DNA, 31 bp, Homo sapiens
  chr17:48690339-48690370
  hypo
tgcttgcctgcagagccgaggtccagagagc

SEQ ID NO: 92996 - DNA, 157 bp, Homo sapiens
  chr17:48763549-48763706
  hypo
gtctcaagaaaaaaaactttacatttgcccagcacttaacaatattcaaagcactctggcctccactttctcctttaatctttaccatggtcctgtgggccagaaacgagcctccacggtttgaaatgatttcctcgcagcagttcagctggtaagg

SEQ ID NO: 92997 - DNA, 209 bp, Homo sapiens
  chr17:48764875-48765084
  hypo
gcctgccttctccactcccagcgtgggccagaggcagctcgtgtgcctggcccgagccctgctccgcaagagccgcatcctggttttagacgaggccacagctgccatcgacctggagactgacaacctcatccaggctaccatccgcacccagtttgatacctgcactgtcctgaccatcgcacaccggcttaacactatcatggact

SEQ ID NO: 92998 - DNA, 232 bp, Homo sapiens
  chr17:48776790-48777022
  hypo
gaaaaatggctggaatgctggcgctggtcctgcatacgtcccattttgaggctccagagacattggtggcttggacgggacagaagaaaacagggagcggctctgactcactggtggctgacaaacaggacccggttttgtgctttctggtgttctgagtatggcagagggggccgacacatcaccattctgaactagtgccaaagaggtgtggtcccggggaaaggtccct

SEQ ID NO: 92999 - DNA, 85 bp, Homo sapiens; identical to SEQ ID NO: 30503
  chr17:48844994-48845079
  hypo

SEQ ID NO: 93000 - DNA, 106 bp, Homo sapiens; identical to SEQ ID NO: 30504
  chr17:48881297-48881403
  hypo

SEQ ID NO: 93001 - DNA, 38 bp, Homo sapiens
  chr17:48890602-48890640
  hypo
ggtcaacaacccagtccgaaggtcgcagaagatttcct

SEQ ID NO: 93002 - DNA, 202 bp, Homo sapiens; identical to SEQ ID NO: 30505
  chr17:48911126-48911328
  hypo

SEQ ID NO: 93003 - DNA, 192 bp, Homo sapiens
  chr17:48921800-48921992
  hypo
ctgctccattgtctagccagccgctccgtagtctgatgtcaccccccggacagtggggctggagagcagggatggggtgaaccctgactagagtccacagcatcggtgattgccttaggccgtggggaactccctccgtccccttgtcctattgtaaaacagcagcatgcttgcgcacgtcctatgtgccag

SEQ ID NO: 93004 - DNA, 246 bp, Homo sapiens
  chr17:48970679-48970925
  hypo
tacctcacagctccccgacagagtgctgcacaatgacgaccttcggtggggcagacattcgcctccatcaggcgcctaattatgcaaaccctgaacatgagactgaagaggagactggcctgcccagggacgattgatgaggctggctggtttcatcttccccattgtgtaggccagaggcttcatgatgggagcggctcagctgcgggatctcggttgctttgttgcaggcgctggggcaacgaa

SEQ ID NO: 93005 - DNA, 26 bp, Homo sapiens
  chr17:48991947-48991973
  hypo
gcgtgagccaccgcatccagccaggc

SEQ ID NO: 93006 - DNA, 201 bp, Homo sapiens; identical to SEQ ID NO: 54353
  chr17:49008950-49009151
  hypo

SEQ ID NO: 93007 - DNA, 31 bp, Homo sapiens
  chr17:49015437-49015468
  hypo
atttgaaattcttctgcgtgggtttttttgt

SEQ ID NO: 93008 - DNA, 30 bp, Homo sapiens
  chr17:49024819-49024849
  hypo
ggaacatgggtgggcgtgtttcccacactg

SEQ ID NO: 93009 - DNA, 116 bp, Homo sapiens; identical to SEQ ID NO: 11384
  chr17:49027999-49028115
  hypo

SEQ ID NO: 93010 - DNA, 30 bp, Homo sapiens
  chr17:49039156-49039186
  hypo
gtcattcttccttcccgagtcttgcccaag

SEQ ID NO: 93011 - DNA, 37 bp, Homo sapiens; identical to SEQ ID NO: 30507
  chr17:49129051-49129088
  hypo

SEQ ID NO: 93012 - DNA, 24 bp, Homo sapiens
  chr17:49170779-49170803
  hypo
ctggccaggcatggtggctcacgc

SEQ ID NO: 93013 - DNA, 33 bp, Homo sapiens
  chr17:49194751-49194784
  hypo
gtataaaagactcttggtctccgcattaaagac

SEQ ID NO: 93014 - DNA, 29 bp, Homo sapiens
  chr17:49227904-49227933
  hypo
tttttaagaaactatcggccgggcgcggt

SEQ ID NO: 93015 - DNA, 181 bp, Homo sapiens; identical to SEQ ID NO: 30508
  chr17:49229458-49229639
  hypo

SEQ ID NO: 93016 - DNA, 164 bp, Homo sapiens; identical to SEQ ID NO: 30509
  chr17:49281026-49281190
  hypo

SEQ ID NO: 93017 - DNA, 30 bp, Homo sapiens; identical to SEQ ID NO: 30510
  chr17:49462712-49462742
  hypo

SEQ ID NO: 93018 - DNA, 104 bp, Homo sapiens; identical to SEQ ID NO: 54359
  chr17:50235154-50235258
  hypo

SEQ ID NO: 93019 - DNA, 686 bp, Homo sapiens; identical to SEQ ID NO: 54360
  chr17:50235416-50236102
  hypo

SEQ ID NO: 93020 - DNA, 79 bp, Homo sapiens; identical to SEQ ID NO: 30511
  chr17:52832077-52832156
  hypo

SEQ ID NO: 93021 - DNA, 44 bp, Homo sapiens
  chr17:52865182-52865226
  hypo
gaagccttttatggatttgcacgcaccagcgcacctgttaaaaa

SEQ ID NO: 93022 - DNA, 21 bp, Homo sapiens
  chr17:53002975-53002996
  hypo
atcctgaggccagatgcgatg

SEQ ID NO: 93023 - DNA, 18 bp, Homo sapiens
  chr17:53021513-53021531
  hypo
gaattcaagaagtggccg

SEQ ID NO: 93024 - DNA, 30 bp, Homo sapiens; identical to SEQ ID NO: 54363
  chr17:53051517-53051547
  hypo

SEQ ID NO: 93025 - DNA, 30 bp, Homo sapiens; identical to SEQ ID NO: 54364
  chr17:53056455-53056485
  hypo

SEQ ID NO: 93026 - DNA, 37 bp, Homo sapiens; identical to SEQ ID NO: 30513
  chr17:53314419-53314456
  hypo

SEQ ID NO: 93027 - DNA, 1555 bp, Homo sapiens; identical to SEQ ID NO: 54367
  chr17:53342190-53343745
  hypo

SEQ ID NO: 93028 - DNA, 77 bp, Homo sapiens
  chr17:53409742-53409819
  hypo
gttagcactaggaaacatatccgagtcacgcagcaccaaagtatgttagcagcagcgaatccttatgggtctgcagc

SEQ ID NO: 93029 - DNA, 101 bp, Homo sapiens
  chr17:53410258-53410359
  hypo
ctgccagcacttgggaggagccgcacgatcagtgttttctgaagttgtatgcatgctcactcgaggccttcttcccttatcagtcaagtgttcctagaaga

SEQ ID NO: 93030 - DNA, 30 bp, Homo sapiens; identical to SEQ ID NO: 54368
  chr17:53445243-53445273
  hypo

SEQ ID NO: 93031 - DNA, 44 bp, Homo sapiens; identical to SEQ ID NO: 30515
  chr17:53479130-53479174
  hypo

SEQ ID NO: 93032 - DNA, 30 bp, Homo sapiens
  chr17:53521489-53521519
  hypo
aaatgtagggtaatcgaggcctgcccggaa

SEQ ID NO: 93033 - DNA, 30 bp, Homo sapiens; identical to SEQ ID NO: 54369
  chr17:53558866-53558896
  hypo

SEQ ID NO: 93034 - DNA, 177 bp, Homo sapiens
  chr17:53852170-53852347
  hypo
ataacccgggtggccaaattccgtcctggctcattaactgggccgccaaggtgagatcccaggaggtggggcggggggagggatgggggagtgtgtttgacaaatgttgacttagcccgcggggctgtcaggctgaagagacacattgtctcaggcgtaatgaggctcttttatgaa

SEQ ID NO: 93035 - DNA, 30 bp, Homo sapiens; identical to SEQ ID NO: 11389
  chr17:54376036-54376066
  hypo

SEQ ID NO: 93036 - DNA, 30 bp, Homo sapiens; identical to SEQ ID NO: 30517
  chr17:54588468-54588498
  hypo

SEQ ID NO: 93037 - DNA, 648 bp, Homo sapiens; identical to SEQ ID NO: 54373
  chr17:54671748-54672396
  hypo

SEQ ID NO: 93038 - DNA, 30 bp, Homo sapiens; identical to SEQ ID NO: 30519
  chr17:54872385-54872415
  hypo

SEQ ID NO: 93039 - DNA, 353 bp, Homo sapiens; identical to SEQ ID NO: 11393
  chr17:54910846-54911199
  hypo

SEQ ID NO: 93040 - DNA, 918 bp, Homo sapiens; identical to SEQ ID NO: 54380
  chr17:54911483-54912401
  hypo

SEQ ID NO: 93041 - DNA, 272 bp, Homo sapiens; identical to SEQ ID NO: 30522
  chr17:54976881-54977153
  hypo

SEQ ID NO: 93042 - DNA, 30 bp, Homo sapiens
  chr17:54978908-54978938
  hypo
ttgttgagattcctcgcagttttgatgctt

SEQ ID NO: 93043 - DNA, 44 bp, Homo sapiens
  chr17:55037249-55037293
  hypo
catcagaagcatcccgggaaggatgctcgttacactgcagattc

SEQ ID NO: 93044 - DNA, 19 bp, Homo sapiens
  chr17:55092693-55092712
  hypo
ttttttttttttgagacgg

SEQ ID NO: 93045 - DNA, 88 bp, Homo sapiens
  chr17:55184790-55184878
  hypo
cttcccaaggaactagcgccaagttgggctcgctgattaacattagtgtgcctctttttctttgtttaaaaaaattattattattttg

SEQ ID NO: 93046 - DNA, 30 bp, Homo sapiens; identical to SEQ ID NO: 30524
  chr17:55193501-55193531
  hypo

SEQ ID NO: 93047 - DNA, 20 bp, Homo sapiens
  chr17:55205466-55205486
  hypo
ggaactgtaattttatcgct

SEQ ID NO: 93048 - DNA, 378 bp, Homo sapiens
  chr17:55363923-55364301
  hypo
cctgttggtaattgtgcttctcggaggtgaccacgtcattggtatccgggctccataaacaaggggctgccttaccagtgacctttcccgcctaaaaccgaaggccccaaggtcgcttgtctgatggagaatgtatttcccggctcactgtgagcctcgacttaatttgttcctttcctaaggcaaaatgaccttccagtaaacccacaccccctcccccgcttattattatttatttatttttctggtgaacaaacagaattaggaaaggtgtgttcttccaggagagagcgggcagtgtgggaggagatggcagtctggctcattaaaatgccgaggtaggtttaagctgattgccaagtgcgggtcctgcaggtc

SEQ ID NO: 93049 - DNA, 30 bp, Homo sapiens; identical to SEQ ID NO: 30525
  chr17:55378777-55378807
  hypo

SEQ ID NO: 93050 - DNA, 67 bp, Homo sapiens; identical to SEQ ID NO: 30526
  chr17:55379075-55379142
  hypo

SEQ ID NO: 93051 - DNA, 35 bp, Homo sapiens; identical to SEQ ID NO: 30527
  chr17:55426662-55426697
  hypo

SEQ ID NO: 93052 - DNA, 30 bp, Homo sapiens; identical to SEQ ID NO: 30528
  chr17:55474930-55474960
  hypo

SEQ ID NO: 93053 - DNA, 45 bp, Homo sapiens
  chr17:55519663-55519708
  hypo
gggattacaggcgtgagccactgcgcctggccaacacagctgatt

SEQ ID NO: 93054 - DNA, 30 bp, Homo sapiens
  chr17:55536324-55536354
  hypo
acttcagctcaacctcgtcagtggttgttt

SEQ ID NO: 93055 - DNA, 30 bp, Homo sapiens; identical to SEQ ID NO: 30529
  chr17:55594699-55594729
  hypo

SEQ ID NO: 93056 - DNA, 68 bp, Homo sapiens
  chr17:55605294-55605362
  hypo
gagtgaggcatgaatagcccacgattccttttctcaaagggattagcgccagcccccaagctcatttg

SEQ ID NO: 93057 - DNA, 30 bp, Homo sapiens
  chr17:55634536-55634566
  hypo
ttaagaaacgttaacgatgaggggcaggcc

SEQ ID NO: 93058 - DNA, 30 bp, Homo sapiens
  chr17:55644106-55644136
  hypo
ccgagagactgccaccgatctggttggggc

SEQ ID NO: 93059 - DNA, 30 bp, Homo sapiens
  chr17:55644538-55644568
  hypo
ataggcccggagtatcgcagggagtaatct

SEQ ID NO: 93060 - DNA, 30 bp, Homo sapiens; identical to SEQ ID NO: 30530
  chr17:55644936-55644966
  hypo

SEQ ID NO: 93061 - DNA, 183 bp, Homo sapiens
  chr17:55752304-55752487
  hypo
aattttggcgcgcccgcttccccggcaggctccaacccggcgcggcccggaggcttcccgggggccaacagcccaggacctgtcgccgatctctacggccctgccagccaggactccggagtggggaattacataagtgcggccagcccacagccgggctcgggcttcggccacggcatagct

SEQ ID NO: 93062 - DNA, 383 bp, Homo sapiens
  chr17:55753391-55753774
  hypo
ggttttgagctaagatgggtgcgtctgcagtcccaggccacgttcctgtcagactccgcttctgagtgacagctggcaagccctgacttgggggccacgctgcggagaacaaaacatgtgcagacagtctagggcaccaaggtggcctcattcatgccccctggcattgggagctcctccctcatacacacactcacacgcacgcatgcatgcacacacgcacacagacatgcacgcacacgcacgcacacacgcacacacaggcgcacacacgcctgccagccctacttgtgcaggatgggtccttgttcagctccgctcccaagccagtatcacttaagtcagtagtctgatgaatctaatcccttcggatcaactgtggt

SEQ ID NO: 93063 - DNA, 71 bp, Homo sapiens; identical to SEQ ID NO: 30534
  chr17:55828322-55828393
  hypo

SEQ ID NO: 93064 - DNA, 270 bp, Homo sapiens; identical to SEQ ID NO: 30535
  chr17:55917218-55917488
  hypo

SEQ ID NO: 93065 - DNA, 29 bp, Homo sapiens
  chr17:55917727-55917756
  hypo
acagagcgagactccgtctcaaaaaaaaa

SEQ ID NO: 93066 - DNA, 18 bp, Homo sapiens
  chr17:55923478-55923496
  hypo
ggcagcccccacccagcc

SEQ ID NO: 93067 - DNA, 23 bp, Homo sapiens
  chr17:55924358-55924381
  hypo
ttaagaatgttgctaggaggccg

SEQ ID NO: 93068 - DNA, 31 bp, Homo sapiens
  chr17:55931430-55931461
  hypo
tctttgtgacaatgcccgtatttaaatagtg

SEQ ID NO: 93069 - DNA, 31 bp, Homo sapiens
  chr17:55962007-55962038
  hypo
ctgcacacccttcccccggcttcactcttcc

SEQ ID NO: 93070 - DNA, 31 bp, Homo sapiens; identical to SEQ ID NO: 30538
  chr17:55965542-55965573
  hypo

SEQ ID NO: 93071 - DNA, 29 bp, Homo sapiens
  chr17:56001755-56001784
  hypo
cgccgggcctcttccggcttctttacgtt

SEQ ID NO: 93072 - DNA, 137 bp, Homo sapiens
  chr17:56009115-56009252
  hypo
tgtctcaataagacacagtcccgaatccagggaggatccggctgaaaagcctcctctggattgcagaggactcccgtgaaaccacgagcctctttctcctttgcaaaaatcaaatcgtattctcccacctccaaacc

SEQ ID NO: 93073 - DNA, 31 bp, Homo sapiens
  chr17:56020028-56020059
  hypo
cgtgagccaccacacccggccaaattgtcta

SEQ ID NO: 93074 - DNA, 30 bp, Homo sapiens
  chr17:56031570-56031600
  hypo
cctctcgctacaagacgctgactgcggatc

SEQ ID NO: 93075 - DNA, 386 bp, Homo sapiens; identical to SEQ ID NO: 54392
  chr17:56032159-56032545
  hypo

SEQ ID NO: 93076 - DNA, 40 bp, Homo sapiens
  chr17:56037719-56037759
  hypo
aggaaacttgccacctcgaactcctgggctcaagagattc

SEQ ID NO: 93077 - DNA, 30 bp, Homo sapiens; identical to SEQ ID NO: 30540
  chr17:56166757-56166787
  hypo

SEQ ID NO: 93078 - DNA, 477 bp, Homo sapiens; identical to SEQ ID NO: 54397
  chr17:56296379-56296856
  hypo

SEQ ID NO: 93079 - DNA, 281 bp, Homo sapiens; identical to SEQ ID NO: 54398
  chr17:56326989-56327270
  hypo

SEQ ID NO: 93080 - DNA, 31 bp, Homo sapiens; identical to SEQ ID NO: 30541
  chr17:56388456-56388487
  hypo

SEQ ID NO: 93081 - DNA, 78 bp, Homo sapiens
  chr17:56389452-56389530
  hypo
gccaagttgctattgccgggcacccaggtgatctcagcagatgtggctgtcaaccgatggacccgcagctggctgggc

SEQ ID NO: 93082 - DNA, 31 bp, Homo sapiens; identical to SEQ ID NO: 11400
  chr17:56401799-56401830
  hypo

SEQ ID NO: 93083 - DNA, 160 bp, Homo sapiens; identical to SEQ ID NO: 11401
  chr17:56402169-56402329
  hypo

SEQ ID NO: 93084 - DNA, 1163 bp, Homo sapiens; identical to SEQ ID NO: 11403
  chr17:56429043-56430206
  hypo

SEQ ID NO: 93085 - DNA, 106 bp, Homo sapiens
  chr17:56435440-56435546
  hypo
catgccactggaaccgctttttgtagtggtggtgccggtggcggtggtagtggacatggctggaaacctgggtttcccctgtgggcaccaccgagtccaaggaacg

SEQ ID NO: 93086 - DNA, 30 bp, Homo sapiens
  chr17:56436082-56436112
  hypo
ggtagtgggcatggccgggatgctggcgaa

SEQ ID NO: 93087 - DNA, 103 bp, Homo sapiens
  chr17:56439855-56439958
  hypo
ccacacacacgcacacgttcaccgccgccaaagaccccacactgctcaccggcctgctgtggcgggggcggcaccggatgcgcagcaccgaagccaggatgat

SEQ ID NO: 93088 - DNA, 33 bp, Homo sapiens; identical to SEQ ID NO: 30545
  chr17:56471127-56471160
  hypo

SEQ ID NO: 93089 - DNA, 97 bp, Homo sapiens; identical to SEQ ID NO: 30546
  chr17:56569870-56569967
  hypo

SEQ ID NO: 93090 - DNA, 30 bp, Homo sapiens
  chr17:56598847-56598877
  hypo
tccctttttctacccggaagaaataagata

SEQ ID NO: 93091 - DNA, 35 bp, Homo sapiens
  chr17:56743118-56743153
  hypo
aaataaggctgggcgcggtggctcacgcctataat

SEQ ID NO: 93092 - DNA, 29 bp, Homo sapiens
  chr17:56795651-56795680
  hypo
cctgggctgtttctcggttttcttacata

SEQ ID NO: 93093 - DNA, 839 bp, Homo sapiens; identical to SEQ ID NO: 54407
  chr17:56833161-56834000
  hypo

SEQ ID NO: 93094 - DNA, 142 bp, Homo sapiens; identical to SEQ ID NO: 54408
  chr17:56834019-56834161
  hypo

SEQ ID NO: 93095 - DNA, 31 bp, Homo sapiens; identical to SEQ ID NO: 30548
  chr17:56906694-56906725
  hypo

SEQ ID NO: 93096 - DNA, 25 bp, Homo sapiens
  chr17:57164466-57164491
  hypo
tttttttgggagatggagtctcgct

SEQ ID NO: 93097 - DNA, 31 bp, Homo sapiens
  chr17:57185327-57185358
  hypo
agaatgcagtgctaggcctggcgtggtggct

SEQ ID NO: 93098 - DNA, 182 bp, Homo sapiens
  chr17:57185657-57185839
  hypo
tgggattcagagtaatgagaagtggcccttgctctcaaggagcagtacagaagacaaataagacaaattgcaatacttacatgataaatagttaagattcttgtatgtttgccgaagaacctaagaatgtcgaaggacttattgcaccaattcataatagcgaacaattagaaacctgtaca

SEQ ID NO: 93099 - DNA, 27 bp, Homo sapiens
  chr17:57216078-57216105
  hypo
caccgcgcccagcctgttctagtctag

SEQ ID NO: 93100 - DNA, 40 bp, Homo sapiens; identical to SEQ ID NO: 30551
  chr17:57244236-57244276
  hypo

SEQ ID NO: 93101 - DNA, 30 bp, Homo sapiens; identical to SEQ ID NO: 30552
  chr17:57288334-57288364
  hypo

SEQ ID NO: 93102 - DNA, 95 bp, Homo sapiens; identical to SEQ ID NO: 30553
  chr17:57297041-57297136
  hypo

SEQ ID NO: 93103 - DNA, 31 bp, Homo sapiens; identical to SEQ ID NO: 30554
  chr17:57398859-57398890
  hypo

SEQ ID NO: 93104 - DNA, 19 bp, Homo sapiens
  chr17:57402605-57402624
  hypo
ttttgagacagagtctcgc

SEQ ID NO: 93105 - DNA, 19 bp, Homo sapiens
  chr17:57402743-57402762
  hypo
accacgccccaccattact

SEQ ID NO: 93106 - DNA, 181 bp, Homo sapiens; identical to SEQ ID NO: 30557
  chr17:57476110-57476291
  hypo

SEQ ID NO: 93107 - DNA, 24 bp, Homo sapiens
  chr17:57495991-57496015
  hypo
gtgagactccgtctcaaaaaaatt

SEQ ID NO: 93108 - DNA, 77 bp, Homo sapiens; identical to SEQ ID NO: 30559
  chr17:57591254-57591331
  hypo

SEQ ID NO: 93109 - DNA, 59 bp, Homo sapiens
  chr17:57743550-57743609
  hypo
ggtcctttacagacgcggttacttgagatgaaccttatgcatgcgcctcaagtatgtgt

SEQ ID NO: 93110 - DNA, 31 bp, Homo sapiens
  chr17:57761794-57761825
  hypo
tttctttgaggctcagcgcatgcagatctgt

SEQ ID NO: 93111 - DNA, 20 bp, Homo sapiens
  chr17:57768696-57768716
  hypo
ccattatggctgggtgcggt

SEQ ID NO: 93112 - DNA, 160 bp, Homo sapiens
  chr17:57787135-57787295
  hypo
ctgatcctttttggtcgtcatgtattgtcacttcagaacttccaagtgcagaaaaagctgaagttttttgcctacgtatagttaactaaagagtagaagtagtcctatcttacttacattaaataagaaaccttattattgggccgggcgcggtggttca

SEQ ID NO: 93113 - DNA, 39 bp, Homo sapiens; identical to SEQ ID NO: 30562
  chr17:57787534-57787573
  hypo

SEQ ID NO: 93114 - DNA, 32 bp, Homo sapiens; identical to SEQ ID NO: 30563
  chr17:57832469-57832501
  hypo

SEQ ID NO: 93115 - DNA, 31 bp, Homo sapiens
  chr17:57832740-57832771
  hypo
gattacaggcgtgagccaccacacctggcca

SEQ ID NO: 93116 - DNA, 16 bp, Homo sapiens
  chr17:57866873-57866889
  hypo
tgacaaagcaagtctc

SEQ ID NO: 93117 - DNA, 42 bp, Homo sapiens
  chr17:57879948-57879990
  hypo
tttcatttttttatgtcgcccaggctgtagtgcagtggcacg

SEQ ID NO: 93118 - DNA, 25 bp, Homo sapiens
  chr17:57881678-57881703
  hypo
gtaaaataaatttgggcctggcgca

SEQ ID NO: 93119 - DNA, 105 bp, Homo sapiens
  chr17:57902281-57902386
  hypo
gtaatcccagcactttgggaggccgaggcagatggattggttgaattctcaggaatttgagtccagcctggtctcgaacatggcgagacccaaagtcaggtgata

SEQ ID NO: 93120 - DNA, 40 bp, Homo sapiens
  chr17:57932453-57932493
  hypo
gtgtaaatgtttgttaccagacgtaaaagagtctgttctg

SEQ ID NO: 93121 - DNA, 78 bp, Homo sapiens
  chr17:57937324-57937402
  hypo
gactcagcattctacgtggttactttaacagaatggaactttgaaaacatttttttttttttttttttttgagacgga

SEQ ID NO: 93122 - DNA, 18 bp, Homo sapiens
  chr17:57937581-57937599
  hypo
ttagccaggatggagaac

SEQ ID NO: 93123 - DNA, 31 bp, Homo sapiens
  chr17:58134321-58134352
  hypo
cttggttttacctgctcgctcctcacagtca

SEQ ID NO: 93124 - DNA, 30 bp, Homo sapiens; identical to SEQ ID NO: 11406
  chr17:58215071-58215101
  hypo

SEQ ID NO: 93125 - DNA, 433 bp, Homo sapiens; identical to SEQ ID NO: 54421
  chr17:58216865-58217298
  hypo

SEQ ID NO: 93126 - DNA, 179 bp, Homo sapiens; identical to SEQ ID NO: 11408
  chr17:58217356-58217535
  hypo

SEQ ID NO: 93127 - DNA, 104 bp, Homo sapiens
  chr17:58471328-58471432
  hypo
gccaccgcgccccaccaatatttcgtgtttttctactcacctttcctggcaaaccagatcagcagcgtggcattagtcacagcgctgccctttccagttcactg

SEQ ID NO: 93128 - DNA, 60 bp, Homo sapiens
  chr17:58512810-58512870
  hypo
cgatggcattgagacgtaggcactgggcgcaggatgcagcggcgcgcgggctttgctcgg

SEQ ID NO: 93129 - DNA, 34 bp, Homo sapiens
  chr17:58559517-58559551
  hypo
aggtgtgagccaccgcgtccggccgggttactac

SEQ ID NO: 93130 - DNA, 37 bp, Homo sapiens; identical to SEQ ID NO: 30571
  chr17:58590465-58590502
  hypo

SEQ ID NO: 93131 - DNA, 45 bp, Homo sapiens
  chr17:58628049-58628094
  hypo
ctattaatatctttaatttttcgtattattaaattttttcgaccg

SEQ ID NO: 93132 - DNA, 705 bp, Homo sapiens; identical to SEQ ID NO: 11413
  chr17:58677542-58678247
  hypo

SEQ ID NO: 93133 - DNA, 78 bp, Homo sapiens
  chr17:58690757-58690835
  hypo
tagagttgtactgcctaggttcgaattccagcttctccacttactgagagttgacagcgtgctggcagccctcgctgg

SEQ ID NO: 93134 - DNA, 243 bp, Homo sapiens; identical to SEQ ID NO: 11414
  chr17:58700867-58701110
  hypo

SEQ ID NO: 93135 - DNA, 126 bp, Homo sapiens; identical to SEQ ID NO: 11415
  chr17:58711212-58711338
  hypo

SEQ ID NO: 93136 - DNA, 192 bp, Homo sapiens; identical to SEQ ID NO: 11416
  chr17:58725251-58725443
  hypo

SEQ ID NO: 93137 - DNA, 251 bp, Homo sapiens; identical to SEQ ID NO: 11417
  chr17:58733951-58734202
  hypo

SEQ ID NO: 93138 - DNA, 1531 bp, Homo sapiens; identical to SEQ ID NO: 11418
  chr17:58740341-58741872
  hypo

SEQ ID NO: 93139 - DNA, 750 bp, Homo sapiens; identical to SEQ ID NO: 11419
  chr17:58742891-58743641
  hypo

SEQ ID NO: 93140 - DNA, 142 bp, Homo sapiens
  chr17:59161858-59162000
  hypo
atgccagggtcatcccgtccagtctctgatcgaaggggagtttccacagtgattgatgctgcctcaggtagaaaaccacctctgaaatatttattgggcagtcctgtgcatttttaactaattttctcgcacaatgtagagg

SEQ ID NO: 93141 - DNA, 259 bp, Homo sapiens
  chr17:59239009-59239268
  hypo
catctggaaaggtgatgtcaacggagggtagggtggttgctggtggaggggagtagccagcgcccctcccctcagcacacataccagcccccgcaattccagtttcatggtgcctgagttgctgtctggttggttgaactcattctcctcagcttatatttaactcgtcgcttgttctggaaaagtagtagtactgccttctctggcctttataaacatgattgctggacaaagatgagcagcacggatttgctgcgat

SEQ ID NO: 93142 - DNA, 160 bp, Homo sapiens
  chr17:59278996-59279156
  hypo
agagggtaccatgacccccttcgtgaagtacgttccacgttcaatctgaaaaatccatgggcttttaaaaaagccttttctgtactttccagtgagggagaaaggtaagggaaaggaaactaactttttttttttttttttgagacagggtctcgctctg

SEQ ID NO: 93143 - DNA, 24 bp, Homo sapiens
  chr17:59312555-59312579
  hypo
cccgcctgtcctaagcactttaaa

SEQ ID NO: 93144 - DNA, 42 bp, Homo sapiens
  chr17:59395454-59395496
  hypo
gctacatgccgctcctcggctcctccccgccaccatcacacc

SEQ ID NO: 93145 - DNA, 30 bp, Homo sapiens
  chr17:59415333-59415363
  hypo
acttaggaactgcagcgtcccttctgtgtt

SEQ ID NO: 93146 - DNA, 362 bp, Homo sapiens
  chr17:59430809-59431171
  hypo
gcacactttgaacagcgaaggtattgagtgcaaaatggggttctccagtctaagttctgccccgcacttcacttccctgccctgatttcctcaaccgtgaaacggggaatagtaatcgttgccttgtcttcctctctaggggtgttgtgaggattcatggagcaaatggctgtgaaagcaccttgtaaagggtagagcagtgtgcggcgtgagggattattatcattgttaagacgtctacgcctcgttgctcaccctgtgtgatcctgcagcttctcaacttttccctcctttctccctggtttccacgcctgggctgctgagtcaggcggaccggccaaggctggcgagggctgaacaga

SEQ ID NO: 93147 - DNA, 30 bp, Homo sapiens
  chr17:59431410-59431440
  hypo
cgctggttctacttccgcacccacctctgg

SEQ ID NO: 93148 - DNA, 163 bp, Homo sapiens; identical to SEQ ID NO: 30581
  chr17:59434279-59434442
  hypo

SEQ ID NO: 93149 - DNA, 71 bp, Homo sapiens
  chr17:59445736-59445807
  hypo
tgagggcttcgggctgcggcacatgtcctccatggagcacacggaggagggcctccgggagcgacttgccg

SEQ ID NO: 93150 - DNA, 3209 bp, Homo sapiens; identical to SEQ ID NO: 54442
  chr17:59475528-59478737
  hypo

SEQ ID NO: 93151 - DNA, 430 bp, Homo sapiens
  chr17:59520970-59521400
  hypo
caggcctggtggccacgtgggcgcgagcttgggcctcggccccaccctcacccgcttccccctcgttgattgggccccttccccttccggaatccaagatggtggggggggggcgggcttccagggcaatcggagcttcaattggtggaatgcaggccctttgagctgaaggacagcctcagtagccactcagggagctcatgctggtgatggtggtgggcgctcagccaccttacctcacacttaagcagccgaggtgacctcaggaatcggtctcccgcaggctggcgagagccacagtgagaacgaggaaactccagacggcctccgggcaggccccttaccagcctggggcgtcttcctcgataatggaactgagaatcagtccctacctgcccggcaagaagacgggaaaaacctccaactacct

SEQ ID NO: 93152 - DNA, 30 bp, Homo sapiens; identical to SEQ ID NO: 30585
  chr17:59560584-59560614
  hypo

SEQ ID NO: 93153 - DNA, 18 bp, Homo sapiens
  chr17:59568974-59568992
  hypo
atgacttctaccaaggcg

SEQ ID NO: 93154 - DNA, 31 bp, Homo sapiens
  chr17:59570612-59570643
  hypo
tgggtctgggaaatgacgcagctccatgagg

SEQ ID NO: 93155 - DNA, 30 bp, Homo sapiens; identical to SEQ ID NO: 30586
  chr17:59646336-59646366
  hypo

SEQ ID NO: 93156 - DNA, 30 bp, Homo sapiens
  chr17:59668556-59668586
  hypo
cggaagcaagatggcggcagaaagagcgcg

SEQ ID NO: 93157 - DNA, 32 bp, Homo sapiens
  chr17:60006123-60006155
  hypo
aaaataaagtcagagccgggcgtggtgtctca

SEQ ID NO: 93158 - DNA, 181 bp, Homo sapiens; identical to SEQ ID NO: 30587
  chr17:60014064-60014245
  hypo

SEQ ID NO: 93159 - DNA, 31 bp, Homo sapiens; identical to SEQ ID NO: 30588
  chr17:60057207-60057238
  hypo

SEQ ID NO: 93160 - DNA, 33 bp, Homo sapiens; identical to SEQ ID NO: 30589
  chr17:60084914-60084947
  hypo

SEQ ID NO: 93161 - DNA, 18 bp, Homo sapiens
  chr17:60127001-60127019
  hypo
aaatgtgaaggctgggcg

SEQ ID NO: 93162 - DNA, 81 bp, Homo sapiens
  chr17:60218565-60218646
  hypo
cgtgttgttccacaccgcctcacgttgtctgttggcgcgctctgctctcgcggttcgaacgatacaagagccttgcagaca

SEQ ID NO: 93163 - DNA, 27 bp, Homo sapiens
  chr17:60263516-60263543
  hypo
cgtgagccaccacgcccagccaaaact

SEQ ID NO: 93164 - DNA, 40 bp, Homo sapiens
  chr17:60517094-60517134
  hypo
aaagtatgtgctgtctctctccttacgaatgttttttttt

SEQ ID NO: 93165 - DNA, 168 bp, Homo sapiens; identical to SEQ ID NO: 30592
  chr17:60525978-60526146
  hypo

SEQ ID NO: 93166 - DNA, 39 bp, Homo sapiens; identical to SEQ ID NO: 30593
  chr17:60564358-60564397
  hypo

SEQ ID NO: 93167 - DNA, 121 bp, Homo sapiens; identical to SEQ ID NO: 30594
  chr17:60564854-60564975
  hypo

SEQ ID NO: 93168 - DNA, 37 bp, Homo sapiens; identical to SEQ ID NO: 30595
  chr17:60565574-60565611
  hypo

SEQ ID NO: 93169 - DNA, 30 bp, Homo sapiens; identical to SEQ ID NO: 30596
  chr17:60582248-60582278
  hypo

SEQ ID NO: 93170 - DNA, 36 bp, Homo sapiens
  chr17:60669600-60669636
  hypo
cgagccactgcgcccggccagaactacattcttaaa

SEQ ID NO: 93171 - DNA, 45 bp, Homo sapiens
  chr17:60691186-60691231
  hypo
aaagaaatagatatttcaggccgggcctggtggttcacgcctgta

SEQ ID NO: 93172 - DNA, 30 bp, Homo sapiens
  chr17:60728138-60728168
  hypo
caggtcccagtttgccgggggcaggcctgg

SEQ ID NO: 93173 - DNA, 30 bp, Homo sapiens; identical to SEQ ID NO: 30597
  chr17:60743990-60744020
  hypo

SEQ ID NO: 93174 - DNA, 260 bp, Homo sapiens
  chr17:60744591-60744851
  hypo
cccgtggtctggggcggagctggagctgagcaccaggcttcccgaactggctcaggcttccgagggagcagagggaggtaggaggttctgagcagggccccgggagccacggtgtgagcttctctctccgggggtgctggcgccctgccctccccacagaccagccggacaaccccagtgaggagaactgtggagtgatccgcactgagtcctcgggcggctggcagaaccgtgactgcagcatcgcgctgccctatgtg

SEQ ID NO: 93175 - DNA, 42 bp, Homo sapiens
  chr17:60750843-60750885
  hypo
caataatgtaaaaggacgcctttccttttttttttttttttt

SEQ ID NO: 93176 - DNA, 151 bp, Homo sapiens; identical to SEQ ID NO: 30598
  chr17:60753743-60753894
  hypo

SEQ ID NO: 93177 - DNA, 271 bp, Homo sapiens; identical to SEQ ID NO: 30599
  chr17:60754616-60754887
  hypo

SEQ ID NO: 93178 - DNA, 30 bp, Homo sapiens
  chr17:60757119-60757149
  hypo
cttcccatctcttccgtccccactcctggg

SEQ ID NO: 93179 - DNA, 212 bp, Homo sapiens
  chr17:60757610-60757822
  hypo
gcagtgggtggccatgcagtgcgacacacagctggactggatctgcaagatccccagaggttggccggagtggcgctgggggacgcgggatggagcgaagggtggcggggccaggaattccagggagggtctcctttcctcacaacgtctttgtccttgttcccctaggtacggacgtgcgggagcccgacgacagccctcaaggtgagcac

SEQ ID NO: 93180 - DNA, 30 bp, Homo sapiens; identical to SEQ ID NO: 30600
  chr17:60758440-60758470
  hypo

SEQ ID NO: 93181 - DNA, 30 bp, Homo sapiens
  chr17:60762204-60762234
  hypo
aaaagaacattacacggccaggcgctgtgg

SEQ ID NO: 93182 - DNA, 61 bp, Homo sapiens
  chr17:60766611-60766672
  hypo
caagacacctccagctccatgcgtaggtggcctctgcgccgggttccttgggtaggaggag

SEQ ID NO: 93183 - DNA, 460 bp, Homo sapiens
  chr17:60766876-60767336
  hypo
ctgtagacccctccctgagcccgtccccagcagcgctgccccccgccccgggcactgagctctcctacctcaacggcaccttccggctgcttcagaagccgctgcgctggcacgatgccctcctgctgtgtgagagccgcaatgccagcctggcctacgtgcccgacccctacacccaggccttcctcacgcaggctgcccgagggctgcgcacgccgctctggattgggctggctggcgaggaggtgggctcccgacacttttgccctgggccccagccttgcccgggttcccctccctgccccttcctgcccccgccttatccgcaccctatcctgactattcccttcctcccaccccatggccccccatgcccagggctctcggcggtactcctgggtctcagaggagccgctgaactacgtgggctggcaggacggggagccgcagcagccggggg

SEQ ID NO: 93184 - DNA, 30 bp, Homo sapiens
  chr17:60767578-60767608
  hypo
gcgtggattcccttccgggagcactgctat

SEQ ID NO: 93185 - DNA, 30 bp, Homo sapiens; identical to SEQ ID NO: 54459
  chr17:60771365-60771395
  hypo

SEQ ID NO: 93186 - DNA, 136 bp, Homo sapiens; identical to SEQ ID NO: 54460
  chr17:60781449-60781585
  hypo

SEQ ID NO: 93187 - DNA, 166 bp, Homo sapiens
  chr17:60793412-60793578
  hypo
ctcctctctttccttccgctgttaaacatctcttcttcagaaaggccttctctggttcagagagcaagtcggagtcccacagctgttcccgcagcggcctgcatggtccttgttttgacctccacctgcaggaattgctggcttcagtcttcgctgctggtcggta

SEQ ID NO: 93188 - DNA, 222 bp, Homo sapiens
  chr17:60858151-60858373
  hypo
cttggaaagatgagaagggcccgtgatgtgttgctttctagaagcttgcggcttaccatgtcctgcgccaattaatcattttcatcatcttctatggggaaatcggggctcctgtcccctctctgtgaaggttcgtggggacaaaattccttccgtgcctctgtcaatcacagcaagctcctctgggccagcagcggtctcgccggtgcctgggaaggaggg

SEQ ID NO: 93189 - DNA, 30 bp, Homo sapiens
  chr17:60869515-60869545
  hypo
tacagcatacgtagtcgggctgccttttgt

SEQ ID NO: 93190 - DNA, 210 bp, Homo sapiens; identical to SEQ ID NO: 54461
  chr17:60885476-60885686
  hypo

SEQ ID NO: 93191 - DNA, 29 bp, Homo sapiens
  chr17:60886669-60886698
  hypo
gctttgccgggttgatgtctgtctgtggt

SEQ ID NO: 93192 - DNA, 35 bp, Homo sapiens; identical to SEQ ID NO: 30604
  chr17:61000667-61000702
  hypo

SEQ ID NO: 93193 - DNA, 31 bp, Homo sapiens; identical to SEQ ID NO: 30605
  chr17:61447304-61447335
  hypo

SEQ ID NO: 93194 - DNA, 30 bp, Homo sapiens; identical to SEQ ID NO: 30606
  chr17:61483398-61483428
  hypo

SEQ ID NO: 93195 - DNA, 30 bp, Homo sapiens
  chr17:61499079-61499109
  hypo
catttgctggaggacgattattacagcccc

SEQ ID NO: 93196 - DNA, 30 bp, Homo sapiens
  chr17:61516354-61516384
  hypo
cccccatcccgccccggttccccactggcc

SEQ ID NO: 93197 - DNA, 211 bp, Homo sapiens
  chr17:61527569-61527780
  hypo
tgagggtcagggaaggcgtattgggtcatgacagaattatcgagccagaagatgctcaggtgttaacccggcagagatagtcagggaggaggcaggagtgtccctggttagaggagcaaggatgatgcaagggaaggctgtagggggctaacctgcaaccctcggggctcccaggcttattttcatgaggatttgccggagccagagtaat

SEQ ID NO: 93198 - DNA, 31 bp, Homo sapiens
  chr17:61529704-61529735
  hypo
gggcagaggttgaagacgtgaggtgtgtatc

SEQ ID NO: 93199 - DNA, 277 bp, Homo sapiens; identical to SEQ ID NO: 54466
  chr17:61553923-61554200
  hypo

SEQ ID NO: 93200 - DNA, 30 bp, Homo sapiens
  chr17:61574320-61574350
  hypo
gcagtacaactggacgccgaactccggtac

SEQ ID NO: 93201 - DNA, 350 bp, Homo sapiens
  chr17:61607515-61607865
  hypo
gttcattctcaacttcgaggacctggcccagctcctggccaagtgcagcagccgcagcttgtcccagcgcctgttgtcccagagcttcctgggctccggtgaggcagagtgagggtggtggtgggagggacgcatgagggtcccctggccgtggctgctctgactcctggccctggtttcagagggctctcatggcaggccaggcggaccagggccaggcacaggcaggggcaagtacaggaccatcagccagatcccacagttcacgctcaacttcgtggagttcaacttggagaagcaccgctccagctccaccacggagattgagatcatcgcgccccataaggtgg

SEQ ID NO: 93202 - DNA, 30 bp, Homo sapiens; identical to SEQ ID NO: 30608
  chr17:61609164-61609194
  hypo

SEQ ID NO: 93203 - DNA, 90 bp, Homo sapiens
  chr17:61611414-61611504
  hypo
ctcagcgatcaggacgaatcacggcgtggggcctgcagctatacctgcagtcccctcactgtggtggatctcatcgtggacatcatgttc

SEQ ID NO: 93204 - DNA, 30 bp, Homo sapiens
  chr17:61613137-61613167
  hypo
ctcatgtgcaccttcgcgctcatagcgcac

SEQ ID NO: 93205 - DNA, 104 bp, Homo sapiens; identical to SEQ ID NO: 30609
  chr17:61637141-61637245
  hypo

SEQ ID NO: 93206 - DNA, 30 bp, Homo sapiens; identical to SEQ ID NO: 30610
  chr17:61656219-61656249
  hypo

SEQ ID NO: 93207 - DNA, 43 bp, Homo sapiens
  chr17:61677496-61677539
  hypo
tgggattacaggcgtgagccaccgcgcccggctgtcctgcttc

SEQ ID NO: 93208 - DNA, 30 bp, Homo sapiens; identical to SEQ ID NO: 30612
  chr17:61685482-61685512
  hypo

SEQ ID NO: 93209 - DNA, 31 bp, Homo sapiens; identical to SEQ ID NO: 30613
  chr17:61700817-61700848
  hypo

SEQ ID NO: 93210 - DNA, 311 bp, Homo sapiens; identical to SEQ ID NO: 54471
  chr17:61777762-61778073
  hypo

SEQ ID NO: 93211 - DNA, 14 bp, Homo sapiens
  chr17:61778234-61778248
  hypo
ggtatgcgtggttc

SEQ ID NO: 93212 - DNA, 31 bp, Homo sapiens; identical to SEQ ID NO: 30614
  chr17:61780924-61780955
  hypo

SEQ ID NO: 93213 - DNA, 86 bp, Homo sapiens; identical to SEQ ID NO: 30615
  chr17:61817228-61817314
  hypo

SEQ ID NO: 93214 - DNA, 28 bp, Homo sapiens
  chr17:61817852-61817880
  hypo
cgagggcgaaactccatctcaaaaaaat

SEQ ID NO: 93215 - DNA, 26 bp, Homo sapiens
  chr17:61857356-61857382
  hypo
tttaatagtaggaaaaactgccgggc

SEQ ID NO: 93216 - DNA, 93 bp, Homo sapiens
  chr17:61864834-61864927
  hypo
acctttactcattcagtgttacgtcctactgggctgttgctcactgtgggattagaagccattgaaacaggctgggcgtggtagctgggcgtg

SEQ ID NO: 93217 - DNA, 30 bp, Homo sapiens
  chr17:61895441-61895471
  hypo
acggagatggtggtcgccatggagatggat

SEQ ID NO: 93218 - DNA, 31 bp, Homo sapiens
  chr17:61908469-61908500
  hypo
gactccatcggctcctcgcggctggaggggg

SEQ ID NO: 93219 - DNA, 30 bp, Homo sapiens
  chr17:61910204-61910234
  hypo
ctcaccccagcctacgtgtctgcggcccca

SEQ ID NO: 93220 - DNA, 17 bp, Homo sapiens
  chr17:61927404-61927421
  hypo
acttgtatttataagga

SEQ ID NO: 93221 - DNA, 149 bp, Homo sapiens
  chr17:62010937-62011086
  hypo
tttagatcttggcctaggcctcggacctgataaggtgggggccactctcaaggggtgcaggccaggacctgagccacggaagtcaggggcaggagggttaaggtttcatccgaggaacagcccgttccgggcagccccagatgttcttt

SEQ ID NO: 93222 - DNA, 30 bp, Homo sapiens; identical to SEQ ID NO: 30618
  chr17:62019009-62019039
  hypo

SEQ ID NO: 93223 - DNA, 30 bp, Homo sapiens; identical to SEQ ID NO: 30619
  chr17:62019292-62019322
  hypo

SEQ ID NO: 93224 - DNA, 181 bp, Homo sapiens
  chr17:62022730-62022911
  hypo
gggagaggtagcccagacccacgttgtcgtagttgaccttgacattgagccagcggacctggcctgtgtgcatgaggctctcgcactcagacttgttgttgacctcggagatgtcgaacctctcagaggtggtggtgttgatgcagtagtagaacttgccggcaaacaggttgacacccat

SEQ ID NO: 93225 - DNA, 30 bp, Homo sapiens
  chr17:62050190-62050220
  hypo
ggtctggccatcctcgcatcctgggctcag

SEQ ID NO: 93226 - DNA, 79 bp, Homo sapiens
  chr17:62131716-62131795
  hypo
acagctggacctcacggtctgcgaagctaaaacactcggggaggatcctcttcacggccacgtcgcggttgtcaaacat

SEQ ID NO: 93227 - DNA, 38 bp, Homo sapiens; identical to SEQ ID NO: 30620
  chr17:62209842-62209880
  hypo

SEQ ID NO: 93228 - DNA, 21 bp, Homo sapiens
  chr17:62222008-62222029
  hypo
ttttgagatggagtctcgctc

SEQ ID NO: 93229 - DNA, 166 bp, Homo sapiens
  chr17:62236398-62236564
  hypo
aagcacagctttccagaaacacgtccaccctctgatcggccagagtttatgaacttgaaactgggctacgagggctgcatgaatagcagtgaatgtggacgcatacgtggcaagcacctcagggaccggcctggttgccacccccggtgcccaagaccccctttgc

SEQ ID NO: 93230 - DNA, 30 bp, Homo sapiens
  chr17:62241004-62241034
  hypo
ggagcaaagaccaaccggttacgtgacagg

SEQ ID NO: 93231 - DNA, 41 bp, Homo sapiens
  chr17:62659471-62659512
  hypo
cctattcttgacaaataatcgtacagaagatgttctttgct

SEQ ID NO: 93232 - DNA, 35 bp, Homo sapiens
  chr17:62659956-62659991
  hypo
ctaaaaataccacagataggccgggcacagtggct

SEQ ID NO: 93233 - DNA, 31 bp, Homo sapiens; identical to SEQ ID NO: 30621
  chr17:62781267-62781298
  hypo

SEQ ID NO: 93234 - DNA, 286 bp, Homo sapiens
  chr17:62782498-62782784
  hypo
gctggccatgactgcccagggcgtgggctgccctgaacaactgcaccgccccttggcacggcacaaagcagatgttcaatacattcctgcccatagagcgaagcctgctgccctgcgtgcttgggccaggctgtgggtgtggcgaagggtagggctgggaggcagctggctgggtgtcccgcatacctgattgtggtgtcaaactcagaggggaagatgatgtcgtggtgctggcagatctggcagatgaagctgcgctgggtgcacaggtcgcagtggtagacat

SEQ ID NO: 93235 - DNA, 31 bp, Homo sapiens; identical to SEQ ID NO: 30622
  chr17:62783043-62783074
  hypo

SEQ ID NO: 93236 - DNA, 285 bp, Homo sapiens
  chr17:62783321-62783606
  hypo
aagtctttctagagttctgggcggggtaggcatgacactctcacctgccggaggtcagcaacacggaacctatgcggagactccaagagataattccggtggttgagccttcaaacaaaacacaagcgattctttagaaaagtttcgaagacccaggccagcccgtgttgtttattttcattcccctggcgctgctcaccaggcagacacctcccgcctgggcggggcagggcctaggagcacaattcagcctgcttgggacccggtcttcaaggtaactaacta

SEQ ID NO: 93237 - DNA, 31 bp, Homo sapiens; identical to SEQ ID NO: 11448
  chr17:62915937-62915968
  hypo

SEQ ID NO: 93238 - DNA, 18 bp, Homo sapiens
  chr17:62998000-62998018
  hypo
ccgctgaggtcatgtcgt

SEQ ID NO: 93239 - DNA, 30 bp, Homo sapiens
  chr17:63049743-63049773
  hypo
gcccgggtatcaaacgacatcatcttatct

SEQ ID NO: 93240 - DNA, 30 bp, Homo sapiens
  chr17:63060146-63060176
  hypo
cgccttgccagaaacggataacgataattt

SEQ ID NO: 93241 - DNA, 31 bp, Homo sapiens
  chr17:63089109-63089140
  hypo
gcgcccagccgttgtgtctcttttcacaagt

SEQ ID NO: 93242 - DNA, 30 bp, Homo sapiens
  chr17:63132283-63132313
  hypo
tctcaagatgaaaacgctaacataatgagc

SEQ ID NO: 93243 - DNA, 243 bp, Homo sapiens
  chr17:63152518-63152761
  hypo
ggatttgggcgaggtcgcccatcctgccatggcttccttgttcctcctgcacaggtgaattccagctgctgtagaaacaacacagggagaagccctggtcctgcaacaacagcaccgataaaaaaaaattatttaacttcttggacggcaggcgtcccagggcttcctcgggacaaaggtggctgatgcgggaggctgagcagcctgccaggctgtcaacgtagaccgcgtggtacagatgct

SEQ ID NO: 93244 - DNA, 30 bp, Homo sapiens
  chr17:63204713-63204743
  hypo
attgaactcttttccgggggaattcaatct

SEQ ID NO: 93245 - DNA, 24 bp, Homo sapiens
  chr17:63410186-63410210
  hypo
ctcggtctcacaaaaaaaaaaaaa

SEQ ID NO: 93246 - DNA, 32 bp, Homo sapiens
  chr17:63459275-63459307
  hypo
gccaccgcgccgggcactactagctcttctta

SEQ ID NO: 93247 - DNA, 37 bp, Homo sapiens
  chr17:63497963-63498000
  hypo
aaataactagaagtggctgggcgcggtggctcactcc

SEQ ID NO: 93248 - DNA, 351 bp, Homo sapiens; identical to SEQ ID NO: 30624
  chr17:63534021-63534372
  hypo

SEQ ID NO: 93249 - DNA, 1548 bp, Homo sapiens; identical to SEQ ID NO: 54490
  chr17:63555846-63557394
  hypo

SEQ ID NO: 93250 - DNA, 31 bp, Homo sapiens; identical to SEQ ID NO: 54491
  chr17:63557793-63557824
  hypo

SEQ ID NO: 93251 - DNA, 158 bp, Homo sapiens; identical to SEQ ID NO: 11454
  chr17:64257869-64258027
  hypo

SEQ ID NO: 93252 - DNA, 31 bp, Homo sapiens; identical to SEQ ID NO: 54493
  chr17:64298538-64298569
  hypo

SEQ ID NO: 93253 - DNA, 30 bp, Homo sapiens; identical to SEQ ID NO: 54494
  chr17:64299050-64299080
  hypo

SEQ ID NO: 93254 - DNA, 22 bp, Homo sapiens
  chr17:64499058-64499080
  hypo
gagccaccgcgcccagcgtgcc

SEQ ID NO: 93255 - DNA, 30 bp, Homo sapiens
  chr17:64633176-64633206
  hypo
gcaggaggtggaagcgatggtttcctctct

SEQ ID NO: 93256 - DNA, 686 bp, Homo sapiens
  chr17:64671946-64672632
  hypo
cagttctggttcctccgcggggtcccacgccagctgacccagcagtacctgtaacgtgtcccacccttgccagggtttgtgtgcctgcatggttttagaggttccaagtcagagcccctaaaccccttgccttattgctagacagcttgaccgcccccggaacatcacgtgggaagggcgctcggtaaatcctgttctggaggcaatctgtcactccaccagtttcccaatcaacatttgccgaggagttctggctcccggtgcagaactgacttgtggcgacgtgagggaactggcagcttcttagacccaagttctccctcgcagcatcgtcagaagaggcccaaagtagagacgcaaacaaaccctgagaacagcgtgttcttcccagtaacgtgaccgggaaaatgtgagccagaggaaacttgagagctccgtggtgcggctgagctggtggggtgagggttttttccctttttctatctggtccagcccatcggccacttgagatgctcctgaactgagtaaccaagctgttcggagggtactttctcagcaggacaagccctgagctctggaaaaacgcagctagaataacgaggaagcagaggggcctctcccacaccaggcttgccccgacaggtcagcttgcttgtggcccagcgctactgcgcacatgttccttt

SEQ ID NO: 93257 - DNA, 438 bp, Homo sapiens; identical to SEQ ID NO: 30629
  chr17:64751202-64751640
  hypo

SEQ ID NO: 93258 - DNA, 30 bp, Homo sapiens; identical to SEQ ID NO: 30630
  chr17:64752171-64752201
  hypo

SEQ ID NO: 93259 - DNA, 31 bp, Homo sapiens; identical to SEQ ID NO: 30631
  chr17:64781441-64781472
  hypo

SEQ ID NO: 93260 - DNA, 30 bp, Homo sapiens
  chr17:64781859-64781889
  hypo
ttgccttcattcggcgcttattgggtacaa

SEQ ID NO: 93261 - DNA, 30 bp, Homo sapiens; identical to SEQ ID NO: 11455
  chr17:64877670-64877700
  hypo

SEQ ID NO: 93262 - DNA, 31 bp, Homo sapiens; identical to SEQ ID NO: 30633
  chr17:64935531-64935562
  hypo

SEQ ID NO: 93263 - DNA, 30 bp, Homo sapiens; identical to SEQ ID NO: 30634
  chr17:65026892-65026922
  hypo

SEQ ID NO: 93264 - DNA, 143 bp, Homo sapiens
  chr17:65027609-65027752
  hypo
ccagaaatcagaccaccgaagctcactcccttcctctccatctctccctctctccaagactctggcagtggcctatgatcctgaagacagctctgcagccaactggtgctttggcctttgcgctgtcccggggccagcttccc

SEQ ID NO: 93265 - DNA, 145 bp, Homo sapiens
  chr17:65040724-65040869
  hypo
ggagacgcagccgccggaccctgcccagggcacccacgcctcggcgaccaccatgtcccagaccaaaatgctgaaggtccgcgtgaccctcttctgcatcctggcaggcatcgtgctggccatgacagccgtggtaaccgaccac

SEQ ID NO: 93266 - DNA, 38 bp, Homo sapiens; identical to SEQ ID NO: 30635
  chr17:65109641-65109679
  hypo

SEQ ID NO: 93267 - DNA, 57 bp, Homo sapiens; identical to SEQ ID NO: 54500
  chr17:65242141-65242198
  hypo

SEQ ID NO: 93268 - DNA, 17 bp, Homo sapiens
  chr17:65279482-65279499
  hypo
tccgtcaaaaagaataa

SEQ ID NO: 93269 - DNA, 92 bp, Homo sapiens
  chr17:65297542-65297634
  hypo
gaaagaatttcagtaaggcagtggttaaccaagactagggctgctgagagatgggaataggacacccggccactggacgtgattggatggag

SEQ ID NO: 93270 - DNA, 41 bp, Homo sapiens
  chr17:65298391-65298432
  hypo
agattagaggcgtgagtcactgtgcccgacccacctttata

SEQ ID NO: 93271 - DNA, 18 bp, Homo sapiens
  chr17:65339825-65339843
  hypo
tctgttttttttgagacg

SEQ ID NO: 93272 - DNA, 42 bp, Homo sapiens; identical to SEQ ID NO: 11457
  chr17:65352418-65352460
  hypo

SEQ ID NO: 93273 - DNA, 85 bp, Homo sapiens
  chr17:65363296-65363381
  hypo
tcttaagggccttacacgttttatgtgttatcattcataccatgctggtccctagaaaatagcttgagatcttaaaaaagcttag

SEQ ID NO: 93274 - DNA, 31 bp, Homo sapiens
  chr17:65593931-65593962
  hypo
ggtagacaggcaagatcgtgatgcagggaga

SEQ ID NO: 93275 - DNA, 272 bp, Homo sapiens
  chr17:65668881-65669153
  hypo
gtgttattgacactccagaaacgcacctgctctcgcacgtgagtcgctaatgagtatctgaggctagcatttgcatgggttgaaggtgccagggatgcctttctctgaacacctttgtttttttaagaatctattcacagttaaggggaaaaaaatgttcgaaagcgagccatgagcacattattgaattctggtttccagccgacagctgtgttgtgcttcgtgtaatagggtacatttactgatgcctcgatgctgttcttttgatttcc

SEQ ID NO: 93276 - DNA, 38 bp, Homo sapiens
  chr17:65711558-65711596
  hypo
aaaatgtgaagtggccgggcgcggtggctcaggcctgt

SEQ ID NO: 93277 - DNA, 97 bp, Homo sapiens; identical to SEQ ID NO: 30637
  chr17:65712195-65712292
  hypo

SEQ ID NO: 93278 - DNA, 30 bp, Homo sapiens
  chr17:66384767-66384797
  hypo
tatttgaaaaacagctaaggccggacgcag

SEQ ID NO: 93279 - DNA, 30 bp, Homo sapiens
  chr17:66416286-66416316
  hypo
actgtcagggttagcgaggcatttgttgtc

SEQ ID NO: 93280 - DNA, 212 bp, Homo sapiens
  chr17:66416570-66416782
  hypo
ctaccaaattgcctgccgctgtcaagccgcataacagaccaatttttattccacgaggaggagtacctggaaattaggcaagtttgcttccaaatttcatttttaccctctttacaaacacacgctttagtttagtcttggagtttagttttggagttagccttgcatatcccttctgtatcctgtccctcctccacgccgacccgagagca

SEQ ID NO: 93281 - DNA, 206 bp, Homo sapiens
  chr17:66420536-66420742
  hypo
gggttccacggatctgcgggagaaagaagccagacctgcactccatccttttacaattggaagctcaatggacacaaaacaatgatcaggagaagtttccataacaaagcctaatggacattgtttcagtgcccaagtggcagctcctctctggctctaggagctgatgctccaagtcttggcccaaacactacttccggccgggt

SEQ ID NO: 93282 - DNA, 26 bp, Homo sapiens
  chr17:66421041-66421067
  hypo
acttccatctcgaaatgatttcaggt

SEQ ID NO: 93283 - DNA, 33 bp, Homo sapiens
  chr17:66421684-66421717
  hypo
caactgctggggaggtgcgggtctgccggccag

SEQ ID NO: 93284 - DNA, 108 bp, Homo sapiens
  chr17:66426283-66426391
  hypo
gaaggctcttctggtcgactagggagtaatgcacaggcaacgatgggactgggctgcaggccccacacgcacccaggaatctccacacccaagcgtcattagccacac

SEQ ID NO: 93285 - DNA, 30 bp, Homo sapiens
  chr17:66426688-66426718
  hypo
acagacagatctcaacgtgaaggcctcctg

SEQ ID NO: 93286 - DNA, 41 bp, Homo sapiens
  chr17:66430633-66430674
  hypo
tgccagcggtccctgcgggacttctgcggggactttaaaat

SEQ ID NO: 93287 - DNA, 140 bp, Homo sapiens; identical to SEQ ID NO: 54508
  chr17:66434323-66434463
  hypo

SEQ ID NO: 93288 - DNA, 16 bp, Homo sapiens
  chr17:66439554-66439570
  hypo
gctttgttcttttaaa

SEQ ID NO: 93289 - DNA, 203 bp, Homo sapiens
  chr17:66440109-66440312
  hypo
aaatagtgttaaatcccgagaattcagtaaggtttaatatcctagcatatcgtcgaagtagagagatttctttgtcatgtaataaaacatattctttatggttcagattgtctttttgctggccatgcagacacgccaagttgaaacctgcttctaattatcacgcctactctgtactgaacgaaccacaaaaaacaattagg

SEQ ID NO: 93290 - DNA, 30 bp, Homo sapiens; identical to SEQ ID NO: 30644
  chr17:66440530-66440560
  hypo

SEQ ID NO: 93291 - DNA, 150 bp, Homo sapiens
  chr17:66446927-66447077
  hypo
tgcctttcttgaagtgatacacgttcatctgccgtggttttgtgtgactgactaccaccaccaggctgctggagaagaggcgctccacgatgtagacgtccgggatttcatctgggaggaaaagcagccgggaggttacatggattgatc

SEQ ID NO: 93292 - DNA, 19 bp, Homo sapiens
  chr17:66449633-66449652
  hypo
ttttgagagggagtctcgc

SEQ ID NO: 93293 - DNA, 29 bp, Homo sapiens
  chr17:66461886-66461915
  hypo
ggcatgagccatcgcgcccggcctgtctc

SEQ ID NO: 93294 - DNA, 30 bp, Homo sapiens
  chr17:66507038-66507068
  hypo
ggagcagtcggcctccgagggcagcgctgc

SEQ ID NO: 93295 - DNA, 309 bp, Homo sapiens
  chr17:66538785-66539094
  hypo
ggcttacgatctactcagacccggaatatcactcgggccagtactctacctggagagacaaagaaaacactctgcaggatttcattcttggtgacctctaggatttccttggtgacatttactatcctccccactgttggcggcacccgtcggaagtccagaatcctgcaagagaggaagctctgttccatctgagggatgatcagggagtgaggaggaggggttttgtcccccggccagtgcacattaggaattggctggtgtacccaggagggtggccggtgaggcgtgactctgcactgttgagct

SEQ ID NO: 93296 - DNA, 205 bp, Homo sapiens
  chr17:66539461-66539666
  hypo
taggagtgggtgcattctcctcgctctcagatcaggaaactagagcaactgccccaagcagcatggcgggaagcgtgttctttgtaaattgttcttttcgttacattcgttaaaaggccttgtgtttttcaatctggggggttgcatgggacattttgagttcaaagacaccacgatgaggcacgaagaagatagaaagccagaa

SEQ ID NO: 93297 - DNA, 30 bp, Homo sapiens
  chr17:66539939-66539969
  hypo
agcgagaaaggaaaacgggcttttatgctt

SEQ ID NO: 93298 - DNA, 30 bp, Homo sapiens; identical to SEQ ID NO: 30647
  chr17:66588586-66588616
  hypo

SEQ ID NO: 93299 - DNA, 1254 bp, Homo sapiens; identical to SEQ ID NO: 54509
  chr17:66596260-66597514
  hypo

SEQ ID NO: 93300 - DNA, 80 bp, Homo sapiens
  chr17:66913060-66913140
  hypo
ctaactaggtagacacaaatacgtgtacatgtttgtacaaacacctgtgtataataatacaaattcttggccgggcgcgg

SEQ ID NO: 93301 - DNA, 19 bp, Homo sapiens
  chr17:66913379-66913398
  hypo
ctcaaaaacaaaacaaaac

SEQ ID NO: 93302 - DNA, 24 bp, Homo sapiens
  chr17:67001279-67001303
  hypo
ctcgtccctcctggcttatctttt

SEQ ID NO: 93303 - DNA, 43 bp, Homo sapiens
  chr17:67081065-67081108
  hypo
tggagatagcatattgactctcggttctttattagtgaattca

SEQ ID NO: 93304 - DNA, 20 bp, Homo sapiens
  chr17:67410119-67410139
  hypo
aggtgtggccgggcgcggtg

SEQ ID NO: 93305 - DNA, 19 bp, Homo sapiens
  chr17:67410378-67410397
  hypo
agagcgagactccctctcg

SEQ ID NO: 93306 - DNA, 30 bp, Homo sapiens
  chr17:67448226-67448256
  hypo
acaagttcccctaacgcagtgcttctcaac

SEQ ID NO: 93307 - DNA, 210 bp, Homo sapiens
  chr17:67468375-67468585
  hypo
ctccctgttacaaggccgcacatgtacccccgaatctaaaaaaaaagtttaacattaacaataataaattacaaataaatatgcatcgttataagcaagatttgtagtgcagtaggtccttgaataatgccatttcattcaacattgttttattatagtgttgatgagaaaacaaaatcggttcccaaccagggccgctgtcagtgtgga

SEQ ID NO: 93308 - DNA, 1583 bp, Homo sapiens; identical to SEQ ID NO: 54512
  chr17:68164453-68166036
  hypo

SEQ ID NO: 93309 - DNA, 32 bp, Homo sapiens
  chr17:68197135-68197167
  hypo
tgagccaccgcgcccagcctagtcaaataact

SEQ ID NO: 93310 - DNA, 175 bp, Homo sapiens
  chr17:70220135-70220310
  hypo
cagagctcaccacagctctgacgacggcaaagagaggttgccggaaggaaacaaaagtccatcaagggctggcaaaatattaatccggagctcacggatgggcagtgatgcgcaccctctgatggcgagcattcccttcatgttcatgctgcccgtgggctgacaaaagcccacc

SEQ ID NO: 93311 - DNA, 52 bp, Homo sapiens; identical to SEQ ID NO: 11470
  chr17:70270192-70270244
  hypo

SEQ ID NO: 93312 - DNA, 94 bp, Homo sapiens; identical to SEQ ID NO: 30655
  chr17:70380739-70380833
  hypo

SEQ ID NO: 93313 - DNA, 30 bp, Homo sapiens; identical to SEQ ID NO: 54523
  chr17:70400150-70400180
  hypo

SEQ ID NO: 93314 - DNA, 343 bp, Homo sapiens
  chr17:70441815-70442158
  hypo
ggcagaggtgggtggcgatggggccggcggacacacggcctcgtgcttttcatgcgatgacacacctgactggccaggcacacctggacgtcggggcaggccaagctttccaacagtcactcactgttccttgagtggagaggcctggcagccacgctcctcacagacaggggggtttttctccttcttggtaggccacgcctcccccgggcacatactgcctctgtccgagggtttcgtccaagccctgggctctgaccacaaaaagcgcccttttctttggcgggctcacctcagacgtgaggtaccagagagccaaaccgtctgctaaaaggacatcccc

SEQ ID NO: 93315 - DNA, 544 bp, Homo sapiens
  chr17:70657400-70657944
  hypo
gacactcctgcttgagcgcagattgctgctcagcctggggtgtagttctggggttcgaggtgcacgctctcaggagaggtagtggagagagtcatgggtttctctgagaattggcaagcgaagggacggcaacctgcagccttgctctccaggctatattccctggccggttgattatgaaaggagaatggcatatccctgacaagccctgcttcaccccggctttcagatcctcccatgtgcgatgagcgtgtgtgttcttgtgtggcaggcccttacatactgttttgattgttatcatcttgccgtgaaaggcctgattgttcaggcctggagatgacatcaccggcttcccactagggcagcctgtcgaggtgtttgatgagcctgcaggtgggaaggggctgggtactccccgcagggctgcccggccctacctgctcagaggagctggcttagcacgcaagggatcttcccccaccctcttggtgcagttctcggaaacttcttggtgcaggctggcgagatgagatgacccatccat

SEQ ID NO: 93316 - DNA, 144 bp, Homo sapiens
  chr17:70712100-70712244
  hypo
gttgggattacagacgtgagccaccgtgcccggccaaaatgtaccatcttgatcaatttttaagtgcacagacaggtcatggtaagtgtgaaaaaatacctaactcccgccctcgttctcctcgcaccctccctgacccacccc

SEQ ID NO: 93317 - DNA, 257 bp, Homo sapiens
  chr17:70713781-70714038
  hypo
caccctaatccagtacgagctgatcttaactaattacatctgcaaagatcctaccgccaaataaggttacagtcacaggtcctggggattaagacttccatacctttctggggtgcatgacttcagcatcgctccttattctggaacttacaggacaggtcactcttgctctgtagctctccctcggagtgaccctgcacatcggctgtctaggaggtgaggctggagaagtgagtcatgaccgcaaggccaccaga

SEQ ID NO: 93318 - DNA, 34 bp, Homo sapiens
  chr17:70785405-70785439
  hypo
tcgtgatccgcccgcctaggcctcccaaaggctt

SEQ ID NO: 93319 - DNA, 30 bp, Homo sapiens
  chr17:70944321-70944351
  hypo
gcaagcgtcatcgccgcacacacacaaaac

SEQ ID NO: 93320 - DNA, 121 bp, Homo sapiens
  chr17:70948869-70948990
  hypo
atccttatagccctgcaaggtcggcaaagtgcgagcgtgatccttcttagggcaaacacgtgaccaacgcaagctgttcttgactttccacagcagccccgacagtctgctctgctgccca

SEQ ID NO: 93321 - DNA, 16 bp, Homo sapiens
  chr17:71161142-71161158
  hypo
tgggccagtcccagcg

SEQ ID NO: 93322 - DNA, 250 bp, Homo sapiens; identical to SEQ ID NO: 54529
  chr17:71161183-71161433
  hypo

SEQ ID NO: 93323 - DNA, 544 bp, Homo sapiens; identical to SEQ ID NO: 54530
  chr17:71161481-71162025
  hypo

SEQ ID NO: 93324 - DNA, 74 bp, Homo sapiens; identical to SEQ ID NO: 54531
  chr17:71162334-71162408
  hypo

SEQ ID NO: 93325 - DNA, 253 bp, Homo sapiens
  chr17:71201619-71201872
  hypo
ttgaagctgtttattacgctcacataccaagtcctctctcttcatgggtggggactgggaattcatttgcagaaagaaggtgcatttccagtcacccagaaccgggcgctgcagctgctttatgatctgcgttacctcaacattgttctgacagccaagggtgacgaggtgaagagtggccggagcaagccagactccaggtgtcgtatcctctagggagctatgtcaaggcggtctcttccaaaagcaaata

SEQ ID NO: 93326 - DNA, 211 bp, Homo sapiens
  chr17:71202330-71202541
  hypo
atccatttgacctggacgttttcacgccacacctcaacagcaaccttcatcgcctggtgcagcgaacttctgtgagtcaaatcaaaaacatgcttagtgcgaacgaagcgatacaggctcaaataacaaaattaacctgctcaagcacgtaatactccaggatgcagcatagggaggggaataagacacaaatagccgagtgtagttataa

SEQ ID NO: 93327 - DNA, 150 bp, Homo sapiens
  chr17:71202869-71203019
  hypo
tacagagaatcagctcgccccccggagcagtacgttcaactcccaagaaccccataacatcctgccactggcatccagtcagatcaggtaaaggctgccaagaggcttctgcggggcacttcgggaggccaaggtggacggatcacgtca

SEQ ID NO: 93328 - DNA, 30 bp, Homo sapiens
  chr17:71244879-71244909
  hypo
aagtggattaacctcggggcggccttgttt

SEQ ID NO: 93329 - DNA, 113 bp, Homo sapiens; identical to SEQ ID NO: 30660
  chr17:71269316-71269429
  hypo

SEQ ID NO: 93330 - DNA, 31 bp, Homo sapiens
  chr17:71271188-71271219
  hypo
cccatccgggtgacttcggcaacagttcagt

SEQ ID NO: 93331 - DNA, 88 bp, Homo sapiens
  chr17:71272523-71272611
  hypo
agccaccatgcccggccctgaaaacacttttatttgtcttaaattggtctttatattttgccattacttttaacgacaaaaaatgcaa

SEQ ID NO: 93332 - DNA, 24 bp, Homo sapiens
  chr17:71279081-71279105
  hypo
aaagcccatgtcgaccggcacggt

SEQ ID NO: 93333 - DNA, 167 bp, Homo sapiens
  chr17:71280548-71280715
  hypo
atagctatgggaggtgcgtagggaaaacacacacaccagacacccaccccatgtcattctaaataaagttgggaagcactaaagttgagctggtgtctttgccacggatgtccccagactccagtccgctaatcgccaccagactccagtccgctaatcgccactgt

SEQ ID NO: 93334 - DNA, 30 bp, Homo sapiens; identical to SEQ ID NO: 30663
  chr17:71281851-71281881
  hypo

SEQ ID NO: 93335 - DNA, 30 bp, Homo sapiens
  chr17:71282087-71282117
  hypo
aaaggcctgctcatcgaggagggggtcagg

SEQ ID NO: 93336 - DNA, 1601 bp, Homo sapiens; identical to SEQ ID NO: 54536
  chr17:71306966-71308567
  hypo

SEQ ID NO: 93337 - DNA, 30 bp, Homo sapiens; identical to SEQ ID NO: 30665
  chr17:71312494-71312524
  hypo

SEQ ID NO: 93338 - DNA, 259 bp, Homo sapiens
  chr17:71325319-71325578
  hypo
taggactgtaggcgtgagccgctgcgcccagtcccccgtcaaagacttcttaccttctacaacacactagaaaatcccaccctttgtggtagaagcgctcagcaaacctctttggatccaatttcactcactctttatgggcgttaagaaaagagtatatgagacgtgcatatgatgggccctgggtaaaagagggtaaggggtcatggggacagcagcaccggaaggcacagggaagcactgccgtgggcctgctggt

SEQ ID NO: 93339 - DNA, 155 bp, Homo sapiens
  chr17:71326304-71326459
  hypo
ccagctctcactaccccgggtccttacccacaatctggtgaatggtctcttcctgaaactcctgaaatgggcctgtgttgagtgcgccattgctttccagcttgactgatagactcggaaaggtcggttcagctctccctcccaaagtgctggga

SEQ ID NO: 93340 - DNA, 31 bp, Homo sapiens
  chr17:71328372-71328403
  hypo
agagtgggttagaggccgggcgcagtggtgc

SEQ ID NO: 93341 - DNA, 30 bp, Homo sapiens; identical to SEQ ID NO: 30667
  chr17:71332892-71332922
  hypo

SEQ ID NO: 93342 - DNA, 200 bp, Homo sapiens
  chr17:71345760-71345960
  hypo
agctgtgcttgcaccacgagccttgtcctgtcctcatgggctgctttcagatgctgccctttgaggctgatggggataggaggttgtcctttaataggtataaataaggacctgggggagagggtttcccaaatggggaggaagacaggagggcatagcgataatgcgggtgctcaggcgtccttcgctaaggtgttttt

SEQ ID NO: 93343 - DNA, 31 bp, Homo sapiens; identical to SEQ ID NO: 30668
  chr17:71351037-71351068
  hypo

SEQ ID NO: 93344 - DNA, 38 bp, Homo sapiens
  chr17:71354306-71354344
  hypo
cgcacgatgatgggcacgccaggcggtcctggggcacc

SEQ ID NO: 93345 - DNA, 138 bp, Homo sapiens; identical to SEQ ID NO: 30670
  chr17:71364485-71364623
  hypo

SEQ ID NO: 93346 - DNA, 31 bp, Homo sapiens
  chr17:71410786-71410817
  hypo
tagccctggttgatgccgttgatgaactggg

SEQ ID NO: 93347 - DNA, 298 bp, Homo sapiens; identical to SEQ ID NO: 30671
  chr17:71431600-71431898
  hypo

SEQ ID NO: 93348 - DNA, 30 bp, Homo sapiens; identical to SEQ ID NO: 11477
  chr17:71469605-71469635
  hypo

SEQ ID NO: 93349 - DNA, 171 bp, Homo sapiens
  chr17:71492641-71492812
  hypo
cgttctgcccattagcgaagggagttagtgagagaggaggctggacagatggacaggacccggtgatacagggtcttgtactccctcgaccaaaatcctttcgagactgtccactgcctgctggatatatccgagaagattcttcctggcgttccaggtcctacctctgcc

SEQ ID NO: 93350 - DNA, 230 bp, Homo sapiens
  chr17:71507290-71507520
  hypo
aagagccctttgaatcgcgcttttaaaaaccctctgttcattgctgtcatcactcgtttgttttaaaacaataacgatccagcccctgggtgattaaatcccttccatgtggggctgactcagagccagaacagtcagaggggctgggcagtgtgtgtatctgcatgcacacatgtgcatatgtgtgagcacacacacacgcgcgagcacgcacacgctctgcgcccaga

SEQ ID NO: 93351 - DNA, 344 bp, Homo sapiens
  chr17:71548538-71548882
  hypo
gttaaggcagcttggcgaggacgcatgacatctgtgtcacgcattgaaactggagtggcgcaggggaccctcctgagggggtggccgtccacattgccagctgatggccgagcggtcagtggtcgaggcgcaggtctgagtgtactcggccggagtacccatcatgagccacttagattagcttctcggcactcaagaagtacgtacgagcatcacgcccacttgagctatgagaaactgaggcataaatgggttaagtcacttggcaggatacgggggaacaggatttgagcccggccaggctgactgcagagcttgaggacggtgctactaccctgccaatg

SEQ ID NO: 93352 - DNA, 30 bp, Homo sapiens; identical to SEQ ID NO: 54538
  chr17:71639300-71639330
  hypo

SEQ ID NO: 93353 - DNA, 297 bp, Homo sapiens; identical to SEQ ID NO: 54539
  chr17:71639570-71639867
  hypo

SEQ ID NO: 93354 - DNA, 30 bp, Homo sapiens; identical to SEQ ID NO: 11478
  chr17:71641654-71641684
  hypo

SEQ ID NO: 93355 - DNA, 30 bp, Homo sapiens
  chr17:71744311-71744341
  hypo
gccttctgttatgaacgaccatgtgatgca

SEQ ID NO: 93356 - DNA, 433 bp, Homo sapiens
  chr17:71744647-71745080
  hypo
tgctccaagatgggccccagacgtggaagatggctctgccgggacagctgtaaactctttaaccttgtgtggggcttcgtccttcagcagcccggtgagggatcagtggcaggtgtgatggcgggggaggtggaggtggcggcggaggcggccctgcactcactcactcacggcagaacagactctggataaacaattatagtctatttacctcagaccatatggtgttggggaacaggtgtgcgggtaatgaagagcccagctccaattaagcgtcggggaacccggccggattcccactgaatcttgcgcttgggttgaggcccacttacaaatgagagctaaaaggactgaggctcggggaggcaggagcgggagcctgaggggtgcgtggcagggccagccagcggcccccacccgctgctctgtacct

SEQ ID NO: 93357 - DNA, 888 bp, Homo sapiens; identical to SEQ ID NO: 54545
  chr17:71948433-71949321
  hypo

SEQ ID NO: 93358 - DNA, 56 bp, Homo sapiens
  chr17:72198103-72198159
  hypo
tcctgcctgaaaaaggggaggcgggagctgagctcggaaggaccagtggcacttgg

SEQ ID NO: 93359 - DNA, 30 bp, Homo sapiens; identical to SEQ ID NO: 30678
  chr17:72207503-72207533
  hypo

SEQ ID NO: 93360 - DNA, 225 bp, Homo sapiens; identical to SEQ ID NO: 54546
  chr17:72208726-72208951
  hypo

SEQ ID NO: 93361 - DNA, 35 bp, Homo sapiens
  chr17:72243966-72244001
  hypo
cttaagtgcgtgcgtgcgtgcgtgcatgcgtgtgt

SEQ ID NO: 93362 - DNA, 395 bp, Homo sapiens
  chr17:72249016-72249411
  hypo
cctggaagagctggtcgtgaagctgggaatgggccagaatgatctgcaggaggcaggctggggaccgcgttttagaggagtctcaaggagacacgcgtggccagagagtcctgggaggaaaggcagggaagtaggacaggacctggctgcctcggagcctccttcacccttcacagccggccatcttctacccattgttctagaaacagagactacgatgacattgatgatgatgacccctttaacccccaagcctggcgcatggcggctcacagtcccccgaggggacagcttcacagcttctgcagctacagcagtggcctgggaagtcagaccagcctgcagcccccggcccagaccatctccaacgcccctgtctccgagtacatgtacgg

SEQ ID NO: 93363 - DNA, 30 bp, Homo sapiens
  chr17:72249920-72249950
  hypo
cccacgctacgagaacgtgccactaatcgg

SEQ ID NO: 93364 - DNA, 80 bp, Homo sapiens
  chr17:72269880-72269960
  hypo
ctccgtctcaaaaaaaaaaaaattccccagcttctactcccaaggagtttccattctggtggtgcgggaagatgtcttta

SEQ ID NO: 93365 - DNA, 164 bp, Homo sapiens; identical to SEQ ID NO: 54550
  chr17:72270295-72270459
  hypo

SEQ ID NO: 93366 - DNA, 89 bp, Homo sapiens; identical to SEQ ID NO: 30681
  chr17:72278028-72278117
  hypo

SEQ ID NO: 93367 - DNA, 35 bp, Homo sapiens; identical to SEQ ID NO: 30682
  chr17:72290213-72290248
  hypo

SEQ ID NO: 93368 - DNA, 41 bp, Homo sapiens; identical to SEQ ID NO: 54551
  chr17:72322128-72322169
  hypo

SEQ ID NO: 93369 - DNA, 30 bp, Homo sapiens
  chr17:72356239-72356269
  hypo
acctcatcggtgcccgcagcctgcacccgc

SEQ ID NO: 93370 - DNA, 317 bp, Homo sapiens; identical to SEQ ID NO: 30683
  chr17:72367921-72368238
  hypo

SEQ ID NO: 93371 - DNA, 374 bp, Homo sapiens; identical to SEQ ID NO: 11486
  chr17:72449938-72450312
  hypo

SEQ ID NO: 93372 - DNA, 337 bp, Homo sapiens; identical to SEQ ID NO: 54557
  chr17:72450330-72450667
  hypo

SEQ ID NO: 93373 - DNA, 30 bp, Homo sapiens; identical to SEQ ID NO: 54558
  chr17:72612278-72612308
  hypo

SEQ ID NO: 93374 - DNA, 30 bp, Homo sapiens; identical to SEQ ID NO: 54559
  chr17:72638272-72638302
  hypo

SEQ ID NO: 93375 - DNA, 30 bp, Homo sapiens
  chr17:72797753-72797783
  hypo
caccccaaaaatgtgcgtgcccgtacccgc

SEQ ID NO: 93376 - DNA, 30 bp, Homo sapiens
  chr17:72798145-72798175
  hypo
gctcctgtctgagcacggcccctgtccctc

SEQ ID NO: 93377 - DNA, 163 bp, Homo sapiens
  chr17:72799714-72799877
  hypo
gtcagaccccgagcccgaggcctaagccctccttgtttgtgagtggtgcagtcagggataaaaacccggtgtgcctcacttcccaagccacctgggctgatcctggccactgacctgtgcgtgcacatgcatttccagtcattcccctcgagaagctgagccc

SEQ ID NO: 93378 - DNA, 202 bp, Homo sapiens
  chr17:72800412-72800614
  hypo
atagccgtgatccttcgtgtggccagtgtcccagccagcggtgctggccctgcacactggctcaaaagcagcacctgtgtgcagagaagaaatagctgagtgtgcgctgtgcagtgcaccctggccctgaggagaggagccacagaaccccagagggtttacagccagcagagaggtgcgagggactcggctatgatggccc

SEQ ID NO: 93379 - DNA, 193 bp, Homo sapiens; identical to SEQ ID NO: 30686
  chr17:72811188-72811381
  hypo

SEQ ID NO: 93380 - DNA, 138 bp, Homo sapiens
  chr17:72818502-72818640
  hypo
ggtctcccaccctgaggctcccggggccctgcagtgctgcggagcaggtgacagtggcctcgagagaggcttttggcagcatcaggagccggaggtggagaccagctcgggaaggtcgacagcacttgtttttttggt

SEQ ID NO: 93381 - DNA, 19 bp, Homo sapiens
  chr17:72823449-72823468
  hypo
ttttagacagagtctcgct

SEQ ID NO: 93382 - DNA, 37 bp, Homo sapiens; identical to SEQ ID NO: 30688
  chr17:72823707-72823744
  hypo

SEQ ID NO: 93383 - DNA, 522 bp, Homo sapiens
  chr17:72824032-72824554
  hypo
cgcacccaccccttccgaggcccagctaaagccaagagagccctgcagcccggcaccttccaagggctaagtggtggtgaaggagggagctggcgccaagtcctcccctagtcctgttccccgcctggagtgccggtgcctgagctggtgatgggcacactgccggccatttgttatcattagccctggcatgttgattctctgcttggaaaagagagtgccgctcccagacagccaccgtgacggatggcctccacctcacagtgtcagagccagagccacacatggggagcagggaatggcacggggcttggggcgccctgacctcagggacatctggagccaggttcagaggtcagagagttgtgggagcagctctccaggaagcagccctgccaaggcacagctcagcactggcgtgtggaaaaggcctgggggcccatgcctggaggaagacccttcacccttggccctcagggtcatggctctgagtgtgtgtgcacaactcggacacccaaaggg

SEQ ID NO: 93384 - DNA, 734 bp, Homo sapiens; identical to SEQ ID NO: 54568
  chr17:72920294-72921028
  hypo

SEQ ID NO: 93385 - DNA, 905 bp, Homo sapiens; identical to SEQ ID NO: 54573
  chr17:72983605-72984510
  hypo

SEQ ID NO: 93386 - DNA, 30 bp, Homo sapiens
  chr17:72999556-72999586
  hypo
ctacctactgggtccggacgaccacctggc

SEQ ID NO: 93387 - DNA, 44 bp, Homo sapiens
  chr17:72999879-72999923
  hypo
tgctgagcaagtgccggcagcacggggccggagtgcggcacgcc

SEQ ID NO: 93388 - DNA, 30 bp, Homo sapiens
  chr17:73001498-73001528
  hypo
cctggcctctgcaccgggatcccagtggga

SEQ ID NO: 93389 - DNA, 237 bp, Homo sapiens
  chr17:73016426-73016663
  hypo
caggttccatttggcaactgccgagtggatcgcggagcccgtgcggcagaagatagccatcacggtaaccaccatccctttctttccctagaaatccctcagtggcttttaaacctttactctgtaggactccagtttttcatttgttctctgcagcataaaaacaagatcaacaggttaggagagttgatcctcacctctgagagcagccgctatcagttccggaatctggcagat

SEQ ID NO: 93390 - DNA, 267 bp, Homo sapiens
  chr17:73016883-73017150
  hypo
tgggaccgaggcctgcgggctagtgcctgctggtgtaactgctcggcttcccgttgagctcccaactcctctcaccactttgaaaagcactgattgggcatctggggctaattgcagtctttttgttttcaggatagaaaacatgaatcgggaaaggctgagacaaaagagaattcattctgctgtaaagacaagcaggagggtcgacatggactgaaatcaccctctgcagctgggagggctcttctgggcgtccgggcagctgca

SEQ ID NO: 93391 - DNA, 30 bp, Homo sapiens
  chr17:73031636-73031666
  hypo
cgggcccaatggctcacgcctgtaatccca

SEQ ID NO: 93392 - DNA, 30 bp, Homo sapiens
  chr17:73055777-73055807
  hypo
ccaattaataaccacgggagacggctacgg

SEQ ID NO: 93393 - DNA, 35 bp, Homo sapiens
  chr17:73067478-73067513
  hypo
tgagggtattttcaaccgtccgtctgtcagctctt

SEQ ID NO: 93394 - DNA, 223 bp, Homo sapiens; identical to SEQ ID NO: 54578
  chr17:73073460-73073683
  hypo

SEQ ID NO: 93395 - DNA, 86 bp, Homo sapiens; identical to SEQ ID NO: 11496
  chr17:73073967-73074053
  hypo

SEQ ID NO: 93396 - DNA, 406 bp, Homo sapiens
  chr17:73075226-73075632
  hypo
acccaagtgggtagcagcagccgcatacatctcagagtcttcccacatcacggggctggcaaggacaggggcttcctcgccaagtcctccccgctctgaaagacacttggtggcaggatggtgcgtgacaccctcaggcacacatccaaatgtcccggggatgatacttgctctcaaacagctgttccttatttgggggagtcctgggcccccataggtccgcaatggtggtcctgagggtcctgaaactcttttcagtatttccacgagccagatggcaagcaggcctgtgctttcaaggaggcaggttagcaaaccgaatgtcagggtgtctggtctctgcctggcctgttcctggagaaattagtgacccaggtttcagcctgtgcttcatgggggaaaacat

SEQ ID NO: 93397 - DNA, 190 bp, Homo sapiens
  chr17:73086358-73086548
  hypo
agaccagttgactggagaaaccgctcgatgggaggggaggctggagagccgactgggcatccataccgtgtatgtgacctgggacttactgggagtgggagaggagacagggaaggccatgtctgcagtgggggtcccagagaggcgggggaagggggtcctcagaccttggtggcagagtttcttttct

SEQ ID NO: 93398 - DNA, 799 bp, Homo sapiens
  chr17:73089509-73090308
  hypo
atgccaaggccaacgcgtgggcctctggccacctcccaggggtggtgcccctctgtgacacctggtacttgggtatgaggaagggatggcttagctgcccagagaaggtggcaggtgggccaggagagacggacagcctgctgaccaccaggctccattctgtcccctccccaggcagcagccacattggcagtgaggccgtggcagcgtcggcagcagaggatgccccaggccctggagcgtgcagatggcagctgggcctgggtggtgctgctggccaccatggtgacccagggcctcaccctgggcttccccacgtgtatcggcatcttcttcactgaattgcaatgggagttccaggccagcaacagcgagacctcttggttcccctccatcctcacggctgtgctccacatggcaggtgagcggcctagggaggggccgatgagaaagtcctaggggttgcggggaagccacaacctccctggccttctgattccctctctctgaggccacaggctttgcctcctgggtgaattcctaaggtttcaccagatttcaccaggggcccctggctggaatccagctggactgggctggagccggggagagagtggggaggtgcctgggttgcaaagccaggcggagccttgcgtcctttctgtgggatccattccgacacaggcgtaggtgtgctggggcgctcagtgccaggctgggaagagcgctggggccagcccaccaagactctcctgctttccagctggctggtctctctgaacctcggttgcttcctctg

SEQ ID NO: 93399 - DNA, 235 bp, Homo sapiens
  chr17:73090970-73091205
  hypo
actgcctcaccctgaccccagcgttgggagcagggcagagggagggttctctgcagtcgccgtggacacagggacctgccctcagctcctgggagctctccagggagactgcagagaccccggcctcggaggggcccggtggacagcagcccgagctgatggcccacaggcctctgcaggcgtgtgtctgctggccgcagctgcccatctccccggctacctcctggctactccc

SEQ ID NO: 93400 - DNA, 44 bp, Homo sapiens
  chr17:73095831-73095875
  hypo
cccaatttgggtttttaaaagataactctcgtgctacacctagg

SEQ ID NO: 93401 - DNA, 30 bp, Homo sapiens
  chr17:73096487-73096517
  hypo
ggtgtgatgtggtccgtcctgggcttccca

SEQ ID NO: 93402 - DNA, 31 bp, Homo sapiens; identical to SEQ ID NO: 30699
  chr17:73096893-73096924
  hypo

SEQ ID NO: 93403 - DNA, 169 bp, Homo sapiens
  chr17:73100140-73100309
  hypo
cttcatgggtggcagcttctacgccctgcagaagaaggagcaaggcaagcaggctgtcgcggcggatgccctggagcgggatcttttcttggaagccaaagacggtcctgggaagcaacggtcccctgagatcatgtatgtaaccagcgtctaagacccagggttcatc

SEQ ID NO: 93404 - DNA, 31 bp, Homo sapiens
  chr17:73101011-73101042
  hypo
atgcactggaccttctcgtccagcctggatg

SEQ ID NO: 93405 - DNA, 29 bp, Homo sapiens
  chr17:73115544-73115573
  hypo
tttctttttttttttttgagacggagttt

SEQ ID NO: 93406 - DNA, 88 bp, Homo sapiens
  chr17:73115872-73115960
  hypo
ccctgggctgcttcagctcagcatgggcgagtccccagatgtagctgtattttgagctgcccttgccgagggcctgcccagccaccag

SEQ ID NO: 93407 - DNA, 31 bp, Homo sapiens; identical to SEQ ID NO: 30700
  chr17:73117396-73117427
  hypo

SEQ ID NO: 93408 - DNA, 23 bp, Homo sapiens
  chr17:73119991-73120014
  hypo
gcgaggctcatactcaaaaaaaa

SEQ ID NO: 93409 - DNA, 201 bp, Homo sapiens
  chr17:73124802-73125003
  hypo
caacaaggagcacatcctgcacgcaggaggtgtcccactcatcatcaactgcctatccagccccaatgaggagacggtgctgtctgccatcaccacgctcatgcacctgagcccgccgggccgcagctttctcccagagctgaccgccacgcccgtggtgcagtgcatgcttcgcttctccctctcggccagcgccaggct

SEQ ID NO: 93410 - DNA, 222 bp, Homo sapiens
  chr17:73131494-73131716
  hypo
tcctggaggaagacccgcttcagtgtgattgcctcccttgcttcactgcttttagttccaggcagtttcattgtacatccaagccttcctctgcgtgagagcaaaggctttgctcatcagccagccagtcttgttactatctggctactttttaaggttaaaaaataaaaggcagtttctttgctttgcaggcggcaaggcaggaggcgcaggcctcttcat

SEQ ID NO: 93411 - DNA, 162 bp, Homo sapiens
  chr17:73132151-73132313
  hypo
gcatggaggaaacagacagaacgacagcgttcaggacagtcagagctaacccaagacgaggctggacttgccgccagggggatttcttctggatggcactggggccggggccaccgggctgggcacaggcgcagcaggcacgggcttctcttcactctgccc

SEQ ID NO: 93412 - DNA, 20 bp, Homo sapiens
  chr17:73132858-73132878
  hypo
acaggcgtgagccaccgcgc

SEQ ID NO: 93413 - DNA, 121 bp, Homo sapiens; identical to SEQ ID NO: 30704
  chr17:73135932-73136053
  hypo

SEQ ID NO: 93414 - DNA, 31 bp, Homo sapiens; identical to SEQ ID NO: 30705
  chr17:73136292-73136323
  hypo

SEQ ID NO: 93415 - DNA, 33 bp, Homo sapiens
  chr17:73148047-73148080
  hypo
gagcaaaactgcgtctcaaaaaaaaaaaaaaaa

SEQ ID NO: 93416 - DNA, 41 bp, Homo sapiens
  chr17:73151711-73151752
  hypo
cttaccacaacagcacgaagcgcaccacttgtttgtgttag

SEQ ID NO: 93417 - DNA, 23 bp, Homo sapiens
  chr17:73153031-73153054
  hypo
ccggcccaatcttcccactctta

SEQ ID NO: 93418 - DNA, 121 bp, Homo sapiens
  chr17:73154764-73154885
  hypo
cttattcaagatggagttgctctggttcaaacgtctctgacacctgttctgagttgtgagggctggaatgagataaatataagaatgtacatgctggccaggcaaggtggctcacgcctgt

SEQ ID NO: 93419 - DNA, 42 bp, Homo sapiens; identical to SEQ ID NO: 30708
  chr17:73179829-73179871
  hypo

SEQ ID NO: 93420 - DNA, 181 bp, Homo sapiens; identical to SEQ ID NO: 30709
  chr17:73209660-73209841
  hypo

SEQ ID NO: 93421 - DNA, 155 bp, Homo sapiens; identical to SEQ ID NO: 30710
  chr17:73215294-73215449
  hypo

SEQ ID NO: 93422 - DNA, 220 bp, Homo sapiens
  chr17:73236200-73236420
  hypo
agaaagggtggtgagccgagggcgggtggggagggcctgccgctggaacggggcgcagccctccaaggactgcacggaagacagccccggaggcactcattgttccccgctgcagctggcacgctctggagggaaggacagctaactgcagcccaggagacatgacgctggaaagtggaggtccttggcacagtagtgctgtcaccgatcctgtgcccct

SEQ ID NO: 93423 - DNA, 152 bp, Homo sapiens; identical to SEQ ID NO: 30711
  chr17:73241506-73241658
  hypo

SEQ ID NO: 93424 - DNA, 32 bp, Homo sapiens; identical to SEQ ID NO: 30712
  chr17:73241837-73241869
  hypo

SEQ ID NO: 93425 - DNA, 30 bp, Homo sapiens
  chr17:73242141-73242171
  hypo
cctcagccatcagtgcgacaccttcgctag

SEQ ID NO: 93426 - DNA, 183 bp, Homo sapiens; identical to SEQ ID NO: 30713
  chr17:73242493-73242676
  hypo

SEQ ID NO: 93427 - DNA, 215 bp, Homo sapiens
  chr17:73274192-73274407
  hypo
tggggtgggagggctccctctcgtgtgagggctgcctcaccatttttctttccttcggctggtatggcccacttgtacaggtgcttcaaggagctgtagcaagagaactgcagcccggcgtaggggaagatggcgatcaaggtgggagccaagcctttgtagaaaacctgggggccttcgctcctatacatggtccccacggcgtggcgcagcgt

SEQ ID NO: 93428 - DNA, 364 bp, Homo sapiens
  chr17:73311548-73311912
  hypo
ctctgtctcaaaaaaaaaaaaaagaaaaaaaaagtatttccaagacgcataaaacaggtccactgtcattttttccagttatccaggaacttccataaagcgaacgttttgggctgaaggtcacccaccccatgaacagtcaggtggaactagtgcccagggaaggcaggcagcctgcgccatcatggcctttggctcagaggccacctaagcagccccgcgctgtgggtcaccatctcctccacactcaagtctgaaggtgagcctgtcaggggctcccagctcactgggtggagggaagcgtgtcagggaggggtggggggggcgtgccctgaagagcgaggccatgcgcctacctccagct

SEQ ID NO: 93429 - DNA, 29 bp, Homo sapiens
  chr17:73352189-73352218
  hypo
caggcatgagccaccgcacctggccctat

SEQ ID NO: 93430 - DNA, 84 bp, Homo sapiens; identical to SEQ ID NO: 11499
  chr17:73422367-73422451
  hypo

SEQ ID NO: 93431 - DNA, 203 bp, Homo sapiens
  chr17:73465134-73465337
  hypo
tcattttccaggtaaccagcccgcttttgtcggacctgttgtcagattgggctgcccatcgtgtgttcatctgctcaggtgcctgttgagcactgcactcaaccacgtgaggggctgcgggcttgcacatgctggtgagtgtggcgtctgactgccagcacgtggaaagaagtcagtgcctcgttctggggatgcagtggaca

SEQ ID NO: 93432 - DNA, 31 bp, Homo sapiens; identical to SEQ ID NO: 30719
  chr17:73474683-73474714
  hypo

SEQ ID NO: 93433 - DNA, 143 bp, Homo sapiens
  chr17:73498112-73498255
  hypo
ggcactggccactccgaaggccagcagtgcggtctgcagtggctctctctcccggcacttgggcctccgcttaacagtgtctgattccgtgaggttgaaatcgaggccggggggcacgggtgtctctcggggcggggggccag

SEQ ID NO: 93434 - DNA, 450 bp, Homo sapiens; identical to SEQ ID NO: 54591
  chr17:73511035-73511485
  hypo

SEQ ID NO: 93435 - DNA, 411 bp, Homo sapiens
  chr17:73517992-73518403
  hypo
cagctgggagagtggcagagccgagaacggagtcacgggagccggtaagcggcgctggaacttcgagcagatctccttccccaacatggcttcagacagccgccacacccttctgcgcgccccagccccagagctgctcccggccaacgtggctgggcgggagacagacgctgagtcctggtgccagaagctgaaccagcgcaaggagaagctctccaggcgggaacgggagcaccacgcggaggccgcgcagttccaggaagatgtcaacgccgatcccgaggtgcagcggtgctccagctggcgggagtacaaggagctgctgcagcggcggcaggtgcagaggagccagcgccgggcccctcacctgtggggccagcccgtcaccccgctgctgagtcctggccaggc

SEQ ID NO: 93436 - DNA, 30 bp, Homo sapiens
  chr17:73542408-73542438
  hypo
gtggtgccgactgcccggctcgccagctgt

SEQ ID NO: 93437 - DNA, 71 bp, Homo sapiens
  chr17:73545957-73546028
  hypo
cagagcccaggagagacgggccttctcccctactccaggctaacgttgcagtctggcggcttctgcaaatc

SEQ ID NO: 93438 - DNA, 30 bp, Homo sapiens
  chr17:73552095-73552125
  hypo
gcaggcccaccccacgtgcttctcgttgca

SEQ ID NO: 93439 - DNA, 30 bp, Homo sapiens
  chr17:73561653-73561683
  hypo
gtggccacactccccgggctaactgagtta

SEQ ID NO: 93440 - DNA, 30 bp, Homo sapiens
  chr17:73566463-73566493
  hypo
agggcccactctcccgcgtcaagtccctca

SEQ ID NO: 93441 - DNA, 51 bp, Homo sapiens
  chr17:73569824-73569875
  hypo
ccaccctcccaggctccggctctccttgcctctttgcgtgccccttgcccc

SEQ ID NO: 93442 - DNA, 30 bp, Homo sapiens
  chr17:73580927-73580957
  hypo
gggcacaaggcaggcgtgggctgacaaggg

SEQ ID NO: 93443 - DNA, 31 bp, Homo sapiens
  chr17:73581211-73581242
  hypo
tcaagaaactcctgaccgggtgaggtggctc

SEQ ID NO: 93444 - DNA, 209 bp, Homo sapiens; identical to SEQ ID NO: 54596
  chr17:73585912-73586121
  hypo

SEQ ID NO: 93445 - DNA, 30 bp, Homo sapiens
  chr17:73588629-73588659
  hypo
gagcccttgtggtgcggcggggaggcctgc

SEQ ID NO: 93446 - DNA, 31 bp, Homo sapiens
  chr17:73596005-73596036
  hypo
aataaataaatacaagcgcatgtgattctgg

SEQ ID NO: 93447 - DNA, 301 bp, Homo sapiens
  chr17:73606229-73606530
  hypo
tctttcccggcctccaggaagcggtacctccggcggcgggcagctttgggacagctgaacaccatcctgctggtggcccagcccctgctccagaggcggcagagactgcaggtgcaggggcttgggtggggcggttcagggtagaagccaggctgcctgagctggccgagctggccaaatcccagcagcgttgaccctctcagcccggcctcgcacgggctgtggcttcagacacagtgctccttgaactcatcccttttccctccggccggggtaggccggggcccttgggaggtgctgt

SEQ ID NO: 93448 - DNA, 183 bp, Homo sapiens
  chr17:73608063-73608246
  hypo
ccctttctccagcttcgtcgccatcggctttcaggtgggcgcccaggcctaagctcttcccgctggcctcaccgctctgagttagcacctgcctgacagatgctgcgtttttttccccgctgtcagctcttgccctccttcctccccagcctttggggctgtgagtagcgctgaattgctctg

SEQ ID NO: 93449 - DNA, 79 bp, Homo sapiens
  chr17:73611622-73611701
  hypo
atgcagggcagctggccgtccagcagcagaactttatccagcagcaggcgctaatcctggtgagcgctggcagggccct

SEQ ID NO: 93450 - DNA, 960 bp, Homo sapiens
  chr17:73613005-73613965
  hypo
aagctgggtatcaacggtgcccactcgtccccgccggtgagcaccccagcctgtctcccccagagtgtgtgctgctgcactggggagctcaaggctctctggggcgaacttggccttgtgctgtgactcagcccgtgtactttctccgtatccccccagatgctgtcccccagcccaggaaagggccccccgccagctgtggctcctcgacccaaggccccgctacagcttgggccctctagctccatcaaggaaaagcaggggccccttctggacctgtttggccagaagctgcctattgcccacacacccccacctccaccagcgccaccactgcctctgcccgaggacccagggaccctttcagcagagcgtcgttgtaaggaaccacatttctcctgcgccgtgggcttcactggggcagaggcagggttcgcacagactctcggtgcccagggctgaaggcatttctgcgtggctgaggccagctgttcgggcttctggactttggagccatacgtagctggggagtcccagcttccgcgttcccacccagggcagggcctgggcatctttggggctgtcatcgagaggctgtcacacacagggtgttgtccctgacacatacccgacagctctgtgaggaagttagtggccctggctgacatggtcatagaagacccacgagcctcacggacgccagggaaagtttagggcccaaaatggaggcaggagatggtgccatggaaggagtaaggcagctggaggttgggagagccgggcccttggaaggctcgtggggatgaaggtcttccctcccgtgcccccatcactctggctctgcagcccctcactgaggctcctcaccccctcctctctgccaggcttgacacagcccgtggaggaccagggggtctccacccagctactcgcgccctctggcagcgtgtgcttctccta

SEQ ID NO: 93451 - DNA, 912 bp, Homo sapiens
  chr17:73615716-73616628
  hypo
agcaggacccaggagactgcccgagacccaccaccttcctgtagggcgagagtggcagcgacgtgcagctgttagccgtgtcccaccgtgggctgcgactgctcaaggtgacccaaggccccggcctccgccccgaccagctgaagattctctgctcatacaggtgcgctagcccacgaccctgggctagaggtgggggcaggtggcaaggtgacctcagttcatgcccgatccctgcgcagctttgcggaggtgctgggtgtggagtgccggggcggctccaccctggagctgtcactgaagagcgagcagctggtgctgcacacagcccgggcaagggccatcgaggcgctggttgagctattcctgaatgagcttaagaaggtaagtgtggggcacgggttgagaggccgggcagacagccctcaccgatgctgcatctccctgtccgtcttccctgtgggggcaggggctgggagtttgggccaaatccctggaagtctggggtgctaggtggaggggcaggccagcagggggagcaggtgggcaggcaggacagggaggcacaggcagacttgctgctccaggccctcgcctgcttgcccacaggactccggctatgtcatcgccctgcgcagctacatcactgacaactgcagcctcctcagcttccaccgtggggacctcatcaagctgctgccggtggccaccctggagccaggtatcgccagaggccggcaggggctcacacagggagggcatccacttggcagaggctgcccgggggcagagggtccagtgggtgagccacatccctgggtgccttccaggctggcagtttggctctgccgggggccgttccggactctttcctgccgacatagtgcagccggctgccgctcccgacttttc

SEQ ID NO: 93452 - DNA, 30 bp, Homo sapiens
  chr17:73623167-73623197
  hypo
cctgacttagaactcggggaggggccactc

SEQ ID NO: 93453 - DNA, 30 bp, Homo sapiens
  chr17:73625478-73625508
  hypo
gtctccatcagttccgtggccgtctggaac

SEQ ID NO: 93454 - DNA, 30 bp, Homo sapiens
  chr17:73627728-73627758
  hypo
caatggcggcatggcggcacctggagcagg

SEQ ID NO: 93455 - DNA, 191 bp, Homo sapiens; identical to SEQ ID NO: 30728
  chr17:73635124-73635315
  hypo

SEQ ID NO: 93456 - DNA, 409 bp, Homo sapiens
  chr17:73635982-73636391
  hypo
accaccaccagccgccgccttggccggcagcccccgaagcaagcccttggtctcactgtcctcaccggcttcctccaccctgagctgtgtcagctgggtggggactgagggccaccactaggtggaagtcaccaggggtgcaatgtgtgagacctgacaaacttgttctgcgggctgcggatgggtgcgagggtggaatctcggtgctgcgacgagtgtggggccagccgtggaggctccaggtgttctctctgccccagcagagcccggcaggagccccaacaggaagccagcgcggcatggctgccaccgacttcgtgcaggagatgcgcgccgtgggcgagaggctgctgctcaagctgcagagactgccccaggctgagcccgtggagatcgtggccttctcagt

SEQ ID NO: 93457 - DNA, 30 bp, Homo sapiens
  chr17:73636707-73636737
  hypo
ggcatggggaccgtccgcacctctcaccag

SEQ ID NO: 93458 - DNA, 113 bp, Homo sapiens
  chr17:73638312-73638425
  hypo
tccagacagagcatcccgaggtgcctccccggggcttccccagagcctcaagaagtctgtgtttttcacatgcttccatcatcttggcctgcgtgacccgtgctctggccacc

SEQ ID NO: 93459 - DNA, 218 bp, Homo sapiens
  chr17:73639434-73639652
  hypo
cagccctgggcacagacaggccgaatggccgctctagggcaggcggtgaacaactgctgagtccgcacaggattcggtccctgccctcacaggactcactcctccctgctccttggccaactggcacacaccaggcccggctgtcgggccaactccttcacaggcttcaaacccactgagattaacaaaccagacctgctctccgacagcagcctggc

SEQ ID NO: 93460 - DNA, 120 bp, Homo sapiens
  chr17:73680673-73680793
  hypo
tccctgcgctcaacacgatggatggtcttctttaggcttttcctcaacaacactagggttgccttgcacagctgggagacatggaatttccagaagctcgtggagtggctgtgctgggaa

SEQ ID NO: 93461 - DNA, 423 bp, Homo sapiens
  chr17:73691883-73692306
  hypo
actgcagccccttgacagagccgagcatgcacaccctgtctgtgccctccagggcctcgcagatgcccacggctgagcctggagcagtggtgctggtgtggcagtgcacgtgggttctctctgtcactcaggagctggagatactccaccgtcccctggggccccccagctcgctcactccctgccatcccataagcccgtccaactagctgttcctgcacagatccctccctggcagctgtgggtactctgggtgttttctgacttgggcacgcaccagggcaagtcacgctgacagctggcttctcaagtcctaagtgcggctgcctctgagaacacacccatcagacccaggcagcagccacagacccagcgctgcttccaagagactgtggacacatcgctttactggcttgaggctct

SEQ ID NO: 93462 - DNA, 163 bp, Homo sapiens
  chr17:73726224-73726387
  hypo
cccatgttgggacccgcgttccccgtcctacacgacgccgtgatgcgtgtcagcaggcagcctgctcagtgggcacgccccgccttgccttccccagagggacattggctggcgcccggacagcacccacctgctggtcttctccaccgagtcagccttccac

SEQ ID NO: 93463 - DNA, 30 bp, Homo sapiens
  chr17:73727942-73727972
  hypo
cgtgtgccagctgccggaggaccagaaggg

SEQ ID NO: 93464 - DNA, 30 bp, Homo sapiens
  chr17:73729640-73729670
  hypo
gacaagccgtgctccggccgtggggagtgc

SEQ ID NO: 93465 - DNA, 36 bp, Homo sapiens
  chr17:73736027-73736063
  hypo
ggacacgcccatgctgcgcagcgggaacctcaaggg

SEQ ID NO: 93466 - DNA, 30 bp, Homo sapiens
  chr17:73736916-73736946
  hypo
agcagaccaagttccggtgagtcccggggt

SEQ ID NO: 93467 - DNA, 64 bp, Homo sapiens
  chr17:73739825-73739889
  hypo
ttctcggtcagccgcggggaccaggtggcccgcatccctgtcatccggcgtgtcctggacggcg

SEQ ID NO: 93468 - DNA, 30 bp, Homo sapiens; identical to SEQ ID NO: 30733
  chr17:73748329-73748359
  hypo

SEQ ID NO: 93469 - DNA, 72 bp, Homo sapiens
  chr17:73753019-73753091
  hypo
tcagggccagccaccgcattccgggtggatggagacagccccgagagccggctgaccgtgccgggcctcagc

SEQ ID NO: 93470 - DNA, 30 bp, Homo sapiens
  chr17:73753785-73753815
  hypo
aagggggcaaggtccgtcctctgtgggccc

SEQ ID NO: 93471 - DNA, 30 bp, Homo sapiens
  chr17:73754545-73754575
  hypo
tctccaccatgaggcggccaaaggctctgt

SEQ ID NO: 93472 - DNA, 31 bp, Homo sapiens
  chr17:73785418-73785449
  hypo
ctctttttttttttctgagaccgagtctcgc

SEQ ID NO: 93473 - DNA, 37 bp, Homo sapiens; identical to SEQ ID NO: 30734
  chr17:73800543-73800580
  hypo

SEQ ID NO: 93474 - DNA, 30 bp, Homo sapiens
  chr17:73805938-73805968
  hypo
accagcggcgccgccggtccatccgccgtc

SEQ ID NO: 93475 - DNA, 204 bp, Homo sapiens
  chr17:73808641-73808845
  hypo
ctcagcgaggagcctcggtggcaaggtacaggcatccacacctcggccgcgccctccctataatcctgctcatagctgccctggggatttggctcaccaccacctactgcctgctctagccgaggccccgacctggcccgcatcccaccctacacccaccattcaaaaggcgcctctaggggcgttttccctgacacatcatgt

SEQ ID NO: 93476 - DNA, 246 bp, Homo sapiens
  chr17:73811152-73811398
  hypo
gagatgactaagccagcgcactcatgctggaggaaggggagcctgcccggccttccctcagggcctgagcctgacttgcctgtgctctgccctccagatctacaagtccaccaagtgcaacgacatgcagcagtcgggcagctgtccccgaggacccttctgcgcctttgcccacgtagaacgtatgctgttcccattgccccggggcagtgccctctcccacccctccctcgcctggctagctca

SEQ ID NO: 93477 - DNA, 30 bp, Homo sapiens
  chr17:73821493-73821523
  hypo
acccggaggggctccgtttgcattccttgg

SEQ ID NO: 93478 - DNA, 45 bp, Homo sapiens; identical to SEQ ID NO: 30736
  chr17:73822057-73822102
  hypo

SEQ ID NO: 93479 - DNA, 30 bp, Homo sapiens; identical to SEQ ID NO: 30737
  chr17:73825212-73825242
  hypo

SEQ ID NO: 93480 - DNA, 166 bp, Homo sapiens; identical to SEQ ID NO: 30738
  chr17:73830727-73830893
  hypo

SEQ ID NO: 93481 - DNA, 316 bp, Homo sapiens
  chr17:73870803-73871119
  hypo
caaggcacggtcagcgtattccaggcagaccccaaccgtgggcgagaaggggtggggcaggggagcctccagcccatgaaaccagacggagaagctgcgtccattccactgcaggcagcaggagtgggcgttgcggcccagccggccgcggtcgtagggctcttgtggggagaagtcttcggccatgacccccatgctgacccagccctcgataatctccacctcccagtagtaggtgcctcggtccagggcaccctcgcccagcacctgctcacaatgggtgaagcgggtgggcgacaaggggtagttgatagga

SEQ ID NO: 93482 - DNA, 46 bp, Homo sapiens; identical to SEQ ID NO: 54605
  chr17:73874666-73874712
  hypo

SEQ ID NO: 93483 - DNA, 66 bp, Homo sapiens
  chr17:73887193-73887259
  hypo
caccgtggcagttgcgggtaggagacgcccagtgtcaccgagtggtctgacgcgcgcacctcccag

SEQ ID NO: 93484 - DNA, 30 bp, Homo sapiens
  chr17:73887636-73887666
  hypo
aagtggaagaattacgggtctgtgccccag

SEQ ID NO: 93485 - DNA, 30 bp, Homo sapiens; identical to SEQ ID NO: 30740
  chr17:73891047-73891077
  hypo

SEQ ID NO: 93486 - DNA, 30 bp, Homo sapiens
  chr17:73895698-73895728
  hypo
gggaggtagggacacgtcacctgtccttca

SEQ ID NO: 93487 - DNA, 21 bp, Homo sapiens
  chr17:73902882-73902903
  hypo
tttttgagatggagtttctgt

SEQ ID NO: 93488 - DNA, 18 bp, Homo sapiens
  chr17:73904255-73904273
  hypo
atatttctctctctaaaa

SEQ ID NO: 93489 - DNA, 32 bp, Homo sapiens
  chr17:73904784-73904816
  hypo
gttgttgttttttttttgagacggagtcttgc

SEQ ID NO: 93490 - DNA, 30 bp, Homo sapiens; identical to SEQ ID NO: 30742
  chr17:73906660-73906690
  hypo

SEQ ID NO: 93491 - DNA, 111 bp, Homo sapiens
  chr17:73910327-73910438
  hypo
gcttctcctcggcccggagctcgctggccctgatcttcagctcagcctgctcctggagacagcggaggccctgctgcattctcctcccaggaattgcgctgcactctgtgc

SEQ ID NO: 93492 - DNA, 171 bp, Homo sapiens
  chr17:73911101-73911272
  hypo
gcccgttccagctccgccctttccatggccatctgctgggccgtgaccttcctttgctcctctagggcgcgctgcatggactccgccttggactgctcggcagtcacccgccagcgttcctgtagggcccagggcaggactgagagcgtggttcccgccctgaggatcacg

SEQ ID NO: 93493 - DNA, 30 bp, Homo sapiens
  chr17:73913886-73913916
  hypo
cctcctccatgtcccgctgctgctggccca

SEQ ID NO: 93494 - DNA, 30 bp, Homo sapiens
  chr17:73914267-73914297
  hypo
ccgcatcgacctctcggtccttcagcagct

SEQ ID NO: 93495 - DNA, 45 bp, Homo sapiens
  chr17:73915887-73915932
  hypo
cttcgttctctctccggagccgctcctcccgttgctggtacgatg

SEQ ID NO: 93496 - DNA, 31 bp, Homo sapiens
  chr17:73921368-73921399
  hypo
ctgtcttcccagtggccgacctgtctcaaga

SEQ ID NO: 93497 - DNA, 129 bp, Homo sapiens
  chr17:73923088-73923217
  hypo
ggagggtggggcctggggcaacggggactccacaaaaagacaggccgggcaaggagagagggagttggagggcggccctggacctacggggcctgcctcaggcttgccggtggggcctctgactctgca

SEQ ID NO: 93498 - DNA, 30 bp, Homo sapiens; identical to SEQ ID NO: 30744
  chr17:73941135-73941165
  hypo

SEQ ID NO: 93499 - DNA, 21 bp, Homo sapiens
  chr17:73977821-73977842
  hypo
aaatataagctgggtgcggtg

SEQ ID NO: 93500 - DNA, 30 bp, Homo sapiens
  chr17:73996852-73996882
  hypo
cagaggaggctgagcgtcgtcacacgggcc

SEQ ID NO: 93501 - DNA, 30 bp, Homo sapiens
  chr17:74002929-74002959
  hypo
ggggagacagaattcgtttattgggatcac

SEQ ID NO: 93502 - DNA, 501 bp, Homo sapiens
  chr17:74005165-74005666
  hypo
cctgcaccaccaccttctcctcgggcttcctcctctccagcagcaggcgcttgctctgcagctcgtacaccgcgtcctccgcggcccgcctcttctgggccgcctcccgcacctcctggcggagccgctctgcttctttctccagcaccgggtccttctcgtggcgcaccacctccttgctcaccgtcttggtctccaccttggcccgctcgcgcctccactcgtcgcgctcaccctgcaggcggatgagctgctcctgggagcgcccgtggctgttgacgagctcgttgagctgagccttcaggcggtcgatctcacgcagcacctcggggctcctctcatgcctcaccacctcctgggtcacctccttgtactccaccgtgggcttctgggcccgcaggacctccaggtcgggcagcagcttctccacctccttctccacaccgctcctcttgcccgccatctcctgcagcttggccttgagccgagtgatctcctgct

SEQ ID NO: 93503 - DNA, 103 bp, Homo sapiens
  chr17:74008700-74008803
  hypo
agcacagtagtatctgcgagcatcacctggggcctgtgggaggcaggcaggcatgcagggcccacctgcacatcagatccagcaggtccgggtggccctgaga

SEQ ID NO: 93504 - DNA, 30 bp, Homo sapiens
  chr17:74011601-74011631
  hypo
cagctgcagggcagcggggcccacgggccg

SEQ ID NO: 93505 - DNA, 224 bp, Homo sapiens
  chr17:74013673-74013897
  hypo
ccagcttgtctgagcccgggtctgtccacacccttctccatctccatcccagccaccgctcctgcacttgcctcacctccctcaagtgtgagcaccagggccgggccgcttctcatcccagccgccccttcccgctgctcacccacctcatggctgtggatgcggccctccaagtcctccaagggtgtggggcggctcagcggggcccgcgcccaggccagcac

SEQ ID NO: 93506 - DNA, 30 bp, Homo sapiens
  chr17:74014164-74014194
  hypo
ccatcacagaccagtcggaagtcggaatct

SEQ ID NO: 93507 - DNA, 30 bp, Homo sapiens
  chr17:74015074-74015104
  hypo
catcccggcttcgccgctgcaggtccccag

SEQ ID NO: 93508 - DNA, 156 bp, Homo sapiens
  chr17:74019374-74019530
  hypo
gtttctgctccagcacgcgtgcccagtcgaccctgggtcccacgtcggggggcagcaccatcttctcgtacagggcacggtactccgcacactcctgggtcacccgctcgtgcagctgcttgatgctgtcaagaaggtggccggcaggtcagggct

SEQ ID NO: 93509 - DNA, 22 bp, Homo sapiens
  chr17:74022590-74022612
  hypo
cggccatgaacccctaactctt

SEQ ID NO: 93510 - DNA, 377 bp, Homo sapiens
  chr17:74028158-74028535
  hypo
ggagcgagactccggctcaaaaaaaaaaaaaaaccaaaaaaaaatttttttaaaggcatgcatgcaaagatagcatctccccaccttgaagggcctggtgagtccttcctctcacctggccctggcttgctccttggtggattgagaggttagagatgaaacgatccctggggctgctcaaccctctgccagccatgactttgcgcggcagcttactcactccttgcgcctggagcgccacgctgatgtgggcagctggcagctcacctggcctgggacctgagcaagaggcttgatcagaccaagaacagtgagactctcggctccaagactgccagacacagctgggcatatgtgcagcccggccacagggtggc

SEQ ID NO: 93511 - DNA, 30 bp, Homo sapiens
  chr17:74035601-74035631
  hypo
gtgctctcctgacacgctgcttaagaacgt

SEQ ID NO: 93512 - DNA, 30 bp, Homo sapiens; identical to SEQ ID NO: 30749
  chr17:74041568-74041598
  hypo

SEQ ID NO: 93513 - DNA, 227 bp, Homo sapiens
  chr17:74042042-74042269
  hypo
aaagttaagtcactttgtgtccgacacaggcaaaggaaaaccacaggcccttgccttcccggtcctcaagggtcacctgtaagatgatgtcatagagtcggatcaggtcctggggccggggtgagcgcttgctgtcatcctctggctgctgctgcagcagagccctctgcagacctttggccatgttctcattacgcttgattgccgttgatagcttgatgtaagtc

SEQ ID NO: 93514 - DNA, 171 bp, Homo sapiens
  chr17:74046448-74046619
  hypo
ggacacaggctgacctggacccgcccagagcaagaaccagggctcggctgagggtcctacctgatctggcttgagctcctcccgaaccacctggatggcgtcccgacactcgctgagcattgattcaaacaggcgctccttagtttcttcgctttcagcctaaacaagggc

SEQ ID NO: 93515 - DNA, 206 bp, Homo sapiens; identical to SEQ ID NO: 30751
  chr17:74047791-74047997
  hypo

SEQ ID NO: 93516 - DNA, 30 bp, Homo sapiens; identical to SEQ ID NO: 30752
  chr17:74049499-74049529
  hypo

SEQ ID NO: 93517 - DNA, 30 bp, Homo sapiens; identical to SEQ ID NO: 30753
  chr17:74050000-74050030
  hypo

SEQ ID NO: 93518 - DNA, 30 bp, Homo sapiens; identical to SEQ ID NO: 30754
  chr17:74050272-74050302
  hypo

SEQ ID NO: 93519 - DNA, 41 bp, Homo sapiens; identical to SEQ ID NO: 30755
  chr17:74050636-74050677
  hypo

SEQ ID NO: 93520 - DNA, 40 bp, Homo sapiens
  chr17:74050856-74050896
  hypo
tcacaccattgcacaacgcgttaataaaaacaggatacag

SEQ ID NO: 93521 - DNA, 18 bp, Homo sapiens
  chr17:74059750-74059768
  hypo
aaagcaagactctgtctg

SEQ ID NO: 93522 - DNA, 30 bp, Homo sapiens; identical to SEQ ID NO: 54611
  chr17:74072090-74072120
  hypo

SEQ ID NO: 93523 - DNA, 284 bp, Homo sapiens; identical to SEQ ID NO: 54612
  chr17:74072426-74072710
  hypo

SEQ ID NO: 93524 - DNA, 591 bp, Homo sapiens; identical to SEQ ID NO: 54613
  chr17:74072998-74073589
  hypo

SEQ ID NO: 93525 - DNA, 30 bp, Homo sapiens
  chr17:74078778-74078808
  hypo
cccatggctgggggcgggccatgacagggc

SEQ ID NO: 93526 - DNA, 122 bp, Homo sapiens
  chr17:74081022-74081144
  hypo
gaaagaggaccagagaagcagcgggatcctcacagagcaaggctcagccacgttcaagtgctctcgcgaccttgctcttctcctaggtaaacattacccacgtctctgagagccagctcttc

SEQ ID NO: 93527 - DNA, 72 bp, Homo sapiens
  chr17:74086416-74086488
  hypo
cggcccgtgcttgtcgttcaaggcctcggacaggtgcttaactcggaaatcatgctcgtgacctggcgagat

SEQ ID NO: 93528 - DNA, 51 bp, Homo sapiens
  chr17:74094004-74094055
  hypo
aagatgagcacgggcgagacgaccttactgtgccgcgtcatcaggctgcga

SEQ ID NO: 93529 - DNA, 31 bp, Homo sapiens; identical to SEQ ID NO: 11512
  chr17:74132738-74132769
  hypo

SEQ ID NO: 93530 - DNA, 30 bp, Homo sapiens
  chr17:74138723-74138753
  hypo
aagtgagcgaccagcgtgctaaactccagg

SEQ ID NO: 93531 - DNA, 395 bp, Homo sapiens
  chr17:74269540-74269935
  hypo
tgtgccttcaggccccggctgtctctgcagcagcccactcaagggagagaagcggagggcggcaaacagaaacctgcccagccggctgcaggggttcgcctccagccattggcactgcttccccggaatcccacgccaggggtcaggaaccaccctgagccagcagcaagagcgcagcaggcagctgccaccctcacccccagagtgctggacactgacagcacgggccccagcaccccaggctagaaggcaggtctagagccagaaggcagggcacccccaatctagctgaggccaggagagagctggtggggtgagcaccggcccagctggtcccggggccaggagtctccctgtccccagtgcagtgtccagccctccgaagccccggcgcc

SEQ ID NO: 93532 - DNA, 30 bp, Homo sapiens
  chr17:74273292-74273322
  hypo
tgctgcgggcggctgcggtggtaggggtag

SEQ ID NO: 93533 - DNA, 30 bp, Homo sapiens
  chr17:74274054-74274084
  hypo
ccgcctctcctgtaccgtttgtagcagggg

SEQ ID NO: 93534 - DNA, 30 bp, Homo sapiens; identical to SEQ ID NO: 30760
  chr17:74275070-74275100
  hypo

SEQ ID NO: 93535 - DNA, 436 bp, Homo sapiens
  chr17:74303783-74304219
  hypo
agcgctgacgaaggcgcctggcccacgcccctgcgcttctcccggggcgcccccttgggcacctccttgggcgcgggcaggtgcgggatgctgaacgagctccggacggactgcagcgagcggctgggctcgggcgacgagggctggaagtcgatccgggtattttggaggtcgaggttcttgagcatggccacgatgagcgtgtgcagggccgtgaagttgacggcgcccacctctggcgtgccgatggagaggtccgccagctcccggagggagaccgtggtcgcgggcggcatcgtggctgtcaggagctgtgcgccgccgcggggcgccggccaaccacttcccgctcactgcacgccgcgccttggggcctttcgggggccctgcgaggtcctcggggcgcccctgccccgggtccggccgagtcactgga

SEQ ID NO: 93536 - DNA, 34 bp, Homo sapiens
  chr17:74333711-74333745
  hypo
tctgtcacccaggctggaaggcgagagtgcagta

SEQ ID NO: 93537 - DNA, 30 bp, Homo sapiens
  chr17:74362255-74362285
  hypo
gggacccacccagcccggacgcagtgcttc

SEQ ID NO: 93538 - DNA, 30 bp, Homo sapiens
  chr17:74375730-74375760
  hypo
gtagggctgcagctcgccaccttgagaggg

SEQ ID NO: 93539 - DNA, 212 bp, Homo sapiens; identical to SEQ ID NO: 30761
  chr17:74387384-74387596
  hypo

SEQ ID NO: 93540 - DNA, 121 bp, Homo sapiens
  chr17:74388647-74388768
  hypo
ccttgcctggaatcattgaaccctggctaagagaaatactcgaagtgagtttttatcttatcaggtgtttttcctcataaatcattactttaagactgtattccagctgggcgcggtggtt

SEQ ID NO: 93541 - DNA, 30 bp, Homo sapiens
  chr17:74389889-74389919
  hypo
tgacagggcaatgggcgaggtcagtgatga

SEQ ID NO: 93542 - DNA, 297 bp, Homo sapiens; identical to SEQ ID NO: 30762
  chr17:74390230-74390527
  hypo

SEQ ID NO: 93543 - DNA, 152 bp, Homo sapiens
  chr17:74391567-74391719
  hypo
cggccgagaaagtaattttttaaaggagggaggaaagaaagaaccatctggcctggacacacggctgagtcagccctcacctgactgagcctgtgaccgcccctgtaaaaggtgggtgggtgagtgtcctcgcaggtgccagtcagccccgg

SEQ ID NO: 93544 - DNA, 363 bp, Homo sapiens; identical to SEQ ID NO: 30764
  chr17:74392149-74392512
  hypo

SEQ ID NO: 93545 - DNA, 30 bp, Homo sapiens
  chr17:74395428-74395458
  hypo
cagaggtgtgtgtgcgagcgcaggcacgca

SEQ ID NO: 93546 - DNA, 40 bp, Homo sapiens
  chr17:74397332-74397372
  hypo
agcccactcacacacacgccccacacgccctaaaacaagt

SEQ ID NO: 93547 - DNA, 31 bp, Homo sapiens
  chr17:74412535-74412566
  hypo
aatttgggggaaacagcggtgttcccctgta

SEQ ID NO: 93548 - DNA, 119 bp, Homo sapiens; identical to SEQ ID NO: 30765
  chr17:74415733-74415852
  hypo

SEQ ID NO: 93549 - DNA, 35 bp, Homo sapiens; identical to SEQ ID NO: 30766
  chr17:74427554-74427589
  hypo

SEQ ID NO: 93550 - DNA, 30 bp, Homo sapiens
  chr17:74434945-74434975
  hypo
tgcatgcataggtgacgccatgcacaccga

SEQ ID NO: 93551 - DNA, 157 bp, Homo sapiens
  chr17:74435186-74435343
  hypo
ttccaggggcagctgacggcgtggtttggaggcgcttgcctggctttagcccaagcctttctgctcactgccttaacctctcctcctctgtgaagtaagaacacctacttcacggggttctccagtgactgtgcctagaacgcggcaggtgccaaca

SEQ ID NO: 93552 - DNA, 30 bp, Homo sapiens
  chr17:74467319-74467349
  hypo
ccccagcaagggcacgctccagtagtagtg

SEQ ID NO: 93553 - DNA, 30 bp, Homo sapiens
  chr17:74467647-74467677
  hypo
cagagggcagccctcgcaggcagaccctgt

SEQ ID NO: 93554 - DNA, 133 bp, Homo sapiens
  chr17:74472948-74473081
  hypo
tgctgctgatgctgcggcggtagctgcggttcagccagttgcccaccacgccgaggccgtagtgccgcttcttccgatcaaaggcaaagtgcttcaccttggaggcgatgcgcttgccgcgccggggcccggg

SEQ ID NO: 93555 - DNA, 77 bp, Homo sapiens
  chr17:74475340-74475417
  hypo
aaaccactgggctgcgcccctgcggaagcagacaagggacaggtgggcatacgcttgtctacgcctgtgcacctgag

SEQ ID NO: 93556 - DNA, 30 bp, Homo sapiens
  chr17:74501543-74501573
  hypo
ttgacattgagaagcgttggtcctcagtga

SEQ ID NO: 93557 - DNA, 31 bp, Homo sapiens
  chr17:74516485-74516516
  hypo
gtggagaccctgggggcgagtgagcagagac

SEQ ID NO: 93558 - DNA, 31 bp, Homo sapiens
  chr17:74527623-74527654
  hypo
tcatgcaggttctccacgacagtgttgaggg

SEQ ID NO: 93559 - DNA, 195 bp, Homo sapiens
  chr17:74531808-74532003
  hypo
gacatggccctggcctcggtgtttcgtttctcccttggcatctgccctaccctggtccccttcctggggaggttcaatggtgttccatgatgtggacggtgagcacttcctccacgtatccgcacaggtacctggcaggggttgggacacaaaacctccaaggtcctgaggaccctgcctcgcttcttcatggtg

SEQ ID NO: 93560 - DNA, 69 bp, Homo sapiens; identical to SEQ ID NO: 30770
  chr17:74533184-74533253
  hypo

SEQ ID NO: 93561 - DNA, 161 bp, Homo sapiens; identical to SEQ ID NO: 54627
  chr17:74533830-74533991
  hypo

SEQ ID NO: 93562 - DNA, 94 bp, Homo sapiens
  chr17:74551786-74551880
  hypo
acccagctcctattcaagatggagttttctggttccaatgcctctgacagtagtacttcatcgcattgtgaggattaaacgagttcatacatgt

SEQ ID NO: 93563 - DNA, 30 bp, Homo sapiens
  chr17:74562033-74562063
  hypo
tattgaacagacctcgatgaaaatcttgaa

SEQ ID NO: 93564 - DNA, 152 bp, Homo sapiens
  chr17:74571582-74571734
  hypo
aaagagcagtggagccgccagagctgggaaaaggcaggggaggctttcttcgagccttcggagggagcgtggccctgccagcaccttgattctgggcttctgggctccagaactgtgacgattcaatttctgtggatcgaagccccccaggc

SEQ ID NO: 93565 - DNA, 35 bp, Homo sapiens; identical to SEQ ID NO: 30773
  chr17:74579151-74579186
  hypo

SEQ ID NO: 93566 - DNA, 647 bp, Homo sapiens; identical to SEQ ID NO: 11517
  chr17:74581100-74581747
  hypo

SEQ ID NO: 93567 - DNA, 54 bp, Homo sapiens; identical to SEQ ID NO: 30775
  chr17:74621442-74621496
  hypo

SEQ ID NO: 93568 - DNA, 30 bp, Homo sapiens; identical to SEQ ID NO: 30776
  chr17:74621698-74621728
  hypo

SEQ ID NO: 93569 - DNA, 150 bp, Homo sapiens
  chr17:74623751-74623901
  hypo
tcgcagtttggaaggcgcggcctctgctacctcttccattctgttctcagggtctgcttaccctccccttcccattgtctgggctcattgtggtcctgagggttctgggaaatgggtgttctcggccatcgaggcaaatgcacctaggcc

SEQ ID NO: 93570 - DNA, 149 bp, Homo sapiens
  chr17:74625058-74625207
  hypo
ggagccagagggaaggcgtggtggcaaaaactcaccgtctgaaggcctcctatttcgaagctgtatttttcctcaaaatcccaccgaggctcagatttgaagttggcggccttcagtctttggtttctctgcgtcgtggggctctggaa

SEQ ID NO: 93571 - DNA, 181 bp, Homo sapiens
  chr17:74629608-74629789
  hypo
taaaaatcaatcaatcaatttatcatgaacaagaatcgcacaataaaagaaacaggaaaatagttatctggcaacatcctccctctctgtatatatatattttctttttttttgagactgagtctctgttgtctaggctggtggcacgttcacagctcattgcagcctcgacctcccgggc

SEQ ID NO: 93572 - DNA, 42 bp, Homo sapiens
  chr17:74638681-74638723
  hypo
gagaacctgcattactttcaacgtttaggaacagtgaaatga

SEQ ID NO: 93573 - DNA, 80 bp, Homo sapiens
  chr17:74640872-74640952
  hypo
aggtgtgagccaccgtgcctggccgattgcattcgtatccactgcttagtagcacctacgagaaatcattaactctacct

SEQ ID NO: 93574 - DNA, 31 bp, Homo sapiens
  chr17:74645178-74645209
  hypo
gctatgagtatcactacgcctatgatgtctg

SEQ ID NO: 93575 - DNA, 41 bp, Homo sapiens
  chr17:74651096-74651137
  hypo
ggattacaggcgtgagccgccgcgcccggcccaacagctgt

SEQ ID NO: 93576 - DNA, 251 bp, Homo sapiens; identical to SEQ ID NO: 30778
  chr17:74667046-74667297
  hypo

SEQ ID NO: 93577 - DNA, 31 bp, Homo sapiens; identical to SEQ ID NO: 30779
  chr17:74703800-74703831
  hypo

SEQ ID NO: 93578 - DNA, 30 bp, Homo sapiens
  chr17:74714603-74714633
  hypo
agtaaaacaagccgcgtttatctgcattgg

SEQ ID NO: 93579 - DNA, 31 bp, Homo sapiens; identical to SEQ ID NO: 30780
  chr17:74716633-74716664
  hypo

SEQ ID NO: 93580 - DNA, 30 bp, Homo sapiens
  chr17:74726627-74726657
  hypo
ctgccttccacggccgtggcagtctttaag

SEQ ID NO: 93581 - DNA, 225 bp, Homo sapiens; identical to SEQ ID NO: 11518
  chr17:74732258-74732483
  hypo

SEQ ID NO: 93582 - DNA, 262 bp, Homo sapiens; identical to SEQ ID NO: 11519
  chr17:74732943-74733205
  hypo

SEQ ID NO: 93583 - DNA, 254 bp, Homo sapiens
  chr17:74771039-74771293
  hypo
cggcaacattagtgacgtttctgccatcttgacttataggtggaagcctcttcggcctgctgagcaagaacaatcgttttggtagaaatccagttgtgctgttgggcatcctggtgcacttcatagctttttatctaatatttctcaacatgcctggagatgccccgattgctcctgttaaaggaactgacagcagtgcttacatcaaatccaggtatagtggctgtcatttctctagtcgcttgagtacgggt

SEQ ID NO: 93584 - DNA, 30 bp, Homo sapiens; identical to SEQ ID NO: 30784
  chr17:74771629-74771659
  hypo

SEQ ID NO: 93585 - DNA, 30 bp, Homo sapiens
  chr17:74774441-74774471
  hypo
tccgtgaggggacacgtatgacctcagaaa

SEQ ID NO: 93586 - DNA, 30 bp, Homo sapiens; identical to SEQ ID NO: 11520
  chr17:74864287-74864317
  hypo

SEQ ID NO: 93587 - DNA, 1691 bp, Homo sapiens; identical to SEQ ID NO: 54635
  chr17:74864602-74866293
  hypo

SEQ ID NO: 93588 - DNA, 75 bp, Homo sapiens; identical to SEQ ID NO: 30787
  chr17:74908778-74908853
  hypo

SEQ ID NO: 93589 - DNA, 60 bp, Homo sapiens
  chr17:74928818-74928878
  hypo
atggccgtggtgtacggcaaggaggcgagcatctggaaggtgagcgcggcccctgcgcgc

SEQ ID NO: 93590 - DNA, 137 bp, Homo sapiens
  chr17:75132758-75132895
  hypo
tcatttccaaggaagcgtcgttcggggagcaggtttgctcttcttcaccctttcctccgacttgctggctggagggggaagacacactgtggtaatggcaaagtagcaacacagaaggggcccgtgttaggccattc

SEQ ID NO: 93591 - DNA, 4 bp, Homo sapiens
  chr17:75196343-75196347
  hypo
cagg

SEQ ID NO: 93592 - DNA, 217 bp, Homo sapiens
  chr17:75196526-75196743
  hypo
cttttaacattgcttagaaatgtctttttctcttaatagattccaaaagatgagcatattcttcggttcctccgtgcacgggattttaatattgacaaagccagagagatcatgtgtcagtctttgacgtggagaaagcagcatcaggtagactacattcttgaaacctggacccctcctcaggtccttcaggattactacgcgggaggctggcatc

SEQ ID NO: 93593 - DNA, 890 bp, Homo sapiens
  chr17:75206842-75207732
  hypo
tttgttaggcactatcgctcttgtccatgtttcaagaacttggggtgcagtgtgtttcgtgtgaatcgggggcatctgtagacatccacatggtaaaaacctccgttctgctttgggtattaaataaagcacagatccgagatggcaacaaactgaaaggaaggctgaagcggaggcccccactgtgaatgcaggaaagaggttccgtcagcacagggggccgaggcctcaggatggagctgcctggggagccactttgctgaagagggggccgtgccacgtggtgccgcctgctgttcttagacaggacccttgtacctcactgaatctgctgtggaaggacattctgaagtggcgtttcagtggtgaggtggcagtggtgggattaaaggggcccggctcgtagagcagccacgcgctgaagggcacagcagacagcgtgcatgggctgagaggggccgtgggcctggctctgctgcttccttaggtggagttttcagtgactgcagaactctgcacagctgcttttcattctcacgtccgcccccgcccaatctttgaaactaactttgattattccctcctgggtagctctgtcggtgctgtgtaagtttggttttcaattggttctcagcacccagggggtgaccacctcaaccccatctctactatgccaggggctcatcccgctcacccagcctcgccactgttctctcgtgtgagcctcacacggcaggcccggttccatgcccctgcttcccccttgctgggaacgctgtcctcaggctcccctgcctgctctttctttagctttcaccttctccagggccttctgttctgtccagcccagggcagtcctctgaaccactcatgtacgagctcacagtgtt

SEQ ID NO: 93594 - DNA, 295 bp, Homo sapiens
  chr17:75207947-75208242
  hypo
gatcccctggagagcacgatgcgctcgcagcatgccggcctggtgctcgtggatcgtggctgcctaacgctgcctctttttcagattctcattcagattgtggatgcctcgtcagtcatcacttgggatttcgacgtgtgcaaaggggacattgtgtttaacatctatcactccaagaggtcgccacaaccacccaaaaaggactccctgggagcccacagcatcacctctccgggtgggaacaatgtgcagctcatagacaaagtctggcagctgggccgcgactacagcatgg

SEQ ID NO: 93595 - DNA, 350 bp, Homo sapiens; identical to SEQ ID NO: 30792
  chr17:75209342-75209692
  hypo

SEQ ID NO: 93596 - DNA, 26 bp, Homo sapiens
  chr17:75211196-75211222
  hypo
tgctggggggacggggtgagtggaaa

SEQ ID NO: 93597 - DNA, 624 bp, Homo sapiens; identical to SEQ ID NO: 30794
  chr17:75213326-75213950
  hypo

SEQ ID NO: 93598 - DNA, 159 bp, Homo sapiens
  chr17:75306481-75306640
  hypo
ctgcctgtgcccacaacgtgacggcgtggagacttatccgtgtagatccacgaagccttggttcacttattttggcagctagcgagtgttcctctgtgtggggaggcagagtttgcccgtcccgtggcccactggtgacatcgccgaaggtcttctctg

SEQ ID NO: 93599 - DNA, 202 bp, Homo sapiens
  chr17:75354843-75355045
  hypo
tctgccaggggctcagcgtataaagatgagacccctgccctgccagacaggtgggatgatggccataccttgagttagtcaaggcaccatctggctgtgtaacaaaagctaaaacatcagaggctgagcagcactcggacccacgtcccagtccaagtgtcagtcgttatgggggcccaggacagcccggacctagttcatt

SEQ ID NO: 93600 - DNA, 790 bp, Homo sapiens; identical to SEQ ID NO: 11524
  chr17:75368667-75369457
  hypo

SEQ ID NO: 93601 - DNA, 623 bp, Homo sapiens; identical to SEQ ID NO: 11525
  chr17:75369492-75370115
  hypo

SEQ ID NO: 93602 - DNA, 491 bp, Homo sapiens; identical to SEQ ID NO: 54641
  chr17:75370185-75370676
  hypo

SEQ ID NO: 93603 - DNA, 30 bp, Homo sapiens
  chr17:75376920-75376950
  hypo
ggtggggagtaggccgttgtctcgtgccac

SEQ ID NO: 93604 - DNA, 30 bp, Homo sapiens
  chr17:75390082-75390112
  hypo
tgaaataaagagcacggtccctgtgcaggc

SEQ ID NO: 93605 - DNA, 31 bp, Homo sapiens; identical to SEQ ID NO: 54642
  chr17:75392295-75392326
  hypo

SEQ ID NO: 93606 - DNA, 388 bp, Homo sapiens
  chr17:75398243-75398631
  hypo
ccagaaattccaggacctgggcgtgaagaactcagaaccctcggcccgccatgtggactccctaagccaacgctcccccaaggcgtccctgcggagggtggagctctcgggccccaaggcggccgagccggtgtcccggcgcactgagctgtccattgacatctcgtccaagcaggtggagaacgccggggccatcggcccgtcccggttcgggctcaagagggccgaggtgttgggccacaagacgccagaaccggcccctcggaggacggagatcaccatcgtcaaaccccaggagtcagcccaccggaggatggagccccctgcctccaaggtccccgaggtgcccactgcccctgccaccgacgcagcccccaagagggtggag

SEQ ID NO: 93607 - DNA, 38 bp, Homo sapiens; identical to SEQ ID NO: 30799
  chr17:75411918-75411956
  hypo

SEQ ID NO: 93608 - DNA, 414 bp, Homo sapiens
  chr17:75413666-75414080
  hypo
ccacatagccaaacaaaagcacgtttctaactgaagctgttggagagttcctgaggactttataccagacaagggccggtaagtggaagttcaatacgcaggagccattccttttgttcacaaatgtttgccgtcttttctgtctatatccgcattcatgtgagggcactcataggtccaccgtccagccccatgctttgtttgctaccaaaaaatttcttaagaattcctcagctgcaaatcctcctaccggagggggggttccaggaacccagccttgctcggggttggggcacctcagcacctgctgcacaggcgttggtcattaaaggtcatgtgccgtatccgtgggccctcggggtctggtggcacctgggcacacagtccagtggcggcctcctacctgccagacac

SEQ ID NO: 93609 - DNA, 167 bp, Homo sapiens
  chr17:75420112-75420279
  hypo
ccattttagggacaacgcaaggaggctgtcattccacccctcaccttattaatatttcatgaatcataagtgaccacttactgcgtcctgacgtactccaggcgctgggctcgaagctttatgcgcttcatgggatgtatctgcactatcgccgtagaaaacggttc

SEQ ID NO: 93610 - DNA, 279 bp, Homo sapiens
  chr17:75434080-75434359
  hypo
tgggtgagcagcccacgacacatctgcttccagcatcgtgtgggccggggctttcagaggggctgagggcttggatggccctgcaggggggtgctcctggccttgtgaccgaaaggagctgaaggtttggagaagccgttgggccgaggtcagttcttatagatttggcgaggagggaacagatgctcacggagctgctccaggcactgcacacactgcctcactctgcgctgacagccaagaggctggttccccgccgacccccattttacagataat

SEQ ID NO: 93611 - DNA, 31 bp, Homo sapiens; identical to SEQ ID NO: 30802
  chr17:75438182-75438213
  hypo

SEQ ID NO: 93612 - DNA, 94 bp, Homo sapiens
  chr17:75445188-75445282
  hypo
gtgctggaaaatgtaaggttgcgtctgtggcccatgtgccgtttctgctggagggttggaccgagggccagccgagaaggctctggggctgctc

SEQ ID NO: 93613 - DNA, 148 bp, Homo sapiens; identical to SEQ ID NO: 30803
  chr17:75452753-75452901
  hypo

SEQ ID NO: 93614 - DNA, 184 bp, Homo sapiens; identical to SEQ ID NO: 30804
  chr17:75473917-75474101
  hypo

SEQ ID NO: 93615 - DNA, 676 bp, Homo sapiens
  chr17:75476706-75477382
  hypo
ccccctgcagcctcccgtgctgtggccctggctcccacgccggctccactcccctgtggctgcccctgctgggtgcccaccggtcccagggaaaagccactcccctcccggaggactggcgggaggggccctgcctgggagcgtgccgtgtggtccctgtcttagcgcaggatgcctgaggccagatcctccctgggaggcaggatggggcaaaagtctccccgcaggcagagcagggcctggatgggcccaagcagggacgggggcacagaacagcagccgcccagcctgcgtgggagctgagggccaccaagggcagctccagcctgtggggactagcagaggcaccacctctgtgaccagcgagttgtctgcacctgcatgcgcatgcaccagtgagtgtggcgagtctgaggtgtgctgggacctggcccgtgtaccagccagccctgatgggaaccagccccatcctgggtacccctggaaccccactgtgtgggagcacctgggtcctcagcaggcgtcttccgggcgtccgcccccagccccaggcctctgacccgtgtgtggtgtcttaacagcagccaggagcagggccatcgaagggacctacagacagaagaggctttagtgatttcgggaagttcagctccacgtgccccacatacccaagagt

SEQ ID NO: 93616 - DNA, 105 bp, Homo sapiens
  chr17:75478248-75478353
  hypo
gttggcgacatggccgacacccccagagatgccgggctcaagcaggcgcctgcatcacggaacgagaaggccccggtggacttcggctacgtggggattgactcc

SEQ ID NO: 93617 - DNA, 64 bp, Homo sapiens; identical to SEQ ID NO: 30806
  chr17:75490715-75490779
  hypo

SEQ ID NO: 93618 - DNA, 30 bp, Homo sapiens
  chr17:75494654-75494684
  hypo
cgtaccgtgtgaagcgcctcaacgagggca

SEQ ID NO: 93619 - DNA, 74 bp, Homo sapiens
  chr17:75502858-75502932
  hypo
gccgaggctctccccgctgcaccctctgccttctgctcccagcagggcgctgcagcatcgtccggttttaacag

SEQ ID NO: 93620 - DNA, 322 bp, Homo sapiens
  chr17:75523090-75523412
  hypo
gatggcggcctgaaccggagtccttcttcccctcctccctctccgctgctgcaatgcccaggccccccgcaacgttcctcgtctgtaatggtgccagaggctttaaatcttgcagaagccacatctgctgcctgcaggtaaacctccctggctgagcccactgcgcacgcctccacgttctggagccagaaacaatgagaagcacaattccggcagcatctctcctcccggtcatttgcatagcacaacctctccctccaccccctcctgtctcccacgtggatcttcatgtaattaattaatatcgcgttcatcagagctt

SEQ ID NO: 93621 - DNA, 77 bp, Homo sapiens; identical to SEQ ID NO: 30807
  chr17:75544176-75544253
  hypo

SEQ ID NO: 93622 - DNA, 38 bp, Homo sapiens
  chr17:75548377-75548415
  hypo
ctaccactagaatttgtaacatcgacgagtgcaaacct

SEQ ID NO: 93623 - DNA, 30 bp, Homo sapiens
  chr17:75603634-75603664
  hypo
agctggcgcaccagccgcggagaggtgagc

SEQ ID NO: 93624 - DNA, 207 bp, Homo sapiens
  chr17:75643460-75643667
  hypo
ctggagatggccgtgcggatttccgtgtgtttagtgtactttcgtgcaagctggagatggccgtgcggatttccgtgtgtttagtgtactttcgtgcaagctggagatggccgtgcggatttccgtgtgtttagtgtactttcgtgcaagctggagatggccgtgcggatttctgtgtgtttagtgtactttcgtgcaagctggaga

SEQ ID NO: 93625 - DNA, 30 bp, Homo sapiens
  chr17:75733589-75733619
  hypo
tgccatgccatgccacgccatgtgggggcc

SEQ ID NO: 93626 - DNA, 290 bp, Homo sapiens
  chr17:75733961-75734251
  hypo
cacaatacagagaataaaagacgcggcccgtacgcagagctgaagtggctctctgttatttgcagatggaaattggaatctctacagcatgacagacacttgagcagaaattctaagcttttatgggttgccacaggtccctttcaggaggatggcgaaggctatagtcatgagccgtctaaggtggaggtcacgagcggcaggtggctcttaataagcacttgacataccacttctcccaactgagatgtgctgtacgcgtcaaatccgaactggattttgaggattca

SEQ ID NO: 93627 - DNA, 23 bp, Homo sapiens
  chr17:75796001-75796024
  hypo
tttgggaggccaaggcgggcgga

SEQ ID NO: 93628 - DNA, 143 bp, Homo sapiens
  chr17:75797043-75797186
  hypo
ccatatggtctttcagtgaggcgcgtggagcggtgatttatgactgtcaccagcccagcgctgtctccgagacattcaaggaccgcgtgggctggacactcaccttcggtggcagggccaccgagtcacactccactctcagc

SEQ ID NO: 93629 - DNA, 30 bp, Homo sapiens; identical to SEQ ID NO: 30809
  chr17:75848864-75848894
  hypo

SEQ ID NO: 93630 - DNA, 183 bp, Homo sapiens
  chr17:75875368-75875551
  hypo
tgagcttttatcttcacgcagacccagtagtacctgctggtggggagaggggtagggaaggggtgggggtcgcccacccaacccaggctcacccccaatcccatgtgaaactgcgcccacccgccatggctgcacccatgggtgtcaccagtgggacaacagtgcaggcgtggccttgctgta

SEQ ID NO: 93631 - DNA, 183 bp, Homo sapiens; identical to SEQ ID NO: 30810
  chr17:76034962-76035145
  hypo

SEQ ID NO: 93632 - DNA, 49 bp, Homo sapiens
  chr17:76046727-76046776
  hypo
aaagcgccaagtggcccgggggtttggggggactcgataagctctactg

SEQ ID NO: 93633 - DNA, 43 bp, Homo sapiens
  chr17:76076531-76076574
  hypo
aaaagaaagaaaggaaaaaaggtcaaatcgaattaaggaaaag

SEQ ID NO: 93634 - DNA, 25 bp, Homo sapiens
  chr17:76085333-76085358
  hypo
ccaccgtgcccgaccacttatcttt

SEQ ID NO: 93635 - DNA, 30 bp, Homo sapiens
  chr17:76089107-76089137
  hypo
accagccagtcctcccgtagctgttcccca

SEQ ID NO: 93636 - DNA, 31 bp, Homo sapiens; identical to SEQ ID NO: 30811
  chr17:76093764-76093795
  hypo

SEQ ID NO: 93637 - DNA, 30 bp, Homo sapiens
  chr17:76098261-76098291
  hypo
ggcctcatcacccccgtctctcctggcaca

SEQ ID NO: 93638 - DNA, 30 bp, Homo sapiens; identical to SEQ ID NO: 30812
  chr17:76100495-76100525
  hypo

SEQ ID NO: 93639 - DNA, 189 bp, Homo sapiens
  chr17:76100940-76101129
  hypo
agcaccaggagagccgacccctcccgggacccctcccggctgggcggccccacagacccgctggaacccagcagcggccgcccttttgagtacctctgtccaggactgaagacgaaccttggccgcagtccttgcgaactgttcgcaaaacagtgcgggctgcggtgggtcagcgtcacatgctaatga

SEQ ID NO: 93640 - DNA, 54 bp, Homo sapiens
  chr17:76104280-76104334
  hypo
tgtgggtcaattccttcgaaaagatgggacccgcacccccgccacaggctggcc

SEQ ID NO: 93641 - DNA, 31 bp, Homo sapiens
  chr17:76109601-76109632
  hypo
gtccccaatccctccacggaccctcacctgc

SEQ ID NO: 93642 - DNA, 134 bp, Homo sapiens
  chr17:76114989-76115123
  hypo
gtcctgcccccactgccggccaccctgccagcccagccctccccaggccttggcagcctcaccttcttgacatagaagacgagcagcagcttgatgatctgcacggcggggaggaggggcgagaagagcacccc

SEQ ID NO: 93643 - DNA, 118 bp, Homo sapiens; identical to SEQ ID NO: 30815
  chr17:76121807-76121925
  hypo

SEQ ID NO: 93644 - DNA, 190 bp, Homo sapiens; identical to SEQ ID NO: 30816
  chr17:76129455-76129645
  hypo

SEQ ID NO: 93645 - DNA, 143 bp, Homo sapiens
  chr17:76132636-76132779
  hypo
gtacatatgtgtggcacgtgtttatgacatgcaagcttgtgtcagtgggcttcaatgtccataggcggcggaggaaaggaggagctcgcctgcagtcaggatcctgaaaaggccacaggcttctccaccgcagggcttgctgc

SEQ ID NO: 93646 - DNA, 321 bp, Homo sapiens
  chr17:76137869-76138190
  hypo
tggcgggaatcctctccgtccagtcttctaacctagcagcctcacgtccacagagctgccttgtgaaactcagcagagccctggcttcctgcagagccgtgttctcccagcctgcttcatggctccctggttgagccaagcttgcggatccgtggggtgaaggtacccgcaccgcctgggccttagtggtatgtacgggcctgcatcgtgagcagcgggcgggggcccaggcaggtgaggcagctggccacaagggcagggcccggcccccctcccaaggctgtgtctgatattcttgagcctgttcgagtttccttttcc

SEQ ID NO: 93647 - DNA, 241 bp, Homo sapiens; identical to SEQ ID NO: 30818
  chr17:76145401-76145642
  hypo

SEQ ID NO: 93648 - DNA, 135 bp, Homo sapiens; identical to SEQ ID NO: 30819
  chr17:76152519-76152654
  hypo

SEQ ID NO: 93649 - DNA, 96 bp, Homo sapiens
  chr17:76153509-76153605
  hypo
cagatgatttggacttcgagacaggagatgcagggcctcagcgaccttcccaatgcagtcctcagcattgtgtaaaaatgactttgtaggccgggc

SEQ ID NO: 93650 - DNA, 95 bp, Homo sapiens
  chr17:76153904-76153999
  hypo
agaatggctttgtggtactcaaaggccggccacgtaagatcgtcgagatgtctacttcgatgactggcaagcacggccatgccaaggtccacctg

SEQ ID NO: 93651 - DNA, 274 bp, Homo sapiens
  chr17:76166932-76167206
  hypo
tgagggctacagcaatgcccacgagtctaagcagatgtactgcgtgttcaaccgcaacgaggatgcctgccgctatggcagtgccatcggggtgctggccttcctggcctcggccttcttcttggtggtcgacgcgtatttcccccagatcagcaacgccactgaccgcaagtacctggtcattggtgacctgctcttctcaggtatctgcctgtggcacctccatttgatcttgggggaggcattaactctagggttccgcagctgggagggt

SEQ ID NO: 93652 - DNA, 302 bp, Homo sapiens
  chr17:76167731-76168033
  hypo
taggatggccaggggccggttcttgggtcaagggtggtggagggtggggtcccccacccacctgtaccctgctgtgctccccctgcagggtgtgctggcctccctggcctaccagcgctacaaggctggcgtggacgacttcatccagaattacgttgaccccactccggaccccaacactgcctacgcctcctacccaggtgcatctgtggacaactaccaacagccacccttcacccagaacgcggagaccaccgagggctaccagccgccccctgtgtactgagcggcggttagcgtgg

SEQ ID NO: 93653 - DNA, 45 bp, Homo sapiens
  chr17:76173532-76173577
  hypo
tattatgaacatgcaaatattcgaaaacctgaaatccgaaacact

SEQ ID NO: 93654 - DNA, 200 bp, Homo sapiens
  chr17:76175394-76175594
  hypo
cccagcctgggctcactttctcgccaggagtccctcaagcacggggcagcaacaacgacgtctccacgtacgcagaggcatgggggtgctcaggggcgcacctctgaaggtcagaaacggaatggccatacccaagcggggaggagatgccagctgccgggtggtcgggaacccagagcggacactggcagcctcaactc

SEQ ID NO: 93655 - DNA, 28 bp, Homo sapiens
  chr17:76175854-76175882
  hypo
actagactaagtgtggccaggcgtggtg

SEQ ID NO: 93656 - DNA, 81 bp, Homo sapiens; identical to SEQ ID NO: 30823
  chr17:76176964-76177045
  hypo

SEQ ID NO: 93657 - DNA, 30 bp, Homo sapiens
  chr17:76187063-76187093
  hypo
agtactgtcccagccgatgggttgtccgac

SEQ ID NO: 93658 - DNA, 193 bp, Homo sapiens; identical to SEQ ID NO: 30824
  chr17:76187325-76187518
  hypo

SEQ ID NO: 93659 - DNA, 31 bp, Homo sapiens; identical to SEQ ID NO: 30825
  chr17:76204092-76204123
  hypo

SEQ ID NO: 93660 - DNA, 30 bp, Homo sapiens
  chr17:76209688-76209718
  hypo
ggtcgtgcagtcaacgatgtactcgccggg

SEQ ID NO: 93661 - DNA, 162 bp, Homo sapiens
  chr17:76215738-76215900
  hypo
ccagcttttctgcagcgtgccatagaccatctcttagccctcgtgggtcagagtctctgttgcatattgtcttttgttgtttttcacaaccttttagaaacataaaaagcattcttagcccgtgggctggacaaaaaaaggccatgacgggctgtatggatt

SEQ ID NO: 93662 - DNA, 127 bp, Homo sapiens
  chr17:76216112-76216239
  hypo
tgctggtggacgctgcggggtgctccgctctagggttacagggatgaagatgcagtctggtagggggagtccactcacctgttggaagatgtgattaagaaaagtagactttcagggccgggcatgg

SEQ ID NO: 93663 - DNA, 155 bp, Homo sapiens; identical to SEQ ID NO: 11530
  chr17:76227981-76228136
  hypo

SEQ ID NO: 93664 - DNA, 196 bp, Homo sapiens
  chr17:76232493-76232689
  hypo
ccacccatccactgacgcggctccagctctgactacatgccgagtgctggccaagtgctcctccgaaggctcctccgagggccccccagtcccagctgcaggtgagaaatctgaggcctggagagggccgagggcctgggctccccttcacccccactggtgctgtctcctcagtttccaccgactgcccagcact

SEQ ID NO: 93665 - DNA, 31 bp, Homo sapiens
  chr17:76260378-76260409
  hypo
acaactgagacagacccggcatggtggctca

SEQ ID NO: 93666 - DNA, 41 bp, Homo sapiens
  chr17:76275113-76275154
  hypo
cgagttctgtgacccgctccggggagcggggcatctcatgt

SEQ ID NO: 93667 - DNA, 30 bp, Homo sapiens; identical to SEQ ID NO: 54655
  chr17:76338190-76338220
  hypo

SEQ ID NO: 93668 - DNA, 167 bp, Homo sapiens; identical to SEQ ID NO: 54657
  chr17:76349230-76349397
  hypo

SEQ ID NO: 93669 - DNA, 31 bp, Homo sapiens; identical to SEQ ID NO: 30829
  chr17:76364857-76364888
  hypo

SEQ ID NO: 93670 - DNA, 580 bp, Homo sapiens
  chr17:76395197-76395777
  hypo
tggcaagaagagcaggcgtctgccacgctgaggacttcaggcctgagacatggccagcatgcaggacagaggttggcctggaagtcctctggctaggagtagccccagctggtgtgactgattcaggtggacggcacaggtgaaggcgaggccacgtggaggtggctcctcattgggggcaggacgccttcctgttgtgagtcaggtgccgttttctctgtccgtgttcaggccggaagaactcccgcacaatgctgctcccactcctgcggaggttcccagagcaggtccgagtctccctctttcacacgccgcacctccgtgggctgcttcggctcctcatccctgagcgcttcaacgagaccatcggcctccagcacattaaggtgtacctcttcgacaacagcgtcatcttgagcgggtgagtgcttcccaccgtcagtgcttttgccctcctgctctgcaggctggagggcagtggaataggaacagtgggaaacccgttcccctcagtcttggagaacctgcttgtaggtctggctgctgtgcacccgcggcacctccccgacactgtctctgc

SEQ ID NO: 93671 - DNA, 39 bp, Homo sapiens
  chr17:76396176-76396215
  hypo
cctgcatgggccgggcgcagtggctcacgcctgtaatcc

SEQ ID NO: 93672 - DNA, 140 bp, Homo sapiens; identical to SEQ ID NO: 30831
  chr17:76397568-76397708
  hypo

SEQ ID NO: 93673 - DNA, 590 bp, Homo sapiens
  chr17:76404588-76405178
  hypo
caccttggtggggcgcgtggaggttgaaatcacactgggggccgagggctgctgcgcgtccctgagcgaatagattggcagaagggagtggggtgggggccttggatcccttggtgccgtgtctctggccttgctccctgtagttctgttgcgctgattcggtcgtgaaggaaggtgctgccaggccgcttcacctgcatcgccttggctttgggaggtggggctgagtgggcatctgggttggatctcaggcaggtggcagttcctctgattcatggttgtcagtttcctgttgcctggccctcgctcctcgcccagtaggtgtggtgggacaaggttctgggagctggggtagaatttggactcttaacgggaagtgcctcgtgctgccgcagacacatctggatgggtgctgagctttccttcccaagcctggtcctgatcgggggtggggtacaggcaggagcagcccggccttgtcagccgttgaaagtgtggtatctgctgggttgccagtaagctcgcttcgaggtcttgagaggcagtgcaggggaggctgagtatgaaccgtgtcaagccagttcttatgt

SEQ ID NO: 93674 - DNA, 30 bp, Homo sapiens
  chr17:76422625-76422655
  hypo
tcatagaagagagccgtggacagatcttcc

SEQ ID NO: 93675 - DNA, 542 bp, Homo sapiens
  chr17:76425212-76425754
  hypo
ggttgggggggatctgaaagccgggggccagcaggacgtctccctccagcatctccgtccggatgtattcagccaggtaggtcctgcacagccgacggtcccagtcatctgtgatgtggccgccatacatgatttcaccaaaaaggtagcggagatcgtcccagggcacctgaggaaggatgacagcgggtaggggaaagtgcccctgtgccccttctctgccatgagagggtcaggctcaggcaggcagggcgtgggaacccagccattggtgctgtgtccttctcgccctccaggtcagcctcctggccatttaccttcagggtcaccaggccccagggccacctttctttccattccgcgccaccagacgccaatgtccggcccctttggcttctctcacaaggggctgtgtggcacctccctccaccttggacagcgcttccacagccggcatgctctgcacctcccgtggggcaggtgtttctgctgtgcctcactgtgcctcagaggccacagggctgaatcggaactcgctccct

SEQ ID NO: 93676 - DNA, 329 bp, Homo sapiens
  chr17:76441609-76441938
  hypo
gcacaacgtgttcaacgtctaaagacgaaccttgatcccgccccagccttgatgctggaggaagtccactggtgagaccactccggccttaaaagggaaccgcaggaggaaatccagctccactgggttcagctccttcttcatggacaggacctgggggaacatcgaggtgtacacacttaacgcagccagtaaaacgtcagcagccctgaagatgcgcgctggactcgaagaggagttcacactcccggcctgcagggggcgccctgtcctgcccctttggtttggggtaaagttttgtcttcacctcgtctcgctttttaagttgt

SEQ ID NO: 93677 - DNA, 31 bp, Homo sapiens
  chr17:76449723-76449754
  hypo
ctttgtaaactgcccccgtgctcttatggga

SEQ ID NO: 93678 - DNA, 30 bp, Homo sapiens; identical to SEQ ID NO: 30834
  chr17:76455087-76455117
  hypo

SEQ ID NO: 93679 - DNA, 42 bp, Homo sapiens
  chr17:76456116-76456158
  hypo
gtttggaccgggtcctcggtgatgccccgaagaagccgccat

SEQ ID NO: 93680 - DNA, 142 bp, Homo sapiens
  chr17:76459427-76459569
  hypo
atgcatacacacacacgtatatgtgcacattcacatacctgcatatatacgcgtgcacacgcattcacatacctgcatatatacacgtgcatacgcattcacatacctgtatatatacacgtgcatacgcattcacatacct

SEQ ID NO: 93681 - DNA, 30 bp, Homo sapiens
  chr17:76472339-76472369
  hypo
tgccagagttatcgcgtggaaccctcggac

SEQ ID NO: 93682 - DNA, 30 bp, Homo sapiens
  chr17:76482441-76482471
  hypo
atcaccgtgatctccggcactggcgtgatc

SEQ ID NO: 93683 - DNA, 30 bp, Homo sapiens
  chr17:76498565-76498595
  hypo
gccgctccaggtactcgcccggcaggtttc

SEQ ID NO: 93684 - DNA, 253 bp, Homo sapiens
  chr17:76498805-76499058
  hypo
cacgcagtgagcgatcgctggcgcctgctaacgcagacattcctgctgaaagcttagatggttttccaggggaccacagttaacagcggagcccatgaacgcaaagaaactcgccccttatctcagccacgaggcgccgccgagcccccacccgcctcagacctgggctgggtagtccaggatccactgctccctcggcttctcttcgtaggtcaccacggcctctgggatttcgtgccggagggtagagcac

SEQ ID NO: 93685 - DNA, 262 bp, Homo sapiens
  chr17:76501114-76501376
  hypo
acagggcttttctcccgtcctttcccctcccctttctccctaaggatacactggtgctatatgggtaaggctgggctggaaattctataaagaggcccatcccttaagtgttttctagagagggagaggagaggagcaggggcgggctggcagctgcacagggtgctggttctccggacatcgccatctgagggcgtgtggcccacacgcgtgctgcacccttgtcctgggttccctgtgtggtgtgcgcacacactcacct

SEQ ID NO: 93686 - DNA, 91 bp, Homo sapiens
  chr17:76503567-76503658
  hypo
cgctgggagtcccccgggagctgggtgcggatgtcttcggagccgatgaagatgctctccaggtggctccaggttcgctggacctcaaacc

SEQ ID NO: 93687 - DNA, 30 bp, Homo sapiens
  chr17:76521187-76521217
  hypo
ccggacttggacagcgcctccatgatgcct

SEQ ID NO: 93688 - DNA, 363 bp, Homo sapiens
  chr17:76522740-76523103
  hypo
gggacttgtaggggttggggtcgctgaaggagaacggggcctcgcgcctgaacctctccctgaactcatgttgcttgagctgcgagagaagagtgcaaagtacagagagtcacggggcggccacctgccccaagggtggccccaccctgtatgccgcagggccctgggtgagccccacgctgctccccggaaatcccgccaccctgccccaggtataatacctcgaattgctggcatttccgccgcaggatgctgacctcgttggcctggagtggtgccacggtcagcttcacctgaatggccagtttcttggtatttgcccagtgctccggcagctcctgcgggaagcaaaggcagaggagg

SEQ ID NO: 93689 - DNA, 466 bp, Homo sapiens
  chr17:76526202-76526668
  hypo
aggtgctcggtacaccgggtttggagaagggataatgtttgctcgcagcccggtgacacctttctgctcacgcttggtggggtagttggccttgaagcccagcctccaccccctgctaccccagaggaggcacctgacaaatgccacccactcaagtggaaggccactccctggtgctctgcacattccttgggctccccgagtacatggctggggacccacctgttggtgacgtggttgctcaggtgccgcttgaacatgaagccccagcgccggattgtgctgagcagggcctgcttgaaggggcggcagtcgcactgcagccagccgtggaacaccttggtgttctcgcacttggacacctcctcatacagcttctcgtaggagtcgatctggaaaacacggccaccggcggcctgtcatagcctgcaagcctagggggggcgtcagcacagggcctcagtcc

SEQ ID NO: 93690 - DNA, 465 bp, Homo sapiens
  chr17:76533245-76533710
  hypo
tgagattccgtctcaaaaaaaaaaaaagaaaaaaagaaaaggtaaacggcgaagccttgccgagttagggcggcaacaccaaatggggaaagcaatggatgaccctgtgtacggccagaagaggccaggactgaccttgtagttcatcctgtccttggccagccgagggatgagcctggctacgttgtagatgtcgttgaccaggccctcgatcagtgccaggaagccgcgatctgagcccacctccagggtcgggttgaaggtcagcccatcctcgtccagctccatgcggatctcaaacaggggagcgatactctcctgaaagaggggtggggttggcagtggtcaacacctctgtcctccatcggatgattctcagtgccctgatcatccactccgtaccatcaatgtgtcactgccttccacttatctgggaagcttctgagagctcgtgtctcagcgcac

SEQ ID NO: 93691 - DNA, 49 bp, Homo sapiens
  chr17:76556842-76556891
  hypo
gatgaggttgctagcggcgtcccgcagaatcagcggctgccccaggtta

SEQ ID NO: 93692 - DNA, 30 bp, Homo sapiens
  chr17:76572297-76572327
  hypo
ttccccaaaagacacgtaataccacggaac

SEQ ID NO: 93693 - DNA, 120 bp, Homo sapiens
  chr17:76617948-76618068
  hypo
cagggctgaacctaacggctgcccaggtctagtcccttctcaaacatgccacttccgtgtcctgaagcacaggtctgcggcggacctccccaggccaggatgccccgttgttggagtcac

SEQ ID NO: 93694 - DNA, 30 bp, Homo sapiens
  chr17:76618315-76618345
  hypo
ttgtgttccgtggtccgtgccacccccagg

SEQ ID NO: 93695 - DNA, 30 bp, Homo sapiens
  chr17:76618705-76618735
  hypo
gctgcaaagaggcgccgggaggagctgcag

SEQ ID NO: 93696 - DNA, 215 bp, Homo sapiens
  chr17:76669914-76670129
  hypo
ctaaaaaagtgggggcggtgcaaagactaagttacttatcttttctgactctgctcttcttaacagaagacagaaccctcctcccactttcaaggtgttacaactgaactcaaggtgcagctggagtaacaccctcctgcacaagtgtccggtcagcacccctttcccacctcgagggccccgcctgagcccagagacaccgcgaacaacaaaga

SEQ ID NO: 93697 - DNA, 178 bp, Homo sapiens
  chr17:76670691-76670869
  hypo
gaggagccgtggcgacgcggccctgtgaaaacccgcagctcctccacctgcctcctcagggctgcgccctgcaccgccctggtccagggtcctgtggaggggcggggcgagacggccagacagccagccacctgctctgcctggactggcatgctggccctggcggagtggcaggagc

SEQ ID NO: 93698 - DNA, 30 bp, Homo sapiens
  chr17:76671437-76671467
  hypo
gccgactgcgaccccggccagggcaggccc

SEQ ID NO: 93699 - DNA, 30 bp, Homo sapiens
  chr17:76672141-76672171
  hypo
cccccgcagaccaacgcccttggctgcacg

SEQ ID NO: 93700 - DNA, 30 bp, Homo sapiens
  chr17:76673625-76673655
  hypo
gcagccgctgttaccgctgacacgcagttc

SEQ ID NO: 93701 - DNA, 30 bp, Homo sapiens; identical to SEQ ID NO: 30838
  chr17:76676228-76676258
  hypo

SEQ ID NO: 93702 - DNA, 198 bp, Homo sapiens
  chr17:76690198-76690396
  hypo
aaaagaaaatgtccagcgtaggtcctggcagacaagtaaaaggaccactggactttcaggccagtttttagcaccctgcttggatgctgaaccctaggcgggcttacgtgactgatcattaattgccaagattccaaatgacacagatctaggttatgcgagggaatttgctgtaagcaagcacgtgccctccacctg

SEQ ID NO: 93703 - DNA, 189 bp, Homo sapiens; identical to SEQ ID NO: 30839
  chr17:76722779-76722968
  hypo

SEQ ID NO: 93704 - DNA, 45 bp, Homo sapiens; identical to SEQ ID NO: 30840
  chr17:76766752-76766797
  hypo

SEQ ID NO: 93705 - DNA, 31 bp, Homo sapiens; identical to SEQ ID NO: 30841
  chr17:76794654-76794685
  hypo

SEQ ID NO: 93706 - DNA, 30 bp, Homo sapiens
  chr17:76798761-76798791
  hypo
cacgcattagcggacgctccacacgcagcc

SEQ ID NO: 93707 - DNA, 84 bp, Homo sapiens
  chr17:76818664-76818748
  hypo
ttcatgtcccccgcaccgctcactaactgggatctgaggcactctgagctctggggcctcttctcacccggacccggggctgcc

SEQ ID NO: 93708 - DNA, 171 bp, Homo sapiens; identical to SEQ ID NO: 30843
  chr17:76851782-76851953
  hypo

SEQ ID NO: 93709 - DNA, 30 bp, Homo sapiens; identical to SEQ ID NO: 30844
  chr17:76852368-76852398
  hypo

SEQ ID NO: 93710 - DNA, 31 bp, Homo sapiens; identical to SEQ ID NO: 30845
  chr17:76862114-76862145
  hypo

SEQ ID NO: 93711 - DNA, 30 bp, Homo sapiens
  chr17:76895229-76895259
  hypo
cgcttggagtactgcggccctggcaaacca

SEQ ID NO: 93712 - DNA, 130 bp, Homo sapiens; identical to SEQ ID NO: 54663
  chr17:76921422-76921552
  hypo

SEQ ID NO: 93713 - DNA, 40 bp, Homo sapiens
  chr17:76963989-76964029
  hypo
ccaaggctgatgggagcggacctggcgctcctgggccttc

SEQ ID NO: 93714 - DNA, 30 bp, Homo sapiens
  chr17:76968735-76968765
  hypo
aagcacttgactgacgacagggtgatgtca

SEQ ID NO: 93715 - DNA, 28 bp, Homo sapiens
  chr17:76974849-76974877
  hypo
aaaaatggccaactggccaggcgcgatg

SEQ ID NO: 93716 - DNA, 42 bp, Homo sapiens
  chr17:76975544-76975586
  hypo
tgccctggccgggcgcggtggctcacacctgtaatccctaca

SEQ ID NO: 93717 - DNA, 73 bp, Homo sapiens; identical to SEQ ID NO: 30847
  chr17:76977963-76978036
  hypo

SEQ ID NO: 93718 - DNA, 212 bp, Homo sapiens
  chr17:76987615-76987827
  hypo
ctgaccacagcgctcgtgctcttggagcgccttgagatagtgggacaaggcggactggaggacgcagtttccagatgggatgccctggcgggcgactcccgtgcgcatgcccagcatcctgcgcaggcgctctcgtggccaggcctctgcaaacagtcagcacagaccgggagacagaaaactacactccctcagacgctttattgtttaca

SEQ ID NO: 93719 - DNA, 30 bp, Homo sapiens
  chr17:76988314-76988344
  hypo
ggtttgtgagggaccggcacagggacagcc

SEQ ID NO: 93720 - DNA, 30 bp, Homo sapiens; identical to SEQ ID NO: 30849
  chr17:76989950-76989980
  hypo

SEQ ID NO: 93721 - DNA, 609 bp, Homo sapiens
  chr17:76991110-76991719
  hypo
atgccggcagcagcccgcagggcgttgtagttggacacccagttctcgtggtccacgctgcccttgtagcccaccaccttcacccactccgggttctcgttcaccacatcacccgtagtggtcgtccactccttgcccaggccgcccacgtacagacgctcgtccttcactgccagccattcggccttgaagcctggccaagcagagtgtccttaggccccgcacccagctcccgccgcacccctgcacctggctcccacccggccccgcacctgtccttagaccccgcacctgactcccgcccggctccacacctgcctcccctccggcccgcacctggctcccgcccagggccggccggctgccctcccctcagctcctgaaggttcagtgaccactctcaagtctcctctgatccccaactccccgctcctcaagctgtaaccccaaccttaggattatccttaaaggctagaaaagctgaaaagtgacagcactctgaaggggcacgtgtgtcccaggggagtgcgggtgctgccctcggccacacctgaggtctcaccgagcatcactctaactccagtggccggagaggggcttggtgctggg

SEQ ID NO: 93722 - DNA, 1191 bp, Homo sapiens
  chr17:76992706-76993897
  hypo
ctcctggtaggcacatcctagcgtggtcttgagaacctttgaaggtgtaaaaagggcgtgttcccagaggctccgagagcagcagcggatacagccgaaaacatcttggagagattccccacgtctcccacaggcctctagcgataagctcttcctcctagaaactgctcagtgtgaagtgacagtaggctatgctcctggctaagggtaagggggccgcaggtcagagcaagagggagacgtgctccctcaccacatccctggcttctaggtgtgtgaattctttaccatgtgcctgtgtttgccagccaggccctgagctcccactccccacccacacctccataaaacctcagggtccagttacctttctccacggtgccgtcgccgtcggacagaatcacccagggcacggctttgctgccttcgatctggtagacgacccccgtccggtcatccacggagtagagtttcccattgaaaacaatcaggtcggatagctccatgcctctccccttctccgccaggtgggactccaggaccccatggtctttgtcccattccacggccaccttgtccccactgtctgacagggtcaggtagccctttttcaggtaactgaaccaggtgttttcctcttgggcccttgactctgtgtccaggtctgcgataactgcgattcgataccgaatcccagccggtgtcctttgtgggggagacagggggtaggtgtcattgtaccagttggcgggcgcctggccgagcctccagttgtgtgcattgtgggtggggggcctgccgggggccgggcggtgggagcagagcagccagaggatggcagcacccacaaagaacgtcaggatcaccttccagcgggggcggaagcgggggtccgcggccttggtcatggacgccagcacaggaaggccccccacactgatccggagggagtgcatagactcattccattccgggtgctcagacagctgcacgggcatcagcgtgacagacaggcgggacctgcacagccagggagggaggagaggagtcagcgcctccgcaagcccagtcacatcttagttccggaagctgcaggcgctggaggctgacttttccagaagaaacagtatttcactactctgtggccattcttactcccttggcttaatgaattcccgactctagattccc

SEQ ID NO: 93723 - DNA, 31 bp, Homo sapiens; identical to SEQ ID NO: 30853
  chr17:76994831-76994862
  hypo

SEQ ID NO: 93724 - DNA, 152 bp, Homo sapiens
  chr17:76995121-76995273
  hypo
cccccttctccacgccgcagcctgctgggctgagaagatacaaaaacagggtgacaattccacatggaactttcggacagtcctaggttttagccccagggtgaggttcaaggagtgaacaaggcacatacgtggaacctgctgctcagagt

SEQ ID NO: 93725 - DNA, 28 bp, Homo sapiens
  chr17:76995583-76995611
  hypo
tctgagatagggcctcgctctgttgccc

SEQ ID NO: 93726 - DNA, 747 bp, Homo sapiens; identical to SEQ ID NO: 30854
  chr17:76996175-76996922
  hypo

SEQ ID NO: 93727 - DNA, 459 bp, Homo sapiens; identical to SEQ ID NO: 30855
  chr17:76997142-76997601
  hypo

SEQ ID NO: 93728 - DNA, 247 bp, Homo sapiens; identical to SEQ ID NO: 30856
  chr17:76998487-76998734
  hypo

SEQ ID NO: 93729 - DNA, 132 bp, Homo sapiens; identical to SEQ ID NO: 30857
  chr17:76998993-76999125
  hypo

SEQ ID NO: 93730 - DNA, 30 bp, Homo sapiens; identical to SEQ ID NO: 30858
  chr17:76999461-76999491
  hypo

SEQ ID NO: 93731 - DNA, 155 bp, Homo sapiens
  chr17:77002124-77002279
  hypo
atcctgcctccacagacagcacgctccttaaaggtcaagctcaggatctgactgacttctgcacctgtccccgcccctagtatccagcacacggcaggcagcaggcaccgtcctgtgggacagaagcctcacacgggccatggctccattctcat

SEQ ID NO: 93732 - DNA, 285 bp, Homo sapiens
  chr17:77002843-77003128
  hypo
aacgggatgggatcatcgccccatggacctggatcagggctgccttccacaccgcggtggcacctgcacgagcccacctgcttactgccaccttctctcctcacgctttcctccaggctcggctcccgggacacaaaggccgaatcgccaggactttcactcaacccggcaacaccctcagagccattctggggggtcccagtctcacctctgccccactcccacatggtggcatcacgcactgtcttaagtcttaagccagacttcaacgccttcttcacttcc

SEQ ID NO: 93733 - DNA, 31 bp, Homo sapiens
  chr17:77004087-77004118
  hypo
ggtccccacactgctgcggtggcctcatgac

SEQ ID NO: 93734 - DNA, 61 bp, Homo sapiens
  chr17:77043871-77043932
  hypo
gcaagttctactgctacgtgcccggcctctacttcttcagcctcaacgtgcacacctggaa

SEQ ID NO: 93735 - DNA, 15 bp, Homo sapiens
  chr17:77069721-77069736
  hypo
ctccccatgggtcag

SEQ ID NO: 93736 - DNA, 113 bp, Homo sapiens; identical to SEQ ID NO: 30862
  chr17:77070137-77070250
  hypo

SEQ ID NO: 93737 - DNA, 81 bp, Homo sapiens; identical to SEQ ID NO: 54668
  chr17:77070948-77071029
  hypo

SEQ ID NO: 93738 - DNA, 264 bp, Homo sapiens; identical to SEQ ID NO: 54669
  chr17:77071239-77071503
  hypo

SEQ ID NO: 93739 - DNA, 405 bp, Homo sapiens
  chr17:77074635-77075040
  hypo
gatcctgttctgggtcgctgggctctggctttcatgcacagagatgttacatgccccacccaccccaggtgcagacgtcccatccaaagttgccgtggagtccgcgcggcgcttttaaatgtccataaaacaatcttggaccctgtgattgatgggaaggcttgagtcagagccaaccatcaaggtagagatagaagcaggtggtgaaaccttgggcgcagctcacagggctttcaaccccgaccttcgagttccgggagactctgttctgagggactgcctacccctccaaatagagtgggaagccagagacgggactttgacacgagacttcctgcttcccctcctttctctcccttgttcattggctcacagggggtagcagtgctcggtccattagatgca

SEQ ID NO: 93740 - DNA, 30 bp, Homo sapiens
  chr17:77076343-77076373
  hypo
cggggatgagcgctcgtaccaggcagtggc

SEQ ID NO: 93741 - DNA, 30 bp, Homo sapiens; identical to SEQ ID NO: 30865
  chr17:77076599-77076629
  hypo

SEQ ID NO: 93742 - DNA, 30 bp, Homo sapiens
  chr17:77078503-77078533
  hypo
agcgcctctcactgcggctcaggggcgagg

SEQ ID NO: 93743 - DNA, 30 bp, Homo sapiens
  chr17:77081181-77081211
  hypo
tgcttcttgggacccgcgagcgtctggccg

SEQ ID NO: 93744 - DNA, 30 bp, Homo sapiens
  chr17:77081745-77081775
  hypo
tcgtttgcttctcacggccgccgggtagtc

SEQ ID NO: 93745 - DNA, 31 bp, Homo sapiens
  chr17:77084213-77084244
  hypo
aacacaagcggctgccgcatgtagccactca

SEQ ID NO: 93746 - DNA, 191 bp, Homo sapiens
  chr17:77084536-77084727
  hypo
ggcgtgtggcagaatcgcaccgccccggctccccagcccaccgccatgcagggctcgcgtgcgggaaaactaatatgccggcgtttaagcctgtgcccctctgctgggtgtaactgcgctgaaataaatgatctgacaatgtgaagcgtgcagtcgagtcctggtgtgatggggcgcgggcagcaccagcc

SEQ ID NO: 93747 - DNA, 215 bp, Homo sapiens; identical to SEQ ID NO: 30868
  chr17:77113341-77113556
  hypo

SEQ ID NO: 93748 - DNA, 30 bp, Homo sapiens
  chr17:77126522-77126552
  hypo
gttggcagtggagggcgggcacaggctggg

SEQ ID NO: 93749 - DNA, 927 bp, Homo sapiens
  chr17:77126789-77127716
  hypo
gggtctcacagagcccgataccgagcagtcttctgacacagtccctggaacgagtggagtgccctgtccttcagcccgggcttggtgcgggatggggcctgccatgctctaagctctggcctccctgcctggaggcgggacctggcccaagcctcaaagccgaagcacaaattcctcatcagtgaagatccagagccgccgtggtgctaggacacggtgcgcgggaatcagccccgcacctgcaaggcagcgtgctctgcgtgccctgcgtgtgccccatgtgtactgtgtgccccgtgtgtgagcatgtgtgccccatgtgtgctgtgcccccatgtacttgtgtgtaccgtgagccatgtgctgcgtgtcccgtgtgtgctgtgtgccccgtgtgtgcacatgtgcgccccgtgtgtgctgtgtgacccgtgtgcttgtgtgtaccgtgtgtgagccatgtgctgcgtgtgctgtatgctgtgtgctccgtgtgttctgtgcactgtgtgtgccctgcgtgtactgtgtgctctgtgcccatgtgtgctccgctcagtctccatgtgccctccgtgtgtattccatgtgccctccgtgtgctgtgctctgtgcacgctgggaacagcgctagagcgtctgtgcttctggacaggaaaacaagcccctcgtctaccttcaccgtcttccagctgaacgttggtagcacctccacccacagacgcggctgcaaaccccacggcgtgagcccacctgacgcagcacccaccaccacccgcaggagcctcaggccttcctgttaagcgtcgccactccgctatctgctgaccttcacgctcactccaactccaaacctgggcctggtctctcacacgttaggaagccacggatcatgttttcatgcacgggtattttcttttggtaact

SEQ ID NO: 93750 - DNA, 101 bp, Homo sapiens; identical to SEQ ID NO: 54671
  chr17:77178962-77179063
  hypo

SEQ ID NO: 93751 - DNA, 248 bp, Homo sapiens; identical to SEQ ID NO: 54672
  chr17:77179081-77179329
  hypo

SEQ ID NO: 93752 - DNA, 102 bp, Homo sapiens; identical to SEQ ID NO: 11540
  chr17:77179380-77179482
  hypo

SEQ ID NO: 93753 - DNA, 159 bp, Homo sapiens; identical to SEQ ID NO: 11541
  chr17:77179617-77179776
  hypo

SEQ ID NO: 93754 - DNA, 221 bp, Homo sapiens; identical to SEQ ID NO: 11542
  chr17:77179799-77180020
  hypo

SEQ ID NO: 93755 - DNA, 52 bp, Homo sapiens
  chr17:77194210-77194262
  hypo
gtgctacggttgcatcgtgtggggtgggctgtcatcccggaagtgctacggt

SEQ ID NO: 93756 - DNA, 30 bp, Homo sapiens
  chr17:77259778-77259808
  hypo
tgttgttgcctagaacggtgcctgacacac

SEQ ID NO: 93757 - DNA, 30 bp, Homo sapiens
  chr17:77361651-77361681
  hypo
agtgcccactgaagccggcgcggcggcagg

SEQ ID NO: 93758 - DNA, 30 bp, Homo sapiens
  chr17:77395128-77395158
  hypo
gcagggttggagtgacgcggctacaagccc

SEQ ID NO: 93759 - DNA, 30 bp, Homo sapiens
  chr17:77395379-77395409
  hypo
cacaaatgaggaaaccgaggcaccgggagg

SEQ ID NO: 93760 - DNA, 30 bp, Homo sapiens
  chr17:77768372-77768402
  hypo
ctatgccaagctcacgctcactctctcccc

SEQ ID NO: 93761 - DNA, 30 bp, Homo sapiens
  chr17:77768672-77768702
  hypo
agccatgtcggacccgggtgccattgggat

SEQ ID NO: 93762 - DNA, 30 bp, Homo sapiens; identical to SEQ ID NO: 30873
  chr17:77769050-77769080
  hypo

SEQ ID NO: 93763 - DNA, 175 bp, Homo sapiens; identical to SEQ ID NO: 54682
  chr17:77771455-77771630
  hypo

SEQ ID NO: 93764 - DNA, 310 bp, Homo sapiens; identical to SEQ ID NO: 54685
  chr17:77774930-77775240
  hypo

SEQ ID NO: 93765 - DNA, 30 bp, Homo sapiens; identical to SEQ ID NO: 54686
  chr17:77776701-77776731
  hypo

SEQ ID NO: 93766 - DNA, 191 bp, Homo sapiens; identical to SEQ ID NO: 54687
  chr17:77777712-77777903
  hypo

SEQ ID NO: 93767 - DNA, 484 bp, Homo sapiens; identical to SEQ ID NO: 54688
  chr17:77777943-77778427
  hypo

SEQ ID NO: 93768 - DNA, 30 bp, Homo sapiens; identical to SEQ ID NO: 54691
  chr17:77781709-77781739
  hypo

SEQ ID NO: 93769 - DNA, 30 bp, Homo sapiens; identical to SEQ ID NO: 30876
  chr17:77791080-77791110
  hypo

SEQ ID NO: 93770 - DNA, 571 bp, Homo sapiens
  chr17:77807458-77808029
  hypo
actagaactctgaggccgggcgcagagctgccctgtccgttccgggggtccatctccagcggggaagggcaggagagggcgagccccgccggcaccgcgtggaaggggcctccgcccaggtctgacagccgccgcagggggaacatggttacctccgctccgggcgtcctcaccctgggggccagcctgggtctctcgcggttggcgggttggcgagaggggagcccgccccgaggccccaggtgctcagctccccgcccccccgcgggaatggcgcttccccttccgacgccctccggctacaccgtcacgtactccttgaaagtaacggtgaggcagttcgcggtgacgtcggtgataattatattcccaaagaagggcttgaactcgctcagcgactctgcaggttcgtcctgggcctcggctggaggcttctccgccgtcgtggtgggtgccgctgccgccgccaccgccaccgccgccgacgccggtgtctcgggcttcacctggagggagctgggcggctccccggcctcgctgcgcgtcttgacgcagcgcaagtctatgggtt

SEQ ID NO: 93771 - DNA, 30 bp, Homo sapiens
  chr17:77808376-77808406
  hypo
aaggcctccttggtcggggacagcttgcgg

SEQ ID NO: 93772 - DNA, 194 bp, Homo sapiens
  chr17:77808686-77808880
  hypo
tcttcatcttgcccccaatcccgttgcccgtcacagcctctttgggggccggcatcattccgttgggggggcccttctcggagcctttgcctggagcacccgccgcaccggccaggggcttcaccgcccccaggtagcctttggcccccgcaccttgcgcccacttgtcgggcgggtggctcttggcccccagg

SEQ ID NO: 93773 - DNA, 351 bp, Homo sapiens; identical to SEQ ID NO: 54697
  chr17:77813599-77813950
  hypo

SEQ ID NO: 93774 - DNA, 100 bp, Homo sapiens; identical to SEQ ID NO: 30880
  chr17:77824716-77824816
  hypo

SEQ ID NO: 93775 - DNA, 50 bp, Homo sapiens
  chr17:77825516-77825566
  hypo
atgaagctggtccacccgtacgggctggcaagagccgttggccacattct

SEQ ID NO: 93776 - DNA, 64 bp, Homo sapiens
  chr17:77900546-77900610
  hypo
ccccttgcccgggcagggatacggcggcacagagatgggggccgatggctaggacctgaactcc

SEQ ID NO: 93777 - DNA, 31 bp, Homo sapiens
  chr17:77908724-77908755
  hypo
cccgccccccgtgctccgggaggaccaggag

SEQ ID NO: 93778 - DNA, 31 bp, Homo sapiens
  chr17:77911917-77911948
  hypo
ccggggcaacagctgccgcggggtttttggc

SEQ ID NO: 93779 - DNA, 194 bp, Homo sapiens
  chr17:77912318-77912512
  hypo
cagcggttcaaaggcacgaggtatctagtgaaatgctaggaccagggacgctattcccctggagcaggcgggtggggaaggagtgctccaaagcaggcattattaggacacagactctccagagtcccagttgtttagccctccaaattctcagcctactgccacccgactgtgcagagcggacaataaagtgg

SEQ ID NO: 93780 - DNA, 154 bp, Homo sapiens
  chr17:77913050-77913204
  hypo
tgatggggctccaggacggtctcctcaaaaggctcttaggcagacagacctgggaacttggaagtacctgctggacgacctgggttcatggagaaaagagaagccgagaaggtggaggaggccggtaagtggtgacctccgctttcctgctgag

SEQ ID NO: 93781 - DNA, 43 bp, Homo sapiens
  chr17:77913690-77913733
  hypo
tggtcagctaatacactaccacgtccctgggacaaagcagatc

SEQ ID NO: 93782 - DNA, 388 bp, Homo sapiens
  chr17:77914565-77914953
  hypo
ccctgtccccttcacgcccagccccaccccctcccgtgcccagggcctctgaggaggtcccctcaacccctgtccggtgtcgggggcccgacctatctgcggaagccgaagccgtcctgcggcgtctttgggcccttcttgccttccctcagggacttgggggaaggcatctccaccgtgcccccgtagggacagctctccgagccgggatggtggccggtgcactccaccgcgggcatggagccgctgtcccacatgcctgacccgcacagcttacacagatcgtgcaggctgcaggggatccggggcaggaggcggaactggtacagcaaactcctcgcctgcagacagaggacggggggtgaggaggggccgggggacagcctgg

SEQ ID NO: 93783 - DNA, 31 bp, Homo sapiens
  chr17:77915952-77915983
  hypo
tccccgtagatggccacgatggccacgcaga

SEQ ID NO: 93784 - DNA, 189 bp, Homo sapiens
  chr17:77917678-77917867
  hypo
acgattttttttaattcgggagtggtgggaatgaagcctctcagaccgtccatgccgtgcttcccttcgttaatgcagatcgtccaccctgcacgtccacgtccagcaggctgagccaggagggaaacctagacccgggccaggggcgagccgatgaccgcatgcaaaggcggcgtgtggtaccggcac

SEQ ID NO: 93785 - DNA, 350 bp, Homo sapiens
  chr17:77918539-77918889
  hypo
ggtctgaagccagccacgtgggacgggaaggcagtcgccgtatggggggctaatgtgtggctgtgggtggggggcggcgaggcggacaggggcagcaggcagggtggccacggtggttcaggggccatggtcccaacctccccagccctggcccctgccctggtcacctggtagtgggcccagcaggcctcccagatccgcagcgcttcggcctcggggaactcccgcttgaagcacagaaggagccagcggtggcagaagagcatctgcaggccgtcctcgcccagcgagaccaggtgctggtagaagcgcacgtgcgtcagccgcagcagctcgcgcaggtacagctg

SEQ ID NO: 93786 - DNA, 376 bp, Homo sapiens
  chr17:77919323-77919699
  hypo
tgttttagggcaggaaggggacgtatctgagccccaggatgctcgattcctgccattaaggtcatctcccaatgatgtgggacaagatcggggctatttctggcagcactcgggcccaggccgctgacttcatcaatgccgctggaaaatcaatctccagcattcagtgagtcacccagccatgcgctgccatgagccgtcagaggcgaatggcgttggacactgtaactgcctccccaagcaatgtggacacccgacgtcacacacacccgttgatgcagagtgagcaggcttggctgggttcagccccccggcccaggtggagttagatcacagctggggggatcctggggcagagctcggggccacatgcccc

SEQ ID NO: 93787 - DNA, 698 bp, Homo sapiens
  chr17:77921126-77921824
  hypo
gggctgggtgtgatggtgccacgtcttccttgccagccagggagcttgggccaggttgtcacgtgcaggggtggaaggccaccagagcggcccacacaacgcggcctctggacctgcagggagtcagagggccatccccggaggccgagataggctaagccgcccatatcccacgggcaagtcctatcctggcgttcccactgcccactgacctacagcagccaagccacgcatcaccacggcaaccccggctacaacgggagaggcaacacgggccctcacatgcccttggacgcacccatccccctgagcctcaccagttgtttctccatgtcctcgtcccggggtgagctgacgaagatcgtgttctgcatcaaacccacaaagcaccagaaggtgtctgactcatccaggacctcggccaagatgggcgccaccaggtccgacatcccttgggaatagccgacggcagggttgtacacggcgtagttcagcaggatcctcctgggaggcggtggagacagcagtgggtggggatgaccctcaccgcggcacactgcccagcctgcagaaccctgggccgtggaccctgccttccctcgcttgccttcacctcagtggaaggcagctgtgccaccatctcagagcccaagcttagcttccagacacacagacccttgctttgcaaaaggtaatgg

SEQ ID NO: 93788 - DNA, 30 bp, Homo sapiens; identical to SEQ ID NO: 30888
  chr17:77922760-77922790
  hypo

SEQ ID NO: 93789 - DNA, 211 bp, Homo sapiens
  chr17:77923479-77923690
  hypo
ctcggcggggtgggccgggctggccccggcggttaccttttctgctggatctcagagtactcctttcgcttctgcagccgcagcgcctcccgctcctccgacgtggactcgtggctgtaatagcgcagcaggaagggccagacctccccgcggattgacacatcaataccgccaaagaaaatggcctggaggaagcggcaaaagttgggga

SEQ ID NO: 93790 - DNA, 171 bp, Homo sapiens; identical to SEQ ID NO: 30890
  chr17:77923949-77924120
  hypo

SEQ ID NO: 93791 - DNA, 347 bp, Homo sapiens
  chr17:77926414-77926761
  hypo
cacaggccaactcccaggaggcgcccagagatgcttcctacctgaagaaaaggcggagggagcgcatgtggcccaggtccacgcggaacacgccgcaaatctgctccagggcgcacacccgctgcggctcgtcccagcgtggggtctgcaggaggccgttgctgtccgggaaccgcaggccggcgtcggagctggacggggggctggtggaacaggttatgtgatgatcgccacacttctccctgcccacactacccagagggggacgggggtcatgggggagtcatttaaacctacgcaccaagcttaaacacacatacaggcacggctgaatatgccctgtaaac

SEQ ID NO: 93792 - DNA, 31 bp, Homo sapiens; identical to SEQ ID NO: 30891
  chr17:77928736-77928767
  hypo

SEQ ID NO: 93793 - DNA, 208 bp, Homo sapiens
  chr17:77928996-77929204
  hypo
ttccataagctcaaactagagcgaaggtgatggagacctcagttcgctttcattggggtacgtctggcaggtaccccaggccctgtgtggtcatggaggacgaggtctggtgcccctcgaggccggctgctgtggggtgggggttgcatcgtgtctcttcatcttcagctcccagccctggcttggcgcagaacacacagacatttaa

SEQ ID NO: 93794 - DNA, 64 bp, Homo sapiens; identical to SEQ ID NO: 30892
  chr17:77930368-77930432
  hypo

SEQ ID NO: 93795 - DNA, 31 bp, Homo sapiens
  chr17:77932289-77932320
  hypo
cacaggcgtgagccaccgcgcccagccctga

SEQ ID NO: 93796 - DNA, 93 bp, Homo sapiens
  chr17:77937608-77937701
  hypo
tttgcatttccccgatgattaatgatattgagtaccttcatgtgcttatcgggcattcgtgtctcttctttggagacacgtcttttcaaatcc

SEQ ID NO: 93797 - DNA, 84 bp, Homo sapiens
  chr17:77946277-77946361
  hypo
ctaaaaaggaaggagattctgacacaggctacagcatgaatgacacctgacgttacgctaagtgaaagacgccagacacagaag

SEQ ID NO: 93798 - DNA, 31 bp, Homo sapiens
  chr17:77949673-77949704
  hypo
atggcagcagcagctccggcaggcggctctc

SEQ ID NO: 93799 - DNA, 34 bp, Homo sapiens; identical to SEQ ID NO: 30894
  chr17:77951520-77951554
  hypo

SEQ ID NO: 93800 - DNA, 169 bp, Homo sapiens
  chr17:77953073-77953242
  hypo
gagcacacgcgctccggggacgcacacccacgcccagagcacacacgctccagggatgcacacccacgccctggaccccagcagagggatcaagggctcaggcatccccagtgccgccaatcacgtggccctctcgaggtgaagctgcgacactgtgtggaaacccagg

SEQ ID NO: 93801 - DNA, 62 bp, Homo sapiens
  chr17:77954475-77954537
  hypo
ccacatggcttggtcccgcctttcagccccccagggttcactcgaaccgcctccgcgcaccc

SEQ ID NO: 93802 - DNA, 30 bp, Homo sapiens; identical to SEQ ID NO: 30895
  chr17:77955152-77955182
  hypo

SEQ ID NO: 93803 - DNA, 270 bp, Homo sapiens
  chr17:77955470-77955740
  hypo
tcaaagaagcacctcccacaccggaggcaagggacgcgccaccctcggagcggctccctcggctcttctgtaatctcagcaagaacgtgctcactgcacataacgctgaacctgccacgggcacgaagcagacccacatccgtccctgcagcagcagcctcggcccaacctcaatcccactcctccaagggcgcgccagggaacagcaggacgcggccctccggggcttccctgtgcgcacacacacacgcacacacacacacatgcaca

SEQ ID NO: 93804 - DNA, 101 bp, Homo sapiens
  chr17:77956293-77956394
  hypo
tctgcacacaatacaccgaacctgtgtgtgcacgtgtgtacaggtaccgtgcatctctttaaacattccctgaggcttggcgtggtggtggctcaggcctg

SEQ ID NO: 93805 - DNA, 485 bp, Homo sapiens
  chr17:77975730-77976215
  hypo
gccccggaacaaagacgggaagggcaaagtgtgtcctgattcgtgtgccaccgctcacttcttcgcccacctccaggagtttctaatcctcctcgggcttgcctggagggttgggcagaaaaggaacggcaggaaacgcagaagggatccggaacgagcagagctttgtgagtccagggcgacacccccagggccttccgtgggagctcctgcaaggatgcttcccagcactgggtcctggcccaccaagcgcactggctctagctcattctcagagactggactcttccccgagagcctcatttctgtcctctgtgccgtgtaggaggacaggggccattacaccaacgatgaacgataacgccgttaataattcagccgctgccgctgatactcggtcgacaaggagccttttcctcctaaaggcagaaagcacttagatgccgtttattactgcctcgcacgccctgcggggtgggctggca

SEQ ID NO: 93806 - DNA, 182 bp, Homo sapiens; identical to SEQ ID NO: 30896
  chr17:77976564-77976746
  hypo

SEQ ID NO: 93807 - DNA, 306 bp, Homo sapiens
  chr17:77980904-77981210
  hypo
agctgcaactcgccacgttcagcgagcctcccctggaccgggctgacacaggcctgaggtgcgagccacaccgagcccgcggccatgtggccaagaggcattttctgagccttcatcaggagcagggccgggctgtggtaagcaccccccagcacggtctccgggtggggacgagtcccaggccaggctcgctgaccccataccccaggctggtgctcaaccctcacgccgactctgccctacaagggggttcttggccgcacttcacacccgtgaggcatctgcgttttggatgtgggaggtaat

SEQ ID NO: 93808 - DNA, 30 bp, Homo sapiens; identical to SEQ ID NO: 30898
  chr17:77982972-77983002
  hypo

SEQ ID NO: 93809 - DNA, 554 bp, Homo sapiens
  chr17:77983869-77984423
  hypo
ggcatcacaggtgacgcaggtgagtgcttcctgcccaggtcaggccttgggggcctcccgagagcccacgcccagaaccaggaactcacctgctgtcactttccagaaacacggagccgcggctctcggccagcgccgcgctgatgggcgagaggcagaagggcgaggagaaggtgtctgagtctgagtcaaaggagctgtctctgctcacgccctcggctgacagttccaaagagccatcctcctccccggcctcgggccgcggctcccgcccctcctcggtgacatcctgcggactgaccgtcgacaagatcccggaggggctgcaagcaggctgcgaggctggctgggcaccatccacccccaagccctgcgccagcttctcctcatcctctggcgcagggctggcgagcatgcggtctggaacactctgggccaccaccaggatgtcctcatctttgggggtcagggtaggccgcagctccgtcggggagggctggtgggaggctcctgagctccgggtgcgccggccccgagggcggggtgccttgcga

SEQ ID NO: 93810 - DNA, 31 bp, Homo sapiens
  chr17:77987118-77987149
  hypo
aataacctgggctgtgcgaccctggagcctc

SEQ ID NO: 93811 - DNA, 68 bp, Homo sapiens
  chr17:77987435-77987503
  hypo
caaggttgtggacttgcgttctgtctcacagcagtacgtgtcgcctcggcacccggtgggttctggtt

SEQ ID NO: 93812 - DNA, 31 bp, Homo sapiens
  chr17:77989974-77990005
  hypo
actgtaggattctactcgtgtgaggtcccta

SEQ ID NO: 93813 - DNA, 32 bp, Homo sapiens
  chr17:77991172-77991204
  hypo
caacccccttaaaaaacgtaaaaaccggccag

SEQ ID NO: 93814 - DNA, 31 bp, Homo sapiens
  chr17:78007923-78007954
  hypo
aattaggaactactaacgcaatcaccaaaat

SEQ ID NO: 93815 - DNA, 101 bp, Homo sapiens; identical to SEQ ID NO: 54705
  chr17:78009417-78009518
  hypo

SEQ ID NO: 93816 - DNA, 580 bp, Homo sapiens; identical to SEQ ID NO: 54706
  chr17:78009923-78010503
  hypo

SEQ ID NO: 93817 - DNA, 21 bp, Homo sapiens
  chr17:78021779-78021800
  hypo
aaaaaacaagccgggcgcggt

SEQ ID NO: 93818 - DNA, 176 bp, Homo sapiens
  chr17:78022347-78022523
  hypo
agctcctcaatggtgtcgctgtctctccccccagtgatccccccaggggtgcccgatgcccaccccagggaaggagacctgccagtgttccaggaccagatccagcagcccagcaccgaggagggggccatggcagagagagtggagtccgaggggagtgacgaggaagcagaaga

SEQ ID NO: 93819 - DNA, 79 bp, Homo sapiens
  chr17:78024049-78024128
  hypo
cctgcgcagccgccaacgaggagcgcaaaaagtgtaaggcaacccggcagccccacacgccatccggtcctggagggtt

SEQ ID NO: 93820 - DNA, 188 bp, Homo sapiens
  chr17:78024750-78024938
  hypo
tggcccagggcctgaccgccgtaggatgtgtgcggcaggtcagtgggtagctttgaatcagatgagacagtgggggctacagcacgtgctatgcaacattaccgataaagcaacgtccttgcacagagctggtcatgtaggtgaccggggacagtggcttcctcttgtgactacggagtatttcagtc

SEQ ID NO: 93821 - DNA, 226 bp, Homo sapiens
  chr17:78026927-78027153
  hypo
caatgtccaggagaacagatgcgtgagttcaggaaagacgaatctgcagatagaaagactcgtgacgggccatgcagctgaaagagaaaataaacctccgcagacatagctggtgggatttccaaataccacggcaaaagaaaaaatgctgcaggcttccaggcgggaaaacccagatggcctcttgaggccgggcctgggctacgctttcatcaaggcctccatc

SEQ ID NO: 93822 - DNA, 20 bp, Homo sapiens
  chr17:78031663-78031683
  hypo
gatttcgtctcaaaaaaaaa

SEQ ID NO: 93823 - DNA, 428 bp, Homo sapiens
  chr17:78041282-78041710
  hypo
tttgctttttccatttaacagcgtgtccctagagcgcttcccaagtcaaaatataaacaccgctcgttcccgcctttctaccacatggcattccgctgggatacttctacggggaagcttcctgcccggggcatcgagggcgttcgcgtccgtctgttatggcggtgctgctgtagataaccggatccgcgaatgctaacgctcaccaggatgctatatagccttttttatattgcctatcaagcccggaatgtctgggtctagcgggtattgctaagtaggattgtgacagtcacgcccccggcagcggtgtttcaaagtcccctgacagctcagcatgttgtcacacttcaggactgtgccaatccgattgatgaagaaaatagataatcttgttttataaaacgtgcatgcgcagaatgttgagt

SEQ ID NO: 93824 - DNA, 213 bp, Homo sapiens
  chr17:78055252-78055465
  hypo
ccttagtgagctccctcgtgtggggcgcagctctgtgcactggctctctgatgtctcacacgtaactggctctccccgctgcatttctacagaggatgccagcatcaagccaaatccaccgacggcgagattgaggcctataagaaatccatcatgaaggaggaagaaaagaacgagaagctggcgagcatcctgaaccggacagagacggaa

SEQ ID NO: 93825 - DNA, 158 bp, Homo sapiens
  chr17:78061501-78061659
  hypo
aaaaccggtgcagctcggaggagctggagcagaacaaccgggtgacagagaatgagttcgtgcgctcgctgaaggtccggccgtgtccacgcagtcccggggctcaggacgatggagggcgggggtacggtccttgcggtgggcgttctgcaccagga

SEQ ID NO: 93826 - DNA, 30 bp, Homo sapiens
  chr17:78063748-78063778
  hypo
ccacaccaaggcctcggctctcccggggct

SEQ ID NO: 93827 - DNA, 48 bp, Homo sapiens
  chr17:78073419-78073467
  hypo
ccctagtgctggagcgccagcgcctggacaagcgactggctctcatcg

SEQ ID NO: 93828 - DNA, 121 bp, Homo sapiens
  chr17:78078980-78079101
  hypo
gacatcgacacccacgcacctcacaagggtggggtgcatgttgcaccactgtgtgctgggcccttgctgggagcggaggtgtgagcagacaatggcagcgcccctcggggagcagtgggga

SEQ ID NO: 93829 - DNA, 41 bp, Homo sapiens
  chr17:78083746-78083787
  hypo
cctgccatcagcagctcgggccctgccgggagctacaggcc

SEQ ID NO: 93830 - DNA, 113 bp, Homo sapiens
  chr17:78086405-78086518
  hypo
catttgtgatctcccgctcgacctttgctggccacggccgatacgccggccactggacgggggacgtgtggagctcctgggagcagctcgcctcctccgtgccaggtgagctc

SEQ ID NO: 93831 - DNA, 31 bp, Homo sapiens
  chr17:78096141-78096172
  hypo
aacgctctgccaggctcgccaggtctgcagt

SEQ ID NO: 93832 - DNA, 30 bp, Homo sapiens
  chr17:78112873-78112903
  hypo
atctcgtgtggcagcgtggcactgatgaga

SEQ ID NO: 93833 - DNA, 30 bp, Homo sapiens; identical to SEQ ID NO: 30909
  chr17:78122206-78122236
  hypo

SEQ ID NO: 93834 - DNA, 31 bp, Homo sapiens
  chr17:78135900-78135931
  hypo
gaagacctccaaccaacggtgagtggcatct

SEQ ID NO: 93835 - DNA, 201 bp, Homo sapiens
  chr17:78155301-78155502
  hypo
tgatggagagccaccgccacaggatcgtacgctgcatctgccccagccgcctcaccccctacctgcgccaggccaaggtgctgtgccagctggacgaggaggaggtgctgcacagcccccggctcaccaacagcgccatgcgggccggtgagcgcagctccctcttccccacctcttccagcttcccgtggcccacatggc

SEQ ID NO: 93836 - DNA, 173 bp, Homo sapiens; identical to SEQ ID NO: 30910
  chr17:78158228-78158401
  hypo

SEQ ID NO: 93837 - DNA, 41 bp, Homo sapiens
  chr17:78159114-78159155
  hypo
gctgggattacaggtgtgagcccctgcgctggccagcgctt

SEQ ID NO: 93838 - DNA, 403 bp, Homo sapiens; identical to SEQ ID NO: 30911
  chr17:78163402-78163805
  hypo

SEQ ID NO: 93839 - DNA, 201 bp, Homo sapiens
  chr17:78165106-78165307
  hypo
cgtcgtggcccacaggcgtactccgcgagggacagtgctcagagggagatttcccagagcctggtggagaaggactccctccgcaggcaggtgttcgagctgacggaccaggtctgcgagctgcgcacacagcttcgccagctgcaggcagagcctccgggtgtggtgagtgttcccggctgacccgagctggaggccagg

SEQ ID NO: 93840 - DNA, 30 bp, Homo sapiens; identical to SEQ ID NO: 30913
  chr17:78178841-78178871
  hypo

SEQ ID NO: 93841 - DNA, 34 bp, Homo sapiens
  chr17:78179549-78179583
  hypo
acctgggtgaccttgtcgccgacctctgggtccc

SEQ ID NO: 93842 - DNA, 85 bp, Homo sapiens
  chr17:78182031-78182116
  hypo
gcagcctggctcctgacggctggagcgacctggacggcctgctcagctgtgtccgccaggccatcgccgacgagcagaagaaggt

SEQ ID NO: 93843 - DNA, 30 bp, Homo sapiens
  chr17:78183302-78183332
  hypo
cattctcccagcaacgccgacgtcatccaa

SEQ ID NO: 93844 - DNA, 30 bp, Homo sapiens
  chr17:78188488-78188518
  hypo
gagccattctcctccgtgtacgcaaagtca

SEQ ID NO: 93845 - DNA, 97 bp, Homo sapiens
  chr17:78188822-78188919
  hypo
ggtcctcacctgtgcgcacaccagcttggctgagcagcagcggcaggctccgcaccttgtcgaaggagttgaagtggtgcacgtcctggtgcagccc

SEQ ID NO: 93846 - DNA, 30 bp, Homo sapiens
  chr17:78190968-78190998
  hypo
actctcaaagcctccgtcatccgctgcgtg

SEQ ID NO: 93847 - DNA, 130 bp, Homo sapiens
  chr17:78195403-78195533
  hypo
ccccgggatggccccgagcgcctgctgctgctcccctgcggccctgcagaggaggctgcccatcctggcgtggctgcccagctactccctgcagtggctgaagatggatttcgtcgccggcctctcagtt

SEQ ID NO: 93848 - DNA, 31 bp, Homo sapiens
  chr17:78217103-78217134
  hypo
aggctgagaaaatccacggcctcctcaaaga

SEQ ID NO: 93849 - DNA, 31 bp, Homo sapiens
  chr17:78222247-78222278
  hypo
cttagcacccctctcccggtcccctgcagca

SEQ ID NO: 93850 - DNA, 30 bp, Homo sapiens
  chr17:78236931-78236961
  hypo
gtcagtgcagagtggcgcgctttgtggatg

SEQ ID NO: 93851 - DNA, 184 bp, Homo sapiens
  chr17:78256872-78257056
  hypo
atacttctaagcctcaccccccgtaaaattataaataccgctatggttatgtagttcgagattctgggtcaaagaagactatgaaactgttcaatggaaaagcagacagcaggaggcactggcagcacagggcgcctaccagggcactcggccagtcctcaccgagaagtaagtggtccctaac

SEQ ID NO: 93852 - DNA, 680 bp, Homo sapiens
  chr17:78271716-78272396
  hypo
tgccttgatgacagagtgagactctgtctctaaacaatgaaaataaattttacaagttgctttatatttagatttactgttgccagatggcctgggttcaaaccccagctctgtcagtcaggaccctgcgttgactacttagccaggacccctgcttctgagatccctcccctgtcctgggagtttgttgtggggattcggtgagggcctgcaaaggagctgacgccctaggctgggggctgagggaagccctgtctcctgcgtgagttaaactctgctcagccacgcgcggtgctcctcttgctctgtgtgcacggtgcttgcttcctgttgggactccagactcccagggagatgactccctggccagctcagctcactgcgggatctttattcccttccagctggcggctgtacctggtgaacctgtgccaaagatgcatggacacaaggacgtacacctggctgggcgccctgcctgtcctgcactgctgtatggagctggccccgcggcacaaggatgcctggagacagcctgaggacacctgggccgctctggagggactctccttctcaccgttccgggaacaaatgctagatacgtaagtcgtagagttgtgcttatctacatgaatctgggaagactgactcctacattgtgcacccggagtcccggtggg

SEQ ID NO: 93853 - DNA, 32 bp, Homo sapiens
  chr17:78280675-78280707
  hypo
tctcatgtgatgcacttcgtagctgccattct

SEQ ID NO: 93854 - DNA, 30 bp, Homo sapiens
  chr17:78322832-78322862
  hypo
ggagcagatggaaccgagagatactcagga

SEQ ID NO: 93855 - DNA, 30 bp, Homo sapiens
  chr17:78323628-78323658
  hypo
cacaggcagggctccgaaacccacactcct

SEQ ID NO: 93856 - DNA, 30 bp, Homo sapiens; identical to SEQ ID NO: 30917
  chr17:78326747-78326777
  hypo

SEQ ID NO: 93857 - DNA, 60 bp, Homo sapiens
  chr17:78330432-78330492
  hypo
agaaccaggctcagcggctccagatagggcggaaccaggctcggcggctcccgcctctcc

SEQ ID NO: 93858 - DNA, 305 bp, Homo sapiens
  chr17:78337244-78337549
  hypo
agagatgttaaggacacatctcgctgacgcttctcacatcctagacaatgaaagtttaggtcgcaagcctgggacacaagtatacatgcagctaacagccggggcctctggtgggccggtgggaggggcaccgctcagccacgccctgctgtccgtctccccagaccctggacgcatttgccgcaatggcctgcacggagatgctgacaagaaacaccctgaagcccagtccccaggcgtggctacagttggtgaagaatctttccatgccgctggagctcatctgctccgatgagcacatgcaa

SEQ ID NO: 93859 - DNA, 259 bp, Homo sapiens
  chr17:78338097-78338356
  hypo
gggcttgcttgtaatcccagccgctgggcctggaccccgggtcccgcatctcttctcccgtctccctcctcgtttcacccttgggttccttggtgggagccgagtgagtgagtgagtggcgccctcttttgacagagcccagtggagtcggattttctccaccgcactcttcgtggagcacgtgctcctaggaaccgagagccgcgtccccgagttacaggggctggtgaccgagcacgtcttcttactagacaaggtg

SEQ ID NO: 93860 - DNA, 328 bp, Homo sapiens; identical to SEQ ID NO: 30919
  chr17:78354367-78354695
  hypo

SEQ ID NO: 93861 - DNA, 106 bp, Homo sapiens
  chr17:78387297-78387403
  hypo
tgcggcttgtcctgctacactctggtgggaaagacaccgcagcaggggagcagggtgcgcagggtgcagtgggtgacgctcattcgctgaaaactgaccctgcttt

SEQ ID NO: 93862 - DNA, 179 bp, Homo sapiens; identical to SEQ ID NO: 54711
  chr17:78388503-78388682
  hypo

SEQ ID NO: 93863 - DNA, 91 bp, Homo sapiens; identical to SEQ ID NO: 54712
  chr17:78389460-78389551
  hypo

SEQ ID NO: 93864 - DNA, 30 bp, Homo sapiens
  chr17:78395661-78395691
  hypo
cagccccctacgtgtcgggcttcctggcct

SEQ ID NO: 93865 - DNA, 30 bp, Homo sapiens
  chr17:78410002-78410032
  hypo
acacgtcctcgtctcgttcctgatcgaacg

SEQ ID NO: 93866 - DNA, 311 bp, Homo sapiens; identical to SEQ ID NO: 54713
  chr17:78428376-78428687
  hypo

SEQ ID NO: 93867 - DNA, 30 bp, Homo sapiens; identical to SEQ ID NO: 54716
  chr17:78450840-78450870
  hypo

SEQ ID NO: 93868 - DNA, 789 bp, Homo sapiens; identical to SEQ ID NO: 54717
  chr17:78451164-78451953
  hypo

SEQ ID NO: 93869 - DNA, 459 bp, Homo sapiens; identical to SEQ ID NO: 54718
  chr17:78452108-78452567
  hypo

SEQ ID NO: 93870 - DNA, 30 bp, Homo sapiens; identical to SEQ ID NO: 30921
  chr17:78489283-78489313
  hypo

SEQ ID NO: 93871 - DNA, 28 bp, Homo sapiens
  chr17:78518167-78518195
  hypo
cgtgagccacggcgcccggcctttcact

SEQ ID NO: 93872 - DNA, 156 bp, Homo sapiens
  chr17:78529318-78529474
  hypo
caaggtggacagctcacgggaagtgtcctgtctctccagggcgctgctgcctagacagactgacagacacggtagcaccaaattacaatacgcaagtataggtatcaatcatagtaattacaggtgagaatgacattattacggggagcatcttga

SEQ ID NO: 93873 - DNA, 128 bp, Homo sapiens
  chr17:78582534-78582662
  hypo
cgctgaggcccacccgcagtagctgaccgtgttggtcttgaccgtgttggtcttcagagtcctttggtgtttattgagtgcccttgggcagatgcgggaacaggtgcttctgcgcgtggttcagatgg

SEQ ID NO: 93874 - DNA, 189 bp, Homo sapiens; identical to SEQ ID NO: 30922
  chr17:78587645-78587834
  hypo

SEQ ID NO: 93875 - DNA, 268 bp, Homo sapiens; identical to SEQ ID NO: 30923
  chr17:78590517-78590785
  hypo

SEQ ID NO: 93876 - DNA, 30 bp, Homo sapiens; identical to SEQ ID NO: 30924
  chr17:78593766-78593796
  hypo

SEQ ID NO: 93877 - DNA, 339 bp, Homo sapiens
  chr17:78598705-78599044
  hypo
aaggacaggtgtgatcgcagcgttccccagctggctccaccccgatggggagtgtggaaggtgtgttgaggggtatccagagaaggcctccccaagaaattgatctttaaactgagatctgaagagagagtcagagccggccaggtgacccgggggaggggaactcccagcagagggaactgtggatttgagggccgagaggtgagtgtggccaggccgcagtgtaagtacgaggaatgagtagtgagtagatggtccacggagagtgaacaacgcaggcagtgaaggcactctaggagaaccaggcagcatcactgatgtgaacgaatgtaaactaaa

SEQ ID NO: 93878 - DNA, 242 bp, Homo sapiens
  chr17:78599525-78599767
  hypo
gaatgttggtgtggaccctcccgatgtggtgaagaccacgccctgtgcacgcttggaatgctggatcggtgagtatgcctccctcacgcgctgccacaaaggccgtctggccggctctggcctgggcggggctcgccaagcctgtggtctggtccaggggcccgtctccagctgtgcaaatctgaggggtttttctttctggagtcacatcacctttgagtaatttccgatgcgctcacctg

SEQ ID NO: 93879 - DNA, 31 bp, Homo sapiens; identical to SEQ ID NO: 30926
  chr17:78611563-78611594
  hypo

SEQ ID NO: 93880 - DNA, 31 bp, Homo sapiens; identical to SEQ ID NO: 30927
  chr17:78614859-78614890
  hypo

SEQ ID NO: 93881 - DNA, 30 bp, Homo sapiens
  chr17:78617735-78617765
  hypo
tgcgcactgcgtttcgtgtgcctgcgttct

SEQ ID NO: 93882 - DNA, 86 bp, Homo sapiens
  chr17:78620630-78620716
  hypo
aaagtttgtcggagtcgttgcctccacgctggcatggatgggagcagagtaggaaatgcctgttttctcaacggtagcgtccatcc

SEQ ID NO: 93883 - DNA, 48 bp, Homo sapiens
  chr17:78630807-78630855
  hypo
cattttaatccaatttctcagcgtttcgtcatttgaagaatagaagtc

SEQ ID NO: 93884 - DNA, 410 bp, Homo sapiens
  chr17:78642230-78642640
  hypo
cgcaggaggtcttcgcgccctgtcccctcagcatgcacttgttctcccagagtcggccatggccattcttccaggcttctggagaaaggacctcctcacaagcagacagcaaaataaaacaatgaccagtgtcagagaagatgacacccccgtctcccatgtttgcacgcctcagcagttctcagccgtatgcctatgcttttacaagtgaaaaccagctctttaggtcacttgcgtcacagggatctcctcttttctgtccagctacctggcagtcattattcctcattgtttattgttagaaaccttttgttcagcagagcggctgccccagggatcacaggcagagcgggtcctgctggagtttagtctcaggacagcggcttgtccgcattcgggtttgagcatga

SEQ ID NO: 93885 - DNA, 30 bp, Homo sapiens
  chr17:78642839-78642869
  hypo
ctttgctcggggacacgcttgccggaggcc

SEQ ID NO: 93886 - DNA, 236 bp, Homo sapiens
  chr17:78649356-78649592
  hypo
ccctcagacaccatgccagcacgggccttgggcgttgcctcctgcccctcaggccgcccatgactgcaacgccccactccagttcatgggctcaggcccgcggaacccggctgctctgctcaccgggctcgggcccgcagaacccggctgctctgctcaccgggctggccccagcttcactgctctcacaccagcacatccgtgaatttcagaacgtgcccctgcctgcttgtctg

SEQ ID NO: 93887 - DNA, 30 bp, Homo sapiens
  chr17:78654633-78654663
  hypo
aatcccacgtcgcacgtatgtgctgggctc

SEQ ID NO: 93888 - DNA, 251 bp, Homo sapiens
  chr17:78667553-78667804
  hypo
gtgctgtgggaaacagcgttttgccaggggccagagagctgactcagatagtgacctggaaaacagactgtggatcaggtgggcacgggcctggaacagggtccctgaaacacccagcaagaggctggggaatgtctggagagcccggcatggtccggagcgtccacgcagccagcagctcacatcctcttgctcctggcggccgatgctctgcgcagaaacgggcttggtctgaacggagagggacattg

SEQ ID NO: 93889 - DNA, 237 bp, Homo sapiens
  chr17:78668006-78668243
  hypo
tcgaggcagttgccccgtgctcacgaatccctgacacagctggtgacctctccaggtgacctcttcaagcctggtcccaggggcaggcatgcccgggcatggccctcgcagatggctttgctggcctggtctggcaaccgttgaataaatactgatttcccacccaggtgaggcgcatggtagatgtttgttctgtgcattgcgttggtcggcctccacagtcgcacaatctctcag

SEQ ID NO: 93890 - DNA, 30 bp, Homo sapiens
  chr17:78683257-78683287
  hypo
tgggcggacgctggcgcgctcttccgcagt

SEQ ID NO: 93891 - DNA, 30 bp, Homo sapiens
  chr17:78744800-78744830
  hypo
ctctcccggaaccatcgaggtgatcgctgc

SEQ ID NO: 93892 - DNA, 90 bp, Homo sapiens
  chr17:78745062-78745152
  hypo
ctgcagctcatccagcgatcactatcctgacccctctgagataatccctccttcctcacgctctccctctgccagcgctttcctcgtcat

SEQ ID NO: 93893 - DNA, 159 bp, Homo sapiens; identical to SEQ ID NO: 30930
  chr17:78759733-78759892
  hypo

SEQ ID NO: 93894 - DNA, 30 bp, Homo sapiens; identical to SEQ ID NO: 30931
  chr17:78760411-78760441
  hypo

SEQ ID NO: 93895 - DNA, 54 bp, Homo sapiens
  chr17:78760829-78760883
  hypo
gcccaccacgcagggcgcccttgatgcacacgcacctgccgcccccgccctgtg

SEQ ID NO: 93896 - DNA, 30 bp, Homo sapiens; identical to SEQ ID NO: 30933
  chr17:78768925-78768955
  hypo

SEQ ID NO: 93897 - DNA, 30 bp, Homo sapiens
  chr17:78771228-78771258
  hypo
tgagccgctgtgcccggccatgtcttttgc

SEQ ID NO: 93898 - DNA, 30 bp, Homo sapiens
  chr17:78773646-78773676
  hypo
tgatcggcacataacgtgacagatgggcag

SEQ ID NO: 93899 - DNA, 30 bp, Homo sapiens; identical to SEQ ID NO: 30934
  chr17:78774033-78774063
  hypo

SEQ ID NO: 93900 - DNA, 376 bp, Homo sapiens; identical to SEQ ID NO: 30935
  chr17:78775494-78775870
  hypo

SEQ ID NO: 93901 - DNA, 116 bp, Homo sapiens
  chr17:78789605-78789721
  hypo
atcctcccgactggcgaggtggcttccacgtgccccgtcaatcagggctggacagtccgtcacgtgcagagcatcctcccgactggcgaggtggcttccacgtgccccgtcaatca

SEQ ID NO: 93902 - DNA, 30 bp, Homo sapiens
  chr17:78795526-78795556
  hypo
gcaggtatcagctgcgtgttgaatacacgg

SEQ ID NO: 93903 - DNA, 37 bp, Homo sapiens
  chr17:78796144-78796181
  hypo
agtgcgcggggagccgactctcggacatgagaggagt

SEQ ID NO: 93904 - DNA, 30 bp, Homo sapiens
  chr17:78803459-78803489
  hypo
gtgcatggagagggcggcgtccacggcgac

SEQ ID NO: 93905 - DNA, 64 bp, Homo sapiens; identical to SEQ ID NO: 30938
  chr17:78811168-78811232
  hypo

SEQ ID NO: 93906 - DNA, 30 bp, Homo sapiens
  chr17:78811666-78811696
  hypo
ctcgtgtggaagcccgtccataatgctcag

SEQ ID NO: 93907 - DNA, 30 bp, Homo sapiens; identical to SEQ ID NO: 30939
  chr17:78812472-78812502
  hypo

SEQ ID NO: 93908 - DNA, 31 bp, Homo sapiens; identical to SEQ ID NO: 30940
  chr17:78817768-78817799
  hypo

SEQ ID NO: 93909 - DNA, 234 bp, Homo sapiens
  chr17:78818426-78818660
  hypo
gctgcacaggagcacggattcctacgtggtgaatgttctcggctgactttttaagtcgggccacggggctctgcccgccaggctcctctgtggaggctgccgagagcgctcctggacttgggcgcacggaggcaccctgtcctgctcctggcgttcgcctgtccacatgtgtccacattcactggaacccggggcacagccgaccccggccagatgagcggagggagggttcct

SEQ ID NO: 93910 - DNA, 30 bp, Homo sapiens
  chr17:78820878-78820908
  hypo
ttgtggcccagcgccgtaggttatgcactg

SEQ ID NO: 93911 - DNA, 31 bp, Homo sapiens
  chr17:78829655-78829686
  hypo
ctgcggaggagcagggcgcccctgagcctga

SEQ ID NO: 93912 - DNA, 30 bp, Homo sapiens
  chr17:78836324-78836354
  hypo
tggtgatggtcctccgaagctccgcccacc

SEQ ID NO: 93913 - DNA, 30 bp, Homo sapiens
  chr17:78856996-78857026
  hypo
cagtctgttcactccgggaggcgagcctgg

SEQ ID NO: 93914 - DNA, 31 bp, Homo sapiens
  chr17:78867125-78867156
  hypo
gcgccaggtgtgtgtgcgccagggtgtgtgt

SEQ ID NO: 93915 - DNA, 207 bp, Homo sapiens; identical to SEQ ID NO: 30941
  chr17:78872484-78872691
  hypo

SEQ ID NO: 93916 - DNA, 30 bp, Homo sapiens; identical to SEQ ID NO: 30942
  chr17:78873994-78874024
  hypo

SEQ ID NO: 93917 - DNA, 67 bp, Homo sapiens
  chr17:78874422-78874489
  hypo
ttctttcacaggaagcgacagcagcatcacccctcggtgctcacctggtgaccgtctgccaagggcc

SEQ ID NO: 93918 - DNA, 265 bp, Homo sapiens
  chr17:78876711-78876976
  hypo
gagttaattctgctcgggactctggtggcctgagaaggctcttcccgcagaaacagcctcatcccgagagcgctggcaggaacgcagatcagaggcctgggctagatgggaccagttttcacgactctgctagatacggtgacattttttacggttttgaaaatgagttaccatagaaatggatccaggatggactaatgcaagggaggggagggcgagaaaggaacacagccctgcggagcctggagccggccctggtgcagct

SEQ ID NO: 93919 - DNA, 110 bp, Homo sapiens
  chr17:78877956-78878066
  hypo
gagcggctggtcagcgtgattctcgtaacagccacaccgagttgtgggtgcagcccctgaggggtcaggaggggtcacaggaaaggggccgctgcggaagccctcggcct

SEQ ID NO: 93920 - DNA, 30 bp, Homo sapiens
  chr17:78880016-78880046
  hypo
aaaaaaaatgaggacgcagccatcgccgat

SEQ ID NO: 93921 - DNA, 30 bp, Homo sapiens; identical to SEQ ID NO: 30946
  chr17:78880733-78880763
  hypo

SEQ ID NO: 93922 - DNA, 229 bp, Homo sapiens
  chr17:78882479-78882708
  hypo
gcttcctgtaacctcggctctttaaagcaacacttctgataccagggttagggtttcagaaaatgcagccgccttaggagcctcattggcagctactttccactaaaacatcttccatttctctctctcaggagtttcctttaacagtgtttacactcagatttggagagtcctgctgcacctggctgctgacccctatccagaggtctcggacgtggccatgaaagta

SEQ ID NO: 93923 - DNA, 198 bp, Homo sapiens
  chr17:78894342-78894540
  hypo
gagtgggcagagcagagggttcgtcaccacggctccatgcggtactcccacgggcgcttccgtgcagggtggcaaggcgggagctgcacagaccccaggcggctcagcgtgacgtcccagggctcctgagtcaccggccccagcccagcagcgcctgagcctttgtgctccgtgagcgtctgagcatgtgtgggtttt

SEQ ID NO: 93924 - DNA, 30 bp, Homo sapiens
  chr17:78895049-78895079
  hypo
ctgggatgggccggcgctcagggaatggct

SEQ ID NO: 93925 - DNA, 31 bp, Homo sapiens
  chr17:78898616-78898647
  hypo
ctctgacagccctggccgccacaggttccac

SEQ ID NO: 93926 - DNA, 30 bp, Homo sapiens
  chr17:78911562-78911592
  hypo
tccgtgctgagcggcggtcacatcctagtt

SEQ ID NO: 93927 - DNA, 30 bp, Homo sapiens
  chr17:78915131-78915161
  hypo
gctgcaggcggccccggtcacagagactgt

SEQ ID NO: 93928 - DNA, 30 bp, Homo sapiens
  chr17:78923917-78923947
  hypo
agttaggaggctcccggggtcaggcttctg

SEQ ID NO: 93929 - DNA, 399 bp, Homo sapiens
  chr17:78935152-78935551
  hypo
ttcagggaagccccacgctgagcgtgccccctcccctacagccgcgtcatgacgtaccgggagcacacagcctgggtggtgaaggcctccctgcagaagcgtcccgacggccacatcgtgagtgtgaggtgaggagcgccgatatttagcagccgttctgctgtaaaaacattattttcccctccatttaaaatacgtccttggtatttaaacagctggaaggggatggcatttcgggcagtaattaactcctgccctggaactggccagaaagatcaggcgcagcccgtaggggcccaggggccacagctgctcccctgctgggggacacctgacctgcaggcgctttgggaactttcctgggctgccaactgcggagggttccggggggagttgggc

SEQ ID NO: 93930 - DNA, 30 bp, Homo sapiens
  chr17:78936277-78936307
  hypo
gcatctttgatccccggatgcctgagtcgg

SEQ ID NO: 93931 - DNA, 199 bp, Homo sapiens
  chr17:78936613-78936812
  hypo
agccagcctgtccccgtggtctagccggcctgtccccgcggtctcggcatctgcgcccatcttccatcctcaaagaagagggcagtgatgccgggaccctttctctccccacagtggctccgtcaatcagttcaccgccatctacaacagcagcggagagctcatcaacaacatcaagtactacgacggcttcatgggc

SEQ ID NO: 93932 - DNA, 30 bp, Homo sapiens
  chr17:78938329-78938359
  hypo
agggctcgggttgacggtggcttcccactg

SEQ ID NO: 93933 - DNA, 30 bp, Homo sapiens
  chr17:78939091-78939121
  hypo
gctctgtccccacacgttcctcacatacag

SEQ ID NO: 93934 - DNA, 203 bp, Homo sapiens
  chr17:78940078-78940281
  hypo
aacgcgaattgagacggactttgacaaaacacgaaatggtaatgtgaagctaagagcagagagtgaccaacagtaaacaacacgcgcagactccgcggctggcggctgtgtctttaaggaaactgcccaccccacctcaggggggcatcggtcagagcagagctctggggggtggggggacgttgcccgggtcccccctgctg

SEQ ID NO: 93935 - DNA, 186 bp, Homo sapiens
  chr17:78968279-78968465
  hypo
cactcacggagggccgcccggcctccatgcctggcgctcagtagcgtggccagggctcccagtgtgggctcggtgacgccaggccctctctctcttggcagcaactgaagcagcagcgggacaagctgaggcagtaccagaagaggatcgcccagcagctggagcgcgagcgcgccctggcccggc

SEQ ID NO: 93936 - DNA, 30 bp, Homo sapiens; identical to SEQ ID NO: 30949
  chr17:78968910-78968940
  hypo

SEQ ID NO: 93937 - DNA, 30 bp, Homo sapiens
  chr17:78973135-78973165
  hypo
tgaacgcactcaggcgccactggcctgctc

SEQ ID NO: 93938 - DNA, 30 bp, Homo sapiens; identical to SEQ ID NO: 30950
  chr17:78973676-78973706
  hypo

SEQ ID NO: 93939 - DNA, 31 bp, Homo sapiens
  chr17:79001595-79001626
  hypo
gccagctcggccagttcgtcccggcgccaca

SEQ ID NO: 93940 - DNA, 256 bp, Homo sapiens; identical to SEQ ID NO: 54722
  chr17:79008305-79008561
  hypo

SEQ ID NO: 93941 - DNA, 650 bp, Homo sapiens; identical to SEQ ID NO: 54723
  chr17:79008840-79009490
  hypo

SEQ ID NO: 93942 - DNA, 31 bp, Homo sapiens; identical to SEQ ID NO: 30953
  chr17:79020691-79020722
  hypo

SEQ ID NO: 93943 - DNA, 211 bp, Homo sapiens
  chr17:79027367-79027578
  hypo
aggggtgcctgctctgggttttctcctctgtgttcggacccttcggagtcaccagggtgacctctgccagtaatgctgtttcttctctgctttcttccagaccatcatggagcagttcaaccctagcctccggaacttcatcgccatggggaagaattacgagaaggcactggcaggtggaactgcgcccgggccccgtggggtgggagct

SEQ ID NO: 93944 - DNA, 30 bp, Homo sapiens
  chr17:79032984-79033014
  hypo
ggtctggtgatgcccgggcggctggagttt

SEQ ID NO: 93945 - DNA, 31 bp, Homo sapiens
  chr17:79040987-79041018
  hypo
ccctacagtaggactccggcaggggtgctcc

SEQ ID NO: 93946 - DNA, 31 bp, Homo sapiens
  chr17:79041934-79041965
  hypo
cctggcagacactggtcgcagccacgcaggg

SEQ ID NO: 93947 - DNA, 183 bp, Homo sapiens
  chr17:79042374-79042557
  hypo
ccccgcagtcagcagccgcacagacggagccagcactggagcccgtctcaggtggctccgctcttgtgtcccctgtccccgcttccctgccctggggagggtgcccccaagcctggtactgcagagaaggccacctcggtggctccttggttgtgacatgaagtcctgcgggagggcctgggg

SEQ ID NO: 93948 - DNA, 31 bp, Homo sapiens
  chr17:79044176-79044207
  hypo
attgaatgtgctctgccgggcaaccttggtc

SEQ ID NO: 93949 - DNA, 237 bp, Homo sapiens; identical to SEQ ID NO: 30956
  chr17:79045479-79045716
  hypo

SEQ ID NO: 93950 - DNA, 55 bp, Homo sapiens
  chr17:79047313-79047368
  hypo
tgctccatttgggattcggagtcaagcatttggggaccctcgggcagggtctgag

SEQ ID NO: 93951 - DNA, 375 bp, Homo sapiens
  chr17:79048251-79048626
  hypo
gtgccagtgtgtgtgcatgcacggatacatgtgaatgcctgtgtctgtgcgtgcatggatgcgtacgagttgcctgtgtgtgtgcacgtgcacagatgtgtgagtgcctgttcgtgtgcgtgcatggatgtgtgagtgcctgtgtgtgcgtgcacggatgcgtgagtgcctgtgtgcgtgcacggatgcgttgagtgcctctgtgtctgcgtgcacggatgcgtatgagtgcctgtgtgtgtgcatgcacggatgcgtgtctgtgcgtctgtgtgcgtgcacagatgcgtgtgagtgcctgtgtgtgtgcacggatgcataagtgcctgtgtgtctgtgtgcatgtacggatgcgtgtgagtgcatgtgggtgta

SEQ ID NO: 93952 - DNA, 581 bp, Homo sapiens
  chr17:79051338-79051919
  hypo
gcctgggtgacagagactctgtctcaaaaaaaaaaaaaagtaaaaatggtgaattttatgttatgtgaatttttctcaattttaaaaaaagagcctaatgctgggaggacggatgcttgggcttcccgcccgtcctgaggctggtggtgctgagtatgcgggtggctgtgggagcgggtgccgtctcaggtgcgagccagacaccgtgggtgcgggtgcaggtgtgggtaccgttttgggtgggagccgggcgctgtgggtgcaggttccacctcggagctgggtgctgtgggcacaggtgcgggtgccatcttgggtgggagccaggcactgtgggtgccagtgccatcttagatctgggcactctgggtgcaggtgccatctcggagctggatgctgtgggtgcgggtgccgtattgggtgggagccggacgctgtgggtgcaggttccacctcggagctgggtgctgtgggcacaggtgcgggtgccatcttgggtgggagccaggcactgtgggtgccagtgccatcttagatctgggcactctgggtgccggtgcgggtgtcgtcttgggtgggag

SEQ ID NO: 93953 - DNA, 35 bp, Homo sapiens
  chr17:79052329-79052364
  hypo
cgtattgggtgggagccgggcgctgtgggtgcagg

SEQ ID NO: 93954 - DNA, 31 bp, Homo sapiens; identical to SEQ ID NO: 30958
  chr17:79060230-79060261
  hypo

SEQ ID NO: 93955 - DNA, 238 bp, Homo sapiens; identical to SEQ ID NO: 30959
  chr17:79060659-79060897
  hypo

SEQ ID NO: 93956 - DNA, 210 bp, Homo sapiens
  chr17:79062264-79062474
  hypo
tgtccatcactcagtccgttttagagcatttttcaatcagcagtcactcctgggcccctggccccaccagtcaccagcctgccattggcctccgtagacttgcctgttatggacattctgcgtagctggaatcccacagtgtccggcctttggtgcctggtggctcacgtggcacggagggttcttaaagctcatcgtgccgtagcctgc

SEQ ID NO: 93957 - DNA, 157 bp, Homo sapiens
  chr17:79062727-79062884
  hypo
aggcctgaggcccccacgcagtcactgtggccctgccgcaccagctccctggttttcaggtgccctgcctcccactgccaggcctcttcaggagggccctgaccgcacacctggcctctgcctgccctccgcgctgctctgccgtgggccccgggtg

SEQ ID NO: 93958 - DNA, 98 bp, Homo sapiens; identical to SEQ ID NO: 30962
  chr17:79065508-79065606
  hypo

SEQ ID NO: 93959 - DNA, 56 bp, Homo sapiens
  chr17:79067465-79067521
  hypo
cccaggatcccccctccggctgccccccatctctgggtgtgcgaggcctatagcct

SEQ ID NO: 93960 - DNA, 31 bp, Homo sapiens
  chr17:79069908-79069939
  hypo
gcaccttctcttcccccgagtcctattcaga

SEQ ID NO: 93961 - DNA, 75 bp, Homo sapiens
  chr17:79072578-79072653
  hypo
gagccagggccacagacgcaagggctgccgagcggctgaccgccgggtcagggtggggaccgcctgctggctgcc

SEQ ID NO: 93962 - DNA, 306 bp, Homo sapiens; identical to SEQ ID NO: 30964
  chr17:79072863-79073169
  hypo

SEQ ID NO: 93963 - DNA, 240 bp, Homo sapiens
  chr17:79073766-79074006
  hypo
aattacgtgtccgacggctacaagaccgcactgacagaggagcgcaggcgcttctgcttcctggtggagaagcagtgcgccgtggccaagaactccgcggcctaccactccaaggtgaggcggctgggggctgcgctgtgccggcgctgggccttgctggcagaaatgacccaggcccctgccccagccccagccccgtgaacacaccggggcagtgtccaggctcgaactctcgtttat

SEQ ID NO: 93964 - DNA, 181 bp, Homo sapiens
  chr17:79074738-79074919
  hypo
cacatgctgctgccctcgtgacctctgagagacccctctgcccgtcatctgttgagggcccctccttgggccggtagactcttggccctgtgtttcccgctaggcgtcccccggcacagtcctgcggccctgtgtctcccgctaggtgtcccccggcacagtcctgcggccctgtgtctcc

SEQ ID NO: 93965 - DNA, 30 bp, Homo sapiens
  chr17:79077103-79077133
  hypo
tccccggccctttaccggcagccgcttctg

SEQ ID NO: 93966 - DNA, 681 bp, Homo sapiens
  chr17:79077360-79078041
  hypo
caagatcccggagcgcgcggtgcagctcatgcagcaggtggccagcaacggcgccaccctccccagcgccctgtcggcctccaagtccaacctggtcatttccgaccccattccgggggccaagcccctgccggtgccccccgagctggcaccgttcgtgggggtgagtctgtggcctctggaaagcttcacgggtgtgggtgggagggcagcttgttgtcagggcggggggccgccagggtgcagagtccaggggcccctgctgagggggcggagggttctctttccccctggtcttgcccggggtgggctccagcaacagcctgctctgcctgcttccctgcagcggatgtctgcccaggagagcacacccatcatgaacggcgtcacaggcccggatggcgaggactacagcccgtgggctgaccgcaaggctgcccagcccaaatccctgtctcctccgcagtctcagagcaagctcagcgactcctactccaacacactccccgtgcgcaagagcgtgaccccaaaaaacagctatgccaccagtaagggctccgctggggtgttgggctggggtccctggacgtgcctcctcagaccctacagtcatgccacaaccctcaataggggcctgggagaccctgaggctcacaattatgtgaccgtgtgtacctacat

SEQ ID NO: 93967 - DNA, 37 bp, Homo sapiens
  chr17:79078511-79078548
  hypo
agatgtgagtgtttctcgggggcgggctccaggcagc

SEQ ID NO: 93968 - DNA, 41 bp, Homo sapiens; identical to SEQ ID NO: 30969
  chr17:79079545-79079586
  hypo

SEQ ID NO: 93969 - DNA, 31 bp, Homo sapiens
  chr17:79080045-79080076
  hypo
gctccttgtctgctaccgcagggccatcccc

SEQ ID NO: 93970 - DNA, 30 bp, Homo sapiens; identical to SEQ ID NO: 30970
  chr17:79080644-79080674
  hypo

SEQ ID NO: 93971 - DNA, 538 bp, Homo sapiens
  chr17:79082609-79083147
  hypo
gccccaatctgtgctccgcccttgtcctgggtcttcctggagggtcaggaggccaacgggagctgctgaaaggggcattgctcggtgctggcggactcgccgcctgtggctgggcagcgtcgtgcagccaggcagccgtcctgtgctttgtttcacagtggcagcggcacgctggtgtccacagtgtgaggacgctgaccccgggcagccgctgctctgaagagcttccgcgccttccccctggtctcgtccgttttcctcctcagctctcgctggtttgttcttgggttgtttttcttttccacctgccccatgccttttggttggtgaccccagactctgtgatcccccagggtccatggtgctgctccatccgccccccctcccctgtgtttacgcgccccatcctgtgtgtcccagccttttgagcagaaactgccaggcaggacctgctgggccgtgcggggcaccctcggcctcaccctgcagtgtctgtggcactcactgcttttctaaggctcgccgtgagccaggtcta

SEQ ID NO: 93972 - DNA, 124 bp, Homo sapiens; identical to SEQ ID NO: 30973
  chr17:79083369-79083493
  hypo

SEQ ID NO: 93973 - DNA, 38 bp, Homo sapiens
  chr17:79084534-79084572
  hypo
caagtgaggcaggctccgcaggcgccgtccagggagag

SEQ ID NO: 93974 - DNA, 40 bp, Homo sapiens
  chr17:79086356-79086396
  hypo
gaggcccaagcgcccacgctggacccgattccagaagggc

SEQ ID NO: 93975 - DNA, 31 bp, Homo sapiens; identical to SEQ ID NO: 30976
  chr17:79086874-79086905
  hypo

SEQ ID NO: 93976 - DNA, 517 bp, Homo sapiens
  chr17:79093913-79094430
  hypo
ggccgccaggagccgcggccgctcccaccccttcctgcgggagcgcgacccccagccccgggcagaccccgggtggcggcggcccacctggtcaaagaggtagacggtgacgtcgtcgaagaaggacacggccttcttcttgcgttccaggtcctcgcagaaggtctcggacagcaggctgggcatcttgagcaggctgcgcaggttgcgcgcgctctggctctcagccaccaccacgggcaccgccggcgcctcctcttcgctgtcctcgctaggctcctggacgctgtagcagcggagctcctcgtcagactcgtcgctgtcctcactgtcctcctcctcctcctccggccggccctccaaggccgcagggaggccgggcagagccaggcggagtggggctctgggggtgcctgggccccccatccgcttttgtggggccggccctgacaacagtcctgggggcccctggaactcagagctgttgccttctgatctcagcggaaccggggtcagc

SEQ ID NO: 93977 - DNA, 30 bp, Homo sapiens
  chr17:79094801-79094831
  hypo
ccgtgtctcgggcccggggccctcaccctc

SEQ ID NO: 93978 - DNA, 222 bp, Homo sapiens; identical to SEQ ID NO: 30978
  chr17:79097036-79097258
  hypo

SEQ ID NO: 93979 - DNA, 30 bp, Homo sapiens; identical to SEQ ID NO: 30979
  chr17:79098045-79098075
  hypo

SEQ ID NO: 93980 - DNA, 30 bp, Homo sapiens; identical to SEQ ID NO: 30980
  chr17:79099231-79099261
  hypo

SEQ ID NO: 93981 - DNA, 189 bp, Homo sapiens
  chr17:79099769-79099958
  hypo
gggctgacggggccacgtgtccttcgccacttcttccagcatgtccccccggggtccccaggggctgggcatcctggcccaagcaggacagaaccctccctccagggtccttcgaagcagggtctgtctccctcaagccccaaagcgagggcttagcagagtgtggggttggcgcggggctgcagggtg

SEQ ID NO: 93982 - DNA, 57 bp, Homo sapiens
  chr17:79100245-79100302
  hypo
gatgaaggtgcaggacgccacaggccacctcacaggccatgcgctgcagggtccggg

SEQ ID NO: 93983 - DNA, 31 bp, Homo sapiens
  chr17:79102269-79102300
  hypo
cttcccgaaccagccacggccgatttccttc

SEQ ID NO: 93984 - DNA, 357 bp, Homo sapiens
  chr17:79102633-79102990
  hypo
gcagggcccggagctcgacccgtcacatgggctgcaccaggcaggcagtgtggctgagcaagaggctggggccacggcacagagagggcactggagcggcccacccccaccctgccgcaggctggcatcccacgccgggcgcaccaaaggctcctttgttgggggctgcttggcacggccccgcacggagcacactggcccattctccccgagggccaggccgggtgaggtcagcgggaggaagggtcagtgaggcccgggacgaaggggccagcgctggcagagcccactcatgcctgcccacgccccgagggattccccgaattctgctcccacgtcaactgcccagagggctga

SEQ ID NO: 93985 - DNA, 256 bp, Homo sapiens
  chr17:79104767-79105023
  hypo
agagctgagtcttccggtctccccagatcacacccaacgcccagcacctgggccccggagggaggccaccccatctccccacccagccctcacctgagcgcccaggctgcttggccatgggcaaggagacctccgtgagtggcaggacgtacacgtcgggcccgttctgtgctgccgtggccggggagccctgcgccaggtcggctgcgtactcgtccccctccgcattctcaaactcctgcgggccgggccgggc

SEQ ID NO: 93986 - DNA, 30 bp, Homo sapiens; identical to SEQ ID NO: 30985
  chr17:79105544-79105574
  hypo

SEQ ID NO: 93987 - DNA, 36 bp, Homo sapiens; identical to SEQ ID NO: 30986
  chr17:79108203-79108239
  hypo

SEQ ID NO: 93988 - DNA, 31 bp, Homo sapiens
  chr17:79113512-79113543
  hypo
ccccagccctccactgcgctgctgaggctgt

SEQ ID NO: 93989 - DNA, 55 bp, Homo sapiens
  chr17:79114514-79114569
  hypo
ccgtggggctgtgagccgtggggccgggagaccgtggggccgtgagccgtggggc

SEQ ID NO: 93990 - DNA, 185 bp, Homo sapiens
  chr17:79135398-79135583
  hypo
cagccctggagctgccgtgacggcccccgggttctctcaggaacctcctggagcgtgggtgctgccggaccccatttcagaggtgaaacagacacagagaagttatgagacctgtccatggtcacacagcagggcccggcccaggacaccagcccacgccagaactctcccgtgaggcagggtca

SEQ ID NO: 93991 - DNA, 183 bp, Homo sapiens
  chr17:79135803-79135986
  hypo
tcctggagaatgtgccggaatgagagaaatgttctccctgacccatgcctgggagtgtggggcctcacacccaccccctccccgagtgccgacacccacaccctccccgagtgcccgcacccatgctggtaggtgggagccggacccgtgcccagggcccacggcctgcgtgtgaccgctccc

SEQ ID NO: 93992 - DNA, 30 bp, Homo sapiens
  chr17:79155141-79155171
  hypo
gcccccgcccggcgcggccccccgcccgtc

SEQ ID NO: 93993 - DNA, 31 bp, Homo sapiens; identical to SEQ ID NO: 30987
  chr17:79164758-79164789
  hypo

SEQ ID NO: 93994 - DNA, 376 bp, Homo sapiens
  chr17:79166574-79166950
  hypo
acctcactgtacagccgctgccgttgctgctgcagcgcccactgctcctgctccaggtgctgctggaacctgcgggacggtcaggactggctctcgggggccgggacgggcggtcccaggacccacccaccgcaggggcacgggccgaccacaggcctgactcacagctggagagcagccctccggggccctgcccctccccctcggcagtcaaggcccctcaaagccaccgcccgggggcaggcaaggccacgaggaacttgcccatcagccaagcgcagcaattccctgagctccaggccctcgtggcactttgggaagtggctgtggagccgcgtccaggcccccttttccctcagcccgtgtgccggcctca

SEQ ID NO: 93995 - DNA, 37 bp, Homo sapiens
  chr17:79168719-79168756
  hypo
tcccggcgggctttctcggtggcgctcattaattctt

SEQ ID NO: 93996 - DNA, 30 bp, Homo sapiens
  chr17:79173808-79173838
  hypo
gaggatgagccctacgtcgcaggtggccaa

SEQ ID NO: 93997 - DNA, 176 bp, Homo sapiens
  chr17:79176000-79176176
  hypo
taggctcaggcccccccccaccgccccaagatcggtcacctctcagcctcctcctccgtcacctccttccgcctgggcaagcccgtgctgcccccagtattgttccgggctgagtgggtggcactggagacattcttcggcagcttcccaaagccgctgctctcactgccctcaca

SEQ ID NO: 93998 - DNA, 30 bp, Homo sapiens
  chr17:79177508-79177538
  hypo
ttcagtgcttgctacgtgctggcagcattg

SEQ ID NO: 93999 - DNA, 34 bp, Homo sapiens
  chr17:79183371-79183405
  hypo
agcgctcggagaagcggacgctaagcgaggatca

SEQ ID NO: 94000 - DNA, 30 bp, Homo sapiens
  chr17:79193747-79193777
  hypo
cggcactgccaggacgccgggacacaggcg

SEQ ID NO: 94001 - DNA, 31 bp, Homo sapiens; identical to SEQ ID NO: 54726
  chr17:79197096-79197127
  hypo

SEQ ID NO: 94002 - DNA, 30 bp, Homo sapiens; identical to SEQ ID NO: 54727
  chr17:79205354-79205384
  hypo

SEQ ID NO: 94003 - DNA, 30 bp, Homo sapiens
  chr17:79206045-79206075
  hypo
ccgcaaagccccagcggtgacaggaaggag

SEQ ID NO: 94004 - DNA, 30 bp, Homo sapiens
  chr17:79206356-79206386
  hypo
gcggcccccacccgcgttctctgggagcag

SEQ ID NO: 94005 - DNA, 71 bp, Homo sapiens
  chr17:79216890-79216961
  hypo
cgtccctgggccagcgtgctgcgcaagtctgttcccgcgcagaagtacacaccggcgacgggacagcgcta

SEQ ID NO: 94006 - DNA, 68 bp, Homo sapiens; identical to SEQ ID NO: 30991
  chr17:79226307-79226375
  hypo

SEQ ID NO: 94007 - DNA, 30 bp, Homo sapiens
  chr17:79226872-79226902
  hypo
cttgcccagggcgatcgagctgtgcctcct

SEQ ID NO: 94008 - DNA, 30 bp, Homo sapiens; identical to SEQ ID NO: 30992
  chr17:79230307-79230337
  hypo

SEQ ID NO: 94009 - DNA, 30 bp, Homo sapiens
  chr17:79232593-79232623
  hypo
acgtttttccagtccgaattaccaaatcca

SEQ ID NO: 94010 - DNA, 30 bp, Homo sapiens
  chr17:79233105-79233135
  hypo
cagatgacgcccagcgaatctgactgagcc

SEQ ID NO: 94011 - DNA, 51 bp, Homo sapiens; identical to SEQ ID NO: 30993
  chr17:79234792-79234843
  hypo

SEQ ID NO: 94012 - DNA, 30 bp, Homo sapiens
  chr17:79239557-79239587
  hypo
ggtgctgacatctccgtacctaaggaaaca

SEQ ID NO: 94013 - DNA, 30 bp, Homo sapiens
  chr17:79248036-79248066
  hypo
gaggagcaccagcacgtgggggaggcaccc

SEQ ID NO: 94014 - DNA, 30 bp, Homo sapiens
  chr17:79253926-79253956
  hypo
attatggaagagcccgatccacatttacag

SEQ ID NO: 94015 - DNA, 30 bp, Homo sapiens; identical to SEQ ID NO: 30994
  chr17:79254214-79254244
  hypo

SEQ ID NO: 94016 - DNA, 30 bp, Homo sapiens; identical to SEQ ID NO: 30995
  chr17:79254580-79254610
  hypo

SEQ ID NO: 94017 - DNA, 31 bp, Homo sapiens; identical to SEQ ID NO: 30996
  chr17:79256352-79256383
  hypo

SEQ ID NO: 94018 - DNA, 30 bp, Homo sapiens
  chr17:79279038-79279068
  hypo
atccctggaggctgcggttggggaggtggt

SEQ ID NO: 94019 - DNA, 97 bp, Homo sapiens; identical to SEQ ID NO: 30997
  chr17:79294050-79294147
  hypo

SEQ ID NO: 94020 - DNA, 219 bp, Homo sapiens; identical to SEQ ID NO: 30998
  chr17:79296319-79296538
  hypo

SEQ ID NO: 94021 - DNA, 181 bp, Homo sapiens; identical to SEQ ID NO: 54732
  chr17:79319123-79319304
  hypo

SEQ ID NO: 94022 - DNA, 39 bp, Homo sapiens
  chr17:79505401-79505440
  hypo
atgggcgacagggcccggccacaccgtggtccgcaggct

SEQ ID NO: 94023 - DNA, 30 bp, Homo sapiens
  chr17:79505666-79505696
  hypo
cctcagggtctgcgtcgcagctttcttttc

SEQ ID NO: 94024 - DNA, 30 bp, Homo sapiens
  chr17:79506958-79506988
  hypo
tcacggctcctacccgcactcatcgcggac

SEQ ID NO: 94025 - DNA, 20 bp, Homo sapiens
  chr17:79542140-79542160
  hypo
tttgagagggagtctcgctc

SEQ ID NO: 94026 - DNA, 436 bp, Homo sapiens
  chr17:79542406-79542842
  hypo
gtgagccacagcgcccagctgacacttggtttcttaaaagcaccacttagaaaatagtccagtccgtgtgcaacgactggatgcacacagaactggcagctggcatttctcaggggccagctgtgtgcacagagccacttcgtcctcacaaacacactggtcacaggcactactgctgtccaagacaggaagggttacaaagatgagtgaacctcctaaagcaatcggcaaggacagctggacagctgtgtagagactgggccccccacactacgtgcgcaggctccccgcctcccaagtcagtgccggtgctgcagggccagggcacacgcaggcctccctcctgcctttggggaaccttgaagttgaggctcggaccccaacagccgtctcacactgagtaagactctcccacctccaccgcaagggaagatgc

SEQ ID NO: 94027 - DNA, 30 bp, Homo sapiens
  chr17:79543329-79543359
  hypo
ggccgttgcacaacgcgggtttgaactgag

SEQ ID NO: 94028 - DNA, 139 bp, Homo sapiens
  chr17:79544178-79544317
  hypo
acagctggctccttgaaggaacgctgttcccttgctgctcctatgtcccctcagctccccacggcgctctgacccgccccaccccatcactgtgtagtcctcgccagactgcctgtccgcacagctctccagacagagg

SEQ ID NO: 94029 - DNA, 21 bp, Homo sapiens
  chr17:79566025-79566046
  hypo
tattttaggccaggcacggtg

SEQ ID NO: 94030 - DNA, 99 bp, Homo sapiens
  chr17:79597563-79597662
  hypo
gattacaggtgtgagccacaacgccagctattacttactttccctaaaaaacgtttaaaaatggccagacacagtggctcacgtctgtaattgtagcac

SEQ ID NO: 94031 - DNA, 31 bp, Homo sapiens
  chr17:79608475-79608506
  hypo
ctcccacccccatctccgcttgccccacaca

SEQ ID NO: 94032 - DNA, 309 bp, Homo sapiens
  chr17:79609052-79609361
  hypo
gggagctgatggagcggctgctgaccctgcagagctgaagtccgcatggggggctgcagtgagagccacaaggctggcacccaaacatgcctgcctgagtcacacctgcgctgagcttaggggacccacagagccagggctggggagaaatatatctccacaagcagaggcctccttaagctctaaaatgtgattcttcacatgactcaactgtgactccggcatctgggtagggctcgcacctcccccattcccatgcccagggctgcactgttcacagactagcccagggccgcagtcaggaccagc

SEQ ID NO: 94033 - DNA, 56 bp, Homo sapiens
  chr17:79611881-79611937
  hypo
ctccagtgctgccctccgccatccggcatcctcccatccctcgaaggctctgccac

SEQ ID NO: 94034 - DNA, 537 bp, Homo sapiens
  chr17:79612315-79612852
  hypo
tgggggggcccctgcccgcagaccccatgctggggctggcactgggagggctggtggtcagcgcagtgagcctggctggctacctgggcgccctctgtgagaacacctgcctgttacgtggcttctctgggggcatccttgccttcctggtgcttgaggccgtggcgggggccctggtggtggccctctggggcccgctgcaagacagcctggagcacaccctgcgtgtggccatcgcccactaccaggacgacccagacctgcgcttcctcctcgaccaagtccagctcgggctgaggtgctgcggagctgcctcctaccaggactggcagcagaacctgtgagtcttggagtgggcgagggacagggccaccacagggtcgcagaggccacacacccttgtgcgtgtacacacagtcactcacacgtacatactcattcgtgcatgcccacatgcatgcacacgtatacccacatgtacacgcatatccacactggcacgtctcgtgctcacaggtttcacgtgtgtggacacac

SEQ ID NO: 94035 - DNA, 198 bp, Homo sapiens
  chr17:79619103-79619301
  hypo
taagagtgtcatgcccgtgtgtgcgcacacgtgtgagtggacactcctcggtgcgttgatgggagcgcggtgcctgtgtgcgcacacgagtgagtggacactcctcggtgcactgatgggagcgagatgcccgtgtgtgcgcatgtgtgagtggacactcctcggtgcattgtgccatggctgtccctgggtggcagt

SEQ ID NO: 94036 - DNA, 88 bp, Homo sapiens
  chr17:79626615-79626703
  hypo
aagacttcatctcaaaaataaataaataataaaaaagaaattaaacggtgatgtggaacactctttaaattgtcgttcaccacatttt

SEQ ID NO: 94037 - DNA, 30 bp, Homo sapiens
  chr17:79632434-79632464
  hypo
cagcgatgccttgggcggcctggtgccgtc

SEQ ID NO: 94038 - DNA, 205 bp, Homo sapiens; identical to SEQ ID NO: 31004
  chr17:79634635-79634840
  hypo

SEQ ID NO: 94039 - DNA, 30 bp, Homo sapiens; identical to SEQ ID NO: 31005
  chr17:79635155-79635185
  hypo

SEQ ID NO: 94040 - DNA, 43 bp, Homo sapiens
  chr17:79637466-79637509
  hypo
aaaaaagcaaaaaaagcgtgagtggaggcgggagggggagggg

SEQ ID NO: 94041 - DNA, 343 bp, Homo sapiens
  chr17:79648939-79649282
  hypo
gtggcagccacacacctgccccggacccccagctgcaccacctccctaccgagccatgcttccggctgtaacccgagggagcccccgcccccgctgtgctccctctcagctcagggacgcgtacattttattgaagagtatcagcaccgatgcttctgcaagttgttctgcagaaaggagacctaagagctgcacacaggatgcagagagctgggtggggtcagaggcgtccatcacaaactggggaaaaagaaaaagacagcagcaatgccccgctgccaaacttcctcccctgggcctcacagacctggcactgggagagcaaaactgcattttttaatta

SEQ ID NO: 94042 - DNA, 61 bp, Homo sapiens; identical to SEQ ID NO: 31007
  chr17:79653802-79653863
  hypo

SEQ ID NO: 94043 - DNA, 1226 bp, Homo sapiens
  chr17:79655114-79656340
  hypo
taggctgaggtgcaagtgccccggagcctgcttgcagcagcctctgatcgcacgccgtcctgcacgtcacaccgggacggcgtccccgagagggccgtagacgcgaggccaggctgcgctctaaccgggggagaggatggctgcagggggtctggagcccgctctgaatttggaggcatttctggagcggctgccccccgcgtctccccggctgtgactggaaggaggggcgtggccagagccccgcagtacccctgtgttctcagccccaacaccacgctgccaccgtcaggcctgccgggtcctgcctgttggaggctgacgggaaccggggatcctggggtgggcaggtcccgtggggaaagggagagacagatggtcaggggcacagagacgcggcgttgtttggctccagcaagtagaggcaggcgtgaggtttgaactcagggtctgggaacaggttggtgcatggcccccacgccccactcggggggccctccctggcctctgtgtcagccccatctgctcagaggctgaggtctgccagctgcttcctcacaccgaggcctctggcgcctggagtgtcctgcgaccctcacccccttctccctgcctgcagagacaagtggaggtaaacgtccgtaacaagatcctgtacctgatccaggcctgggcgcatgccttccggaacgagcccaagtacaaggtggtccaggacacctaccagatcatgaaggtggagggtgagtcaggactgaggttgggaccaggttgaggcttggaactgctgggcagtcaggctcaacgggcacagtggcgaggggcctgggaagatgggttgttccctgtgttgggagggaggagggcggtggcctggagccagggaagaccgtgcatgtgagggcgggttcagaccggctcctgcctttctggacccacggcccacgggcaggggcaggcagtgatggcagacaacacacaggtgaaaaggcagcagacagcctgtttcagagtggcaggactcctgggggccgggttgggctgtgcagtcagggaaggcctctgaaggagctgtcccaagtgtcgagactggaacagaagccagagccggcgtgagcaggcaggcagcacccgtgggcagacactcagggttgaggccccagggcagaaaggtggccagcgtgccagaggagagtgcagccgggcctgtgcgccgagggcctcca

SEQ ID NO: 94044 - DNA, 36 bp, Homo sapiens
  chr17:79657391-79657427
  hypo
ctgtgtgtcctgggcggaggcgtagcagctgtctct

SEQ ID NO: 94045 - DNA, 30 bp, Homo sapiens; identical to SEQ ID NO: 31009
  chr17:79658809-79658839
  hypo

SEQ ID NO: 94046 - DNA, 30 bp, Homo sapiens
  chr17:79659532-79659562
  hypo
cttgccttgagccacgtcaagtcccgtccg

SEQ ID NO: 94047 - DNA, 30 bp, Homo sapiens
  chr17:79660229-79660259
  hypo
ggtttcccgagtgccgtaggaaggtcttcg

SEQ ID NO: 94048 - DNA, 30 bp, Homo sapiens; identical to SEQ ID NO: 31010
  chr17:79663024-79663054
  hypo

SEQ ID NO: 94049 - DNA, 65 bp, Homo sapiens
  chr17:79664244-79664309
  hypo
cctgaatgcgacagcgagcatttcctgaaaccagcaggtgctgggctgccgatcctcgtctgtag

SEQ ID NO: 94050 - DNA, 30 bp, Homo sapiens
  chr17:79668266-79668296
  hypo
ctcacagggggagacgcatacccgaggccc

SEQ ID NO: 94051 - DNA, 30 bp, Homo sapiens
  chr17:79673954-79673984
  hypo
ccatagcgaaagaacggacacatttcaccg

SEQ ID NO: 94052 - DNA, 114 bp, Homo sapiens
  chr17:79674300-79674414
  hypo
tcctgggccccgggcgaggtcccgccctcccgtggtcactggctccgcccccagcaccaggcgcccagtggagccgtttgggagaattgcctgcgccacgcagcggggccggac

SEQ ID NO: 94053 - DNA, 154 bp, Homo sapiens; identical to SEQ ID NO: 31011
  chr17:79682600-79682754
  hypo

SEQ ID NO: 94054 - DNA, 252 bp, Homo sapiens
  chr17:79687597-79687849
  hypo
cagctgcaactccccgcgagaccccgcagctgggtgggatgaacaagcaacgcagaccacaagcgagtgcctgggagggagtggcccagggtggttctggagccattgtgggtgagggtcgagggccaccgaggtcccgcgcaccgctgcctgccctgcagtggctttaacagttagttttgccaaagcctctccactcaccagcaggcggtctctgtcttcagggattgtgcctgcgtccctcgggcacct

SEQ ID NO: 94055 - DNA, 31 bp, Homo sapiens
  chr17:79695442-79695473
  hypo
tacaggcgtgagccaccgcacctggccagct

SEQ ID NO: 94056 - DNA, 103 bp, Homo sapiens; identical to SEQ ID NO: 31012
  chr17:79705355-79705458
  hypo

SEQ ID NO: 94057 - DNA, 30 bp, Homo sapiens
  chr17:79768944-79768974
  hypo
cgggggcagccttggcgtgatgcctcccag

SEQ ID NO: 94058 - DNA, 248 bp, Homo sapiens
  chr17:79769294-79769542
  hypo
ccgcaatgccatccacgcgaatctgtttgcgtccttcgtgctgaaagccagctccgtgctggtcattgatgggctgctcaggacccgctacagccagaaaattggcgacgacctcagtgtcagcacctggctcagtgatggagtgagcccccctcggcggccccaggcaggtgggtgggtgggcagccaggcaggtggccacgtagccgcgctcacactgcacctgtaccaggcggtggctggctgcc

SEQ ID NO: 94059 - DNA, 261 bp, Homo sapiens
  chr17:79772551-79772812
  hypo
gccacacagagaggtccggcctacgccagtcctcgtgccacacagagaggtccggcctacgccagtcctcgtgccacacagagaggtccggcctacgccagtcctcgtgccacacagagaggtccggcctacgccagtcctcgtgccacacagagaggtccagcctacgccagtcctcttgccacctcgtggtgggtgggcgccctgcttgccagccagggagcaccaggaaagagctgcctcctgcgtgctggacacagg

SEQ ID NO: 94060 - DNA, 31 bp, Homo sapiens; identical to SEQ ID NO: 31013
  chr17:79781434-79781465
  hypo

SEQ ID NO: 94061 - DNA, 30 bp, Homo sapiens
  chr17:79792319-79792349
  hypo
gacccactgaggcccggaggggtcgggttc

SEQ ID NO: 94062 - DNA, 103 bp, Homo sapiens; identical to SEQ ID NO: 31014
  chr17:79803002-79803105
  hypo

SEQ ID NO: 94063 - DNA, 30 bp, Homo sapiens
  chr17:79804312-79804342
  hypo
tgccctccaggaagcggtggcagaactctg

SEQ ID NO: 94064 - DNA, 238 bp, Homo sapiens
  chr17:79826933-79827171
  hypo
tgtagtcagtcttgtcaactgcggcacaaggaagagggcggtcagcggccccgcttccccgcctggcagcacgcacccaagcggccccctctgccctgcccggggccccactcactcttgacgcctttcctgtacgtatgctggatgtacttcatgccggacactatctctcggttaacctgcaggacccgaagcgaggatcagggaaggtcggtccggaccccagccccagccccgc

SEQ ID NO: 94065 - DNA, 178 bp, Homo sapiens
  chr17:79844240-79844418
  hypo
atctgtagtgacatctgtgaccgacagcgaaagaaccacccttagtcacactcccttgcccatgactcagccaggcccatcccagcgtggaagcaagcttagcctgggatgtgtgcccgcaggagccgctggtgcagggaaaggtttctgcagacacggcatgcattcctgtctgtct

SEQ ID NO: 94066 - DNA, 310 bp, Homo sapiens; identical to SEQ ID NO: 31016
  chr17:79846190-79846500
  hypo

SEQ ID NO: 94067 - DNA, 121 bp, Homo sapiens
  chr17:79851769-79851890
  hypo
ttgctgctggggcttgctgttctcccgtagctcccctgcagccctgaccctctgggcccagagccctttacttgttatttgttttaatagaaacggggctcatagcagggcataggggttc

SEQ ID NO: 94068 - DNA, 32 bp, Homo sapiens
  chr17:79863960-79863992
  hypo
ctggcccccactcacccggcaggccagcacgc

SEQ ID NO: 94069 - DNA, 247 bp, Homo sapiens
  chr17:79870435-79870682
  hypo
gccttcttcaccagcacgcaggggagtcgccagtgagaaaatgggatcctgccacctgccaaaaagggaaagcggcatcaggcgggcctgggagcctctcgcagtcacacctgccccagctcgggaaagctgtctgcggtccctgccttcccatccccttccctcccgtgtcaactgcggcggggctctggttggcggcagcttcattgttaccaagctgcagaacggatgtgggagaggtcacctc

SEQ ID NO: 94070 - DNA, 30 bp, Homo sapiens; identical to SEQ ID NO: 31019
  chr17:79871390-79871420
  hypo

SEQ ID NO: 94071 - DNA, 30 bp, Homo sapiens
  chr17:79872354-79872384
  hypo
tcacatcgaacacccgcacgtactccctgt

SEQ ID NO: 94072 - DNA, 440 bp, Homo sapiens
  chr17:79873415-79873855
  hypo
aggagagctggagctcaggcccgtgctgccgctgcccagcctatgtgggaggccatgcctggcccgcttacctaacgcttctccctttctgaagcagtgtccacactccattagggccccggtagtctgggatagacgctgcctgcatgtcgagaaaaaaggtaagccaagtcaaaaggcaccactgtaggtactggcagaattcccagaaacggaaagccactgtcactcctgccgcattccgggctggcctgcatgttggcctctattcattccacaggctgacctgcctgagcccatatggagtgtaccccaattcggctcctcccttctacctggacttccgtttcccgcctggcctggctcatccttccaggctgcacgcagccctgcctgcctccggaagcctctctggcaccgagcacaaagctgggctctgt

SEQ ID NO: 94073 - DNA, 30 bp, Homo sapiens; identical to SEQ ID NO: 31020
  chr17:79878636-79878666
  hypo

SEQ ID NO: 94074 - DNA, 127 bp, Homo sapiens
  chr17:79880222-79880349
  hypo
ctggtacaaaaggggttggggcgaccccacgtcaccgccgaactgaccaatcccaacatacaaaacacacgacgacaatgacgagatcaaaggggctcagcccggcgcccctggggtacaggttgtg

SEQ ID NO: 94075 - DNA, 37 bp, Homo sapiens; identical to SEQ ID NO: 11566
  chr17:79886040-79886077
  hypo

SEQ ID NO: 94076 - DNA, 501 bp, Homo sapiens
  chr17:79887407-79887908
  hypo
tcctcacctccccagcggctcctggccagctccccacggagagcccaggacacttgtccctggacacagtggtgcagccatgcttgggccaaaccatgaggccaccagaaccgcgaaaggctactgtactgagagggatactgcgagagaggcccacaggtttccaagcatccctctcactccgcacactcatctccacgaccggctttaagtgcggccttgaggcctggctccctgtttggacttctctgcacctccaggagctcacttcccgtcacagctggatgcctcctcccgcaggcacctcccgggcatcctcccgccccaggctgcaccttctgtgggactggcccccgcaggcacctcccgggcaccctcccgccccaggctgcagcttctgtgggactgagccccgcaggcacctccccggcatcctcccgccccaggctgcaccttctgtgggactgagccccgcaggcacttccccggcatcctcccgcc

SEQ ID NO: 94077 - DNA, 31 bp, Homo sapiens; identical to SEQ ID NO: 11567
  chr17:79889370-79889401
  hypo

SEQ ID NO: 94078 - DNA, 30 bp, Homo sapiens
  chr17:79890687-79890717
  hypo
gggccgggagggggcgtgggatcccacctc

SEQ ID NO: 94079 - DNA, 573 bp, Homo sapiens
  chr17:79892729-79893302
  hypo
gggagcagggacagatgtgcccggtggtcccgggaagtgcccgccgccgccagcttcccccgcagtccttacgtaggcggggccgctgccactgagccccgtgacggcatcaatcaggtcctcttccacctccgtgcagaagcccacgctgctcagcagctgctccatgagcctcccgtcctccacctgggcgtgcgtgcctgtggcatacacggtggccccctcccgcaccacgactggagtgttggtcatgcagcggatgaccctgggggctggccgaaacgctgacagcttctggaagagaaaccagcgtgtccgtctggccatggacgcagtgcctagatgcactcaccccaccaagcagtgcccgagctctcccagtgggccgggacgctgcaacccttttgcagatgaaaactgaagtactgagggcccgggctctagacagcccctctccacaccccactgggcctgcggtgctaccttctcaatggagctgatggtgacgccggccgcgcaggacaccacaatgtgtctgtcctcaatgtcggcgcctatttcatccaggatgaa

SEQ ID NO: 94080 - DNA, 273 bp, Homo sapiens
  chr17:79899060-79899333
  hypo
ctgtcatggaccagcgccccgaagatgatgcaggccacgaaggcctggacgatcttgaggagccccgacaccgtggccatatagctgctcacctggccgggccgggcccgcgtcagggccacctccacagcgtaggccaggaagaggagcccggcgaagacactggctgccaggcggaagtccctggcagcacagccggcgggctcgggggaacactcccgccgggcaaagtacagcggatacaggaccgcagccgtcgcgcatagcagggtg

SEQ ID NO: 94081 - DNA, 171 bp, Homo sapiens
  chr17:79906752-79906923
  hypo
agccccctctccctcccgagctctgtccttgtggggagtcctgtccaaggccctgcctggaggtctggctctggaggccccgagaaggaggccaccagactcccccggaccccttctctcacctccagccctcggtctccacatctctgaccttgtcgtctccattggctg

SEQ ID NO: 94082 - DNA, 158 bp, Homo sapiens
  chr17:79913288-79913446
  hypo
tgtggcgcagctcgcggccgaggttctggatgtacagccgcaggccctcctgcaccggctgccccgtcaggtgcacgttgtccaccgtcagctgtgcctcgtcaaacagccactgcaccacgaacacagggcctgcgggcggcggggctcagttcggc

SEQ ID NO: 94083 - DNA, 70 bp, Homo sapiens; identical to SEQ ID NO: 31027
  chr17:79914599-79914669
  hypo

SEQ ID NO: 94084 - DNA, 189 bp, Homo sapiens; identical to SEQ ID NO: 54747
  chr17:79917291-79917480
  hypo

SEQ ID NO: 94085 - DNA, 85 bp, Homo sapiens
  chr17:79942954-79943039
  hypo
cacacctacacatctgcgcacatacccgcacacacctgcatgtaaacatgcacacacacgcacatctgcacgcacatgcgcacac

SEQ ID NO: 94086 - DNA, 414 bp, Homo sapiens
  chr17:79951968-79952382
  hypo
ctggggctggatgtgacggcatgtgcccgtctcccgggctgccatgcacatcaggcatgtgtgggaggcgtgctgcatatacctgcccacccatgcacgggtccagctgtgcctcctgcggggcgaggctcagaaagacactggtggcagagtccgacatggacttataagcacggcctccccggccacaggcaagcgggcgtgagcggagtgcagcgcccctccctccatgcttcggtgacatcaggcgtcggctttgaaggaggacatcaggcggtggagacaggggcacctcctcttagtgggcggcttaagatgaaagcccagacgtcggtaccctgactctcaggctcctgagtacaggtgtccgtgagccgcattccggagccagtgctgctcgcccctcctgtgcgg

SEQ ID NO: 94087 - DNA, 30 bp, Homo sapiens
  chr17:79953893-79953923
  hypo
cacgacgctgcagtcgctgggcctgaccgg

SEQ ID NO: 94088 - DNA, 124 bp, Homo sapiens
  chr17:79961364-79961488
  hypo
ctccccagccatgtggccactcgctggcaggcccgggccatgagcatcggtgcggatgctgtgctcagcctgggggcggcgccgtctcctctgggtgggattcgaggcctgatgcctctgcctg

SEQ ID NO: 94089 - DNA, 83 bp, Homo sapiens
  chr17:79964097-79964180
  hypo
gtgtgtgtgtccttgcgggtgcatgtgcatgcttggggggcgtgtgcgtgtccttgcgggtgcacgtgcgtgtttgggggtgt

SEQ ID NO: 94090 - DNA, 157 bp, Homo sapiens
  chr17:79964537-79964694
  hypo
gctggggaggggggacgggaattcccccaggggccaggccttgactgccctgcagggccctcgctgtcgcttttttccctcacagtgtctcatccctcaacctctgttttccatccaaaggcatctctgtgaatccacctggcgcgggagcggcgct

SEQ ID NO: 94091 - DNA, 30 bp, Homo sapiens
  chr17:79966351-79966381
  hypo
ctccgcgagctgcacggcccggctttgtca

SEQ ID NO: 94092 - DNA, 237 bp, Homo sapiens
  chr17:79972010-79972247
  hypo
caagccactcacctggcagggcgtgactggcacttctggcctgagtgcctgctgggcgcccgcccctagccagttctgtcgtccttcctttccacccaggacagccccgtcctgcactgccgtgtcgcccactgccggggcctctctgggaccaacaggcccccttccttccacccaccaggccctaccccacctggaccctctgaaatgttcctcgttgacaaatggtcttgcaga

SEQ ID NO: 94093 - DNA, 30 bp, Homo sapiens; identical to SEQ ID NO: 31031
  chr17:79977292-79977322
  hypo

SEQ ID NO: 94094 - DNA, 30 bp, Homo sapiens
  chr17:79977625-79977655
  hypo
tccagacatacccccgccctcccgaggcct

SEQ ID NO: 94095 - DNA, 31 bp, Homo sapiens
  chr17:79986711-79986742
  hypo
aacctcctattgggggcggcggggggacccc

SEQ ID NO: 94096 - DNA, 1266 bp, Homo sapiens; identical to SEQ ID NO: 54753
  chr17:79988352-79989618
  hypo

SEQ ID NO: 94097 - DNA, 41 bp, Homo sapiens; identical to SEQ ID NO: 54754
  chr17:79989899-79989940
  hypo

SEQ ID NO: 94098 - DNA, 30 bp, Homo sapiens
  chr17:80004952-80004982
  hypo
tccgggagagccagcgtgaggccccgaggc

SEQ ID NO: 94099 - DNA, 374 bp, Homo sapiens; identical to SEQ ID NO: 31035
  chr17:80005249-80005623
  hypo

SEQ ID NO: 94100 - DNA, 31 bp, Homo sapiens; identical to SEQ ID NO: 54757
  chr17:80010342-80010373
  hypo

SEQ ID NO: 94101 - DNA, 30 bp, Homo sapiens
  chr17:80011808-80011838
  hypo
tgatcactgccccacgctgcgggtggaggc

SEQ ID NO: 94102 - DNA, 31 bp, Homo sapiens; identical to SEQ ID NO: 31036
  chr17:80018697-80018728
  hypo

SEQ ID NO: 94103 - DNA, 793 bp, Homo sapiens
  chr17:80019099-80019892
  hypo
ttgaagaggtgggcccggacgtaggacagggggcaggggtgctcccgcacgatgtccagatactcctcggccagctcccacacggcagggctccggccctcgaacagggcggggttgtgcaggttgccctctgtgggaggaggagcggggaaggacacctcgtgggttgctccaggtggacggcacaggaaagcctgggacactcaggacacccttctgtgccacctcacaagggacaaggccagctcaggcccatcagagcagactgggattgatgaacaccatctgtgaacagcaccatggggagggcagtaggcagtgggaggcaccgacctgggcggtggtatcaggccgtgtgcatggggccctggctgctgtcctgggccctgcccacctgcgctcatgacgccctgcacacccgtgtcccggaggcagcgctccacgtcctgcaggcactggatgttcccgttagcaaacacagggatggccacagccttcctgttggcagagaaatgcctgtttccacccgcccggaacagcacccaggtgatgctgcccccagccacggccccctgggtggtcacgggcgtcaggcgtgccgagcaccctgaggtgtggagctgggacccccagcaaagccccaaggactgagggctgtgtcacccacacccactcaccgcacagccttgatatgctcccaggacgctgcacccgacaggggccccttctgctccttggtgcgtccgtgcaccgtcagcaactaggacagagcagtggtcgcttgacccctcca

SEQ ID NO: 94104 - DNA, 31 bp, Homo sapiens; identical to SEQ ID NO: 31039
  chr17:80021087-80021118
  hypo

SEQ ID NO: 94105 - DNA, 138 bp, Homo sapiens; identical to SEQ ID NO: 31040
  chr17:80030811-80030949
  hypo

SEQ ID NO: 94106 - DNA, 39 bp, Homo sapiens; identical to SEQ ID NO: 31041
  chr17:80038871-80038910
  hypo

SEQ ID NO: 94107 - DNA, 88 bp, Homo sapiens; identical to SEQ ID NO: 31042
  chr17:80040621-80040709
  hypo

SEQ ID NO: 94108 - DNA, 30 bp, Homo sapiens
  chr17:80041809-80041839
  hypo
ggccaggagggcagcgggaggcaccggggg

SEQ ID NO: 94109 - DNA, 31 bp, Homo sapiens; identical to SEQ ID NO: 31043
  chr17:80042177-80042208
  hypo

SEQ ID NO: 94110 - DNA, 232 bp, Homo sapiens
  chr17:80042508-80042740
  hypo
aggagcagacccagcggatggaggacaggtccccccgggtgagggtgctcacaaaggcatgtgccgtcggctcctcaggcttgtctagggaaacagggaggtggggctgctgcggggccttcgggtgcagtctcccgggaggggcagggcagtgtcgggggctcaccctcctccagcaggaagtggcggaaagccccccaggccccgtcgcggtagacgttcatcaccaggt

SEQ ID NO: 94111 - DNA, 31 bp, Homo sapiens; identical to SEQ ID NO: 31045
  chr17:80045800-80045831
  hypo

SEQ ID NO: 94112 - DNA, 30 bp, Homo sapiens
  chr17:80046040-80046070
  hypo
cacaggcagctgctcgacgcccaggcccag

SEQ ID NO: 94113 - DNA, 39 bp, Homo sapiens; identical to SEQ ID NO: 31046
  chr17:80046548-80046587
  hypo

SEQ ID NO: 94114 - DNA, 60 bp, Homo sapiens; identical to SEQ ID NO: 31047
  chr17:80047422-80047482
  hypo

SEQ ID NO: 94115 - DNA, 31 bp, Homo sapiens; identical to SEQ ID NO: 31048
  chr17:80048709-80048740
  hypo

SEQ ID NO: 94116 - DNA, 161 bp, Homo sapiens
  chr17:80049201-80049362
  hypo
gtggcggggacagccgcgatgtcgttcagcatgctcaggaaagccaggtcctggctgtgccggaggccctgctccagcagcttctgcacggcctcaggggtgcgtccgctggcccgcagcagacggggcagggtggcatgtggggcgggtgcggggggcgg

SEQ ID NO: 94117 - DNA, 31 bp, Homo sapiens; identical to SEQ ID NO: 31049
  chr17:80050213-80050244
  hypo

SEQ ID NO: 94118 - DNA, 31 bp, Homo sapiens; identical to SEQ ID NO: 31050
  chr17:80050505-80050536
  hypo

SEQ ID NO: 94119 - DNA, 333 bp, Homo sapiens
  chr17:80050745-80051078
  hypo
gcaccccggaaccccggcagagcccaccttgctccttgaagccatctgtattggtgccggcgttcaggatggtggcgtacacccgccgggccagggacttcttggtcagcaggacggccaccacaccctccgagcggcagtacccattccctgggtagagcagcacctcaggcccggggctcagccccacgccggcccccaccccaccaggaggagctctggggtgtggggtgggtgcttgggtgggggatccccggagctggcaggatcctgctcagcgtggggactgtgcggggggccgtcctgtgccactgtcccgcctgccctggccgc

SEQ ID NO: 94120 - DNA, 190 bp, Homo sapiens
  chr17:80051503-80051693
  hypo
tggccatcatcgctcgctggcagcccaccatgctgtagcccacgagtgtctcggggtctcggctcagggcctccgaggtctcagagccgctcacgcccacccagacgccagtgtgtgttcctcggagtgaatctgggttgatgcctgccacaaacagtggtcaaggtgccacggccgggccccacagcgc

SEQ ID NO: 94121 - DNA, 105 bp, Homo sapiens
  chr17:80077689-80077794
  hypo
gaggctgtcataaaaacgcaggtgagagaggaggctaggcttggaggtgggtcctccaaagagccgcatccagggtgtatgggggagccccgactccagccagct

SEQ ID NO: 94122 - DNA, 114 bp, Homo sapiens; identical to SEQ ID NO: 31052
  chr17:80085171-80085285
  hypo

SEQ ID NO: 94123 - DNA, 167 bp, Homo sapiens; identical to SEQ ID NO: 31053
  chr17:80085323-80085490
  hypo

SEQ ID NO: 94124 - DNA, 30 bp, Homo sapiens
  chr17:80096498-80096528
  hypo
gaagactgccgagtcggaagagacgcatgg

SEQ ID NO: 94125 - DNA, 30 bp, Homo sapiens
  chr17:80096759-80096789
  hypo
cgtcactgccgttacgttaacttaggtgtc

SEQ ID NO: 94126 - DNA, 31 bp, Homo sapiens; identical to SEQ ID NO: 31054
  chr17:80104070-80104101
  hypo

SEQ ID NO: 94127 - DNA, 30 bp, Homo sapiens
  chr17:80112645-80112675
  hypo
gatgacttgatgcccgtctctcctgtacag

SEQ ID NO: 94128 - DNA, 30 bp, Homo sapiens; identical to SEQ ID NO: 31055
  chr17:80132885-80132915
  hypo

SEQ ID NO: 94129 - DNA, 188 bp, Homo sapiens
  chr17:80135499-80135687
  hypo
agtcctaagtacactcggctgccttaagccaagcctcaaggcagagaagcaaattgaatgggagagaatgcgcaccagtggctggccgcttagtgcggggaggtgggaccagcaggggcagggactcttgggtggtcttgttggggtgggggtgcttgggcacacttacatgtcggctgcactgacct

SEQ ID NO: 94130 - DNA, 72 bp, Homo sapiens
  chr17:80139083-80139155
  hypo
ggagaagccaacaccggctgggccaagagcaactcgtgggaacgaagcagccagcacggggctccacgtgcg

SEQ ID NO: 94131 - DNA, 161 bp, Homo sapiens
  chr17:80144202-80144363
  hypo
tagcttaagactgcaacggggggccaaggttaggcgcacaggagtggtgacgcccagtcacctcggccgcactacatggaaaatggaagcacctgcggcccctctcaccccgtataccgaccacagaggtcgccccgcacaccgaccgcagaggctttagg

SEQ ID NO: 94132 - DNA, 31 bp, Homo sapiens; identical to SEQ ID NO: 11572
  chr17:80156992-80157023
  hypo

SEQ ID NO: 94133 - DNA, 31 bp, Homo sapiens; identical to SEQ ID NO: 31059
  chr17:80163308-80163339
  hypo

SEQ ID NO: 94134 - DNA, 31 bp, Homo sapiens
  chr17:80172375-80172406
  hypo
gaacccatgtgtgggccgggcacagtgctca

SEQ ID NO: 94135 - DNA, 110 bp, Homo sapiens
  chr17:80176132-80176242
  hypo
tcactgggggggtggacggccaaggggagcccagcctcggtcactgcggggtggacggccaaggggagcccagcctcggtcactgggggggtggacggccaaggggagcc

SEQ ID NO: 94136 - DNA, 278 bp, Homo sapiens; identical to SEQ ID NO: 54760
  chr17:80186356-80186634
  hypo

SEQ ID NO: 94137 - DNA, 30 bp, Homo sapiens; identical to SEQ ID NO: 54761
  chr17:80186841-80186871
  hypo

SEQ ID NO: 94138 - DNA, 266 bp, Homo sapiens; identical to SEQ ID NO: 54762
  chr17:80187170-80187436
  hypo

SEQ ID NO: 94139 - DNA, 352 bp, Homo sapiens; identical to SEQ ID NO: 54763
  chr17:80189390-80189742
  hypo

SEQ ID NO: 94140 - DNA, 677 bp, Homo sapiens
  chr17:80201406-80202083
  hypo
ttcacttctgaccaacagacacgcgcccaacagaaggtcacagcgcagactctactttctggccgtgaaggttctgggtccggttgggagagtcacctgctccttggcacctcagggtgggtccttctggcctgccggcttttctgagctagtcttggcacgtggcaaggacagccccgctcctggttttaagcacaggcattcatacagacggagtgccaatccgcacaggagcattgagtgctgagaaaatggactgagtgcaaaggcagcaaggcaacaaacactacagtaaccacctctcggttcacagtcctctcccaagggaccagaaacgcatcttccaccttgaatcctgggactcccaattgtcctgctagggtctcaaagcctctgcttccaagctctcagctgcctgcccacctcctggggaagaagcgcgcagtgctttgcctggtaacacccactgcacccctgccccgcggcagcctgcggtccctaactgctctccgagggcctcaagagttcctgacagcaggcatgtcaattacgggaggagggagggtgagacgccaaaatcaggttgaagaggtcccaccacacacgggcacacacacacaccacggacttttgatgagaaatctcctctccaaagcggacaataaaacactgcaaaa

SEQ ID NO: 94141 - DNA, 31 bp, Homo sapiens
  chr17:80202436-80202467
  hypo
agttcacgtggggggccgcagtgcagcccca

SEQ ID NO: 94142 - DNA, 139 bp, Homo sapiens
  chr17:80207967-80208106
  hypo
gcgtggccagcagccggcagccggatctgtgctgcactatccagatgcacgggggtggggaggtcagattttaagccgagacagcaacctatgaaaaagcagattctaactgccaatgctgtgcggcaggggcctgcaa

SEQ ID NO: 94143 - DNA, 30 bp, Homo sapiens; identical to SEQ ID NO: 31061
  chr17:80208423-80208453
  hypo

SEQ ID NO: 94144 - DNA, 76 bp, Homo sapiens
  chr17:80222093-80222169
  hypo
accatccacctacaaatgtgccgcggagccttctcactgggagggctccacagacgtggcacagccactcttcaga

SEQ ID NO: 94145 - DNA, 36 bp, Homo sapiens
  chr17:80224601-80224637
  hypo
cagctctctcctcttccctcacgagtcccttcagag

SEQ ID NO: 94146 - DNA, 97 bp, Homo sapiens
  chr17:80229864-80229961
  hypo
tcaggggatcttggaataactcgtgcattgcacaatcccactaacaagtgcggaaaattaagttactttaaaattacaaacttgggccaggcgcggt

SEQ ID NO: 94147 - DNA, 36 bp, Homo sapiens
  chr17:80230200-80230236
  hypo
caagagcgaaactccgtctcaggaaaaaaaaaaaaa

SEQ ID NO: 94148 - DNA, 89 bp, Homo sapiens
  chr17:80239661-80239750
  hypo
gtgcatgtgtgcatgggtgtccatgtgcacgtgttcacgtgtgtgcatgcatgcatacatgtgtgtgcgtgtgtgtgttgggcaaacct

SEQ ID NO: 94149 - DNA, 141 bp, Homo sapiens
  chr17:80247837-80247978
  hypo
caggtacttggagggagggtgcggtgagacaggaatgtaagccgaatgggttggtcaggtatacatactcaacaagttacaggaggcgttgcgaatatacatgcatgtttattcggacacgtgtgctggataaacatgcat

SEQ ID NO: 94150 - DNA, 162 bp, Homo sapiens
  chr17:80251904-80252066
  hypo
atgacttaggtatatacgcatggggggaatcctcgtaaggcaagaacgtgctgcacattctggggactgggacaggataagcacacgagtagatctaagtcactggaaatacctggttttgctgttggaggggggcttgcaggtgctcgttatattattacg

SEQ ID NO: 94151 - DNA, 73 bp, Homo sapiens
  chr17:80254256-80254329
  hypo
tctgcgggacagacccggcattcttcgttatccattcattcgttgacggacacttaggcgagttccgtacctt

SEQ ID NO: 94152 - DNA, 99 bp, Homo sapiens
  chr17:80257490-80257589
  hypo
gcgaggtccccgacacggtgaggggcacgcctgagtcccggcctctgcatctcctcaggcacctcccacttttctggtgggttgctattttccttttct

SEQ ID NO: 94153 - DNA, 49 bp, Homo sapiens; identical to SEQ ID NO: 31064
  chr17:80260759-80260808
  hypo

SEQ ID NO: 94154 - DNA, 30 bp, Homo sapiens
  chr17:80275865-80275895
  hypo
ccccctggtttggccgtggggaaggagcct

SEQ ID NO: 94155 - DNA, 31 bp, Homo sapiens; identical to SEQ ID NO: 54764
  chr17:80277704-80277735
  hypo

SEQ ID NO: 94156 - DNA, 30 bp, Homo sapiens; identical to SEQ ID NO: 31065
  chr17:80285254-80285284
  hypo

SEQ ID NO: 94157 - DNA, 568 bp, Homo sapiens
  chr17:80289190-80289758
  hypo
cgaggcttcaggctgcggaccatgcgtggccccagctctgtctgggcagcaggtgtcagcgactttgggttgctgtgggaatttgctccgtttatcagaagaaaacgcaccctggcaacacaggcccctctcaggtcaccaggcacatctggtcacatctgagtctcagataaacaaccaatgatgtcctggtgaaagcttgtcccgtgggacactcgggacacacttatattaaaacacgattaacgatctcaaactcagatgttactgggtatcctgcgtttttgttggcagctctgccactctgcccgtctgcctgagtcctctcctgccatcctcctgaccagaggcgtgggcttgagttgaatgccacgcagtggctaaaaatcagagagagggcaggcggcagggcgcggccccagggaaagtggccaggtgggcggtgactggccgggcagctccgtgtgtggcacagggagacctggcacagggagaccaggtacagggagacgaggcgcacggagcctcaaaacttctagagtgggccgggcgcggtggcgcatgcctg

SEQ ID NO: 94158 - DNA, 30 bp, Homo sapiens
  chr17:80290210-80290240
  hypo
acgcaccgcccagcacgcctgcgcatgcct

SEQ ID NO: 94159 - DNA, 90 bp, Homo sapiens
  chr17:80303789-80303879
  hypo
aagataactgttttcccgaaattaatataattcctaagataatttttcatgaaattggaaaaactggttctaaaattcatacgaaggccg

SEQ ID NO: 94160 - DNA, 557 bp, Homo sapiens; identical to SEQ ID NO: 11573
  chr17:80329443-80330000
  hypo

SEQ ID NO: 94161 - DNA, 541 bp, Homo sapiens; identical to SEQ ID NO: 54768
  chr17:80332161-80332702
  hypo

SEQ ID NO: 94162 - DNA, 30 bp, Homo sapiens
  chr17:80348287-80348317
  hypo
gaagcagccggccccgcaaggacggctttg

SEQ ID NO: 94163 - DNA, 30 bp, Homo sapiens
  chr17:80349821-80349851
  hypo
ctccaaagctgctgcggtttgctgatgccg

SEQ ID NO: 94164 - DNA, 30 bp, Homo sapiens; identical to SEQ ID NO: 31069
  chr17:80350125-80350155
  hypo

SEQ ID NO: 94165 - DNA, 30 bp, Homo sapiens
  chr17:80350390-80350420
  hypo
ggtgaagaaggagacgcgacctgggagagg

SEQ ID NO: 94166 - DNA, 30 bp, Homo sapiens
  chr17:80351442-80351472
  hypo
agatatgcaggacacgtccttttccaggtc

SEQ ID NO: 94167 - DNA, 30 bp, Homo sapiens; identical to SEQ ID NO: 31070
  chr17:80361659-80361689
  hypo

SEQ ID NO: 94168 - DNA, 30 bp, Homo sapiens; identical to SEQ ID NO: 31071
  chr17:80367012-80367042
  hypo

SEQ ID NO: 94169 - DNA, 30 bp, Homo sapiens
  chr17:80369435-80369465
  hypo
gtttccaaggccaccggcgcatgcccttcc

SEQ ID NO: 94170 - DNA, 30 bp, Homo sapiens
  chr17:80373333-80373363
  hypo
ccacgacctcgccacggcgggccaggacct

SEQ ID NO: 94171 - DNA, 40 bp, Homo sapiens
  chr17:80391607-80391647
  hypo
ggcagagtccctggcgctggtgggcgccatgattgaccag

SEQ ID NO: 94172 - DNA, 207 bp, Homo sapiens; identical to SEQ ID NO: 31072
  chr17:80395042-80395249
  hypo

SEQ ID NO: 94173 - DNA, 30 bp, Homo sapiens; identical to SEQ ID NO: 31073
  chr17:80404883-80404913
  hypo

SEQ ID NO: 94174 - DNA, 30 bp, Homo sapiens
  chr17:80438897-80438927
  hypo
caagcgtaagctgccgtcacctcttcacca

SEQ ID NO: 94175 - DNA, 25 bp, Homo sapiens
  chr17:80445587-80445612
  hypo
tcgaagtaggattgccgcttgaagc

SEQ ID NO: 94176 - DNA, 291 bp, Homo sapiens
  chr17:80445731-80446022
  hypo
gaagctaaggcagaaagatcgcctgagcccaggataaacttacctgtgtttatctttcaggatgcttaaatggcagaggccaagcccagactccagacggacatgcggataaggccctgctgcggcagatggaaggcatttacgctgacatccctgtgcggcgtccggagtccagtgcacacgtgcaggagctgtaccaggagtggctggaggggatcaactcccccaaggcccgagaggtgctgcataccacgtaccagagccaggagcgtggcacacacagcctggaca

SEQ ID NO: 94177 - DNA, 20 bp, Homo sapiens
  chr17:80446252-80446272
  hypo
tttctttttttttttttgag

SEQ ID NO: 94178 - DNA, 160 bp, Homo sapiens
  chr17:80451149-80451309
  hypo
ctggtaagttaagtaacacttcgcctgctctctgttgcccctaagcctttgtctcgcatcaatcttggcagaatcctcctgttcctctgtcttcggctttagccaccatcagggcgtgtgtcctgctatttccccactcgtttttgccctgtaaaggaaa

SEQ ID NO: 94179 - DNA, 181 bp, Homo sapiens; identical to SEQ ID NO: 31076
  chr17:80479372-80479553
  hypo

SEQ ID NO: 94180 - DNA, 101 bp, Homo sapiens
  chr17:80487528-80487629
  hypo
tgggattacaggcgtgagccatggcgccccacctgaaagtgccttttgtaaaacagagcctggaggttgagactcattgcggagtcactagataactcctc

SEQ ID NO: 94181 - DNA, 16 bp, Homo sapiens
  chr17:80488088-80488104
  hypo
gggcacgttgggtcac

SEQ ID NO: 94182 - DNA, 278 bp, Homo sapiens
  chr17:80491462-80491740
  hypo
tcatacggctgttcgcgtagtaggttcgttgacaccagcatcaccccagactcatgagtaattcattgcactatgacatcacaatggctaggaataggaatttttcagctccatcataatcttaacgggaccctcatatatgcggcccatcattgacttgaaacgacgtgaattttgttagccgggcatggtggtgcccagctgtaggttagccgggcgtggtgacgcacagctgtaggttagctgggcctggcacagctaggttagctgggtgtggt

SEQ ID NO: 94183 - DNA, 217 bp, Homo sapiens; identical to SEQ ID NO: 11574
  chr17:80503129-80503346
  hypo

SEQ ID NO: 94184 - DNA, 181 bp, Homo sapiens
  chr17:80519707-80519888
  hypo
catggcgtagcctccgacctccacaggctggaggtgcccctagggcagggtggtggacagagtcttcctctgttggggggggggggtgcccgcactgggcgcacagatgtgagccgggctgagtcccgcgccgggtgcgcggatgtgtgctgggctgagtgtggccggccacttgtttgcg

SEQ ID NO: 94185 - DNA, 206 bp, Homo sapiens; identical to SEQ ID NO: 31079
  chr17:80535281-80535487
  hypo

SEQ ID NO: 94186 - DNA, 18 bp, Homo sapiens
  chr17:80541421-80541439
  hypo
tcaaaacaaaaatacact

SEQ ID NO: 94187 - DNA, 145 bp, Homo sapiens
  chr17:80554757-80554902
  hypo
tcctgtagtcctcccgggcttgctgaagtgctgctccaagttacagtccccgggttgtcaggcgtggcgagagccccttgtgctcagagctctcacggaacacagagcaagcctgtctacgagttcagccggtgaggggcagggg

SEQ ID NO: 94188 - DNA, 218 bp, Homo sapiens
  chr17:80562620-80562838
  hypo
ggacagcgggttgagcgtgcaggtagaaaaggcgccgtgtcacaggcagtggtaacagggtcttgattgattgatctatgatgtcggagttttaaagttacttggagattgtggctgccactatttcttctgcagactttctctccaacctgagaatgaagatcactgcaaagcatcttgagggacattttctcagaaaatgaaaaagcagctcttgg

SEQ ID NO: 94189 - DNA, 397 bp, Homo sapiens; identical to SEQ ID NO: 31080
  chr17:80563137-80563534
  hypo

SEQ ID NO: 94190 - DNA, 667 bp, Homo sapiens
  chr17:80571116-80571783
  hypo
cagaaggctgcagatggccagcgcccccgactacagtggtgggagcgggaggtggccaggggttcacacaggcatcaacgccaaacacagggtgggtatgggtcagggctgcgttccacagggcacaagccgcctgtccccgcaagacatcccagggccacaggggagggaggacagaccagaaacgcagccggagtcatccatgcccacgcacctgtacgatcagacaggaaagctgctgagtaggcaccgtctgaggcagtcactctggagtcccttcgcacccacgtccggggcacaggaggttcgtgggggaggcagcagcccggccttgtttcccatacactgcgcttcccatcagttccacttgaaaagcagctgcgctcccgagtccgccggcctagggacaccgtgtccttgccgctctacagtgatttttaaaaagcacatgcctggggagggccggtgccgccagggcctcacatgaggcacgtccgtgcaggccctcgccacgttcctggtgaacgggcctgtgacacagccccgccgtccgcatcagttctgaggctgttcacgtgcactgcgagaaaacccacccttcttgcatgcatttcccccagattcatgtttatcaactggtaattacgctcctactcccccacccaga

SEQ ID NO: 94191 - DNA, 30 bp, Homo sapiens
  chr17:80572020-80572050
  hypo
gagaggagggcaggccgtcccatccccgac

SEQ ID NO: 94192 - DNA, 30 bp, Homo sapiens
  chr17:80573582-80573612
  hypo
cactgagttacctacggtgccttgatgatg

SEQ ID NO: 94193 - DNA, 21 bp, Homo sapiens
  chr17:80578015-80578036
  hypo
tactacctaaagggctgggtg

SEQ ID NO: 94194 - DNA, 81 bp, Homo sapiens
  chr17:80578335-80578416
  hypo
ctacctagaaataactaaacctgttctcagctgagtcccaggagtgagcgggacacgccccaaaccgcgtgtccccacgtg

SEQ ID NO: 94195 - DNA, 30 bp, Homo sapiens
  chr17:80585228-80585258
  hypo
cgatgccagcttggcgcctaaggtgttttc

SEQ ID NO: 94196 - DNA, 121 bp, Homo sapiens; identical to SEQ ID NO: 31082
  chr17:80593583-80593704
  hypo

SEQ ID NO: 94197 - DNA, 22 bp, Homo sapiens
  chr17:80594123-80594145
  hypo
aagactccgtctcaaaaaaaaa

SEQ ID NO: 94198 - DNA, 57 bp, Homo sapiens
  chr17:80603957-80604014
  hypo
cagcactccagcctgggcaagagcaagatccgtctcggaaaaagaaaaaaaaaaaga

SEQ ID NO: 94199 - DNA, 140 bp, Homo sapiens
  chr17:80604377-80604517
  hypo
aaaaaaaaaaacccaaaacaaaaaaacagctagaaacaaaaataagtacaaaaataaagtacagaagtaggcaaaactaatctatgatgtcacaagtcaggtagggagcatttattggaatcaagcgtggccaggtatat

SEQ ID NO: 94200 - DNA, 120 bp, Homo sapiens
  chr17:80607967-80608087
  hypo
ctcctccctgagagcgaccagaagccttccgatggcggagcgagttgggccgccccggctgtgactagggctcgggggcccaggtccaaatcacagagctggggcgagacctaagtgcgg

SEQ ID NO: 94201 - DNA, 112 bp, Homo sapiens
  chr17:80614272-80614384
  hypo
cctggaggtctttgcggtcagccctgctctgaggcagtcggggtcaggggctacatcttcatgcggaattcctgacagcccctcggagctcctcaccgaggctcaggagcac

SEQ ID NO: 94202 - DNA, 30 bp, Homo sapiens
  chr17:80617839-80617869
  hypo
ctggatggattgcacgcatacacgtgcaca

SEQ ID NO: 94203 - DNA, 30 bp, Homo sapiens
  chr17:80621621-80621651
  hypo
ggacccaggagccccgggctgcctcaacca

SEQ ID NO: 94204 - DNA, 30 bp, Homo sapiens; identical to SEQ ID NO: 31085
  chr17:80622926-80622956
  hypo

SEQ ID NO: 94205 - DNA, 111 bp, Homo sapiens
  chr17:80624870-80624981
  hypo
gaggggagaagcagcgccgaggctcgcaccagacctcaccctggagaccgtcgtggagcacacggcctctgcagctctccttccagagaagcccacgatgtagccagtgag

SEQ ID NO: 94206 - DNA, 30 bp, Homo sapiens; identical to SEQ ID NO: 31086
  chr17:80635505-80635535
  hypo

SEQ ID NO: 94207 - DNA, 81 bp, Homo sapiens
  chr17:80645604-80645685
  hypo
ccagccctcctgactggctgccgatcatgcagggcaggtgccttcaagactttacgcccccagccaggcgcggtggctcat

SEQ ID NO: 94208 - DNA, 30 bp, Homo sapiens
  chr17:80654028-80654058
  hypo
ccaccgcccccggcccggtgggaggtgtat

SEQ ID NO: 94209 - DNA, 30 bp, Homo sapiens
  chr17:80654327-80654357
  hypo
ccatattcgtctgggcgtacacgttgttgg

SEQ ID NO: 94210 - DNA, 497 bp, Homo sapiens
  chr17:80654593-80655090
  hypo
tctccagccctgtcctccaggcgctcaatctccagccctgtcctccaggcgctcaatctccagccctgtcctccaggcgctcaatctccagggcagcgctggccctcggactttgccacagcgacatccgaactatctagaaatgtgacgaatggaagctttttgttttctttccttctaattacacttccacagccacacgtggctcatggcatcctactggacaccacggtcctagagacctgccaccgagcggggaggggggtaggacatgcgggggcagcggcgcctggggacaggtagagacgcaggctcccctcctgccccacggagcacactctgcacccaccagctgccagagactcccccgcatgctgcagtttcaggaggcctctgggtgctggtcgtgagcccaagcccatctcagctgctcccccaaactctgcccattcctcaccccgtcccctaagctgaggtgtggccgggcacctgagtcc

SEQ ID NO: 94211 - DNA, 1706 bp, Homo sapiens; identical to SEQ ID NO: 54776
  chr17:80655504-80657210
  hypo

SEQ ID NO: 94212 - DNA, 30 bp, Homo sapiens
  chr17:80671116-80671146
  hypo
ccatctgtgggcgtcgcatgcccatgcaga

SEQ ID NO: 94213 - DNA, 30 bp, Homo sapiens; identical to SEQ ID NO: 31092
  chr17:80678300-80678330
  hypo

SEQ ID NO: 94214 - DNA, 31 bp, Homo sapiens; identical to SEQ ID NO: 31093
  chr17:80680723-80680754
  hypo

SEQ ID NO: 94215 - DNA, 30 bp, Homo sapiens
  chr17:80687437-80687467
  hypo
gtccatcctgacggcgcatgtgcccctcag

SEQ ID NO: 94216 - DNA, 34 bp, Homo sapiens
  chr17:80692481-80692515
  hypo
cgggcgtggtggttcacggctgtaatcccagcac

SEQ ID NO: 94217 - DNA, 97 bp, Homo sapiens
  chr17:80692874-80692971
  hypo
cttaaaaacacaaaaaacaaacaataaaaaaacctcacgtcaaatgacttcagcacggactgggctcaggtgcgcacctgctcgtgtgcacgcgtgt

SEQ ID NO: 94218 - DNA, 227 bp, Homo sapiens; identical to SEQ ID NO: 54777
  chr17:80693227-80693454
  hypo

SEQ ID NO: 94219 - DNA, 3 bp, Homo sapiens
  chr17:80712382-80712385
  hypo
ctg

SEQ ID NO: 94220 - DNA, 30 bp, Homo sapiens
  chr17:80712954-80712984
  hypo
tctcgtcagggaaggcgggacatcttgggt

SEQ ID NO: 94221 - DNA, 31 bp, Homo sapiens; identical to SEQ ID NO: 31095
  chr17:80721019-80721050
  hypo

SEQ ID NO: 94222 - DNA, 46 bp, Homo sapiens
  chr17:80732635-80732681
  hypo
tattgcaaacagtccacgtaaaattgtgtaccgttctgactgattt

SEQ ID NO: 94223 - DNA, 30 bp, Homo sapiens
  chr17:80744318-80744348
  hypo
aatttgatctctgtccggtctcttaacggg

SEQ ID NO: 94224 - DNA, 252 bp, Homo sapiens
  chr17:80744600-80744852
  hypo
ctgggtgcagggctccgagtccttctcggcttgggagggtcttgtggccacatgtgtctagttctgcagtttctttgttgtgggttcggttctttactttttttttttttttttttgatgatcttgttggttttctctagattgttcccaagttttctgttcttccatcccaagtgggagacacgtgttgcacagcctgcatttggaatacccagagggtgggtgggcgggacggctcgctgccccattccc

SEQ ID NO: 94225 - DNA, 198 bp, Homo sapiens
  chr17:80745051-80745249
  hypo
tggcaaagagtgaggcgtgctgtcctgccgtttagggcagagcacccaggcggtttggcagcagcacctcagaactattcagagatttgccctcagcaagagtgagcaattgtctgacgcagccggctgaaatccctgggaagggaatgaatgaaactgccgtgaagcaacgcctggcggggccgggcttctggcagc

SEQ ID NO: 94226 - DNA, 287 bp, Homo sapiens
  chr17:80747039-80747326
  hypo
aggtaccccaggccacgctggttcggtctcctcgtggcgttaaggaaagacctggagcagccagctcctaacactcatttcccatcactcagcattttatgtggggcgggcacagtgccgtgagtcttacagaaacctgcatggtgagccgcacgcctttgagtccccatcagccctggcccatccctgctgaggtggcgcgacctgctcacagacgtgtgctcacaggcagcccgtcgcggggtcatgtgctagacggggagggggcttggcgggtcaccagcctc

SEQ ID NO: 94227 - DNA, 260 bp, Homo sapiens
  chr17:80747739-80747999
  hypo
cctggcctgtttacccgggagcccagcaacaaatgggagcttctgtgctgctgtccgtgcatacggcccaggagccgggctcatccccgagacgccgtgttccctcccgctgtccgctcacacctgcctgtgtggacgtggctctgacatgtctccttcctggttcattgctcatctgttctcatgtggctgcgccgccaccctgtcctgggggtccttgtcccagcacgtggctctgtgcttcacgtcatcctgagtct

SEQ ID NO: 94228 - DNA, 30 bp, Homo sapiens
  chr17:80763445-80763475
  hypo
ggcgctggtcctgtcgtctgtgtacccatc

SEQ ID NO: 94229 - DNA, 128 bp, Homo sapiens
  chr17:80767311-80767439
  hypo
gcctgcagcgtccgcgttacagtggtacatggtgacctaccctgtgccgcgtgtgctcactcgtcccctttgaatctggctgcaggctcctttaccctgcagcgtgttttagcgcgggggctccaagc

SEQ ID NO: 94230 - DNA, 30 bp, Homo sapiens
  chr17:80768989-80769019
  hypo
agccttgtttcaggcgtgtccctggagctc

SEQ ID NO: 94231 - DNA, 30 bp, Homo sapiens
  chr17:80771619-80771649
  hypo
acgcaaggggctcacggagcctctgggcag

SEQ ID NO: 94232 - DNA, 309 bp, Homo sapiens
  chr17:80772714-80773023
  hypo
gtttccaggagactgacaaggcgtggcatgggggatgtctggcgctggcagagctgggcaggagaggcctgttgctgccgtctcgactcgtggatggtgagtagctgaggcacggtcaggggggatgtctggcgctggcggagctgggcaggagaggcctgttgctgccatctcgactcgtggatggtgagtagctgaagcacggtcagctgcgtcaccaggctgtccgtggcaggctgcagcccttcgtctgaacccatctccgcggtgtggccctgccgcgggcacgcccagaagagcttgagaaca

SEQ ID NO: 94233 - DNA, 165 bp, Homo sapiens; identical to SEQ ID NO: 31100
  chr17:80773303-80773468
  hypo

SEQ ID NO: 94234 - DNA, 166 bp, Homo sapiens
  chr17:80775960-80776126
  hypo
actgaccccaggcagctggggcgagaggatatgggtgttggcatcataaacgaaaagggtaaagctatggttcagaaactgacacgtgatgtggaatacactggcccatgaccttcgcatggttggttggccccttctgcctggcggtgccctccatgtgagctga

SEQ ID NO: 94235 - DNA, 78 bp, Homo sapiens
  chr17:80793813-80793891
  hypo
aaccagggagggtgtcgggtgacaccctgggctcagaccccgcgctcagcacccgtctcccaccgtgggctgccacag

SEQ ID NO: 94236 - DNA, 30 bp, Homo sapiens
  chr17:80794409-80794439
  hypo
ttcagttttcgaagccgcattatttcacat

SEQ ID NO: 94237 - DNA, 1224 bp, Homo sapiens
  chr17:80797611-80798835
  hypo
cctcattagaagttttgtaatcgtggtctgcatcccagccatgcacctgctgggtcctgagtaatcctcggagcccagagcaaggcagagcagacacggagcaaacgctgcgttcagctgggtattttagatacgtctgagaagagttttaaaataaaacttgaatttgaaaagaaatagtgagtacttaccagaggtgggcagtgctgggatgtggccggtcttggtgccggtggctggcggtgctcaggaagcagtacctgttctcacgcttgctgggtgaaactggagcctgctgttccagtgggagggatttaagtgtaggagttgagccctcggggcgtagagatgcacctgatattcctcctgcccgcagctacgattcatgtgtttgcacccaccgagctgctgcgggcagcctccccagcactggacccagcaagcaagttatctcgccgactcccagcgctgtctccagactcaactgtctgtgagtgcggcgtcggtgctgcctggacggccatatgtcagagggctttcgatgtgtccgcagttagaatagagattactatattcatcagaatcacacccgatgaatatttggcgtcatgataaagacatgtgagactttcctttagaacttgagcatgtgtacgcaggaggcaaacacttggattgattctcaagcgcgcataccctgggaggcacagtattcatggcgtccttgccatgaggtccagtgaggcctttgaggatctgtggaccttccaccctctaccctgctcctgagagtctctgtccctggtcctcctcaggagctgagccggcagggagggagcttatcccagagcctggctgcagggacctgccggagcttgcccgacaccaggcaccgcaagagctgcggagcagggtgtgtgggtgcgggggagggggccagctgtgcactcccgcaaaccaccctccccccactttaaattgcagaggcacttaacttgggggccagtttttacctccacacccccccaccaaaactgcttgcttgcttaatcggaggccgcaccccagttgtagcgaaggctggcatgtggtgtcggtttgaggactgggaaaggaggtgggatgagctggtgtcaggcccttggatgagcctgaggctgcagggcagaggctgcagggctgtggcatagggacgagctggccaggacagacaaactggttttt

SEQ ID NO: 94238 - DNA, 30 bp, Homo sapiens
  chr17:80818627-80818657
  hypo
tcttgtttcatcgcccgtgtccgggctgtg

SEQ ID NO: 94239 - DNA, 218 bp, Homo sapiens; identical to SEQ ID NO: 31102
  chr17:80819086-80819304
  hypo

SEQ ID NO: 94240 - DNA, 36 bp, Homo sapiens
  chr17:80820742-80820778
  hypo
tgtctgtcctctcacgcgtccgaggtggctgccggc

SEQ ID NO: 94241 - DNA, 31 bp, Homo sapiens; identical to SEQ ID NO: 31103
  chr17:80821581-80821612
  hypo

SEQ ID NO: 94242 - DNA, 35 bp, Homo sapiens
  chr17:80825505-80825540
  hypo
gatttggtttagttcggatcgaggtaatcatcttg

SEQ ID NO: 94243 - DNA, 30 bp, Homo sapiens
  chr17:80827937-80827967
  hypo
tctaacaggagccccgaacctctgggtggg

SEQ ID NO: 94244 - DNA, 30 bp, Homo sapiens
  chr17:80829931-80829961
  hypo
gagggacctcaacccggttacttccctggg

SEQ ID NO: 94245 - DNA, 79 bp, Homo sapiens; identical to SEQ ID NO: 31104
  chr17:80830875-80830954
  hypo

SEQ ID NO: 94246 - DNA, 155 bp, Homo sapiens
  chr17:80831394-80831549
  hypo
acaaatcaagtccccgctactggacggggctggcagctcagctggggccggagagaaaagtcacgagcaagaaagttcttacctaaggtcctggacaggcagatacataacttctgcctttggcaacgttagatgtcatcgttccagagtaaaat

SEQ ID NO: 94247 - DNA, 696 bp, Homo sapiens; identical to SEQ ID NO: 31105
  chr17:80832187-80832883
  hypo

SEQ ID NO: 94248 - DNA, 203 bp, Homo sapiens
  chr17:80839228-80839431
  hypo
tcattcggtcaggccgcttgccgccgatgaggggtgcagagcttctgcagcatcctggggaggtcccggaacgtgggtctgggctgtgctgatgctggagcagccagcggggagagctgccaggccactcctgacagccccgcacccgctctggatggaagcttctcgctcccagccgatacgggcctgctgcctgctgctgg

SEQ ID NO: 94249 - DNA, 30 bp, Homo sapiens
  chr17:80840988-80841018
  hypo
cgtgcatgtccccggcgtccttcatgttga

SEQ ID NO: 94250 - DNA, 30 bp, Homo sapiens; identical to SEQ ID NO: 31107
  chr17:80846060-80846090
  hypo

SEQ ID NO: 94251 - DNA, 37 bp, Homo sapiens; identical to SEQ ID NO: 31108
  chr17:80847857-80847894
  hypo

SEQ ID NO: 94252 - DNA, 30 bp, Homo sapiens
  chr17:80849360-80849390
  hypo
gcgcaggtgcggagcgtctcccagccccgc

SEQ ID NO: 94253 - DNA, 30 bp, Homo sapiens
  chr17:80857064-80857094
  hypo
cctcagcgcgtgtccgcagtgcgtcctcag

SEQ ID NO: 94254 - DNA, 30 bp, Homo sapiens
  chr17:80857336-80857366
  hypo
gtgtgtccgcagcgcgtgtgtctgcacctc

SEQ ID NO: 94255 - DNA, 201 bp, Homo sapiens
  chr17:80859371-80859572
  hypo
gcctggggagcggcccggctgcctactgtggtcctgctgcctactattggtcctgcttcctggggagcggcccggctacctgcggtggtcctgctgcctggggagcggcccagctgcctactgtggtcctgcttcctggggagcggcccggctacctgccgtggtcctgctgcctggggagcggcccggctgcctactgtg

SEQ ID NO: 94256 - DNA, 128 bp, Homo sapiens
  chr17:80859832-80859960
  hypo
gatatatgcccgtagcgtcggagctgtgggactctccagctggtacatatgcccgtggcgtcggagctgtgggactctccagctgttgctgtctgtctctgcctcagttctgtcggcctttccttcac

SEQ ID NO: 94257 - DNA, 198 bp, Homo sapiens
  chr17:80860236-80860434
  hypo
agggccgtccttacgcgaagaggcctcgggctgggcttgcggctgcagactgcattgcctccgcttctcaggtgctttgtcttttctgttccctcagagttgcaggcgatggtcttctagacagcatgcagttgggtgtcgctcagggtgtggagtcctggcacatgagacgccacctgcctcgaagagctctttgtt

SEQ ID NO: 94258 - DNA, 30 bp, Homo sapiens
  chr17:80862582-80862612
  hypo
agttactgatgtgacgcctgtgttgaacat

SEQ ID NO: 94259 - DNA, 30 bp, Homo sapiens
  chr17:80863867-80863897
  hypo
tcgattctcgcctgcgcagaagttgcttac

SEQ ID NO: 94260 - DNA, 30 bp, Homo sapiens
  chr17:80864547-80864577
  hypo
tccagtttaagaaacgtttttaagttcatg

SEQ ID NO: 94261 - DNA, 141 bp, Homo sapiens
  chr17:80867213-80867354
  hypo
ctgtgtcctaatgaagaactgcgctgtcaggagcaggcggggcgggtgtgttcgcttccctctctgcctatgtgtgtttgggttgagcgggtgggtgtcacccggcccgctgtgggaggcgcatgagggtctgacctggtt

SEQ ID NO: 94262 - DNA, 236 bp, Homo sapiens
  chr17:80867974-80868210
  hypo
aagctgctgtgcacatctagacgtacaagtcttggtacgtttcacgtttcctggctgactaccaggagcagcatcgcagggtgtggggcacatgtgtgacttctcagcagccgagccaacttcccagaccctgctgctgcacgtccccatccacaagtgaccccttggtgtggtcggctctgaacgtgggccctctgggtgagtagaggcctctcgctgctgctggagtctgcctc

SEQ ID NO: 94263 - DNA, 30 bp, Homo sapiens
  chr17:80870908-80870938
  hypo
gcctccagagcacacggtgcaggggtgtca

SEQ ID NO: 94264 - DNA, 31 bp, Homo sapiens
  chr17:80873199-80873230
  hypo
ctcaacccttgggagtcgtctgcgtccccat

SEQ ID NO: 94265 - DNA, 30 bp, Homo sapiens; identical to SEQ ID NO: 31109
  chr17:80878135-80878165
  hypo

SEQ ID NO: 94266 - DNA, 30 bp, Homo sapiens
  chr17:80878834-80878864
  hypo
ggccgccgacaccacggaccctgtgggcag

SEQ ID NO: 94267 - DNA, 350 bp, Homo sapiens
  chr17:80879333-80879683
  hypo
gtgtttttgattgcctgggtacgctaacttgattttttgacagatggttggcaatggctgataaatgacactttgagacatctccatctcatctcaagtcactcccgccagcagatgaaggtacagtgagcatgggcgttcccggccggcgctgtggcggtgttagtgtgttagtcacggatggtgtttgtgttggcgactgtgcatcatgaggctgtccctgcagtagcctgataactgacaaatgggggcataattctatttggaatcccggatggtagcgtctacacggtttataaccagaaaatccaatacagccattggaatccgaatgtttaattttttattgc

SEQ ID NO: 94268 - DNA, 30 bp, Homo sapiens; identical to SEQ ID NO: 31111
  chr17:80882753-80882783
  hypo

SEQ ID NO: 94269 - DNA, 30 bp, Homo sapiens
  chr17:80885667-80885697
  hypo
tgtggggttagtcacgggtgtcgaattcac

SEQ ID NO: 94270 - DNA, 30 bp, Homo sapiens
  chr17:80887026-80887056
  hypo
gtgagaagattgaccgtttccgtgctcacg

SEQ ID NO: 94271 - DNA, 30 bp, Homo sapiens; identical to SEQ ID NO: 31112
  chr17:80887371-80887401
  hypo

SEQ ID NO: 94272 - DNA, 30 bp, Homo sapiens
  chr17:80887939-80887969
  hypo
gcgccgtgtgggcgcgtgcggggagacccg

SEQ ID NO: 94273 - DNA, 30 bp, Homo sapiens
  chr17:80888617-80888647
  hypo
tctgaagggagaagcgagacacacgctgta

SEQ ID NO: 94274 - DNA, 30 bp, Homo sapiens; identical to SEQ ID NO: 31113
  chr17:80894203-80894233
  hypo

SEQ ID NO: 94275 - DNA, 127 bp, Homo sapiens; identical to SEQ ID NO: 31114
  chr17:80895932-80896059
  hypo

SEQ ID NO: 94276 - DNA, 31 bp, Homo sapiens; identical to SEQ ID NO: 31115
  chr17:80898078-80898109
  hypo

SEQ ID NO: 94277 - DNA, 30 bp, Homo sapiens; identical to SEQ ID NO: 31116
  chr17:80898720-80898750
  hypo

SEQ ID NO: 94278 - DNA, 152 bp, Homo sapiens
  chr17:80899169-80899321
  hypo
ctcctttccctgactgcggccatggaagcttgacgcgggacctccgcacacctgaggttctccggtgggcactcgagagactcacggctctccctctcctcacagggacgcggagcttgcagtggtgagagagcagcgcaaccgtctgtgtg

SEQ ID NO: 94279 - DNA, 30 bp, Homo sapiens
  chr17:80916110-80916140
  hypo
caacggggccagaacggcgtgggatgtgtc

SEQ ID NO: 94280 - DNA, 30 bp, Homo sapiens; identical to SEQ ID NO: 31117
  chr17:80917377-80917407
  hypo

SEQ ID NO: 94281 - DNA, 30 bp, Homo sapiens; identical to SEQ ID NO: 31118
  chr17:80917847-80917877
  hypo

SEQ ID NO: 94282 - DNA, 364 bp, Homo sapiens
  chr17:80918441-80918805
  hypo
cccagacccgggcccacgtggccgctcctcacagtgacacgggagagggaggcggaccccgcagcactgggcgcgtcctcactgggtgctgcgattccctggccgtgcctctgccaccctccacggcagctgcgccccccaggcctgtggtccccgccggaccccactcatgagactcccgtcgggttaaagggagcacagggtttcagaaggacccggcgcgtggtcattttacctctgggaactagggaaggacgttcggccttcaccctggcgctccctggcgcccttgggaaatgccccttcgtggacgccgaatccccgccaccctcgggatgtgctgttgccccgtgtcccaccagac

SEQ ID NO: 94283 - DNA, 30 bp, Homo sapiens
  chr17:80923584-80923614
  hypo
gtgggcatgatcaccgtggggccatttgag

SEQ ID NO: 94284 - DNA, 202 bp, Homo sapiens
  chr17:80935244-80935446
  hypo
ggagtgactgaggtcgggtctggggttgcttcgaaagactccgggtgctcagtgttgggaggggggtgagtaccgttatgtgacagtggtctctaccccttggtgtacttaacattttcaacaaaaaaaaacttttctttgtttaaaagcactcatgggtatctggaacgcagctacagtggggagcgagcaacgccccaat

SEQ ID NO: 94285 - DNA, 30 bp, Homo sapiens
  chr17:80963016-80963046
  hypo
gctggttgatccaacgtgtgtatcgttcgg

SEQ ID NO: 94286 - DNA, 31 bp, Homo sapiens; identical to SEQ ID NO: 31121
  chr17:80963751-80963782
  hypo

SEQ ID NO: 94287 - DNA, 165 bp, Homo sapiens
  chr17:80964418-80964583
  hypo
gatgtcccagggcacgagcacccgaggcgccccttacagccactggcagcccctcaacggcagccgctgtgctatcccgacgccgtggctgtgctatcccgacgccgtggctgtgctctccagagcatgatccgggaacgtgcaggaggcggccttctgtgcccg

SEQ ID NO: 94288 - DNA, 75 bp, Homo sapiens
  chr17:80965454-80965529
  hypo
gacaggtgagtacacgccagcccactcctgagagcctggatcccgctggggcatgagaggcgcctctcggacggg

SEQ ID NO: 94289 - DNA, 134 bp, Homo sapiens; identical to SEQ ID NO: 31124
  chr17:80965856-80965990
  hypo

SEQ ID NO: 94290 - DNA, 30 bp, Homo sapiens
  chr17:80966200-80966230
  hypo
ggcggagcagaaagcgcaggccgctggagt

SEQ ID NO: 94291 - DNA, 30 bp, Homo sapiens
  chr17:80967610-80967640
  hypo
ggggccgggctgaggcgggaggcaaatgaa

SEQ ID NO: 94292 - DNA, 98 bp, Homo sapiens
  chr17:80968078-80968176
  hypo
gctgctgctgagccacgccccagggtccagagtcaccagcaccgggggcttcggccgccactcctgagcagcgatgttgaaggcgaaggtgaaggagg

SEQ ID NO: 94293 - DNA, 30 bp, Homo sapiens
  chr17:80978691-80978721
  hypo
actggagaacaccccgagttttctgctggg

SEQ ID NO: 94294 - DNA, 83 bp, Homo sapiens
  chr17:80982743-80982826
  hypo
ctcctgccagacacatcggccggcacagagggcagcaaacggctactgctggccaggatcaaagcagccggcagctgcaagac

SEQ ID NO: 94295 - DNA, 31 bp, Homo sapiens
  chr17:80983791-80983822
  hypo
ctcggggtgacatgcacgatgctggtggcct

SEQ ID NO: 94296 - DNA, 343 bp, Homo sapiens
  chr17:80995218-80995561
  hypo
tctcccaccctctctgcgttctccaacccggagcagtgcccctcttcataccaggtagcagtttaatttctagcattaatccctaaagtttagccagctcaacccagttagccagaggatcccagatgtcaaaaagccaggggcataaacaggcgcagggaggaaatgcacccggggaggcgagcgcctgttctgccctgggatggatggtgggccgtgtctccagggccgctgcagccaagcctccatcatcgctgcagggccaggtgagtgccctgaagctcctcacgagaaacacaggcggaggcacctgtgaggacgaagggccggaaggggccttcca

SEQ ID NO: 94297 - DNA, 31 bp, Homo sapiens
  chr17:80997107-80997138
  hypo
tagacacactgctgggcgcccgccgcccgcc

SEQ ID NO: 94298 - DNA, 35 bp, Homo sapiens
  chr17:80997454-80997489
  hypo
actgctgggcgcccaccgcccgcccctgttctaga

SEQ ID NO: 94299 - DNA, 295 bp, Homo sapiens
  chr17:81008590-81008885
  hypo
cacggggaaggtgttcggggcttaagggcaggtttttagggcacgtgtttggggtaagtgtgctgggcacacaggcaggtgtgtgggcacggaggaggtgtgcaggtaggtgtgtgggatgcgcaggcaggtgtgcacggcaggtgcacgggcaggtatggggcacgggcatgtatgcaggacgcagagcaggtgtgtgaagcaggtgtgcaggcacaagacgtgtgtgtggggcatgggcaagtgtgccgggaatgtgtgacggcagacgtgtggggtgcgaggttgtgtgggg

SEQ ID NO: 94300 - DNA, 37 bp, Homo sapiens; identical to SEQ ID NO: 54779
  chr17:81009161-81009198
  hypo

SEQ ID NO: 94301 - DNA, 30 bp, Homo sapiens
  chr17:81016170-81016200
  hypo
gactgagaagccgccgcgtgcacctggccc

SEQ ID NO: 94302 - DNA, 83 bp, Homo sapiens
  chr17:81021404-81021487
  hypo
tgcaccgtgcagggcggcggccagcacagcttggtgcccaggaactgctgacggaccgaaggaggagcgcctgagacagtgcc

SEQ ID NO: 94303 - DNA, 30 bp, Homo sapiens; identical to SEQ ID NO: 31127
  chr17:81024108-81024138
  hypo

SEQ ID NO: 94304 - DNA, 30 bp, Homo sapiens
  chr17:81024338-81024368
  hypo
ctggaggagcaccccgggtccgagccagcc

SEQ ID NO: 94305 - DNA, 457 bp, Homo sapiens; identical to SEQ ID NO: 54781
  chr17:81036701-81037158
  hypo

SEQ ID NO: 94306 - DNA, 50 bp, Homo sapiens; identical to SEQ ID NO: 54782
  chr17:81038241-81038291
  hypo

SEQ ID NO: 94307 - DNA, 203 bp, Homo sapiens; identical to SEQ ID NO: 11582
  chr17:81039184-81039387
  hypo

SEQ ID NO: 94308 - DNA, 423 bp, Homo sapiens
  chr17:81042841-81043264
  hypo
gaggtggagcaggtgtatctgcgctgtgcggcgggtgccgtggagtggatgtacccaacaggtgctctcatcgttaacctgcggcccaacaccttctcgcctgcccggcacctgaccgtgtgcatcaggtccttcacggactcctcgggggccaatatttatttggaaaaaactggagaactgagactgctggtaccagacggggacggcaggcccggccgggtgcagtgttttggcctggagcagggcggcctgttcgtggaggccacgccgcagcaggatatcggccggaggaccacaggcttccagtacgagctggttaggaggcacagggcgtcggacctgcacgagctgtctggtgagtgtcctgcctggggcgggggcggcgggcctcgtcatcacggggctggtgatgtggcaggt

SEQ ID NO: 94309 - DNA, 794 bp, Homo sapiens
  chr17:81048443-81049237
  hypo
cagtgaggggaccctcgggtggactggggtcaccacgcttctgtcgttgaccagctctctctcagccgaggccacctccactcacatgaggcgccctgggctgggacctctggccctgtggtacggggcaggtgctggcgtgcagtctcacctgtggaggataaaagtgctgcctgaaatttgagatcccccagtgctccctccttgttgcttccggacgtgagtggtggtctgtgctgctggcctctgtccagcacgtgcctgcatcaggcccagcatggtctgcagacccccagccggcgagtgggatgggggtccacataggtgaactaagtgtcaagggtgggccacaccccggggcccccataggagagcgcaccgggcggcttccagcttgggggtcaggaggcccccgtggtgggggctgcagtgtgagtctgtacacatcagcaggaaggggatttggccagaagctcccattctggagggttgctgggatggcagaggtgcccccccagtgccaggctggaccggcctcaaggtgctcagcagtgccaggctggaccggcctcgaggcgcccccagtgccaggctggaccgggcctcgaggcgctcagcaggctgtgcagtttctttttcctgataccttaatggaagcaaatgcaggaggaggtgggtgggccggtgagtcaggcactgagcccggctgggaggcgccctcacccctgcctggcggaaagtgctggccttgtctctgggtccctcctacctccaccctgcggggtccacaaaga

SEQ ID NO: 94310 - DNA, 30 bp, Homo sapiens; identical to SEQ ID NO: 31130
  chr17:81050074-81050104
  hypo

SEQ ID NO: 94311 - DNA, 381 bp, Homo sapiens
  chr17:81050554-81050935
  hypo
gagcacaaagacccctccccacgaaggccctgggacatggccggactgagggtcttgctctcggacatgtgcccatcatggccgaggtgcaggtgcctttggtccaggtggggccgaggggtcccctgggtgagaccccgtcgtggtcgaggttgtgttttctgtctcccgtgctgccggcccctccagcacgtgccgccaactcacatttgaagtggcgttggtcacaaaggtgccttgacgtggacaccctccctgacttggctttgctgagtgtgagatcctttgacggtggtgggcggcgttccagagcctgtcccgtccaggctgcttcctgactctgcctttcttctccagcgccgtgccgtccctgcagtgaca

SEQ ID NO: 94312 - DNA, 17 bp, Homo sapiens
  chr17:81061265-81061282
  hypo
atgggaggccgggtgcg

SEQ ID NO: 94313 - DNA, 214 bp, Homo sapiens
  chr17:81062113-81062327
  hypo
acgcgaccatgggtacgttggccacctgaaggttgagtcccgcagcctagagactggagcgtggggaccaggaggagcttcttagcggaactgggctggggctcatgcagccctccaggagcccccgacgcgacgccctggctcatcccgggtgaagaggctgctgagtctgaactgatgacagtggacgggtggccgccggttcccaacgcat

SEQ ID NO: 94314 - DNA, 30 bp, Homo sapiens
  chr17:81062551-81062581
  hypo
gggcaaagggagctgcgtgctgtgagagac

SEQ ID NO: 94315 - DNA, 428 bp, Homo sapiens
  chr17:81068539-81068967
  hypo
gacagccccgtccagcgctgacctgtgggaaaacggcctcttggcaggtcagtccaggcggtggtttccctggagccaggggctgggttccagagcccggccttccacccctacagcgggcagggctgacgggcgcgaaactgggagcgtagctctgggaggtggcctcggggaaccattttcccaccgggcgggcccttttgttctcctgtctgtgcgcgcagggcagccaggtcccgggatggaccctattttgagagatttattgactttctttttcttttgaaagggctgtggccaggcagaatattgaagcgaaggagcccgacagtagccgctctctcagggtctaaggcaacagagagctcccaggtgtgtatagagcggggcgggagtcgggtctgcaggacggccggtggggaaaggcc

SEQ ID NO: 94316 - DNA, 30 bp, Homo sapiens; identical to SEQ ID NO: 31133
  chr17:81080825-81080855
  hypo

SEQ ID NO: 94317 - DNA, 193 bp, Homo sapiens
  chr17:81102240-81102433
  hypo
ctcctgggcttttctccgctgctcccacagagccctgggcctgggagggtgggaccacccaggaaggggacaattctgggccccgggatgcccccccgctctggggacaaggggatggtttgttaaaatcccactcccgctctgttgtgaaagatgattcttgtcttcctgcaccactcggcctgtcctgagg

SEQ ID NO: 94318 - DNA, 178 bp, Homo sapiens
  chr17:81104182-81104360
  hypo
tgcatgttgttttaacgtatgtgagtggaaccccttgttctcatgccgcagcccattgtgtgaataggctacactatacctgtctgttcgattgttgatggctatttgggttgcttagtttatggccattttgaatatgctgccatggctgggtgaacatacgcgtttccgctgggtg

SEQ ID NO: 94319 - DNA, 30 bp, Homo sapiens
  chr18:48897-48927
  hypo
cctggctaaggagccgcaccccagtcctcg

SEQ ID NO: 94320 - DNA, 45 bp, Homo sapiens
  chr18:72941-72986
  hypo
gggaaacgagcgaaagtccgtctcgaaagaaacaaaacaaaacaa

SEQ ID NO: 94321 - DNA, 30 bp, Homo sapiens
  chr18:165387-165417
  hypo
tctttgtttacccccgaaggtacagtatga

SEQ ID NO: 94322 - DNA, 93 bp, Homo sapiens
  chr18:196511-196604
  hypo
agactccatctcaaaaaaaaaaaaaattaagtaagtttttgtttgtattaattaaaattaatttacagtcgcgtgtattaaatatgtgactgt

SEQ ID NO: 94323 - DNA, 251 bp, Homo sapiens
  chr18:196806-197057
  hypo
acttaggtttcctacatttaccgtacttactggaacatagttcgaaatataaacatcagtcttctctagttcatgccacggctgtctcttgcctggagccgcacagtagtcttaactgatatctggcttctgcctttgcccctttgcagtttctctacacagcccgcaatgtcctttttaaaatgacgataggattatgttggccccttgttcagtactccctagtgattttctaccgcagtcctaaatcc

SEQ ID NO: 94324 - DNA, 30 bp, Homo sapiens
  chr18:245845-245875
  hypo
gcaaagggagtgagtcgaaacataaactca

SEQ ID NO: 94325 - DNA, 138 bp, Homo sapiens
  chr18:380755-380893
  hypo
tgaaatttgggaatgtctttacgttcttagagacctcatctgcacaggcctcagctttcaactcaggcagagtacgtaagtttgcatgagaacgtagagtagacaaaagtgagagacggcagaaagaaagaggtacag

SEQ ID NO: 94326 - DNA, 43 bp, Homo sapiens
  chr18:460334-460377
  hypo
cccagcccaagtttcattttacgcatcagtgaaagcctcagcc

SEQ ID NO: 94327 - DNA, 22 bp, Homo sapiens
  chr18:483103-483125
  hypo
aaatcacatgtgatgctgtagc

SEQ ID NO: 94328 - DNA, 1379 bp, Homo sapiens; identical to SEQ ID NO: 54786
  chr18:499745-501124
  hypo

SEQ ID NO: 94329 - DNA, 28 bp, Homo sapiens
  chr18:558857-558885
  hypo
cgcacccggcccaaacaccattatttgt

SEQ ID NO: 94330 - DNA, 565 bp, Homo sapiens; identical to SEQ ID NO: 31138
  chr18:580158-580723
  hypo

SEQ ID NO: 94331 - DNA, 16 bp, Homo sapiens
  chr18:597430-597446
  hypo
aaaaactaagcggagc

SEQ ID NO: 94332 - DNA, 98 bp, Homo sapiens; identical to SEQ ID NO: 31139
  chr18:635704-635802
  hypo

SEQ ID NO: 94333 - DNA, 30 bp, Homo sapiens; identical to SEQ ID NO: 31140
  chr18:686331-686361
  hypo

SEQ ID NO: 94334 - DNA, 423 bp, Homo sapiens; identical to SEQ ID NO: 54788
  chr18:712015-712438
  hypo

SEQ ID NO: 94335 - DNA, 1572 bp, Homo sapiens; identical to SEQ ID NO: 54790
  chr18:811502-813074
  hypo

SEQ ID NO: 94336 - DNA, 22 bp, Homo sapiens
  chr18:883065-883087
  hypo
cggtctactaaattgctacttg

SEQ ID NO: 94337 - DNA, 164 bp, Homo sapiens
  chr18:930035-930199
  hypo
ccagatgacaatagctggttacgtcgactggttaagcttggctttctcattagtgtctttgactataatctggctcgatgttcatattcaccatgtgactcaaaatggtgaactccatttgtttctcgccacagaggatttacgtccatttttttcttaatttt

SEQ ID NO: 94338 - DNA, 30 bp, Homo sapiens; identical to SEQ ID NO: 31143
  chr18:940771-940801
  hypo

SEQ ID NO: 94339 - DNA, 30 bp, Homo sapiens; identical to SEQ ID NO: 31144
  chr18:941133-941163
  hypo

SEQ ID NO: 94340 - DNA, 96 bp, Homo sapiens
  chr18:1098041-1098137
  hypo
tgacagcatgctggcagccctcgccggctctgggtgcctcctcgccggctctgggtgcctcctcgcctcgcgcccattctggccgcacttgaggag

SEQ ID NO: 94341 - DNA, 27 bp, Homo sapiens
  chr18:1406559-1406586
  hypo
gactccgtctcaaaaaaaaaaaaaaaa

SEQ ID NO: 94342 - DNA, 81 bp, Homo sapiens
  chr18:1772177-1772258
  hypo
aatgacttatttggttaagagcgaggagttgtaagattgcaaatttttggccgggcgcagtggctcacgcctgtaatccca

SEQ ID NO: 94343 - DNA, 30 bp, Homo sapiens; identical to SEQ ID NO: 11593
  chr18:1777065-1777095
  hypo

SEQ ID NO: 94344 - DNA, 78 bp, Homo sapiens
  chr18:1798115-1798193
  hypo
atgaaccacacccatgtaacacggcaaacttaataaatgttacctgtggccgggcgcggtggcccatgtctgtaatcc

SEQ ID NO: 94345 - DNA, 47 bp, Homo sapiens
  chr18:1800380-1800427
  hypo
atagaagttgagttttctagtcggccgtcttttattcctctagacta

SEQ ID NO: 94346 - DNA, 94 bp, Homo sapiens
  chr18:1847232-1847326
  hypo
taccaacttagtttcccatagcgggggttcccaacccctgataccggtcagaggcctgttaagaatcaggctgcacagcagaaactgagcagca

SEQ ID NO: 94347 - DNA, 35 bp, Homo sapiens
  chr18:1928648-1928683
  hypo
aactctagcgggaaaagaatcgggagaccctgctc

SEQ ID NO: 94348 - DNA, 64 bp, Homo sapiens
  chr18:1955268-1955332
  hypo
cctacaccatccctgcagcagcggcaggcgagagtgacaatgcgaggccagggtagagagtggt

SEQ ID NO: 94349 - DNA, 330 bp, Homo sapiens
  chr18:2405968-2406298
  hypo
ggtgggacagttggggcacaccgggaaggttggccagcctgggcggaagcactagactgccctgccgtgcagtctaagacaggcttggcaaggccatcagggcgtccttgagccgaagccacccatcgggagagtcttagtaccgactgccacactcatcattggcagcagcagctcgtgggaatttcagcctcagtgaaaaagcggtaaaggatttgcgagcaccgcagcaggggccctaagtcgattctgggcagcacccggtagccgggattccatgaggtgcattcgcatggaggtcttggaagcgggtattgggaagggagaagg

SEQ ID NO: 94350 - DNA, 22 bp, Homo sapiens
  chr18:2417423-2417445
  hypo
tggatcaccaggtcaggagatc

SEQ ID NO: 94351 - DNA, 21 bp, Homo sapiens
  chr18:2417684-2417705
  hypo
ggttgtgcagcaaatattaca

SEQ ID NO: 94352 - DNA, 21 bp, Homo sapiens
  chr18:2485456-2485477
  hypo
tgagacagactcttgccctgt

SEQ ID NO: 94353 - DNA, 93 bp, Homo sapiens
  chr18:2565717-2565810
  hypo
atagaaagagctcaaacgtttgttcggtgagtaatgaatgttaatcctatcactaaaaaagaaaatgttgaggccgggtgcagtggctcaagc

SEQ ID NO: 94354 - DNA, 51 bp, Homo sapiens; identical to SEQ ID NO: 11594
  chr18:2571377-2571428
  hypo

SEQ ID NO: 94355 - DNA, 30 bp, Homo sapiens; identical to SEQ ID NO: 31147
  chr18:2755855-2755885
  hypo

SEQ ID NO: 94356 - DNA, 1881 bp, Homo sapiens; identical to SEQ ID NO: 54809
  chr18:2846544-2848425
  hypo

SEQ ID NO: 94357 - DNA, 193 bp, Homo sapiens
  chr18:2851483-2851676
  hypo
catagagagagtgctccgagactgagggtgaaaccgctgggaaatggggtgtgatggaggtactcatttaaataacaggaggagggcttctgcgcccagccatgtcactgggccctgacagcctccttagctgtagagactgactacaggccgcaggtgccttgtcagaaggattagacggtgccctgtttac

SEQ ID NO: 94358 - DNA, 742 bp, Homo sapiens; identical to SEQ ID NO: 11596
  chr18:2906054-2906796
  hypo

SEQ ID NO: 94359 - DNA, 153 bp, Homo sapiens; identical to SEQ ID NO: 11597
  chr18:2907033-2907186
  hypo

SEQ ID NO: 94360 - DNA, 30 bp, Homo sapiens
  chr18:2909774-2909804
  hypo
aaagtgctggtgaacgacggggatgtttac

SEQ ID NO: 94361 - DNA, 128 bp, Homo sapiens
  chr18:2910111-2910239
  hypo
gttatgagggctgtgccggcacagcccgccatgccctggccacctctgatagccaccattgcacccctctctcaggctccgacagtcatcctgacaacctgggccaggacaagcgggaggctccctca

SEQ ID NO: 94362 - DNA, 35 bp, Homo sapiens
  chr18:2910451-2910486
  hypo
gctgggctgctctgcccggacggagggcagctcca

SEQ ID NO: 94363 - DNA, 149 bp, Homo sapiens
  chr18:2913120-2913269
  hypo
gagagagacgcctacgtggaagcagtgctgtcggtctccaacgccagcgtggcccagctgcataccgctgggtacaggagagagttcctggaataccaccgccctccaggagctttgcatacctgcgggggcccgggggcattccacct

SEQ ID NO: 94364 - DNA, 128 bp, Homo sapiens
  chr18:2921215-2921343
  hypo
ggctctggggtgatccaaggacgcagctcagaactgcttagaagaggagccggagctgcctgaggaaatggaatggcagccacagaaacgatggaaaagcgtccttcgtataaattctggggcagatc

SEQ ID NO: 94365 - DNA, 217 bp, Homo sapiens
  chr18:2921974-2922191
  hypo
cccccaccttgggcccagccccgcccacatgctggggcggtgggcagagggctgcctgccggagaggtacctgtggaaggcggagaacaagctgctgggggacagcatcagggggccccggggcaagattgtgcccttgtcattgacccagtgcaggtagccacgggtcatgtcggccatgccgatggcacgagccgagcagtacagaaacttgtag

SEQ ID NO: 94366 - DNA, 212 bp, Homo sapiens
  chr18:2937550-2937762
  hypo
aaaaaaaaaaaaaaaaaaagtgcgacgggtttcgactggtgaatacaaatacagaggcagccatcacgttatgtggaacactgaaataatttaccatctaatttgagagtacctggagccaaattaaacaaacgattacctttcttctttgacggcgagtctactttagctgccggtttggattctgagggcgcctccgctaaggctgcgtt

SEQ ID NO: 94367 - DNA, 30 bp, Homo sapiens
  chr18:2944634-2944664
  hypo
accgcgcccggcctccacaaaccttttaag

SEQ ID NO: 94368 - DNA, 30 bp, Homo sapiens; identical to SEQ ID NO: 31152
  chr18:2947828-2947858
  hypo

SEQ ID NO: 94369 - DNA, 30 bp, Homo sapiens
  chr18:3000510-3000540
  hypo
atcaccatatgggcacgactacacaaagca

SEQ ID NO: 94370 - DNA, 43 bp, Homo sapiens; identical to SEQ ID NO: 31153
  chr18:3011388-3011431
  hypo

SEQ ID NO: 94371 - DNA, 162 bp, Homo sapiens
  chr18:3051274-3051436
  hypo
ataaattaattctcacagaaacgtgaagcagggaagatgctcactgcgtgaagttgggagcagcatcggtcctgcccagtgctgtgcatgggtgacttgatcgcatgagactttgggccgagaggggctttattcatactcgctagcagaaggagtagatgc

SEQ ID NO: 94372 - DNA, 31 bp, Homo sapiens; identical to SEQ ID NO: 31154
  chr18:3061642-3061673
  hypo

SEQ ID NO: 94373 - DNA, 136 bp, Homo sapiens; identical to SEQ ID NO: 31155
  chr18:3119809-3119945
  hypo

SEQ ID NO: 94374 - DNA, 127 bp, Homo sapiens
  chr18:3135594-3135721
  hypo
actcctgcagaattagaacagcggacacggaaacagtaggatttcccctcggccaagtcaaacagagcaaagcggggagacttcacagggagctccgtgttcactcgctgccagttttctgttcctg

SEQ ID NO: 94375 - DNA, 272 bp, Homo sapiens; identical to SEQ ID NO: 31156
  chr18:3214252-3214524
  hypo

SEQ ID NO: 94376 - DNA, 601 bp, Homo sapiens; identical to SEQ ID NO: 31157
  chr18:3214823-3215424
  hypo

SEQ ID NO: 94377 - DNA, 36 bp, Homo sapiens; identical to SEQ ID NO: 11600
  chr18:3262088-3262124
  hypo

SEQ ID NO: 94378 - DNA, 31 bp, Homo sapiens
  chr18:3330572-3330603
  hypo
tgtcacaggggaatgacggcagctgtgccaa

SEQ ID NO: 94379 - DNA, 330 bp, Homo sapiens
  chr18:3360374-3360704
  hypo
acaaagcttgccttgtctcaccgacccctgctgtggaagagccctgcgtccttcagcagcaaagtagggccacgcccctcgggcccggcctctggcctccgtcacgctcccttctcactgccgctccaggcctcccggacccaggtcaccttcgcttggattataagaaccaatgccccttttaggcttccggggcaggctgacttccattgctctttatccccggaaatgaccgcacatcagccttcccagctctaagctgggaaagaaaatccttaagtgatttccccagtagaggctcttagccgggactgccgatctacagctggc

SEQ ID NO: 94380 - DNA, 30 bp, Homo sapiens
  chr18:3360913-3360943
  hypo
gaggagtccccgaggcggagtctgagtgcc

SEQ ID NO: 94381 - DNA, 37 bp, Homo sapiens
  chr18:3412986-3413023
  hypo
gcctgggcgacaaaacgaggctctgtccccaaacacc

SEQ ID NO: 94382 - DNA, 239 bp, Homo sapiens
  chr18:3415133-3415372
  hypo
gcaggcaccatgatcccggctctgccttccggcgacccggagctcattgctctcatcctggagtggctcaagagccaggcccgtttggcagcttctgtcgatgctgcctggcccctgtggacaccaagccagcttaccaaaaccagaggcagaaagctgagggttcggtgtccacacacctggatgagcagaactggaatcttatgatgcgcaaaagcctattgcgaaatggtcagagg

SEQ ID NO: 94383 - DNA, 36 bp, Homo sapiens
  chr18:3417142-3417178
  hypo
tgttgttgttgttgttcgttgtttgtttgttttgag

SEQ ID NO: 94384 - DNA, 91 bp, Homo sapiens
  chr18:3421738-3421829
  hypo
tgtactctttctgtttaataaaaaaattaactgtaaagcaacctcaggcaggtccttcaggaggtattgcaaaagacggcattgttaccat

SEQ ID NO: 94385 - DNA, 87 bp, Homo sapiens; identical to SEQ ID NO: 31160
  chr18:3443524-3443611
  hypo

SEQ ID NO: 94386 - DNA, 121 bp, Homo sapiens
  chr18:3443850-3443971
  hypo
ttttaagtagtaaataaaataaaagaaggaaagtatttgcatactgcctggcatgctgtatacaataaatgattgtattctttcttttttttttttttttgagacggagtctagctctttc

SEQ ID NO: 94387 - DNA, 95 bp, Homo sapiens; identical to SEQ ID NO: 31161
  chr18:3445348-3445443
  hypo

SEQ ID NO: 94388 - DNA, 632 bp, Homo sapiens; identical to SEQ ID NO: 11602
  chr18:3447897-3448529
  hypo

SEQ ID NO: 94389 - DNA, 36 bp, Homo sapiens; identical to SEQ ID NO: 54821
  chr18:3448759-3448795
  hypo

SEQ ID NO: 94390 - DNA, 3100 bp, Homo sapiens; identical to SEQ ID NO: 54822
  chr18:3449164-3452264
  hypo

SEQ ID NO: 94391 - DNA, 43 bp, Homo sapiens; identical to SEQ ID NO: 31166
  chr18:3534579-3534622
  hypo

SEQ ID NO: 94392 - DNA, 39 bp, Homo sapiens
  chr18:3535410-3535449
  hypo
aatagggaaaaagggccgggcgtggtggctcacgcccgt

SEQ ID NO: 94393 - DNA, 27 bp, Homo sapiens
  chr18:3553809-3553836
  hypo
cgtgagccaccacgcccggcccacaca

SEQ ID NO: 94394 - DNA, 18 bp, Homo sapiens
  chr18:3567918-3567936
  hypo
tagagtttccctctgtcg

SEQ ID NO: 94395 - DNA, 33 bp, Homo sapiens
  chr18:3570504-3570537
  hypo
aacctcagctgatctgcccgcctcagcctctca

SEQ ID NO: 94396 - DNA, 263 bp, Homo sapiens; identical to SEQ ID NO: 31169
  chr18:3581879-3582142
  hypo

SEQ ID NO: 94397 - DNA, 24 bp, Homo sapiens
  chr18:3588162-3588186
  hypo
tatatatttttggggccgggcgct

SEQ ID NO: 94398 - DNA, 31 bp, Homo sapiens
  chr18:3599046-3599077
  hypo
caggcgtgagccactgcgcccagcaaagact

SEQ ID NO: 94399 - DNA, 37 bp, Homo sapiens; identical to SEQ ID NO: 31170
  chr18:3600254-3600291
  hypo

SEQ ID NO: 94400 - DNA, 36 bp, Homo sapiens
  chr18:3600530-3600566
  hypo
gccagaaacattctttttattcgtttttattataat

SEQ ID NO: 94401 - DNA, 77 bp, Homo sapiens
  chr18:3608038-3608115
  hypo
gaccagctcagctgggcgtggtggcctgtaatcccagcattttgggaggatgcgggcagatcatgtgaagtcgggag

SEQ ID NO: 94402 - DNA, 94 bp, Homo sapiens
  chr18:3610053-3610147
  hypo
ctcaaaaataaaataaaaaattgctttaaaaaataaaaattcatctcatcgctgttctcaattcatatgtcctctccttcgagagggctttaaa

SEQ ID NO: 94403 - DNA, 28 bp, Homo sapiens
  chr18:3613114-3613142
  hypo
gcatgagccaccacgcctggccttttag

SEQ ID NO: 94404 - DNA, 31 bp, Homo sapiens; identical to SEQ ID NO: 31172
  chr18:3614529-3614560
  hypo

SEQ ID NO: 94405 - DNA, 18 bp, Homo sapiens
  chr18:3636418-3636436
  hypo
ggtttgttttttgagacg

SEQ ID NO: 94406 - DNA, 155 bp, Homo sapiens; identical to SEQ ID NO: 31174
  chr18:3637283-3637438
  hypo

SEQ ID NO: 94407 - DNA, 30 bp, Homo sapiens
  chr18:3640433-3640463
  hypo
gagacagacagcgggcgctctcagctcagg

SEQ ID NO: 94408 - DNA, 23 bp, Homo sapiens
  chr18:3647472-3647495
  hypo
ttttttttttttaaaccgagact

SEQ ID NO: 94409 - DNA, 25 bp, Homo sapiens
  chr18:3657608-3657633
  hypo
ttttttttttttgagacggagtctt

SEQ ID NO: 94410 - DNA, 25 bp, Homo sapiens
  chr18:3662972-3662997
  hypo
gtaagaacctgaatctcggctgggt

SEQ ID NO: 94411 - DNA, 100 bp, Homo sapiens
  chr18:3668965-3669065
  hypo
cgagtaagactctgtctcaaaataaataaataaataaattaaaaagcaatagaatgatctacataatatttgacatgttaatattcgtacagcatctttg

SEQ ID NO: 94412 - DNA, 80 bp, Homo sapiens
  chr18:3669444-3669524
  hypo
accctagtaaggaaagagacacaagcggctggacgtgttgggaaacacatcggcagaagaagacacgagtggttatgtgt

SEQ ID NO: 94413 - DNA, 19 bp, Homo sapiens
  chr18:3702319-3702338
  hypo
ctgacgtctaccttgaatt

SEQ ID NO: 94414 - DNA, 44 bp, Homo sapiens; identical to SEQ ID NO: 31177
  chr18:3729157-3729201
  hypo

SEQ ID NO: 94415 - DNA, 1037 bp, Homo sapiens; identical to SEQ ID NO: 11607
  chr18:3879109-3880146
  hypo

SEQ ID NO: 94416 - DNA, 30 bp, Homo sapiens
  chr18:3880495-3880525
  hypo
gtgccatctgcgaccgtgtttttttggcag

SEQ ID NO: 94417 - DNA, 30 bp, Homo sapiens
  chr18:3881532-3881562
  hypo
ctcattatgtaccccgacctagtgtcgatc

SEQ ID NO: 94418 - DNA, 30 bp, Homo sapiens
  chr18:3931079-3931109
  hypo
gctgggccagtcccacgaactgctcctgcc

SEQ ID NO: 94419 - DNA, 30 bp, Homo sapiens
  chr18:3955020-3955050
  hypo
cgcagaggatccaaccggcaaatgcatgtg

SEQ ID NO: 94420 - DNA, 196 bp, Homo sapiens
  chr18:3986861-3987057
  hypo
attgtcctgagctccccggatactggacccttcaatggtgacaccctgcctcccacaaaaatgtcctatgatttagcaactgaaaagttaatgctcgacacaggacgaggctctgactacgcagagccattttgattggacactggtttaataacttgactatcaccctgcaaatagcgctcgtttccaggtatgt

SEQ ID NO: 94421 - DNA, 18 bp, Homo sapiens
  chr18:4008918-4008936
  hypo
tttgaaacggagtctcgc

SEQ ID NO: 94422 - DNA, 77 bp, Homo sapiens; identical to SEQ ID NO: 31179
  chr18:4009175-4009252
  hypo

SEQ ID NO: 94423 - DNA, 253 bp, Homo sapiens; identical to SEQ ID NO: 54827
  chr18:4454777-4455030
  hypo

SEQ ID NO: 94424 - DNA, 13 bp, Homo sapiens
  chr18:4455258-4455271
  hypo
cggaggctgagcg

SEQ ID NO: 94425 - DNA, 97 bp, Homo sapiens; identical to SEQ ID NO: 54829
  chr18:4455631-4455728
  hypo

SEQ ID NO: 94426 - DNA, 18 bp, Homo sapiens
  chr18:4509886-4509904
  hypo
aaaagtatctcagcagcc

SEQ ID NO: 94427 - DNA, 64 bp, Homo sapiens
  chr18:5149402-5149466
  hypo
tgaaaatagagatacaaatgtcgtagccaagtgtccaggaaccgttcagctgagcttcatatta

SEQ ID NO: 94428 - DNA, 30 bp, Homo sapiens; identical to SEQ ID NO: 31180
  chr18:5285184-5285214
  hypo

SEQ ID NO: 94429 - DNA, 19 bp, Homo sapiens
  chr18:5441430-5441449
  hypo
aaagaatacaggtaaaaat

SEQ ID NO: 94430 - DNA, 18 bp, Homo sapiens
  chr18:5441748-5441766
  hypo
caccgcgcccggcctcga

SEQ ID NO: 94431 - DNA, 41 bp, Homo sapiens
  chr18:5533863-5533904
  hypo
agccataaagaaacccaaggccgggcgccgtggctgacgcc

SEQ ID NO: 94432 - DNA, 429 bp, Homo sapiens; identical to SEQ ID NO: 54836
  chr18:5542728-5543157
  hypo

SEQ ID NO: 94433 - DNA, 24 bp, Homo sapiens
  chr18:5617635-5617659
  hypo
aacgcaaataacaaggaaggatta

SEQ ID NO: 94434 - DNA, 1213 bp, Homo sapiens; identical to SEQ ID NO: 11615
  chr18:5628270-5629483
  hypo

SEQ ID NO: 94435 - DNA, 256 bp, Homo sapiens; identical to SEQ ID NO: 11616
  chr18:5629569-5629825
  hypo

SEQ ID NO: 94436 - DNA, 530 bp, Homo sapiens; identical to SEQ ID NO: 11617
  chr18:5630124-5630654
  hypo

SEQ ID NO: 94437 - DNA, 295 bp, Homo sapiens; identical to SEQ ID NO: 54844
  chr18:5894650-5894945
  hypo

SEQ ID NO: 94438 - DNA, 1228 bp, Homo sapiens; identical to SEQ ID NO: 54845
  chr18:5895017-5896245
  hypo

SEQ ID NO: 94439 - DNA, 38 bp, Homo sapiens; identical to SEQ ID NO: 54846
  chr18:6414307-6414345
  hypo

SEQ ID NO: 94440 - DNA, 25 bp, Homo sapiens
  chr18:6430134-6430159
  hypo
gcccggcctgacataaagttttgtg

SEQ ID NO: 94441 - DNA, 30 bp, Homo sapiens; identical to SEQ ID NO: 54849
  chr18:6646431-6646461
  hypo

SEQ ID NO: 94442 - DNA, 30 bp, Homo sapiens; identical to SEQ ID NO: 54850
  chr18:6659987-6660017
  hypo

SEQ ID NO: 94443 - DNA, 30 bp, Homo sapiens; identical to SEQ ID NO: 54852
  chr18:6795203-6795233
  hypo

SEQ ID NO: 94444 - DNA, 499 bp, Homo sapiens
  chr18:6929366-6929865
  hypo
gggagagccctgtagagtccccgcccagcgtgcccacccagggtttccacccagtgtccccgcccaggtcctcaaccaggtccccgcccagcgtccccgcccagcctcccggggtctacaccaggccacctgcgctcgctggttgacagcacagccccttccggctagcttgacggcctccgcccgatccaccctgcgtgaatacaattatttccctctgccttccactcggagagagcggccaggatgccaactggcttcactggaaacaccccggccccccagccctcctggggcatctctaggtgacaccccacaaggcctgaggcctctacgccttctctcccatccgcagtgaccctgcctcgcacctgccacgtgggtccagccacactgtcccggcagacgctctcaccttagcctcgggctggacttactgcttccaaaagcgctgggcacagccttatatgactgaccccgcccccgagtcccaggccgc

SEQ ID NO: 94445 - DNA, 30 bp, Homo sapiens; identical to SEQ ID NO: 54853
  chr18:6950931-6950961
  hypo

SEQ ID NO: 94446 - DNA, 70 bp, Homo sapiens; identical to SEQ ID NO: 31189
  chr18:6953008-6953078
  hypo

SEQ ID NO: 94447 - DNA, 30 bp, Homo sapiens; identical to SEQ ID NO: 54854
  chr18:7037492-7037522
  hypo

SEQ ID NO: 94448 - DNA, 281 bp, Homo sapiens; identical to SEQ ID NO: 54855
  chr18:7116490-7116771
  hypo

SEQ ID NO: 94449 - DNA, 56 bp, Homo sapiens; identical to SEQ ID NO: 54856
  chr18:7116826-7116882
  hypo

SEQ ID NO: 94450 - DNA, 30 bp, Homo sapiens; identical to SEQ ID NO: 54860
  chr18:7127507-7127537
  hypo

SEQ ID NO: 94451 - DNA, 30 bp, Homo sapiens; identical to SEQ ID NO: 54861
  chr18:7204771-7204801
  hypo

SEQ ID NO: 94452 - DNA, 22 bp, Homo sapiens
  chr18:7351428-7351450
  hypo
gtcttttttttttttttgagac

SEQ ID NO: 94453 - DNA, 81 bp, Homo sapiens; identical to SEQ ID NO: 31191
  chr18:7351749-7351830
  hypo

SEQ ID NO: 94454 - DNA, 30 bp, Homo sapiens; identical to SEQ ID NO: 54862
  chr18:7419870-7419900
  hypo

SEQ ID NO: 94455 - DNA, 24 bp, Homo sapiens
  chr18:7426983-7427007
  hypo
tgggcaagtggtaagtagaagcga

SEQ ID NO: 94456 - DNA, 24 bp, Homo sapiens
  chr18:7427306-7427330
  hypo
accggaaatgagctatgattttaa

SEQ ID NO: 94457 - DNA, 30 bp, Homo sapiens; identical to SEQ ID NO: 54863
  chr18:7542474-7542504
  hypo

SEQ ID NO: 94458 - DNA, 212 bp, Homo sapiens; identical to SEQ ID NO: 54864
  chr18:7566543-7566755
  hypo

SEQ ID NO: 94459 - DNA, 1937 bp, Homo sapiens; identical to SEQ ID NO: 54865
  chr18:7566780-7568717
  hypo

SEQ ID NO: 94460 - DNA, 30 bp, Homo sapiens; identical to SEQ ID NO: 54867
  chr18:7605703-7605733
  hypo

SEQ ID NO: 94461 - DNA, 30 bp, Homo sapiens; identical to SEQ ID NO: 54868
  chr18:7647070-7647100
  hypo

SEQ ID NO: 94462 - DNA, 30 bp, Homo sapiens; identical to SEQ ID NO: 54869
  chr18:7789601-7789631
  hypo

SEQ ID NO: 94463 - DNA, 30 bp, Homo sapiens; identical to SEQ ID NO: 54870
  chr18:7926629-7926659
  hypo

SEQ ID NO: 94464 - DNA, 30 bp, Homo sapiens; identical to SEQ ID NO: 54871
  chr18:8003570-8003600
  hypo

SEQ ID NO: 94465 - DNA, 51 bp, Homo sapiens; identical to SEQ ID NO: 54872
  chr18:8016760-8016811
  hypo

SEQ ID NO: 94466 - DNA, 30 bp, Homo sapiens; identical to SEQ ID NO: 54873
  chr18:8129093-8129123
  hypo

SEQ ID NO: 94467 - DNA, 30 bp, Homo sapiens; identical to SEQ ID NO: 54874
  chr18:8249539-8249569
  hypo

SEQ ID NO: 94468 - DNA, 195 bp, Homo sapiens
  chr18:8348209-8348404
  hypo
acacagacttgctgccgattcattaaggcagagctggggacctgcttccccccattttgccctgaagcgctctgcattaggcggccctaattgctggtgttggagccgccaggagacctttcctgtcgcagcacctggtgcagaagacatagatgctgcacttccctccagcggggtccccggtacatctgacag

SEQ ID NO: 94469 - DNA, 181 bp, Homo sapiens; identical to SEQ ID NO: 54875
  chr18:8367258-8367439
  hypo

SEQ ID NO: 94470 - DNA, 30 bp, Homo sapiens; identical to SEQ ID NO: 54876
  chr18:8379043-8379073
  hypo

SEQ ID NO: 94471 - DNA, 30 bp, Homo sapiens; identical to SEQ ID NO: 54877
  chr18:8383007-8383037
  hypo

SEQ ID NO: 94472 - DNA, 34 bp, Homo sapiens
  chr18:8400563-8400597
  hypo
tccctgcagtgccatgcggcggtgttcacagctc

SEQ ID NO: 94473 - DNA, 30 bp, Homo sapiens; identical to SEQ ID NO: 54878
  chr18:8470342-8470372
  hypo

SEQ ID NO: 94474 - DNA, 246 bp, Homo sapiens
  chr18:8612036-8612282
  hypo
ctccactcatcagatcgtttgttgagcacctactgtgtgttgggtgttatgctacccagtggggattcagtggtaaacaggacatcgactctgtccagaagtggatcggagcttctgggagctgcgtgaccgcttgtcagggcagtgacagatgtgtatgggtatttgggagcacagtgaaagcgcctccagtcgaggctagtgatgaggcctggtcagagaaggcttcctcgtcattggaatgtt

SEQ ID NO: 94475 - DNA, 52 bp, Homo sapiens; identical to SEQ ID NO: 31196
  chr18:8612503-8612555
  hypo

SEQ ID NO: 94476 - DNA, 30 bp, Homo sapiens
  chr18:8616576-8616606
  hypo
gagctttgtgtttttcgctggcttcctctc

SEQ ID NO: 94477 - DNA, 365 bp, Homo sapiens
  chr18:8625619-8625984
  hypo
gctattaacctgttaacagcccgcaggtgctagcgacctgtctgtggaagaagggataagatctggtctggtggtctggcggtggcttaaaagtagccccattgaggtgctctgagaatgccgttttgttttgaatgctacagctgcggtgtactcagcttactaactcctcttggcaggtcaccctcagctctgattgtttgtccaccatgtgtgtgtttgctttcatctgcgttaattgctgcttcatctgtggcatcatcggtcacctaatgcttgaatgttagtgccatgtcttcattcttcatccgtgtccctgtctgggccgcagctgcagccaagccgcagtgcctgccttctggagg

SEQ ID NO: 94478 - DNA, 30 bp, Homo sapiens
  chr18:8658999-8659029
  hypo
agggggcagagggagcggtaggaagagagg

SEQ ID NO: 94479 - DNA, 624 bp, Homo sapiens
  chr18:8659284-8659908
  hypo
agaggcagcgccccgcgcagaacgcccgtgcctgggaagaggcctgcactccagcagacttccatgttcgctggaagcctcccttcctgactgtgaattgggacaatgcgcagacttccatgttcgttggaagcctcccttcctgactgtgaattgggacgatgcgcgggattttctgaaacctcagttcctccgtctgtaagatgagattgtggggaggagggcggacctgtaagtgcccagccacgagggctgagagattcgaactcctttgctgccgcgaagaagggcctgttccccggaggccaggtgggctccaggccaagctcgcagaggggccaggtgtgctctggcggtgagagggccgcgcgtcccggcacacaccccgcccatttcagcaccctctccaccctcctcagatgaccagagaaatccaagcaggcccttggctttcaagattcagcttcagccatgcataagtccttcactgaagtggcagaggaaggacgagcggctttgttggattggggctggagccccgtgcccggctgtgggtgctcgtgggagagcctcgcccggccctgcgcttcccgagagttcgccgggagcacaagccctggagag

SEQ ID NO: 94480 - DNA, 101 bp, Homo sapiens; identical to SEQ ID NO: 31199
  chr18:8662985-8663086
  hypo

SEQ ID NO: 94481 - DNA, 20 bp, Homo sapiens
  chr18:8699668-8699688
  hypo
taggacgacccttctctggg

SEQ ID NO: 94482 - DNA, 184 bp, Homo sapiens
  chr18:8732472-8732656
  hypo
aatactccataggattctctacggcctgagtgctgtttcttggtgttgctcagactcaagtgagccatcgtacgttgaaatggtatgattatgagccaaataagcaagttgtgttgtttttttctccctggtaataaaaaatcattcgcattgaaaagacgccgagtcacccatacatagttac

SEQ ID NO: 94483 - DNA, 146 bp, Homo sapiens
  chr18:8733059-8733205
  hypo
tagaccgttgccagttgttttcgcatcacacgtggctcatctctcctggcaggggggaggaaggtgagagctgaggacgcagtgcctgggagccagggcgcagggcagccctcgggactgtcagaccacctcgggggctgaggtga

SEQ ID NO: 94484 - DNA, 44 bp, Homo sapiens; identical to SEQ ID NO: 11630
  chr18:8748271-8748315
  hypo

SEQ ID NO: 94485 - DNA, 216 bp, Homo sapiens
  chr18:8783991-8784207
  hypo
gatcgaagaccacaaccggcaactgacccacgagctcagcaagtttaagtttgagcctccccgggagccgggctggctaggagagggtgcaagtcctggtgccgggggtggggcccccctgcaggaggagctgaagtcagccaggctgcagatcagcgagctcagcggcaaggtgctcaaactgcagcacgagaaccacgcgctgctgtccaacat

SEQ ID NO: 94486 - DNA, 63 bp, Homo sapiens
  chr18:8787324-8787387
  hypo
gaagtctctcattctgcggatgagaaaagtgaggcctgagaagtgaagcggcttgccagtaag

SEQ ID NO: 94487 - DNA, 125 bp, Homo sapiens
  chr18:8794466-8794591
  hypo
ggctctccaggagggcctaggcgcggtgctgctgatgctgcctcccgtggtgcgggtccgggtgtctcagcgcctctccacagccaggcggggaagggtctcacgttaccttcacattgcccctg

SEQ ID NO: 94488 - DNA, 739 bp, Homo sapiens
  chr18:8799970-8800709
  hypo
gatagaagcacgtggcggggtggggtccagacactcagacccaggtctgccaagtgggccagtgttcacagtagtgagtaaggagctcactaacgcatgcacaaccctctgtctgtccaaggacggaagatggacgagctctactgtaacgacagctggttctctgggagggaacattcccggttagaggatttgcctctctgtgactggcatgagtattagccaggcagctgggatgcaagagccagggtacgtgtctcacagagctgcacagagccgggccgttcccgaaacgccgagcacctcgcaaggcgattagtagcatgggaaacctagccaagccgttttcccaaggacaagttctcagtcacagtattcctcaggccttggtctttgctttgtgacatatggaacgttctcacaattgaactcaagtagatggcaacatttatcacgtccacagaggtttaaaaaaaactgcatataccgatcaaccttgggatggctcataacaaatcatcaggttggcaaacatttggctccgcagacattccctgtttccctgtcttcagccacgtgagctcgcagtcatgacctgggcgctttagagccacagtgaatgctttcagtttccccagccatcctgaagagcagaggctgcgcacacgcaagagggaatcttacagttttccttgagctccaagactcacgccactgcgttaagcatttgaggccagca

SEQ ID NO: 94489 - DNA, 155 bp, Homo sapiens
  chr18:8814258-8814413
  hypo
actaagaagaataaaatacaccgcaggtgagctatgatccccactgcattccagcctgggcgacagaccgagaccccgtctccaaaaaacaaaagaaggaaagtacactgcagatagaaaagctgaaactcttcgtaggtttgaccacttacaca

SEQ ID NO: 94490 - DNA, 150 bp, Homo sapiens
  chr18:8823064-8823214
  hypo
atccaaagtggaaactggatgcgccctccccactgtccccatgtcctctgattctgactgcccggtatgtttccaccatactctcttcgttccacctgcaagcgcctacacatgctccagatgtatcccgggttttctcatcatggtttt

SEQ ID NO: 94491 - DNA, 70 bp, Homo sapiens
  chr18:8826026-8826096
  hypo
gaagggggagagggcacgccagtgaagcaggacttatctgctccccctggctacacgctcactgagaacg

SEQ ID NO: 94492 - DNA, 178 bp, Homo sapiens; identical to SEQ ID NO: 31205
  chr18:8829962-8830140
  hypo

SEQ ID NO: 94493 - DNA, 141 bp, Homo sapiens
  chr18:8856546-8856687
  hypo
atttcattctaataacgagaaaaagcctgacattctaaaacatcgtaagttttcttgagcccatctgaggaggtgaggccaggacacaatgaagtgaacataattccaaagagtgacaagcgcctgcgaccaaagtggggg

SEQ ID NO: 94494 - DNA, 30 bp, Homo sapiens
  chr18:8934446-8934476
  hypo
acatgttgaagcggccgcattgtctgggat

SEQ ID NO: 94495 - DNA, 32 bp, Homo sapiens; identical to SEQ ID NO: 31206
  chr18:9101196-9101228
  hypo

SEQ ID NO: 94496 - DNA, 142 bp, Homo sapiens
  chr18:9196881-9197023
  hypo
agctaattactggatcgcttacctgagaagagggtgcttatgtgcctttgggatagctatttcagattgaactcttctcgcatattgttaaaagtttctttgctagtcatttttaaattacattactcgggttttgttttcc

SEQ ID NO: 94497 - DNA, 11 bp, Homo sapiens
  chr18:9284924-9284935
  hypo
ccaggcgcagt

SEQ ID NO: 94498 - DNA, 31 bp, Homo sapiens; identical to SEQ ID NO: 31207
  chr18:9285996-9286027
  hypo

SEQ ID NO: 94499 - DNA, 105 bp, Homo sapiens; identical to SEQ ID NO: 31208
  chr18:9333522-9333627
  hypo

SEQ ID NO: 94500 - DNA, 34 bp, Homo sapiens
  chr18:9364506-9364540
  hypo
acagccaggtgtggtggctcacgcgtataatccc

SEQ ID NO: 94501 - DNA, 389 bp, Homo sapiens
  chr18:9417388-9417777
  hypo
cccagagcaccgccacgccggccacccctggggccagtggcagggtgccaggcgtgttcacgctctgaggctccagaaattaatctgacctcttgaaagaacacattcctactgactaggaatcttgaatgaaattcaagcagtgcaggtgttcagcaattctgaagacaaaattcagacagcagagctgctgccttctctggcagatggaggagtgtccgtgaaggagggcccttcgcaccccatggagctcctgatgtccgtgcctttatcagagactctcctcctcctctctttgattgctcttttttttttttccttttttcccttttttaagagacagagtctcgctctgtcgcccaagcagctggactgccctggcctgatct

SEQ ID NO: 94502 - DNA, 225 bp, Homo sapiens
  chr18:9428290-9428515
  hypo
atcaactcctcacttaacagacgaggagacggaggcccgacagacaacaacctcttaaaatcacaaagaggcagacgagggcgggtgtgcggcctccctggcttgtggtggtttgctgtgtgtttactccagaacgccctgctcacatggctgagacagaggacagaaggcttgagagggatggaaagagcaaccaggtggactgactgacgtgtttcctcacag

SEQ ID NO: 94503 - DNA, 99 bp, Homo sapiens
  chr18:9478554-9478653
  hypo
ggcctcttcttctccgagatcctctcctgcgtcccgagtttgggaatggcccggccgtgctcaggcccaggcggtggaggcctcggtgtagtagtgccg

SEQ ID NO: 94504 - DNA, 30 bp, Homo sapiens
  chr18:9478881-9478911
  hypo
ggggtgtcctggggcgcggcaggcggaaag

SEQ ID NO: 94505 - DNA, 30 bp, Homo sapiens; identical to SEQ ID NO: 31211
  chr18:9498624-9498654
  hypo

SEQ ID NO: 94506 - DNA, 22 bp, Homo sapiens
  chr18:9514122-9514144
  hypo
tctcctccgctgacgccccacc

SEQ ID NO: 94507 - DNA, 21 bp, Homo sapiens
  chr18:9535686-9535707
  hypo
aatcaagcaattcatgaggag

SEQ ID NO: 94508 - DNA, 22 bp, Homo sapiens
  chr18:9535902-9535924
  hypo
cccagcagggataggaaggaga

SEQ ID NO: 94509 - DNA, 78 bp, Homo sapiens; identical to SEQ ID NO: 31213
  chr18:9535962-9536040
  hypo

SEQ ID NO: 94510 - DNA, 30 bp, Homo sapiens; identical to SEQ ID NO: 31214
  chr18:9536977-9537007
  hypo

SEQ ID NO: 94511 - DNA, 114 bp, Homo sapiens
  chr18:9547785-9547899
  hypo
tctagtaggttgaggacgctgtgctcatggcatcttcggagattttggtactggcagggtggatgcttgcaaaatacttgacatcgctgtcacggtccatctgaagagccatga

SEQ ID NO: 94512 - DNA, 224 bp, Homo sapiens
  chr18:9569202-9569426
  hypo
aaaaagaagaaaaccggagtcattgaagttggataaacttaataaacttaagttggtaaataataacatttaaacagaaagctggaagctgtaaagacgttaaacatttatcaaaagttgactatgcttgctgtgaacattctatagtcttttcctcccccacgcccgagacagagtcttgctgtcgcccaggctgcagtgcagtagtgcgacaaacattctat

SEQ ID NO: 94513 - DNA, 204 bp, Homo sapiens
  chr18:9615429-9615633
  hypo
atgtctaggaggtgctcggtgaagggtgcctatgattcgctttgtcttctaaatacttttggcagcacttgaggtgttaaagtctgtatcccagactttattagtcttgttgttttacgtgacttaagcgattagctcaaacgcccaagtacaaaatggggctaaacccaggttttccgacacgattctacctccatggctcta

SEQ ID NO: 94514 - DNA, 31 bp, Homo sapiens
  chr18:9659944-9659975
  hypo
gcatggaggagctttgcggacaccaaagtct

SEQ ID NO: 94515 - DNA, 154 bp, Homo sapiens
  chr18:9688387-9688541
  hypo
gctttcatgcgcatgcgccatcgctcatgcgggatgtgggtgtggtcatcacagaccttcccacctctatgaaatggggaaatggaagcgacactgagctctcctggattgacttggatatatcaattctttctctcctcggtgtgcactcttt

SEQ ID NO: 94516 - DNA, 30 bp, Homo sapiens; identical to SEQ ID NO: 54884
  chr18:9708423-9708453
  hypo

SEQ ID NO: 94517 - DNA, 495 bp, Homo sapiens; identical to SEQ ID NO: 54885
  chr18:9708875-9709370
  hypo

SEQ ID NO: 94518 - DNA, 30 bp, Homo sapiens
  chr18:9720231-9720261
  hypo
attacaggcgtgagccaccacacccagcct

SEQ ID NO: 94519 - DNA, 80 bp, Homo sapiens
  chr18:9758084-9758164
  hypo
tagcacagggatcccccatttcgcctgtgggccacccgagacgcggctcctgttcatacgtcccattaaatgttgctctc

SEQ ID NO: 94520 - DNA, 19 bp, Homo sapiens
  chr18:9791400-9791419
  hypo
ttttttttttttgagacgg

SEQ ID NO: 94521 - DNA, 248 bp, Homo sapiens
  chr18:9797314-9797562
  hypo
gaacacaataagtcaattttgcgaatcgctggcttaatgtcagcgatgcttctgcttctcctgctggcggacgttccctgatgacttgctgtgttccatgtactgttctgagtgcctgtgtgtactgatgcattcagccctcctcgcaaaagcactttgaggttgaaactgtcgttattcccatttgcaggtgaggtcactgagacagagacattaagtaacttgcacaatgtcgcagagctaataag

SEQ ID NO: 94522 - DNA, 30 bp, Homo sapiens; identical to SEQ ID NO: 31220
  chr18:9800134-9800164
  hypo

SEQ ID NO: 94523 - DNA, 154 bp, Homo sapiens
  chr18:9800801-9800955
  hypo
cagctttactgagatccgattcacgtaccatacaatttatccatctaaagtacgcaccttggtgggttctgatgtgttccgaattgttcaaccatcagcacaatccattttagagcatttttatcagtccagaaagaaacgcttatgaattagc

SEQ ID NO: 94524 - DNA, 31 bp, Homo sapiens
  chr18:9805773-9805804
  hypo
atatcaactgaagcaacgtttcatttcagag

SEQ ID NO: 94525 - DNA, 129 bp, Homo sapiens
  chr18:9833345-9833474
  hypo
cagggggaccatgggacgacagggcccccagaagggaggcaggtcacaatgtgagggtttgggtccagagtacctgctggtttgattctgttttccctgtaaccaggtcctgaacgcccagagcctcag

SEQ ID NO: 94526 - DNA, 97 bp, Homo sapiens
  chr18:9838162-9838259
  hypo
cagcctggtggaatgcatggacgacatagacctgagggaggtgagcactgaagggtatttactggtggagacgatcgctttctttctgtgagcagtg

SEQ ID NO: 94527 - DNA, 16 bp, Homo sapiens
  chr18:9874718-9874734
  hypo
gcgaaactccatctca

SEQ ID NO: 94528 - DNA, 30 bp, Homo sapiens
  chr18:9875829-9875859
  hypo
acatccataatcggccgggcacggtggctc

SEQ ID NO: 94529 - DNA, 90 bp, Homo sapiens
  chr18:9883099-9883189
  hypo
tgaggagcagggaaaccgaattaagtttgcctgtttgtggaattttggctcaaagaacccttttccatggtgtagcggtgcaatctttca

SEQ ID NO: 94530 - DNA, 216 bp, Homo sapiens
  chr18:9887793-9888009
  hypo
gaaacaatggagttcccggagggggacaaggtgaaagtgatcctgagcaaggaggactttgaggcatcactgaaggaggccggggagaggctggtggctgtggacttctcggccacgtggtgtgggccctgcaggaccatcagaccattcttccatgccctgtctgtgaagcatgaggatgtggtgttcctggaggtggacgctgacaactgtgag

SEQ ID NO: 94531 - DNA, 237 bp, Homo sapiens
  chr18:9912766-9913003
  hypo
accctaatacctggatcgcacatgaaaacttggatttggtgcctacttctagactgctgtttcgtctcgtttattttctagacaaactgtgctgctccatggcagtagcatcaatatgtcttttgtttcgtggcgctacctagggatttaaattcaaaccgtatcacaaaatacaataaaggtttatttacagcacattggtttcatttgacgttcctgtaccggactaccctggca

SEQ ID NO: 94532 - DNA, 139 bp, Homo sapiens
  chr18:9917586-9917725
  hypo
agttttgtagaaaagtttgaagaagaaagtttataaaatgctaaaataaatttcaaatatattcttaatgatcagagagagacgaaaataaaccaaaatccttatgttgagagtggccgataacaataaatcaacaaag

SEQ ID NO: 94533 - DNA, 30 bp, Homo sapiens
  chr18:9969878-9969908
  hypo
cggggtttgctggctcggggcgtccccttc

SEQ ID NO: 94534 - DNA, 30 bp, Homo sapiens
  chr18:9970486-9970516
  hypo
tccgcttgggaagaacgtggagcagggctg

SEQ ID NO: 94535 - DNA, 104 bp, Homo sapiens
  chr18:10069171-10069275
  hypo
accttgccagctccccgcctctcacagcgagcctccggagattgggaagcggcgtttcctcacctgccagtgctcctgtactccagctccgcagaccccactcc

SEQ ID NO: 94536 - DNA, 31 bp, Homo sapiens; identical to SEQ ID NO: 31221
  chr18:10078821-10078852
  hypo

SEQ ID NO: 94537 - DNA, 99 bp, Homo sapiens
  chr18:10336857-10336956
  hypo
gtgctccatggccaaggtctccgcccagggtcccttgctaggcaggccacgcgaaacacgcagtgcacgtgtgcacacgccatgtccctggagggcagg

SEQ ID NO: 94538 - DNA, 279 bp, Homo sapiens
  chr18:10414333-10414612
  hypo
ggcaggcagaatgccaccactcggccaagaaggcgtgtttggctacgacagcccagagtccagagccacggcacttccggttgctgtccacgcggcttctgctggtactcagccaccacgcccaccagagccaccgcacttccggttgctgtccaggcggcttctgctggtactcgcccaccacgcccaccagagccaccgcacttccggttgctgtccaggcggcttctgctggtactcgcccaccacgcccaccacgtggagtctagcagctctccc

SEQ ID NO: 94539 - DNA, 31 bp, Homo sapiens
  chr18:10460166-10460197
  hypo
tcggcaggtgaaaaaccgtggaatatattca

SEQ ID NO: 94540 - DNA, 311 bp, Homo sapiens
  chr18:10474410-10474721
  hypo
gcctcaaaacaccaaaaagcacggggagccttgagtgcgaggtctgagtgaggaggcaggtgcggctggggaacttgctgggcgggcgtgggccgggctgtgggctccgaacccgaccttggactagtcctttgcacccactcaggttctggttccttttcctcaccttcatgcgcctgcacgggctctgatctcttctgctctttttagtactgggggaaaaattaaccatcatcacgtttattttcttacctgcctctctaccccgttgcactcctgggtgtggctccgcagatggagtctgaaagccc

SEQ ID NO: 94541 - DNA, 258 bp, Homo sapiens
  chr18:10485490-10485748
  hypo
catctatcggtcagacgagcaccaccctcccatcctgcccccaaaggcagacctgaccatcggcctgcacggggagtgggtgagccagcgctgtgaggtgcgccccgaagtcctcttcctcacccgccacttcatcttccatgacaacaacaacacctgggagggccactactaccactactcagacccggtgtgcaagcaccccaccttctccatctacgcccggggccgctacagccgcggcgtcctctcgtccag

SEQ ID NO: 94542 - DNA, 33 bp, Homo sapiens
  chr18:10578688-10578721
  hypo
tattataaaaaccaaagccgcagctcagtgggg

SEQ ID NO: 94543 - DNA, 377 bp, Homo sapiens; identical to SEQ ID NO: 31224
  chr18:10589090-10589467
  hypo

SEQ ID NO: 94544 - DNA, 31 bp, Homo sapiens
  chr18:10696517-10696548
  hypo
gcacatagatctccagcgtcctgcaaaatgg

SEQ ID NO: 94545 - DNA, 30 bp, Homo sapiens; identical to SEQ ID NO: 31225
  chr18:10705420-10705450
  hypo

SEQ ID NO: 94546 - DNA, 268 bp, Homo sapiens
  chr18:10725629-10725897
  hypo
aggccagaacatgcctgcccacgctctgggctcgccttcatctcttggtcctttcgggtatatttttctctctccacttcctctccgacttctctccacagtggcggcagggctggtgaggccctgacaggccagagggagaacgctcagggtcccaccaggccaaccaccacgcgggccctccagggtggatggaaggccagatcctgggaatggacttggcttgaggacacacggcgcctggtttaggaggcgactggccaggctg

SEQ ID NO: 94547 - DNA, 39 bp, Homo sapiens
  chr18:11116412-11116451
  hypo
gaaagaatgaaatttgcaggccgggcgcggtggctcacg

SEQ ID NO: 94548 - DNA, 46 bp, Homo sapiens
  chr18:11589693-11589739
  hypo
aacaatttttttttcttgagacggagtctcgctgtgtcccccaggt

SEQ ID NO: 94549 - DNA, 214 bp, Homo sapiens
  chr18:11821761-11821975
  hypo
ctgcaggagggagccgggaggtccttgagcaggggccccagtaaatgcttcagagctagaatgtcctccctttccagctcaccaagggctgaagcacaagggcctcccgcctccctgcagcgcacatccgccctctggcgaggccaggccggcatccagtgtggcccggtggccagaacgcgcccaggccatggccgccgctccgtaggcctcc

SEQ ID NO: 94550 - DNA, 30 bp, Homo sapiens; identical to SEQ ID NO: 31226
  chr18:11877622-11877652
  hypo

SEQ ID NO: 94551 - DNA, 176 bp, Homo sapiens
  chr18:11881074-11881250
  hypo
ttcaacgactgccgcgacatcatccagcggatgcacctcaagcagtatgagctcttgtgaggatgctgccgccaccctgcgacggagcggcgccccggactgcctgactgccagccccatgccatggtaggaggcagagtctctagttccatctcgctgccgtctgtcccgttctg

SEQ ID NO: 94552 - DNA, 30 bp, Homo sapiens; identical to SEQ ID NO: 31227
  chr18:11905551-11905581
  hypo

SEQ ID NO: 94553 - DNA, 10 bp, Homo sapiens
  chr18:11929333-11929343
  hypo
agtagtgaaa

SEQ ID NO: 94554 - DNA, 17 bp, Homo sapiens
  chr18:11954687-11954704
  hypo
agctgcctcagtgtaat

SEQ ID NO: 94555 - DNA, 31 bp, Homo sapiens
  chr18:11971653-11971684
  hypo
cctgggaaacatatggcgactctgtctccaa

SEQ ID NO: 94556 - DNA, 36 bp, Homo sapiens; identical to SEQ ID NO: 31229
  chr18:11979847-11979883
  hypo

SEQ ID NO: 94557 - DNA, 221 bp, Homo sapiens; identical to SEQ ID NO: 31230
  chr18:11992148-11992369
  hypo

SEQ ID NO: 94558 - DNA, 195 bp, Homo sapiens; identical to SEQ ID NO: 31231
  chr18:11992750-11992945
  hypo

SEQ ID NO: 94559 - DNA, 30 bp, Homo sapiens
  chr18:11999295-11999325
  hypo
tgaagccctaagccacgcagcctaacctgc

SEQ ID NO: 94560 - DNA, 46 bp, Homo sapiens
  chr18:11999659-11999705
  hypo
tgatgcacgccccctcgcccaggccagagggcgcagtgggaatggc

SEQ ID NO: 94561 - DNA, 214 bp, Homo sapiens; identical to SEQ ID NO: 31232
  chr18:12093610-12093824
  hypo

SEQ ID NO: 94562 - DNA, 78 bp, Homo sapiens
  chr18:12208465-12208543
  hypo
ggtcttttccaagtttattggcgtagtggtgagaactgtctctatgggcttatgagggtgccgcgttgtttaaagatg

SEQ ID NO: 94563 - DNA, 140 bp, Homo sapiens; identical to SEQ ID NO: 54905
  chr18:12253734-12253874
  hypo

SEQ ID NO: 94564 - DNA, 41 bp, Homo sapiens; identical to SEQ ID NO: 54906
  chr18:12254105-12254146
  hypo

SEQ ID NO: 94565 - DNA, 180 bp, Homo sapiens; identical to SEQ ID NO: 54907
  chr18:12254304-12254484
  hypo

SEQ ID NO: 94566 - DNA, 30 bp, Homo sapiens
  chr18:12277369-12277399
  hypo
gaggccgctggtcacgctgctcaggagtgg

SEQ ID NO: 94567 - DNA, 697 bp, Homo sapiens; identical to SEQ ID NO: 31235
  chr18:12279586-12280283
  hypo

SEQ ID NO: 94568 - DNA, 31 bp, Homo sapiens; identical to SEQ ID NO: 31236
  chr18:12291393-12291424
  hypo

SEQ ID NO: 94569 - DNA, 479 bp, Homo sapiens; identical to SEQ ID NO: 54910
  chr18:12307602-12308081
  hypo

SEQ ID NO: 94570 - DNA, 755 bp, Homo sapiens; identical to SEQ ID NO: 54911
  chr18:12308301-12309056
  hypo

SEQ ID NO: 94571 - DNA, 30 bp, Homo sapiens
  chr18:12326151-12326181
  hypo
cagatcctacaacacgcaagttccttcttg

SEQ ID NO: 94572 - DNA, 30 bp, Homo sapiens
  chr18:12329176-12329206
  hypo
gaatgaagagtgggcgacaaagagaaagca

SEQ ID NO: 94573 - DNA, 421 bp, Homo sapiens
  chr18:12375056-12375477
  hypo
aaaaaaaaaaaaaagaaaagaaaagaaaagggatcagagcttggtaaaacagggaaatggatacaggaaaccgaaaaaggacctaccacacggcagcgtggcgtgaccatggcgaagaaattgatttaagactggcaagggagcctcaaggagtaaaaatcatgaatgcaggcactattattccccctccccacccccgctctttttttttttaggagacagagtccgtcacccacgctggagtacagcaatgcaatcaaaactcactggagcctcaacctcccgcgccaagcaacccgccttggccccccgagttgctgggactatagtcataagtcactgagcccaggtaagaaaaaaaaaaaaaaaacaatttgtagaggccaggagctgtggctcaggtctgtaattccaacacttt

SEQ ID NO: 94574 - DNA, 121 bp, Homo sapiens; identical to SEQ ID NO: 31240
  chr18:12375776-12375897
  hypo

SEQ ID NO: 94575 - DNA, 31 bp, Homo sapiens
  chr18:12380135-12380166
  hypo
aatttgtagttaaaaacgtttccatgggttg

SEQ ID NO: 94576 - DNA, 615 bp, Homo sapiens; identical to SEQ ID NO: 11651
  chr18:12407707-12408322
  hypo

SEQ ID NO: 94577 - DNA, 42 bp, Homo sapiens; identical to SEQ ID NO: 11652
  chr18:12408339-12408381
  hypo

SEQ ID NO: 94578 - DNA, 30 bp, Homo sapiens
  chr18:12423751-12423781
  hypo
gcaagtacccgaaccggtacctgggcagct

SEQ ID NO: 94579 - DNA, 99 bp, Homo sapiens
  chr18:12431470-12431569
  hypo
cccgcccgcccgcccacgctgtcctccacttaggctcctccacaaacgctggcgggtgtgccgccctccagcctctccgcccccgtcccctcggtcctg

SEQ ID NO: 94580 - DNA, 30 bp, Homo sapiens
  chr18:12432587-12432617
  hypo
atcacattttttaggcgaggacagtcgtaa

SEQ ID NO: 94581 - DNA, 318 bp, Homo sapiens
  chr18:12432918-12433236
  hypo
gaggccgccctgccccgccggccagaagcggactcggtgcagacatgcagctctctccgtggaatgtgcatgtgcacggaggtgagtgtggtctgataaggccgcaggcagctcgtttgggaaaactgcgcagggctcggcctcagtggccaagcagtgtttgtggggcaccggaagcggcgccgcacccgtgctggccggcccgccactgggaagaaacgccccctcgggcggcctactgctcccatcgaagcccacaggccgtggccctgagggcacccagtgctgctcgtgcgcagggtccgggactttcgccag

SEQ ID NO: 94582 - DNA, 30 bp, Homo sapiens
  chr18:12434403-12434433
  hypo
gccagagctgctcccgtaaatgctcatcac

SEQ ID NO: 94583 - DNA, 162 bp, Homo sapiens
  chr18:12460293-12460455
  hypo
gaaggtactgccaacacgaggtgcctttagactggatgggcatttgccctcggttatttgaccaaatgatgaaaaaaaatgacattttaaacatcacaagaaaagggagggagatacaacaaaaataaaaattatcagccgggcacagtggctcacgcctgt

SEQ ID NO: 94584 - DNA, 30 bp, Homo sapiens; identical to SEQ ID NO: 31245
  chr18:12655872-12655902
  hypo

SEQ ID NO: 94585 - DNA, 30 bp, Homo sapiens
  chr18:12673427-12673457
  hypo
gtaaatactcggacacgaactgccagtcgc

SEQ ID NO: 94586 - DNA, 30 bp, Homo sapiens
  chr18:12699054-12699084
  hypo
cgaaaacgttggtttcgataatgtaaacat

SEQ ID NO: 94587 - DNA, 30 bp, Homo sapiens
  chr18:12741325-12741355
  hypo
gggttgaatgaggcccgctggctttggaga

SEQ ID NO: 94588 - DNA, 31 bp, Homo sapiens
  chr18:12749282-12749313
  hypo
tcactctcacctcgggcgtggtggctgcttc

SEQ ID NO: 94589 - DNA, 2 bp, Homo sapiens
  chr18:12849301-12849303
  hypo
aa

SEQ ID NO: 94590 - DNA, 24 bp, Homo sapiens
  chr18:12849542-12849566
  hypo
agcgaaaccctgtctcaaaaaata

SEQ ID NO: 94591 - DNA, 36 bp, Homo sapiens
  chr18:12849992-12850028
  hypo
tcttgtttgattgatcgtgctcgatcttgacagagt

SEQ ID NO: 94592 - DNA, 77 bp, Homo sapiens
  chr18:12854821-12854898
  hypo
agaggaaaatcagaaaaattacggggttaggaaaaaaggcacggtcggctgggcacagtggctcacacttgtaatcc

SEQ ID NO: 94593 - DNA, 30 bp, Homo sapiens
  chr18:12912688-12912718
  hypo
ctgtgctctcggcccgtgatggccatagat

SEQ ID NO: 94594 - DNA, 42 bp, Homo sapiens; identical to SEQ ID NO: 31249
  chr18:12949140-12949182
  hypo

SEQ ID NO: 94595 - DNA, 31 bp, Homo sapiens; identical to SEQ ID NO: 11658
  chr18:12991134-12991165
  hypo

SEQ ID NO: 94596 - DNA, 194 bp, Homo sapiens; identical to SEQ ID NO: 31251
  chr18:13033465-13033659
  hypo

SEQ ID NO: 94597 - DNA, 453 bp, Homo sapiens
  chr18:13131735-13132188
  hypo
tacctaggaatgcgacggtgcctaattgatacatacaaatcaatagtcttcctatacataaggaaataatgaacgaccagaaaacagcggaagacaaaacagcagaaataagtttagaaatgtgtgaagtgtatacaaaggaaactgtcaggttcctctggagcacatcggagacttgagtaggagtaacttaccggactgcactgggggccttcttccgtagcatgaacagcacccatgagtggggatggggctggggccgcaccagtccaggcagcatttcccccagtggagggggagctctgcaggtgcccagcctcccacgctgtttcagtagcttgttaggaactctcccagacacggatagtggcccagctgcccatccctgccgtcactgggtctgagcgtggcctgtcctttgtttaaatcctacatttagctggccggactcac

SEQ ID NO: 94598 - DNA, 149 bp, Homo sapiens
  chr18:13135169-13135318
  hypo
gccgaggaggcgccaagagtgagcgagggctgccagcaccctgtcatctctcaggttttagctcagggctgctgtccagcacccgctcttgcttggatactttcggtggtgtggctgctggttactgtattgcacgacaaatgtttttc

SEQ ID NO: 94599 - DNA, 136 bp, Homo sapiens
  chr18:13162993-13163129
  hypo
ccaagcgatcctcctgcctcagcctcccgagtatgagaaagggtttttctgaggcaagtggctgatccgatttgccccgtggggaagccggcactctgggagtcccagcacaaacggcagacagagggtctgcagg

SEQ ID NO: 94600 - DNA, 91 bp, Homo sapiens
  chr18:13165626-13165717
  hypo
aaacgcgaagtttcccggacagaactcgggcgacgggtgaatcggagcgcagacacagcacagaagccgcggcaggcggggaagcttgaaa

SEQ ID NO: 94601 - DNA, 222 bp, Homo sapiens
  chr18:13212917-13213139
  hypo
gagttcagtgcaaaccgagcgagtacctcttcccatgcttgttggctacttaagtatcttcttccgtaagggaccttttcaaggaattcgcccttttcttatggagcacgttccggtaaggaaagccacattgctatgttctctacaaacgacccctcaccagcgggacagggagatgcagaggcacacaatcctgcctccgtcagtgtttgatgaaaaagc

SEQ ID NO: 94602 - DNA, 326 bp, Homo sapiens
  chr18:13231193-13231519
  hypo
ggcaggtggtatgggaggaagcgggagggagaagggcaagaggggtctggaccggttttgcttgagaagaaatggcagtggacacatggctcgtgtgaaaggtgggtgcacgcagacaggccagaggcttttgggagcgggagtgaacctgggcacggggcgctgctcttggtgagcatgtcgggtggcccttgccctttgggtcaccattcctcctgattgcggcctgcccgagatcgcgtgagtctggttctggtgtggagcgtttcctcccatctttgtcgaaaaccaaatcaaccagccacgaatggtaaagaaaaacaagc

SEQ ID NO: 94603 - DNA, 222 bp, Homo sapiens; identical to SEQ ID NO: 31255
  chr18:13233039-13233261
  hypo

SEQ ID NO: 94604 - DNA, 300 bp, Homo sapiens
  chr18:13252606-13252906
  hypo
tgcagctgcaccctgggaactcggtggtgccccccaccatactgggcacggtgggactgccgcagatgtgatggatgacaagggttcctgccagtgagaggaatgaagatgctctttgcttctgtgaggtcaaggcctcatttcatgtgacatgcagaaccagcctcacttgccgtcggccctccacatccacagctgtttctgcgcagggatgtctggctctgagcccttctgcggagcagtgttgcgctgttcctagaatagtgtccttgtagtctcgttaggctttgcttctctttg

SEQ ID NO: 94605 - DNA, 183 bp, Homo sapiens
  chr18:13254435-13254618
  hypo
ggcccagctgagcagggctggcgcggacagagagaatcccgcctcttcaaggtcgctcagctgaccatgggcatagctggacctagagtgccagcgaccctccatgcttctgccaggaagtccagcggcatctttccattcatggtggttacggaattggccgagtccttactctgacctaca

SEQ ID NO: 94606 - DNA, 17 bp, Homo sapiens
  chr18:13263219-13263236
  hypo
tgcgtgggggctgagtc

SEQ ID NO: 94607 - DNA, 160 bp, Homo sapiens; identical to SEQ ID NO: 31256
  chr18:13292878-13293038
  hypo

SEQ ID NO: 94608 - DNA, 141 bp, Homo sapiens
  chr18:13311611-13311752
  hypo
attgggcattgtgacagctggcgatgctgctggcactgtgctcttgagggaaggcgggcctggatgtggagggtatgcccaaaggcctgagtccggaaaggagttctgcatttccatgccgcctgtggctcacctggaaaa

SEQ ID NO: 94609 - DNA, 23 bp, Homo sapiens
  chr18:13325752-13325775
  hypo
ttcctttttttttttttgagacg

SEQ ID NO: 94610 - DNA, 55 bp, Homo sapiens
  chr18:13381475-13381530
  hypo
agaggagatgggagccagggccgggagtcaccacgggtaccagaagcagagtggg

SEQ ID NO: 94611 - DNA, 30 bp, Homo sapiens
  chr18:13383190-13383220
  hypo
ctcagggaagcttcacgtaagtgtcttcct

SEQ ID NO: 94612 - DNA, 30 bp, Homo sapiens
  chr18:13383547-13383577
  hypo
acggccggcaagcagcgtttgttcagctcc

SEQ ID NO: 94613 - DNA, 311 bp, Homo sapiens
  chr18:13387327-13387638
  hypo
cttgcttttcagtttcagaggcggagcacagagagctgcggctgggacaaggagcacccgcgtgcaggtgcgaccctgcaggatgctggcagcggcgtggccaggggcgcccgtgttctgagggcctgagggccagcccctccacccgcgccatggcctccgcgccctggctggacggctgacgggagcagggaccgccgccgcccaggtgccacacccaggtaccgcccgcccgcgcgagagccgggcaggtgggccgcggatgctcccagaggccggcccagcagagcgatggacttggacaggctaag

SEQ ID NO: 94614 - DNA, 88 bp, Homo sapiens
  chr18:13393142-13393230
  hypo
gttgcacctgtggctgacccacggatgccctcagcccccgccttccagagctgcccagagaatgctcgctttaggagatattgagagc

SEQ ID NO: 94615 - DNA, 129 bp, Homo sapiens
  chr18:13400463-13400592
  hypo
tgggtgtggggcccagacctgcgggctccagacggagccttctctttgtgcagtccgtgcacacatgagcagccctgactcttagaaacgtggtgatggggaggagacggtgaaaagagtgtttatgat

SEQ ID NO: 94616 - DNA, 280 bp, Homo sapiens
  chr18:13404254-13404534
  hypo
tgttcccttgctctgcatccccgctgtttcccctgcccctgaacaggcgtggagatgtgcacgggacactcggaggccggatgctcaacagagtggagtgccgcgacggtgtggccgcagcctggctgtgccttcacgacgcagctgcaatcagaggagctgtgggacgctgtcccacgtggacacagcccactcactgggtgctgctcctgtgctgggcgctgcacttttattgtcgttaaaaatttatattaagatgcggccgggcatggtggctcat

SEQ ID NO: 94617 - DNA, 39 bp, Homo sapiens
  chr18:13404773-13404812
  hypo
gcgactgagcgaaactccgtctcaaaaaaaaaaaaaaat

SEQ ID NO: 94618 - DNA, 78 bp, Homo sapiens
  chr18:13412927-13413005
  hypo
ctgtcctgagcttcctggatgcgctgcttccttctcctggtacgtagtaagggcagcgtgtgtgacctgacaggatca

SEQ ID NO: 94619 - DNA, 117 bp, Homo sapiens; identical to SEQ ID NO: 31258
  chr18:13425934-13426051
  hypo

SEQ ID NO: 94620 - DNA, 68 bp, Homo sapiens
  chr18:13432047-13432115
  hypo
tcaggttcccagagggattcacgttgataacacgccggtgcagtctcgcagcctactcaacatgtgca

SEQ ID NO: 94621 - DNA, 365 bp, Homo sapiens
  chr18:13442500-13442865
  hypo
ggcccgcgtggggcacggctgagaaagtgggttgggcctagagagacagaagccaatgtataaggctgcacctcctgccctggtcctaggacgggccacctgctggccggccggctgcggggagcctgaggctggcatcccacttggtggacctgccacctcattgttcctgcccagccaagcacgtcctgtggtgctgtgtttccaaagccccttggccacatcttagtgggggacagcagcgttccttcgaccgtccagaagcgataattgagtggtctgtgcagcctggcaagtgccacgccctccgaaagccttggtgagcacagacccccgaagccagcgctgctgagggattctcacca

SEQ ID NO: 94622 - DNA, 88 bp, Homo sapiens
  chr18:13477884-13477972
  hypo
tcactggttaggggaaactggcggcttttccgtggtcccgggctcggataatgcatctcagatcaacgaaggataccaaaggcaggtg

SEQ ID NO: 94623 - DNA, 168 bp, Homo sapiens
  chr18:13481382-13481550
  hypo
tcaggttcaaagcctgagaagcgggggcacgtgtagacgctgactgtggcttgacgctgactgctgtcagcaacatgatttctgaggcatgtgctgtgacacggttgtgcatggccccgtctgctgggaagacttctggtggccctcgagctgtgaccaccacccaag

SEQ ID NO: 94624 - DNA, 241 bp, Homo sapiens
  chr18:13491220-13491461
  hypo
ccacctgcagggtagctgggacgatgaaagcatcccaagacctcccttttccatctgtggctgatcacctctggaacccacagctagccggctgctcctccactatcagatggcggctgtcagtcatgggcttgtcaccgagtgcatccgtcatgctcgggccatgggccggcacctgtgtgtgtgtgtccagcttaacgacagagatttttggaaagacgccctaagatagacatacttg

SEQ ID NO: 94625 - DNA, 121 bp, Homo sapiens; identical to SEQ ID NO: 31261
  chr18:13498451-13498572
  hypo

SEQ ID NO: 94626 - DNA, 85 bp, Homo sapiens; identical to SEQ ID NO: 31262
  chr18:13498972-13499057
  hypo

SEQ ID NO: 94627 - DNA, 241 bp, Homo sapiens; identical to SEQ ID NO: 31263
  chr18:13499116-13499357
  hypo

SEQ ID NO: 94628 - DNA, 84 bp, Homo sapiens; identical to SEQ ID NO: 31264
  chr18:13499656-13499740
  hypo

SEQ ID NO: 94629 - DNA, 30 bp, Homo sapiens
  chr18:13503383-13503413
  hypo
aggtgcttgaacaaacggccatgtgtatga

SEQ ID NO: 94630 - DNA, 45 bp, Homo sapiens
  chr18:13505524-13505569
  hypo
cactagtgaccttgccaggcacggtggctcacgcctgtaatccca

SEQ ID NO: 94631 - DNA, 92 bp, Homo sapiens
  chr18:13518928-13519020
  hypo
tagttcaccattctacggaggatataattttgtgaagactcagctttcttcagcagcagtgttcgttgtgggagccccgcagtggaaatgcc

SEQ ID NO: 94632 - DNA, 203 bp, Homo sapiens
  chr18:13525324-13525527
  hypo
acacagtgagcatcatccccacgccctgagtccattctgcaaatctcacatttaaacacgctaaagtcaacctctgcctttcagaccacagagctgcttccagatcctggccatcctggacacctggagaactaccagtcgggatctgcaggaaaacgtgggcattcccataaacgtcattcgttttgcagaaatctgaccaa

SEQ ID NO: 94633 - DNA, 270 bp, Homo sapiens; identical to SEQ ID NO: 31266
  chr18:13532098-13532368
  hypo

SEQ ID NO: 94634 - DNA, 227 bp, Homo sapiens
  chr18:13550419-13550646
  hypo
tgtcatgggtctgtggagagacgtaatactgggagctgcagagggctcggaataagtcaaagctcgaggggctagagggtgtctggacggcttacatcataaacacatgctgtgagaatgagaaggcgtccctgaggacggccaggaggaaggctcaaggcatgagtgctggcgatgttgatgccatcaagacgatgagtcccgccgagcagccttccacagtgggt

SEQ ID NO: 94635 - DNA, 36 bp, Homo sapiens
  chr18:13571914-13571950
  hypo
gtgagctaccgcaccgggcctataaactattattaa

SEQ ID NO: 94636 - DNA, 58 bp, Homo sapiens
  chr18:13590479-13590537
  hypo
tgtgactgttcagaatgtacacggccctgcagctcccgaaggccagctctgctgcaac

SEQ ID NO: 94637 - DNA, 255 bp, Homo sapiens
  chr18:13621653-13621908
  hypo
agctgggtcctggaggtgctgcggggacaaatcacgcgctcatcgtcactaaacgtgccggcagcacatgggtgccatgagctggaggacgcctggagcttaaggcctcgggagcttcctggggatcggcggtggggttgttggcggtgggcttgtcagcggtgggcttgtcggcggtagggttgtcggcggtgggttgtggagggtggggttgtggagggtggggttgtcggcggtggaccctcaagccaaact

SEQ ID NO: 94638 - DNA, 30 bp, Homo sapiens
  chr18:13649582-13649612
  hypo
gggcgcagggagcccggccccccatgcagc

SEQ ID NO: 94639 - DNA, 346 bp, Homo sapiens; identical to SEQ ID NO: 54928
  chr18:13823934-13824280
  hypo

SEQ ID NO: 94640 - DNA, 43 bp, Homo sapiens
  chr18:13826556-13826599
  hypo
cctcagaacctctactgctctcgcttcatgtctcacttcaata

SEQ ID NO: 94641 - DNA, 139 bp, Homo sapiens
  chr18:13836863-13837002
  hypo
ggaaacagtgctcctaggatccgccctccagtcctgctctcagtgagaactcagcgcagggctccggacacgggcagacgccgcgctttgtcttcccgtcttcccctcacctcagtgtcctctttctctcacgttcttt

SEQ ID NO: 94642 - DNA, 18 bp, Homo sapiens
  chr18:13837301-13837319
  hypo
cctctcacattcttaaga

SEQ ID NO: 94643 - DNA, 30 bp, Homo sapiens
  chr18:14145851-14145881
  hypo
ggagtgacaacaaccgagaggcaggggcag

SEQ ID NO: 94644 - DNA, 146 bp, Homo sapiens
  chr18:14221784-14221930
  hypo
ccttaaaagataagttctggccgctgccgctgcagcctgctgggctggaggaagtggagctggtgccgtccctgctctcttgctgggaagcaactgagggggcggcgcggcaggccccggcagccgaagaggctggcaggtggcac

SEQ ID NO: 94645 - DNA, 31 bp, Homo sapiens; identical to SEQ ID NO: 31267
  chr18:14392672-14392703
  hypo

SEQ ID NO: 94646 - DNA, 30 bp, Homo sapiens; identical to SEQ ID NO: 11663
  chr18:14726130-14726160
  hypo

SEQ ID NO: 94647 - DNA, 28 bp, Homo sapiens
  chr18:15198163-15198191
  hypo
aagcagcggtggcgctgacaaaaagccg

SEQ ID NO: 94648 - DNA, 22 bp, Homo sapiens
  chr18:18659891-18659913
  hypo
ttttcttcaaagttttagggtc

SEQ ID NO: 94649 - DNA, 21 bp, Homo sapiens
  chr18:18693552-18693573
  hypo
cttttttttttttctccgagg

SEQ ID NO: 94650 - DNA, 34 bp, Homo sapiens
  chr18:18700053-18700087
  hypo
gcctagccttcgcgccttttattttttcctcagc

SEQ ID NO: 94651 - DNA, 18 bp, Homo sapiens
  chr18:18738934-18738952
  hypo
actccctctcaaaaaaaa

SEQ ID NO: 94652 - DNA, 89 bp, Homo sapiens
  chr18:18997461-18997550
  hypo
aagactccatctcaaaaacaaacaaacaaaaaataatctttcaaaaatgaagatgaaataaagacactttaagacgtacaaaatatgga

SEQ ID NO: 94653 - DNA, 121 bp, Homo sapiens
  chr18:19064404-19064525
  hypo
tcttattacattttttaaagctgccttatttcctttatgagttggagagcacttaaataaaaatgtcaacacataataaataacaaaagtgggccaggcgcagtagcttacgcctgtaatc

SEQ ID NO: 94654 - DNA, 31 bp, Homo sapiens
  chr18:19079791-19079822
  hypo
tggatgaaggggtctccgccagctcagctgg

SEQ ID NO: 94655 - DNA, 32 bp, Homo sapiens
  chr18:19216810-19216842
  hypo
agcaagactccgtttcaaaaaaaaaaaaaaaa

SEQ ID NO: 94656 - DNA, 240 bp, Homo sapiens
  chr18:19243721-19243961
  hypo
gctacaagttcagcttcagaacgcagctccagggatggctgggagtgcgtcaggaatcagaaggtcaacatggcagccggtgagtgatgcaatcgacttcatgggcttcagacaaaccttcaggctcacaaaatccgcagtcacagagacccgtagttaagaaaaatattaaaattcacctgaattaattctttccttccttcgttcattcaatcaaccgcatttaataaaatatgataa

SEQ ID NO: 94657 - DNA, 33 bp, Homo sapiens; identical to SEQ ID NO: 31270
  chr18:19253262-19253295
  hypo

SEQ ID NO: 94658 - DNA, 26 bp, Homo sapiens
  chr18:19267459-19267485
  hypo
ccacacccagccgcctctgttaaact

SEQ ID NO: 94659 - DNA, 24 bp, Homo sapiens
  chr18:19596546-19596570
  hypo
accgcaccccgctggcactggatt

SEQ ID NO: 94660 - DNA, 60 bp, Homo sapiens
  chr18:19769947-19770007
  hypo
tcagtgttgttgccactacagcgtgttagattaatatgcgatattagttcatttctttga

SEQ ID NO: 94661 - DNA, 31 bp, Homo sapiens; identical to SEQ ID NO: 31273
  chr18:19775129-19775160
  hypo

SEQ ID NO: 94662 - DNA, 35 bp, Homo sapiens; identical to SEQ ID NO: 31274
  chr18:19778301-19778336
  hypo

SEQ ID NO: 94663 - DNA, 30 bp, Homo sapiens; identical to SEQ ID NO: 31275
  chr18:19780713-19780743
  hypo

SEQ ID NO: 94664 - DNA, 81 bp, Homo sapiens
  chr18:20109532-20109613
  hypo
agagagagaagcacaggtccacgcaggcagccaaagccatcttcttggttgaaagatactcttttcggggggaggagccaa

SEQ ID NO: 94665 - DNA, 30 bp, Homo sapiens; identical to SEQ ID NO: 11671
  chr18:20261870-20261900
  hypo

SEQ ID NO: 94666 - DNA, 133 bp, Homo sapiens
  chr18:20380479-20380612
  hypo
ttctgatgcaaaatgttctcccgccagcacccaagaccatagatgctgtggcggtggtggcagcaaacactgggcatgcttggacgggcagccacagggttgccacggtctcggcagggtctagtagacagag

SEQ ID NO: 94667 - DNA, 210 bp, Homo sapiens; identical to SEQ ID NO: 11672
  chr18:20512627-20512837
  hypo

SEQ ID NO: 94668 - DNA, 1246 bp, Homo sapiens; identical to SEQ ID NO: 11673
  chr18:20512902-20514148
  hypo

SEQ ID NO: 94669 - DNA, 22 bp, Homo sapiens
  chr18:20554443-20554465
  hypo
tgtttttgagactctccgccac

SEQ ID NO: 94670 - DNA, 22 bp, Homo sapiens
  chr18:20554704-20554726
  hypo
gccactgcgcctggcctatttt

SEQ ID NO: 94671 - DNA, 31 bp, Homo sapiens
  chr18:20668996-20669027
  hypo
cctgttcataaaaatgcgtcttcaccctatt

SEQ ID NO: 94672 - DNA, 31 bp, Homo sapiens; identical to SEQ ID NO: 31281
  chr18:20696269-20696300
  hypo

SEQ ID NO: 94673 - DNA, 75 bp, Homo sapiens; identical to SEQ ID NO: 11674
  chr18:20715562-20715637
  hypo

SEQ ID NO: 94674 - DNA, 1040 bp, Homo sapiens; identical to SEQ ID NO: 54947
  chr18:20715850-20716890
  hypo

SEQ ID NO: 94675 - DNA, 220 bp, Homo sapiens; identical to SEQ ID NO: 31284
  chr18:20790546-20790766
  hypo

SEQ ID NO: 94676 - DNA, 261 bp, Homo sapiens
  chr18:20800424-20800685
  hypo
ggtgggggcaggcagtgtggccgcagatctgccctgttgtgtttgctgctgtggagccggttcagcccgggaagctggaatgcacacttgagaaccaagtgtgtttcccttcatgatcgcgcctttggggctgggtgtgctggctcgggaccagtacaggcaggcagcactggctgactggtatgcattttggtgaagatggagctcggaggtcacagctctcataggtgtgccacacacgggctgccctctggggacacc

SEQ ID NO: 94677 - DNA, 194 bp, Homo sapiens; identical to SEQ ID NO: 31286
  chr18:20846711-20846905
  hypo

SEQ ID NO: 94678 - DNA, 43 bp, Homo sapiens; identical to SEQ ID NO: 31287
  chr18:20910922-20910965
  hypo

SEQ ID NO: 94679 - DNA, 642 bp, Homo sapiens
  chr18:20911024-20911666
  hypo
ccagcaggagcgttcagcgagaggcagagccccggaacagcggtgttcactcagttaaacctcatggtctgagagagtggcaggtgtgccgttttccataattagtcacagcccctgaaggaaaagcgcgcccgtgtggggcaggaccaaaggaagaaacgcttctgcaatgctaccgggaagtctgagctcaccttctttaccttggcaccgagctgaagatctgttagaaaccctctccaaccaggactttcaggagaaacggtggccaccgcccagaataacaaggccccagcagcaaggtgtccttttcccagcaagtgaaacctgccccccgccaccacctgtagtacaggagacaccacaaagcaagaggccccagggctctgctcgggaagctgccgggcctgtttttcctcccagtggccaacaaacaggagggcaggttcagcacgttgggctctgctttctgagcgccgcaccattacagcatccacatccgatttttaaaactgaagtataacataaataccgtgtagtgtaggaggcacaggaatctcaagtacatggcttgctgagcatttatacccattagcacccacacagctgccacctggacagagacaccggcccttcccagca

SEQ ID NO: 94680 - DNA, 31 bp, Homo sapiens; identical to SEQ ID NO: 31289
  chr18:21000859-21000890
  hypo

SEQ ID NO: 94681 - DNA, 44 bp, Homo sapiens
  chr18:21042373-21042417
  hypo
ggattacaggcgcgcgccaccgcgcctggcctgttcttgttttt

SEQ ID NO: 94682 - DNA, 156 bp, Homo sapiens
  chr18:21104195-21104351
  hypo
agtggtcctgaagtcctcctccgggcagctgtgaataacactccgagagccaccccgcaggcagcttccctgactgtccaggggcctcgcgtttagcgtggactcagtacatggtgggcaggggcgagtgctagcggaaactgggtttgctttttg

SEQ ID NO: 94683 - DNA, 27 bp, Homo sapiens
  chr18:21130735-21130762
  hypo
caccacgcctggcccagttcttacatt

SEQ ID NO: 94684 - DNA, 95 bp, Homo sapiens; identical to SEQ ID NO: 31290
  chr18:21164537-21164632
  hypo

SEQ ID NO: 94685 - DNA, 769 bp, Homo sapiens; identical to SEQ ID NO: 54951
  chr18:21242240-21243009
  hypo

SEQ ID NO: 94686 - DNA, 45 bp, Homo sapiens
  chr18:21306853-21306898
  hypo
ttgtaggagtgagctaccgtgcccggcccattgcccactttttaa

SEQ ID NO: 94687 - DNA, 31 bp, Homo sapiens
  chr18:21314132-21314163
  hypo
tggtatgcagtggggtcgcctaaacatcatt

SEQ ID NO: 94688 - DNA, 31 bp, Homo sapiens; identical to SEQ ID NO: 31292
  chr18:21338239-21338270
  hypo

SEQ ID NO: 94689 - DNA, 204 bp, Homo sapiens
  chr18:21388619-21388823
  hypo
aagtgagtaaactagccgagttcccctccatcagtgagagtttcttttacgtttctgatgacaacacaggtaaattctgtcgttcaccatcatttactaaaaagcactttcagagaaattcaccatacatgggctgggctgtcacagagaatgaaaataacatggtctcgtccctgtgggggccccatgcgccaaggcttagat

SEQ ID NO: 94690 - DNA, 31 bp, Homo sapiens; identical to SEQ ID NO: 54954
  chr18:21393784-21393815
  hypo

SEQ ID NO: 94691 - DNA, 30 bp, Homo sapiens; identical to SEQ ID NO: 54955
  chr18:21405537-21405567
  hypo

SEQ ID NO: 94692 - DNA, 74 bp, Homo sapiens
  chr18:21422658-21422732
  hypo
cagagcctgaagtggccgcaactgtgaaggttccagaaggaaagtccttggttttggtgcgttccactcgttcc

SEQ ID NO: 94693 - DNA, 43 bp, Homo sapiens
  chr18:21426404-21426447
  hypo
gcccaacgtcatcgggcggcagtgcacccgctgtgcaacaggc

SEQ ID NO: 94694 - DNA, 31 bp, Homo sapiens
  chr18:21441717-21441748
  hypo
gcaaccatccacagcgcgtcctgggtcgcac

SEQ ID NO: 94695 - DNA, 31 bp, Homo sapiens
  chr18:21459202-21459233
  hypo
ctttctagctgcatcccgcccccttgcactt

SEQ ID NO: 94696 - DNA, 31 bp, Homo sapiens
  chr18:21520175-21520206
  hypo
tactgtgaggggagggcgcagggaggacaga

SEQ ID NO: 94697 - DNA, 31 bp, Homo sapiens
  chr18:21536808-21536839
  hypo
aacactgaccagttcacgatgggtccaccat

SEQ ID NO: 94698 - DNA, 23 bp, Homo sapiens
  chr18:21546285-21546308
  hypo
gatgaccaggccaggcgcggtgg

SEQ ID NO: 94699 - DNA, 248 bp, Homo sapiens; identical to SEQ ID NO: 54957
  chr18:21594466-21594714
  hypo

SEQ ID NO: 94700 - DNA, 51 bp, Homo sapiens
  chr18:21656995-21657046
  hypo
taatcctggtcccttcgacgtcacgttgagagatgccgtttctccgggagc

SEQ ID NO: 94701 - DNA, 140 bp, Homo sapiens
  chr18:21702094-21702234
  hypo
tatcctggtacgtgcacgcctgggataggtgactgcttgaccatgcccaaatgcgagtacgggaccaacctacttttaggggtgctcaggtaacgaagggggaactagccaggcacagtggctcacacctgtaatcccag

SEQ ID NO: 94702 - DNA, 20 bp, Homo sapiens
  chr18:21720212-21720232
  hypo
gtctatctactcactttggg

SEQ ID NO: 94703 - DNA, 31 bp, Homo sapiens; identical to SEQ ID NO: 31293
  chr18:21730971-21731002
  hypo

SEQ ID NO: 94704 - DNA, 31 bp, Homo sapiens
  chr18:21779334-21779365
  hypo
ttgcccccagctcccccggctcccccagctg

SEQ ID NO: 94705 - DNA, 19 bp, Homo sapiens
  chr18:21796451-21796470
  hypo
cagagcgagactgtgtctc

SEQ ID NO: 94706 - DNA, 30 bp, Homo sapiens
  chr18:21839134-21839164
  hypo
tgctgggattataggcgagagccaccacgc

SEQ ID NO: 94707 - DNA, 30 bp, Homo sapiens; identical to SEQ ID NO: 31294
  chr18:21849397-21849427
  hypo

SEQ ID NO: 94708 - DNA, 30 bp, Homo sapiens
  chr18:21897134-21897164
  hypo
tgtttgcatccctggcgataaatattatga

SEQ ID NO: 94709 - DNA, 30 bp, Homo sapiens
  chr18:22049809-22049839
  hypo
gattattttgtcacccggggaatgagcaca

SEQ ID NO: 94710 - DNA, 205 bp, Homo sapiens
  chr18:22098634-22098839
  hypo
ggatgggctgctgctgttccacgctgccatcgccaccgggacccaacatctcttcctgaagtccgtgatgcaggattttcactccaccgcttgcgaacagccccacacccagcgccctcccgcacacaccgtcttggggcctcctccagcgcagtgcactcctgctgccacggtacgtcctgccggggagaattacaaacttctc

SEQ ID NO: 94711 - DNA, 31 bp, Homo sapiens; identical to SEQ ID NO: 31295
  chr18:22596097-22596128
  hypo

SEQ ID NO: 94712 - DNA, 187 bp, Homo sapiens
  chr18:22597054-22597241
  hypo
cacattattcatgtcactgaacgtaagtttcacatgatcgtagggcattgggatgctctcagtgttgttggcgatcactctgctgccctctgagtgactctcgttgagcaccatatctttccgaaagcagccccgagatgccccatcctgcagttgaccagcccacggtggtagctacatcttcaca

SEQ ID NO: 94713 - DNA, 30 bp, Homo sapiens
  chr18:22636398-22636428
  hypo
gatagcatcacccatcgttccgccggtgcg

SEQ ID NO: 94714 - DNA, 25 bp, Homo sapiens
  chr18:22640190-22640215
  hypo
gaatgtgtattacttttgcaccgtg

SEQ ID NO: 94715 - DNA, 148 bp, Homo sapiens; identical to SEQ ID NO: 54963
  chr18:22653838-22653986
  hypo

SEQ ID NO: 94716 - DNA, 28 bp, Homo sapiens
  chr18:22654045-22654073
  hypo
gtgtgcacgcgcacgggaatatgcctgt

SEQ ID NO: 94717 - DNA, 30 bp, Homo sapiens; identical to SEQ ID NO: 31297
  chr18:22658457-22658487
  hypo

SEQ ID NO: 94718 - DNA, 128 bp, Homo sapiens
  chr18:22721785-22721913
  hypo
tttccaattatagagccatggcgctctccaaaacatcaccatacgactgtcggtgaccagtgtaactttccaacattccatgcgctaggaagtttttgctcatttgcgcctgtctggtttagctgata

SEQ ID NO: 94719 - DNA, 259 bp, Homo sapiens
  chr18:22756674-22756933
  hypo
tccgagggatcgcagcgtagtgcaacagattacaccagcttgcccaagtcggccgccccggtgttgctttccttacagaataaatgacaaagatgaaactgctcccggaaaattctagacactcacacatgctcaccagcacacgtgcgcgtgcacgcacacactcataagcacacgctccctggctggctccaacattcggcgctggcgtggaacctggtgtttactcccaatactcgctgtgacctgagcacttacc

SEQ ID NO: 94720 - DNA, 171 bp, Homo sapiens
  chr18:22804888-22805059
  hypo
tggagaggcatcttgcaaatccggcagtttccagtatcaagactcttactatgcgtgactttgtgttcagtaagagttaaaagggagggaaaccgctctccgcaaatagggcacatgtagtgtttgacagggcctaggtgggtctgcatatgttcccggaggccattttcg

SEQ ID NO: 94721 - DNA, 140 bp, Homo sapiens
  chr18:22806989-22807129
  hypo
tcatgagggaggtctcctctacgaagagctcgtggcagtagacacactggagggccgctcggtcctcatttggggagcattcggggtggcactctgcaatgtgtttttggaggtcttccgggaagtcaaagccttcctca

SEQ ID NO: 94722 - DNA, 528 bp, Homo sapiens; identical to SEQ ID NO: 54964
  chr18:22929190-22929718
  hypo

SEQ ID NO: 94723 - DNA, 1259 bp, Homo sapiens; identical to SEQ ID NO: 11688
  chr18:22929926-22931185
  hypo

SEQ ID NO: 94724 - DNA, 30 bp, Homo sapiens
  chr18:23584863-23584893
  hypo
agcttaggaagcgatcgtcaaattgcagtg

SEQ ID NO: 94725 - DNA, 155 bp, Homo sapiens
  chr18:23652340-23652495
  hypo
atcctactcataatatcgttatctctaacacaagaaaacagaaaggaggataataccatgcaaacaccaaagaaagcttatttagctatgctaatatcagataaagtagactttaaaagcattactaaagataagaagggataattcacaatgat

SEQ ID NO: 94726 - DNA, 1029 bp, Homo sapiens; identical to SEQ ID NO: 54968
  chr18:23806174-23807203
  hypo

SEQ ID NO: 94727 - DNA, 18 bp, Homo sapiens
  chr18:23841146-23841164
  hypo
tttttttttttttttttg

SEQ ID NO: 94728 - DNA, 17 bp, Homo sapiens
  chr18:23841463-23841480
  hypo
agcactgtcatctttag

SEQ ID NO: 94729 - DNA, 131 bp, Homo sapiens; identical to SEQ ID NO: 31302
  chr18:23988506-23988637
  hypo

SEQ ID NO: 94730 - DNA, 31 bp, Homo sapiens; identical to SEQ ID NO: 31303
  chr18:24035812-24035843
  hypo

SEQ ID NO: 94731 - DNA, 30 bp, Homo sapiens
  chr18:24050614-24050644
  hypo
ggctgttcccactctcgtagctggaagcgt

SEQ ID NO: 94732 - DNA, 525 bp, Homo sapiens; identical to SEQ ID NO: 54969
  chr18:24127690-24128215
  hypo

SEQ ID NO: 94733 - DNA, 30 bp, Homo sapiens; identical to SEQ ID NO: 11693
  chr18:24367819-24367849
  hypo

SEQ ID NO: 94734 - DNA, 28 bp, Homo sapiens
  chr18:24514511-24514539
  hypo
ctaaagcgtactctgccagccaagtggc

SEQ ID NO: 94735 - DNA, 30 bp, Homo sapiens; identical to SEQ ID NO: 54979
  chr18:24570651-24570681
  hypo

SEQ ID NO: 94736 - DNA, 2416 bp, Homo sapiens; identical to SEQ ID NO: 54983
  chr18:25755555-25757971
  hypo

SEQ ID NO: 94737 - DNA, 38 bp, Homo sapiens
  chr18:26202688-26202726
  hypo
aacaagcaatgtaattcgccaataaagtttaaagaaga

SEQ ID NO: 94738 - DNA, 31 bp, Homo sapiens
  chr18:27426191-27426222
  hypo
cgtgagccaccgcacccgcccatgccttcaa

SEQ ID NO: 94739 - DNA, 30 bp, Homo sapiens
  chr18:27932692-27932722
  hypo
tgacatgccagcccccggtcaccatggccc

SEQ ID NO: 94740 - DNA, 20 bp, Homo sapiens
  chr18:28563773-28563793
  hypo
acataaccatcctggctaac

SEQ ID NO: 94741 - DNA, 151 bp, Homo sapiens; identical to SEQ ID NO: 31308
  chr18:28934935-28935086
  hypo

SEQ ID NO: 94742 - DNA, 121 bp, Homo sapiens
  chr18:29026531-29026652
  hypo
attgcactccggcctgggcaacacaaagagacgcagtctcaagtaagtaagtaagtaaataaataaataaataaataagaataatgtttcattttctgtactactcgggagcctgaggcag

SEQ ID NO: 94743 - DNA, 31 bp, Homo sapiens; identical to SEQ ID NO: 31309
  chr18:29114802-29114833
  hypo

SEQ ID NO: 94744 - DNA, 31 bp, Homo sapiens; identical to SEQ ID NO: 31310
  chr18:29199776-29199807
  hypo

SEQ ID NO: 94745 - DNA, 31 bp, Homo sapiens
  chr18:29200393-29200424
  hypo
agccactgtgcccaggcgacaaatttcaatt

SEQ ID NO: 94746 - DNA, 18 bp, Homo sapiens
  chr18:29248668-29248686
  hypo
aaagttgtaatctggccg

SEQ ID NO: 94747 - DNA, 37 bp, Homo sapiens; identical to SEQ ID NO: 11704
  chr18:29265159-29265196
  hypo

SEQ ID NO: 94748 - DNA, 46 bp, Homo sapiens; identical to SEQ ID NO: 31312
  chr18:29269412-29269458
  hypo

SEQ ID NO: 94749 - DNA, 55 bp, Homo sapiens; identical to SEQ ID NO: 31313
  chr18:29293794-29293849
  hypo

SEQ ID NO: 94750 - DNA, 100 bp, Homo sapiens
  chr18:29325110-29325210
  hypo
gtaatctggaagcccccgactaccttgcttcaagtgccgcgcctttccagattgaaccaatgtacatattacattgtaatattacaggttatattgatgt

SEQ ID NO: 94751 - DNA, 62 bp, Homo sapiens
  chr18:29366853-29366915
  hypo
aataatattttatatccgattagagcagggtttctcaatcttattgccgttggagctagata

SEQ ID NO: 94752 - DNA, 31 bp, Homo sapiens
  chr18:29391614-29391645
  hypo
cccggatgcaaaatggcgtgctaggtccaca

SEQ ID NO: 94753 - DNA, 30 bp, Homo sapiens
  chr18:29520739-29520769
  hypo
gtgagccaccgcgcccggccgaaaattttt

SEQ ID NO: 94754 - DNA, 46 bp, Homo sapiens; identical to SEQ ID NO: 31314
  chr18:29521105-29521151
  hypo

SEQ ID NO: 94755 - DNA, 22 bp, Homo sapiens
  chr18:29549642-29549664
  hypo
atgaatatttttgggccgggcg

SEQ ID NO: 94756 - DNA, 31 bp, Homo sapiens
  chr18:29593107-29593138
  hypo
ttacaggcatgagccacggtgcctggcgaga

SEQ ID NO: 94757 - DNA, 171 bp, Homo sapiens; identical to SEQ ID NO: 54993
  chr18:29598281-29598452
  hypo

SEQ ID NO: 94758 - DNA, 30 bp, Homo sapiens; identical to SEQ ID NO: 54994
  chr18:29598682-29598712
  hypo

SEQ ID NO: 94759 - DNA, 158 bp, Homo sapiens
  chr18:29610272-29610430
  hypo
tgggattacaggcgtgagccaccctacccggcagtgaatgtacctaatttttagaaaatgaaactctgtttaggataattctgaaatactttcaggtaaatggattgaaacgttcaatttgtggtcaagtatgagcagtaaagcgtacatcaaattgg

SEQ ID NO: 94760 - DNA, 20 bp, Homo sapiens
  chr18:29668748-29668768
  hypo
caccacgcctggtcttgact

SEQ ID NO: 94761 - DNA, 37 bp, Homo sapiens
  chr18:29670947-29670984
  hypo
tttttgagagtctcactctgtcgccagggctggagtg

SEQ ID NO: 94762 - DNA, 20 bp, Homo sapiens
  chr18:29864726-29864746
  hypo
ttttttgagacagtctcgct

SEQ ID NO: 94763 - DNA, 1367 bp, Homo sapiens; identical to SEQ ID NO: 54996
  chr18:30050220-30051587
  hypo

SEQ ID NO: 94764 - DNA, 30 bp, Homo sapiens
  chr18:30092956-30092986
  hypo
agcagcaggctccccggcagtctgttcctc

SEQ ID NO: 94765 - DNA, 1331 bp, Homo sapiens; identical to SEQ ID NO: 54997
  chr18:30349790-30351121
  hypo

SEQ ID NO: 94766 - DNA, 1011 bp, Homo sapiens; identical to SEQ ID NO: 55006
  chr18:31802345-31803356
  hypo

SEQ ID NO: 94767 - DNA, 19 bp, Homo sapiens
  chr18:31803640-31803659
  hypo
gctgggcaggtggagcgca

SEQ ID NO: 94768 - DNA, 178 bp, Homo sapiens; identical to SEQ ID NO: 55008
  chr18:31803673-31803851
  hypo

SEQ ID NO: 94769 - DNA, 1865 bp, Homo sapiens; identical to SEQ ID NO: 11724
  chr18:32556604-32558469
  hypo

SEQ ID NO: 94770 - DNA, 73 bp, Homo sapiens
  chr18:32702564-32702637
  hypo
actcagcctgcactgtgtccccgttagtgaggcttaacggtggggcagaagcggtgcttccatcccacatgtg

SEQ ID NO: 94771 - DNA, 44 bp, Homo sapiens
  chr18:32957797-32957841
  hypo
attgaaaaataagtttgaggccgggcgcggtggctcatgcctgt

SEQ ID NO: 94772 - DNA, 20 bp, Homo sapiens
  chr18:32971688-32971708
  hypo
ttctgtttttttgagacgga

SEQ ID NO: 94773 - DNA, 31 bp, Homo sapiens
  chr18:33036599-33036630
  hypo
ttatggctgggtgcagcggtgactcatgcct

SEQ ID NO: 94774 - DNA, 119 bp, Homo sapiens
  chr18:33041504-33041623
  hypo
gagaaggagtgctgggcgtggatgcaggggcctggctcacagccttcccttgcctctagtttctctcttgaacctcaggttccttaggtgtagagcgagcccgccgctacacttgcctc

SEQ ID NO: 94775 - DNA, 79 bp, Homo sapiens; identical to SEQ ID NO: 55020
  chr18:33077969-33078048
  hypo

SEQ ID NO: 94776 - DNA, 30 bp, Homo sapiens; identical to SEQ ID NO: 31322
  chr18:33078704-33078734
  hypo

SEQ ID NO: 94777 - DNA, 406 bp, Homo sapiens; identical to SEQ ID NO: 55021
  chr18:33530169-33530575
  hypo

SEQ ID NO: 94778 - DNA, 18 bp, Homo sapiens
  chr18:33596484-33596502
  hypo
ctgttttgttaaaactgt

SEQ ID NO: 94779 - DNA, 30 bp, Homo sapiens
  chr18:33682070-33682100
  hypo
cagcttggcaagttccgggttcttgtcccg

SEQ ID NO: 94780 - DNA, 421 bp, Homo sapiens; identical to SEQ ID NO: 55023
  chr18:33766768-33767189
  hypo

SEQ ID NO: 94781 - DNA, 31 bp, Homo sapiens
  chr18:33793348-33793379
  hypo
ttacaacatccacctgcgaactggctgcttc

SEQ ID NO: 94782 - DNA, 30 bp, Homo sapiens
  chr18:34127677-34127707
  hypo
tgctcacccgcagatcgttggaggcagcct

SEQ ID NO: 94783 - DNA, 132 bp, Homo sapiens
  chr18:34297788-34297920
  hypo
tttcaggtttgtggcccgcaggtgtccaggatgcaggtgtaaatggacagtgtggcgacatcctcaccaacaaacggttcatgcttgacatgctgtatgcccataacaggaagtctccggatgatgaggaga

SEQ ID NO: 94784 - DNA, 30 bp, Homo sapiens
  chr18:34340776-34340806
  hypo
cttctcaggttggccgctctgggggggtcc

SEQ ID NO: 94785 - DNA, 36 bp, Homo sapiens
  chr18:34366182-34366218
  hypo
atagaataaggggtcagttagcgtctggtggtgttc

SEQ ID NO: 94786 - DNA, 31 bp, Homo sapiens; identical to SEQ ID NO: 31324
  chr18:34889651-34889682
  hypo

SEQ ID NO: 94787 - DNA, 30 bp, Homo sapiens
  chr18:34983626-34983656
  hypo
ggacaggcaggacagcgcaggtgtgtgttc

SEQ ID NO: 94788 - DNA, 792 bp, Homo sapiens; identical to SEQ ID NO: 55037
  chr18:35144968-35145760
  hypo

SEQ ID NO: 94789 - DNA, 703 bp, Homo sapiens; identical to SEQ ID NO: 11733
  chr18:35146061-35146764
  hypo

SEQ ID NO: 94790 - DNA, 437 bp, Homo sapiens; identical to SEQ ID NO: 31327
  chr18:35249613-35250050
  hypo

SEQ ID NO: 94791 - DNA, 121 bp, Homo sapiens; identical to SEQ ID NO: 31328
  chr18:36298626-36298747
  hypo

SEQ ID NO: 94792 - DNA, 70 bp, Homo sapiens
  chr18:36889401-36889471
  hypo
ggctggtccaatcaaccgcccaagggctgacaagtgcgggcgcgtggcgcggaactggtgggcagctccg

SEQ ID NO: 94793 - DNA, 121 bp, Homo sapiens; identical to SEQ ID NO: 31330
  chr18:36939329-36939450
  hypo

SEQ ID NO: 94794 - DNA, 18 bp, Homo sapiens
  chr18:37053945-37053963
  hypo
ttaaaaacaaaaaagaaa

SEQ ID NO: 94795 - DNA, 22 bp, Homo sapiens
  chr18:37154072-37154094
  hypo
cgtctcaaaaaaaaaaaaaaaa

SEQ ID NO: 94796 - DNA, 37 bp, Homo sapiens; identical to SEQ ID NO: 31333
  chr18:37198432-37198469
  hypo

SEQ ID NO: 94797 - DNA, 31 bp, Homo sapiens
  chr18:37382687-37382718
  hypo
ttatgcctgacatatacgcatcatgtgtgtc

SEQ ID NO: 94798 - DNA, 30 bp, Homo sapiens; identical to SEQ ID NO: 11736
  chr18:38242390-38242420
  hypo

SEQ ID NO: 94799 - DNA, 1725 bp, Homo sapiens; identical to SEQ ID NO: 55046
  chr18:42258978-42260703
  hypo

SEQ ID NO: 94800 - DNA, 30 bp, Homo sapiens; identical to SEQ ID NO: 55048
  chr18:42399574-42399604
  hypo

SEQ ID NO: 94801 - DNA, 8 bp, Homo sapiens
  chr18:42530942-42530950
  hypo
agttatgg

SEQ ID NO: 94802 - DNA, 68 bp, Homo sapiens; identical to SEQ ID NO: 11740
  chr18:42531891-42531959
  hypo

SEQ ID NO: 94803 - DNA, 30 bp, Homo sapiens
  chr18:43262596-43262626
  hypo
caaacacaaagaagcgtgtatgtagtcacc

SEQ ID NO: 94804 - DNA, 140 bp, Homo sapiens
  chr18:43299704-43299844
  hypo
taatcttgaagaaacaaaaggcgcaagcctgggagggaggatgatgccccgggtggtgtagtggatgggatttggcgctctcaccaccatggcccggatttgattcccggtcagggaagcctttcttcttgccaggcgtg

SEQ ID NO: 94805 - DNA, 193 bp, Homo sapiens
  chr18:43307166-43307359
  hypo
tagagctagggcacacgtcatgctgattcacatatttttgccctttgtcatgtattgagaaaaagtaaggatgaatggacggtctttgattggcggcgctggtgacgcccgtcatggtcctgtttggaaggacccttttggaactaaagctggtgacgcagcgcgcagaggcatcgcccggctaagcttggcc

SEQ ID NO: 94806 - DNA, 30 bp, Homo sapiens; identical to SEQ ID NO: 31337
  chr18:43308141-43308171
  hypo

SEQ ID NO: 94807 - DNA, 30 bp, Homo sapiens; identical to SEQ ID NO: 55050
  chr18:43309895-43309925
  hypo

SEQ ID NO: 94808 - DNA, 30 bp, Homo sapiens; identical to SEQ ID NO: 55051
  chr18:43316950-43316980
  hypo

SEQ ID NO: 94809 - DNA, 30 bp, Homo sapiens
  chr18:43404530-43404560
  hypo
ttgttttcaaaagtcgctgtgcttgcagag

SEQ ID NO: 94810 - DNA, 30 bp, Homo sapiens; identical to SEQ ID NO: 31338
  chr18:43416003-43416033
  hypo

SEQ ID NO: 94811 - DNA, 30 bp, Homo sapiens
  chr18:43467765-43467795
  hypo
gacgctgcgtctcatcgctgacgtaatcca

SEQ ID NO: 94812 - DNA, 26 bp, Homo sapiens
  chr18:43559605-43559631
  hypo
ttgctttttttttagacggagtcttg

SEQ ID NO: 94813 - DNA, 25 bp, Homo sapiens
  chr18:43577160-43577185
  hypo
tttgttttcttggagacggagtctt

SEQ ID NO: 94814 - DNA, 33 bp, Homo sapiens
  chr18:43599471-43599504
  hypo
gtgtccatattgaggccgggtgcagtggctcac

SEQ ID NO: 94815 - DNA, 31 bp, Homo sapiens; identical to SEQ ID NO: 31339
  chr18:43605713-43605744
  hypo

SEQ ID NO: 94816 - DNA, 30 bp, Homo sapiens
  chr18:43606965-43606995
  hypo
aataagaccatatggccgggtgcaatggct

SEQ ID NO: 94817 - DNA, 194 bp, Homo sapiens
  chr18:43613982-43614176
  hypo
ttgaccagctaatgcacgaagggaatctgtcattcccaccctggcaatctgtccttcttaaggctgtcctgagacatagccgaccacagtgagggtcccggaaacagagctgtagccagggcaggttgaccatgggacgtacaggagcttatggggaagagtacagagtcctgaggcaccggggctgtggatcc

SEQ ID NO: 94818 - DNA, 31 bp, Homo sapiens; identical to SEQ ID NO: 31340
  chr18:43627251-43627282
  hypo

SEQ ID NO: 94819 - DNA, 21 bp, Homo sapiens
  chr18:43629543-43629564
  hypo
aatcccataaaaatgaacaac

SEQ ID NO: 94820 - DNA, 31 bp, Homo sapiens
  chr18:43637142-43637173
  hypo
gccctggctctgcctgcgtcccactcagcag

SEQ ID NO: 94821 - DNA, 18 bp, Homo sapiens
  chr18:43663645-43663663
  hypo
tagaaacttacaaagagc

SEQ ID NO: 94822 - DNA, 30 bp, Homo sapiens
  chr18:43744272-43744302
  hypo
cccacctagagaagacggccacgtaatcat

SEQ ID NO: 94823 - DNA, 121 bp, Homo sapiens; identical to SEQ ID NO: 31342
  chr18:43767224-43767345
  hypo

SEQ ID NO: 94824 - DNA, 104 bp, Homo sapiens
  chr18:43779975-43780079
  hypo
cctgtggattttaagcgccagcatcagatgcagatagccttacagaaaattctttattgtgtgtgtgtgtgtgtgtgtgtgtgcgcgcgcgtgctgggggcaga

SEQ ID NO: 94825 - DNA, 263 bp, Homo sapiens; identical to SEQ ID NO: 55058
  chr18:43913491-43913754
  hypo

SEQ ID NO: 94826 - DNA, 493 bp, Homo sapiens; identical to SEQ ID NO: 55059
  chr18:43914155-43914648
  hypo

SEQ ID NO: 94827 - DNA, 30 bp, Homo sapiens; identical to SEQ ID NO: 55060
  chr18:43914933-43914963
  hypo

SEQ ID NO: 94828 - DNA, 45 bp, Homo sapiens; identical to SEQ ID NO: 31345
  chr18:44010835-44010880
  hypo

SEQ ID NO: 94829 - DNA, 30 bp, Homo sapiens
  chr18:44139320-44139350
  hypo
cagccattgtgctgcgatgggctgccatgg

SEQ ID NO: 94830 - DNA, 85 bp, Homo sapiens
  chr18:44140396-44140481
  hypo
gcaccaccaggtgccgcagccacacggtgtccacgaaccagctgggcccaaagccctcgcccgtgtgcccgagccggagcttata

SEQ ID NO: 94831 - DNA, 30 bp, Homo sapiens; identical to SEQ ID NO: 31346
  chr18:44259958-44259988
  hypo

SEQ ID NO: 94832 - DNA, 123 bp, Homo sapiens
  chr18:44260342-44260465
  hypo
gcacgtacttgacgcggatggacacgtcggtgttgcgcgtgttgtagaaggcaggcagcagcaccgacgcgttctcgtacacctgcagcacgcgatagaacggccgccgccacttctccagct

SEQ ID NO: 94833 - DNA, 483 bp, Homo sapiens; identical to SEQ ID NO: 55061
  chr18:44335966-44336449
  hypo

SEQ ID NO: 94834 - DNA, 151 bp, Homo sapiens; identical to SEQ ID NO: 11745
  chr18:44337012-44337163
  hypo

SEQ ID NO: 94835 - DNA, 27 bp, Homo sapiens
  chr18:44531779-44531806
  hypo
tctgtcagcagtggcccgaccttggct

SEQ ID NO: 94836 - DNA, 30 bp, Homo sapiens; identical to SEQ ID NO: 11748
  chr18:44581294-44581324
  hypo

SEQ ID NO: 94837 - DNA, 45 bp, Homo sapiens
  chr18:44700790-44700835
  hypo
ttcttccttgggaggccgaggtgggcagatcacgaggtcaggagt

SEQ ID NO: 94838 - DNA, 105 bp, Homo sapiens
  chr18:44701014-44701119
  hypo
gggggacagggtgagactccgtctcaaaaaaaaaaaaaaatgggtcttcccacatccactgctttcccttccaatctttcctccgtattgtagcctcaaggatct

SEQ ID NO: 94839 - DNA, 356 bp, Homo sapiens; identical to SEQ ID NO: 55068
  chr18:44773610-44773966
  hypo

SEQ ID NO: 94840 - DNA, 581 bp, Homo sapiens; identical to SEQ ID NO: 55069
  chr18:44774201-44774782
  hypo

SEQ ID NO: 94841 - DNA, 31 bp, Homo sapiens; identical to SEQ ID NO: 31352
  chr18:45058416-45058447
  hypo

SEQ ID NO: 94842 - DNA, 35 bp, Homo sapiens
  chr18:45186645-45186680
  hypo
gttgcctggatgggccaggtgcggtggctcatgcc

SEQ ID NO: 94843 - DNA, 79 bp, Homo sapiens; identical to SEQ ID NO: 31353
  chr18:45353783-45353862
  hypo

SEQ ID NO: 94844 - DNA, 23 bp, Homo sapiens
  chr18:45439574-45439597
  hypo
agccacagcgcccagcctgttac

SEQ ID NO: 94845 - DNA, 31 bp, Homo sapiens; identical to SEQ ID NO: 31355
  chr18:45443477-45443508
  hypo

SEQ ID NO: 94846 - DNA, 31 bp, Homo sapiens
  chr18:45536044-45536075
  hypo
ggctaatcctcaggcccggtagtgtgtacac

SEQ ID NO: 94847 - DNA, 201 bp, Homo sapiens
  chr18:45554568-45554769
  hypo
gtggcccccatctcttcgatgttggccctgagagccccaagacactgcacagccttggagggggcactggagatgggggtaaacattaaatagcgcccccaggagtccagacatgaacagcggcctgcagggaaggtagggtagcattctgagttcgcagagctacctgtgggctttgctgaagctcggaagctcccctga

SEQ ID NO: 94848 - DNA, 30 bp, Homo sapiens
  chr18:45556157-45556187
  hypo
cgcccgtgtggatgcgcatgtggttcttga

SEQ ID NO: 94849 - DNA, 31 bp, Homo sapiens
  chr18:45567065-45567096
  hypo
tcatcctcctcccccccgtcccccccaggct

SEQ ID NO: 94850 - DNA, 190 bp, Homo sapiens
  chr18:45579500-45579690
  hypo
gtaaaagtgcttgatgcgtcccttccgcctgccccagaggaaaagtgaggaggcagcttccatgtctgtcttcccatcgcccctacagtggccaagaatgggcatggagttgggagcggccgcttctgcagaatgtgcacagattcattacagacaccccacaggccttgcatgcgcgggttggggaatg

SEQ ID NO: 94851 - DNA, 87 bp, Homo sapiens
  chr18:45594042-45594129
  hypo
agcccttacaattgcacgagccaattctgtaaaataaatctctctctcagttgggcatggtggctcatgcctgcaatctcagcaatt

SEQ ID NO: 94852 - DNA, 577 bp, Homo sapiens; identical to SEQ ID NO: 55081
  chr18:45687916-45688493
  hypo

SEQ ID NO: 94853 - DNA, 31 bp, Homo sapiens
  chr18:45822972-45823003
  hypo
ctcctctcccacagcacgttcccgagtctcg

SEQ ID NO: 94854 - DNA, 31 bp, Homo sapiens; identical to SEQ ID NO: 31357
  chr18:45854284-45854315
  hypo

SEQ ID NO: 94855 - DNA, 31 bp, Homo sapiens; identical to SEQ ID NO: 31358
  chr18:45868799-45868830
  hypo

SEQ ID NO: 94856 - DNA, 155 bp, Homo sapiens; identical to SEQ ID NO: 31359
  chr18:45917049-45917204
  hypo

SEQ ID NO: 94857 - DNA, 2578 bp, Homo sapiens; identical to SEQ ID NO: 55082
  chr18:45934609-45937187
  hypo

SEQ ID NO: 94858 - DNA, 30 bp, Homo sapiens
  chr18:46041351-46041381
  hypo
ctctgcctctgccaccgccgccattggcaa

SEQ ID NO: 94859 - DNA, 2060 bp, Homo sapiens; identical to SEQ ID NO: 55084
  chr18:46065663-46067723
  hypo

SEQ ID NO: 94860 - DNA, 581 bp, Homo sapiens
  chr18:46142030-46142611
  hypo
cccattgagggcagccgcatggggcgctagctcctcatactccgggttgcaggtgccaggggccgggggcttcctgcaggcatctcctgactgcagaggaagcctggacaggagaccccggggcagctgaggtgaggcgccgctgggctaccccatgtgaatctggctgggcagcaaacactagagtagaaggaatggccgagaggacgtgaggacacaagaggcacccgcagagcgagtcctcttccttcctcggggcaccaaaaggctgcaggtttgggatgggtctcaattctgtcccctttctcggcaactattatgggtttggggtgatgaccatgcccaggctccctcatgggaccctgacacagccctgagacactcgggcatgtttgggagagccccgcagagccggccagaggctgctgctgcaggcagagcctggcactcaatcctcctggaaacggctccgtgtagagttcctgcaaaacccggttctccgactgcacctgttaggtgtgccagggagcccttgataagatctgacgtcttccaggaataatgggcgtggccttgtgtat

SEQ ID NO: 94861 - DNA, 77 bp, Homo sapiens
  chr18:46287943-46288020
  hypo
cagaaggctgtgtccgaccgcagcttcgccttcaccgctgccaagctctgcgacaagatggcgctctttatggtgga

SEQ ID NO: 94862 - DNA, 30 bp, Homo sapiens; identical to SEQ ID NO: 55086
  chr18:46450960-46450990
  hypo

SEQ ID NO: 94863 - DNA, 30 bp, Homo sapiens; identical to SEQ ID NO: 55087
  chr18:46453447-46453477
  hypo

SEQ ID NO: 94864 - DNA, 30 bp, Homo sapiens; identical to SEQ ID NO: 55088
  chr18:46454032-46454062
  hypo

SEQ ID NO: 94865 - DNA, 31 bp, Homo sapiens; identical to SEQ ID NO: 55089
  chr18:46476386-46476417
  hypo

SEQ ID NO: 94866 - DNA, 28 bp, Homo sapiens
  chr18:46481277-46481305
  hypo
agcgcccggcccagaaatgggattttta

SEQ ID NO: 94867 - DNA, 186 bp, Homo sapiens; identical to SEQ ID NO: 55092
  chr18:46501831-46502017
  hypo

SEQ ID NO: 94868 - DNA, 318 bp, Homo sapiens; identical to SEQ ID NO: 55093
  chr18:46502752-46503070
  hypo

SEQ ID NO: 94869 - DNA, 43 bp, Homo sapiens
  chr18:46524823-46524866
  hypo
gctgggagggtgtcctggccccgagccagacctcccactgaca

SEQ ID NO: 94870 - DNA, 225 bp, Homo sapiens; identical to SEQ ID NO: 31365
  chr18:46578115-46578340
  hypo

SEQ ID NO: 94871 - DNA, 31 bp, Homo sapiens; identical to SEQ ID NO: 31366
  chr18:46624147-46624178
  hypo

SEQ ID NO: 94872 - DNA, 30 bp, Homo sapiens
  chr18:47009520-47009550
  hypo
ttccagaaacgggccggatggctaaattag

SEQ ID NO: 94873 - DNA, 45 bp, Homo sapiens
  chr18:47012297-47012342
  hypo
aattagcaaggtgtgatggcacgcgcctgtagtcccaggtatttg

SEQ ID NO: 94874 - DNA, 93 bp, Homo sapiens; identical to SEQ ID NO: 31367
  chr18:47019806-47019899
  hypo

SEQ ID NO: 94875 - DNA, 27 bp, Homo sapiens
  chr18:47171180-47171207
  hypo
agagtcttcagccaggcgcagtggctc

SEQ ID NO: 94876 - DNA, 144 bp, Homo sapiens
  chr18:47285296-47285440
  hypo
ccggccagtggtatttgtttttaatcaccacacagagctattgtgaggaccaaataaagaaatggatgtgaaggcgtgctgcgaactgcgccatgtggggtgttttctcattgttcaggtagcattcagcgtgaggccggtgtt

SEQ ID NO: 94877 - DNA, 31 bp, Homo sapiens
  chr18:47500682-47500713
  hypo
caggtagcagatagagcgagacaggcggcag

SEQ ID NO: 94878 - DNA, 1552 bp, Homo sapiens; identical to SEQ ID NO: 55097
  chr18:47720184-47721736
  hypo

SEQ ID NO: 94879 - DNA, 411 bp, Homo sapiens; identical to SEQ ID NO: 55098
  chr18:47792568-47792979
  hypo

SEQ ID NO: 94880 - DNA, 89 bp, Homo sapiens; identical to SEQ ID NO: 31370
  chr18:47812103-47812192
  hypo

SEQ ID NO: 94881 - DNA, 203 bp, Homo sapiens; identical to SEQ ID NO: 55099
  chr18:47813500-47813703
  hypo

SEQ ID NO: 94882 - DNA, 31 bp, Homo sapiens
  chr18:48135893-48135924
  hypo
acacaggtgtttgtgacgagaatgcactcct

SEQ ID NO: 94883 - DNA, 271 bp, Homo sapiens; identical to SEQ ID NO: 31371
  chr18:48190330-48190601
  hypo

SEQ ID NO: 94884 - DNA, 31 bp, Homo sapiens
  chr18:48256054-48256085
  hypo
gcgccagcccccagttcgacctggacgtgtt

SEQ ID NO: 94885 - DNA, 29 bp, Homo sapiens
  chr18:48403659-48403688
  hypo
acaattgtatataattatggtcgggcgcg

SEQ ID NO: 94886 - DNA, 21 bp, Homo sapiens
  chr18:48493428-48493449
  hypo
tttttttttttaacagagtct

SEQ ID NO: 94887 - DNA, 101 bp, Homo sapiens
  chr18:48493688-48493789
  hypo
aaagtgatgggattacaggtgtgagccacggcgcccggccagctgctggatattttgaccacctcaagtacgctgagcacgaaatcagtgcatctggcagt

SEQ ID NO: 94888 - DNA, 80 bp, Homo sapiens; identical to SEQ ID NO: 11773
  chr18:48494352-48494432
  hypo

SEQ ID NO: 94889 - DNA, 86 bp, Homo sapiens; identical to SEQ ID NO: 31375
  chr18:48664887-48664973
  hypo

SEQ ID NO: 94890 - DNA, 22 bp, Homo sapiens
  chr18:48665502-48665524
  hypo
gggctgcattatagccggactc

SEQ ID NO: 94891 - DNA, 39 bp, Homo sapiens; identical to SEQ ID NO: 31376
  chr18:48725412-48725451
  hypo

SEQ ID NO: 94892 - DNA, 30 bp, Homo sapiens
  chr18:51793433-51793463
  hypo
tcttctagagagaccgttttcatctgccat

SEQ ID NO: 94893 - DNA, 24 bp, Homo sapiens
  chr18:52525887-52525911
  hypo
ggcgtgagccactgtgcccagcca

SEQ ID NO: 94894 - DNA, 28 bp, Homo sapiens
  chr18:53037338-53037366
  hypo
aaagagaaggccgggcgcaatggctcat

SEQ ID NO: 94895 - DNA, 21 bp, Homo sapiens
  chr18:53074040-53074061
  hypo
gatagcagtgatgaacaaacc

SEQ ID NO: 94896 - DNA, 32 bp, Homo sapiens; identical to SEQ ID NO: 31377
  chr18:53106925-53106957
  hypo

SEQ ID NO: 94897 - DNA, 31 bp, Homo sapiens; identical to SEQ ID NO: 31378
  chr18:53107196-53107227
  hypo

SEQ ID NO: 94898 - DNA, 160 bp, Homo sapiens
  chr18:53126064-53126224
  hypo
ttttccattttttttgcataccgcgcaataccctctcgctctgagggtgacttccctgaccccagtctgacactgcgccgttaatgtcagataaaccatttagcccaagcacaattcttttctgtgcaaaaatctgctcgaggtggaaaatgtagcagtt

SEQ ID NO: 94899 - DNA, 1671 bp, Homo sapiens; identical to SEQ ID NO: 55114
  chr18:53254613-53256284
  hypo

SEQ ID NO: 94900 - DNA, 399 bp, Homo sapiens; identical to SEQ ID NO: 55115
  chr18:53256997-53257396
  hypo

SEQ ID NO: 94901 - DNA, 30 bp, Homo sapiens; identical to SEQ ID NO: 11784
  chr18:53257771-53257801
  hypo

SEQ ID NO: 94902 - DNA, 33 bp, Homo sapiens
  chr18:53333159-53333192
  hypo
ccttttttttttttttttttgcgacggagtctc

SEQ ID NO: 94903 - DNA, 22 bp, Homo sapiens
  chr18:54266812-54266834
  hypo
agacagtctcactctgttgccc

SEQ ID NO: 94904 - DNA, 31 bp, Homo sapiens; identical to SEQ ID NO: 31383
  chr18:54306859-54306890
  hypo

SEQ ID NO: 94905 - DNA, 29 bp, Homo sapiens
  chr18:54377546-54377575
  hypo
tgatacacgttcttctaggcttttaaaat

SEQ ID NO: 94906 - DNA, 164 bp, Homo sapiens; identical to SEQ ID NO: 31384
  chr18:54398592-54398756
  hypo

SEQ ID NO: 94907 - DNA, 158 bp, Homo sapiens; identical to SEQ ID NO: 31385
  chr18:54483259-54483417
  hypo

SEQ ID NO: 94908 - DNA, 30 bp, Homo sapiens; identical to SEQ ID NO: 31386
  chr18:54581775-54581805
  hypo

SEQ ID NO: 94909 - DNA, 31 bp, Homo sapiens; identical to SEQ ID NO: 31387
  chr18:54609486-54609517
  hypo

SEQ ID NO: 94910 - DNA, 291 bp, Homo sapiens
  chr18:54694220-54694511
  hypo
tcctgtccctccagatgaacacgtcactgctgggaagcatcggcatgctgaactcggcacctcagctgcgctgcattaaaacctaccaggtgccccctgtgcagcccgcgtcccccggctcccacaatgccctcaagctggcccggctcatctggacttccaaccgcaacgtcatcctcatggcccatgacgggaaggagcaccgcttcatggtctaatgctgctgcctgccgccgtgactgcgttttagttctctaaattatccaagccgatgttgctctgtccttcctc

SEQ ID NO: 94911 - DNA, 30 bp, Homo sapiens; identical to SEQ ID NO: 11789
  chr18:54724442-54724472
  hypo

SEQ ID NO: 94912 - DNA, 31 bp, Homo sapiens; identical to SEQ ID NO: 31389
  chr18:55138397-55138428
  hypo

SEQ ID NO: 94913 - DNA, 18 bp, Homo sapiens
  chr18:55279960-55279978
  hypo
cctggcctgtcccacttt

SEQ ID NO: 94914 - DNA, 30 bp, Homo sapiens
  chr18:55292543-55292573
  hypo
ggggtccttattcccgtagctcctcattgt

SEQ ID NO: 94915 - DNA, 54 bp, Homo sapiens
  chr18:55315833-55315887
  hypo
ctggtgcgagaaggcgtaggccgagcgccgcgttgacacgccccggcggaacac

SEQ ID NO: 94916 - DNA, 134 bp, Homo sapiens; identical to SEQ ID NO: 31391
  chr18:55329688-55329822
  hypo

SEQ ID NO: 94917 - DNA, 28 bp, Homo sapiens
  chr18:55366664-55366692
  hypo
ttgttgttaagacaggagtctcggccgg

SEQ ID NO: 94918 - DNA, 31 bp, Homo sapiens
  chr18:55373610-55373641
  hypo
cccaggcaggtggttacgtggaaggcaggtg

SEQ ID NO: 94919 - DNA, 30 bp, Homo sapiens; identical to SEQ ID NO: 31393
  chr18:55400152-55400182
  hypo

SEQ ID NO: 94920 - DNA, 31 bp, Homo sapiens
  chr18:55423988-55424019
  hypo
cacataggtgatgctgcgtcctttcagatgt

SEQ ID NO: 94921 - DNA, 31 bp, Homo sapiens
  chr18:55425542-55425573
  hypo
ctgttttctgtttatccgtcctgtgtgtttt

SEQ ID NO: 94922 - DNA, 46 bp, Homo sapiens
  chr18:55426741-55426787
  hypo
atcaaagaaaccaggaagggccgggcacggtggctcacgcctgtaa

SEQ ID NO: 94923 - DNA, 45 bp, Homo sapiens; identical to SEQ ID NO: 31394
  chr18:55427026-55427071
  hypo

SEQ ID NO: 94924 - DNA, 26 bp, Homo sapiens
  chr18:55445745-55445771
  hypo
gccaccgcgcccggcctataatctca

SEQ ID NO: 94925 - DNA, 188 bp, Homo sapiens
  chr18:55760788-55760976
  hypo
taccttcaattcactactgtgcgcatattcatgtttcatgctgagcagttcacttgagactttctcacggaaagaagtgcgatacagttggtggtagtcttatatttgctacgtgctcatgtgttgtctgatgatagaatgcagtggtcaaatattgcacaatttacgccagaggaggagaattccca

SEQ ID NO: 94926 - DNA, 24 bp, Homo sapiens
  chr18:55761695-55761719
  hypo
gacgtgagccactgcacccagcca

SEQ ID NO: 94927 - DNA, 181 bp, Homo sapiens
  chr18:55784749-55784930
  hypo
atgtatgaaaaccatcctcatcgcttcacagttgtctttgaaccagtttccctgggattgttcgaaatgtagcaaacgtggctcacggttaccctgacggggccagagcaatagggggaggtgtgggcacctgtatacatttgcgttgaaaaacgtacccgggctattctgaggtcctttc

SEQ ID NO: 94928 - DNA, 40 bp, Homo sapiens
  chr18:55821160-55821200
  hypo
gagtcaccgcacccggcccgaaatattgttaaaaccaagt

SEQ ID NO: 94929 - DNA, 56 bp, Homo sapiens
  chr18:55847724-55847780
  hypo
taccccctttctgtgcttggccgactccagcgcccgttcttctgcccctccttggc

SEQ ID NO: 94930 - DNA, 177 bp, Homo sapiens; identical to SEQ ID NO: 31395
  chr18:55850817-55850994
  hypo

SEQ ID NO: 94931 - DNA, 30 bp, Homo sapiens
  chr18:55866441-55866471
  hypo
atcttcttacattgcgatagaaattttgat

SEQ ID NO: 94932 - DNA, 31 bp, Homo sapiens
  chr18:55894720-55894751
  hypo
ttagtaaaatggaattcgctgggtgattctt

SEQ ID NO: 94933 - DNA, 30 bp, Homo sapiens
  chr18:55922732-55922762
  hypo
gtcgctcccggtgccgcagtgctaacagtt

SEQ ID NO: 94934 - DNA, 30 bp, Homo sapiens
  chr18:55923990-55924020
  hypo
gggagctgacaccacggtaagttcacagcg

SEQ ID NO: 94935 - DNA, 185 bp, Homo sapiens
  chr18:55945679-55945864
  hypo
gaccccttctaatccacgtcccacattatagctcaaaagtatggattttacagatcttatcctctcctgttctgccaaaaccccatacggtcctccattaccaatcaggtgaatcgacttgcatttcccagcgtgtccccacacccacaaacactccatgacactgggcccgtccctgcctttat

SEQ ID NO: 94936 - DNA, 43 bp, Homo sapiens
  chr18:55947808-55947851
  hypo
cagtggattcatggagcctgtcgaggaagctacctgtgtgctt

SEQ ID NO: 94937 - DNA, 31 bp, Homo sapiens
  chr18:55976208-55976239
  hypo
caactgggtgacttcacgctgtcctcagcgc

SEQ ID NO: 94938 - DNA, 174 bp, Homo sapiens
  chr18:55977130-55977304
  hypo
aggagtgtcttctcaccaccccgattatactggtctagttatgctttggagttaaagccaggctgctattgcagggctgctgcaatccttgcaagcacagttgttctttgcttgcgcttgctctcgctctcgctctcactctcactcttgctcgctctctttctctctctctga

SEQ ID NO: 94939 - DNA, 138 bp, Homo sapiens
  chr18:55992341-55992479
  hypo
tactatgtcaaccacaacaaccggaccactcagtggcacagaccaagcctgatgtgagtaccgtgtgatggtcaggaacacgtgcacgtgcactgcacagctagggacaaatatggcggccctttgggacaaggctgg

SEQ ID NO: 94940 - DNA, 39 bp, Homo sapiens
  chr18:56036806-56036845
  hypo
agcctgcatagggccacgctgagccggggagaattggcc

SEQ ID NO: 94941 - DNA, 116 bp, Homo sapiens
  chr18:56063562-56063678
  hypo
cctaacagacttttgcagaggcgatggcagagagcagctgcaggcatggtccctggagccgagccttcaccacgcactcgtccaagttcggatgcgggaacctggtcccagcttga

SEQ ID NO: 94942 - DNA, 31 bp, Homo sapiens; identical to SEQ ID NO: 31396
  chr18:56277829-56277860
  hypo

SEQ ID NO: 94943 - DNA, 30 bp, Homo sapiens; identical to SEQ ID NO: 31397
  chr18:56335503-56335533
  hypo

SEQ ID NO: 94944 - DNA, 45 bp, Homo sapiens
  chr18:56483917-56483962
  hypo
taagtttgaaattccccggccgggcgcggtggctcacgcctgtaa

SEQ ID NO: 94945 - DNA, 44 bp, Homo sapiens; identical to SEQ ID NO: 31399
  chr18:56815805-56815849
  hypo

SEQ ID NO: 94946 - DNA, 211 bp, Homo sapiens; identical to SEQ ID NO: 55142
  chr18:56888444-56888655
  hypo

SEQ ID NO: 94947 - DNA, 51 bp, Homo sapiens; identical to SEQ ID NO: 55143
  chr18:56888686-56888737
  hypo

SEQ ID NO: 94948 - DNA, 766 bp, Homo sapiens; identical to SEQ ID NO: 55148
  chr18:56936004-56936770
  hypo

SEQ ID NO: 94949 - DNA, 452 bp, Homo sapiens; identical to SEQ ID NO: 11810
  chr18:57363597-57364049
  hypo

SEQ ID NO: 94950 - DNA, 154 bp, Homo sapiens; identical to SEQ ID NO: 55158
  chr18:57364448-57364602
  hypo

SEQ ID NO: 94951 - DNA, 40 bp, Homo sapiens; identical to SEQ ID NO: 55159
  chr18:57364847-57364887
  hypo

SEQ ID NO: 94952 - DNA, 498 bp, Homo sapiens; identical to SEQ ID NO: 55162
  chr18:59000845-59001343
  hypo

SEQ ID NO: 94953 - DNA, 31 bp, Homo sapiens
  chr18:59482707-59482738
  hypo
tttgtttgaatctaccgcatttagagaaggt

SEQ ID NO: 94954 - DNA, 499 bp, Homo sapiens; identical to SEQ ID NO: 31405
  chr18:59483203-59483702
  hypo

SEQ ID NO: 94955 - DNA, 203 bp, Homo sapiens
  chr18:59533472-59533675
  hypo
cttctagacagcgagtcgggcccaggtagccccacggatggctactccccaccagatgccttatacacggggactcgtttatcctcaggacaacttgaggaagtcaccctcattgtcttcttattacacaccaggagctggcagcaaagatgttcaaacactaccccaagctacagagtgagaatctgcgaggacaagattca

SEQ ID NO: 94956 - DNA, 30 bp, Homo sapiens
  chr18:59728670-59728700
  hypo
gagcttgcagtgagccgagattgtgccact

SEQ ID NO: 94957 - DNA, 40 bp, Homo sapiens; identical to SEQ ID NO: 31406
  chr18:59975662-59975702
  hypo

SEQ ID NO: 94958 - DNA, 87 bp, Homo sapiens
  chr18:59987231-59987318
  hypo
aaaaattacaggtaggtaataaaaacatttttatttattaataagttttcactatatgcaagattcgtaaagtcttatgtttgcata

SEQ ID NO: 94959 - DNA, 40 bp, Homo sapiens; identical to SEQ ID NO: 55167
  chr18:59992690-59992730
  hypo

SEQ ID NO: 94960 - DNA, 165 bp, Homo sapiens
  chr18:60004627-60004792
  hypo
atcaataccacacaattctgacggtatgggtgtatattaactcacaatgcgtataaattagtaatcagttatgtgaccttataccctacccacctcacactgcacttagtcacacgggctatcttgctgtttctccgtcaagccgtgcatgcttcctccaagggc

SEQ ID NO: 94961 - DNA, 31 bp, Homo sapiens; identical to SEQ ID NO: 31408
  chr18:60010358-60010389
  hypo

SEQ ID NO: 94962 - DNA, 31 bp, Homo sapiens
  chr18:60010760-60010791
  hypo
actcaacatggctttgcgtagggaaataaat

SEQ ID NO: 94963 - DNA, 189 bp, Homo sapiens
  chr18:60077429-60077618
  hypo
caatgcttgaaaaacccgtccttggctggggggcctcggtcacctgcactagtagaaagtctgtggacccatttttcgtgaagaggagatctgctgaccttctataaacaattgcccaagtggaggcagggctcatcgagactcacccagcagaggaaaatgagtccaacactgcggctgggcaaagtg

SEQ ID NO: 94964 - DNA, 121 bp, Homo sapiens; identical to SEQ ID NO: 31409
  chr18:60110133-60110254
  hypo

SEQ ID NO: 94965 - DNA, 165 bp, Homo sapiens; identical to SEQ ID NO: 31410
  chr18:60117013-60117178
  hypo

SEQ ID NO: 94966 - DNA, 194 bp, Homo sapiens
  chr18:60120641-60120835
  hypo
ttgcttcttatttcaccgagaaaatagatggcatccgaaaagaacttgcctgtcccacctccccgtctactatcctcctgtgtctgtcccgaaatactgtctgtttgctccatcactgtagtgaactgttcctcctccatgtacaaatggtgcatcccttcccacttactcaaaaatgtcgctcctgtgatcat

SEQ ID NO: 94967 - DNA, 32 bp, Homo sapiens; identical to SEQ ID NO: 31412
  chr18:60127357-60127389
  hypo

SEQ ID NO: 94968 - DNA, 31 bp, Homo sapiens
  chr18:60129833-60129864
  hypo
gggacacagccatgaacgaaaatctggcaaa

SEQ ID NO: 94969 - DNA, 158 bp, Homo sapiens
  chr18:60154517-60154675
  hypo
tttttttttgagacagcgtcttgctttgctgcccaggctggaatgcagtggcactcgcatggttcctgacctcttgggctcaagtgatcctcctgcgtggctgggaccgaaggccacacctggctaatttttgtaatttttgtagagactaagtctca

SEQ ID NO: 94970 - DNA, 30 bp, Homo sapiens
  chr18:60186063-60186093
  hypo
ggcttagttaaggtcgtctaccctggcaag

SEQ ID NO: 94971 - DNA, 501 bp, Homo sapiens; identical to SEQ ID NO: 55169
  chr18:60189546-60190047
  hypo

SEQ ID NO: 94972 - DNA, 1612 bp, Homo sapiens; identical to SEQ ID NO: 55170
  chr18:60190084-60191696
  hypo

SEQ ID NO: 94973 - DNA, 96 bp, Homo sapiens; identical to SEQ ID NO: 55171
  chr18:60191978-60192074
  hypo

SEQ ID NO: 94974 - DNA, 31 bp, Homo sapiens; identical to SEQ ID NO: 55172
  chr18:60193831-60193862
  hypo

SEQ ID NO: 94975 - DNA, 98 bp, Homo sapiens; identical to SEQ ID NO: 55173
  chr18:60194121-60194219
  hypo

SEQ ID NO: 94976 - DNA, 147 bp, Homo sapiens
  chr18:60210293-60210440
  hypo
atgtcttcttcttgcccgtcagctgtatcgggaattccttgtccacatcttccttacttctccctgcttgagctacgccttttctcctcaggttggatggcacgcaccctgaagccaggtggaaccatgccacgtttttgtgaatcc

SEQ ID NO: 94977 - DNA, 31 bp, Homo sapiens
  chr18:60210719-60210750
  hypo
tcctggtgtcttactgcggcatgcgtctcgc

SEQ ID NO: 94978 - DNA, 84 bp, Homo sapiens; identical to SEQ ID NO: 31416
  chr18:60216458-60216542
  hypo

SEQ ID NO: 94979 - DNA, 166 bp, Homo sapiens
  chr18:60217645-60217811
  hypo
cttgaaaagggaggaacggcgacatcctgacctagagcccatcctaaggtaatgatttacctgacgcctatcatagcagcatacacacaggacaaagggccgctccaaatggggtcttcaggtgggggaatcatagagatcctttctctggcgtacttcttaaaat

SEQ ID NO: 94980 - DNA, 88 bp, Homo sapiens
  chr18:60229134-60229222
  hypo
tcaaatatttcttctccgcttttctcttgctccgtcttccaagactccaaatccttgtatgttagatttttcaccatgtcccgtggtt

SEQ ID NO: 94981 - DNA, 27 bp, Homo sapiens
  chr18:60229521-60229548
  hypo
accgtgcccagccgtcccatgtctttt

SEQ ID NO: 94982 - DNA, 137 bp, Homo sapiens; identical to SEQ ID NO: 31418
  chr18:60234751-60234888
  hypo

SEQ ID NO: 94983 - DNA, 35 bp, Homo sapiens
  chr18:60242134-60242169
  hypo
acttctccccagccagcgagcgcaggtatcagcca

SEQ ID NO: 94984 - DNA, 31 bp, Homo sapiens
  chr18:60254709-60254740
  hypo
agggcatctggaagaccgtggttctccttgc

SEQ ID NO: 94985 - DNA, 328 bp, Homo sapiens; identical to SEQ ID NO: 55174
  chr18:60263660-60263988
  hypo

SEQ ID NO: 94986 - DNA, 71 bp, Homo sapiens
  chr18:60273153-60273224
  hypo
tggcctggcgttcctgcgctactcagtccctatttagggctcataaaggtgcaccccgctgccccacacag

SEQ ID NO: 94987 - DNA, 19 bp, Homo sapiens
  chr18:60346046-60346065
  hypo
agtccggcctaaagtgata

SEQ ID NO: 94988 - DNA, 1366 bp, Homo sapiens; identical to SEQ ID NO: 55176
  chr18:60382938-60384304
  hypo

SEQ ID NO: 94989 - DNA, 29 bp, Homo sapiens
  chr18:60415770-60415799
  hypo
gccccgcccaaattcggaatagttatatt

SEQ ID NO: 94990 - DNA, 27 bp, Homo sapiens
  chr18:60476063-60476090
  hypo
ggcgtgagccaccgtgcctggcctgga

SEQ ID NO: 94991 - DNA, 29 bp, Homo sapiens
  chr18:60476904-60476933
  hypo
agcctggcgacagagcaagactccatctc

SEQ ID NO: 94992 - DNA, 187 bp, Homo sapiens
  chr18:60523277-60523464
  hypo
taggcccttcttactgcgagtttcccattttcagattcaactaaccggggatcaaaacctgccaacacggagggctgagtgtactatggcattttatgtcagggacttgagcatccgtggattttgatacctgctggggtccaggagctaatccccagtggatatggagcgccgaccatatgttggt

SEQ ID NO: 94993 - DNA, 34 bp, Homo sapiens
  chr18:60534963-60534997
  hypo
ctttggtattctgccacggcgatgcatgccaaga

SEQ ID NO: 94994 - DNA, 38 bp, Homo sapiens
  chr18:60549763-60549801
  hypo
ttacaggcatgagccaccgcgcccggccattcacttaa

SEQ ID NO: 94995 - DNA, 170 bp, Homo sapiens
  chr18:60609800-60609970
  hypo
tttactttaatttctaattttcggtgagcggtgacattatatctagctttgagtgaatctgcgtgctgagcctgccgtgaggatttaccgtgtttccatttcattggcttttatccatctaacaagttagggcttgaacacacacccacgcatcaaagaaacaaacacta

SEQ ID NO: 94996 - DNA, 98 bp, Homo sapiens
  chr18:60614283-60614381
  hypo
tcaaaaaacaaacaacaacaacaacaacaaaaatttccagaatttttactttctgtatagtaactttcacattgaggaagagccgtgctctgaaggga

SEQ ID NO: 94997 - DNA, 203 bp, Homo sapiens
  chr18:60645389-60645592
  hypo
tctgtggtcctacagtcgagacagtcgagggacccgcagggaacctgcacagttgccgcaggtgctctgtattaactgtctgtctgcaaacccttgttcttccaggatggcaaggtgaacggagtgactgagtccacgcgcatcctgggctacaccttcctccatcccagtgtggtgcctcgcccccacgtgcagtccgtgct

SEQ ID NO: 94998 - DNA, 211 bp, Homo sapiens
  chr18:60645978-60646189
  hypo
tggggtcaacagcctccgatgagcccccgcccggagccctaagcgagaacagccctgcctaccccagtgagcagcgctgcatgctccaccccatctgtctgtccaactccttccagcgccagctatccagcgccacgttctctagcgccttctccgacaacggccttgacagtgacgatgaggagcccatcgagggcgtcttcaccaacgg

SEQ ID NO: 94999 - DNA, 44 bp, Homo sapiens
  chr18:60654358-60654402
  hypo
gaaccccctccacatgcgctgagtgcagacgacacaggagcaga

SEQ ID NO: 95000 - DNA, 30 bp, Homo sapiens
  chr18:60660313-60660343
  hypo
cttcagatgaatctccgggcggccactcct

SEQ ID NO: 95001 - DNA, 30 bp, Homo sapiens
  chr18:60660703-60660733
  hypo
gcaggaacgtggagtcgtttccagtcttgt

SEQ ID NO: 95002 - DNA, 31 bp, Homo sapiens
  chr18:60740620-60740651
  hypo
gcgcccggccgtcagtaatatattaagagat

SEQ ID NO: 95003 - DNA, 227 bp, Homo sapiens
  chr18:60813470-60813697
  hypo
ataaagaaattaagtgttggccgagtgaaacaagtgagacttctgcagccgcagccagggcttggccatagctgcgagggaccttccagcccgcctcctggcagaaggacgctggtcgtggacactgatggggaaatggcggctgtccctgagccccccaagaaatggagcgaggtaactagaggcagtgtggttaccatttgaccgtggaagtctgacaggacgcc

SEQ ID NO: 95004 - DNA, 192 bp, Homo sapiens
  chr18:60878882-60879074
  hypo
acagtgaaataaataggtactcgacgatagtatgtgttgttgctgtgtagttcttttgctcctgaacagcaaataccattggacttggcattgtcctactgtggctgcaagctgtgtctcaccacagctaacgccagtgcagaggagccatgccacgcaaaggtcccctgcggcagcaccagcctgaagctc

SEQ ID NO: 95005 - DNA, 112 bp, Homo sapiens
  chr18:60959764-60959876
  hypo
gtaatagaaagggggggcttgcgcacagaaggaaatgggttcatgttggcaccacccaggtgctcagcaaatggacagcaaataaaccgtcgttgaagaaaggcaatgaaag

SEQ ID NO: 95006 - DNA, 166 bp, Homo sapiens
  chr18:60973500-60973666
  hypo
gcaaagctagcaatttcttgccgttcccactaccattcctctaggtcaggcacttgatctcttgcccgtttgctgaaagagccttctatctggtcactgatttctcccccgtctcattaacggtctggagtggagtcagggtgacgtatctgaaacaaactcttcc

SEQ ID NO: 95007 - DNA, 43 bp, Homo sapiens
  chr18:60992576-60992619
  hypo
aaaataccacaaattaggtagcgtaaaacaacagaaatttatt

SEQ ID NO: 95008 - DNA, 53 bp, Homo sapiens
  chr18:61144211-61144264
  hypo
caggtctttgtgctcctcgcttgcctgttccttttccacgcattttccaggat

SEQ ID NO: 95009 - DNA, 31 bp, Homo sapiens
  chr18:61164471-61164502
  hypo
gctagcattggaatagcgtttggcagcttga

SEQ ID NO: 95010 - DNA, 31 bp, Homo sapiens; identical to SEQ ID NO: 31427
  chr18:61261736-61261767
  hypo

SEQ ID NO: 95011 - DNA, 40 bp, Homo sapiens
  chr18:61450037-61450077
  hypo
ccagaccaggatcatcagcaccgcctggagaacttgttag

SEQ ID NO: 95012 - DNA, 30 bp, Homo sapiens; identical to SEQ ID NO: 55182
  chr18:63411688-63411718
  hypo

SEQ ID NO: 95013 - DNA, 30 bp, Homo sapiens; identical to SEQ ID NO: 55183
  chr18:63416927-63416957
  hypo

SEQ ID NO: 95014 - DNA, 207 bp, Homo sapiens; identical to SEQ ID NO: 11828
  chr18:63417590-63417797
  hypo

SEQ ID NO: 95015 - DNA, 30 bp, Homo sapiens; identical to SEQ ID NO: 55186
  chr18:63421750-63421780
  hypo

SEQ ID NO: 95016 - DNA, 112 bp, Homo sapiens; identical to SEQ ID NO: 31429
  chr18:66360548-66360660
  hypo

SEQ ID NO: 95017 - DNA, 482 bp, Homo sapiens; identical to SEQ ID NO: 55188
  chr18:67067488-67067970
  hypo

SEQ ID NO: 95018 - DNA, 118 bp, Homo sapiens; identical to SEQ ID NO: 55189
  chr18:67067995-67068113
  hypo

SEQ ID NO: 95019 - DNA, 783 bp, Homo sapiens; identical to SEQ ID NO: 11831
  chr18:67068592-67069375
  hypo

SEQ ID NO: 95020 - DNA, 43 bp, Homo sapiens
  chr18:67073949-67073992
  hypo
tccttaaatgtctttcaaacacgcacagtaatggtgaatattt

SEQ ID NO: 95021 - DNA, 27 bp, Homo sapiens
  chr18:67941008-67941035
  hypo
tgtctgaggctgggtgcggtggctcat

SEQ ID NO: 95022 - DNA, 150 bp, Homo sapiens; identical to SEQ ID NO: 55192
  chr18:67955796-67955946
  hypo

SEQ ID NO: 95023 - DNA, 178 bp, Homo sapiens; identical to SEQ ID NO: 55193
  chr18:67956753-67956931
  hypo

SEQ ID NO: 95024 - DNA, 28 bp, Homo sapiens
  chr18:67980296-67980324
  hypo
tgagccaccacaccgggtccatggattt

SEQ ID NO: 95025 - DNA, 91 bp, Homo sapiens
  chr18:67985373-67985464
  hypo
gaaccactgtacctggcctattatttattatatagtttttttttaaaggaatgtttccctagtctttttgcctgtacgtgattctgcagaa

SEQ ID NO: 95026 - DNA, 246 bp, Homo sapiens
  chr18:67991028-67991274
  hypo
tgttattgcagttctatggaacgcctttactgtcgtgccaggacacaggctgggacatggcaggcagcggaggagcagtcggagtcagtgctgaaggagtgcacaggtctagctagagtccagctgggaaggatgtggacactggcccacacgttagagtttataccaaaaagcaaggtgccaaaagaacaaaaggtagatgcaggcttgttctttataaacatcatcgggcggggcatggtagct

SEQ ID NO: 95027 - DNA, 371 bp, Homo sapiens
  chr18:67991979-67992350
  hypo
gtagtacaacaaccatcgctagccagtgactttggaaaagatgattccttatttggtagctgctatggtaaagatatggccagctgcgatatcaacggtgaagatgaaaaaggcggaaaaaacagatcaaaaagcgagagcctgatgggtacgctaaaaaggcggctttctgcaaaacagaagtcaaaaggcaaggcgggcacaccctctgggagctctgccgacgaggacaccttctcctcctcctcagcacccatagtctttaaagacgtgagagctcagaggccgataaggtccacgtcgctccgcagccatcactacagtcccgcgccgtggcctctgcggcccacaaactccgaggagacctgcat

SEQ ID NO: 95028 - DNA, 108 bp, Homo sapiens
  chr18:67992599-67992707
  hypo
tcctttggaaggatcacggagctattgtctggacagctcttctcccatggaagtctctgcggttcctcctcaagtgggagggcgcgctttccccgaggatgagagtca

SEQ ID NO: 95029 - DNA, 31 bp, Homo sapiens
  chr18:67992930-67992961
  hypo
catttgaattttgatccgaactctgctcctg

SEQ ID NO: 95030 - DNA, 41 bp, Homo sapiens; identical to SEQ ID NO: 31437
  chr18:68042711-68042752
  hypo

SEQ ID NO: 95031 - DNA, 46 bp, Homo sapiens; identical to SEQ ID NO: 31438
  chr18:68053093-68053139
  hypo

SEQ ID NO: 95032 - DNA, 31 bp, Homo sapiens
  chr18:68059453-68059484
  hypo
tgtacttgagtttaggcgaggaagagctctt

SEQ ID NO: 95033 - DNA, 31 bp, Homo sapiens
  chr18:68088585-68088616
  hypo
aaatgcagaaattattcgtctccataggtac

SEQ ID NO: 95034 - DNA, 110 bp, Homo sapiens; identical to SEQ ID NO: 55200
  chr18:70535444-70535554
  hypo

SEQ ID NO: 95035 - DNA, 508 bp, Homo sapiens; identical to SEQ ID NO: 55201
  chr18:70535575-70536083
  hypo

SEQ ID NO: 95036 - DNA, 415 bp, Homo sapiens; identical to SEQ ID NO: 55202
  chr18:70536187-70536602
  hypo

SEQ ID NO: 95037 - DNA, 30 bp, Homo sapiens; identical to SEQ ID NO: 55203
  chr18:70536833-70536863
  hypo

SEQ ID NO: 95038 - DNA, 31 bp, Homo sapiens
  chr18:71003886-71003917
  hypo
atttcccttaccagtacgttaatgtaagaat

SEQ ID NO: 95039 - DNA, 31 bp, Homo sapiens
  chr18:71745556-71745587
  hypo
tttcaaggcccccccccgacctgccccagca

SEQ ID NO: 95040 - DNA, 30 bp, Homo sapiens
  chr18:71822329-71822359
  hypo
tgcctgctcccagccggcacccgtaaccca

SEQ ID NO: 95041 - DNA, 30 bp, Homo sapiens
  chr18:71825745-71825775
  hypo
tggactcgctactccgttcttcacagctgc

SEQ ID NO: 95042 - DNA, 182 bp, Homo sapiens; identical to SEQ ID NO: 31441
  chr18:71844278-71844460
  hypo

SEQ ID NO: 95043 - DNA, 84 bp, Homo sapiens
  chr18:71847877-71847961
  hypo
gggcgttcctggagaccgtaaggggcacgttcatggagcagaggaagcagagacatgagcgatggtgggcggaagtccacacca

SEQ ID NO: 95044 - DNA, 173 bp, Homo sapiens
  chr18:71867253-71867426
  hypo
tgaaggagcgaagccccgtccttgggaagaggagacgtgagccaggcaggatgggcccaaggagggagtcccttagaaactgtccagatgaaggctaacgaggtgcagctccacccagcctcctcgggctctccttcccacaggagcctctcatcctgcgatggccacattct

SEQ ID NO: 95045 - DNA, 31 bp, Homo sapiens
  chr18:71872660-71872691
  hypo
cttctcaaggagccttcgtaactgtcagtgg

SEQ ID NO: 95046 - DNA, 34 bp, Homo sapiens
  chr18:71874052-71874086
  hypo
aacctctgcacccggcccatacttcaggttttaa

SEQ ID NO: 95047 - DNA, 100 bp, Homo sapiens; identical to SEQ ID NO: 31442
  chr18:71879692-71879792
  hypo

SEQ ID NO: 95048 - DNA, 172 bp, Homo sapiens
  chr18:71889076-71889248
  hypo
agactggttgtgaagacgggaattcagcgcgccatgcaggggactcactaggccccaggtgggaaccccatcccctcctcaggcgtttttgcttcatgcttatatccgtgtcatcatcgggcctcttatgctggcattttgtttgtgtgttctctctcgcttaacaaactca

SEQ ID NO: 95049 - DNA, 49 bp, Homo sapiens
  chr18:71904649-71904698
  hypo
ctgaaatggcagtccccgctcttctcgtccactgcgcacctcctggcct

SEQ ID NO: 95050 - DNA, 124 bp, Homo sapiens; identical to SEQ ID NO: 55205
  chr18:71958660-71958784
  hypo

SEQ ID NO: 95051 - DNA, 31 bp, Homo sapiens
  chr18:71982746-71982777
  hypo
gcagcacgcagttagccggggcttcagcgcc

SEQ ID NO: 95052 - DNA, 62 bp, Homo sapiens
  chr18:71983205-71983267
  hypo
cttgaaggaggcagagcggaagcgagggagactgctggaggccctgccgcccacccgccctt

SEQ ID NO: 95053 - DNA, 31 bp, Homo sapiens
  chr18:72035257-72035288
  hypo
ttacttctctctgggccgtgctggcctcctg

SEQ ID NO: 95054 - DNA, 590 bp, Homo sapiens; identical to SEQ ID NO: 55208
  chr18:72123599-72124189
  hypo

SEQ ID NO: 95055 - DNA, 31 bp, Homo sapiens; identical to SEQ ID NO: 31446
  chr18:72171141-72171172
  hypo

SEQ ID NO: 95056 - DNA, 31 bp, Homo sapiens; identical to SEQ ID NO: 31447
  chr18:72171538-72171569
  hypo

SEQ ID NO: 95057 - DNA, 337 bp, Homo sapiens
  chr18:72189897-72190234
  hypo
cagaaggcccttgccaggttccggtccctccaccttggacctcccagcctcccgaacgttgagccaatacatctctgctcattgtaaattacctagtcttgggcattgtgttacagcagcaaaaagcagcctacggcagtcaccgtgctaacacctgcagcagcctgcggcggtcaccgtgctaacacgtgcagcagcctgtgtggctcaggccagtcagcttcccctggaagcaagtgtgaggtcgtcgcctctggaagtgctagcggagggtgatctcccggaggaaatcagagtggtgttctactagaaggccgatgactcctgggtaaagtgc

SEQ ID NO: 95058 - DNA, 31 bp, Homo sapiens
  chr18:72213717-72213748
  hypo
agatgcggtactgtctcgtgccacccccctt

SEQ ID NO: 95059 - DNA, 253 bp, Homo sapiens; identical to SEQ ID NO: 31449
  chr18:72226537-72226790
  hypo

SEQ ID NO: 95060 - DNA, 52 bp, Homo sapiens
  chr18:72239211-72239263
  hypo
aaaaaggtgatgtgtgcagaacgcttgtcacggtggctggaatgcagcatgt

SEQ ID NO: 95061 - DNA, 45 bp, Homo sapiens
  chr18:72263658-72263703
  hypo
cttacaatgatttttttgagacggaatctcgctctgtcgcccagg

SEQ ID NO: 95062 - DNA, 110 bp, Homo sapiens
  chr18:72335287-72335397
  hypo
actgcattgtgagtgtgagtgcgcgtgtgcgtctgtgactttgggtgtgtgcacatgagggcggcagagcgagagctgcagctcgcttcgtagatactctttaggaggga

SEQ ID NO: 95063 - DNA, 30 bp, Homo sapiens
  chr18:72342029-72342059
  hypo
gtaatgagattatacgtgttgttcattgga

SEQ ID NO: 95064 - DNA, 63 bp, Homo sapiens; identical to SEQ ID NO: 31450
  chr18:72344371-72344434
  hypo

SEQ ID NO: 95065 - DNA, 307 bp, Homo sapiens
  chr18:72347357-72347664
  hypo
gcatctggctagtgccggccacatgagaaatgagcaggccagtgtggaggagcttccggagggaggggccacctttaaatgtgtcaagtgcacagagccctttgattctgaacagaatttatttttacatattaaaggacagcatgaggaattgctgcgggaggtgaataagtatatagtggaagacactgagcaaatcaaccgcgagagggaggaaaaccagggaaacgtctgcaagtattgtgggaagatgtgtcgaagcagcaactcgatggccttcctggcacacattcgcactcacacaggt

SEQ ID NO: 95066 - DNA, 31 bp, Homo sapiens; identical to SEQ ID NO: 31452
  chr18:72487985-72488016
  hypo

SEQ ID NO: 95067 - DNA, 30 bp, Homo sapiens; identical to SEQ ID NO: 31453
  chr18:72547176-72547206
  hypo

SEQ ID NO: 95068 - DNA, 159 bp, Homo sapiens
  chr18:72604259-72604418
  hypo
ttagctgtgggaccgcggtcaaactatcgagtgaaatgccactttctgttttgtaaattgtgggttcttagtggaccaacctcataggattatggtaaatattaggtgagaagcactttgaagtcacctagagagagtcggccacgtcagtcgcttgat

SEQ ID NO: 95069 - DNA, 153 bp, Homo sapiens
  chr18:72611941-72612094
  hypo
gcaggtagacggatgcgtgctgtctttgtgttggcattcatttgtttgcgtaaaatcactttctgaaatgtactttaatgtttatgtgccaaatgtttaaatgtccattgaaaccgtgaggctgaaaactgcattattcgtgatggctagtac

SEQ ID NO: 95070 - DNA, 92 bp, Homo sapiens
  chr18:72617338-72617430
  hypo
gagaggccagcgcagcgcctgctgttcaggagcgtctcagaggcacacgagagccggttggctgctcgcgcagagagcgcatgtggacacct

SEQ ID NO: 95071 - DNA, 31 bp, Homo sapiens; identical to SEQ ID NO: 31454
  chr18:72632026-72632057
  hypo

SEQ ID NO: 95072 - DNA, 115 bp, Homo sapiens
  chr18:72632538-72632653
  hypo
caactgtcccaagtgtgactacgggaccaacgtcccggtggagttccggaaccatttgaaggaacagcatcctgacatcgaaaacccggacctcgcttacctgcatgctggtaag

SEQ ID NO: 95073 - DNA, 29 bp, Homo sapiens
  chr18:72646480-72646509
  hypo
ttagctgggcatggtggctcacgcctata

SEQ ID NO: 95074 - DNA, 28 bp, Homo sapiens
  chr18:72646748-72646776
  hypo
gagactcggtctcaaaaacaaacaaaaa

SEQ ID NO: 95075 - DNA, 225 bp, Homo sapiens
  chr18:72670001-72670226
  hypo
tgtttggagaaccataacccacgtctcacttacactgtgaagtggtctaaaaatgttcgtcttcacctacgagactctggacgtctttgagtattcattccttcattctttcattatgtattaaggtccttattatagatgaggctgatgtaagtgcctgcgataaaacagtggaaaagatcagcaaaagagaacactgtcgtcgttgtcatcatttactgagtg

SEQ ID NO: 95076 - DNA, 127 bp, Homo sapiens; identical to SEQ ID NO: 31455
  chr18:72741504-72741631
  hypo

SEQ ID NO: 95077 - DNA, 263 bp, Homo sapiens
  chr18:72764592-72764855
  hypo
ccaagtggactcaggcgtcagccgcctgatagagctcgtttcttaggtacctgagtttggattacacataatgaattcagttttccacttgttcacgtcaccattcccacacaaagtgccttctgggggtgcctgtgcggcacccggtacacagctttgctactgctttcctgcacgtgcacccgggtggaaggacacatgtgcgtggatgtcactccctgatcagcgttcggacccataccgcatgcttgttgctatgtgtg

SEQ ID NO: 95078 - DNA, 31 bp, Homo sapiens
  chr18:72801127-72801158
  hypo
ctgagcgaggccaccacggcttccccacctg

SEQ ID NO: 95079 - DNA, 319 bp, Homo sapiens
  chr18:72895945-72896264
  hypo
cacttgctcgcttgacgtgtacagttggtgggacagagaccatgttttgcagacttttcatcctcactttagtacagtaggtgcccagtgaatgagagctgaacgagttaaagcacgagcaaagtcacacagaacggtcgccatgtgagtgctcatggcgcgatgcccagctctgccgcagaagcaggtctagcggttctgggccattggcttctcctggggctgccctccccatcgtcactggaaggctggaggactctccattatggagcccaggggaggttgaggacgtccctgcactccccgccctgtaagcatc

SEQ ID NO: 95080 - DNA, 238 bp, Homo sapiens; identical to SEQ ID NO: 55213
  chr18:72921090-72921328
  hypo

SEQ ID NO: 95081 - DNA, 309 bp, Homo sapiens
  chr18:72960844-72961153
  hypo
tagaagctggtgtgccgtgaagccatagggtcacccaccagcagcagtaccaggcgagccacctccgcgtgggaggaggcccaggtgtctgcttcctaacgcggggcctgagccgggcaccctggggtggagaggcttggatgggagccccagatctgggccactgtggtccctgggctactgggggaaagccaggtccttcaccgccctcctgcctacccggggctctgggctccaggccgtggctgctctctgtcccttgtccctgcggccacccaggccccacctgctacccgggcaggctgctca

SEQ ID NO: 95082 - DNA, 31 bp, Homo sapiens
  chr18:72997866-72997897
  hypo
ggccccaccacgagcacgcccagcaccagct

SEQ ID NO: 95083 - DNA, 31 bp, Homo sapiens; identical to SEQ ID NO: 31460
  chr18:73424173-73424204
  hypo

SEQ ID NO: 95084 - DNA, 31 bp, Homo sapiens; identical to SEQ ID NO: 31461
  chr18:74058618-74058649
  hypo

SEQ ID NO: 95085 - DNA, 31 bp, Homo sapiens
  chr18:74060163-74060194
  hypo
tgtgggtagctgtggacgatgcttccctgaa

SEQ ID NO: 95086 - DNA, 449 bp, Homo sapiens
  chr18:74062282-74062731
  hypo
gggccaccgccttcccggcgcaaggtgggccaggccccacaggtggccccagaattgcaaagccaatggcagcttcctaagtggtcaccgaaacgcactttcagtgtggacccgccggcctgtgtgtattcagcaatcccagccatccaacctgacctcgggctgcaaagacgatcgtggccggagccggctggctctttgcgaaagcggcgggacccggggacagcaggctgcctgcgccgcttccctccgggtggcaggcccactctctgcgggcaccgcgtcctgctcacccgtgttgtggtcgggccgcagagcaggccccttgacggggggatccggagccgcctggtgccggcacagcctcagggagcagcccctaagctgccccgtgacagtcaatcgcccgctttccccccgtgggaagtctgtgccgtgaccagagcctc

SEQ ID NO: 95087 - DNA, 304 bp, Homo sapiens
  chr18:74069271-74069575
  hypo
agagtggcgcacccagcgcagagtggcgtccccagcgcagagtggcgtccccagcgcagagtggcgcacccagcgcagagtggcgtacccagcggagagtggcgtacccagcggagagtggcgtacccagcggagagtggcgtacccagcggagagtggtgtacccagcggagagtggcgtacccagcgcagagtggcgtacccaaggctagacgctccggttgggggaaggacgcccagtgctgttcagagttccatttcctgcccagcacatctggaaagccacattcgggaacttatctag

SEQ ID NO: 95088 - DNA, 568 bp, Homo sapiens
  chr18:74083439-74084007
  hypo
gggccctgaggtggccgggctggtggaagctctttccgcactcgatgcagacgaactctcctggccgggcctgcgtccggagtgtccctgcggtggcgaggtggtggtggtggcagggccgtggtggggttggcgtggaggtgaggaggcaggagagcgagggggaagcgagaggaaaacatcattagtctgtctaatgtgtcatcatgtgaggctcccttcaggccctggtgacaactgtcagccttcatctcggctctgctgacaggccaggcactctcaggactgcaaggatgcataaattacagcgaattaaaaaccactccctgggacaggaggtgcccgccaggcagcacgtcgggctgtgcagctccgagcaactgcaggctgggcacagccatcacccggctctgtcaagcagcacatccagcaaatcagagtgacaccggcgtgacagagacgaggctcatggaaaataggaagtgagcgggaccagagcccaccgtgacccggccgcgatcctgggagacccacgcagagtgagtgcggccacagggtggccccacct

SEQ ID NO: 95089 - DNA, 198 bp, Homo sapiens
  chr18:74089117-74089315
  hypo
gacagcctcctcaggttacaccgtccacccagagcacatgggcggggagaagatgaggatctaagaccacgcctcagggacgccactcctgagtcacacctcaagccaacgtgaatgacgagaccctcgggtgtccgggcctacggcctcatcctaaaaagttcacaagtgctcagcgggctcttcaaagcaggaatg

SEQ ID NO: 95090 - DNA, 922 bp, Homo sapiens
  chr18:74090915-74091837
  hypo
atgcccctcggccaccggctcctgtttgatggagtgtaggacgggggggcgccccagccacgccgggctgggcctgcaaggccgcgtcgcccctggaccccgcagcacaggtggccagagtcctcagctcctgggctgccttcgaggggggctcgcggggaggtagaggaggagcgcccccttcgccctttgcaggaggtggaccctgaggctgagcactgaatttggctttcagggagtccggggcactgtgcttatttgtgggggcaaagccagcccccgctggggggaccccaaacttctccacaggcttgctattggccgagggctgcgcgccagcccgggcgatgacggtgggcgtaggggtggcgctcctgctgaagcccccgccacccggggcaggcaccggtttggagctagcctcctgcctgggcttggccaggggcccctgtgtggccgcgccatgtggctcctggccgtgacaaggtttggtctgtcgatacccgtcagggccgggcgcccacagagcgcagggacctccggaatggctctccttattcttaggcatgctagcggcttttgtgaccactcccaggggagaagagccacttttggaccccggcatcccccctggcacctgagtgcgggtgaaccgagcaaggagcaaaggctggcattctttgccaccgagggcaggcggggggcccgtgcgtccgctccgggaaaggaaaaccaaattgcttctgatgcttttgtaaccattgggctgaatccacgggggagccacggagttgcagctgacgcggtgccagatgcgtttgtgcatccacaggacctcggggtagtaggtcttgtggctgcagtaaggacacgggtgaacgactaaagccgcctgcagggaggaggccgtctccttattgct

SEQ ID NO: 95091 - DNA, 31 bp, Homo sapiens; identical to SEQ ID NO: 31466
  chr18:74092348-74092379
  hypo

SEQ ID NO: 95092 - DNA, 31 bp, Homo sapiens; identical to SEQ ID NO: 31467
  chr18:74094300-74094331
  hypo

SEQ ID NO: 95093 - DNA, 793 bp, Homo sapiens
  chr18:74096592-74097385
  hypo
tggcttttgatgtttcggtggccctgatcctgaaacggaagaactcggctagagaagtgtccggggagggggctccagctccctggttgaggaaatgcctggttccgtggctcccatgccacacagggagaaagtctgcaagaaaaagcacttctgctcctcagtccccaccaatctgacagcccctgggtggcagtgctcaccgggcactttattagaattgaaggaaagagaacggtgctgatttgagcatggcgtggccctgcatagatggctgcctctaaccctgaccgcagtgccgagggcacacaccagagagggaaggctggctcagaaaggcctggcagcggccctgtgcagagggagcaggatctccaacactcaccccatgctctccgggtgcacggaagcacgtgccaggaggaggcagccgggtccgagcagccctagagaaggcgcacgtcgctcccaaccccacgagtgtgcacacgcgtgccacagacggtgactatggctgctctgtcctcggctcaaacacaccaggggctcccgggttcctttctaagcaggaccttcctagatgtgtcttggaaacacaaacatggattaggtcttgggtgacttcactgcgtcccaagctggccctggcctggctggtgccgcacaccgccgacaagcatgtttcacacggggcccagggagtggcagacttgcactgtctgaagtccctgaggcaacatcttcaacacacacaaccgccctcaaaagcacagaaatgcggtgagggcacttt

SEQ ID NO: 95094 - DNA, 31 bp, Homo sapiens
  chr18:74100531-74100562
  hypo
gatggagaaagggaaccggacaagcttattg

SEQ ID NO: 95095 - DNA, 30 bp, Homo sapiens; identical to SEQ ID NO: 31470
  chr18:74113524-74113554
  hypo

SEQ ID NO: 95096 - DNA, 323 bp, Homo sapiens
  chr18:74113797-74114120
  hypo
ccaaccacacccccgcgccgcacccctccactactgtttataggctctcaagagggacagggaaaaccagtattgtttgagtgccaactctgcataaacaatttccacagaatgactgcacatgcatgtgcgtgcctatgtgcatgtgtgtacgcgcgtgtgtacacgtttgtgtgtacacgtgcgcgcatgtgtgcacgtgaacgtgaccagtggtctctgcatcccacagggaggggagggcttctctgaaaagaaattgtatatgcacaagccttagccccgcgccttctatttgctgaagacatcgcctcggtcaacac

SEQ ID NO: 95097 - DNA, 31 bp, Homo sapiens
  chr18:74115004-74115035
  hypo
cagaaaccaccaaaggcgcctggcactactg

SEQ ID NO: 95098 - DNA, 30 bp, Homo sapiens
  chr18:74115420-74115450
  hypo
agtcacacacgcattcgcacaactcacaag

SEQ ID NO: 95099 - DNA, 30 bp, Homo sapiens
  chr18:74115900-74115930
  hypo
gcatcctgcggacaacgagcaccgaccacc

SEQ ID NO: 95100 - DNA, 64 bp, Homo sapiens
  chr18:74116223-74116287
  hypo
acacgcctgggggagacgacgtgatcccactcgccccactccagcacttcgtgcatgtggaccg

SEQ ID NO: 95101 - DNA, 31 bp, Homo sapiens
  chr18:74117535-74117566
  hypo
tcactttcggggcacccggttctgttgtgtt

SEQ ID NO: 95102 - DNA, 118 bp, Homo sapiens
  chr18:74118863-74118981
  hypo
tgtcccctgccaggccggagtccccgtgctcctgcctggggctatcttagatttgctaacccggggcacacagtgcgtctccgtccactgttgggtgagacctcgcccagacagaatc

SEQ ID NO: 95103 - DNA, 61 bp, Homo sapiens
  chr18:74119405-74119466
  hypo
gaggaaacccagtagcgcaggttcaatgtcgggacaggggctcgggcggcagcatccataa

SEQ ID NO: 95104 - DNA, 30 bp, Homo sapiens
  chr18:74119937-74119967
  hypo
cctcttggtgcagcccgcgctgcttctgtc

SEQ ID NO: 95105 - DNA, 167 bp, Homo sapiens
  chr18:74120284-74120451
  hypo
gctggtgtggacagcaagctccgaggggctgcggcgtgcgtctctcctgacagcgacacacttgagaccctccgggagttccagccggggtgaaaccagtcacaagggaaaatagcaaaaattaagaagaagtgcatggctctggtatagctcggaaagtacactgt

SEQ ID NO: 95106 - DNA, 30 bp, Homo sapiens
  chr18:74130201-74130231
  hypo
cacactaacatacaccgtaacacactaaca

SEQ ID NO: 95107 - DNA, 30 bp, Homo sapiens
  chr18:74130468-74130498
  hypo
taacacactataacacgcactgtaacacac

SEQ ID NO: 95108 - DNA, 260 bp, Homo sapiens; identical to SEQ ID NO: 31473
  chr18:74133242-74133502
  hypo

SEQ ID NO: 95109 - DNA, 60 bp, Homo sapiens
  chr18:74134225-74134285
  hypo
agagcctgcggagagcgggccggtccctcggcactccctgcactgcggcagtaagaagca

SEQ ID NO: 95110 - DNA, 16 bp, Homo sapiens
  chr18:74136515-74136531
  hypo
ggtgaaaaggttcccc

SEQ ID NO: 95111 - DNA, 240 bp, Homo sapiens
  chr18:74141718-74141958
  hypo
gacccagaatggaaaatgatgcgccgagcagtggctacggaaaaggtatcaaggaatccaatgtctgccagacaccgcacggctaccaggctgttctgcaaaagcaaacacggtgcccttttgttactgaggtttcaaaacaacatcaagaatttgtttctaagtggagtgtaggctatcaccatagaaaccgcagagactctgtcttgctggtgtgacgcacaacctgtccagaacctt

SEQ ID NO: 95112 - DNA, 319 bp, Homo sapiens
  chr18:74144937-74145256
  hypo
caacaacaccaaaagcgagacctggccgcacatcctgagtccacacatcctgagtggcaacgacactgaaatccacacatgcggcactttccattgaagactctgtaggcttctgagatgctcccattaaatactaactgtaaggccagcctctgctgcgactgctgttcatcgctgtttctgttatcagacaggaagatctctagagtctagacatccagtaaaaagcaccactgaccgctgagtactcccgtgcaaaactacccactcccgaatacaacatttctccatggagttcgctgtcaactctgaagaacag

SEQ ID NO: 95113 - DNA, 306 bp, Homo sapiens; identical to SEQ ID NO: 31475
  chr18:74145828-74146134
  hypo

SEQ ID NO: 95114 - DNA, 232 bp, Homo sapiens
  chr18:74148371-74148603
  hypo
atcgttttgagcctctcgtgggacccatgatgaacactgtgtgaggacaagcgctcctcccaacccatgacttggcttcagagagagctttgcccgtgttgcgtccaagccaggacaccgctgagtccccgagagactcagcatcgcgagtggattcagctgcaaggtcagtgcgcgaaggtattgtgagagctcctcctgctctaccttgaagaaacgcttagaagaagta

SEQ ID NO: 95115 - DNA, 30 bp, Homo sapiens
  chr18:74149201-74149231
  hypo
gccagcctccaagcacgtgctcagcaaaca

SEQ ID NO: 95116 - DNA, 172 bp, Homo sapiens
  chr18:74149886-74150058
  hypo
gtcccatctattgagtcgcagtgagtatctaaaaagtgagggtgggttcaacaggatggagtatggattttacatgacagatattagcacgacaagaaatggtgaaaagcgggagtagtgaaattagtcttgaatgatatgcagctcaacggggcaccgcttgtgcattatg

SEQ ID NO: 95117 - DNA, 61 bp, Homo sapiens
  chr18:74153448-74153509
  hypo
ccgcactcgaagcactcggaggacttgccctggccggtggtggctgcggccctgcggttgg

SEQ ID NO: 95118 - DNA, 765 bp, Homo sapiens
  chr18:74154238-74155003
  hypo
tgaaggcctggccacacacctcgcacgggaactccccggggctcagctcgggcttgccgttctccacgcaggcctcgccgctgccgggcccctgcgcggtgatgtggtccctctcgatgtggctcagcagcgactcctcccgcagcgtcgcgtagctgcacagcctgcacttgaacggcttgtgcgcctggtgcacgtgcagctccaggtccttcttacgctcgaactggctcttgcagaaggagcactggaccgctgccttggcctcccccggggcgcatgcggacccctctgcccccttcttgctgctccgcagcaggactctgccgctgtcggcctgcgaggccccgttcaggaccctggcgccgtcggcctgcgaggccccgttcagcagccggttgcaggccgaggcgctcttggtggggctggcgcaggcgtccaggccctcggaggcgcgcatctcacccagcggcgcctcgcccgcctccggctcgtgtccctgaatcagagtccccgtgcggtggctccggatgtgaatcttcaggttgcccttctgggaagcccggtggtcgcagtagggacacttgtagggcttctcgcccgtgtgcttgcgcatgtgctgcgaaagcgagctctggaaggggaagctcttgccgcagatgcagcaggtgtggcaggtagccttgtccccatccacctcgtggccccggccggccctggtggggctggggcctcgcctcagctccatctcggcctctctgttgc

SEQ ID NO: 95119 - DNA, 31 bp, Homo sapiens
  chr18:74155961-74155992
  hypo
gtagctgtgtccagcacggaacaggccccca

SEQ ID NO: 95120 - DNA, 66 bp, Homo sapiens
  chr18:74156515-74156581
  hypo
atgacagggccacccacgaaaagacctggggtggcagctccctgtttgctccgagttttgcagcct

SEQ ID NO: 95121 - DNA, 338 bp, Homo sapiens
  chr18:74159157-74159495
  hypo
agagcttccaacttcaaaacacgccatgggcggccgccccaattaggaggattattgggacgtcagcggccctgctggcacgacgggctgtgctttaaatcccgccaacccctgtaagccaggagggtttcgatgggatgcctcctccacctttatcctggtccctagtggggcgtgcctcacgtaggagcagcgccgtgtgataaagtgctacctacctcagttccagccgcagacatttccgtcctgggctgctctattccactttctcaaacgcacgccaaatacaagttgttccaactctccctgtaacacacgggcctggagataaccagcct

SEQ ID NO: 95122 - DNA, 31 bp, Homo sapiens; identical to SEQ ID NO: 31479
  chr18:74168121-74168152
  hypo

SEQ ID NO: 95123 - DNA, 31 bp, Homo sapiens; identical to SEQ ID NO: 31480
  chr18:74170657-74170688
  hypo

SEQ ID NO: 95124 - DNA, 153 bp, Homo sapiens
  chr18:74171329-74171482
  hypo
cccaagctctctgaggacagccgtcctagcttccttcgtgggagaaaactctggccctccactgccggccagggaggcctcgcgtgccaagctggccctgagctcagcccaggatttgtgccattcaggacgtggcggccgtgtgcaccccat

SEQ ID NO: 95125 - DNA, 143 bp, Homo sapiens
  chr18:74171505-74171648
  hypo
gaatgtattccagcactgtctgccatgatgccaacagcaacacttctcaacaccaagcctttaaatgtccagcagctccacagcccgagtcagagtggcccagcctcccctggacctgatgcggggcttcaggaagtggcagg

SEQ ID NO: 95126 - DNA, 52 bp, Homo sapiens
  chr18:74172240-74172292
  hypo
ctgagggtcaaagctgtgagccacatccctcgacaaggctgtgagcccattc

SEQ ID NO: 95127 - DNA, 124 bp, Homo sapiens; identical to SEQ ID NO: 31483
  chr18:74175493-74175617
  hypo

SEQ ID NO: 95128 - DNA, 27 bp, Homo sapiens
  chr18:74175990-74176017
  hypo
gactcaaggccgggcgcgggtgctcac

SEQ ID NO: 95129 - DNA, 189 bp, Homo sapiens; identical to SEQ ID NO: 31484
  chr18:74183547-74183736
  hypo

SEQ ID NO: 95130 - DNA, 24 bp, Homo sapiens
  chr18:74192763-74192787
  hypo
caccgcacccggctggtttttaca

SEQ ID NO: 95131 - DNA, 30 bp, Homo sapiens
  chr18:74194644-74194674
  hypo
tctgtctgtatcaaacgtgtgaccttacgt

SEQ ID NO: 95132 - DNA, 268 bp, Homo sapiens; identical to SEQ ID NO: 31486
  chr18:74195358-74195626
  hypo

SEQ ID NO: 95133 - DNA, 31 bp, Homo sapiens; identical to SEQ ID NO: 55221
  chr18:74204793-74204824
  hypo

SEQ ID NO: 95134 - DNA, 31 bp, Homo sapiens
  chr18:74273198-74273229
  hypo
ggcactgatttatcttcgctgtgaaaggtcc

SEQ ID NO: 95135 - DNA, 31 bp, Homo sapiens; identical to SEQ ID NO: 31487
  chr18:74274870-74274901
  hypo

SEQ ID NO: 95136 - DNA, 204 bp, Homo sapiens
  chr18:74275175-74275379
  hypo
agacctgccagtcaccgatgtccctgctatctggacgtccctctgccaccggaggtgcctgggccggctcggctcccagtggctgctgcgtctgtgtggcgtccggttcagcatctctccctcttggggagatgggcagggccaacctgagacaggacaggtgcgctcctaccgctgacaccagagtcccgaagatgcccgtcc

SEQ ID NO: 95137 - DNA, 35 bp, Homo sapiens
  chr18:74299117-74299152
  hypo
gtgcatatatgggccacgtgcgtatatgggacacg

SEQ ID NO: 95138 - DNA, 31 bp, Homo sapiens
  chr18:74299794-74299825
  hypo
ctcacaaatcctaaagcggcttttacacaac

SEQ ID NO: 95139 - DNA, 232 bp, Homo sapiens; identical to SEQ ID NO: 31488
  chr18:74323560-74323792
  hypo

SEQ ID NO: 95140 - DNA, 31 bp, Homo sapiens
  chr18:74324131-74324162
  hypo
accgaagccttgaaggcgagcaggcaccctc

SEQ ID NO: 95141 - DNA, 549 bp, Homo sapiens; identical to SEQ ID NO: 31489
  chr18:74325583-74326132
  hypo

SEQ ID NO: 95142 - DNA, 22 bp, Homo sapiens
  chr18:74381417-74381439
  hypo
gccggtaatgctagcacgttga

SEQ ID NO: 95143 - DNA, 36 bp, Homo sapiens
  chr18:74420788-74420824
  hypo
tggcttagagagcggtcgtcacgtgacccggaagtg

SEQ ID NO: 95144 - DNA, 206 bp, Homo sapiens
  chr18:74426496-74426702
  hypo
ggcatcagacagtgcccgtgacgaggtcagggccactaggcaacacttttcaggtaagggaaggctgggtatgtgctgggcacctgcatgctggtggtgggggttaaaccgcgtgaagctgaaggagccaccctcctgagtctgtctctgtcagggagaggagtgggctggagtcactatcttaggacatacggcagatttttcta

SEQ ID NO: 95145 - DNA, 121 bp, Homo sapiens
  chr18:74443716-74443837
  hypo
gctccctttctctgcagcttccagaacagagcagcctctgatgaccttgctcactgcgccatagccgtgaggttcaagccactttatgaaagaaaatcaccatttcctgcttttttttttt

SEQ ID NO: 95146 - DNA, 31 bp, Homo sapiens
  chr18:74451537-74451568
  hypo
tgctgtgtggcccacacgggagcaaagaggg

SEQ ID NO: 95147 - DNA, 31 bp, Homo sapiens
  chr18:74451803-74451834
  hypo
gaccgaggggatgcagcgcacagtcatgaga

SEQ ID NO: 95148 - DNA, 39 bp, Homo sapiens
  chr18:74471097-74471136
  hypo
gaacgttgttcctgcccgggaggacgcctgcagccgcgc

SEQ ID NO: 95149 - DNA, 259 bp, Homo sapiens; identical to SEQ ID NO: 31490
  chr18:74501039-74501298
  hypo

SEQ ID NO: 95150 - DNA, 508 bp, Homo sapiens
  chr18:74503957-74504465
  hypo
atggagcagggagttcgggtgtgacaggatgactgtggtgtggtggtaggacttcgacgtgtggacccccaggtatttggaaatgtaggtccggggcgcacctgagggctcaggactggaagtgcacttggggagccacggatgcgctcccagaagtgcgcccaagaggaacagtgtggggcctgagcaggcgggaagcttgaggagtgcccacccgcagggaatgggaaggacagcgcagcagcttgaggagaggacgctcagagagtgagcttcagaggaacacccagggtgtgaggcgcgcaacccaggcgtggcacagctgcatggaaacccggggcaaagtggcatgagcagctgccaggaagtccagagggctccgtggtaggcagacgttctgtgacggagcccacggcaggtgcaagtgtgagctgagacctgagtctgctaaggagaagtgaggacgcccctgataaggttttgaagctgaaggcgccacaggagtctt

SEQ ID NO: 95151 - DNA, 31 bp, Homo sapiens
  chr18:74518062-74518093
  hypo
acagacatgagccgccgcgcctggccaacag

SEQ ID NO: 95152 - DNA, 89 bp, Homo sapiens
  chr18:74518714-74518803
  hypo
ggtctttacgatgaccggttgtgacatgtgagcctcagtcctcgctatatcagggagtagcttcctccgactatcggaatcacccttgc

SEQ ID NO: 95153 - DNA, 132 bp, Homo sapiens; identical to SEQ ID NO: 31492
  chr18:74570065-74570197
  hypo

SEQ ID NO: 95154 - DNA, 172 bp, Homo sapiens
  chr18:74586686-74586858
  hypo
tactggggcaagaaccgcccaggcggcggatttcagaggcccggaagtggagaaacctgcctggtgtgtctgagggcggtggcagaagtgggtagagggagcaagagagcaggggcaggggagctgacaacagctggtgtgcgaagcactgcactggcgcctcctctactga

SEQ ID NO: 95155 - DNA, 77 bp, Homo sapiens
  chr18:74592527-74592604
  hypo
aaagaacaggcttttccgaagttgtatctatttatgttgacagaggtggaaaaagcgttttattctttcttgaggtt

SEQ ID NO: 95156 - DNA, 30 bp, Homo sapiens
  chr18:74598246-74598276
  hypo
cgctgcacgcttttgcgctacagtgttgca

SEQ ID NO: 95157 - DNA, 210 bp, Homo sapiens
  chr18:74625649-74625859
  hypo
tgtaattgtgctatgaattaacgtggtctgagttctgtatgtttgctttgtaggtgtgactattgcaacaaaggctttaagaagtccagccacctgaagcagcatgtgcggtcgcacaccggggaaaagccctacaagtgcaagctctgtggacgcggctttgtttcctctggggtcctcaagtcccacgagaagacacacacaggtcac

SEQ ID NO: 95158 - DNA, 30 bp, Homo sapiens
  chr18:74626242-74626272
  hypo
ttgtaggatatgccacgtcttattgatcca

SEQ ID NO: 95159 - DNA, 63 bp, Homo sapiens
  chr18:74627686-74627749
  hypo
gcatgaagccttataagtgtccgttttgtgaggagggtttccgaactacagtgcattgtaaaa

SEQ ID NO: 95160 - DNA, 362 bp, Homo sapiens
  chr18:74631682-74632044
  hypo
taggttttcttcattacgattttgatcccttttccttgattttgtgtagacatttgtatggaggaagaggaagaacattctgacagaaatgcatcacggaagtctcgtcctgaggtcatcactttcacggaggaggagacagcccagttagccaagatccggccgcaggagagcgccacggtgtcagagaaggtcctggtgcagtccgcggcagaaaaggaccgcatcagtgagctgagggacaagcaggcggagctgcaggacgagcccaagcacgccaactgctgcacatactgccccaagagcttcaagaaacctagcgacctggtgaggtgagggcatggctacgccgcgcgggttcc

SEQ ID NO: 95161 - DNA, 80 bp, Homo sapiens
  chr18:74633614-74633694
  hypo
caaaatgctaccaaggcgacataaagtgctaaacatgtctccatcgactgtacctgaagaccagaagagtgggatgttct

SEQ ID NO: 95162 - DNA, 19 bp, Homo sapiens
  chr18:74633753-74633772
  hypo
gtggcgtggtctcggctca

SEQ ID NO: 95163 - DNA, 31 bp, Homo sapiens; identical to SEQ ID NO: 31497
  chr18:74670146-74670177
  hypo

SEQ ID NO: 95164 - DNA, 231 bp, Homo sapiens
  chr18:74691006-74691237
  hypo
agacatggtattaagcccacacgaaacattcagaattagaattggattaagaagacgcgttttggcatcacgctgactactcctcatctccgtcctcggggagggtgatgccagcgtgggactctttggaaggcctatcaatcacaggtgcgctaaaatcaaaaggtgggtcagtaggttagggagggaggcgcgaaaggagatgccagcgggtgttaagaaggatatggt

SEQ ID NO: 95165 - DNA, 35 bp, Homo sapiens
  chr18:74697570-74697605
  hypo
tggctggcacggggggcggccgcatcctggcagca

SEQ ID NO: 95166 - DNA, 30 bp, Homo sapiens
  chr18:74724277-74724307
  hypo
gagatgctggtggggcgggctgtgtccatg

SEQ ID NO: 95167 - DNA, 252 bp, Homo sapiens
  chr18:74726188-74726440
  hypo
gggcattcccgggctcgggggcggccgctccaacatgtggtaccagcggccatgtgccctcaaggggagggaggaagagcacaggagggtgggaggaggacaaacagccccttttatagggtcatgggggggctccactcagagtctggcaggaatctgccaggaaaacctcgttctagatagggagaagcagaactgtgtgtggggcaggccgccgtggtcctgagagacagggcccgggccttccactgc

SEQ ID NO: 95168 - DNA, 733 bp, Homo sapiens
  chr18:74728302-74729035
  hypo
ttcaaaagtcttcctcgacctcaatcctatgattgtcgcagagcaacatgaagctagcagcactgactccaggaaaaaacgagcataacccagtgttgaaccccagcgtgtgggctgcagaggcaacatcagtcatcaagtccgcaagcacacaccaccagagaccctgagaatgtggctctctttctgcaacgcccatgtccaggcacccttagagatccagaattcagcatgtccttacattcctgagccacaccccggccaccatcccttgtgaggaaaagagggggtgagttaaacgaaaacgtcctaagcagccactcaggcccacactcttgggctcatatgcattctccagcacggaacgagaccttagacagcaagaggctacgtgccagttcttcctctaatggctgagttcacctactgatttctcctttgctttttccatttaaactaaaactcctctactcctcagagctcaccttgccagagccccgcttgggcgcacccctgtcaccgccaaagaagcgcccgatggagtcaaggatgcccgtgtctctgtgccttgggaggaagccatgcctggcatggtccatggtacttgctgtggccaggtacttggatccgtgcctctgggagggtctcttctgtgacgccatcacatccaggctctcggaggtggctgcactgtcttcttggatggtctggagctcgtcggactcagagggcc

SEQ ID NO: 95169 - DNA, 100 bp, Homo sapiens
  chr18:74729466-74729566
  hypo
gcacccaggcttcccgatgaagtcatctgagcatgcagagcagccacatcagcgtttcttcccgggtgctgccatggctgctcccggagagcccagatgt

SEQ ID NO: 95170 - DNA, 147 bp, Homo sapiens
  chr18:74733724-74733871
  hypo
caccgtgcccagcctctacttttaagccatcatgagcacttggactccaatgcagctcctttctttatttctcagtgtatttcccggggtctttggccaactgcagcgggtggccttttttgaatctgagaacgcacggtgacacag

SEQ ID NO: 95171 - DNA, 285 bp, Homo sapiens
  chr18:74734079-74734364
  hypo
tgccctgtaagtgagacgtatcatgcagtccacataagacctggttccaaggcaggttaacctgctctcacatacattacagatgtttgccaacagcaaagtgtaaagccagcagttggaacccagggtcgcggtggtctcgtccatgcacccaagggattgcgtacggctgccagtgtgactgtgctggctgagccctgtgcctgaaaaataggtcacctgctccaggacaagtgcggaaaaggcaggaccaggtggggcgggagacttcggtggcaccgttct

SEQ ID NO: 95172 - DNA, 1804 bp, Homo sapiens
  chr18:74736586-74738390
  hypo
atcaaagcatgtgggcgacggagaatcggccgtcgtggcagcgccagggcctgcagtcgccagggtggggctgaggccagggccggaggtctgggcagaaccacagggaaggaccttggaggccgacctcagtcccaacactgaccagccgatgtgctccagcaagtcgctgagcccagatgtgcctgtttctgtgtttatgagatgggagcattcatttctattcttacctgaaataaccccaggctcctttccgcagcagcacactgacctgggtgacgtgtcctccccatgccaccctcccacaaacgctgccttccacccacagcacccgcagagagtggcagagagggcattcctgagcagattgcaggagttttgggaggtgcatgtgtgcattctcgtaactctccgaggcgggtggttttagtagcccttttattcataccagaaactgagacttagcaaagttaaggtgggattgatggaggagctgccgttcactcctgcctaaactccctccgtatgttctagaaacgcaggcgatcccccacctctagctgtctgacaccagcccttctccagcccaaagtggctttcactgcagccaggcttttcctctcagggtaaaattgaactgcagataatcgatggctgacgcatctgtggctagcagctgcttcacggagggctgaccaggagagacccagaggctttctgatctgtcgggagccaagagctgagccagggcccccgcctgcagccacagggacctcgagtgcactcagcggtcttggtgcaccatagccacctggacatcgatacgttaatgactgttaaacatgaacaaaagccgagtcccacactccaggacattcaacacccacccgacagtctgtccgagtgttacctccaacagtatgaagctcaccgtgcaacggctccaggcttgtttaggaaactgtcccactctcatcttgctctaatcagaacatggcaggaatcaaatatccatacctgactgtctccagtagaatggtgatgacagagcggacactgtcctctattgaaatacttttttttttttttttttttacctagagcatgtttctcgtgctccattcccctgcatccgtggaaatcacatcgcacaagtaacttccatcaaaaccagcacgtgtgagagacaaacatctgggttcccaggcacaccccacaccctgagtaaaccaggacggacaggccgaggttccgctgctgcctttctggcacacgcaggggagcagtgggcagcgggttactccctctccgaaaaaccgtccttctccccatgccctgcggcaccgtgagtgcatcgctcatcccgctcgctgtgctcccagcctgtgccatggaacctgctcaactgcggagcctgggatgaggctgagcctgttgctcttcctgttgagtttggtttcgaccaccctgcatgaatctttgtgcttccaatgcttctggtcagggggccctgccgcctcgtttcagggacggtgcctgcaggccgctgtctgtgcctgaactcagcgcttttcacgctggcttgacccacggagggcggctgtcagccgcaaccggaggcagagcgcgggcgttctgaggctattggatgaggctcgctggtgataccttctgggtttgcaactttgttctaaagccaggggttttcaggccaacagaaatgcatttagttagtaatccagagcatgccataggaaaacataacgaataaaactagaataaaacataacgcagaaatcacctt

SEQ ID NO: 95173 - DNA, 31 bp, Homo sapiens
  chr18:74743579-74743610
  hypo
tgacatatctaatagacgaacatcttgttgc

SEQ ID NO: 95174 - DNA, 575 bp, Homo sapiens
  chr18:74755404-74755979
  hypo
ttatttctgagtgctggttatcgtggcatctgaaaatgtaaataagtgatgtaccctgtggggtagctctgctgcaggcaccccggggacctgctggtgaccctgcccttctcctgctgcgatcatcccaggccagcgtgacactcagcagcgtggacgtctctctgcaaacgcccaaatgcagtgtatgaaatgtcatccctagaaatggcttcatttgggataaagctttgaacttgcgtgcgtgccccgcaccccgtggcggactgagtcactgctttgctgttgcggcgtggtgagtaaaactttcccaggggagccggagttgagtgagaaagggatgcaggacacgcaggagctgacacatctctatggatttaagtcgctgtttccacaaatgctactcacatgcccacacgtgtagggcaggactgtcacgcgtccactctgctcagctttccaggccggatctggtcccagccattctacctgacccagactccccgcacccctgccattcccccagctgccgtcctgtgtctcctgatttctgcgtttttgatcctgaggctctc

SEQ ID NO: 95175 - DNA, 30 bp, Homo sapiens
  chr18:74758676-74758706
  hypo
gtctctccaaagactcggtccttgttccta

SEQ ID NO: 95176 - DNA, 357 bp, Homo sapiens
  chr18:74759062-74759419
  hypo
cagacaaaacaaaggcgaccacggctgggtgcctgcccaagagaaccgcagacctatgtccacgggaaaccctgaacgccaaggctccggcagtaggattcacgacagccaaagggtggcagccacctgaacatccgtgagctgatgcgtggatgaactgacggtgatgtgcacacacgatagaatatcctcctgtcgtaaggaggaatgcagcactagcgtgcgctactccatgatgaacctcaccagcattgtgtgaagtgaaagaagccagccataaaacaccacgcatttacaggaagaatccaggacacgcaaatccacaggcatggaaagtagattcgcagtggccggggg

SEQ ID NO: 95177 - DNA, 25 bp, Homo sapiens
  chr18:74760839-74760864
  hypo
tcaagaataatctctacgagggcag

SEQ ID NO: 95178 - DNA, 84 bp, Homo sapiens
  chr18:74761163-74761247
  hypo
cgcacccggccgagggcagggtttttaatctgttttgttcaccgatgtactcctgcctgacgcggtttctggggcataaaaact

SEQ ID NO: 95179 - DNA, 30 bp, Homo sapiens; identical to SEQ ID NO: 31504
  chr18:74763397-74763427
  hypo

SEQ ID NO: 95180 - DNA, 649 bp, Homo sapiens
  chr18:74763719-74764368
  hypo
gggttcagtttgatgcgtgaagaccaggggtaggagcgtgagtgggggtgcactttgctaaacctgcatgtaacagtgggcttaattttccctttttttaacaccttgtttcttcaaattacacaatgttgatgctaaaatgttctttgtagaagcgaggcccagctcctgaaggattcatctgagaaacccagggacatgcccttctctcattggaacaagtgggaaaaaaggcatcttaaaaaaaggttatggtgaagccgtgcggcagcactggaagaggatgaggaggctggagaaggcgtgtgagtgcaagctgccctcccgagactgtgccctctgagccagagtcttcctccgatgtgcccaagtccacccgaccaggaacgggggaaggagcggggcgatccaacagccacacaacagagtcccaagttccaatcacaaattcaggctgtgaggtgaaatcacaaatgtgaactttacttatggaaaccaaatagaagtgctttcaaattggggatccaagacccaacagacataagtgatcagcagcatcccgatcgggggggtaagacaaaggggtccttggatgggggcacctgtgagcagggacccctttgtctgagctccccgggtcccgagctgg

SEQ ID NO: 95181 - DNA, 457 bp, Homo sapiens
  chr18:74770084-74770541
  hypo
tttaagttcggcagaggacacccagggctgcaccggctcttcagggaccctccggggagaagaggcatcccctccccagccctggacgtccacctcaggggcggtggggatgcggggatgcggggatgccgagcgctcccaggctgggtcacagcaggcagtggctccgctctggcttcgactctcaggacccacctgggacccctgctccacgctgcggggaggccaaacctggagaacccagggcaccagttcaggctgacagcccggccggacccagccaacgccccgcacagctcgccagccacgggagggagcggcctccggcagaccccagccccaggcacgaccccaggcccgggcacgaccccagcccccaccggctgatgcgacgcccacaggggacgagctgttccagcaccacccccgcccccgcgtgcagaatcctgagcaacag

SEQ ID NO: 95182 - DNA, 233 bp, Homo sapiens; identical to SEQ ID NO: 31508
  chr18:74782715-74782948
  hypo

SEQ ID NO: 95183 - DNA, 160 bp, Homo sapiens
  chr18:74794098-74794258
  hypo
cgcccggcccatagcagcatattttataatagccgcaaggtagaaactacctaaatgtccatcaactagtcaatgaataaataaaatatgagatagtcctacagtgggatattattcagcaataaaaaggaatgaaggactggtacgtgctacaccatgg

SEQ ID NO: 95184 - DNA, 30 bp, Homo sapiens; identical to SEQ ID NO: 31509
  chr18:74805204-74805234
  hypo

SEQ ID NO: 95185 - DNA, 31 bp, Homo sapiens; identical to SEQ ID NO: 31510
  chr18:74806855-74806886
  hypo

SEQ ID NO: 95186 - DNA, 203 bp, Homo sapiens
  chr18:74815190-74815393
  hypo
attattactattaaataaaaacgcactacagacctcagcgaagaggtctggagactgaaattcaattccgttcaattccgcggacatttctaaagcatctgggtgtaagtcgggggttcccctgaccctcaccccggcccatcttcagcagccggacattctagtgcaccaccatctgcctcgagttggagacacataatttt

SEQ ID NO: 95187 - DNA, 138 bp, Homo sapiens
  chr18:74822979-74823117
  hypo
tggctgtattgcctcgtggctgctccagtcctgtgctagacctctcgctgggtctcggggttctcagcgcctgttcagaaagcctggcaatgtttgcctgggaggaaaagctccataaatacacgctgaagacacgac

SEQ ID NO: 95188 - DNA, 430 bp, Homo sapiens
  chr18:74832018-74832448
  hypo
gcaatttaggaagagcacagccgtgctcagcccacgaagcatgaatcccgccttgtctcgggtgaggtatgctaaagggttcgctctcgcttggtgcgagcattcttctgtgaatccattacgggtctcaaagtcctaatgcagggaacacacgctcccgtaggcttctcccaacgctggcaaaatagaaacctctaaaatctggtcagccctcgcggcatctggtgcagctgtgaccggcacggccaggtgacctcagacgcgctgcacacacctgggaggctgcagaggggcagctgtgaagtggggctgtgacgcccagaggcactcaggcattcagacctgcactgacccgggacaaagacctcagcgtggggtgtttttcttcctttcaggaagccccccaggcgctgatttgggcctgagctag

SEQ ID NO: 95189 - DNA, 38 bp, Homo sapiens; identical to SEQ ID NO: 31512
  chr18:74841695-74841733
  hypo

SEQ ID NO: 95190 - DNA, 50 bp, Homo sapiens; identical to SEQ ID NO: 55226
  chr18:74844752-74844802
  hypo

SEQ ID NO: 95191 - DNA, 35 bp, Homo sapiens; identical to SEQ ID NO: 31513
  chr18:74847366-74847401
  hypo

SEQ ID NO: 95192 - DNA, 43 bp, Homo sapiens
  chr18:74877307-74877350
  hypo
aggtgacatccactggtgcagcgaggttctggccctcaagggg

SEQ ID NO: 95193 - DNA, 635 bp, Homo sapiens; identical to SEQ ID NO: 55227
  chr18:74961320-74961955
  hypo

SEQ ID NO: 95194 - DNA, 152 bp, Homo sapiens; identical to SEQ ID NO: 11846
  chr18:74962018-74962170
  hypo

SEQ ID NO: 95195 - DNA, 134 bp, Homo sapiens; identical to SEQ ID NO: 11847
  chr18:74962209-74962343
  hypo

SEQ ID NO: 95196 - DNA, 137 bp, Homo sapiens
  chr18:75087207-75087344
  hypo
cgcagactattgtggcgtgggaaggcccttctgcgggctgtaatggatggagacggggatgctgccaagcatctctcaatgatcagaatggcaccccgcaccacacaattgtccagaagcaacgtctgcggcgccac

SEQ ID NO: 95197 - DNA, 209 bp, Homo sapiens
  chr18:75120505-75120714
  hypo
cgaggtggggaggccacactacgaaagagtgatggagtgtcgtgtgttgccatacaatgctgagggcacatctgaaatcggtgatcagagattgaagtgagttcacttagccaggcgacatgcttttctcctgatttgtttagcaatgcgaaagtcgtgtagagcaatagagttggggcccggacagcgggaaggaggtaaaaaggcca

SEQ ID NO: 95198 - DNA, 101 bp, Homo sapiens
  chr18:75214586-75214687
  hypo
attctagcacttagccatctgcgttgtttcttttagcacagtcgttgatggtacccttgctactacatcgccatagccacgtccctttttggttcctggga

SEQ ID NO: 95199 - DNA, 196 bp, Homo sapiens; identical to SEQ ID NO: 31517
  chr18:75229787-75229983
  hypo

SEQ ID NO: 95200 - DNA, 330 bp, Homo sapiens
  chr18:75230578-75230908
  hypo
tcatagattccttaacttttacgtcagaagcgaatccactttccttctttatgtcctttattattgtgaaatcaaaggactccgaaaggaaatttactcctgtgtttaaaactgaagtctagctcgtgcttctgaaatgacgcataaataattcaagcttgagagggaagaactggccacactttggaggcgccgagctggggaacctggtgtccgaagccaagctctgctcgggcccaggaggacgcagggacatcgcactgtcccccacgcctggcctgtgctcctttaatcttggtcctaatgatcgaattaaagagggatacaaat

SEQ ID NO: 95201 - DNA, 234 bp, Homo sapiens; identical to SEQ ID NO: 31518
  chr18:75339281-75339515
  hypo

SEQ ID NO: 95202 - DNA, 387 bp, Homo sapiens; identical to SEQ ID NO: 55235
  chr18:75612004-75612391
  hypo

SEQ ID NO: 95203 - DNA, 283 bp, Homo sapiens; identical to SEQ ID NO: 31519
  chr18:75873523-75873806
  hypo

SEQ ID NO: 95204 - DNA, 1060 bp, Homo sapiens; identical to SEQ ID NO: 31520
  chr18:75998624-75999684
  hypo

SEQ ID NO: 95205 - DNA, 30 bp, Homo sapiens
  chr18:76000172-76000202
  hypo
aagcgcttgctaaagcgctgtccattttac

SEQ ID NO: 95206 - DNA, 379 bp, Homo sapiens
  chr18:76123567-76123946
  hypo
taagagcaattggggcttatccgtgatccacagaaatgattgctacgttccctgcagaacggacggcagtcgctggacagggccccagagcgcctgggtgcggtcagctccgcggactccccccgggacacctgcccagctgcggccgaccccggggcgcacaccctccgggatgaagacggcacgcctgctgcgcacggtggctgtgctgtgctttccagagacaccaaagatccagcaagccccggtttgtgtcgagtgtcacgggaatggagatgccttaaggctccggcttggacggcctgttgttcgcgtgctgagtgcactctgtgggcccgagcgccgagggtcccatttcgcacacagcatggagtgggtg

SEQ ID NO: 95207 - DNA, 273 bp, Homo sapiens; identical to SEQ ID NO: 31522
  chr18:76129256-76129529
  hypo

SEQ ID NO: 95208 - DNA, 363 bp, Homo sapiens; identical to SEQ ID NO: 31523
  chr18:76151188-76151551
  hypo

SEQ ID NO: 95209 - DNA, 508 bp, Homo sapiens; identical to SEQ ID NO: 31524
  chr18:76189658-76190166
  hypo

SEQ ID NO: 95210 - DNA, 132 bp, Homo sapiens
  chr18:76412641-76412773
  hypo
gggaagaggaagcagcagaatcggccttgggcgaggtcggaaatttcacaaaggtgccgaggaaggcggcggctacttggactaagtttgtcggggactttcctgggttgcgcactgaaagtcccagtccca

SEQ ID NO: 95211 - DNA, 455 bp, Homo sapiens
  chr18:76435960-76436415
  hypo
cgttcactcaggaagccgaagcccagaagagtgaggtctcaaagttcacagcacgtggcctagaattcaggggtgcagagctcctgcttggtaactcatcccctgtgcggtgatgcttctgatcccacagcaatgcctgcttctgcgaggctggtccagggctggaacggagccctgtgccgtgatgcttccgatcccacagcaatgccacgctcctccagagctggagcagattccgatcccacagcaatgccacgctcctccagggctggagcagattctgatcccacagcaaggccgcgcttctccaaggctggagcagattctgatcccaccgcaatgccgcgcttctccaagactggagcacattctgatcccaccgcaatgccgcatttctccaaggctggagcagattccgatcccaccgcaatgccgcatttctccagggctggagc

SEQ ID NO: 95212 - DNA, 30 bp, Homo sapiens
  chr18:76437855-76437885
  hypo
cctctcccaggtctgcggtgacctctcggg

SEQ ID NO: 95213 - DNA, 30 bp, Homo sapiens; identical to SEQ ID NO: 31526
  chr18:76463640-76463670
  hypo

SEQ ID NO: 95214 - DNA, 329 bp, Homo sapiens; identical to SEQ ID NO: 31527
  chr18:76477466-76477795
  hypo

SEQ ID NO: 95215 - DNA, 628 bp, Homo sapiens; identical to SEQ ID NO: 31528
  chr18:76486292-76486920
  hypo

SEQ ID NO: 95216 - DNA, 30 bp, Homo sapiens
  chr18:76487287-76487317
  hypo
ctttgcctcttcatgcggaaagtggttatg

SEQ ID NO: 95217 - DNA, 474 bp, Homo sapiens
  chr18:76495817-76496291
  hypo
agggcctgcctggaatgagaacgccacaaggaaacatttttatcctcggtgtgagcccggcctcgcctccctggtcacaagcaaagccagagggaagcagcgaatatctgtggacacctgctctgcgccgggccgcccgcacggctccagggcaagctcggacctactctgtgagccgtcattttgccccattgtagacaaggaagccgaggcctccgggcagccgtcgtgggtaaatattcgatcccagctctgagtcctgatgtgcggtggtttccagtttccaaggggtccccgtcacggccgattccaaggtagcaagcagacagcactgacggggttaggaagagacggagtgggaacaacacggcggcgttccctccccgtgagcgtgaagcgcggtcgatgccccgcaacggtgcgaggtgagcagtttccatgtttatcaccgtcgtgtttaatagaagttattgc

SEQ ID NO: 95218 - DNA, 326 bp, Homo sapiens
  chr18:76534697-76535023
  hypo
caggttagcctcaacctgggacgcctgcagactgagcccagctcttaaccccaccgatgtttccaggttccctggcacccgctctctcccgaggctcagagtgggcgttggtgtggaacagcccctaagaggcacctcggccttcccggagccccggaacgtggaggctaacccaggacagagacggtcactgcaggagaaaagacgacaccgtcagtccttcccccggtgcacaaccgaggacctcctccgcatttgcccctgcgtctgaggcagcatctcgggaatctgcagtctccaagtgcgagagaggcagccccagaccc

SEQ ID NO: 95219 - DNA, 31 bp, Homo sapiens; identical to SEQ ID NO: 31529
  chr18:76543110-76543141
  hypo

SEQ ID NO: 95220 - DNA, 213 bp, Homo sapiens
  chr18:76552754-76552967
  hypo
ggcaaggtggtgtgagagcagcgggtggcgtgagactggcgggtggtgtgagattggcgggtggcttgaggatggcgagtggtgtgaggacagcgggtggcatgtggatggtgcgtggcctgtggacggcgggtggcatgaggacggcaagtggcgtgaagatggtgggtggcctgtggatggtgcatggcctgtggacggtgggtggcatga

SEQ ID NO: 95221 - DNA, 30 bp, Homo sapiens
  chr18:76557144-76557174
  hypo
aggcgggacgaaagcgcgtcatcgccgagg

SEQ ID NO: 95222 - DNA, 251 bp, Homo sapiens
  chr18:76626238-76626489
  hypo
cagtcacccataaaggacagccgcggctgaacatgccaagctggctagagggagggtgacagccgcagccgaacctcagagctggctagagggagggtgacagccgcggacaaacctgcagacctggctagagggagggtgacagccgcggccgaacctgcagtgctggctagagggagggtgacagccgcagccgaacctcagagctggctagagggagggtgacagccgcagttgaacctgcagtgctg

SEQ ID NO: 95223 - DNA, 295 bp, Homo sapiens
  chr18:76653366-76653661
  hypo
gaaggcagtcacaaaagcctacgcaccacatgactctatctacgggaaacacccagcagccagtcaccgaaggctacacaccgcacaactccgtctacgtgaaacgcccagcgcaggcgtgccggcacatggggtgatgagcgtgctctaaaggtgatcgcggtgacagactgcataaatctaggattctgccaataccctgaattgtatactttcagtgggtgggccgtacggtgtgctaatttcgtctcaataaagctgttataaaaaacaaggaaggcgccctgctcctttt

SEQ ID NO: 95224 - DNA, 213 bp, Homo sapiens
  chr18:76660959-76661172
  hypo
agagctggtgtccatcgtgaagaacgcggctgccctcaccagctcctactcgtggggtggggaaggggtagtttcccctgccagcatccacgcccctgccagcatccacgcccctgccagcatccacgcccctgccagcatccacgcacctgccagcatccacgcacctgccagcatccatgcacctgccagcatccacgcaccagccaggcg

SEQ ID NO: 95225 - DNA, 902 bp, Homo sapiens; identical to SEQ ID NO: 31532
  chr18:76685332-76686234
  hypo

SEQ ID NO: 95226 - DNA, 30 bp, Homo sapiens; identical to SEQ ID NO: 31533
  chr18:76957871-76957901
  hypo

SEQ ID NO: 95227 - DNA, 313 bp, Homo sapiens; identical to SEQ ID NO: 31534
  chr18:76999755-77000068
  hypo

SEQ ID NO: 95228 - DNA, 31 bp, Homo sapiens; identical to SEQ ID NO: 31535
  chr18:77076162-77076193
  hypo

SEQ ID NO: 95229 - DNA, 257 bp, Homo sapiens
  chr18:77083045-77083302
  hypo
aaatcggtaattgggatacccgtcacctcaagcatttatcgttgcttcgcgttagtaatcctccgtttatcgttgcttcgcgttagtaatcctccgtttatcgttgcttcgcgttagtaatcctccgtttatcgttgcttcgcgttagtaatcctccgtttatcgttgcttcgcgttagtaatcctccgtttatcgttgcttcgtgttagtaatcctctgtttatcgttgcttcgcgttagtaatattgcagttcca

SEQ ID NO: 95230 - DNA, 30 bp, Homo sapiens
  chr18:77085730-77085760
  hypo
cggtgacaccatcgcgatccctggctttgc

SEQ ID NO: 95231 - DNA, 255 bp, Homo sapiens
  chr18:77126099-77126354
  hypo
tattgattctttttaccggacacctgggaggtgcagaactgtagggaagagacccgtccgtggtcgctaaaggtttgagtgtagagggtgaccggagaggcatcccgagggggtgtgggtgtggaagctgctctgtctggcgcggtggtggcggacacctgaccgtgcctctctcagagcccgctggacggcaccagcatggagctaagggaggaggaatgcagacagcggcccatgaaccgcagaaccacactg

SEQ ID NO: 95232 - DNA, 46 bp, Homo sapiens
  chr18:77143640-77143686
  hypo
cagtccacaggccacccgtgggttctgaaacgcgcccctcagtgtg

SEQ ID NO: 95233 - DNA, 301 bp, Homo sapiens; identical to SEQ ID NO: 55238
  chr18:77159935-77160236
  hypo

SEQ ID NO: 95234 - DNA, 88 bp, Homo sapiens
  chr18:77161629-77161717
  hypo
tttctacctgggtgtgccatgcgagagtgtcgccccactcccgacctctctttatggggtgaaagtcggtcccatgagagtgtggcca

SEQ ID NO: 95235 - DNA, 380 bp, Homo sapiens; identical to SEQ ID NO: 31537
  chr18:77166683-77167063
  hypo

SEQ ID NO: 95236 - DNA, 21 bp, Homo sapiens
  chr18:77167728-77167749
  hypo
gccaccgcgcctggccacctc

SEQ ID NO: 95237 - DNA, 359 bp, Homo sapiens; identical to SEQ ID NO: 31538
  chr18:77174744-77175103
  hypo

SEQ ID NO: 95238 - DNA, 146 bp, Homo sapiens
  chr18:77181263-77181409
  hypo
caggccactgttcccagaactcgagggttccctgacaccaagatgacatgtggcacagacctggaatcacgaggaaatgcccgtcctcctcccacgggcagacaggtcgagtgtgtttccagagaccgggccgtccgtggggcagt

SEQ ID NO: 95239 - DNA, 274 bp, Homo sapiens
  chr18:77183184-77183458
  hypo
ggtggagccacgggacgccatcagtttttatgaaatccccaaatgtgtcctttaaaacaaaacctctgcactccggcctcacagcccagatcccgcgcgctcccggtctgtggctttgactttggtttgagttcctgggctgggcttacctggctggcagggccgcagctgtggcactccctgtctggggacggaggctgcccatgcacccggctgtccaccttcttcccaaaggcggcgtcctgggctccctcccatgcggacccgggatcca

SEQ ID NO: 95240 - DNA, 30 bp, Homo sapiens
  chr18:77183673-77183703
  hypo
ggcgggcaggagggccgggctgggtgtccc

SEQ ID NO: 95241 - DNA, 269 bp, Homo sapiens
  chr18:77185305-77185574
  hypo
tcttttaactaagggaaaagccgtcacacaaccaaatggccatgaggcccgcggctgccggctgaggagggctgcgggaggaccctgaaaccctcgccctcctgaagctgctcctgtggagtcctgtgggcgggtgtggccctgccgagttcagagtctgtcgcttcgtctgtctggaaactgcaggagtcatgagcagccttcacggttttcacctaagcaatgagcacgtgcgggctttaaccctcggaaaatcagaattaaaggat

SEQ ID NO: 95242 - DNA, 145 bp, Homo sapiens
  chr18:77186374-77186519
  hypo
aaggactgtgtggccggctccccaggccacgggggccactgtcctccatgccacgtcccatgccgcttccaccgcagcgtgaggacagcaggacctgagccacgagccacactgctgtgggacccgtgtcgggactcgcagggcc

SEQ ID NO: 95243 - DNA, 30 bp, Homo sapiens
  chr18:77192626-77192656
  hypo
tctgatggcagaggcgccggcctcttgcac

SEQ ID NO: 95244 - DNA, 30 bp, Homo sapiens
  chr18:77192930-77192960
  hypo
ccaggtcatgcagctcgtgtccctctgtgc

SEQ ID NO: 95245 - DNA, 386 bp, Homo sapiens; identical to SEQ ID NO: 55240
  chr18:77193398-77193784
  hypo

SEQ ID NO: 95246 - DNA, 442 bp, Homo sapiens
  chr18:77194171-77194613
  hypo
accagggctcaaggtgctccccgaggagaggaggagtggcttccagagcgggcctgggcctggcagccacatccctgccggggtaggcctgggcctggcaaccctgcagccgcgtccctgctggggtgggcctgactcccccgggctgtggtgtggcttcctcaccttcctcacaccttgcgggaaagccacgtggagttaggctgtcgagggaggggtgtaatgaccgcgccagggacgggcagcgtctgcacagagccatgctccctctgcaccccaggtgttgatgtggatcccgggtagccgtgggtgttggcattttcttcgttccacctgttacctcgtcagctataggccccaggccctagatctgctgctttggcagccacagagcagcaagtgtgtccagccccagggctccaggctacgcggcagcacagag

SEQ ID NO: 95247 - DNA, 257 bp, Homo sapiens
  chr18:77194890-77195147
  hypo
gatgccaattagtacctccctcgttggtgcttgaagcaaggaaatgcgggagacacctgagcgcacagtggcccgtttgacatttaaagtctccaccctcccaggtgggaaaggtcagacagcgctgcaccacgctccgtcactgcaggcctgcacctccccatccctgcctcggtttttactgaccgaaagcttgttattgctcagtgggaaggatattagataggacaagaaacgaggctgtgaaaggaggagtg

SEQ ID NO: 95248 - DNA, 1760 bp, Homo sapiens
  chr18:77196528-77198288
  hypo
cgcacccggcgtccgcgtcctcccacgcccgctgtctccgtcctccccatccccatgtgtttcgcagttgggaagtgaagcacgtgagcagaacgcagcaccttctctccaggaagcattcggagcatggactctgggttaggaaagggtgtttgctcctctggataggtgctcgctcttacttgtgggtgctgaggggcgtgagggggtccggcatccgggtacctgtgggcgctgaggggcgtgagggggtccggcatccggggcttctcccatttagggcctttccttcagagggaaggaggccagccccctccagtgagcactgagcgtgccccctgccgtctctgtggggatgtcattgttcccacgccggggagagaccaccccaggccagcccctattcttctggccacattgccatgatcacaccgtccgcaccctgaggccacccccattacggctgccacggcgctaaaaacaccagcatcaaagcaacagggccgtggtttagcctggaagagcggggccctggagccgtctgcgagggggtctgggtggttcaggatggccggcagcccctggtggacgtggtccctgcggggtctggcgggacctcggccatggtgatgggtgcgccccctctgcagggtggggcctgcgggtaaggacagtcccgccccctgtgcgtgtgaggggatagtggagagaggggtctggcgtgggcctcactgctcctgggaaaccaaagatgaagacgcctgcttaggactcaccttgccctggtagaacaagtgactcagacagagcctcccagaggcttctggccaggcagggagtgaccagcagcgcagccagcctcagctcctgcccacacagcccccttgtcaccggctcctcctgcccctgctccagcaccttggccaccagttctcggtgggccggtctggatctgccgatgccgggacctcgccaggccgctggttgcaggggaggctgagggggcgtccgcctgctgtctgcttctcaccagcatttccagtgaggcatgaaagtgatgcgtggcggatgtttccctctggcctcagctttcccccaaatcccagctcacactgagtgtcctgatggtggcacctcgggcagccgccaccctctgccctccaccctctgccctgacggcaggctctgcctgagggggagggtctctctgtacacacagtctcctcaccctggagggcctgctctgctctcaacggagctggaaccaggagttcgcgagtgctctgggtggctgctggcttttctccttgtctcacctcctcatccgcacacagcctctgccctcagcgctgctcacctcggtatgtaggcagccggcatcaggatggtctggggtgagacaggcagtgttcttccccttctctggccagggagggtggagaagcacccgggcacagccattgaggccttttcgtgcaactcattgcctttctgggcgtgaaggtggaggctggtcctccacctgcgtgttctccatctgggggactgtggtcccggaggagacctggagtccggctccccgctccgtccgaggaggagctgagcggcgtgagcagtgcccgccctggtcactctgccttgctttcctcctctctgtttctggttgtgcctccttccttccctcctgctctctttgccgtggactgcagccccctcgccagatgtgttcctcacatgagtcaacccgtccttggcctgcg

SEQ ID NO: 95249 - DNA, 99 bp, Homo sapiens
  chr18:77198658-77198757
  hypo
gagtctgcaaagaggtgagggcgggtggtctgggatcctgcctcagccgcgcgggtgagaggggcgggcgggtcaggcgaagactcagagtcaggaggc

SEQ ID NO: 95250 - DNA, 1043 bp, Homo sapiens
  chr18:77199643-77200686
  hypo
tgggagagcacacatggttgccgtcgggctgtgtctgttttcccaggagcaagaactctcagaagtgcagtgttgaagcccgagccttccccgtgtcagcttttatgatgaacgaggattcaccatttatttctcccctaaagcaaagcccacgggctctgttttgagcgatggggacagatgctcggtgctgctgggaaggtgttcacggggcagattcgctgtgtcaggagaccaacgtggaatgaggtcggcccagccagtcactgcttaaaaacagtaatgacaatatttgagaaaatgggtggaattttgtggagatttactggcacggggaaggcgtgtggcctctggcaggtctgcgacactgatttctaactacctgttccacagctccactgcctggaaaaactggcaaaaatgtggcctgggtctcctgacaggcctggccattggagtgggggtgtgcagctgagacaggaaatacgaggcgcatgagtgtccccaagcccagatcctcagcctccaaaatcttctattagtaatttcagagctttggcttcttggtgctttgggaaaatttaagatgacgcgtgggctctggcacggccgttgctagtgacctctcctaatagcgcagaagggcctcccaggaggctttcctaggtagagaggggtctgcacgcccactggaacatgctctatcccagcctcagaaaacccacatttggtgcaggtgggacaggaggagtggacacgtcacctggagaccacatgagaagcggccatctgcagcagcaatcaccccgtggggaggcggcgccctggcagctctcatgtggggcctggtccttcctcgctgcctgagcaatgggccctgcttccccgcagacaccgtggtgcccctgggccacacccagcaggtgtccagtgaccgagggtggtgttggccatggcaggtccctgcccgtttctccgaggacctggggctgtgacccagctgggttctcccgggaaggagcggccactgtctgcactgtcca

SEQ ID NO: 95251 - DNA, 30 bp, Homo sapiens
  chr18:77201354-77201384
  hypo
ctgctgggcgggcagcgctcctgggcctct

SEQ ID NO: 95252 - DNA, 534 bp, Homo sapiens
  chr18:77201764-77202298
  hypo
ctggccctggggtcacggggttgcggcgtttcccacttgcctgtttcaggagttgcattctagatgattctctctccatagaaggtcgaggtttctcagcatggattaattgattagatttaattaaatctaaacgtggtgtttccgggcagaatcttcttcagccaaagtgagcgtggccgtctcttctctgggcgcttccaggtgcgttggggcccctgcaccctccacgtcagtgccctggctccgtggccctgtcggtgctctggtgagtctggggttcgtgccgagcgccattgcctccaggtcgaggtgggaagcgcgctggtggggcaaggtggtccctgcatggcacaggttgggagagcagccgggagggcagcgggccgaggcggtgggggagggcaccagttctccacggcaagcacggcctctggggctgctcttccggagagacgtggagacccgcgtgcacgtgtggagactggcacgtgtgaggggcccacaggtgtggccgggcggcctttctcctcc

SEQ ID NO: 95253 - DNA, 30 bp, Homo sapiens
  chr18:77203652-77203682
  hypo
gcctcggttcctgccgggcacatggacgct

SEQ ID NO: 95254 - DNA, 1307 bp, Homo sapiens
  chr18:77204184-77205491
  hypo
cacatgtggtgtgtgtgtgtgcgtgtgtgtgtgcacgctctgggggggtgtgcacatttcccagtgtggctgtgcgtgtgtgtgtgcccacgtgtgttcacagaacaccaggctttgccccgactcctggctcaggcctgagtctccagccatggcgtccccgttcctcccgttccttctctgcactgcacactgggaaccaggacaagaggtgtgcggcgtcaggctgtgtccttcccccacccaccccgagcccacgctgctctggagggagaccccagcttcccccgcctaccccgagccctcgctgctctggagggagaccccaggcccctcaggccctttcccgcatctgaaggggccagggcagggcgtccggcagatgaagctgccccttaaagccaggtctgggccggtttacagggaagcactgctcacgtacaacctggcagaccacaccagcgccgcacacacaggcacccctgtgggcacccacgtgcccgaccccgcagaccacaccggcactgcacacacaggcacccccgtgggcacacacgtgcccgaccccacagaccacaccggcgctgcacacacaggcacccccgtggccacacacatgcctgcacacgcacacttctggtgcacacgcccacactcacggaggcttctgcacaccacacagccagcaggtgaggaagtggacgctgcgtggctgtctcttggtggcttcacctggaatgtcaccgtggaccccagagcccgaagccccggcaagcacagaaatcacaccggcagcctgtcccacttcgggcaggtgaggcctggctgagaaaagggggaaggagagggaggatgcgggggtgtgtcctggtcctccacccgtttcgggtttggggtgctcccttcgactactggctccatttttgatgtcttttacttttgtttcgatttttcctggtatcttgagtaaagtctccctggagcatcaaattggatttttcttacaagtaccgtgtgctgttgactcatctgctttggtgtgccgtgggtcacgtgggcctgggctgtgggtaaggtgggcctcgttcctgcaggaacacctggctctgcagcagtggctgccgtatcatcctggccaggcccctgtaccgagggtggagccacggggtctctgatgccttccttctcgtgctttggtggagaatgtggctggacgtcctcccatgacagatgcactctcctgcctggttccctggccccgggcccagccctgagagacgcaccacggccttcacctggaagtgtca

SEQ ID NO: 95255 - DNA, 140 bp, Homo sapiens
  chr18:77208866-77209006
  hypo
tctaccaggtgcaccgcatcacagggaagaccgtgtccaccaccagccacgaggccatcctctccaacaccaaagtcctggagatcccactcctgccggagaacagcatgcgagccgtgtaagccgcgggggacctccgg

SEQ ID NO: 95256 - DNA, 928 bp, Homo sapiens
  chr18:77210975-77211903
  hypo
aaactcagaaactccgacattgaacttcggaaaggagagacggacatcgggaggaagaacacacgggtacggctggtgttccgcgttcacgtcccgcaacccagcggccgcacgctgtccctgcaggtggcctccaaccccatcgaatgctgtaagtggacgtccacgcgcccacaggggaggaaaccgtcccgtcacatgcgcttcactgtctcacccgctctcagcttttcgttcgtgtagacttgggactgaacggttcccaccaaacccaccacagtgtgtggccacgaggggtctgagttgatcatggctgagttattgcctgtggcctcccgggggcccctggcgctggctcctctgatggctgagcatggccagggaaagcggtgtgggccggggcttcccctcacgctgcgctgacctttgcgtatttgtgcgatgactgtgatttgagtgaaattggctgagtcttaggaagatattttgatgacttcttcagaacgaggtggagaccatcaggatgaagtgtgcacggcttctcccctagaagtagtggcatccgcaggggtcggcccgcaggtcgtggcggtgcttgctctgggtgggtcggctcacgtgtgacctgctgggtgccacacgtgtgccccaggccgcccactcaggacaggccctcactgcccctctccttctgatgcagcccagcgctcagctcaggagctgcctctggtggagaagcagagcacggacagctatccggtcgtgggcgggaagaagatggtcctgtctggccacaacttcctgcaggactccaaggtcattttcgtggagaaagccccaggtatgctcttcaccaggggccatctgcggcctgggcttcggcgctggtgggaaccggttcccagtcggtggagcaggacccacctgt

SEQ ID NO: 95257 - DNA, 348 bp, Homo sapiens
  chr18:77212144-77212492
  hypo
cctccatctgcagagagtggacgcttcgggggtcagttagcagcagggcaggagggagctcccctccggggccttcccctcccgccagcattcctggggtcggaggcagggatggggtgggtgccgcagacggcgggagctggggtggtctttaatgccacagccgtggtgtgtgtgaggctcttgtgccccaagggcacaggtcacccctgcctccaggtgttgcgctggcccagcctggaggctccggggctgaacttggaagggcagcaggggtgtcctcggagtgatgttcctcctggggccgtcacgcctgtggttctgtgctgcccacgggagactgtcctg

SEQ ID NO: 95258 - DNA, 459 bp, Homo sapiens
  chr18:77212956-77213415
  hypo
cttaagtgcttcaatcaaaatcggctttagaggtctttgactctaacttggcttcctatagaatcagggcttaattggaaaacatgttttaaattacagagaaaaccaactaagggcagtgaccgggaaggcatttgcattgcccgtgccttctcgggaggaggctaattttgaaataattttcccttcagagctttcggtgtgtgtccacgcgttggcggagaaacacttcgcccacagtgtagggcctcgcttgggccaagactggccagaaccgtggctcccagcttctgcttttcaaagcccagacctgagcagcctccttgctttttcttctgcccagagaggcctgggcaccttggcagagcctccccccgaatgcagtccgcagaggtgccccagctcctgccctagccaagttactgtgctgagttggtgccacggcgccatgggtaaggg

SEQ ID NO: 95259 - DNA, 46 bp, Homo sapiens
  chr18:77213651-77213697
  hypo
tgaccctctgccagcaccagccggcgtctggtatacagcaggtgag

SEQ ID NO: 95260 - DNA, 30 bp, Homo sapiens
  chr18:77214945-77214975
  hypo
cacctctctgtacacgcgtgaacgttgaag

SEQ ID NO: 95261 - DNA, 176 bp, Homo sapiens
  chr18:77215330-77215506
  hypo
gtcgtttctgtggccgccgtgactggcaggccagctggggcctggacggccggcgtctccttctccaggtaatcagggcccctctacgtggcctcccggggcccctctggggaggcagcctggcatctcacaggcggccggggctcccgggaagcagagacgggctgtgccagggc

SEQ ID NO: 95262 - DNA, 30 bp, Homo sapiens
  chr18:77217333-77217363
  hypo
agttctcatcaagccgcattctggatagcg

SEQ ID NO: 95263 - DNA, 30 bp, Homo sapiens
  chr18:77219225-77219255
  hypo
ggcctggctggccacgcagacgtggctccc

SEQ ID NO: 95264 - DNA, 30 bp, Homo sapiens; identical to SEQ ID NO: 31551
  chr18:77222007-77222037
  hypo

SEQ ID NO: 95265 - DNA, 30 bp, Homo sapiens; identical to SEQ ID NO: 31552
  chr18:77231639-77231669
  hypo

SEQ ID NO: 95266 - DNA, 321 bp, Homo sapiens; identical to SEQ ID NO: 31553
  chr18:77236129-77236450
  hypo

SEQ ID NO: 95267 - DNA, 30 bp, Homo sapiens; identical to SEQ ID NO: 31554
  chr18:77240515-77240545
  hypo

SEQ ID NO: 95268 - DNA, 30 bp, Homo sapiens
  chr18:77247091-77247121
  hypo
gtgcggtgccacggcgtcagcgccacctgg

SEQ ID NO: 95269 - DNA, 447 bp, Homo sapiens; identical to SEQ ID NO: 31555
  chr18:77255659-77256106
  hypo

SEQ ID NO: 95270 - DNA, 30 bp, Homo sapiens
  chr18:77256407-77256437
  hypo
agggagagaggtggccggggcagtggaggg

SEQ ID NO: 95271 - DNA, 61 bp, Homo sapiens
  chr18:77269733-77269794
  hypo
gctgtgacaactgtcagctcacggaccagggagggaacgcgaagctggggagctctgagct

SEQ ID NO: 95272 - DNA, 155 bp, Homo sapiens; identical to SEQ ID NO: 31556
  chr18:77271019-77271174
  hypo

SEQ ID NO: 95273 - DNA, 30 bp, Homo sapiens
  chr18:77272945-77272975
  hypo
accaaatcgccttccgtacccacctggctc

SEQ ID NO: 95274 - DNA, 30 bp, Homo sapiens; identical to SEQ ID NO: 31557
  chr18:77273799-77273829
  hypo

SEQ ID NO: 95275 - DNA, 250 bp, Homo sapiens
  chr18:77276518-77276768
  hypo
cccttgttcttaccccgtttctcagccgagcgccgggcgcccagcagtgtcggacagtttagggtggaccgaggaggccgtggtggaggcttcatgtaggaggttatggaaaatccagatatttgcttgtgaaggaggaaacatttatggtagactttctaagaggttgcttcttctcaaaaaattaaaaaacccacatgagaggcggcctcttcagttaccttggcgcacacaccgaagccacctctgc

SEQ ID NO: 95276 - DNA, 172 bp, Homo sapiens
  chr18:77284565-77284737
  hypo
tcggcccacacgcaccgccagcccgcaggagtgaggtgcaggctgccgctggctccttaggcctcgacagctctcttgaggtcggccctcctcccctcccgagagctcagcagccgcagacccaggcagagagagcaaaggaggctgtggtggcccccgacgggaacctggg

SEQ ID NO: 95277 - DNA, 30 bp, Homo sapiens; identical to SEQ ID NO: 31558
  chr18:77286037-77286067
  hypo

SEQ ID NO: 95278 - DNA, 379 bp, Homo sapiens
  chr18:77288199-77288578
  hypo
tgcttcccttgtctgcgcggttgaaaccgtaggcttgttcatagtcgcatgctcgcatctttgtttttaatctggcttcgaacatagcacaagtaacttgaatagcacatcaataggttactggacaaaagcagaaaaacctgttacaggatagcctgcatttgcatgtgtgtacatatctaggcatctatttatgtataaataataacagagccgacgtgtcctcgcccaggagggcttccctgtcagcaataaccggcatccgttttggaacctgcgtctggggctccagtcgctgctcttgctggcgtccatcgccgcctcggacggccgtgcattttctcgtctcacgcagttcgaggaggaccctagaaagcca

SEQ ID NO: 95279 - DNA, 31 bp, Homo sapiens
  chr18:77290968-77290999
  hypo
cctggcaagggcatctcgttatatggacagc

SEQ ID NO: 95280 - DNA, 771 bp, Homo sapiens
  chr18:77307983-77308754
  hypo
ccttctctagagcacctgactcgggcacacggaggctgctggaggagtgagagagtgagtggggggaggaattgcaaccaaattcagaatccgcccggccctgaggccgccccttgcctgccacccacccgggtgggggctttatttcgactcaggcacaggcgcacctgccggacccccggtgtctctgcgactccttctccgcactggcctgggcccgggctcccagccctccgctctgtctcgctggggcaaggcgtccctcactggccagttctgacattggtcccgggggagccgccttccacctgctggccctgctggccctgagtgtgactcagccgtgcccggcaggaccacgagacgtccgctgagcacgatgtctacctggcattcaaggtaagtcatcaagcgccccccggttaggctggacgtgtctgtgagggttccggatgagcctggcattgggatgagccaggccggctgcggtttgactcagtgagggaagaggcctggcttgggacaggaggaagctgcgttccagcctcaggggagcctccttcccctggccgcctccttccgcaccctcaacgcaacaaaaaggtgatttcagaattgtaattactaaagaaaacattaccaagaacgactctgcagcacccctcgttcacgtccccactcagcatctccacgcgggggccacgcgtccgtgtttgctgccggcagccatcagcatccgcaggggtcccccgtctccgcgcacagctcaca

SEQ ID NO: 95281 - DNA, 276 bp, Homo sapiens
  chr18:77309674-77309950
  hypo
gctgggacctgcccaggagctcgggcagatgggttccgccagcggcgccaactcccacggctcgcggggatggggagttgggggctctgaacccgtgtgtgtggagcagaaggagtgtcacctcatcccccgggggcccttcacatcccaggccccactggactgtgacgggcagtgggaagggaggacgtgtgtggggccgagagggagctcccaggagaccccgtcgttgtcctggggtggccgagacaaagcctcacagacccccagacaggg

SEQ ID NO: 95282 - DNA, 30 bp, Homo sapiens; identical to SEQ ID NO: 31561
  chr18:77312867-77312897
  hypo

SEQ ID NO: 95283 - DNA, 315 bp, Homo sapiens; identical to SEQ ID NO: 31562
  chr18:77313805-77314120
  hypo

SEQ ID NO: 95284 - DNA, 335 bp, Homo sapiens; identical to SEQ ID NO: 31563
  chr18:77315292-77315627
  hypo

SEQ ID NO: 95285 - DNA, 30 bp, Homo sapiens; identical to SEQ ID NO: 31564
  chr18:77315947-77315977
  hypo

SEQ ID NO: 95286 - DNA, 30 bp, Homo sapiens
  chr18:77319274-77319304
  hypo
cctgtctgctctgccgtggccgatggcatc

SEQ ID NO: 95287 - DNA, 30 bp, Homo sapiens
  chr18:77320263-77320293
  hypo
tgctgggaaactccccgcagtccgaggatg

SEQ ID NO: 95288 - DNA, 62 bp, Homo sapiens
  chr18:77320766-77320828
  hypo
acctgcaggagggagcggaagaggctcgcaggcttgtgcaggggagtcgggaggcgggcaga

SEQ ID NO: 95289 - DNA, 255 bp, Homo sapiens; identical to SEQ ID NO: 31566
  chr18:77329762-77330017
  hypo

SEQ ID NO: 95290 - DNA, 30 bp, Homo sapiens; identical to SEQ ID NO: 31567
  chr18:77333358-77333388
  hypo

SEQ ID NO: 95291 - DNA, 119 bp, Homo sapiens
  chr18:77336078-77336197
  hypo
caccggagcatggggcggtgagaagacacaatacgaggcctgccgtccgaacgcggaccctgcagcccctgcggcgggaagccgtgaacacaaggctgagtttgcgcctctgatttgcg

SEQ ID NO: 95292 - DNA, 232 bp, Homo sapiens; identical to SEQ ID NO: 31569
  chr18:77339169-77339401
  hypo

SEQ ID NO: 95293 - DNA, 151 bp, Homo sapiens
  chr18:77347861-77348012
  hypo
gtatgtatagaaaagcgacatgctaagccgcaaagccgcccccttcaagacgcagcacacgcaaggctcaccctgccacgagcactggtaccggctcactttccgctctgctcggcgggactccggccaggcccagcgtgcagctgcagaa

SEQ ID NO: 95294 - DNA, 189 bp, Homo sapiens; identical to SEQ ID NO: 31570
  chr18:77356568-77356757
  hypo

SEQ ID NO: 95295 - DNA, 570 bp, Homo sapiens
  chr18:77358202-77358772
  hypo
ccagggtgaaagccacagcaccggccctggtttgggatgacaccgcggctgtgatctcggcagccacaggcttccccgtccgactcggccgagaagcctctcctgccacctctgagctctaggcttggactctggagtggttgctggagtcacttcccaccgtgccgggcaagggctgcaggagggcacagcgtgcgggacgctggcaactcacagctgcctcccagccacaccccccacctcctgcaggctccagggccctttgtctctgagaacgagagctgcatcttgtccagtgggtttcacaggtctcaggactgggaatggcgctgggcgcgtggacaggtgaagtccattgttcctgctgctgccggtgtgagccgcagcccacgcccaccaccaaggaggcagaacggcggtgtgaatggagaaccactcatttgccaaatcatttaaatcagacttttcacagctgagaatgccaccgcaaagcacaaatgactttgttccagagagaaaagggagagcagggcaccgaggcagaccacgggaacacgagcagcgccttcc

SEQ ID NO: 95296 - DNA, 225 bp, Homo sapiens
  chr18:77365606-77365831
  hypo
ggctccttctctgcatttgcccgtggcccggagcccaccctgctctgctcatccagcacctggacccctcgccggctcccgagctcgtgccttggcttccccactgggtctgcgctcctctgtgtgctggggctcccacacccagtctgcgttccccgccaggtctacgttccccgccaggtctgcgttccctgccaggtctacgttccctgccaggtctgcact

SEQ ID NO: 95297 - DNA, 90 bp, Homo sapiens
  chr18:77366224-77366314
  hypo
cctcacctggtctctgctcctcgcctggtctctgctcctcgcctggtctgcgctcctcacctggtctgcgctcctcacctgttctctgct

SEQ ID NO: 95298 - DNA, 31 bp, Homo sapiens; identical to SEQ ID NO: 31572
  chr18:77372905-77372936
  hypo

SEQ ID NO: 95299 - DNA, 160 bp, Homo sapiens
  chr18:77382548-77382708
  hypo
ctcctgcacttgtcccagtgtcgtagctacaaccgagagcctgaatagactgtgggtttccactcacacatggccagacaccgtccaagactccgcagaaacaggcaagcccaggctcgtctactgcaatgaacccagcgttggtttggcatgaagaccc

SEQ ID NO: 95300 - DNA, 30 bp, Homo sapiens
  chr18:77395503-77395533
  hypo
gtccccgcatcacacgtcacagcctctcaa

SEQ ID NO: 95301 - DNA, 388 bp, Homo sapiens
  chr18:77410014-77410402
  hypo
atgcaccctagaagcttttggcggtgtgtgcgcgtgggctcagggctcgtgaccctctgttccggcccacgcttctgaccggtgattagaaagcggcacgttctatcctcggccctgtcagccctgcagggcgcaccagctgctctcacgggccacagaatcacagatgcggtcctcacctctcgggagcggccttctcctagacagcacacgagccatctacgttttcccggttgtctttttcattccaaagtccacatgtgcgctaccacctcctttaaaacataaaaacagaaaagcaaaacgacgaaaaaggtagcagttccctttagccacagtgcagcgcatttgttttcattattcctccgttttactgagagtaatgtgc

SEQ ID NO: 95302 - DNA, 60 bp, Homo sapiens; identical to SEQ ID NO: 31573
  chr18:77456031-77456091
  hypo

SEQ ID NO: 95303 - DNA, 84 bp, Homo sapiens; identical to SEQ ID NO: 31574
  chr18:77457660-77457744
  hypo

SEQ ID NO: 95304 - DNA, 30 bp, Homo sapiens
  chr18:77458233-77458263
  hypo
tttgtgtgcctgcccggcacgatgtcggag

SEQ ID NO: 95305 - DNA, 22 bp, Homo sapiens
  chr18:77459546-77459568
  hypo
gccaccgcgcccgcccaaggtt

SEQ ID NO: 95306 - DNA, 30 bp, Homo sapiens
  chr18:77459831-77459861
  hypo
ccaggtgttgtgccacgctctggaaatttc

SEQ ID NO: 95307 - DNA, 317 bp, Homo sapiens; identical to SEQ ID NO: 31575
  chr18:77463263-77463580
  hypo

SEQ ID NO: 95308 - DNA, 30 bp, Homo sapiens
  chr18:77465512-77465542
  hypo
agtgggacagcgaccgtctgttccacgtgg

SEQ ID NO: 95309 - DNA, 30 bp, Homo sapiens
  chr18:77479213-77479243
  hypo
attctggagagcagcgtgtgcccctctcgg

SEQ ID NO: 95310 - DNA, 40 bp, Homo sapiens
  chr18:77493026-77493066
  hypo
agtccctgagtctcctcgtggtgggcgtggccaaagcact

SEQ ID NO: 95311 - DNA, 442 bp, Homo sapiens
  chr18:77493432-77493874
  hypo
actgagggttgaggtggggcccgtctcctgtacacccctgcggaaaagcctgctgggccccagagccggcgtccgctgcctctgcagctgcgttacctcgttcctgcctgttctgctgggccccaaagccggcgtccgctgcctctccagctgcgttacctcgtttctgcgtgttctgctgggccccaaagctggcgtccgctgcctctccagctgcgttacctcgtttcagcctgttctgcttctcatgctcaggatgctttcccgaccttgctctgtgtctcttcttgtttcccgtcctctctcttgaagccgtcccacctcactccagcgcagagctggggagagttttattctgtgatccagggtcgtgcaaggaggttggtagaaacatttcatttccgtgcattgacaggataccgtagcatctgctgttatctgt

SEQ ID NO: 95312 - DNA, 30 bp, Homo sapiens
  chr18:77495548-77495578
  hypo
aagttctttctgtgcgtccttctcccatct

SEQ ID NO: 95313 - DNA, 30 bp, Homo sapiens; identical to SEQ ID NO: 31577
  chr18:77495889-77495919
  hypo

SEQ ID NO: 95314 - DNA, 30 bp, Homo sapiens
  chr18:77496345-77496375
  hypo
gtttgtcaggtggacgacatccttggagaa

SEQ ID NO: 95315 - DNA, 423 bp, Homo sapiens; identical to SEQ ID NO: 31578
  chr18:77497993-77498416
  hypo

SEQ ID NO: 95316 - DNA, 30 bp, Homo sapiens; identical to SEQ ID NO: 31579
  chr18:77507718-77507748
  hypo

SEQ ID NO: 95317 - DNA, 222 bp, Homo sapiens
  chr18:77508724-77508946
  hypo
catctcacacaacagcgacagagtcatgatcagaggcctttagagtcatcattatcatgtctgtgtgtgagccgtgactgcctgggagccgtgtctgcctgggagccgtgactgcacatgagccgtgtctgtgtgtgagccgttctgtgtgtttgccgtgtctgtgtgtttgccgtgtctgtgtgtgagccgtgtctgtgtgtgagccgtgttggtgcatgt

SEQ ID NO: 95318 - DNA, 534 bp, Homo sapiens; identical to SEQ ID NO: 31580
  chr18:77509275-77509809
  hypo

SEQ ID NO: 95319 - DNA, 17 bp, Homo sapiens
  chr18:77510162-77510179
  hypo
tgcacagaaaaggtgcg

SEQ ID NO: 95320 - DNA, 80 bp, Homo sapiens
  chr18:77510421-77510501
  hypo
cagttgacataaaaataaattcgtttaaaacttggacggcaggtattagggcgtgcacttcccgctactctgcctttttt

SEQ ID NO: 95321 - DNA, 61 bp, Homo sapiens
  chr18:77511479-77511540
  hypo
ctctgaacgagcttgtcgtgactgatcggctgtgtgtgccagcccacggggttctcttgtc

SEQ ID NO: 95322 - DNA, 193 bp, Homo sapiens
  chr18:77512023-77512216
  hypo
ccttggcgcagtgggacgtcccagcacggcaccaggagggagggtgtctggcaggacatcaggtggttggaatttcagggctctggggatctcctgggtgtgccccgatcaagtcggctcacgtcacagaaaccaggtgcacctgcagcggctcctaaggaaaacctagtggcactggctggttatgcagagg

SEQ ID NO: 95323 - DNA, 739 bp, Homo sapiens
  chr18:77542641-77543380
  hypo
gccgactctgcagcccggcgactgcttcccaggtgactgtttccagagtcaggtgttggccgtggtcaggttgacctgcctgtttgttttctataagctgtgtgtgttgtgcccgggtgtagatgccctgaggtttcacggccccccagcaagcagccccaggcccggcaccggatgggcccttcatacccattcactgtaacagacaagcagacggatgaggccatcgtggtccctctgaataaacgatgcttcacagaagtctcccctttcaaaacacgtacagcgaatgactcgggcttcagagccaccctggggtgccgtcggctggtgggtgatggagcggctctgcctggctcctctcggctctggcgcggcaggtcttcctgctttccaagcccgtgtccctggtgccagcacagaactgaactccgcccttgagtcgtgcgggacgagaccccgtgctgcgggcgcagtgccctctgtgggcggcgcgtggtggctgtcctccgtttcccacccggcgtctactgggccttgtccagtatcactgggagctgcaggctcggctagcaggtggctcccgtgccatccccgtgagctccgcctggccctgctgctcccgcccggaaagctcagacccataacccagcccacttggcagcagcgtgccgcctgatcggcaaggtttactccctttgaaaatctctgttgggtggccgggcgcggtggctcacgt

SEQ ID NO: 95324 - DNA, 88 bp, Homo sapiens; identical to SEQ ID NO: 31583
  chr18:77543688-77543776
  hypo

SEQ ID NO: 95325 - DNA, 97 bp, Homo sapiens; identical to SEQ ID NO: 55242
  chr18:77547950-77548047
  hypo

SEQ ID NO: 95326 - DNA, 170 bp, Homo sapiens; identical to SEQ ID NO: 55243
  chr18:77548351-77548521
  hypo

SEQ ID NO: 95327 - DNA, 420 bp, Homo sapiens; identical to SEQ ID NO: 31586
  chr18:77549954-77550374
  hypo

SEQ ID NO: 95328 - DNA, 31 bp, Homo sapiens
  chr18:77555363-77555394
  hypo
acacaggactgatttacgggatcagagaggg

SEQ ID NO: 95329 - DNA, 32 bp, Homo sapiens; identical to SEQ ID NO: 55245
  chr18:77557858-77557890
  hypo

SEQ ID NO: 95330 - DNA, 484 bp, Homo sapiens; identical to SEQ ID NO: 55246
  chr18:77557912-77558396
  hypo

SEQ ID NO: 95331 - DNA, 579 bp, Homo sapiens; identical to SEQ ID NO: 11861
  chr18:77558416-77558995
  hypo

SEQ ID NO: 95332 - DNA, 30 bp, Homo sapiens; identical to SEQ ID NO: 55248
  chr18:77559220-77559250
  hypo

SEQ ID NO: 95333 - DNA, 255 bp, Homo sapiens
  chr18:77562266-77562521
  hypo
gcacttagaagaccaggtggacgcggctcatggaggggcgtctggggaccctggagcagtgaaggtcggctctcccagccgtgccgctccggtccggagagcctggcctcaacacctgtcccagccgtgctgctctggtccggagagcctggccttgacacctgtcccagccgtgccgctccggtccggagagcctggcctcgacatctgtcccagcccggccgctgcagcatcggccctagtggggaaggtctg

SEQ ID NO: 95334 - DNA, 30 bp, Homo sapiens
  chr18:77608657-77608687
  hypo
tttgggcagcagccgcgtgggggaaggagg

SEQ ID NO: 95335 - DNA, 743 bp, Homo sapiens; identical to SEQ ID NO: 31589
  chr18:77609430-77610173
  hypo

SEQ ID NO: 95336 - DNA, 73 bp, Homo sapiens; identical to SEQ ID NO: 31590
  chr18:77616359-77616432
  hypo

SEQ ID NO: 95337 - DNA, 30 bp, Homo sapiens; identical to SEQ ID NO: 31591
  chr18:77627461-77627491
  hypo

SEQ ID NO: 95338 - DNA, 587 bp, Homo sapiens
  chr18:77628008-77628595
  hypo
gctgccttcccccgtcgtccccatgaggtccaggtcctgatcgtgcttccaaaaggtgctggagtgtttggctgtcctcggtcgaatatccaggagggaaaattcatttgtgtcacgttagagaataggagaagtttgggctgccccagctacagaagtcaccccaggaacaccagccctaacccttactgtggaccccaaaaccccagatcctctcagggacaaccctgggctccgtggcacccagcccttcacactcctggcacgcacccctaaattgcttgtccagttaagaagcagtcgccctccgcgtggggcctggtgacccgtgtccgagcgtccggttaagaagcagtcgccctccgcgtggggcctggtgacccgtgtccaagcgtccggttaagaagcagtcgccctctgcatggggcctggtgacccgtgtccgagcgttgcagctgctgctgactgaccgaaggtctttttcggaagcgattcagttgtgtgggtgaagagccaagaaaaggtggttctcactcctgtcctaagagaatatttcaaagcatgagaattggcgtgttggtgacgta

SEQ ID NO: 95339 - DNA, 161 bp, Homo sapiens
  chr18:77629188-77629349
  hypo
gtgctggttgctttcagtgcccgccccgcgctgagtctcctgcccctgggctgcgacctgcacaggggcagtagctccctgtggggagggctcggctcagggaccacggaaacgcctggtctgctgcacacggcgggtgcggaagaaataggaagcctcag

SEQ ID NO: 95340 - DNA, 31 bp, Homo sapiens
  chr18:77630315-77630346
  hypo
ttgatgattgcaatgacgtggtgtggttttg

SEQ ID NO: 95341 - DNA, 676 bp, Homo sapiens
  chr18:77636048-77636724
  hypo
ctggggttggtgcagcgcccgcagctcacgggccacagcagcggaaggtctgcggcattttggaccttgctgttgccggggcagtgggtgttggcgccacatccaggacccatctcccgcctggtgccgctgccatcacagtgaagctggactgaaacccacagacaggtccagccctgccgggcaggcgtgatcaggctgacactgcggaaaagccccactaggcaggtatgattgagctggcgtctccgaagggccccagccaggcagggatgatcgggctggcgctgtggaaagttgcaagcacactgtgtgggcacttggtggggctgggctgggtgcagagcacctaatggagaggagtcacctgcggcgtggccactgctgtgggctgcagttcccgggaaacagcagtggaaaccagcggcccagggacaggacaggggctgcaggtgctgagccgttgttcgacccagttgaattctaactcgtgacttggaacgattctgtcccgggaaggatgccctcttctgcatccacaggcagtggtgccctctgcgagcagcttgctcacctgtgtctgtgacgctggtgccctgagggcagggccagccccctctctcggcacagctgggtgaatcatcaacgacacccttggcaccgtgagcacttgcac

SEQ ID NO: 95342 - DNA, 368 bp, Homo sapiens; identical to SEQ ID NO: 31593
  chr18:77638242-77638610
  hypo

SEQ ID NO: 95343 - DNA, 30 bp, Homo sapiens
  chr18:77642896-77642926
  hypo
atctgcgcgtggcacgcggaggccgggtac

SEQ ID NO: 95344 - DNA, 30 bp, Homo sapiens
  chr18:77643801-77643831
  hypo
agcaggcatgttttcgtttttgctttggtg

SEQ ID NO: 95345 - DNA, 462 bp, Homo sapiens
  chr18:77644479-77644941
  hypo
cggccactgggtccccgggggagagccaggctgtgatgtcccgatgcagtggaggagcagggctgggtctgggcctgggcctgggcgtggcagctccccaggcccacggggcaggaattctagattctgggattcctttcatcgttgctttttgtgttttctacctagagcggagaaatgtttgtggtttccaaagagaccggacacgcccaaggcccacagacacgtggcttcgtgatggggagccacgggggcaggggtccgcccggctctgtgttcctcgggggggctcatcctggggcccaggaactcgggagcggtttacccacaggttcctgtgcgtgggagcaaacttgcttttcccattcacagaaacacagtagcgtgcgcgggtcggtgatgcagccaagacaccatccctgaaactgtgataatgagagcgtcctgacaccagggctggga

SEQ ID NO: 95346 - DNA, 608 bp, Homo sapiens
  chr18:77664460-77665068
  hypo
ttgacttctctgtggccgcaagagctgccgcctggctggggctctgcaagcccaagaacagtgagaccagctcgaggctacaggggacagcagggcgagcagctgacgtcagggcccctggtgcgcggtggcaattctgggaggggccgggcctgggagggtgctgaggacgcagatctgtgcccccaggcacacagccaagtggagcagagcagctgcttttgggtctctgccggcctccctccctggtgatagatgcaaaccttcctttcctggagtgaacagggagcagccgccacccaccatcccagtccgaacacgcttcccccaccgctgtgttcatgccctggcttgcctagcagtgaacatgagtgctgctgcactttcccgtgtgaaatgtttaaatcagcggccgctgacccttccacagctcctgaagccagaggcagagcctgggtggggagcgctgcctggacagaaaggacaggacacagccctcccccaccctggggcgtccgtcccgctcataagccagggtgggcacctgggtgccgtagccgccctgtgtgagagtcttcaggcacagccatggccgggtgtgttcaggg

SEQ ID NO: 95347 - DNA, 279 bp, Homo sapiens
  chr18:77675214-77675493
  hypo
ttaaaagcgcagaccggatgaactgggcctggggagggctgaagctcccggcagcacgggcggggccagccccaccccctccgcatccccccagggcccgccctgtcccctccccatccccccggggccaggccagggcctcagtgcacagactctccggggcgctcattaccgtaactacaaccacacactccatcactccgagccgacccgacgctgctgctcctggtccccgttcctgacgaggatgcacagggtctcagcggtcccgcacttgaa

SEQ ID NO: 95348 - DNA, 31 bp, Homo sapiens; identical to SEQ ID NO: 31596
  chr18:77677978-77678009
  hypo

SEQ ID NO: 95349 - DNA, 54 bp, Homo sapiens
  chr18:77685536-77685590
  hypo
cagctgatcctcagaagcttccgtcgcacgggcgtggctgccctcaactcacag

SEQ ID NO: 95350 - DNA, 31 bp, Homo sapiens; identical to SEQ ID NO: 11862
  chr18:77710900-77710931
  hypo

SEQ ID NO: 95351 - DNA, 36 bp, Homo sapiens; identical to SEQ ID NO: 55250
  chr18:77712072-77712108
  hypo

SEQ ID NO: 95352 - DNA, 31 bp, Homo sapiens; identical to SEQ ID NO: 31598
  chr18:77713636-77713667
  hypo

SEQ ID NO: 95353 - DNA, 19 bp, Homo sapiens
  chr18:77728888-77728907
  hypo
aaaaatgattcagaagcca

SEQ ID NO: 95354 - DNA, 43 bp, Homo sapiens
  chr18:77729481-77729524
  hypo
caggtcagaaagctggtgagccgtgaattcaccctgcatttta

SEQ ID NO: 95355 - DNA, 176 bp, Homo sapiens
  chr18:77753636-77753812
  hypo
cagtcctttcagctaccggatttgaccaactccaaaccctctagcttatgagtgtggaattttctaaagaaataagagcactttactcccctcagcctttcggggcattcttaggcaactgagaatcgcgtgagggtgtctgggaggaaagcaccttaagacgtgcaacagctctg

SEQ ID NO: 95356 - DNA, 18 bp, Homo sapiens
  chr18:77772122-77772140
  hypo
tagtgtggggctggtttc

SEQ ID NO: 95357 - DNA, 19 bp, Homo sapiens
  chr18:77773126-77773145
  hypo
ttttttttttttgagacgg

SEQ ID NO: 95358 - DNA, 136 bp, Homo sapiens; identical to SEQ ID NO: 55252
  chr18:77794467-77794603
  hypo

SEQ ID NO: 95359 - DNA, 94 bp, Homo sapiens
  chr18:77805634-77805728
  hypo
gttaccctcagatagacgtttgggagggttctcaggcgagtagatgtaggaagtgtgatgtgctgttgtgttgtggcgacgacactgtggacta

SEQ ID NO: 95360 - DNA, 529 bp, Homo sapiens
  chr18:77808925-77809454
  hypo
ggggatccaaccaggcgtctgctcagtgcctcctagaaagtggagtgtgggcacgtttgtaggggatcccaccaggcatcagctcagtgcctcctagaaagaggagtgtgggcacgtttcagagaaaactggcttaggcctccctgtttctggcgtggccttccctgggagcgagttagggacacggaagctcacccgcttctgaatgggtccactcctggggatttccgcggccttccctgggagcgggttagggacacggaagctcacccccttctgaatgggtccactcctggggatttccgcggccttccctgggagcgggttagggacatggaagctcaccctcttctgaatgggtccactcctggggatttccacggcctttcctgggagcaggttagggacatggaagctcacgcccttctgaatgggtccactcccggggatttccatggccttccctggatgatccactcctggggattttccgcagctctccagatgacgtgcacgcacactaaacacc

SEQ ID NO: 95361 - DNA, 31 bp, Homo sapiens
  chr18:77835956-77835987
  hypo
ctcccaccccttccacgcggtgtggcagacg

SEQ ID NO: 95362 - DNA, 30 bp, Homo sapiens
  chr18:77866335-77866365
  hypo
cgtggttactcccacgtgctctggggcacg

SEQ ID NO: 95363 - DNA, 32 bp, Homo sapiens; identical to SEQ ID NO: 55253
  chr18:77867027-77867059
  hypo

SEQ ID NO: 95364 - DNA, 39 bp, Homo sapiens
  chr18:77913922-77913961
  hypo
ctttaaacaagctgttcgaggggacgagggttcaccctc

SEQ ID NO: 95365 - DNA, 30 bp, Homo sapiens
  chr18:77921353-77921383
  hypo
ctccctctgagagccgcttgtcttcaagtc

SEQ ID NO: 95366 - DNA, 22 bp, Homo sapiens
  chr18:77931207-77931229
  hypo
ttggaaaggggcaaacgcggcc

SEQ ID NO: 95367 - DNA, 169 bp, Homo sapiens
  chr18:77939057-77939226
  hypo
ccacagacaagccctgcgtacactgaccgtagactggtgtgtgcaccaagcatgccagggaccccaggtcacacgcccctgggggataggagaggtggtgtctgtcccctggtccctcagccaagtcagccgatgtccccagctgggatgtctgcggaagctgtggtcc

SEQ ID NO: 95368 - DNA, 31 bp, Homo sapiens
  chr18:77939507-77939538
  hypo
catcctccctcatcagcgactgtgcccctgc

SEQ ID NO: 95369 - DNA, 194 bp, Homo sapiens
  chr18:77942204-77942398
  hypo
cttgtatgtgagcattcgcagcggcatcattcacagtggccaggaggtggaaacaaccccgatgtccatcaactgatgaaccaaccgatgaacacagggtgacctgtccatacagtggggtctcagccacagagggagcaaggccgtgaaacctgcagcgggagcaaggcggtgaaacccgcagagggagcaag

SEQ ID NO: 95370 - DNA, 673 bp, Homo sapiens
  chr18:77943588-77944261
  hypo
ccacacatgcaccctcacacacgcatatacactcagacatgctcgcacaccctcacacatgcatataccctgacatgctcgcacaccctcacacacgcatataccctgacatgctcgcacaccctcacacacgcatgcacccacacaggcaccctctcgcatatactgtcacatatgcttgcacaccctcacacacgcacccacacatgcatacaccctcacgcgggcttgcacaccctcacgcacgcatgcacccacacatgcaccctcacacacgcatataccctcagacatgctcgcacaccctcacacacgcatataccctgacatgctcgcacaccctcacacgcatgcacccacacaggcaccctcacactcgcatatacagtcacatatgcttgcacaccctcacacgcacccacacatgcgtataccctcacgcgggcttgcacaccctcacgcacgcatgcacccacacatgcaccctcacacacgcatataccctcacatatgcttgcacaccctcacgcatgcatgcatcctcacacacatgcacccacacatgcatacaccctcacaaggctcacacaccgtcatgcacacatgcaccctcacatgcttgcacaccctcacatgtgcatgcaccctcacacatgctcgcacacccacacat

SEQ ID NO: 95371 - DNA, 30 bp, Homo sapiens; identical to SEQ ID NO: 55254
  chr18:77983402-77983432
  hypo

SEQ ID NO: 95372 - DNA, 30 bp, Homo sapiens; identical to SEQ ID NO: 55255
  chr18:78004029-78004059
  hypo

SEQ ID NO: 95373 - DNA, 63 bp, Homo sapiens
  chr19:292199-292262
  hypo
cagaagagcacgggggcgccaggagctgggaaccccatgaaatggcgccggggtctgtgcccc

SEQ ID NO: 95374 - DNA, 168 bp, Homo sapiens
  chr19:327874-328042
  hypo
tcatgtctgggaggttcggggccacgtcaccaccctcactctcccggtctgaaatggggtctgacgcctcgtagccatagagcgcaagcagctcatcaaagggcatgtcgttgctctgagttggggaagggaacaaggccccatcaggagggacggctctgggggttc

SEQ ID NO: 95375 - DNA, 35 bp, Homo sapiens
  chr19:369327-369362
  hypo
gcctgagctcaatccccgcccggagaatgcaagac

SEQ ID NO: 95376 - DNA, 518 bp, Homo sapiens
  chr19:403366-403884
  hypo
aagacctgaggcagggcgagacaccacgcaggcgcagaatccctggatgacgcccacttggaagtggaggggggagggcatgggcagctgcagctcccagacaccagcacacacaaacgcacacacaagtgcacaccagcagcgacacaggcacacacaagcgcacacagggtcacacatgcatacacggctcacgtgcttacacgtgcacacgccagcacacaggcagctatactcgagtgcctgcaggcgctcacctggcactgtcacatacgcccaacagatgagcacggtaacggcacacgcagtcacactgcacacacatgcggaagcacatggcgacgtgtgtgcacctacctggcacgcacacgcacacacccgtgcagcctagcgatgagtggctggggctgaagaggctacaaggcgcccgtagccctgtcaacccgtcccaggccctgactggggctcaccaggccgcggtcaggaggccgggctacgctgaaccccaattcccaaaa

SEQ ID NO: 95377 - DNA, 30 bp, Homo sapiens
  chr19:407006-407036
  hypo
gccagcggacccgcccgccagcacccggtg

SEQ ID NO: 95378 - DNA, 652 bp, Homo sapiens
  chr19:407243-407895
  hypo
tcgttgaagacggggcggcggctgttcttcacgatggtgctgcgctgcttctgcagcttgcccggcaccaggcacaggcccacgcagcagttgatgctgcgggcgtcgcacaggcggtcgtagaggccctcggcggccagcaggtgcacccgcaggcgggcctggccggcctcgtactcggccagcagccgcacgctgccccgagggcccacgtggaccgtgtgctccccacgcgcctggcccgactcggggccaggttccgggggtgcccggcgggtcaggcggcgccggctcccggggctggcgtccggggtgctgtcgtccgcagacagggagccgtggcggcccacggagtgccggagctggctcaccttggcctggctgtcctgggcgaaacctttgagcagagacacggagcgggacagcagaggggacccgaagggggaggactcggccgaggaccctgtgtcgctctccccgccactgaagtagcggccggggctcatgagggccccgccagcctccctggggcccccatcacccccgttggccttggcagctgcccggcggcgcccggcccctggggagcccacctgggccagagccccgtgctcactgtggaacagagactccttgcgcctcgtgtgggggc

SEQ ID NO: 95379 - DNA, 591 bp, Homo sapiens
  chr19:416970-417561
  hypo
tccggggcgttagaccgaaccagccaggcgagagggggacccaagggccagggctccgaggcagcggctgcttctggatatattttctttaaaggcgaaatggttccgtctttggtatgaacaccctcactccaggcaaaggagggggtgggcaggggccccggcaggaggaggctctgcccagcccggggccagctggaggaaggaccatgccagaggctcatgcggaggaaggagaggcagcggtggttcggcctgaccaggatccaggaggagggctgagagccccaaggccatgacaggcaggagccggggctgagaacaggcaggagccagggctgagaacggtcacctgcgggcagaaagagaaggcgaggtcagggctgagacggtggccgcagacctgggctccggtgtgagccacatgctcttctgccttggcatcatctctgcaagtgccacacctcaggtccagcccagagctcctcaggtcgcatggctggggctccggtgcaggtgtcctgagtccttgctgtggacctagggcagtgccctaacctctctgctgtctcctcgcgtgcaagcaagaat

SEQ ID NO: 95380 - DNA, 538 bp, Homo sapiens; identical to SEQ ID NO: 31608
  chr19:418266-418804
  hypo

SEQ ID NO: 95381 - DNA, 653 bp, Homo sapiens
  chr19:424712-425365
  hypo
gagcttctcacagagcgggggccagcggcattcccaaccagactgggggttcagcagggaggccccgggagatggggtcctgtaggaggggctgggcctcacccattacactgctcggccgcattcgctagagagaatgggcctcccctgtcagactggccccttttaaggcagagtccaggacacccccatcagacaaggcctccgacaggagacagactgggcttccccgtcccacccgtcgacttgaaggatctcacggggagaagggagcctcccccatcagaccagggaatcccgtagggagtgggggtggggttgtgcctcccccatcagacaacacggccacacgcgatgacggccgccccccaggctgccacatacgcatgtcaaacagatcctttttggggctgtcctccggctcgggggcgtccagaccctgggtgttgacatacaggtgctcctcgtggtccggggggccccgggcgtccgcctgcacgtagccgtcccccggtggagctggggagtgtaaagaggggcagggggtcagctgggagccaggcgaggggctcgcagggagcaaggcggggtcccacgaggagctcccccggccaccacctgtgctgctggctgcagggcggatgctgctctgg

SEQ ID NO: 95382 - DNA, 38 bp, Homo sapiens; identical to SEQ ID NO: 31609
  chr19:434175-434213
  hypo

SEQ ID NO: 95383 - DNA, 30 bp, Homo sapiens
  chr19:436662-436692
  hypo
catgtggtggttggcgatgacctgtggcgg

SEQ ID NO: 95384 - DNA, 221 bp, Homo sapiens
  chr19:450885-451106
  hypo
ccacatcatatttcagcgtgtggatggccatgccgtggccatgtcatatttcagcgtgtggatggccataccatagccacgtcatatttcagtgtgtggatggccacgccatggctgtgccgtatttcagcgtgtggatggccacgccgtggccacatcatatttcagcgtgtggatggccacgccgtggccacgtcgtattttagcgtgtggatggccat

SEQ ID NO: 95385 - DNA, 31 bp, Homo sapiens; identical to SEQ ID NO: 11868
  chr19:452244-452275
  hypo

SEQ ID NO: 95386 - DNA, 450 bp, Homo sapiens; identical to SEQ ID NO: 31611
  chr19:453562-454012
  hypo

SEQ ID NO: 95387 - DNA, 30 bp, Homo sapiens
  chr19:455566-455596
  hypo
tctggggggttctgcgatgccggctgagtc

SEQ ID NO: 95388 - DNA, 30 bp, Homo sapiens
  chr19:458880-458910
  hypo
tgtactgcgcaggccgagcgcgcctgggga

SEQ ID NO: 95389 - DNA, 30 bp, Homo sapiens
  chr19:463899-463929
  hypo
ccatggtgctggcccgtttcgagtggcgga

SEQ ID NO: 95390 - DNA, 30 bp, Homo sapiens
  chr19:464345-464375
  hypo
cctggcgtcacctccggacctgagagagtg

SEQ ID NO: 95391 - DNA, 30 bp, Homo sapiens
  chr19:484682-484712
  hypo
caggaccgcacctggcgaggcggaggagcg

SEQ ID NO: 95392 - DNA, 190 bp, Homo sapiens
  chr19:485164-485354
  hypo
tatggagggtcattgccgtgctctaccacgtaacacacgtacacacacacacacaggtgcacgtttacaccacgtgggtgcgcacgatgaggcacacacaggcaggcgcgcacacacacgcgtgctcacataggaacacgaagaggcaggagccgggcgtgcccgagccccgtggcgccctgggcatccc

SEQ ID NO: 95393 - DNA, 117 bp, Homo sapiens
  chr19:487187-487304
  hypo
tcctgagcccactgtgaagttcgcggcgatctgtgagctggttggctcatgttggcagccacgatgggagtatttacaacacagggggcggcgtgcgctgcaagtgagggccttttc

SEQ ID NO: 95394 - DNA, 333 bp, Homo sapiens; identical to SEQ ID NO: 31612
  chr19:491284-491617
  hypo

SEQ ID NO: 95395 - DNA, 41 bp, Homo sapiens; identical to SEQ ID NO: 11875
  chr19:507105-507146
  hypo

SEQ ID NO: 95396 - DNA, 30 bp, Homo sapiens
  chr19:519594-519624
  hypo
cgcccctccacccccgcgggagcccctgcc

SEQ ID NO: 95397 - DNA, 218 bp, Homo sapiens
  chr19:529760-529978
  hypo
ctggaagtgaccgctcggcccagagctctttcttggatccctccctccctctccactcctgatgctgttttcctttccccagacaggtttgcctgctggtcctcttccggggaccagactcatgaagccggggccaggtgttggggcacctgcgggacagagtggccctggtcccagactggtttttgtttttggttttttttttttttgagacggag

SEQ ID NO: 95398 - DNA, 338 bp, Homo sapiens
  chr19:530217-530555
  hypo
atcacaggcgtgagccaccgtgcccggcctgtatgttgatgcagctgtgtgtacccagggcatagcaacaatgccactggcacagtccgagggcagggccacccgtcacgggcacgactcaggggaggctgggctgccccgtcctcaccacggccagttctcccgaccaagcttcacagcaaggagcatgtgggtgtctgggcagccactgagccaggtcagaagtcaggtggggtcacagtgatgcccggaatcagctggggtcaagactcaggtgggctgggcgcggtggctcatgcctataatcccagcatttgggaggccgacgcagacggatc

SEQ ID NO: 95399 - DNA, 30 bp, Homo sapiens
  chr19:535973-536003
  hypo
tgctgggagcctcacgtcctcatccttccg

SEQ ID NO: 95400 - DNA, 82 bp, Homo sapiens
  chr19:536229-536311
  hypo
tcttcttgtgcagacgggggacgtgtgtatctccatcctccacccgccggtggacgacccccagagcggggagctgccctca

SEQ ID NO: 95401 - DNA, 30 bp, Homo sapiens
  chr19:539140-539170
  hypo
ccgctgagctgtgtcgggcaggctgccgtg

SEQ ID NO: 95402 - DNA, 30 bp, Homo sapiens
  chr19:540963-540993
  hypo
ttcctttgctcctgcgctgaggaaggcttt

SEQ ID NO: 95403 - DNA, 345 bp, Homo sapiens
  chr19:541696-542041
  hypo
gttctgggttttcacgtgcttcagagaagaggggctgccccaccgccactcacgtcactcggggctcggtggacgggcccagggtgggagcggccggcccacctgtcccctcgggaggggagctgagcccgacttctaccggggtcccccagcttccggactggccgcaccccggaggagccacgggggcgctgctgggaacgtgggcggggggccgtttcctgacactaccagcctgggaggcccaggtgtagcggtccgaggggcccggtcctgcctgtcagctccaggtcctggagccacgtccagcacagagtggacggattcaccgtggccgactctttt

SEQ ID NO: 95404 - DNA, 388 bp, Homo sapiens
  chr19:542335-542723
  hypo
gaccaggtgcatctagtgggacgggagctgcctctgcaggcatccagcaaagcttcgtcgcgggtccacagccgcctgggcgttgatctcagcgtctcagggctcccaggaccacagatgcccccgatcagcactccggcggctccagctccgtccaggcacaccctcggggtggggagccgtggccctgggcacacagggcaggcacctcacgtcctggtgtcaggaagtccccagcatcgttttattacatgtcatggaggaaagctcggagctcccatgccctcccggggcaccgccttccaggaacctgcctgcgttccgcttctgggcacccggaaagtcgctcagtggctgattcagggtcgaggagctgtgaggatgaggt

SEQ ID NO: 95405 - DNA, 569 bp, Homo sapiens
  chr19:549360-549929
  hypo
caggtttagcaacctgcgcaagaccacacagccgggaagcggcagagctgtgacttctgctccagccaagacggtccggcgggggaagaaggagcagggttcacagggccagcgggagatggggaggggacacgcgtgggccgggagcagcccctgtgtctccttgagcctggggataacaggcctggccctgctcccctcggcgggccctgctcccctcgtcccctcagcaggtgcagaggctgagctgcggtgtgtcgtccctgcagggtgactcgggcgggcccctggtgtgtggcaaaggccgggtgttggccagagtcctgtccttcagctccagggtctgcactgacatcttcaagcctcccgtggccaccgctgtggcgccttacgtgtcctggatcaggaaggtcaccggccgatcggcctgatgccctggggtgatggggaccccctcgctgtctccacaggacccttcccctccaggggtgcagtggggtgggtgaggacgggtgggagggacagggagggaccaataaatcataatgaagaaacgctcagagcccgcc

SEQ ID NO: 95406 - DNA, 30 bp, Homo sapiens
  chr19:557261-557291
  hypo
caaagcgcagaggcacgatggtcgctgaca

SEQ ID NO: 95407 - DNA, 121 bp, Homo sapiens
  chr19:557933-558054
  hypo
gattacaggcgtgagccaccacgcctggccccttattgaacttgatggtttctccttcgtatctcagaagtcacaagctggaggatttaggtttgaagaatcacgatgccaaggtcaggcg

SEQ ID NO: 95408 - DNA, 38 bp, Homo sapiens
  chr19:561122-561160
  hypo
catgagccaccgtgcccggccttcaaatttctttaaca

SEQ ID NO: 95409 - DNA, 60 bp, Homo sapiens
  chr19:562308-562368
  hypo
gctgtggatatctttacggggtatatgaaccagacaggcatcaaacgaaactagctgggg

SEQ ID NO: 95410 - DNA, 31 bp, Homo sapiens; identical to SEQ ID NO: 31618
  chr19:569949-569980
  hypo

SEQ ID NO: 95411 - DNA, 30 bp, Homo sapiens
  chr19:578425-578455
  hypo
gctccctccctgagcgtccatactgcaagc

SEQ ID NO: 95412 - DNA, 30 bp, Homo sapiens
  chr19:579577-579607
  hypo
aggtcacagggcaccgctggctgaaggggg

SEQ ID NO: 95413 - DNA, 377 bp, Homo sapiens
  chr19:581311-581688
  hypo
taggccctcatgaacggctccgagagcaggttcttcgtgagttcctcgcagggccggtcagagctacacattgagaacctgaacatggaggccgaccccggccagtaccggtgcaacggcaccagctccaagggctccgaccaggccatcatcacgctccgcgtgcgcagccacctggccgccctctggcccttcctgggcatcgtggctgaggtgctggtgctggtcaccatcatcttcatctacgagaagcgccggaagcccgaggacgtcctggatggtgagccgtctgccctcctgcccacatgccctgctctcggggtggcccagggccactcctggtccgtccctgccagccccaccgctgacccagagct

SEQ ID NO: 95414 - DNA, 37 bp, Homo sapiens; identical to SEQ ID NO: 31620
  chr19:582136-582173
  hypo

SEQ ID NO: 95415 - DNA, 127 bp, Homo sapiens
  chr19:585309-585436
  hypo
aggtggatgtccaccccgtcggtgggtgcccggcgcggaggggtgcggaggtggatgtccgccccgtcggtgggtgcccggcgcggaggggtgcggaggtggatgtccgccccgtcggtgggtgccc

SEQ ID NO: 95416 - DNA, 31 bp, Homo sapiens
  chr19:599191-599222
  hypo
tctcttccttttggaccgtttcctcgggatc

SEQ ID NO: 95417 - DNA, 612 bp, Homo sapiens; identical to SEQ ID NO: 55271
  chr19:603407-604019
  hypo

SEQ ID NO: 95418 - DNA, 547 bp, Homo sapiens
  chr19:617540-618087
  hypo
caggtagttggggtcagggagcgccttactcagagcagaaccgcttgaccaggaatctggacaggtcctgcaggatgggctcgctgtgcaagcggacaaactgctcccggcacacctgggcaggagtcagaggatccccaggggtgatcaggcaggctctgggcaccacccctacccaacgccccagtgtgggggccccacccatgggtggactgaggctcagactacgggggcacctggttcatgacggagacatcagctgcgtgagtccagtaacagtcgtgcacagagacgaaggtcaggcccttcctgtggcagagcggaggactcctgaagggaggggagctcacagggccacccagtgaccagcatcctggccctgcgctcagccccctccacttgaggtccagggaagcccaccctcctgcaggcctcgccccacccctcgccccgcccctccccaaacatcctgggttaggtatcagtacagggggaggaaatgttcccagaagcctcctcgccccacccctgccgccccccacgctgc

SEQ ID NO: 95419 - DNA, 555 bp, Homo sapiens; identical to SEQ ID NO: 31623
  chr19:618307-618862
  hypo

SEQ ID NO: 95420 - DNA, 621 bp, Homo sapiens
  chr19:619066-619687
  hypo
gagcccatgtgggagatgaggcgggcactctcggtcagccagtgctgtgggacacaggccgtctcagggcagggggctcaggccggggatcccgtccacttgcttagggagtcctggccgagcggggacaggacaggacgtacctggatggcccgggtccccgagaacatctcctgtagactcttgaagacctggcgtacgagatagtgagaggcctcccacacgaactcctgcagagggcgggcagcaggtgcaggtcctcaggggctggcccgttcacgccctactcccccctatttcagagccactgaggcccaaggcctagggcctagcaggggggcaggggaatggggcctggcgcccacgcagtcagcaagaaacgcccaagccctaacaggcagccagtggtctgggggagcagccagggctcctgctgggaggctgggtcgggggcacacccgtctgagttttaaatggcagtgaaaccaacgtgttcgcagcgcgacatgcctggcgcacctggggaaagtcgctcagctcccggaggcgcttctcaatctgcaggcgcccgccatagcgcgtgaccccgtacaccaccgtcatcaccgtctgcttcaccac

SEQ ID NO: 95421 - DNA, 64 bp, Homo sapiens; identical to SEQ ID NO: 31625
  chr19:623405-623469
  hypo

SEQ ID NO: 95422 - DNA, 276 bp, Homo sapiens
  chr19:623967-624243
  hypo
aaaataacaactaaagcctagcgctttgagaatcaaagacgcacgtccacataaaagcttgtacacaaacgttcacagctgcatgactcgcagtcgataagtagaaacagcccaacgtcccataaacggacgaacagacgggcacggcgcggccatccacgcaccggagcatgactcagccctgacccaggtcgcctcccggaggcaccatgaggacgtcacgctcagtgggagatgccaaacacaaaaggtctcgcagtgtgtggtcccatttct

SEQ ID NO: 95423 - DNA, 31 bp, Homo sapiens
  chr19:634330-634361
  hypo
gcctgccctggtctccgcgtgatcctgccta

SEQ ID NO: 95424 - DNA, 30 bp, Homo sapiens; identical to SEQ ID NO: 31626
  chr19:638573-638603
  hypo

SEQ ID NO: 95425 - DNA, 510 bp, Homo sapiens; identical to SEQ ID NO: 55272
  chr19:639659-640169
  hypo

SEQ ID NO: 95426 - DNA, 323 bp, Homo sapiens
  chr19:640784-641107
  hypo
ggagtcggtgtccccgccgggcggggggcactgggaagggggcccgggcccgctggctgccgcctgaatcaccaccatcagggcaggtaatcaccccctgtccttcccaccgctttcatctgggcgccaaggccctcattaggccgcacgtgacgagggcggacaggggactggctgggccggtccatccatggcgggcatggccaggcggggtggcctcgggccggggcagaggcctggctccgctgcctgacctggaacagtctctgcctctctccaagcctcggtttccccagctggacggtgatgggggtgagggctag

SEQ ID NO: 95427 - DNA, 298 bp, Homo sapiens
  chr19:647140-647438
  hypo
gccagctgtgcccgagctggctgcaccccgggccaggcatccagcaaccttgagcagtggggtccggcttttcagaaggggccaggaacccgcgtggctgaggtgtgaccgaagcgtggggcagaggcgctgggccctggcgctttaacgctggtgtttctggttttaaatttcacgacccagtgacactgccaccctgctacctcgccagcagccctcctgggcttaacttcgggagagcagttttgctagccggccctgggtgccaagccctgcaggaggcgcagacccctggaga

SEQ ID NO: 95428 - DNA, 53 bp, Homo sapiens; identical to SEQ ID NO: 31629
  chr19:647727-647780
  hypo

SEQ ID NO: 95429 - DNA, 30 bp, Homo sapiens
  chr19:648374-648404
  hypo
ctccagccagggcacgatgcagccgtcgtg

SEQ ID NO: 95430 - DNA, 30 bp, Homo sapiens; identical to SEQ ID NO: 31630
  chr19:649024-649054
  hypo

SEQ ID NO: 95431 - DNA, 85 bp, Homo sapiens; identical to SEQ ID NO: 31631
  chr19:651270-651355
  hypo

SEQ ID NO: 95432 - DNA, 30 bp, Homo sapiens
  chr19:652001-652031
  hypo
ggcagagcctgccccgctggtgtgagatgc

SEQ ID NO: 95433 - DNA, 132 bp, Homo sapiens; identical to SEQ ID NO: 55277
  chr19:680399-680531
  hypo

SEQ ID NO: 95434 - DNA, 27 bp, Homo sapiens
  chr19:680552-680579
  hypo
cgaggctgctgccgcagtaggcggggg

SEQ ID NO: 95435 - DNA, 30 bp, Homo sapiens; identical to SEQ ID NO: 31632
  chr19:727133-727163
  hypo

SEQ ID NO: 95436 - DNA, 30 bp, Homo sapiens; identical to SEQ ID NO: 31633
  chr19:731145-731175
  hypo

SEQ ID NO: 95437 - DNA, 667 bp, Homo sapiens
  chr19:736125-736792
  hypo
gaccaagtctcggtccggggggccgggtggggcgggggcgacaccgacctgctctccgcagcgtctgacggggccgtggttatgggggtggcagctggaccgaggccgaggctccgagcctggggtgggggccccctctgctttgttgccctggtcccacgccggcccacgcttccccgagaagacgggccccacgcatggcggctctaaccgacgcgacctcacggctttcattccaccctaatctcacggctccctcctggggcccgctgggggtggcgctcacgcctgaacatgctcgctgcaaatcttacctgctccagtcctcgggcagtaggactggctgccccgggagaaagtgggtgccccgtccctggaggcaaccaagccaggtccccagcaccgctgcgcttccgagaagcaggggaaggtgggggttgacgctgagtgccacacggtgctcaagtcaggctcgaacccctggtctgccgccttgaatttctccgcctgccagaggggtgggacctcagtacgccatcctggggcccggcacaggacaggagcccaataatgagaaatcgtcgcagtgggcaaaaccactgctatgtgagtgagctggaacagcacagaaagaaggcagagggccgggcgtggtggctcacacctg

SEQ ID NO: 95438 - DNA, 38 bp, Homo sapiens; identical to SEQ ID NO: 31635
  chr19:737031-737069
  hypo

SEQ ID NO: 95439 - DNA, 151 bp, Homo sapiens
  chr19:739214-739365
  hypo
attctgagtctaaatagatgacggcgtgtccaaccgttggctggaaggaggcgtcaagtcctgggagcttggatggtcggggcgggggctgtgggtctgcagactgagccccagtctccgccgtgaccccgggcaaggcaggatctctctg

SEQ ID NO: 95440 - DNA, 30 bp, Homo sapiens
  chr19:746286-746316
  hypo
gtccatgctgtggacggcaccgccgagaac

SEQ ID NO: 95441 - DNA, 278 bp, Homo sapiens
  chr19:746554-746832
  hypo
tcatgggttaccagaacgtggaggatgaggccgagaccaagaaggtgctgggccttcaagataccatcacggcggagctggtggtcatcgaagacgcggctgagcccaaggagcctgcaccacccaacggcagtgctgccgagcctcccacggaggccgcctccagggaagagaatcaggcggggcccgaggccaccaccagcgacccccaggacctcgacatgaagaagcaccgttgtaaatgctgctccatcatgtgagccggcccccgagacccc

SEQ ID NO: 95442 - DNA, 235 bp, Homo sapiens; identical to SEQ ID NO: 31636
  chr19:748254-748489
  hypo

SEQ ID NO: 95443 - DNA, 270 bp, Homo sapiens
  chr19:752075-752345
  hypo
ttcagacacttgctctgtcatcgctgtgtgacctcagatgagcaggttctcctctctgggtcccagctccctctctcgaaaaccggagtcgaaaacggttccaaggtgttgcaggaagagtctcaggacgccgaggtccttagccaccgccgggccttgcaggggccatcttccgtcctggggctcttcccccgagggcagcgccgctgcccaagaatgccggccatgagagccgccgtggatccaggggtttttttggccgacacagtg

SEQ ID NO: 95444 - DNA, 95 bp, Homo sapiens; identical to SEQ ID NO: 31638
  chr19:758090-758185
  hypo

SEQ ID NO: 95445 - DNA, 30 bp, Homo sapiens
  chr19:761750-761780
  hypo
ccaggtgtggggatcgtattgggtgtcttc

SEQ ID NO: 95446 - DNA, 57 bp, Homo sapiens
  chr19:762947-763004
  hypo
aggcatgagccactatcgcctgacccctctttgagctgaatccgaaatgccaaatac

SEQ ID NO: 95447 - DNA, 30 bp, Homo sapiens
  chr19:763639-763669
  hypo
actgccaagaccatcgccaagcccccaccc

SEQ ID NO: 95448 - DNA, 31 bp, Homo sapiens
  chr19:784935-784966
  hypo
ccaggaggaggaaggacggtctgcaagtgtt

SEQ ID NO: 95449 - DNA, 30 bp, Homo sapiens
  chr19:804893-804923
  hypo
cctgctgcagtatgcggaccccgtgagcgc

SEQ ID NO: 95450 - DNA, 30 bp, Homo sapiens
  chr19:805223-805253
  hypo
tggtctattagggccgctcagtccggagcc

SEQ ID NO: 95451 - DNA, 63 bp, Homo sapiens
  chr19:807307-807370
  hypo
ttggctgaggtggccgcgagcggagctgcacgcgcgctcctggggggcgtggttgggatcggc

SEQ ID NO: 95452 - DNA, 30 bp, Homo sapiens
  chr19:808101-808131
  hypo
agagttagacctgtcggtggcatatgccac

SEQ ID NO: 95453 - DNA, 30 bp, Homo sapiens; identical to SEQ ID NO: 31639
  chr19:811985-812015
  hypo

SEQ ID NO: 95454 - DNA, 378 bp, Homo sapiens; identical to SEQ ID NO: 55282
  chr19:813482-813860
  hypo

SEQ ID NO: 95455 - DNA, 474 bp, Homo sapiens; identical to SEQ ID NO: 55283
  chr19:814390-814864
  hypo

SEQ ID NO: 95456 - DNA, 30 bp, Homo sapiens
  chr19:815513-815543
  hypo
ggtggcagtggctgcggtgcccacaggctg

SEQ ID NO: 95457 - DNA, 30 bp, Homo sapiens
  chr19:868205-868235
  hypo
agctctgctggtcacgcaggcgtccggccc

SEQ ID NO: 95458 - DNA, 385 bp, Homo sapiens
  chr19:869009-869394
  hypo
catctgtccacaggcgggggtggagggaatggccggcctcacaccatctgccaggtgggcccagatgtctgtgaacagtgaggtgggaggtgcgggaccacctgagacaggcccagtaaagggggcgggaccccccacacggaggagggttggtctcccaggtgcctggggagcttgaggcttagagacccagtaaaggggacggggcccacacagggacgagggtcggtccgccacgtgcccggggagcctgaggtgcagggaaggtgcttgtgacgctcccatttgaggctggacagaagcaggtacatggggacttccacaccacctctgcccagacacccggcctggaggtgccgggacctctgaacgacaagattctggt

SEQ ID NO: 95459 - DNA, 35 bp, Homo sapiens
  chr19:869676-869711
  hypo
tggaggtcctggagccgagccggggccttccccgg

SEQ ID NO: 95460 - DNA, 30 bp, Homo sapiens
  chr19:870164-870194
  hypo
cagagggatctacggcgaggcctgacatcc

SEQ ID NO: 95461 - DNA, 181 bp, Homo sapiens; identical to SEQ ID NO: 31643
  chr19:874507-874688
  hypo

SEQ ID NO: 95462 - DNA, 121 bp, Homo sapiens; identical to SEQ ID NO: 31644
  chr19:874807-874928
  hypo

SEQ ID NO: 95463 - DNA, 30 bp, Homo sapiens
  chr19:875264-875294
  hypo
agatctcggtcagccggtcgccggggctct

SEQ ID NO: 95464 - DNA, 93 bp, Homo sapiens
  chr19:882614-882707
  hypo
cctgctggagcatgtgcggccagtggacaggccacgccacctcggctgctaaccgcagacacgtgggaaccaggagagcgcagctgaggcagc

SEQ ID NO: 95465 - DNA, 1241 bp, Homo sapiens
  chr19:883576-884817
  hypo
ggctgtggcatgtgtgtgagacgtggctctcgggcgggtaacagctgggccagcaggtgaggacggctgcaggagacgaggaggagtgtcggagcccaggactgcccagtggcttggctgtgggcagatggtagacacagacgtgcccagcgggggcaccgggcagtgaaggtgcaggtctgtgcagccacacggggtggcgccaggtgctgctgcaggagccagcgcagcccaaactgcctggtgactcaccacgaggcccaggggaaggaatgaggcccaacaaggccctggggaccgggcgaaggaacgagccctgggagaaggaatggcagcagccctcttcacctgcctggtgactcactacaagccctgggggaaggaatggcagtggccctcttcacctttactgcctctgcggccacaatgggcagttgacataaccacctgcaggccccgggagccatcggggcctcttgacacgtgctcattagtggcttctgaggagcgcctgccccacctgccccacgtgcccccacgtctggccactccagggtccattagcgctaatcggcaaatgcctgtgctctcatctaccgggaaaacatctcccttctccagagcggaggccagcctaaaaaccaggcccgcagcctccgaggctctgaaaaccaagcggctgttctggtccccggtcatagcaggcgggcgtccctgcttcgctccagccccaggattttgtgccggaggtggggatgacgggcttggctccgtgggtgcggggggcccatcgggcggatagagatgggaatgggggccccagaagaggctgctggagaggtggggtggggtggggggcgtgttctcagcagcctcagctgacccgctgagccttggcttcctctccctgaaccaggttccggaggattccgtgcaccgcccctgcccggtctggcctgtcccctgctgcccgacggccccacccacagacccacgctccacagccgcccacacgcctgcagcccctcacggtgtccccgctggctgagcaacgacacctctcagcctcggcctcgcacagaatggtggcagccgccgcagcgggcgtggaaggatggaggagtctatacgcctaacacactcagaatgctggcaggcgcgcggtcacacccgagatcctagcactactggagatcgaggcgagacgatcgcttagggccggggttcaggaccaccctggg

SEQ ID NO: 95466 - DNA, 70 bp, Homo sapiens
  chr19:885042-885112
  hypo
actgctgtggtggccacgccaccaccggagcctgagctgcgggaccctggggccacgcactgctgggcct

SEQ ID NO: 95467 - DNA, 905 bp, Homo sapiens
  chr19:885406-886311
  hypo
cctgcgggtgggattcggttcgggacactgagacgggagagcacgttggggggggtccgggggccccagtgtcctcacagggtcctcaggagagaatgtgggaggttgagattcagagacaggaagaggctgcgctgtggccacgaagcgggaggaaggcgccccgaaccgagggattgggcgcctccagatgctgggaaaggcagaaaatgggttctcccctggagcccccgggagggaccggccctgcccacaccacggtttagcccgtggaggcccgcgcgggtctccacccccaggaccctgagaagcagtgcttcattccaagcctgccagcccacgtgatggcctgcgcccgttcacctgctccgacatgtcccgggccaggaacttgaggtgggtgatggcgggaaacttgtccttgcggttgaggtcggtggtgcagcgcatgaacagggagggcaggatctccgtgtcgatacggcacttctcgctcaccacgctcacgcacaccttgtagaactgcacgggcgacgcgctgctgccgtccgccgtggccaccacgatgttgccgccgccggtgaaggcgatgtcggccagggccacgcggccgcgcagccggcacaggctctcggtggacgtcagcacctgcccgctgggcttcagcagggacacggtgaccaggccgctgaccgtcaccgcgatccagccctccatgggcttgccgccgaacagcgtgagcgacggtgagaacttgactcgggagaacttctccccgaagctggaggcgcccgactgtggagaagggagggagggaggaggggccgctcaggctcatgggggctgccccatgacccccagaaacacgcgcacagaagaaccacgcagaagccaggagtgtgtgc

SEQ ID NO: 95468 - DNA, 31 bp, Homo sapiens
  chr19:891515-891546
  hypo
gacactagctctctcccgaaggaagagcccg

SEQ ID NO: 95469 - DNA, 30 bp, Homo sapiens
  chr19:897608-897638
  hypo
acctgcaccaccctcgcttcttcccaggga

SEQ ID NO: 95470 - DNA, 148 bp, Homo sapiens; identical to SEQ ID NO: 31647
  chr19:898928-899076
  hypo

SEQ ID NO: 95471 - DNA, 533 bp, Homo sapiens
  chr19:899626-900159
  hypo
ggcctggggggacacggagaagaaccgaagcagccgctcctcccaggtctccagcgtttcctggggagagcggcccggtggtcagggaactgcgggacctgtgggtggggggccagggaggtccagggcccccaggagcccacagcgctgggctcaaacatgacctctgacccaccacgtgaggctgcttaagtgtctctgaggccaccatgccacctcctgcctgtgccttccgtggaggaaactcctacacaccctgcagtgcccgccttcgttgcccccgccctcctactcagggccctggtgccgctgtctgtatcctgccctgtttcccctgacacgacctgcaccgggtgagaacctgtgcctgggaaacgggccttcaaaaaagaccaggcaggtagaaaagggaggcccggcaatcccccactcaccatggggatgcggctgcgcttgaggacggctcgcagacgccggctgatgcgctggaagcactcgcggggtgtataggcggggtcctctgcaggagtggg

SEQ ID NO: 95472 - DNA, 403 bp, Homo sapiens
  chr19:900851-901254
  hypo
ccagggcccctcctccgcgccttgctcctgccctcatcctccaggtagcgaagaacccgctcctgctcctccccggagcggttcatgaaatcgttccagacctggaagagaggcagggaggcaggcttgccatgaaacactggggctgcgctgacatccccgggcaaatgggcacggtaaggccgccaagcacgtggacgcgctcctgcggtcacctctgtccactgaggggccgctgcttgtgtcgggccctgagctgagcgcagggaagcggggaaccggggtgggcccagctgtctcggggtgggggggattgaggtgaaacactcctgcaatcgttggagggttcccaaacgtgttgggcaggtgaatccaggagctcgaaggttccaggggtggggtg

SEQ ID NO: 95473 - DNA, 30 bp, Homo sapiens; identical to SEQ ID NO: 31650
  chr19:901790-901820
  hypo

SEQ ID NO: 95474 - DNA, 507 bp, Homo sapiens; identical to SEQ ID NO: 31651
  chr19:932111-932618
  hypo

SEQ ID NO: 95475 - DNA, 588 bp, Homo sapiens
  chr19:938278-938866
  hypo
agctcagaggtgtaggaatgacggcactagccggtatctgttgcttcactgcgtgaagaaagtgactgagtgttttagatgggtcgtctcccagatcctcactggatcccaaggagctgccgttgaacctgttgtgcagacgagaaactgaggcatggggtgatcacatgacttgtgcacagtcgcccgggggacgtgtcagagctggaatttgacccccgggatgcacctgccagagaggacccagcggtgtgtggatggatggcccagggagctgctggtgggacggttttggggaagctcagctgcccctccgtttttctttttgtctggaatgaaagtggttagaccaggccagacctcagtgctgtcctcatatccaggcctccgggcctgacagctgggcgtgtgtgggcactggggcagggacggccaccagcagcctctcaggctcaaggccagacacacctcgctgggcccagccccagagaccgctgggtcctcaccacggtgcctgccaggcagctctcgggagtgaagcgagaccccagcaagaaacgggcatccggtttttggtctttttttggt

SEQ ID NO: 95476 - DNA, 276 bp, Homo sapiens
  chr19:939404-939680
  hypo
ccgcgcccggcctctcgatacacttttggttccagaagtaacacttgacactcttcttgcagagaggaagaaaatggaacgtttacagggagccccgagtccctcccttgacctctagggcatgagccgcatgttctccaggcctttctctgcccactcacacccaggaatgtgacctgggaggtatctaacgtgtgatcttccgggcaggtcgggaggttcctcccgccgctgccttcgaggagctgtttatcttgggtgcgttcgcgtcgtaat

SEQ ID NO: 95477 - DNA, 778 bp, Homo sapiens; identical to SEQ ID NO: 11884
  chr19:941803-942581
  hypo

SEQ ID NO: 95478 - DNA, 30 bp, Homo sapiens; identical to SEQ ID NO: 11885
  chr19:942806-942836
  hypo

SEQ ID NO: 95479 - DNA, 96 bp, Homo sapiens; identical to SEQ ID NO: 31655
  chr19:944545-944641
  hypo

SEQ ID NO: 95480 - DNA, 28 bp, Homo sapiens
  chr19:944820-944848
  hypo
ttgctgcgttgcccaggctgaactcctg

SEQ ID NO: 95481 - DNA, 30 bp, Homo sapiens
  chr19:945409-945439
  hypo
ccgtctgctccctagcggggaggtgtccag

SEQ ID NO: 95482 - DNA, 129 bp, Homo sapiens
  chr19:945744-945873
  hypo
acggcgtcgacatggccggggcaggcgtgttctggccccttgcactgcccggctcctgctgctggtgctgggctgcgtttctgttcagagaacctgggctgggagtgatgggaccgcagtctcccacca

SEQ ID NO: 95483 - DNA, 1014 bp, Homo sapiens
  chr19:955713-956727
  hypo
gggtccaggcagggtagaccccgtaataccgggtcagaatctcagaggagaggaccttccgctcgccctggaagggcccaaggtgtgctggcctctacgtgcggttcttagccggggggctgcgtaacgaaggacctcaaaccgcgggcgtaaaacaaacgaaacctgttctccctccgtcctggagcccagagtccaaaatcgaggcgtccgcagggctgcgctccctccaggggctgcaggaggagccttccgcctctcccagctcctgggggctccaggagtcccttgacatgtggccggcctctgtctctgtgcgaccgtctccagtgcccaccggccttcactgtgactttttctcaatttgatcacgtctgcaaaggccctttttccaaataacgtctcgttctgaggttctgggccgatgtgaatttgggtgggggatggcgttcaccccaggacagccccagcggtgaagtcctccccattccagtacctgctgcctcaggcgtttccctggcaagctcgtcctgtccccctctccgccctgtccccctctccgccctgcccggctcacttttgcagctgagaaaatcaaggttcaagtaacgagcatttattaggcaactgctgtgtgctcggctgattccagactctgggaacaaaacagactaaaccccagatacactcctagatccgtgactcggtgatggacggggtctcggaggaagaacgtggaggggagggggcggcagccgggccggggtcagaggacgaggccgggcgtgtggccatgtgtgcgtgcctgtgctcatgggacccaccggcccggccagccgggtctacctgagggccccacacccctcaggcagctgaaggggaaagggcctccccggccaccataaatcagcgcaggaatgcaggctggccagtctggcgctggccgggttggggcggagacaaagaccaggcagctggacctcgggcagcctcgaccacccagggcagaggtca

SEQ ID NO: 95484 - DNA, 36 bp, Homo sapiens
  chr19:957165-957201
  hypo
tttcccctctggaagacgttccggggcctggtgatc

SEQ ID NO: 95485 - DNA, 86 bp, Homo sapiens
  chr19:959192-959278
  hypo
tggagcccccagaagccgtgagaggcaggaaggttcctcccttggagacttcggagggaacgcaaccctgcagacatcttttgttt

SEQ ID NO: 95486 - DNA, 262 bp, Homo sapiens
  chr19:959581-959843
  hypo
tggacttctgggctccgggaccgcgggagaatagatttctgttgctttaagctgcaacgtgtggctgtaagggagttaaggatcgatttgagatgaggtggccctaaaaccagcaggctggtgtcctgagaagaggagagagagacggggagacggtcttgtggagacggaggcagagactggagcgctgcggccacaagccaggacgcaccttgatctggggttcccgggcccctggaccgggagaggacactgtcttgtc

SEQ ID NO: 95487 - DNA, 163 bp, Homo sapiens
  chr19:962842-963005
  hypo
ctgaggcctaaactggtgtcccgagtggggccgggcggaggctctgggcaggtttccgggccgatcctgcagctgaaacccggcgcggctcctctcgcccaggctgtaaagtgggtttcaggtgggatcgggtctgaggcccgtcttcctccaacctgggatc

SEQ ID NO: 95488 - DNA, 273 bp, Homo sapiens
  chr19:966653-966926
  hypo
agcagctgtgcaagcagcagccgcccaagcagctgtggccgcacaggcagctgccctggaacagctgcgggagaagctggagtctgcagagcctccggagaagaagatggccctggtggccgatgagcagcaacggctgatgcaacgtgcactccagcagaacttcctggccatggcggcccagctgcccatgagcattcggatcaacagccaaggtactgccctcgtgcccagacccgctgtgcttcctgcgtgtgtcacacagtgagggcc

SEQ ID NO: 95489 - DNA, 72 bp, Homo sapiens
  chr19:968720-968792
  hypo
acatattcagtgtgacgttggatggttcacattcctagttttttgttttaatgagacggagtcttgcacaga

SEQ ID NO: 95490 - DNA, 30 bp, Homo sapiens
  chr19:991146-991176
  hypo
tggggacgtgggaacggggcgggggctccc

SEQ ID NO: 95491 - DNA, 82 bp, Homo sapiens; identical to SEQ ID NO: 31658
  chr19:994441-994523
  hypo

SEQ ID NO: 95492 - DNA, 31 bp, Homo sapiens; identical to SEQ ID NO: 31659
  chr19:995015-995046
  hypo

SEQ ID NO: 95493 - DNA, 558 bp, Homo sapiens
  chr19:1003224-1003782
  hypo
ggcctggccctgtgccgcactcaggaccccggcggcctggtggccctctggacaagccgggctggccggcccccacagctggtcctggacctaagccggcgggacacgggagatgcaggactgcgggcacgcctggccccgatggcggcgccagtggggggtgaagcaccggtacccgcggcggtcctcctcggctgtgacatcgcccgtgcccgtcgggtgctggaggccgtacctcccggcccccactggctgttggggacaccactgccgcccaaggccctgcccaccgcggggctgccaccagggctgctggcgctgggcgaggtggcacgacccccgctggaggccgccatccatgacattgtgcaactggtggcccgggcgctgggcagtgcggcccaggtgcagccgaagcgagccctcctccccgccccggtcaactgcggggacctgcagccggccgggcccgagtccccggggcgcttcttggcacggtgagtggggaccctgcttcccttaggagggtgtccaggccactgagtctgcactgctcat

SEQ ID NO: 95494 - DNA, 268 bp, Homo sapiens
  chr19:1004378-1004646
  hypo
tggggacaccaggagcgtccacgtttgtcctcatgatacggacaagagcgaccagtgggaatcgggcacgtgctgggcaggggtgagaggatggaggggtgtgaacttcgacacctgacaccccccccgccctgcccctaggttcctggccaacacgtccttccagggccgcacgggccccgtgtgggtgacaggcagctcccaggtacacatgtctcggcactttaaggtgtggagccttcgccgggacccacggggcgccccggcc

SEQ ID NO: 95495 - DNA, 856 bp, Homo sapiens
  chr19:1004864-1005720
  hypo
cctggacgcactgttcgccgcgctggccaacggctcagcgccccgtgccctgcgcaagtgctgctacggctactgcattgacctgctggagcggctggcggaggacacgcccttcgacttcgagctgtacctcgtgggtgacggcaagtacggcgccctgcgggacggccgctggaccggcctggtcggggacctgctggccggccgggcccacatggcggtcaccagcttcagtatcaactccgcccgctcacaggtggtggacttcaccagccccttcttctccaccagcctgggcatcatggtgcgggcacgggacacggcctcacccatcggtgcctttatgtggcccctgcactggtccacgtggctgggcgtctttgcggccctgcacctcaccgcgctcttcctcaccgtgtacgagtggcgtagcccctacggcctcacgccacgtggccgcaaccgcagcaccgtcttctcctactcctcagccctcaacctgtgctacgccatcctcttcagacgcaccgtgtccagcaagacgcccaagtgccccacgggccgcctgctcatgaacctctgggccatcttctgcctgctggtgctgtccagctacacggccaacctggctgccgtcatggtcggggacaagaccttcgaggagctgtcggggatccacgaccccaaggtgggcggcctcggggggctgcgggtggccttggggggctagcggtggccccgggctgggctgtgtggggcaggggtggtcagctggacgtggaggacgtccactaggccaactctggtcccaagagacatttattcaattaatttatttatttaaagaaaaatagcc

SEQ ID NO: 95496 - DNA, 697 bp, Homo sapiens
  chr19:1007604-1008301
  hypo
gctgacggggtcccccgcgcagctgcaccacccggcgcagggcttccgcttcggcaccgtgtgggagagcagcgccgaggcgtacatcaagaagagcttccccgacatgcacgcacacatgcggcgccacagcgcgcccaccacgccccgcggcgtcgccatgctcacgtgagcccgggcgcggggtgaggcgggggcggggcgtggggtgggcggggcgatggctgacccccgcccccggccccagcaggagcgacccccccaagctcaacgccttcatcatggacaagtcgctcctggactacgaggtctccatcgacgccgactgcaaactgctgaccgtgggaaagcccttcgccattgagggtgagaggcacctgggcgaggcggggcgccggggtctctggggacctcctgggggcagtggggagccacggagggttcgaggtgggaaggggcgaaatcccacgtgtgcgggcagagttcccctggggctgtcccacctggccccaccgcctggccccgcgcccccaggctatgggatcggactgccccagaactcgccgctcacctccaacctgtccgagttcatcagccgctacaagtcctccggcttcatcgacctgctccacgacaagtggtacaagatggtgccttgcggcaagcgggtctttgcggttacagaggtggggcaggg

SEQ ID NO: 95497 - DNA, 30 bp, Homo sapiens; identical to SEQ ID NO: 31662
  chr19:1009934-1009964
  hypo

SEQ ID NO: 95498 - DNA, 174 bp, Homo sapiens
  chr19:1010991-1011165
  hypo
ctgcccgcttgggccgaccccacagggcatcctccccggctgcagcctctcctgcctggaaaggcacggctggcctgccccctgcttgccgcccaggcctcacctggatgaagagccaggaggtgaccagggccaggctgctatactgcccattgaagcggtagtgataggcat

SEQ ID NO: 95499 - DNA, 30 bp, Homo sapiens
  chr19:1012083-1012113
  hypo
ggccaggcccttcacgctggacatgaggat

SEQ ID NO: 95500 - DNA, 104 bp, Homo sapiens
  chr19:1030121-1030225
  hypo
gctggatagggacactcgaggtccccactggtgcacacccactgcccaggagcacacagcccattccccacggcggtgtctcagagcaccgaaggccaagaaag

SEQ ID NO: 95501 - DNA, 267 bp, Homo sapiens
  chr19:1032229-1032496
  hypo
tctcaaaaaaaaaaaaaaaaagagtggaaactgaggcccagagagaggccgtgagtttgcccaggaaggcgtgagcttggctgagatcagcatcgggtcttcacggttcctcgctgctcacagaggtttctgtttcccccgccccatgttgtgccctccagactcatgaacaagctacagccgggctccgtccccaagatcaaccgctccatgcagaactggcaccaggtgaggggctggtggagcggagcagggatggtgctgggg

SEQ ID NO: 95502 - DNA, 31 bp, Homo sapiens
  chr19:1033553-1033584
  hypo
aaggagaagaatcagacgaatgttgagtgtc

SEQ ID NO: 95503 - DNA, 36 bp, Homo sapiens
  chr19:1035213-1035249
  hypo
accgggagcgtgggtgggacacggtgtctggtgtag

SEQ ID NO: 95504 - DNA, 30 bp, Homo sapiens
  chr19:1046310-1046340
  hypo
gtggagcgtgcagccgtccgcgtgctcagc

SEQ ID NO: 95505 - DNA, 326 bp, Homo sapiens
  chr19:1047589-1047915
  hypo
cttctgctgctggacgcggcgctctacggcctcgccacctggtacctggaagctgtgtgcccaggtgggccgtagggggcggggctccgggccgggtcgcacctgctttgcgggaggctgagctaggggtgtggcctccaggccgtttgggggtggggggtggcttattcccttggagagaaggcggggcttcttggcacacgcatgcaggtggctgcattggaggggcggggcctgaggcaggtgggcggggtttctgggccgcctcatacctggacgccctgattccaggtgtatggccagaagctggcacagtcgccgggcgc

SEQ ID NO: 95506 - DNA, 182 bp, Homo sapiens
  chr19:1048855-1049037
  hypo
ggggtgggctaagcaataacccgcgcccctccccgcaggccagtacgggatccctgaaccatggaattttccttttcggaggagctactggtgcggacctcggccccccaagagtccagccccttgccccaccccgctggacccaaagggtgaggcactacgaggcttaatagctggttgtc

SEQ ID NO: 95507 - DNA, 213 bp, Homo sapiens
  chr19:1050962-1051175
  hypo
ttcatcctgggccacgacgtccgctccagcatggccgccatccggccccacctgggcgtctgtcctcagtacaacgtgctgtttgacatgtgcgtctcggcaggcccagagtgcagcggtgggaagggactggacgccctctgggactctgcctgccatgtgggtcactctgctctgtgcactggccgcaggctgaccgtggacgagcacgtc

SEQ ID NO: 95508 - DNA, 147 bp, Homo sapiens
  chr19:1051474-1051621
  hypo
ccattgcctttgtgggcggctcccaagttgttatcctggacgagcctacggctggcgtggatcctgcttcccgccgcggtatttgggagctgctgctcaaataccgagaaggtaagagctggggattctgctcgaggggccagaaaa

SEQ ID NO: 95509 - DNA, 31 bp, Homo sapiens; identical to SEQ ID NO: 31668
  chr19:1055084-1055115
  hypo

SEQ ID NO: 95510 - DNA, 1050 bp, Homo sapiens
  chr19:1079727-1080777
  hypo
cacctgcgtggccgacgcgaagacgcagaagcaggagctggaggataccaaggtgacggcgctgcggcagatccaggaggtcatccggcagagcgaccaaaccatcaagtcggtgcgtggggtgctccggccgcccgggcggggatggtggaccgggcggcctcctcctgacccctccgctctccggtgccgcccgcaggccacgatctcctactaccagatgatgcatatgcagacggcgccgctgcccgtgcacttccagatgctgtgtgagagcagcaagctgtatgacccaggccagcagtacgcctcccacgtgcgccagctgcagcgggaccaggagcccgatgtgcactacgactttgagccccacgtctccgccaacgcctggtaccgccacccagctgccctgtccccggcgcacaaggccctgcctgggagccgggcttccctctgtcgggggcatgaagatgaagctgtcttgccccccatcacctcccctccttttcccggtttcttccactaggtcccccgtcatgcgtgcccggaagagcagcttcaacgtgagtgatgtggcgcggccggaggctgccgggagccccccagaagaaggcgggtgcactgagggcacacctgccaaggaccacaggggtgagtgtccggcggggcccaggggcggacgctggctccctgcgacccaccctggcccttcaccagagacgcctctttctccagccgggcgaggacaccaggttcacaagtcatggccgctctcgatctcagactcggacagtgggctggaccccggccctggcgcaggtgagggaggctctctggcgggctggggtgtggagctgcctcctctcctgagcctcagggtttcatcacccaccggggtgatggagggggcccccctggctgggggagtctgaacagtcctgattcccgcccaggggactttaagaagttcgagcggacgtcatccagtggtaccatgtcgtccacggaggagctggtggacccagacggtggagccggggcttcagcctt

SEQ ID NO: 95511 - DNA, 253 bp, Homo sapiens
  chr19:1082955-1083208
  hypo
gagagcgaggcagtggcggtggccctggcaggtcggctgcgggagctcctgcgggacctgccgcctgagaaccgggcctcgctgcagtacctgctgcgtcacctacgcaggtgagtcccggcatatggagtggagggcgcggggtcccgggagccgctcagcacctggcccctgcccaccccgcaggatcgtggaggtggagcaggacaacaagatgacccccgggaacctgggcatcgtgttcgggcccacg

SEQ ID NO: 95512 - DNA, 44 bp, Homo sapiens
  chr19:1089504-1089548
  hypo
tgatgtacctgccagccgtctcactgggccggatgatcttcacc

SEQ ID NO: 95513 - DNA, 187 bp, Homo sapiens
  chr19:1105540-1105727
  hypo
gcgggtgggtgggggtcggggtgggctccagcctggagagggcctgggagtgtgcagggggcccggactgagggggtgccagcccccgactcactcacacaccttggccgccacaggagccagggagtaacgaagagatcaaagagttcgccgcgggctacaacgtcaaattcgatatgttcagcaa

SEQ ID NO: 95514 - DNA, 1523 bp, Homo sapiens
  chr19:1108137-1109660
  hypo
gaccttggccctgctccccaccgctgctcctaggggagaaacggtccctgtgtcttggggcatgtttcgcctaaaggcgtgtcagagaggagcctgggcgccggggaagggtgggctgaactggatcacgctctgccgctcgggaccaccgcccgccgcgccccccgcccccgcgccctcccccagcgcgccctcggagggcggccccgcgtgcagcgagcgcagcatgtcctccagcacctccttgaagttgatgtcgcagccctggtgcgcgagggccgcagggtcggcctgggcgtcgggggtgcccagcggcacgacgccggggccggcgtccagggacagcggcgccgggaaagagaagtgcgggggcggcgggaaggcctcggccggggggctgtaggtgaggtccagcacctctccggggccgcaaggcagcgccagcgggcgcggggcgggcggggcggggcagcccagggcgggcgcctgcctgcgcttcacgtccgcatccatcagccgcagctcctgcagcacccggcgcacgcagccctcggggatcttgatgcctgcgggcagagcgtcggggtcagggccggcgctgggggctcgggccttcccggggcgcccgccgcccactcacccacttgcttcttcctgtccttggtcttcagccgcacgatctgcaggtagctgctgctgctgacgtcggccatgacggcggcgatgcggccccacacgcgcagcagcgcgccgcacagcatgtagtggtgccgcagccgcagcccctgcaggcagtccttaccctcctgcgccagccggcagtgccggttcctgcggacgagacgggtcgtctcggctcaggcgggtcccaggggcccgcaggctccccaggtgccctgagatctcccgcctcctctcagggtctcgggagcccccgatccccgcctgggtcgccgccatctgccggtttccccctggtccccggcccgccctcaccaggcgctgtggctgcagtgcgtcagcgacaaagcgtagccactctcccagggctccttggcctcctccgcggtgacctagggacacagggccgcatgagcctgggcggggtcagggccggcaacccgagcgaaagctgcgcccggcggccgcctacccggtggaacttgcggcggaggctgtccagggcctccagctggctctgccggccgatgttgggcttgtacaccgtgaagaactggccgcggttctgctccgccagcaggcagctgggcttgttaccgcggacctgcggaggggggcgttgaggccgcgccccggtccgccccccgcgggccctcctctgggggggtaaccccgcccgaccccaccttgtaggagaggtagaagccgtcataggggcccgtcagcgccagcgacttggcaaaggcgtcctcccacttcaggccgcggtccacgctgatctgccacggcacggggtgggggggtgtgagtgtggtgggggcggggtgggcagagtgtgaggg

SEQ ID NO: 95515 - DNA, 31 bp, Homo sapiens
  chr19:1111948-1111979
  hypo
acccctgcccctgccccgccccccaaccctg

SEQ ID NO: 95516 - DNA, 553 bp, Homo sapiens
  chr19:1112194-1112747
  hypo
tccaggcgcttggccacgatggaggcgaaccggcgctccccggccagctccgagatgaggaagacatactctggcgcggagacctggttggaccggtgggtgcggcctgggggcagagctgctctcagggcccggccaggcgggggcggggccgagaccatgttgggggcggggccaggcagcgctgggggcggggccggactcaccgaactgctggatggcgcggtcggcgctccacggcagctccaaggtcatgtgcacgcggcgccgctggttctggacacggcggtcggcttggagggagacacccgagctggaggcctccgagatgatggccacgagctagggggaaagaaggggccgggacacggttggtgcaaggcccgccccagcgttgccgccacctcctcacccactaggcccccgctccaggtcaccaggacgtcccggggcagcgagaggcctgcggggcgcggacaccacccgccacacggccactcgcgcccgcacctggcacacacacactccagaagtgcgcgggtccacagtcccc

SEQ ID NO: 95517 - DNA, 312 bp, Homo sapiens
  chr19:1117274-1117586
  hypo
cctgcaggcccggccgccctcagccctcgaaggccgcagccgctcaccttgtctcgcgccagctcctctcgggccagctccaccagccggcgcaccttggctgcgatgcacagatacttgaagaagcgctggtgtgccgaccagaactggccccacagggacttgcgcgactccaggccgatccagtcggccgcctgctggaacacgttcagggcctcggcccactgcaatgacacgtcacaaggcgcccctgagctgtggctcctggctcccgacccgggccccggcccacctgccgccagccctgggcaa

SEQ ID NO: 95518 - DNA, 30 bp, Homo sapiens; identical to SEQ ID NO: 31675
  chr19:1122663-1122693
  hypo

SEQ ID NO: 95519 - DNA, 253 bp, Homo sapiens; identical to SEQ ID NO: 31676
  chr19:1128183-1128436
  hypo

SEQ ID NO: 95520 - DNA, 30 bp, Homo sapiens
  chr19:1154261-1154291
  hypo
cccactgcaagcatcgggcggcaggcgggg

SEQ ID NO: 95521 - DNA, 637 bp, Homo sapiens
  chr19:1156122-1156759
  hypo
cagcagcaggggccctgagctcgcctgtgtccgagtcccctaggccagcacggtgctcctggcagctcctccctccctacggtctctgagccccccacgtctgtggacgccccttccaggcggcaaccccaggaggctcaggggaccgggttcttcaaggggagggcttcacacatggcatgtgacctggagtccatgccttggggacctggcagggtgtggagacctggaccgggaggggatgggggcaggagaacaatgcggacaccaggcacaaccaaccaagagtcagggcccaaaaccaggaggcggaggcggaggcggatcctcacacacggctgcttggcagtctgggattcctcaagaggctaacgctggagtcaccacaccaccgagcaattccacaccacacagaaacgtggccatgcacgtccacagcagcaccactcacaacagccacccgaggaagcagcccagtgtccacggataggcgagtggaccagcatgtggcgtggcccatccacgtgccagaacacgacacagccatgaacagcagcgaggccgacctaggccacagcgcagacgcaccttgaggacgtcacgctctgtgagagacgccaggcacagatgtgtgtga

SEQ ID NO: 95522 - DNA, 396 bp, Homo sapiens
  chr19:1166849-1167245
  hypo
actgtcactgcctcacatcagcggcctcaggccacaaggtctccccacctggctccttggggagtgccaagcgttgccagcagccgggctatgctgatcccagacaagtggctcgaccggtcaccactgtccttgagcttaagtccagccttggtgacaaaaatgtcacaaggacctgcatccgagccctgagggcatcaggtcctggaggaggaggaagagtcccttctggcttcgggctgggcttgaggacggcagctccaagaccgcttagagcgagacttcagcgctgactgctggagctacgcaccctgtcctgacaatggccgcacagttaggcgctgctccacgcctggaggagggaactgagggcccgaaatcacagaagcaggaact

SEQ ID NO: 95523 - DNA, 51 bp, Homo sapiens
  chr19:1167627-1167678
  hypo
catttgtgacgatgccgggacccgaggaatccaggacgacccctctgcaga

SEQ ID NO: 95524 - DNA, 723 bp, Homo sapiens
  chr19:1169514-1170237
  hypo
atgcagcattccctgcccctccgaagcagtgagtggttcaggggcagagctgggcctgggcgaggggcccccggggggtggggtgatgccatcactgttgccgtcctacgggttgagacaggacagctgcccatcaccccttgatgcaagctggctgcaggctgcctgaccagttcccggggacaccgtgctcaaccctgtggtgacaactggggattccgaaggacagggaggtcttactttctgttaaacacttttattttccctgagatacaatccacaccaggaggggcacctgtccggagcatatgactcaacggtttcaacgtattctaaggcagaccaccacagcttctaattccaaaacattccgctcccccaaaacacagccgtgtccccaacagcagtcactcccccgcctctacagcccctgcaaccacacgcccacttctcttctgtggactggcctgctctggacacgtgaccacacgtctaccccccatctgtggactgccctgctctgcacacgtcacatgaacggagtcacgtgccgtggccttttgcgtctggcgtctctccgcaagcacgtctccgcagagcatccatgccgggcgcacagacgacagatctaatctccgcctcctcacggggcccaggaggcccagggcgagagctgatggggcccacgcatccgaaatccccgtcttggccagaaccccaggt

SEQ ID NO: 95525 - DNA, 37 bp, Homo sapiens
  chr19:1170704-1170741
  hypo
gggtgcatgagaacacgcagcacgcacacaacacaca

SEQ ID NO: 95526 - DNA, 855 bp, Homo sapiens
  chr19:1170964-1171819
  hypo
aaaatacacacacacaacatacgaggacaggcacacaggcacgggcaacacacaaaatacagacacacataaccgactcatgaacatgggtacacacaggcacacacacaacacaaacacgggtgcacaggcacacacaacacacaaacacggatgcacagacacgcacacaatgtgcacccataaaacacacgcgtatgaaacacacgagcaacacacacatgcacaggagcacacagccacaggcacgcacattcacacacacacaacgcacccacatccgtacaacacacacacagaacgcgcacacgtccgtacgacgcacacacagaatgcacgtgcgtacgtacaatgcacacaaagaatacacacatccatacaacacacaggcacacaacacacatgtgcatgcacatggcgcaacatacagatacacaaagacacgtgtacacacacatgcagagtccccagggcagcgctggcgtcatggggggctgcctccacaccgcctccaggagtgtttacagctgtggattacatgataccgcccccttcccagagctgatcccaccccccagcatgggggccccctgggagggggcctctgggagccggactggttctgtcgacacagtcgcctctttgttcggggcagagctcactctggcggtgttggcgtttccgcatgggccctgccggaggggcatccgtgactccgctggagccgggttgggccaagcccaagctggtcacacccctcacacccctggggttgggggaggccttaggcagcaagtgggtggggggtctaggggtggctggcgcaacctctctccacctcggtttccccgccag

SEQ ID NO: 95527 - DNA, 121 bp, Homo sapiens; identical to SEQ ID NO: 11886
  chr19:1173280-1173401
  hypo

SEQ ID NO: 95528 - DNA, 30 bp, Homo sapiens; identical to SEQ ID NO: 55297
  chr19:1173620-1173650
  hypo

SEQ ID NO: 95529 - DNA, 268 bp, Homo sapiens
  chr19:1178809-1179077
  hypo
gggaaattcttgattttcctcggcccagtccatggcgtcactgaagtggatgttcaatgagaaaataataaggatgaatgctgcagttggagttcaagagaggaggcatttttgacgccacagatgggcagagatggggtgagggccctggccggcaccagctctcctggctcagactttggaagccgccccccaggggagacgctcaactggtcagaggtgtggatagccccgtcccccagtagtcccaccccgcagagagctctca

SEQ ID NO: 95530 - DNA, 104 bp, Homo sapiens; identical to SEQ ID NO: 31684
  chr19:1179314-1179418
  hypo

SEQ ID NO: 95531 - DNA, 752 bp, Homo sapiens; identical to SEQ ID NO: 55298
  chr19:1206907-1207659
  hypo

SEQ ID NO: 95532 - DNA, 17 bp, Homo sapiens
  chr19:1209270-1209287
  hypo
ctcccagcagtgagaaa

SEQ ID NO: 95533 - DNA, 31 bp, Homo sapiens; identical to SEQ ID NO: 31685
  chr19:1213488-1213519
  hypo

SEQ ID NO: 95534 - DNA, 30 bp, Homo sapiens; identical to SEQ ID NO: 31686
  chr19:1220712-1220742
  hypo

SEQ ID NO: 95535 - DNA, 310 bp, Homo sapiens
  chr19:1223560-1223870
  hypo
gggtccagtggccctccctcccgtcgtccctgaggcctgcccgctggccctgatgccggccgcccttcttccctaggtggcgaggaggcgtctgaggcagggcttagagcggagcgcggcttgcagaagagcgagggctcagacctttcaggagaggaagcctctcggccggcgccgcagtagtgcctgaggaggagctcagggccttagcgtaggggcggcccacattggcagccagcccctccccgccatgctcccggcttggctgtgttcggcccagggctgggccgtgtcataaagagttttgcag

SEQ ID NO: 95536 - DNA, 687 bp, Homo sapiens
  chr19:1226469-1227156
  hypo
gaggccagtcacaatggacagcgccggggcctccccaaggccgtgtgtatgaacggcacagaggcggcgcagctgagcaccaaatccagggcggagggccgggcccccaaccctgcccgcaaggcctgctccgccagcagcaagatccgccggctgtcggcctgcaagcagcagtgaggctggccgcctgcaggtggggcgcggcggggcccgggtggggcatgtggggacaacgcctggatgccacagccagccgtgagcatagcccgcgctagtcagtcatggtgaccgtcacgtggctgcgcgtggttgccatgtggcctttgggtggcttggccacgtagcgatccccgtggagggtgccgtctcggggcctggtgtctggccagcgtgctggtcatggaggcctacgtgtggcggggctctgggggggcgtgccgtcctcacagccacctctcagagtgggtgcattccgaggaccctgccctgggcctggcgccccctccccatgcccgcgccgcttccaggaaaggcttatgctgggctcagcccagaggcttttgagcaccagtgggtggtgggtggtggggaggggccgcggcctccatggctctgccggggtgccgcaggctctgagccagctgccaagtatggctgaggctgagtcgtgccggacgctgccctgtc

SEQ ID NO: 95537 - DNA, 528 bp, Homo sapiens; identical to SEQ ID NO: 31688
  chr19:1227510-1228038
  hypo

SEQ ID NO: 95538 - DNA, 1417 bp, Homo sapiens
  chr19:1228415-1229832
  hypo
cttgggaagcttggacctggccgtctgggttttgttcgcgtctcaacgtggatggggcggcagcggggcgggcgccgttgacatgcggagggcagtggggactcggggcgcgggagggccggggccggctccctcagggccggcggcagcagcggtggcggcgcggttattgctcggaggcggcgcgggctgccgccagcacacgccgcagtgaggtaaacggtctcggaggtcggcagtcacggtgttgagccgcctcccggcccagggcggcgaactcgtctgcgaccgttagcgccccgcggcccccgcccgggcgagctcgcgcacgcgcccggcacgcggcggctccatcgggcccagtgggctgcgcgaccctcgggtggcgggccctgcgactaagcggccgccccgtccgggactgagggcgagtgatcgttgtcctcaggagcccgaagctgagagccgttcacgccccttccttcccgcccagccggggtctccgcggcccgcgcctcacgacgcccagcacccggcaagcaccggaaagagcagtgcacacttcggcggcgcgagggcggccggggctctgcgcctgcgccctgaagcggcgagcgcgcctccgtcgcccggcgcgtgcgcgaagggcccgcggtccccgcgcattcgcgtcggggcgtcgcgcccccacgtctctcccgccgccgaggccccgtgcggcgccggagaagctgccagagagatgggcccaggacgcgggacttaggccgggctgtggtcgggggacgtgggggcggcggcgaccaacgcgggagtcgccacgacgggctcggcgaggcgcggcggaaagagtctctcgtcgaggccagccgccagcttgtccagcaccgacccggatggtaggacgcacaggcccgagccggggcaccccccgccgcccggctcctcctcgatgacggggatggcggggtcgtcgccggcgccgcccagggtgcgaccgtcgggcgggccgtccacgctgtcgccgcgccgcaagggcgcacgcgcgggtcgggccgcgccggcaggcggtgccggggttccggccagggccggggccgcgcgggcgccggggtcgctgtgctgccggccacgctgccactgtttgcgggcgtgcgggtgcgcgcgggcgcggtgtcgcgcggcagccggcgtgtcgtcgaagtgcgggtcgtggcgcaggaactcgtggaacagcgcgtccgtcttctcgtcgatgctgtagtcgcggcgcgggcggcggggccaggcgcgcgggctgcggggccgggcgggcgcggcaggtggctcggtgtcgtcgcctgcgccgcggccctcgatgctggcgtagccactgtccatctgcagcagccggcgcgcctcgccgtccttgggccgc

SEQ ID NO: 95539 - DNA, 46 bp, Homo sapiens
  chr19:1231261-1231307
  hypo
cgcttgggggaacctgcgcacgggatgtgccgtaagcgtcagccgg

SEQ ID NO: 95540 - DNA, 978 bp, Homo sapiens
  chr19:1234515-1235493
  hypo
cccggggctgcctcccgtcccccgaggaaccggggctgctgcccataggctcacctggaagatggccagagtggccttgggagaggtggccgggtggggcgtggtggctgagctggcctcgcctgagtcacactcgtggatggtgacaatcttgaggggcggcaggtgcaggtgcgtgagccgggcattcttcaggtggtggaagtccccctccgtcagtgtgtacctgcgacagcatctggccatcagagcccgcccacctcccatgcccgatgccccagctgccgtgctctgccatccaccctgccggcctgggcaggggcaggcgaaaggggggcaactggccaaggccgccccaccccacggtcccagtccaggagcctctgccttggtccctgcagcctccgcacccagctcctcccccgtcccggcggccaggacctcagacaggccctggggtgcctcccaacgccgccccgcttaccggcgacccttgtcctgcgtcttgcggctctgctcaaacagcgccgcctcattgaaggagacccggcggcccgtggagctggtggacaggaagcgttcggtctccgcatcctggcactcggggtcctctccccggaagtcggggtctgcgtggagaggcaggagagggtgggccccgggcgggccacgccaggcgcctggtcccgggagggctgctcctccgggcggccacggcagggagggctggggccgcggcacgggcggccgggctggcggggcgagggacactcgtccatccgctcacacactcactcgctcagcacgcgcctgggcccacctacgcctgggcgttaaggaaacagagatgagtcggaatcgagctgcgcccagtctggtgggggagacagacagacacagacggtcaggcagcccgagggggcggcgggtggccgaggggcggatggacaggcgagcgcacagccaggctggccagca

SEQ ID NO: 95541 - DNA, 102 bp, Homo sapiens
  chr19:1236402-1236504
  hypo
ctgtcctgcaaggtagcgccaggccctggagctcagcgctgggcagggcaagcactcggaggaatggggacgccaaggcggtgcagccggctcgagaaggac

SEQ ID NO: 95542 - DNA, 30 bp, Homo sapiens; identical to SEQ ID NO: 55300
  chr19:1248272-1248302
  hypo

SEQ ID NO: 95543 - DNA, 510 bp, Homo sapiens
  chr19:1255195-1255705
  hypo
cccaggaatcccccacacacacgcctggccctgcccggggggccgcgggtcaccaggcgcctgcatactggggacgtgtcccgctcccgccccgtggtccctcgtgcacatcagcccacatgtccacgccattgcctgagctcatgagctcacacccgtggacgcccgtcctggacatgcgggactgtgcccgtgccgggcactcacggccacctctgcccgcaggcacgctacaccccaactgccaagacagcagcgggcggccgcggcgtgacatcggcaccatcctgcagatcctgaacgacctcctgagcgccacccggcactaccagggcatgcccccttcgctggcccagctccgctgccacgcccagtgctccccggcctcaccggcccccgacctggcccccagaactacctcctgcgagaagctcacggctgccccctcagcctccctgctgcagggccagagccagatccgcatgtgcaagcccccgggtgagtggccac

SEQ ID NO: 95544 - DNA, 91 bp, Homo sapiens
  chr19:1256136-1256227
  hypo
actgcccttgggctctgcacccgtcgcgggggctcctcccagctcagtttaaaagtgggaaactggccgggcgcggtggctcacgcctgta

SEQ ID NO: 95545 - DNA, 30 bp, Homo sapiens; identical to SEQ ID NO: 59735
  chr19:1256466-1256496
  hypo

SEQ ID NO: 95546 - DNA, 31 bp, Homo sapiens
  chr19:1274710-1274741
  hypo
gtgcgccggcagcttacggggcggccagtcc

SEQ ID NO: 95547 - DNA, 30 bp, Homo sapiens
  chr19:1277203-1277233
  hypo
cgatacggcctcctcgccaacactgaggac

SEQ ID NO: 95548 - DNA, 43 bp, Homo sapiens
  chr19:1280524-1280567
  hypo
ctccttcactttgtctctgtccgtctctgtctccatgtctgac

SEQ ID NO: 95549 - DNA, 30 bp, Homo sapiens
  chr19:1280826-1280856
  hypo
cgtgctgcaccccacgttgctgcagagtaa

SEQ ID NO: 95550 - DNA, 30 bp, Homo sapiens
  chr19:1281098-1281128
  hypo
gtctcatagacacacggtaagcaactcgga

SEQ ID NO: 95551 - DNA, 30 bp, Homo sapiens
  chr19:1288526-1288556
  hypo
agacggggacagccgcgatggggggcagac

SEQ ID NO: 95552 - DNA, 30 bp, Homo sapiens
  chr19:1288782-1288812
  hypo
ggtggtctggctggccggccccgccactcc

SEQ ID NO: 95553 - DNA, 184 bp, Homo sapiens
  chr19:1289081-1289265
  hypo
gcctggagtcgcatccggctgcaggttacatgtgtctgtgtgtggcaggaggctgcgtgaatccacagggcacagctctggcgtgtttgcacatgtgtctgcgtgattgcatatgaggtgcatgtgtgtgcatgagtgtgtctgtgcgtggcacccgcgtttgcatgtgcgtgcccttgcacgg

SEQ ID NO: 95554 - DNA, 30 bp, Homo sapiens
  chr19:1290537-1290567
  hypo
cattcatgggggtccgggtggtagcgtttc

SEQ ID NO: 95555 - DNA, 31 bp, Homo sapiens
  chr19:1293374-1293405
  hypo
aggggtgggctgaggccgagcccatctccat

SEQ ID NO: 95556 - DNA, 30 bp, Homo sapiens; identical to SEQ ID NO: 31693
  chr19:1296960-1296990
  hypo

SEQ ID NO: 95557 - DNA, 207 bp, Homo sapiens; identical to SEQ ID NO: 31694
  chr19:1297608-1297815
  hypo

SEQ ID NO: 95558 - DNA, 30 bp, Homo sapiens
  chr19:1304915-1304945
  hypo
catctccctcctgccggccagttactgccg

SEQ ID NO: 95559 - DNA, 284 bp, Homo sapiens
  chr19:1308050-1308334
  hypo
ggtcctcctgcacggtcgcctggtggagcagaaaccaccgccagcggctccccgtctatttgtctgtgcacattcctgggctcagacggtggcttccgaggccggaacttcggagtcacctgctccgcacttgagtctggaacgtctcagaccggacccctccctttacagcctgagagagggagagaccctgcccaggcctcccaggggcctgcccacccgacagctcctgactcccccaccctcattggtccagaaatggaaggcttcggcccaggagcgat

SEQ ID NO: 95560 - DNA, 349 bp, Homo sapiens; identical to SEQ ID NO: 31696
  chr19:1312766-1313115
  hypo

SEQ ID NO: 95561 - DNA, 31 bp, Homo sapiens
  chr19:1325875-1325906
  hypo
ggtggttcacaccagccgggcacggtggctc

SEQ ID NO: 95562 - DNA, 31 bp, Homo sapiens
  chr19:1329362-1329393
  hypo
aaaaaaaaaaaaaagacgtacctgctcttct

SEQ ID NO: 95563 - DNA, 111 bp, Homo sapiens
  chr19:1333896-1334007
  hypo
aatcagcccacaactgcggcgacgaggcgtccgaggcggccgcaccccagcagcgatcggtgattcatggctcgatctgctaattgcctctcgggccggcttcgggctgat

SEQ ID NO: 95564 - DNA, 121 bp, Homo sapiens; identical to SEQ ID NO: 31697
  chr19:1357652-1357773
  hypo

SEQ ID NO: 95565 - DNA, 31 bp, Homo sapiens; identical to SEQ ID NO: 31698
  chr19:1359088-1359119
  hypo

SEQ ID NO: 95566 - DNA, 269 bp, Homo sapiens
  chr19:1360024-1360293
  hypo
ggtatgaaactagccgtcagaatgagacaagcgagcttctaaagcgatgccgtgaccgcagtgcctgtgcagtgaacgtaaccggcattgtgtatgttcggtccttgcagcctcacagaatgaggttcctgcggcacccctggaagaactggcctacagacggtcgcttcgcgtggctctggacgttctgagcgagggctcgatttggagtcaagaaagctctgcagggacaggtagagctgaccggtctctgcgagggaagcccatgg

SEQ ID NO: 95567 - DNA, 679 bp, Homo sapiens; identical to SEQ ID NO: 31700
  chr19:1370829-1371508
  hypo

SEQ ID NO: 95568 - DNA, 181 bp, Homo sapiens
  chr19:1373034-1373215
  hypo
gtgcctgctgctattgagccccgtgccctctcacaggccatcatctgtgcgatctctgcggtggacgaggtggactacaagacggctgaggagaagtacatcaaggggccttcgctgagctaccggtaggccgctcccggcgctatctccagccacttgcgtctctgccttgcagtttcta

SEQ ID NO: 95569 - DNA, 359 bp, Homo sapiens
  chr19:1388330-1388689
  hypo
gtctgggccatcattgggggtcggggcgatggccgcatggctccagcggctctggccagtggcccaagtgttgacaggcagaggtgagaacagtctcgcagcagggaggggagaggcaggacaacagtgagtgcggctgggggagctggaggggcctgggacagccactgacccgcgttccatctcccggcagctccagcgtgggcccggctgtgcaggcacgaggtgtccatcagagcgtggccaccgatggcccaagcaggtgaagctggccttctgggggaggtcgtaccccctcgccccacccccatcccttccttattttctgcatcagtgccgcagccactgaggtgcatgga

SEQ ID NO: 95570 - DNA, 30 bp, Homo sapiens
  chr19:1393363-1393393
  hypo
ggagacagggccagcgccacacggagcccg

SEQ ID NO: 95571 - DNA, 215 bp, Homo sapiens
  chr19:1394054-1394269
  hypo
gttcttggccaccctgtgctgcgtgcggcattagctcatgcgcagagagcccagccctgagtcccgagtctgggggtttgggcaagcgagaggcacatcctggtgcctctcaaaagtggaggaacaggctctgactttggattccgcttccctggaaagggcgttgatttgttcagcgttctgcacggttcaggtcaccccgggggcagtggaga

SEQ ID NO: 95572 - DNA, 104 bp, Homo sapiens; identical to SEQ ID NO: 55307
  chr19:1401692-1401796
  hypo

SEQ ID NO: 95573 - DNA, 162 bp, Homo sapiens
  chr19:1416663-1416825
  hypo
aggccctggggccacctggagcggcagtgaggtggaaaggtgagtgggcccttgggcgtcgctgcagggtcgatggcggacgccttgggagagctccagctcttctgcccggaggagacagccccaggacgggggtggcgcgggtctttggtgggggcaggc

SEQ ID NO: 95574 - DNA, 30 bp, Homo sapiens
  chr19:1419737-1419767
  hypo
tcatgaaaccatcccgaccgtcacggcagc

SEQ ID NO: 95575 - DNA, 328 bp, Homo sapiens
  chr19:1424659-1424987
  hypo
ctcgttcacgcctcacgcccgtgctgcgctgtcccctgctgtgtggtgccttgtcacgcaccctgtgcctctggcgcgggcagcccatcttcagcccggtctcagctcttcccatgtccatctttgttctgtgaggtcttgggcagctgtctgccgggcacttccatctggggaggggctggtgccgcctgggccccgcctcgggaggacggtgtgctttgcggtgtcacgctccacctagccggggaggcctggagagcccggcgcactcctgcgcctagaggaggagacccgccccgttagccgggggccgcgcccaccccagacc

SEQ ID NO: 95576 - DNA, 315 bp, Homo sapiens
  chr19:1425405-1425720
  hypo
ttccacgcgggcccccggcctgcagggttcactggcaatctccccacaggcgagagccagaatattcaagcacgggcctctgaccctcccctggggggcgctttgtctgccagtagcgatggaggccctcaccgttcccctgtctccgctgctgttttataagatgtgctccttgttccaaatctttgtgacacggagccccagcccggggtgtctggggcggaggcttgactcaggcctcagtcagcagagccgtcaccgggagtgcggacgtcaccgtctgtccactccgtgtgcagtcgagtggtggctcct

SEQ ID NO: 95577 - DNA, 216 bp, Homo sapiens
  chr19:1432574-1432790
  hypo
ccaccagccactcccggggcagcacctctggctttcccaccgcctccgtctcaggctgccccggacatgagcaagcccccgacagctcagccagacttcccctatggtcagtatggtaagtggtctcctgccatgccgcgtccccgctggccccaggaccctgggcacggcctgccttcttctgcttcctcccctgctggacgctccccagccttt

SEQ ID NO: 95578 - DNA, 30 bp, Homo sapiens
  chr19:1440278-1440308
  hypo
gggtgggctggggtcgcctgatgcaggcgg

SEQ ID NO: 95579 - DNA, 210 bp, Homo sapiens; identical to SEQ ID NO: 55310
  chr19:1449907-1450117
  hypo

SEQ ID NO: 95580 - DNA, 104 bp, Homo sapiens; identical to SEQ ID NO: 55311
  chr19:1450129-1450233
  hypo

SEQ ID NO: 95581 - DNA, 328 bp, Homo sapiens
  chr19:1461032-1461360
  hypo
caggtggtgtccagcatccttcggaacttgtcctggagggccgacatcaacagcaagaaggtgctgagggaggcgggcagcgtgactgccctggtgcagtgtgtcctgcgggccaccaaggtgggcacccggtgggcggcagggatgcttcttcagtcactggaaggagactgctggcggcagcgggcgagctctccgacttgggaggaaatcaagttgaacagctcactgcttagcgggtggtccagcctcagaccggctggggctcactcctcatgtcactgctctttgaaagcaaatgtgggctgggcgccgtggctcacttgag

SEQ ID NO: 95582 - DNA, 27 bp, Homo sapiens
  chr19:1461839-1461866
  hypo
gattccgtctcaaaaaaaaaaaacaaa

SEQ ID NO: 95583 - DNA, 30 bp, Homo sapiens
  chr19:1481711-1481741
  hypo
gtcagggacccaggcgggggcaaggtcgct

SEQ ID NO: 95584 - DNA, 415 bp, Homo sapiens
  chr19:1481986-1482401
  hypo
tgctgctggtccagcgtggaggatgggggacaggaggtgcagtccctcggggagccgccgcggcaggtgtagcaggaggcatggcagctggagcagaccctcagcgcgggcgccgccgtgtgcccaggcccagcggtcaccagccttgtgtggttgaagaaccgcggggggcagtaggccaggcagagctgtcccaggatgtaggcggggccgtcacacgctgctcggggacacgcacgcaaaggcccgtcagcttgccacccgcagcctgttactcgccacccgcccgcctggggccacatgcacgctgcccacggtggccgccaccgcctcccagcagtgggccctgccccgccggcactcaccctggcacagcccctctgtgtcccgctgcacacacgcgctgctggtcacc

SEQ ID NO: 95585 - DNA, 30 bp, Homo sapiens
  chr19:1487004-1487034
  hypo
gtagtgcaggccgccgttgcccgaggccca

SEQ ID NO: 95586 - DNA, 30 bp, Homo sapiens
  chr19:1487321-1487351
  hypo
cagggcgggagggccgctgccaccggccct

SEQ ID NO: 95587 - DNA, 30 bp, Homo sapiens
  chr19:1487590-1487620
  hypo
accccgggtacctccgattcgggcgttgaa

SEQ ID NO: 95588 - DNA, 351 bp, Homo sapiens; identical to SEQ ID NO: 55321
  chr19:1491115-1491466
  hypo

SEQ ID NO: 95589 - DNA, 448 bp, Homo sapiens
  chr19:1494953-1495401
  hypo
gttacaggtgtgagccaccgcgcccggctgcaaacacttcactgggcagctattccgcacccacccccactgcccagcgtcgagctcctgcctgcccttggggagctctcaaccccggtgggggacatggacacgttgaccagttacaggcacaaggctcagggcctagaggcacgatgggggatgtacaggcacatcaggggcagtggacatatcctggaggcggctcctgggaggaggtgacggttgcagtcttcgtcgactgaaaggcggcctgggtaccgtcgtgggggctcagcgggtccccagccctggcacaccaccgcctctctccggcaggagccgtcactctgctaagcctgtatctgctgttcggctacggagcgtctctgctgtgcaatctcatcggatttgtgtaccccgcatatgcctcgtgagtgcacggctg

SEQ ID NO: 95590 - DNA, 484 bp, Homo sapiens
  chr19:1496400-1496884
  hypo
aacgacctcagcgggcgagccctggacgcggcggccggaataaccaggaacggtgggtgctcgcaggcgcctggctgcctcaggccatctcccgggtctggacctgtctctctccaccttgcctccctttctgactttggccgccccctctcactgtccgcctctctctctcacgcttccgggaaccagtcttgcaggtcctggcccgtagccgggcaggcatcaccccggtggctgtggccgggccctccactcccctggaagctgaccgtacgtaaccgctgtggggagataggagctgtgtgtgtgtgtgtgtgcgcgcgcgcgcgcgtgtgtttgagcgtatgtttgctgtgtgcacatgtattattgtgtgtgcatgttttgtcatgtgcaagagggtgcgtgtgcatgggctcaagtgtatgtttggtgtgtgagtgagcaagggagtgagcatgttttctcacgtgtgcatatgtgt

SEQ ID NO: 95591 - DNA, 55 bp, Homo sapiens
  chr19:1506118-1506173
  hypo
gtcggggctgacaagacgctggacagccatcaggtagtcccggtggggtgccagc

SEQ ID NO: 95592 - DNA, 49 bp, Homo sapiens
  chr19:1533725-1533774
  hypo
gctacatgcccaactgcgggaggctggaagccttcgccctgagggatgt

SEQ ID NO: 95593 - DNA, 129 bp, Homo sapiens; identical to SEQ ID NO: 11898
  chr19:1546216-1546345
  hypo

SEQ ID NO: 95594 - DNA, 34 bp, Homo sapiens; identical to SEQ ID NO: 31710
  chr19:1555126-1555160
  hypo

SEQ ID NO: 95595 - DNA, 30 bp, Homo sapiens; identical to SEQ ID NO: 31711
  chr19:1555380-1555410
  hypo

SEQ ID NO: 95596 - DNA, 30 bp, Homo sapiens
  chr19:1556269-1556299
  hypo
cggcacggaggggccgccgcggctgcccgc

SEQ ID NO: 95597 - DNA, 30 bp, Homo sapiens
  chr19:1556716-1556746
  hypo
cgggccctgggcggcgccgggcagaccccc

SEQ ID NO: 95598 - DNA, 30 bp, Homo sapiens
  chr19:1558717-1558747
  hypo
ggcctaaggggagccgaggtctcggcccga

SEQ ID NO: 95599 - DNA, 193 bp, Homo sapiens
  chr19:1565848-1566041
  hypo
gtctagaagctctcagcctgacgctgattcctgccagctccccatgtggccatagcctcgctcaaaggcccttgggtgccaggacaagcgcgttcacaaagaacacagccacagcctccaccacctggaggctcaggctcgtgcctttggtcacttggtccccaggcctcggcttggacgcctgtctccacag

SEQ ID NO: 95600 - DNA, 30 bp, Homo sapiens; identical to SEQ ID NO: 55326
  chr19:1568537-1568567
  hypo

SEQ ID NO: 95601 - DNA, 1057 bp, Homo sapiens
  chr19:1577788-1578845
  hypo
gtggcgccgagctgccgggcacctgctggctgctctccagtctcaaggagctgggacagcgggcatggggaggagctggcctcgagcccaaaggtcgtagggagccaggcagggcccaggagcacccggcacttcccgaagccggactctgtagaggacgagcgtggagggtctttcgggtgggggcagccccagctgtgtgccccgaggccccgggaagtggggacgggccgaggagggagccaggagcacggccttcctcctgggtgtctccaaggctgggcttcgccgccgagcctggttcacgtggggccgaggaccgcgtctgcaggcggctccagcaggcagcacgggctctcggcagggcctctggaaaggacagggagggctggctttagcgactccacgggacggggacgcttgggctcttctagggagatgggaagctcttgggaggcacccgtcatcccaagcacatctgtgttcaccaggcagtccccactgccaggacccgactccagggagcccccgtggccccgcagcacctgccctagacgtgctccatctccgggtccgggtcgggctcctcctcctcctcctcctcgtcttcctcgtcgtcgtcctcagcgcaggccttgtccagcggcgcctccccgtcacgggccagctcctccacgtgcgccagcatgtcggccatcagcgcctcctccagccgcttccgcacctgctgcaccagctcttcctgcttcctggggacacatggaccttgcgttacaccaaggtgagcggccagcaggacatggacacaggatgaacgtggggacctcagctgggaggggaggcccgagggatccacaggcacccccccaggaccagccctggcccgtgccacccctcccttcacaatccacgcagagaatgaccggctgccgctggccatcgccagcgtccgccaccctcccagatggcccccctgccacctctactgggaccaagggaggggcctgacccttcagtccccagacttggccctgagcctccccggggctcagctgtg

SEQ ID NO: 95602 - DNA, 69 bp, Homo sapiens; identical to SEQ ID NO: 31713
  chr19:1579337-1579406
  hypo

SEQ ID NO: 95603 - DNA, 52 bp, Homo sapiens
  chr19:1579658-1579710
  hypo
ccctggctcacctactcgactgcagccaccacctgctcgtcatctttccaga

SEQ ID NO: 95604 - DNA, 24 bp, Homo sapiens
  chr19:1582923-1582947
  hypo
cacatggggtggctcacgcctgta

SEQ ID NO: 95605 - DNA, 30 bp, Homo sapiens; identical to SEQ ID NO: 31715
  chr19:1584556-1584586
  hypo

SEQ ID NO: 95606 - DNA, 30 bp, Homo sapiens; identical to SEQ ID NO: 31716
  chr19:1584855-1584885
  hypo

SEQ ID NO: 95607 - DNA, 30 bp, Homo sapiens; identical to SEQ ID NO: 31717
  chr19:1585231-1585261
  hypo

SEQ ID NO: 95608 - DNA, 30 bp, Homo sapiens; identical to SEQ ID NO: 31718
  chr19:1585902-1585932
  hypo

SEQ ID NO: 95609 - DNA, 18 bp, Homo sapiens
  chr19:1594036-1594054
  hypo
tcttgctctgttgcccag

SEQ ID NO: 95610 - DNA, 30 bp, Homo sapiens
  chr19:1612193-1612223
  hypo
cggggagcctacctcgcacctgctgctcca

SEQ ID NO: 95611 - DNA, 171 bp, Homo sapiens; identical to SEQ ID NO: 31719
  chr19:1612623-1612794
  hypo

SEQ ID NO: 95612 - DNA, 263 bp, Homo sapiens
  chr19:1617229-1617492
  hypo
atcagcaggttggcaggaaagcgtgatgttggaatgacctacagccccacgcccgggccagggccaacggcacactcacaatgggaccccagccgctcacaccacacatgtaccccacacacaacataagccagcaaaccagcgtgtaaagaacacgctagtgggacgccgtgttcatgaagctcaagaacaataattgcaaaacatgtggcttaagggtacacagtgccccaaatgaatgcggccactctgcattcagcagg

SEQ ID NO: 95613 - DNA, 30 bp, Homo sapiens; identical to SEQ ID NO: 31721
  chr19:1619263-1619293
  hypo

SEQ ID NO: 95614 - DNA, 30 bp, Homo sapiens
  chr19:1621840-1621870
  hypo
gaggctgtcggccccgctgacaggcggcgt

SEQ ID NO: 95615 - DNA, 30 bp, Homo sapiens
  chr19:1632351-1632381
  hypo
gctgctctggtcgccgctgccccaggagcc

SEQ ID NO: 95616 - DNA, 30 bp, Homo sapiens
  chr19:1646471-1646501
  hypo
aaaccctacagtcccgggttcaaacccaag

SEQ ID NO: 95617 - DNA, 31 bp, Homo sapiens; identical to SEQ ID NO: 31722
  chr19:1648784-1648815
  hypo

SEQ ID NO: 95618 - DNA, 91 bp, Homo sapiens
  chr19:1665099-1665190
  hypo
tgatgaataataattgttttccgatgaacaataataataacgaattaaggccgggcacagtggctctcacacctgtaatcccagcgctttg

SEQ ID NO: 95619 - DNA, 146 bp, Homo sapiens
  chr19:1673001-1673147
  hypo
gcttatgcgtgttctcgcatgctcgtgtgcattctagcatgtgtgctcactcctatacacaggtttgcatgcgtgtgctggcatgtccgtgtgggtgcacacagaggctgtgacatgttcgctcgttgccacgagctcaggtgtgt

SEQ ID NO: 95620 - DNA, 30 bp, Homo sapiens; identical to SEQ ID NO: 31723
  chr19:1698944-1698974
  hypo

SEQ ID NO: 95621 - DNA, 1373 bp, Homo sapiens; identical to SEQ ID NO: 55332
  chr19:1748598-1749971
  hypo

SEQ ID NO: 95622 - DNA, 1129 bp, Homo sapiens; identical to SEQ ID NO: 11902
  chr19:1754224-1755353
  hypo

SEQ ID NO: 95623 - DNA, 49 bp, Homo sapiens; identical to SEQ ID NO: 31726
  chr19:1756823-1756872
  hypo

SEQ ID NO: 95624 - DNA, 195 bp, Homo sapiens
  chr19:1785484-1785679
  hypo
gcaggcaagacagggccaccacgaccgcaaaggactggtggtcgctgaagctggcgggtcccgccgtgtcgcggctgatccacagtgtcatgaagaagttgaccagagaggtggtcacaccatgggcgatggcttggacgaagacccagtagttgaagagctcgtccttctgccccaccacgtacagctccggct

SEQ ID NO: 95625 - DNA, 30 bp, Homo sapiens
  chr19:1786217-1786247
  hypo
tgagtctggctgagacggggcagtttacgt

SEQ ID NO: 95626 - DNA, 101 bp, Homo sapiens; identical to SEQ ID NO: 31728
  chr19:1799798-1799899
  hypo

SEQ ID NO: 95627 - DNA, 570 bp, Homo sapiens
  chr19:1805819-1806389
  hypo
ggaagggggctcctccgggccatgctccccaccccccagggtccccagcgatgccacagctcctcacccgtcaatgtccaccgtctccacatagcacaggctgctgggctccgtgctggccagcaagagcatgtcggcctggtgtggagtggggggcagcgttgcaagaggggatgcaagacaaattgggggtgcggcagccctccccaccctgggaggggtgctctcggtgagggggcgcgtggttctgggacctcggggtcaaccccagctcactgggacgatgttgtccttgcggagacagaccacatcccccacgcacagatcctgccatttcttctgcttgaagctgcggggagagggggttgtgaaggaggcccctccctctgcaaaccctccccacaccgggagaccagaggcacgggatgacggggggcccgcagctgcagtccccacctccgggcctttgccccctcaggaagccttccccgggctcccaccccactccccgcgggtccacgctcccacccagtgacctccagggtcctgcacccacgtcctcttcagact

SEQ ID NO: 95628 - DNA, 321 bp, Homo sapiens
  chr19:1808119-1808440
  hypo
tctgtggggagtgggacgtgaacccacccatcacacagacaaacacatcgatgctgccaggtggctaggggggacttcctggaggaggcaacacgcctcacctgcaggatgatgatgatgaggaagaacaggttggacacgcggtggaactgctcgtacaggttcagcggcaggaacgagtagaagttgtacttggccgtgcggatgacattggtctggaacgagagccgcgggctgcctggcagaggggtgccatccaggccaggggatgggggtgcccgaggccagacctgcctcacttggcctcgcccagcatcctct

SEQ ID NO: 95629 - DNA, 142 bp, Homo sapiens
  chr19:1809733-1809875
  hypo
ctgcagcgagagagccgggcgtcgctggagctcgaggcccaggacaaacacccctaatgaccgcccggaggagggctcatggggcccgtgggacccaggcactggggaggcccgagatgtcagagcccgtaaacagacagtc

SEQ ID NO: 95630 - DNA, 155 bp, Homo sapiens
  chr19:1810561-1810716
  hypo
cagccctgaacttcataatccctcccacctgcaccgccccctctgcccaggatcagcacctgagttcctgtcctcatcttggagatcttctctctggccgaggctgcccatgctggtggggctgtgggagagaagggccccgggtcacagcagtg

SEQ ID NO: 95631 - DNA, 30 bp, Homo sapiens
  chr19:1810964-1810994
  hypo
ctagaaggactctaccgccagccatgccag

SEQ ID NO: 95632 - DNA, 30 bp, Homo sapiens
  chr19:1815410-1815440
  hypo
gttctcagaggtcacggagtgcaggggtgg

SEQ ID NO: 95633 - DNA, 518 bp, Homo sapiens
  chr19:1815902-1816420
  hypo
tgggctgggctgggcgttctctggccgccagctcatcccgctgctctgggctgcctcggccaggtggacgggttaccggagatttattgcactgttttggaagaggcatggggctaaggaccagcgggacggcaggagaggcgggtgggaggcgggcaggcgtcatcgcttggtcttggcgtcttctcgaaccttccagatcaccaggtgcatgcaggcgccggcgtcctcgctggagctgtgcccatccactgcggggcagatgcggtgagcacccggcccctgcgcagggacggccccagggcaggcaccggcactcaccattgtcctggatgatctgtctgaggtagtcggccatgaggttccgcagggaccgcttgtaggggaggcccaggcggtgggggaagagcacagacgtgtccaccacggtgctgtggatgacctgtgggcagcggcagagatcagcgcacgtggggcctgcgcaggtcctgctggagaaccgcgcgggacccgggccg

SEQ ID NO: 95634 - DNA, 251 bp, Homo sapiens; identical to SEQ ID NO: 31732
  chr19:1818650-1818901
  hypo

SEQ ID NO: 95635 - DNA, 30 bp, Homo sapiens; identical to SEQ ID NO: 31733
  chr19:1820149-1820179
  hypo

SEQ ID NO: 95636 - DNA, 176 bp, Homo sapiens
  chr19:1822371-1822547
  hypo
gccaggctggcacgcgcctcttgcagtggagggtttgctcttcaggaacggacagagaacctccagactccctcggctgcacgctgggggcgagcccaggcagccacaggagtcctccaagccagatgagcccgccctgcggcactgccagcacttgggacgccagactcccttca

SEQ ID NO: 95637 - DNA, 30 bp, Homo sapiens; identical to SEQ ID NO: 31735
  chr19:1827483-1827513
  hypo

SEQ ID NO: 95638 - DNA, 30 bp, Homo sapiens
  chr19:1827737-1827767
  hypo
ctggaggtcccccacgtcgcactgcacggc

SEQ ID NO: 95639 - DNA, 30 bp, Homo sapiens
  chr19:1828373-1828403
  hypo
cacagtggggctggcgttggggccgcgggg

SEQ ID NO: 95640 - DNA, 30 bp, Homo sapiens
  chr19:1880121-1880151
  hypo
aggccgagaagggccgttcacatcctcgct

SEQ ID NO: 95641 - DNA, 58 bp, Homo sapiens; identical to SEQ ID NO: 31736
  chr19:1882111-1882169
  hypo

SEQ ID NO: 95642 - DNA, 17 bp, Homo sapiens
  chr19:1899115-1899132
  hypo
tccgtctcaaaacaaac

SEQ ID NO: 95643 - DNA, 178 bp, Homo sapiens
  chr19:1907680-1907858
  hypo
tcccagcccaggctggcggccgtgttctgctgggacctgggacctgggctgcctgccctcctgaggggtcccagtggtcggtcgcctgccttctgggtgggtgtggtagagggagggtcaggtggccccctgctgttggggggcagtcgctgtgggagtgagtcgtccccccgggcca

SEQ ID NO: 95644 - DNA, 1602 bp, Homo sapiens
  chr19:1911824-1913426
  hypo
ctggtaggtgaattatatcttcgtttttaaaaaccaatggctgtttaaactctgtgcacaccaggggttagcaggacatgagggagtgtagctctgatgcggtgacctgggccggagccctcggactagcctcagctttggtggcagcacgccctgccttgtggagccacggcctcccgggacggactccccggctctcccccagccgcccgcagccgccggatgatcctctgctcccgtctctgtctcccacagtcggcctcgctgaggatggagcccgccccgggcctcgtggagcagcccaagtgcttggaggccgggagcccggagcctgagccggcgccgtggcaggccctccctgtcctgtccgagaagcagtcaggggacgtggagctggtgctggcctacgccgcgcccgtcctggacaagcgccagacctcacgcctcctgaaggaggtgtcggccctgcacccgctccccgcccagcctcacctcaagcgggtgcggcccagccgcgatgccggcagcccccacgccctggagatgctgctttgcctggctgggccggcctcgggcccgcgctcgctggctgagctcctgccacggccggctgtggacccccgcggcctggggcaacccttcctggtgcccgtgcccgcccggccgcctctgaccaggggccagttcgaggaggcccgggcccactggcccacgtccttccacgaggacaagcaggtgaccagcgccctggctgggcggctcttctccacgcaggagcgcgccgccatgcagagccacatggagcgggcggtgtgggcggcccggcgggcagcagcgcggggcttgcgggccgtgggggccgtggtagtggacccggcctcggaccgcgtgctggccaccggccacgactgcagctgcgcggacaaccccctcctgcacgccgtcatggtgtgcgtggacctcgtggcgcgcggccagggccgcggcacctacgacttcagacccttccccgcctgctccttcgccccggccgctgccccccaggccgtccgcgcaggcgccgtgcgtaaactggacgcagacgaggacggcctcccctacctgtgcactggctacgacctgtacgtgacccgcgagccctgcgccatgtgcgccatggccctggtgcacgcacgcatcctgcgcgtcttctacggtgcgccctcgcccgacggcgccctgggcacccgcttccgcatccacgcacggcccgacctcaaccaccgcttccaggtgttccgcggggtgctggaggagcagtgccgctggctggaccccgacacgtaggcgccgccctcctgcctccggacccttcccgctcccggccgtggggcgcccctcctggacttccgggcctcgatttcttccgcacaagcctgaccgtggatttcagggacacataccgcctccagcggggagcacgggtgctgccttccgtgcggatcgagctttcctggactcggtcattggggccaccccgtgccagcggtgcccttctgcggccgcccttgctgcgtttgtgtcccctctgtctcgcgggccgggaaactgctctgatgggaa

SEQ ID NO: 95645 - DNA, 744 bp, Homo sapiens
  chr19:1913963-1914707
  hypo
caccactgctggccaggagcccgccaggcctgcagtgggggagtccgtgcctgggggtgggactgaggtgggctggagggtcccggatggggccagagccacagcgtggagtgaggaggtgggagccgcagaggcgtgcccagttgagtggtagaggcagcatttgggcctccttcatgctcaggtgctcagctccttcccctgaggggcaggaagtcagggaggagggagtgagaggtgggaggtggcaggcgggcggaggggaagatgtcctgtcccaagagccaggggtgccccaccccacggtgacatgttcctgaacgggttgtgagtggagggctcagttcctgggaactgcctcacctggactgtgggcgggaggcagctcctggccccgtgcccgccccctcgggcctgttcccctgccaggatctgggatggttcacaccccactggtctgtgatgcccagtgggcagcaggcatgcccctgctgggctggcccacctcccgatggcaggtccgcccccaggatcacggaagcagctagatccactcagtcgtgggtggatgtcaggccaggtggggctgctctggtgggtgagctcatggggttccctttcagaacggccagggtgccatgcggatgcgatggggtcttaggccctgcagcgttcaccttgtggcgcccaccccttgtgggctgaagccgggatttgggggacgcaggggcctaggacagcggg

SEQ ID NO: 95646 - DNA, 30 bp, Homo sapiens
  chr19:1916916-1916946
  hypo
cagcctgctgcagccgcacccacactaaac

SEQ ID NO: 95647 - DNA, 30 bp, Homo sapiens; identical to SEQ ID NO: 31741
  chr19:1918817-1918847
  hypo

SEQ ID NO: 95648 - DNA, 30 bp, Homo sapiens
  chr19:1919152-1919182
  hypo
agcgcccgcgtcctcgccagcacccagcca

SEQ ID NO: 95649 - DNA, 46 bp, Homo sapiens; identical to SEQ ID NO: 31742
  chr19:1920168-1920214
  hypo

SEQ ID NO: 95650 - DNA, 800 bp, Homo sapiens
  chr19:1920871-1921671
  hypo
tcagagacctccctgccccctcggccctcgtgcacgtgcggcagcagcgacttggctcttctcattggagcctgggtcatctcccgcaggtcacgggagaagctgagcatgcggtccctgcccgaggtggacagaaggtgaacgctcttgagaaagaaacccagcgggtcttaggagagcccggccccccttgtaatgagagaaatcaaaccacagcgcacagcgacttcatgtccaccgttggcttagtgaggccccacgctcagtgcgctgctgtggggcgagaggggacagccccgctctccctgtcctgggcggcttcaccagcgccacctccccacacactctgtgcactgctgtggggcaagaggcgacagccccgctctccctgccccgggcagcttcaccagcgtcacctccccaggggtgacgcatgcccgaggccatgagccacggcagcatctgtggtggcagaggactggaaactccagagaaatgacccccagcggggcctagctgtgtagatggtgagggtggccacatggcggcagccaggtactgaggacacggtgcagcaggggcccccggtgggccccgccaggaatcggacatcagcgggcgccgcagcctctaagcggagcatgcagcccactgacagtgtgctgggtgcctccctagacctgacacttgcatgcgggggcgtgcgatgctggccagtgggaagctgcgggggcggcggcaggagtcctcaaatgcctttgccgcttttcataaatctaaaattacatccaaacagaggt

SEQ ID NO: 95651 - DNA, 30 bp, Homo sapiens
  chr19:1954632-1954662
  hypo
gagaagggggctcccggggccctccccagg

SEQ ID NO: 95652 - DNA, 202 bp, Homo sapiens
  chr19:1955297-1955499
  hypo
ctgctgctgctgctgctgctgcgagggcctcaggcgcaggcggtgactctcggggccactcctgaggtgggggatgtgggctagcggccaccgtgggcggcaggtgtgcaagcagtgctcccgttttccactgggctgcccttcaccggctgtgggtcagcgccccccactgaggctcaggctgaggcgaggctccgcgggg

SEQ ID NO: 95653 - DNA, 706 bp, Homo sapiens
  chr19:1960884-1961590
  hypo
ctcaaaacaaaacaaaatgcaggcacggacgtttcagccccctcttcctgtggatgctgagagggtttccagaagaaggagaatgtccccgtgctggtggctcatccaggtgtgggccggtgtgcggcggggcgtgggcagaggagaggcttcgggctccggtttcctctcctgtggatgcgtcgcccccgcatggtggtcctctgcggaagtccccctgtccgtcccgttggcagccgcagtggaaagacggatggacgggctgtgacagggacagcccagtgtgaccccagccctggccgtcgcggttgtggcattctcgctgtcagggggctgttcccgtggctctcatggctgtggaggggcgtggagggggcggtccccatggccagaacctggccgtggcgggtggaggacttgaggccggctcagtggtcagcgctgctgcttgttcccctacacagaggcgttgggtggagctgcctcaggtatccctcctggctggggtgtgtgcgtcaccctgagtctccagcccatgctgaggagcctcgcaggcagggcccagcagcctatactccaggccattgctgtccgtttctccagaaggccctgctggtgggtggtcccaggagctgggcctcagtgggggatcccaggacagtggagcctgggaggggccccagtgttgaggcgtgaggtactgtct

SEQ ID NO: 95654 - DNA, 30 bp, Homo sapiens
  chr19:1969729-1969759
  hypo
ggcagcagagtcaccgtggagaggccaggg

SEQ ID NO: 95655 - DNA, 135 bp, Homo sapiens
  chr19:1970419-1970554
  hypo
cagcttcaccatgtaaaaggccgcacctggcccacctggctccgtcccttctgctcacaccaacctctcccgggtcggggtctgattgcccgggcaggcgtgaggagcagggccgaggactgagcctctcattgg

SEQ ID NO: 95656 - DNA, 30 bp, Homo sapiens
  chr19:1971266-1971296
  hypo
tttgagaccccacccgaaccagatcccacc

SEQ ID NO: 95657 - DNA, 319 bp, Homo sapiens; identical to SEQ ID NO: 31745
  chr19:1977027-1977346
  hypo

SEQ ID NO: 95658 - DNA, 30 bp, Homo sapiens; identical to SEQ ID NO: 31746
  chr19:1977777-1977807
  hypo

SEQ ID NO: 95659 - DNA, 1129 bp, Homo sapiens; identical to SEQ ID NO: 55360
  chr19:1978008-1979137
  hypo

SEQ ID NO: 95660 - DNA, 237 bp, Homo sapiens
  chr19:1979760-1979997
  hypo
tcggcaccgtccacaccgacctgccctcccagcctcagctccgggacaaaacccagccgcacagcaaaaaccaggtgaggcccgggcgggaccgaccgccccagggaggggcatgggcggccagcgtgaccccctactgcccccaccaggcgttgaactccaccaacggggagctgaatgcggacgaccccacggccggccactccaacgccccgatcacagcgcctgcagaggtgg

SEQ ID NO: 95661 - DNA, 330 bp, Homo sapiens
  chr19:1985876-1986206
  hypo
tatccggcaggggccgtccccacactgaatcctgcgtgcgcagaactcaagccggcatccaggcagtgggaacgccccgcaggctgggcttgggtggcctcgggcacgtgacaggtggggcccgtgtcctgataaacggacaggaacaaaaggaacgcaaggtctgggacccacggctctgggagcagcgccacccaggctggctcctagcagagaaatgggaatcgcaaatgcattgcaatgtgcagtgaagagacgcgagggacgcccgcggcgcaccgccggcagacgacgtgggcaggcgccctgagctgcgggtccgtgggccct

SEQ ID NO: 95662 - DNA, 625 bp, Homo sapiens
  chr19:1992863-1993488
  hypo
cccggcccaaaacacattttactaccaggcaggagcctgctgcctcccgggcccgcccccggccccgcctccgcctccagcctcggtccgccccaccccggccccgcctccagccaggcctggccccgcccccgcctcgtaccggccccgcccacctgcgtgagcagcatgaaggcgttgtcggctcgcaggttcttcttcaggaactccacgcaatgggcctcgagcgctggcaccgcgtacttcttggcggtgtatagcgtggtcatcaccgtctccgggccaatctgcacctcgtccgagtagagaaacctgcagaagcaacgcgggtggccgtgaggtgggaccgccatgcccgcccccaggggagagcgtcaggggaccactcagaccgttagactcggccaccggcccttgagctggcaggacccaaacacccacatcaggttccccgaggaaccttccagaattagcccctgtccgttgccctctgacatagggacacgacttggcaaggtggtcacccatgaaaacgagcaagaggctgaacccatctacacagcacacacccggaagcgtctatatggcctgtcttgttctgcccgggatgccccaggagagggca

SEQ ID NO: 95663 - DNA, 30 bp, Homo sapiens
  chr19:1997642-1997672
  hypo
tgcagacggacccacggcaaggacaggcag

SEQ ID NO: 95664 - DNA, 152 bp, Homo sapiens
  chr19:2000098-2000250
  hypo
cccttgagcctccagagggagcgccgccctcggacgccttgatccatggtcctgggctccgggactggcagaggatgaacccactgagtttgacccccccagtgtgtgggcattgggactgccgcccgcccgtctgccctcctggccgcgtc

SEQ ID NO: 95665 - DNA, 375 bp, Homo sapiens
  chr19:2000537-2000912
  hypo
aggcaggggctcctccaacaccgagcccctccctggagacacctgcatgggccttcaggattcgacccctgggcaccgctactgcctcctctgcccaccgtgagtccccagccccactcccggctgttccccccttcatgtatctgtaaccccttccccttccaaacaaatcgagaacacacggccacacaaaaacacatccacaattgctcacagcagcacgattcccaactccgaacgggggaaacaaccagcgtccattgacagacacggtgcgaccacccacgcactggaacacgacccagccacaaacaggaacgaggctctgatgcaggacccggtgcagatgcgccttgaagacgtcgtgctctatga

SEQ ID NO: 95666 - DNA, 100 bp, Homo sapiens
  chr19:2005107-2005207
  hypo
tgcgcccagccaggaattcttttgactgccaaattccatggaatctgtgaaccgcggtttgtttctgcactcactggctggtctgcgggttttccggttt

SEQ ID NO: 95667 - DNA, 21 bp, Homo sapiens
  chr19:2009031-2009052
  hypo
ttccaagacagagtctcgctt

SEQ ID NO: 95668 - DNA, 37 bp, Homo sapiens
  chr19:2026536-2026573
  hypo
gtgaaggaggttgggcgcggtggctcacacctgtaat

SEQ ID NO: 95669 - DNA, 91 bp, Homo sapiens
  chr19:2038524-2038615
  hypo
gccgaggccgcagccgttttcctgaaggtggcagaccaaaaacactgccctgggggtgaggattcggccagaccccggggtctgggctcag

SEQ ID NO: 95670 - DNA, 31 bp, Homo sapiens
  chr19:2039356-2039387
  hypo
cctctgctcaccttcccgggtgcctgcaatg

SEQ ID NO: 95671 - DNA, 248 bp, Homo sapiens
  chr19:2046070-2046318
  hypo
gacacgggtcttcccggctgtaggacggacagccggaatgccacacactgtttccacccccgctcaacaccgatcccaaggcgctgggttccccagggcgcggcgcgggcccaccttgacggcgtactcctggctggtgatcaggttgatgcaggtctgcactcgggcatgagcgccctcccccagcacatcttcctgcagctggtagacgtctgccgggcagcggggcgggcgtgagagggaccctg

SEQ ID NO: 95672 - DNA, 30 bp, Homo sapiens
  chr19:2076564-2076594
  hypo
gacgcggggcggcgcggaggaaactgcacc

SEQ ID NO: 95673 - DNA, 30 bp, Homo sapiens
  chr19:2078316-2078346
  hypo
gtcgctgatggtgccgtagatgaggttgac

SEQ ID NO: 95674 - DNA, 41 bp, Homo sapiens; identical to SEQ ID NO: 31757
  chr19:2088264-2088305
  hypo

SEQ ID NO: 95675 - DNA, 30 bp, Homo sapiens; identical to SEQ ID NO: 31758
  chr19:2099514-2099544
  hypo

SEQ ID NO: 95676 - DNA, 31 bp, Homo sapiens; identical to SEQ ID NO: 31759
  chr19:2111290-2111321
  hypo

SEQ ID NO: 95677 - DNA, 30 bp, Homo sapiens
  chr19:2111699-2111729
  hypo
gcgccattctgcaccggctcccccgctgcc

SEQ ID NO: 95678 - DNA, 30 bp, Homo sapiens
  chr19:2115266-2115296
  hypo
tcctcgtcgctctccgtgggcagcgagctg

SEQ ID NO: 95679 - DNA, 30 bp, Homo sapiens
  chr19:2115596-2115626
  hypo
gggtgtcctggtaccgctgcaaaggcaaca

SEQ ID NO: 95680 - DNA, 265 bp, Homo sapiens
  chr19:2116557-2116822
  hypo
caggagggaggagacgagggctcgccaggggcagccagcagctcacccgagccagctcttcctcgtccgcctccgacggccggtgcttgggacgccgctgctcctcctcgtggaagacggccctgggcctctcgtcctctgactcgctgtccgagagtggctcattgatccaggcgtccaggtccaggctgcaccggacaggagggccacacaaggcagtgtgtgaccgagcacgcgcctgcaggcgtccgccctgagcaggctc

SEQ ID NO: 95681 - DNA, 50 bp, Homo sapiens; identical to SEQ ID NO: 31760
  chr19:2120003-2120053
  hypo

SEQ ID NO: 95682 - DNA, 48 bp, Homo sapiens
  chr19:2122385-2122433
  hypo
cacatactgccatccacggtggctttcaggccacggggcagcactgag

SEQ ID NO: 95683 - DNA, 30 bp, Homo sapiens
  chr19:2123910-2123940
  hypo
agcaccatggccagcgccgacaccaactca

SEQ ID NO: 95684 - DNA, 32 bp, Homo sapiens
  chr19:2136919-2136951
  hypo
tgcccacaggaagacgcgtgtgggaaccagac

SEQ ID NO: 95685 - DNA, 334 bp, Homo sapiens
  chr19:2140168-2140502
  hypo
gaacaaaaagaccatcccaggcgtggagaggtcagaccctcacgagggcaaaggggatgtcaaacggcgcggctgctgtggaaagcagcctggggttcctccacggttccatgtggagttaccgccccagcaattccacttctgggcgtgcacccgaggggatggaaaacaggtgtccaaacaaaaacaagcacacgaacacacagggcagcaccatttctagtggcctgaaacaggaacagcccccacgctcgccgctgatgaatggatacacaccatgtggtgggtctgctccagtcaacttgcttgactttttttttttttgagacagggt

SEQ ID NO: 95686 - DNA, 39 bp, Homo sapiens; identical to SEQ ID NO: 31763
  chr19:2148549-2148588
  hypo

SEQ ID NO: 95687 - DNA, 30 bp, Homo sapiens; identical to SEQ ID NO: 31764
  chr19:2160537-2160567
  hypo

SEQ ID NO: 95688 - DNA, 578 bp, Homo sapiens; identical to SEQ ID NO: 11913
  chr19:2165095-2165673
  hypo

SEQ ID NO: 95689 - DNA, 444 bp, Homo sapiens; identical to SEQ ID NO: 55368
  chr19:2168902-2169346
  hypo

SEQ ID NO: 95690 - DNA, 282 bp, Homo sapiens
  chr19:2176354-2176636
  hypo
aatgaggcacaaggacgaaacaggcgtggggcagagggcacggctcgcgggagttgcagagcgagttcaccctgctactgcttctgcggggcactcatttttagaagtacacttacgtggcccccaaaataatgtcacgctgccaaggagagcaggcaagggcaggtgacaccgctgtcaatcagagcatttccagccctcacacctgtgagtcatctggctcccaggaacattctctgttccagtaaggcctgcgcctgtgagaagcgcttggctgaatcc

SEQ ID NO: 95691 - DNA, 31 bp, Homo sapiens
  chr19:2177162-2177193
  hypo
gcagccactagccactcggctgtgggcaccc

SEQ ID NO: 95692 - DNA, 199 bp, Homo sapiens; identical to SEQ ID NO: 31767
  chr19:2182655-2182854
  hypo

SEQ ID NO: 95693 - DNA, 31 bp, Homo sapiens
  chr19:2188503-2188534
  hypo
gtgcaggccccctcggcgctggggatgtgga

SEQ ID NO: 95694 - DNA, 30 bp, Homo sapiens; identical to SEQ ID NO: 31768
  chr19:2191139-2191169
  hypo

SEQ ID NO: 95695 - DNA, 254 bp, Homo sapiens
  chr19:2191532-2191786
  hypo
acctgtgcaccctctactgctcgctcccagaagctgccactcgctagcctgggccccagcccgggccccacccacggctgcagcctgccgcagtccttccctgggcacacctgctccctccacagcggctggaaaggtcccccgcggaggaagaccccaggtccctgggctcccggaggccctcgcgccctccctgcatccccagtctccctcggcacccctgcgtctgggccgtgccctgcccctcccaggtt

SEQ ID NO: 95696 - DNA, 31 bp, Homo sapiens; identical to SEQ ID NO: 31769
  chr19:2198383-2198414
  hypo

SEQ ID NO: 95697 - DNA, 30 bp, Homo sapiens; identical to SEQ ID NO: 31770
  chr19:2200489-2200519
  hypo

SEQ ID NO: 95698 - DNA, 108 bp, Homo sapiens
  chr19:2204157-2204265
  hypo
ctgtgtgtctgttagcgtgtctctgtgtgcgtgcctgtgcgtgcctgtgtctgcatgtctgtgcctgtgtgcatgcctgtgtgtgtgcgtgcccgtgtgcctccgtgt

SEQ ID NO: 95699 - DNA, 30 bp, Homo sapiens
  chr19:2213358-2213388
  hypo
tggtcccctcccgccgtggcctgagtattt

SEQ ID NO: 95700 - DNA, 555 bp, Homo sapiens
  chr19:2213810-2214365
  hypo
ccaccagcatgacctctcccccgccccatgtccccagctgggtgtgaaggcgctgacctacaacgacctgattcaagcgcagaaggagatctccgcccataaccagcagctgcgggagcagtcggagcagctggagcaggacaaccgcgcgctccgcggccagagcttgcagctggtgggtgccgcggcgcaaggacagggacgtggaaccagaggggccctgcctgggcgggtgtgtcctctgtgcgggtgggaggctctggaaggcccgcctctgttgtggggtttgttcccagacgaattgcgccacctgtgaaagcttgtcgagcgcgtcacagcaggcaggcctgggcccctcggctggatggtttctcagcggccctgggtgtcatggagccacactctggcaggctcgaggtgtggggtcatgcgagcatcccaccatcgtggtgtgggtgctggagctgcctcatctgtccgtggggggccccagtctccgcgtgttccgcatcctcagcctgctattccagaaacggggtctgtgccctaagcaca

SEQ ID NO: 95701 - DNA, 140 bp, Homo sapiens; identical to SEQ ID NO: 31772
  chr19:2215592-2215732
  hypo

SEQ ID NO: 95702 - DNA, 513 bp, Homo sapiens; identical to SEQ ID NO: 31773
  chr19:2216068-2216581
  hypo

SEQ ID NO: 95703 - DNA, 85 bp, Homo sapiens
  chr19:2219929-2220014
  hypo
cactcgcctggggccccgctcaagttcccccgctgccctcttcccacgcggtactggacggtgaccccggcggcctcccccagcc

SEQ ID NO: 95704 - DNA, 45 bp, Homo sapiens
  chr19:2222842-2222887
  hypo
ctgcctgggccacagagcgagactccctctcggggggacaaaaaa

SEQ ID NO: 95705 - DNA, 145 bp, Homo sapiens
  chr19:2224699-2224844
  hypo
caagccttctgcctcccagtgcctcccagcgtgcgccatcacagccggccctaagtgtgcttttggtggtgttctgtgttagttcgttctgctccttgcccacgtgtgcgtgcacgtgttacacgagaaacattgtagcacctgg

SEQ ID NO: 95706 - DNA, 30 bp, Homo sapiens
  chr19:2226536-2226566
  hypo
caagggccccgaggcggccggcctgagctc

SEQ ID NO: 95707 - DNA, 30 bp, Homo sapiens
  chr19:2226866-2226896
  hypo
ctccgcaggcggcgcggcgtcctccgccca

SEQ ID NO: 95708 - DNA, 193 bp, Homo sapiens
  chr19:2229559-2229752
  hypo
ctggagcttggccggcgtgtccaggtgtcaggctccctggtctgtcacggggcacgcccgtcgtctgttgtggttagaggagctggcactatgcctgtcatggtgctggccccaggtggcgtgtgtgctcgtgggaggcctcggtccccagcctgggtgagtgttgggctcccccaggcgcgatggtaacctc

SEQ ID NO: 95709 - DNA, 133 bp, Homo sapiens
  chr19:2232596-2232729
  hypo
tttcttccaggtggcatgaggcgtctcctggcggccagtgagaggccccggctagtgtgtcatcgccgaaacggggagtggagggcctaggggtgctcctagcagaagctccgggggctgacaccaggacacc

SEQ ID NO: 95710 - DNA, 1272 bp, Homo sapiens
  chr19:2243434-2244706
  hypo
ccccgggggcaagaccgggagcgggggcgtggcctcctcctccgagagcaaccgtgaccgcagggagcgcctccggcagctggccctggagaccatcgacatcaacaaggtgggccagccaccgtgcagctgcctgtggtgggtgctgggctttccagggcagccctggagagggtgccagaggctcttcttgggcctccgcccaggctgggcgatgcagccccgtgtccagacgctcccctgttgcccccgagcagccacagctcccatctgtccaccccagagagcagaccctctgtggctctgagtcccatgtggacatgttttgttctgtccacagccttctgttttgcattatttaattttctgggagtggggagagctgatgtcagtccagccagatgtggtgaagggcagcctttgattttagcttgtgcagaggcaggggtgagccgagtcccctcagcaccgtggacatcggggctggagcactctttgtgtaccctgacatgccccacgggcctggcctatggcaagggctctgttaccgtccccgtcttccagatgaggtcatgggtagagggggtgccacagccgcagatggtggagttagactttgaactccagcgtctgagacgagatgtgtgcgcccggctgccccagcttagggcctgcagatgggcgggtctttgggtcttcagtgtagcccatttgcttttcttgtgcctgtgtctgccttgtgcctactgctggcgtggtggcgtgggcagtggacggctccctgcctcgggagtgaccggcggtgctgtcctggctgtgcctccctctgactcagaaccaccaggaaggtggtgtcgggggctccctgggaacccccactgctcgaagcctggcccacagccccaggtggtgacacccgtgctcacgaaggcctcccgctggatcccccgttttcagaaatgcttgaccactgtcagcggtagccatgcctctacagaaggggggttctgcctccatgcctctacagaaaggggatcccgcctctgagggccttgacggcagcaggccgcgatcttctgtctaacgggcccctgttcttcccctccaggacccgtacttcatgaagaaccacctgggctcctatgaatgcaaactctgcctgacacttcacaacaatgaggtgcggcctctgcctggctccgggcggctcgcggcgggctgagtggctgacgtcagggggacctgcctgtgtctgtccgcccggcctcgagt

SEQ ID NO: 95711 - DNA, 298 bp, Homo sapiens
  chr19:2247478-2247776
  hypo
ctgggctcccagggtagagtccgggctggggaggctagtgcctcgggctccctgcctgatggtcgccctgaggtcacagggaccaggagccctctctgtcccccgccctcccaggtgccgagcagagagatcgacaaggcggagggcaagttctggacacactggaaccgggagaccaagcaggtgagtggctcgccccgagcctggctccttcccacccagccctggcggccctagccctgccctagccccacccgtgcctgctgaacctttctccgtctctctagttcttcctcca

SEQ ID NO: 95712 - DNA, 30 bp, Homo sapiens; identical to SEQ ID NO: 31778
  chr19:2248617-2248647
  hypo

SEQ ID NO: 95713 - DNA, 269 bp, Homo sapiens
  chr19:2255404-2255673
  hypo
acctggaggttctgcggacaccaactaacaggccccgtcctcccacccctcctcactcggcaaattcatactcatgccaggcatggcccggcgcccactccaggcatctctctgaccccgcatgcctgccctgggacccctccctaccgcccagcctcactggggtccagtatccatcagtacagtagcccaggctgctctggcccagagagggcgggagcccctgcaggacaacacagcaatgagtcccagacgcaccccaaaccgaa

SEQ ID NO: 95714 - DNA, 31 bp, Homo sapiens
  chr19:2266363-2266394
  hypo
agagtcatactctctgcgtcctctgccagca

SEQ ID NO: 95715 - DNA, 81 bp, Homo sapiens; identical to SEQ ID NO: 55378
  chr19:2273849-2273930
  hypo

SEQ ID NO: 95716 - DNA, 892 bp, Homo sapiens
  chr19:2275594-2276486
  hypo
ttggctatcatggagacgctgacctcagccccagccctgcctcctgggcaggcctggaccaggtgtgttcgccctgggttggggtcagtcccacagcagcgccagggcctggcccatcgaggactcggtggcctcggccaggtattcgcaacacagccagtcctcgaggctgggagcttccccacctgcggcccgctctgctaggcgcaggaccagcagcccgcggcgcacccgcagccagggcccgagcgctcggagccagggaccaagcggtgctccgcggccgcgcagctcaggcccgggcccccagagcagcgcctgcagcgcgccccgcgtccgggacgccgagggccgcaagcgggtcagctgtgctgccaggagctccaggcccgcggccaaaggcgtggtcgagggcgcagcaaggctgagcagcgctcggaggaggctgcccagctgcggcgcgtgggggcccggggatcccgggggtccagggggctgcagacagacgcggccaaagtcagtgaggagcaggcgtgggggccccgtcgtcgcacagccccgaggtgccaccagcagcaagttctccggccgcaactcgactagggccgcgccccacgcctccaggaacttcagggccgcgctcagctgcagcagcagcagggccacagcccacacgaactcctccggcggctgcgtgcaggcctccgccagccactgcgccaccgtgcgctctggaacctcggctgccagcgccactgcgcctctccagggcgccccgggcagtgtgccttcaggcaccaggccacacagcccctgcagattgaagtgtggagacagggaggcctgcagctccaggccccacgggtggggcacgtccgccccgggcttgggc

SEQ ID NO: 95717 - DNA, 30 bp, Homo sapiens
  chr19:2286775-2286805
  hypo
tcttctttcttccccggcctgagtttgggg

SEQ ID NO: 95718 - DNA, 509 bp, Homo sapiens; identical to SEQ ID NO: 11919
  chr19:2289762-2290271
  hypo

SEQ ID NO: 95719 - DNA, 237 bp, Homo sapiens; identical to SEQ ID NO: 11920
  chr19:2290630-2290867
  hypo

SEQ ID NO: 95720 - DNA, 158 bp, Homo sapiens
  chr19:2321611-2321769
  hypo
agcagccaagtccgcgggaaaccgagctgctcgggcctgccctgcaccccccgcgcccccggccaggctaggcgtcctgctgctggatgaaggggttggggatggcctccatgccgtcctgcgggcagattagcaccacggacgtgccccggcacacc

SEQ ID NO: 95721 - DNA, 226 bp, Homo sapiens; identical to SEQ ID NO: 55382
  chr19:2328965-2329191
  hypo

SEQ ID NO: 95722 - DNA, 30 bp, Homo sapiens
  chr19:2329778-2329808
  hypo
gcatccagatgagtgcgccgtccagttgtg

SEQ ID NO: 95723 - DNA, 25 bp, Homo sapiens
  chr19:2330122-2330147
  hypo
tttgagacggagtctcgctctgtcg

SEQ ID NO: 95724 - DNA, 21 bp, Homo sapiens
  chr19:2330386-2330407
  hypo
gacaggcgtgagccaccgtgc

SEQ ID NO: 95725 - DNA, 188 bp, Homo sapiens
  chr19:2331203-2331391
  hypo
tcccagaagggaggctctccccgcctggactcactggcctgtttcaaaggcccttgatgtggatgctttcacagtcacttggaagcggggtttctaagcctagtagtttctgaacctgtgtgcggttgcaaagcgtttgtgctgcaattgtgaaggatttggaggtcgaggcttgggctttgagcctg

SEQ ID NO: 95726 - DNA, 30 bp, Homo sapiens
  chr19:2334600-2334630
  hypo
gtggcctgtgagtacggcatggtgcacgtg

SEQ ID NO: 95727 - DNA, 30 bp, Homo sapiens
  chr19:2337303-2337333
  hypo
aggtgggccgaggccgtgcggggctttagg

SEQ ID NO: 95728 - DNA, 259 bp, Homo sapiens; identical to SEQ ID NO: 31787
  chr19:2339494-2339753
  hypo

SEQ ID NO: 95729 - DNA, 30 bp, Homo sapiens
  chr19:2351751-2351781
  hypo
ggtggaaggacgtgcgtgcagctcctgtgc

SEQ ID NO: 95730 - DNA, 30 bp, Homo sapiens
  chr19:2354275-2354305
  hypo
ctccagggcagagacgtccgtgcgggaact

SEQ ID NO: 95731 - DNA, 31 bp, Homo sapiens
  chr19:2359119-2359150
  hypo
acagcccagagagatccgaggaggcgtgacg

SEQ ID NO: 95732 - DNA, 177 bp, Homo sapiens
  chr19:2363008-2363185
  hypo
gggatcagggtcccagcgctcaggctggcctgaccgtggggtaattgggccctgcagagcctcacgccgcctgcttgtcctgccacgcggaatgggagtccgtgtgtgccccgctgcccacagcgtgtgaacgtgagttggggaccatgtggcccactgcgcgctgggtcccgtccc

SEQ ID NO: 95733 - DNA, 21 bp, Homo sapiens
  chr19:2366566-2366587
  hypo
ggccaggggctgggtgcggtg

SEQ ID NO: 95734 - DNA, 42 bp, Homo sapiens
  chr19:2377006-2377048
  hypo
agtggccacgggtgggcggctccctcacgctggcttctcctg

SEQ ID NO: 95735 - DNA, 190 bp, Homo sapiens
  chr19:2408349-2408539
  hypo
gcaggttccaagacccgacgaagtgggtggcctacgtgggtgcgacctacctcagcggctcggaggccagcaccgtgcgggcccaggtggtccagatcgtcaagcaccccctgtacaacgcggacacggccgactttgacgtggctgtgctggagctgaccagccctctgcctttcggccggcacatcca

SEQ ID NO: 95736 - DNA, 30 bp, Homo sapiens
  chr19:2433853-2433883
  hypo
cttgccctccaggtcgatctcctcgatgct

SEQ ID NO: 95737 - DNA, 30 bp, Homo sapiens; identical to SEQ ID NO: 31789
  chr19:2434975-2435005
  hypo

SEQ ID NO: 95738 - DNA, 30 bp, Homo sapiens
  chr19:2437152-2437182
  hypo
ggcccggccggccccggcattccaccctgc

SEQ ID NO: 95739 - DNA, 30 bp, Homo sapiens; identical to SEQ ID NO: 31790
  chr19:2442052-2442082
  hypo

SEQ ID NO: 95740 - DNA, 700 bp, Homo sapiens; identical to SEQ ID NO: 55390
  chr19:2488410-2489110
  hypo

SEQ ID NO: 95741 - DNA, 29 bp, Homo sapiens
  chr19:2507679-2507708
  hypo
cagagtctcactttgtcgcccagtctgga

SEQ ID NO: 95742 - DNA, 29 bp, Homo sapiens
  chr19:2507947-2507976
  hypo
gcccggccgcatgtgggtttttcaatggc

SEQ ID NO: 95743 - DNA, 242 bp, Homo sapiens
  chr19:2511248-2511490
  hypo
aattcacgtggtatcgacaactccacacaatattaaaacactgcgagaaagtgggtgcggcacacctggaattttaaaaaagtcagaaataaaaacaaccagacatcccaatgcagatggcatagaacctgctagaaccacaggcggcggctggaaacaggagacaggtctttacgaaggttagatgggcagcggttccgtggacagaggaggaggcgcggctggccggcatatggcttctg

SEQ ID NO: 95744 - DNA, 39 bp, Homo sapiens
  chr19:2513206-2513245
  hypo
agggatccccgcctcacgggcctgcacggaggacctggg

SEQ ID NO: 95745 - DNA, 239 bp, Homo sapiens
  chr19:2513267-2513506
  hypo
gcacgggttcttagacgcctgtctccactggggccggagggacaggactaggctagttttattctactacttgcttctaggccagccccgtggagggggtcggggcggccaggcctcctgcgatcagggctgcgtggggtccatctcaggtgtggccgcaggtgatgccggcaggccctggaagatgtggctgcacctgctcccgtccgtgccgcagaggaggacgcagtcatctttca

SEQ ID NO: 95746 - DNA, 74 bp, Homo sapiens
  chr19:2518479-2518553
  hypo
cctactggttggatcccggccagcagcagcgtgatggggtctgggagggctcagagctgcgctggagggagact

SEQ ID NO: 95747 - DNA, 315 bp, Homo sapiens
  chr19:2524627-2524942
  hypo
atgagtgcatgtacacatctacgtgtgtgcgtctgcatatgagtgtgtgcataggtgcatttgcatacgtgcatgtgtgtggacatgcatgccagtgtgcacgtgtgtatgtgcacgtgtgtggacacggcactgcatgtgcgtgtgcgcacacgtgtgtgggcatgcatgtcactatgggtgtgtgcatgcgtgttggcgtgtgtgtacgtcactgtaggtgcgtggatatgtgcgtgcgtgggtgtgtacatgtgtctgcatgtgtacatgcgtgtgcgtgtgtgtgcgcacgggagtgcatgtggatgcttg

SEQ ID NO: 95748 - DNA, 30 bp, Homo sapiens
  chr19:2626268-2626298
  hypo
ctgaccagcggcaccgtggaaacccaccgg

SEQ ID NO: 95749 - DNA, 30 bp, Homo sapiens
  chr19:2656756-2656786
  hypo
acagctgggaggcctcgacagagagcacat

SEQ ID NO: 95750 - DNA, 35 bp, Homo sapiens; identical to SEQ ID NO: 31797
  chr19:2682926-2682961
  hypo

SEQ ID NO: 95751 - DNA, 157 bp, Homo sapiens; identical to SEQ ID NO: 31798
  chr19:2683885-2684042
  hypo

SEQ ID NO: 95752 - DNA, 30 bp, Homo sapiens
  chr19:2696589-2696619
  hypo
agcccggcctgtccacgcaccggaacacga

SEQ ID NO: 95753 - DNA, 61 bp, Homo sapiens; identical to SEQ ID NO: 55394
  chr19:2702883-2702944
  hypo

SEQ ID NO: 95754 - DNA, 30 bp, Homo sapiens; identical to SEQ ID NO: 31799
  chr19:2716449-2716479
  hypo

SEQ ID NO: 95755 - DNA, 276 bp, Homo sapiens
  chr19:2753322-2753598
  hypo
tagtggctgaacctgaaacttcgcccctgcagatctcggttcttcctgctattgcaggggtggagaaggtgggtgcttgagccagggtcctgagccagagtccctgccagggctccgccaggttcagacgctcacgggtggggtgacctcgggcctgatagccaggcctcggtttctctgtctctagcatgagggtgccggtgcccaaccttggcttgtgggaaacaggaattcacagtccacaaaagcttagaggactttcagggagttgttctt

SEQ ID NO: 95756 - DNA, 37 bp, Homo sapiens; identical to SEQ ID NO: 31801
  chr19:2754664-2754701
  hypo

SEQ ID NO: 95757 - DNA, 30 bp, Homo sapiens; identical to SEQ ID NO: 31802
  chr19:2757808-2757838
  hypo

SEQ ID NO: 95758 - DNA, 30 bp, Homo sapiens
  chr19:2765418-2765448
  hypo
ctcaacacagatgccggctcaggaggcatc

SEQ ID NO: 95759 - DNA, 30 bp, Homo sapiens; identical to SEQ ID NO: 31803
  chr19:2774182-2774212
  hypo

SEQ ID NO: 95760 - DNA, 30 bp, Homo sapiens
  chr19:2780549-2780579
  hypo
cccctgcccaactccgccaggagagaatct

SEQ ID NO: 95761 - DNA, 135 bp, Homo sapiens
  chr19:2795358-2795493
  hypo
tgggctcctgctcccccggatgctcctcgcagtatgcagtggggcctttgctgttgatgtcacatgatcaggagagacccagagaccctcctgctgctgttcatcctcttaggcgaggacccctgggaatgtgct

SEQ ID NO: 95762 - DNA, 600 bp, Homo sapiens; identical to SEQ ID NO: 31805
  chr19:2796367-2796967
  hypo

SEQ ID NO: 95763 - DNA, 31 bp, Homo sapiens
  chr19:2804071-2804102
  hypo
ggtcggagtgagctcccgatcattctttcca

SEQ ID NO: 95764 - DNA, 31 bp, Homo sapiens; identical to SEQ ID NO: 31806
  chr19:2808307-2808338
  hypo

SEQ ID NO: 95765 - DNA, 30 bp, Homo sapiens
  chr19:2810288-2810318
  hypo
cccatccctgcaggcggagttcgccatgtt

SEQ ID NO: 95766 - DNA, 188 bp, Homo sapiens; identical to SEQ ID NO: 31807
  chr19:2812072-2812260
  hypo

SEQ ID NO: 95767 - DNA, 30 bp, Homo sapiens
  chr19:2843123-2843153
  hypo
cctggagtgtgtgtcgtttctcagatctgt

SEQ ID NO: 95768 - DNA, 88 bp, Homo sapiens
  chr19:2881139-2881227
  hypo
aggcgtgagccaccgcgcccagcctaataaattcttgtttattcataatgacaaaaacttacgtaacggttttataaatttaagtatt

SEQ ID NO: 95769 - DNA, 31 bp, Homo sapiens
  chr19:2889959-2889990
  hypo
ggcaagattcgtagtcagaagacacaaaacc

SEQ ID NO: 95770 - DNA, 181 bp, Homo sapiens
  chr19:2899802-2899983
  hypo
acaatgtccaacaaaaaaacaaatccagcgaggccagacaggataggggctccctggggtccgcccattttcgggatcaggtgactcgaggtttggtccttattttagtgcaggctcagatgtcgggggcgagccaaagtgcaggggcctgtgggaaggacaggaggctgggaaacgtttg

SEQ ID NO: 95771 - DNA, 38 bp, Homo sapiens
  chr19:2908410-2908448
  hypo
cgtacagccatttaacgtgcacatttcattgttgttgt

SEQ ID NO: 95772 - DNA, 31 bp, Homo sapiens
  chr19:2917297-2917328
  hypo
gagcagtgtcggatggcgtttaatgggttcg

SEQ ID NO: 95773 - DNA, 147 bp, Homo sapiens; identical to SEQ ID NO: 31808
  chr19:2919930-2920077
  hypo

SEQ ID NO: 95774 - DNA, 34 bp, Homo sapiens
  chr19:2927483-2927517
  hypo
atagggccgggtgtggcggctcacgcctgtaatt

SEQ ID NO: 95775 - DNA, 89 bp, Homo sapiens
  chr19:2934501-2934590
  hypo
ctgctgagacttttcacgtatgtcacagatgctgtccttgagtcctggcaattacagggtttctctacagtctgcgttttcataggagg

SEQ ID NO: 95776 - DNA, 20 bp, Homo sapiens
  chr19:2935614-2935634
  hypo
cactgcgcccagcccacggt

SEQ ID NO: 95777 - DNA, 38 bp, Homo sapiens
  chr19:2938053-2938091
  hypo
caggggtttgtacttctaacccacgatgccaaacggaa

SEQ ID NO: 95778 - DNA, 78 bp, Homo sapiens
  chr19:2938993-2939071
  hypo
tgctctccaggacgcagtgagggaatgatgccacccttacccaaggaggcagtgagggaatgacgccatccttaccca

SEQ ID NO: 95779 - DNA, 70 bp, Homo sapiens
  chr19:2941877-2941947
  hypo
catggggctgtgtgtgcgcctttcccctcatcctaatggaagatgcaacgtcttccgagtttgagagttt

SEQ ID NO: 95780 - DNA, 836 bp, Homo sapiens; identical to SEQ ID NO: 11933
  chr19:2944613-2945449
  hypo

SEQ ID NO: 95781 - DNA, 633 bp, Homo sapiens; identical to SEQ ID NO: 55400
  chr19:2950417-2951050
  hypo

SEQ ID NO: 95782 - DNA, 93 bp, Homo sapiens; identical to SEQ ID NO: 55401
  chr19:2977420-2977513
  hypo

SEQ ID NO: 95783 - DNA, 93 bp, Homo sapiens
  chr19:2995960-2996053
  hypo
ccgtttccgtcctcgttctctgggaatctagtcacagccacagactttgctgttggggtagcagatctccacctccgccgcccggagcagctc

SEQ ID NO: 95784 - DNA, 62 bp, Homo sapiens; identical to SEQ ID NO: 31817
  chr19:2996847-2996909
  hypo

SEQ ID NO: 95785 - DNA, 225 bp, Homo sapiens
  chr19:2997565-2997790
  hypo
acatggttgcctcccagtaaccgtgcccaagaggaacaatgatcaccggttccccagcccgagagagaagtgcggatgtgatagatacattttatttccaccgaggtcccctgcccatcggcccccacatgcagcaggggaaggtgtgaagccgttggccagagagcagatgggatgtacggttcctaggcagggctgggaggcggctgctaggatgtctgtcct

SEQ ID NO: 95786 - DNA, 30 bp, Homo sapiens; identical to SEQ ID NO: 31818
  chr19:3002423-3002453
  hypo

SEQ ID NO: 95787 - DNA, 144 bp, Homo sapiens
  chr19:3053350-3053494
  hypo
cctgggacccggggtcgggggagactcggggtgcccaggacgggaaaggggcagctagcattgcgtgcatgcagtaccagggtgagagggctgtggcccaggcagactgtcggttacacatgttcaaaacgggggaagggccgg

SEQ ID NO: 95788 - DNA, 115 bp, Homo sapiens
  chr19:3055114-3055229
  hypo
gtagctgcacattcctgcatgcgtgtccctgtgctgtctgcacacacgtgtatccgtgtctgcatctgtgtatctcccgtgtgttgatgtgctcgtgcctatctgtgtggctgtg

SEQ ID NO: 95789 - DNA, 604 bp, Homo sapiens
  chr19:3055431-3056035
  hypo
attccagagcagggtgaggcccgccccccacacgcctgcacccctggagtgtctctggcccggggattcttctgcacaggccggctctggtgttcagagccagggaggtccagagaggggaggcgtgtgccctggggcgcccagcacaccacccaagatggctgcagtggacaggggctgggcaagtgcggggccccctcacaacccctccccaaggccctggctcttacctcttgggagaggtagggcaggacctgggcacaaatcccgttcagccttttgacgatctcagcctggaacacacagatgaagccggcttcagtcctgggcgggtggcaggtgcaggctagccacaggaggcctgcgcggggcccggcccagccctgccacttgcggcttctaagaggggctaggtctggccagggtgggatgagcaaagccgtgttcgggcccgagggcagccagtcagtggcaaaggtggggctggacaccggctgtcgcctgcagcttagagtgaggtaagtgcaggatgaggccagactgcacattcctcgggggtcggccactcaggcccctggcaggtagtaagcgcttgtgcgaatgt

SEQ ID NO: 95790 - DNA, 31 bp, Homo sapiens
  chr19:3056363-3056394
  hypo
ggagagagagggggagcgggagatgggggtg

SEQ ID NO: 95791 - DNA, 88 bp, Homo sapiens; identical to SEQ ID NO: 11938
  chr19:3094303-3094391
  hypo

SEQ ID NO: 95792 - DNA, 174 bp, Homo sapiens; identical to SEQ ID NO: 11939
  chr19:3094776-3094950
  hypo

SEQ ID NO: 95793 - DNA, 30 bp, Homo sapiens
  chr19:3101484-3101514
  hypo
agtcccactggatgcggcgagggttgaccg

SEQ ID NO: 95794 - DNA, 31 bp, Homo sapiens
  chr19:3102679-3102710
  hypo
ggttctgagactgaagcgaagcaggcatgag

SEQ ID NO: 95795 - DNA, 815 bp, Homo sapiens
  chr19:3105563-3106378
  hypo
cccaagagctccgtggcggaagaagctgatcccgcctcccaacaccactgtcttaggggtgagaattttaacataggaatttggggggatcacagacattcattgctatgggtgggaccacttggtgcgttgcccttggggtggcggtgtggtcagtggtccattcctgcccagcgccgagcagcggtctgtgcgtggggtctttgcacccgtgcacctgctgaagggtctctggagctttggctttttggcttttacgagtaaagctgccgtggtgcttggtgtgcggtgaggagtggacagaaggctctgtcctggcaggtgccctgcagtggcctgagaccgggagatgagggccggcaaggggctgtggacgagtccagagtgaggcggcatctcggaggggctcacacattgtctcaggaggagtgggctggcatttctttccagtgggcagctgttgaagattttggagccaaaagagcgttccagctcagatgtctttcaggtggagtgtggctgcaggtggggcaggctgggtcagggtggagccatgtgggctgaggcccgagttggggctgtggctttggggccacatggctgccggtcgggtgggagcgagtctctgctgaccagggccctggatgttgagccccagccgcggggtgtgaggtctcaggcaggacccaggcattcagacattgggtccactgtgtgtggacccctgcgtcccagctccaagacgctgtgtgacgggaggcggcagcagctgagttggcgcggggagacagggcgatttgaaaagcaggctggga

SEQ ID NO: 95796 - DNA, 30 bp, Homo sapiens; identical to SEQ ID NO: 31824
  chr19:3107775-3107805
  hypo

SEQ ID NO: 95797 - DNA, 31 bp, Homo sapiens
  chr19:3108247-3108278
  hypo
caggtgaggggtcctgcgacaggcacctgtg

SEQ ID NO: 95798 - DNA, 112 bp, Homo sapiens
  chr19:3109615-3109727
  hypo
cagggggcagtgtggccgtggccgctgagcaaagctctggggaagggggcgcccagcccttggggtggtctgtgcagagatgccgttggggtgagtccgtctgtcagggcac

SEQ ID NO: 95799 - DNA, 341 bp, Homo sapiens
  chr19:3113300-3113641
  hypo
cgacgtctcccctgcccgccctcgcaggccaatgcgctcctgatccgggaggtggacgtggagaaggtgaccaccttcgagcatcagtacgtcagtgccatcaagaccctgtgggaggacccgggcatccaggaatgctacgaccgcaggcgcgagtaccagctctccgactctgccaagtagtaagtgcggccgcaccgctggcggcctggggacggcagctgcgggccggtgcctgggacccttcgggaaggcctccgcggcgtctgtggtgccccctgcctgctcgccgggggcagggatgcggtgggcccgggccacctggccggatggagggacca

SEQ ID NO: 95800 - DNA, 31 bp, Homo sapiens; identical to SEQ ID NO: 31827
  chr19:3114233-3114264
  hypo

SEQ ID NO: 95801 - DNA, 348 bp, Homo sapiens
  chr19:3114745-3115093
  hypo
ggaggctcgtatcccgaccccagggtctccattggcccgagccctccgggctgcttcagacactgccgtaggtggcgcagtgcgcggtccaccccctcctggtggctttccgtcctcccgctggtttgggtgctgtgtccctgtcctgcccccccacccccggcagccggcctgagcacccaccgctgtgttgcagctacctgaccgacgttgaccgcatcgccaccttgggctacctgcccacccagcaggacgtgctgcgggtccgcgtgcccaccaccggcatcatcgagtaccctttcgacctggagaacatcatcttccggtaccgcccgggccacagcaggc

SEQ ID NO: 95802 - DNA, 30 bp, Homo sapiens
  chr19:3116701-3116731
  hypo
cctggagggcctcgcggtggctccggttgc

SEQ ID NO: 95803 - DNA, 81 bp, Homo sapiens
  chr19:3117183-3117264
  hypo
caggatacagctgaggcgagccaggcataggccaggttgtggcatgaatgtcccctcacagccccacgctggcctcttaac

SEQ ID NO: 95804 - DNA, 213 bp, Homo sapiens
  chr19:3118889-3119102
  hypo
ggtggctgagtcctggcgctgtgtcctttcaggatggtggatgtggggggccagcggtcggagcggaggaagtggatccactgctttgagaacgtgacatccatcatgtttctcgtcgccctcagcgaatacgaccaagtcctggtggagtcggacaacgaggtgggccctgccctgagcaggggcagcgttgggggccgggccttccccacc

SEQ ID NO: 95805 - DNA, 30 bp, Homo sapiens; identical to SEQ ID NO: 31830
  chr19:3121225-3121255
  hypo

SEQ ID NO: 95806 - DNA, 396 bp, Homo sapiens; identical to SEQ ID NO: 31831
  chr19:3148405-3148801
  hypo

SEQ ID NO: 95807 - DNA, 30 bp, Homo sapiens
  chr19:3151441-3151471
  hypo
ggggacaccactcctcgatgaggccattcc

SEQ ID NO: 95808 - DNA, 84 bp, Homo sapiens
  chr19:3151728-3151812
  hypo
caccgaggagggctacgtccccacagctcaggacgtgctccgcagccgcatgcccaccactggcatcaacgagtactgcttctc

SEQ ID NO: 95809 - DNA, 211 bp, Homo sapiens
  chr19:3155757-3155968
  hypo
gggttgggggtgtcacggagcaggctcctgagctctgaaagggggcacctcggttccctgtaggatcgtggacgtcgggggccagaagtcagagcgtaagaaatggatccattgtttcgagaacgtgatcgccctcatctacctggcctcactgagtgaatacgaccagtgcctggaggagaacaaccaggaggtgcgccaccgcctccct

SEQ ID NO: 95810 - DNA, 31 bp, Homo sapiens; identical to SEQ ID NO: 31833
  chr19:3192318-3192349
  hypo

SEQ ID NO: 95811 - DNA, 30 bp, Homo sapiens
  chr19:3192586-3192616
  hypo
cggcagtcggcgggcgccgtggtcatcatc

SEQ ID NO: 95812 - DNA, 402 bp, Homo sapiens
  chr19:3196191-3196593
  hypo
acggccactgccaacggcttccagatggtcaccagcggggtacagagcaaggccgtgagtgactggctgattgccagcgtggaggtgagtgccgcctgccccggagccagccccacgtccccaggggttcctgccatccgcctggctccccggctcggccgtactagaggggagccgctgatgggaaactggagtcggatcgcccccctgcctggctgaaaacctcctgtggctccgctggcagctgcaggaacccaaactcctcacatggccggggagtcgctctgtggagtgcccaggcccctgccagcccccggcccatctccttccttccatcatggacccccacacaccaagccgctgcctcccaccccagggcctttgcaccggctgcccctccca

SEQ ID NO: 95813 - DNA, 30 bp, Homo sapiens
  chr19:3198841-3198871
  hypo
gaccttcccaccatcgtcatcgtggcccac

SEQ ID NO: 95814 - DNA, 30 bp, Homo sapiens; identical to SEQ ID NO: 31835
  chr19:3201206-3201236
  hypo

SEQ ID NO: 95815 - DNA, 30 bp, Homo sapiens
  chr19:3208034-3208064
  hypo
tgcccgatcgcgcgcggcctccgcccaccg

SEQ ID NO: 95816 - DNA, 361 bp, Homo sapiens
  chr19:3214889-3215250
  hypo
tgccgggattacctgtgtgagccaccgcgcccagacttgggtaattgcttttcagatgctcatgttacagatggtaacatggaggccgagcacaaggggttcagacgtggattggacgaatctgagggccacgccattagccacatactgagtggagtgggcgaaaagggcccaggtttaggtcaccgggataaccagtgtccagagatggacggcacttacctgaggccacagagcaggtgaggatgagccccagcgggagcgagtagccagggagccggcctgcctcctgggctggggagaagacactggaagagcctggagaccgcccagcctccctgattccacgctagacatttaa

SEQ ID NO: 95817 - DNA, 12 bp, Homo sapiens
  chr19:3218880-3218892
  hypo
gggcgcggcggc

SEQ ID NO: 95818 - DNA, 178 bp, Homo sapiens; identical to SEQ ID NO: 31837
  chr19:3219524-3219702
  hypo

SEQ ID NO: 95819 - DNA, 223 bp, Homo sapiens; identical to SEQ ID NO: 31838
  chr19:3296494-3296717
  hypo

SEQ ID NO: 95820 - DNA, 101 bp, Homo sapiens; identical to SEQ ID NO: 31839
  chr19:3336854-3336955
  hypo

SEQ ID NO: 95821 - DNA, 288 bp, Homo sapiens; identical to SEQ ID NO: 55410
  chr19:3361101-3361389
  hypo

SEQ ID NO: 95822 - DNA, 55 bp, Homo sapiens; identical to SEQ ID NO: 11941
  chr19:3367361-3367416
  hypo

SEQ ID NO: 95823 - DNA, 31 bp, Homo sapiens
  chr19:3381002-3381033
  hypo
caacctcagttttacccgtctgtacaatggg

SEQ ID NO: 95824 - DNA, 30 bp, Homo sapiens; identical to SEQ ID NO: 31842
  chr19:3381511-3381541
  hypo

SEQ ID NO: 95825 - DNA, 30 bp, Homo sapiens
  chr19:3382112-3382142
  hypo
gcaccgacggcgagcgcctggtcaaggctg

SEQ ID NO: 95826 - DNA, 54 bp, Homo sapiens
  chr19:3410577-3410631
  hypo
agggccttgtgggccacgggaagaaggtgggcttttccccgcaaagaaggtggg

SEQ ID NO: 95827 - DNA, 121 bp, Homo sapiens
  chr19:3422334-3422455
  hypo
gtgctgagattacaggcgtgagccactgtgccactgcccctggcttaatcatcatctcattttgcggatgaagaaactcaggccttgaaaggaaagtgaggccgggcgcggtggctcacgc

SEQ ID NO: 95828 - DNA, 147 bp, Homo sapiens
  chr19:3424686-3424833
  hypo
tcattttacagatgaggctcagagaaggcaagcgacttgctcagggtcgcacagcaagaaagcggcacagctgggatttgaacatcagtctgttaagattccaggtgtctaagttcttacccacgactgagccgcccctgcagaagc

SEQ ID NO: 95829 - DNA, 91 bp, Homo sapiens
  chr19:3449009-3449100
  hypo
aggcatctcgtccccggtgaagaagacagagatggacaagtcaccattcaacagcccgtccccccaggactctccccgcctctccagcttc

SEQ ID NO: 95830 - DNA, 30 bp, Homo sapiens
  chr19:3452665-3452695
  hypo
tgagttgggcggggcgcattcgggcctctc

SEQ ID NO: 95831 - DNA, 33 bp, Homo sapiens
  chr19:3453420-3453453
  hypo
gtgaattaggaaaaacgcggagaacctgctgtt

SEQ ID NO: 95832 - DNA, 138 bp, Homo sapiens
  chr19:3453940-3454078
  hypo
gtggggcggatgtccgcaggggggcctgtcccctccccagccccactgccaggtcagaggtcaggcccgaccctgcagggcctggcgagtttggtgggtctccggaaaacagcccagtggccacgtggttgggcccat

SEQ ID NO: 95833 - DNA, 196 bp, Homo sapiens
  chr19:3456282-3456478
  hypo
ctcagcagacaccccgcccacctgggcgatctcagccgtgacccccgggcccctcgagtcaggatccccgcctcccaaggaccttgggcctttcaggggggcccggttcaactgggggtagggcggcaggctcggaggccccaggcactgggtgcagaggcccggctgtgtgacgcctggcggtggccaccctctc

SEQ ID NO: 95834 - DNA, 30 bp, Homo sapiens
  chr19:3462638-3462668
  hypo
aggtggggggtgagcgtgggaagaggtaaa

SEQ ID NO: 95835 - DNA, 30 bp, Homo sapiens; identical to SEQ ID NO: 31845
  chr19:3463226-3463256
  hypo

SEQ ID NO: 95836 - DNA, 30 bp, Homo sapiens
  chr19:3463773-3463803
  hypo
gtgcccgtctggagcgcccccgtcagcccc

SEQ ID NO: 95837 - DNA, 140 bp, Homo sapiens; identical to SEQ ID NO: 31846
  chr19:3464750-3464890
  hypo

SEQ ID NO: 95838 - DNA, 35 bp, Homo sapiens
  chr19:3465694-3465729
  hypo
tggtccctaggccacgggccggcccccagacacca

SEQ ID NO: 95839 - DNA, 1051 bp, Homo sapiens
  chr19:3490841-3491892
  hypo
ttccatctgggcagcgctctgaggtctgcttgtccctccctggcccctgtgccctacctgacccactcagggaccaccaccctgtccctacccaggcctcggggtgggggagtcagaggcccccagaccctgtgtcccattcctagtgaagctgaagccaccataacgtcagcctcttcccagagccccagctctgcccctggcttccctcgcgatcctcccctggctcccctcgcgatcctcccttggcttccctcgcgatcctcccctggcttccctcgcgatcctcccctggcttccctcgcgatcctcccctggcttccctcgcgatcctcccctggcttccctcgcaatcctcccctgtcctgagccgggcatcccagagcctcccgcagagtcccaccccaagcctggaaacttccacgctacagccctgcgccaggccccgaggagcagtcaggggactcagggagtcacagcacaacggcagctcctcggtcccagacggaggagggggacagcaaccatgcgcccagcaagacacaagcgatgacaccgatttacacacacccggtttagacgccaaagctctgcgggggaggagcggccctcaagagtcctccgggagctccgggtgagggtggggccctaggagggggccccgcgcagctgctccaggccgtccgcgtactggaaggcccgcccggtctcgtgctcatacatgtccagagccacctcgcagctctcacgcaccacgcgctctgggtcgtccgcgtgagcctgcagcgcggccaggcaggcgggccgggcaatggcgcccagggcctccgcgcactcgtgccgcaccatggggttctcggtgcatcgggccagggcggccgccagctggggcaccgccgcctcgtgctgcagctgtcccaggacgtagccgacctcgtggcggaagagggcgctcccacagtgcagacctgcaggggagagggacactcgctggggccaggaggggtgggaaggggagctctgtcttttcgaagacatggggtcttgctat

SEQ ID NO: 95840 - DNA, 30 bp, Homo sapiens
  chr19:3492425-3492455
  hypo
cgccgccggctccccgccgtgctgctgcag

SEQ ID NO: 95841 - DNA, 30 bp, Homo sapiens
  chr19:3522572-3522602
  hypo
cagacgcacacgcacgtgggtccccatggc

SEQ ID NO: 95842 - DNA, 30 bp, Homo sapiens
  chr19:3522931-3522961
  hypo
tctcctgcccttcccgctgcaggctaacct

SEQ ID NO: 95843 - DNA, 382 bp, Homo sapiens
  chr19:3531589-3531971
  hypo
gtcgttagggaaaccgtcccagagccctggtgaggagagagcctggcgcgaccaacgccaggacgggcacagtccccgggccagacctgacaccggtgctctgcccatgccttccatcctaggggaacctggtggcggtgggcacacacaagggcttcgtgcagatctgggacgcagccgcagggaagaagctgtccatgttggagggccacacggcacgcgtcggtgaggagcccgggtcccatggctggtgagctccctgaggccccagctccgcgagggcaggagaggctcacccccgcttccacctggcctccaggggcgctggcctggaatgctgagcagctgtcgtccgggagccgcgaccgcatgatcctgcaga

SEQ ID NO: 95844 - DNA, 31 bp, Homo sapiens; identical to SEQ ID NO: 31850
  chr19:3532514-3532545
  hypo

SEQ ID NO: 95845 - DNA, 30 bp, Homo sapiens; identical to SEQ ID NO: 31851
  chr19:3535090-3535120
  hypo

SEQ ID NO: 95846 - DNA, 30 bp, Homo sapiens
  chr19:3546145-3546175
  hypo
gtacacgaacgctccgctgttctgtggaga

SEQ ID NO: 95847 - DNA, 135 bp, Homo sapiens
  chr19:3562275-3562410
  hypo
taaggaaactgagtttcacaaagacgggcatgggcatgggactgtggcgggcatgggactaacaagaggcagatgtgggatttgaactcagctccacgtgacctctttatgtgctggctgcggaatgccacctga

SEQ ID NO: 95848 - DNA, 156 bp, Homo sapiens; identical to SEQ ID NO: 31852
  chr19:3571350-3571506
  hypo

SEQ ID NO: 95849 - DNA, 58 bp, Homo sapiens; identical to SEQ ID NO: 55417
  chr19:3573236-3573294
  hypo

SEQ ID NO: 95850 - DNA, 908 bp, Homo sapiens
  chr19:3577590-3578498
  hypo
tcaccccacctccccacgcccccgtcacccatccctccccacgccccgctgacgcctgagccccctccaccaccccagtcacgtcccacgcgaccccagccccccggtgtcatccccacctccccgacctcgttccctccgtccgtgactgtcctcagcggaccctggacgcccgccgctctagccccgcgtccccaccctgtccccgtcctcgccatcctcctgccccggcttaccttagcccaccctgcgccgctcctgcgctggcggtgtccggacctctgagcgcccgcgcgacccgccctgagtcaccccctaccgctgcccctggagcccccgccccgcgactccccggcaccctcgcctgaccttcccgcctgtcccccaggcacgggcgaaacgcccacgctgggcactctggacttctacatggcccggcttcacggagccatcgagcgcgaccccgcccagcacgagaagctcatcgtccgcatcaaggaaatcctggcccaggtcgccaggtgtgtgccgggcgaggcggggcggggccggggttcaaggcccggatgtgcccgccctggggttccccaggtccgcgagggctgctgggtgggactccgcagcttactagagatcacctcccggaggggcctacctgcggtcgcccctgatgcaccagtgctaggatggccatggagaaccccgggccggcgggacccactcgggggcaccagaacttccctaaagcttctcagggtggatcccagcgcccgggttagataggttcaacgcctgtcccccaaccctggcatctgttggagcagctgatgggccatggtctctggggttccccagggccggggtgggggccagagatgatgagggcctcatcccgggccctcctctct

SEQ ID NO: 95851 - DNA, 29 bp, Homo sapiens
  chr19:3580165-3580194
  hypo
ccgcacccggactatatgtccttttgtat

SEQ ID NO: 95852 - DNA, 30 bp, Homo sapiens; identical to SEQ ID NO: 55419
  chr19:3585594-3585624
  hypo

SEQ ID NO: 95853 - DNA, 31 bp, Homo sapiens
  chr19:3589345-3589376
  hypo
agattctagaaaggctcggctgttggcctcc

SEQ ID NO: 95854 - DNA, 26 bp, Homo sapiens
  chr19:3595359-3595385
  hypo
gagcaagactccgtctaaaaaaaaaa

SEQ ID NO: 95855 - DNA, 30 bp, Homo sapiens
  chr19:3599739-3599769
  hypo
ccggcgtgagccaccgcgcccggtcccacc

SEQ ID NO: 95856 - DNA, 83 bp, Homo sapiens; identical to SEQ ID NO: 31856
  chr19:3600527-3600610
  hypo

SEQ ID NO: 95857 - DNA, 30 bp, Homo sapiens; identical to SEQ ID NO: 31857
  chr19:3613558-3613588
  hypo

SEQ ID NO: 95858 - DNA, 30 bp, Homo sapiens
  chr19:3623721-3623751
  hypo
tccgaaggggttgtcggtgttggtgtagcc

SEQ ID NO: 95859 - DNA, 30 bp, Homo sapiens
  chr19:3633319-3633349
  hypo
cacctgtgccctcccgccccgggcctcagt

SEQ ID NO: 95860 - DNA, 30 bp, Homo sapiens
  chr19:3636632-3636662
  hypo
ctggctccgtgggacggagctgcctagagc

SEQ ID NO: 95861 - DNA, 164 bp, Homo sapiens; identical to SEQ ID NO: 31858
  chr19:3638706-3638870
  hypo

SEQ ID NO: 95862 - DNA, 394 bp, Homo sapiens
  chr19:3643064-3643458
  hypo
cctcccacacattggatgctccgcccccgcgcacccacatgcagtgtatgtacatccaccgtacatacgatgctccacccacatgcacagcggatgccccgcccacatgcagtgaatgccccgcccccacgcacagcggatgccccgcccacatgcactgcggatgcctcgcccacctgtaccgcggctgctccgacgtctccgagggggaccgctcaggaatggagagggatgtggatgacagagtcgtggcaatggaggctgtagtggcttcttcgaaagaaggtggcgtgcagggcaggaggtcgggccggcctgaggggagaggactgtgggcaccttgcggagcctccgagcccccaaacacacagtcgattctccctgaggcttggct

SEQ ID NO: 95863 - DNA, 161 bp, Homo sapiens
  chr19:3648544-3648705
  hypo
gctgcagacccgggcgcccacctgtgggactgcagacccggggcgtccacctgtaggactgcagacccgggcacccacctgtaggactgcaggatgtcgatgatgccaatgtgcagcagcagccgctccccgcggccgttcacagcggggatcccgcccat

SEQ ID NO: 95864 - DNA, 30 bp, Homo sapiens
  chr19:3652045-3652075
  hypo
ggaacacgccacgccgtcagccgtctctat

SEQ ID NO: 95865 - DNA, 35 bp, Homo sapiens
  chr19:3680258-3680293
  hypo
tgacacaccactgaggcggccggctctctgtctaa

SEQ ID NO: 95866 - DNA, 45 bp, Homo sapiens; identical to SEQ ID NO: 31860
  chr19:3691223-3691268
  hypo

SEQ ID NO: 95867 - DNA, 88 bp, Homo sapiens
  chr19:3694858-3694946
  hypo
cgcccaacgcagcccggctctgggctgggcaaacatcttccgtaaaggaccgggcagcaagtgttttcggcttcgtgggacacgtagc

SEQ ID NO: 95868 - DNA, 30 bp, Homo sapiens
  chr19:3701675-3701705
  hypo
gatctacacagggccgggcgcggtggctca

SEQ ID NO: 95869 - DNA, 282 bp, Homo sapiens
  chr19:3709587-3709869
  hypo
tccagaaccaagagggtcccccggggccgaggaggcatggatgatcgcatagtgggggacagagcggcccggcatttggggtcaccttgtggctgtgtggctgcagagctcccagggagcaggcttgcttgagattcgggagtccgtgggggtgggcgacatggatcccaccttgcctgggttttgagagcaaacccgtggactcagttagatctggcttccacacctcccttctctccgggcctctgtttcctgctctgtaaaatggggatattgagggcc

SEQ ID NO: 95870 - DNA, 161 bp, Homo sapiens
  chr19:3728586-3728747
  hypo
ctcatcctctctcaggacccccgccggggctttggcattgcgatctctggaggccgagaccggcccggtggatccatggttgtatctgacgtggtacctggagggccggcggagggcaggctacagtgagtatccaggcagctgggttctggcgggggagg

SEQ ID NO: 95871 - DNA, 213 bp, Homo sapiens
  chr19:3730409-3730622
  hypo
ccagggcgccaggactcggatgaagacgatgggccccagcgggtggaggaggtggaccagggccggggctatgacggcgactcatccagtggctccggccgctcctgggacgagcgctcccgccggccgaggcctggtcgccggggccgggccggcagccatgggcgtaggagcccaggtggtggctctgaggccaacgggctggccctggtg

SEQ ID NO: 95872 - DNA, 31 bp, Homo sapiens
  chr19:3731830-3731861
  hypo
ttaggatgggagggcccgcacctggactgct

SEQ ID NO: 95873 - DNA, 96 bp, Homo sapiens; identical to SEQ ID NO: 31863
  chr19:3739004-3739100
  hypo

SEQ ID NO: 95874 - DNA, 399 bp, Homo sapiens
  chr19:3740454-3740853
  hypo
gcctgtccacaggctccgaggggtaggacgaggacgtctttggggccaccatgctgctgaccccagtgctcagtactgtcccctcttctccccagggcggagcagctggccagcctggaagctgcccagagggccgtgggagtcgggcccggctcctccgcgggctccaatgctcgggccgagttctggcggctgcggggtcttcgtcgaggagccaagaagaccactcagcggagccgtgaggacctctcagctctgacccgacagggccgctacccgccctacgaacgagtggtgttgcgagaaggtggggcccggagctggaggggccctggggaggcctcacacacagctcctggtgcacctgttcactaacattcagcctctaaaaggcacagt

SEQ ID NO: 95875 - DNA, 328 bp, Homo sapiens; identical to SEQ ID NO: 31865
  chr19:3747811-3748139
  hypo

SEQ ID NO: 95876 - DNA, 30 bp, Homo sapiens
  chr19:3750798-3750828
  hypo
tattttcacagcaccggcttctagtggctt

SEQ ID NO: 95877 - DNA, 30 bp, Homo sapiens; identical to SEQ ID NO: 31866
  chr19:3751531-3751561
  hypo

SEQ ID NO: 95878 - DNA, 43 bp, Homo sapiens; identical to SEQ ID NO: 31867
  chr19:3754227-3754270
  hypo

SEQ ID NO: 95879 - DNA, 308 bp, Homo sapiens; identical to SEQ ID NO: 31868
  chr19:3767180-3767488
  hypo

SEQ ID NO: 95880 - DNA, 96 bp, Homo sapiens
  chr19:3770844-3770940
  hypo
cgggcgaacggcagcgctggggcctcggggagtctcggagctgccacggcacccgagcctgactccagccgctcctggcggcgccacttggcccgg

SEQ ID NO: 95881 - DNA, 30 bp, Homo sapiens
  chr19:3771668-3771698
  hypo
cttgggggcctcctcgcccggccccagacc

SEQ ID NO: 95882 - DNA, 196 bp, Homo sapiens
  chr19:3778075-3778271
  hypo
gaggatgacttgcccgcctggaccctccttgggcctggtcagtgcccccacgccgcactctccactctctcggtcctctggggccaagggccccaccgggtggggtcagggctcctggcttcggggcgaggtggagccgtcggcgtcctgccctgagacggaggctggggcacctgcactgcgtagctcccgggcc

SEQ ID NO: 95883 - DNA, 489 bp, Homo sapiens
  chr19:3778997-3779486
  hypo
tgagagcctcgggcgccgtccacttgacgggcagccggcttgagtctagccccttccgctcggctttggccaggccaaagtcgctgaccttggccaccaggtcctctgagaccaggatgttgcgggcggccaggtcgcggtgcacaagcttcttgctctccaggtactccatgccctcggccacgtgcctgggggtagtagggggcagtgggggctcaggtgccaggatgcccacattcagggctcagaaagctcggggtgcctggggccacaagctcacaaagcctccctgccccgtgcctcagtttccccttgatggatcttggaatctgcgccccgacgaccccagtgccgcagcaccctgagagtcccacttacagagaaaactgcaggagctgagcggtgttcacgagggctcgaccccgggtccgcagaaagttcaccaggttgccctgttgggggtgggagatggccgcgggatgttggggc

SEQ ID NO: 95884 - DNA, 345 bp, Homo sapiens; identical to SEQ ID NO: 11944
  chr19:3785490-3785835
  hypo

SEQ ID NO: 95885 - DNA, 356 bp, Homo sapiens; identical to SEQ ID NO: 55426
  chr19:3785864-3786220
  hypo

SEQ ID NO: 95886 - DNA, 28 bp, Homo sapiens
  chr19:3786583-3786611
  hypo
gcgcggcggggaccgggggtgagggaga

SEQ ID NO: 95887 - DNA, 290 bp, Homo sapiens; identical to SEQ ID NO: 31875
  chr19:3792995-3793285
  hypo

SEQ ID NO: 95888 - DNA, 40 bp, Homo sapiens
  chr19:3807697-3807737
  hypo
tgtgtccatgcatgcacggtgtgcccgtgtgtgtgtgcat

SEQ ID NO: 95889 - DNA, 95 bp, Homo sapiens
  chr19:3816806-3816901
  hypo
gacgcctttcaggacccgagtctggggggcaacgctgctgtggggacaaagccacagacgtgcgccatcagcggagagacgcggggtaccccagc

SEQ ID NO: 95890 - DNA, 30 bp, Homo sapiens; identical to SEQ ID NO: 31877
  chr19:3821080-3821110
  hypo

SEQ ID NO: 95891 - DNA, 7 bp, Homo sapiens
  chr19:3822134-3822141
  hypo
cgttgaa

SEQ ID NO: 95892 - DNA, 136 bp, Homo sapiens
  chr19:3823137-3823273
  hypo
tgggtctgtaaatctcgctgggagaagccgggtgaggtctcgaagcctgatccatgggaaggtccttccctgaccggggcaccaggacttgacagcctcgacttacctcctccacatattccgggcccaccggctg

SEQ ID NO: 95893 - DNA, 30 bp, Homo sapiens
  chr19:3823650-3823680
  hypo
gcttgaggaacccaccgacagcacaaaatc

SEQ ID NO: 95894 - DNA, 31 bp, Homo sapiens
  chr19:3830871-3830902
  hypo
ctgccaagcacaagcacgcatgcacacacac

SEQ ID NO: 95895 - DNA, 30 bp, Homo sapiens
  chr19:3838197-3838227
  hypo
cccgacaatacattcgatgaacaccgtgac

SEQ ID NO: 95896 - DNA, 301 bp, Homo sapiens
  chr19:3855410-3855711
  hypo
tgaaagcagtcccgggcgatccggcggcagattcattgagtcattggataaatacttcctgggtgctagtggggaccagctgctgtcatgggcgctgtcacagcagcggggaataaccagaccaaagtcccgtcctccaggagggtgctgcgcgatagtccagggagacacggggtcagcaaaataattcaacgcgatctgatggttctcatgccgccgggaaggacgcggcaagggggtgtgagcagggggttgcactttctcacgggctggtcatggcgggcctggtgggtgaggagga

SEQ ID NO: 95897 - DNA, 602 bp, Homo sapiens; identical to SEQ ID NO: 31880
  chr19:3907668-3908270
  hypo

SEQ ID NO: 95898 - DNA, 27 bp, Homo sapiens
  chr19:3941641-3941668
  hypo
tttttgttgttgttgtttagacggagt

SEQ ID NO: 95899 - DNA, 30 bp, Homo sapiens
  chr19:3958329-3958359
  hypo
cttcctgagcacagcggcaggcatggaaca

SEQ ID NO: 95900 - DNA, 30 bp, Homo sapiens
  chr19:3959043-3959073
  hypo
cccccaccgcaggccgagctccggctgtcc

SEQ ID NO: 95901 - DNA, 732 bp, Homo sapiens
  chr19:3966220-3966952
  hypo
cagacagctgctgctgggtaccgggttcctgcgtgcctacctcccggctccacgctgtctcctgctaacagacccagctgtcccagggcagcctttgccgctcactctcagtctgtgggactcagtggcccaggaaaggggtggaaggggacacgactggacctgggcaagcagaaaaccacgccttccagcccaaagagaccggtccagtccacagggctctgaacgcctgctgggaagagaggatctctctctccctctgctgggcttggatccaggctcgcggcaggggccaccacgtagaaggctacctaagaagcctgcctaagaacagaccaggccaggagaggggagccaccaggcactgcgggtggcacataagccccgtcattcactctgccagggcgcctcctccatgctggagtggacttcggccccggggacacagggcaccatatgcaccagcacccagtcacacctgcggccgctgcacacctggacaacctggttctgtaaaccacgcctttccctgttttgctattgccaaccagatttcaggttctgccactgagtcctcctacagcaacagcagaccacagccgcccacctccagacagcccccggtctcactggccacagacttgctccttagaggcaaggccactggcaggctctcagttcctctacggaatgtgaaacgtgcctcatctccccagccgggaaagaaactcc

SEQ ID NO: 95902 - DNA, 30 bp, Homo sapiens
  chr19:3977636-3977666
  hypo
ggccggacacacctcggctgcttgccctcc

SEQ ID NO: 95903 - DNA, 141 bp, Homo sapiens
  chr19:3978033-3978174
  hypo
atgtcctcggccaggccgtcggggaagggccgcgccttcatgtacagccggttgtgcttgttgggggacttggagaggcagagcacgttcgactcttcactgaccgtctcgcggtacgagacgaccgggtcagatttctgc

SEQ ID NO: 95904 - DNA, 77 bp, Homo sapiens
  chr19:3979327-3979404
  hypo
ttgatggggatgcaggcgtggtcctcctccaggtccttcaggcagatctccaggtgcagctcgccggcgcccgcgat

SEQ ID NO: 95905 - DNA, 108 bp, Homo sapiens
  chr19:3979895-3980003
  hypo
gacaacagggctgacgctgaacttcatcacccgcatgttgtgcgcgtgctcgaaggtggtgatggtgcccgtcttcaccaggaactggtccacgcccacgaggcccac

SEQ ID NO: 95906 - DNA, 505 bp, Homo sapiens
  chr19:3982551-3983056
  hypo
atgatcagtcatcacgaataggggggccagcccctccaccacccagggcagcgttccctgagctcgtctcttccagctgcccaaagatcaagggctgggtcaagtcggatgaaaacattccagcccccttctctgtcacccaacattcctggcaaaaacacacttccagtccccctcagctcaactccactccccaccggctcctgcagatcccgctgcggcaagcccaccacccagctagggagggccgtaccatgatgttgcccatggggccgctctcgccctcgccgtaggtggagatgatgacgttcacgttctccacgatgcgctggaaagtctggtagagctcctcgggctccagctgcagctccagcagggcgcggtccatcttgttcatcatcagcacaggcttgatgcgctcggcaatggcctgccgcagcactgtctccgtctgcacgcacacgcctggggacacgggggacagggcggcgctgtcatcctcaag

SEQ ID NO: 95907 - DNA, 30 bp, Homo sapiens
  chr19:4031614-4031644
  hypo
cacggggtgggggccgggcttaactcctca

SEQ ID NO: 95908 - DNA, 997 bp, Homo sapiens
  chr19:4032608-4033605
  hypo
tgtctgcaggctgccttggggcggtgctggggctgggcggcagccgcttgctggctcacagccaggaagccccaggatccgtctcccaaagagtccctgcctcattccccgctgtggccttggggatggtgcttcggtgacagaatgaagtcacagcaatgactctttcggtggctgtgttgcatgaaacttgccagaaaagtcccatgggtcatagtccacgcagggtgggggaggccacataggccacctccgtgtgggggcttcggctgggtctgtgctgtgcccaggttgtggtcaaatctaatggtggttgccacccggctttctccaatccctcacggccccgagccacacagcgaagcttgggactcatcgtcaggggcctgttctgggaggtggacgtcagtgccggagagaactcgaatcacagccccgcgccctgctgttcccaccctcctgacggtgtcttccgttccctccccacagtcaaggagaagctgcgccttgatcctgacagcgagatcgccaccaccggtgtgcgggtgtccctcatctgtccggtgagtcggggcgcggtcccctcctcgaggcctctcctgcggccggccttcccccctggcggccctgggcccggggcggcttggctgggccgtgagcctgcgggggcgaggctggtcttcgtcccctccgtgttcctgaggcatgagtgattggagcgagccacaggatggagctgggggtgaggggcaccgggcaggcgggcacaacaggaggggtgccctgctcacgcagcccctcccccacagctggtgaagatgcggctctccgtgccctgccgggcagagacctgtgcccacctgcagtgcttcgacgccgtcttctacctgcagatgaacgagaagaagcccacctggatgtgccccgtgtgcgacaagccagccccctacgaccagctcatcatcgacgggtgagcccggggccccggggagggcgg

SEQ ID NO: 95909 - DNA, 33 bp, Homo sapiens
  chr19:4033631-4033664
  hypo
cggtggcaccccgcttcctgcagaccacatggt

SEQ ID NO: 95910 - DNA, 30 bp, Homo sapiens
  chr19:4037866-4037896
  hypo
ctgctgaccccggccgcacactcgactttc

SEQ ID NO: 95911 - DNA, 108 bp, Homo sapiens
  chr19:4038128-4038236
  hypo
gccacccacacagccgcctccccggctggagtccgagccgggaaggggtagtgggcgggagggaccaggacgccgccccgcgccctcccctccggatgccccgccgcc

SEQ ID NO: 95912 - DNA, 31 bp, Homo sapiens
  chr19:4042779-4042810
  hypo
accccgcctggggcctcgggaaagcctggag

SEQ ID NO: 95913 - DNA, 632 bp, Homo sapiens
  chr19:4043056-4043688
  hypo
cctggcttccaaggccgggcaggaagagcaggaagggtcggggacctggggcttctctccttgggacccaggatccggtcaccctgggcccaaaggtgtggtgtggacgaggtgctcaacccacccagtctcttcagggccaaaaggggaaaagggggaccccccccaagccccccatccccgctccccagcctcccccgaacaaaacacagagaacatcaaatgaggcgactgaggcggcagcggtcgtaacaggctgcgtttagtggttctttttttttttttatgtacaagaaaaatgaatttttttgttttttcatcttttgtgtttttgtttgttttttattacttttaaagcttctccctccccactcccaaaaagtgcatttttatcagttttttttttttttaaatctcccacactttataaagactctcaatacagtctctggaatgtctatctgtctgtgctctgtaccctgagggcgccgccccgccccccattcaccaggcctggcccctccaaagtccaaggcacctcgattctgggcctggggtggggtggggggcgggacctgggcatcggatcctggtccacagcctccaggcagccccggcgagggatgggggtc

SEQ ID NO: 95914 - DNA, 126 bp, Homo sapiens
  chr19:4044503-4044629
  hypo
tgcagacgggggctccggcccggccacctccccggcccccgggcgcccccgcctgaagccccccaaccccagcctggacctcactcccgctctcttgcacacacgcacacacgcgtccacgcaact

SEQ ID NO: 95915 - DNA, 133 bp, Homo sapiens
  chr19:4044932-4045065
  hypo
tacagtatgtgattgcgcggagtctggggagggcggggctgggctgggggggtcccggctctgggcccatgcagaggctgtggcccccaggacgggcgggtagttaaggcaaagtgggcgggcaggacaggcg

SEQ ID NO: 95916 - DNA, 48 bp, Homo sapiens; identical to SEQ ID NO: 31886
  chr19:4047770-4047818
  hypo

SEQ ID NO: 95917 - DNA, 30 bp, Homo sapiens; identical to SEQ ID NO: 31887
  chr19:4048060-4048090
  hypo

SEQ ID NO: 95918 - DNA, 83 bp, Homo sapiens
  chr19:4050361-4050444
  hypo
ctctcttgtttctgttgatttccttgtttctcctctgtctccctgattggattgtgagccccgagaaggcaggggttgggtgt

SEQ ID NO: 95919 - DNA, 1665 bp, Homo sapiens; identical to SEQ ID NO: 11950
  chr19:4053793-4055458
  hypo

SEQ ID NO: 95920 - DNA, 98 bp, Homo sapiens; identical to SEQ ID NO: 55437
  chr19:4064871-4064969
  hypo

SEQ ID NO: 95921 - DNA, 40 bp, Homo sapiens
  chr19:4093666-4093706
  hypo
acagagtgagactctgtccgactctcaagaaaaaaacaaa

SEQ ID NO: 95922 - DNA, 103 bp, Homo sapiens
  chr19:4095008-4095111
  hypo
aggagaatggagtggggctggcgaccctcccagaacctgcgggcggatcccggggagcccacagtcagcacaccaggggtccggggaccagacagaggcttct

SEQ ID NO: 95923 - DNA, 54 bp, Homo sapiens; identical to SEQ ID NO: 31891
  chr19:4096410-4096464
  hypo

SEQ ID NO: 95924 - DNA, 30 bp, Homo sapiens
  chr19:4101197-4101227
  hypo
ggctctggggagggcgggctgggccttacc

SEQ ID NO: 95925 - DNA, 31 bp, Homo sapiens; identical to SEQ ID NO: 31892
  chr19:4111004-4111035
  hypo

SEQ ID NO: 95926 - DNA, 241 bp, Homo sapiens
  chr19:4116486-4116727
  hypo
cactgcactccagccaattccttagaataaatctctctctacacatacactcaagtatcattaaggacagggatacactgagaaatccctctctgggcgatgtcgtcactgtgcaaacactggaaagcccattccacacccaggctcccatgctctgtacagcgcagtgctgagctgctgtctgtttatttaaatatagagaaccgaggcaggcggatcacctggggtcaagagttccaga

SEQ ID NO: 95927 - DNA, 190 bp, Homo sapiens
  chr19:4116973-4117163
  hypo
aaacatggcctgatcatcttacgtcgccaccgctgcgtaggcggtctgtcactggctgagccatcgccctgaggtggctgtacacataggcgcaaacacacacacgcttcgtcttcatcgcttgtttctctggagaaccataacacactcgcatttctgaaacccccacgtgctagctttctgggaatat

SEQ ID NO: 95928 - DNA, 24 bp, Homo sapiens
  chr19:4129629-4129653
  hypo
gaatcatccttctggccgggcgcg

SEQ ID NO: 95929 - DNA, 378 bp, Homo sapiens
  chr19:4175002-4175380
  hypo
aggggtaggctcagacacctacgtgcttggtgggctgcaggttgacgatgaccaggcggcctccccggcgcttggtagccagcggcaggttcccgctgggccggatctgcagcgatgtacccagcgtgatggacaggtcggcgttcctggggccggggagcgtgggctgagcctgatgccctgctcctgccaacatcccgagccagccctgggggccggttcacacctaggccatctgtgctcaccggggcggtcaaggccagccccactcccgagtcagcctttgggatcccgccctgccctcctctgcggtccgttggcggggtcattgatctgggcgggcccttagacacttccggggagtatcacagtgtggta

SEQ ID NO: 95930 - DNA, 30 bp, Homo sapiens; identical to SEQ ID NO: 11954
  chr19:4198043-4198073
  hypo

SEQ ID NO: 95931 - DNA, 30 bp, Homo sapiens
  chr19:4207436-4207466
  hypo
gcttctgcacctcccgggggtcagtttctc

SEQ ID NO: 95932 - DNA, 30 bp, Homo sapiens
  chr19:4217744-4217774
  hypo
cgggggagcagcagcgcacggcggccgcgg

SEQ ID NO: 95933 - DNA, 30 bp, Homo sapiens
  chr19:4218047-4218077
  hypo
tctcggagcacgaacgcatcgtgggcaccc

SEQ ID NO: 95934 - DNA, 5 bp, Homo sapiens
  chr19:4279426-4279431
  hypo
ccgga

SEQ ID NO: 95935 - DNA, 502 bp, Homo sapiens; identical to SEQ ID NO: 55446
  chr19:4279567-4280069
  hypo

SEQ ID NO: 95936 - DNA, 30 bp, Homo sapiens
  chr19:4292259-4292289
  hypo
ggggaaagtgggagcgagatccatcattac

SEQ ID NO: 95937 - DNA, 31 bp, Homo sapiens
  chr19:4295628-4295659
  hypo
ttgtcatcatgagccccgccatctttatcct

SEQ ID NO: 95938 - DNA, 237 bp, Homo sapiens; identical to SEQ ID NO: 55447
  chr19:4304481-4304718
  hypo

SEQ ID NO: 95939 - DNA, 88 bp, Homo sapiens
  chr19:4323007-4323095
  hypo
gcattactgggaggtgcgctacgagccggacagcaaggcgttcggcgtgggcgtggcctaccgcagcctgggccgcttcgagcaactg

SEQ ID NO: 95940 - DNA, 30 bp, Homo sapiens
  chr19:4358860-4358890
  hypo
gaaccagggggccacgtcaggcccgcgtgg

SEQ ID NO: 95941 - DNA, 30 bp, Homo sapiens
  chr19:4360025-4360055
  hypo
ttgtcttgagggtccggatgggctcaggta

SEQ ID NO: 95942 - DNA, 754 bp, Homo sapiens; identical to SEQ ID NO: 31895
  chr19:4361146-4361900
  hypo

SEQ ID NO: 95943 - DNA, 234 bp, Homo sapiens; identical to SEQ ID NO: 31896
  chr19:4371715-4371949
  hypo

SEQ ID NO: 95944 - DNA, 30 bp, Homo sapiens
  chr19:4377883-4377913
  hypo
ctgtctgaagactcgcgtttgggtcccggg

SEQ ID NO: 95945 - DNA, 31 bp, Homo sapiens; identical to SEQ ID NO: 31897
  chr19:4409230-4409261
  hypo

SEQ ID NO: 95946 - DNA, 62 bp, Homo sapiens; identical to SEQ ID NO: 31898
  chr19:4429585-4429647
  hypo

SEQ ID NO: 95947 - DNA, 149 bp, Homo sapiens; identical to SEQ ID NO: 11957
  chr19:4432844-4432993
  hypo

SEQ ID NO: 95948 - DNA, 186 bp, Homo sapiens
  chr19:4442912-4443098
  hypo
gccctgcagaggtccaagccccgtgtggagccgcttccggagctgggggtggtgtgggggtggacaccggcaaggccaccctgacctcgagcccactgggtgcatcctgagagcaggggtgacgtatgtagaatgcttagggtgtcctccccacagagcagatacttgaaccgactcaattcctgt

SEQ ID NO: 95949 - DNA, 30 bp, Homo sapiens
  chr19:4445070-4445100
  hypo
gcatcccctcctgccgttgtcacccacatc

SEQ ID NO: 95950 - DNA, 30 bp, Homo sapiens
  chr19:4446016-4446046
  hypo
cagcggtgctcctgcgggccgacactcacc

SEQ ID NO: 95951 - DNA, 416 bp, Homo sapiens
  chr19:4446321-4446737
  hypo
tgtagttgtacttgcgcagcccccgctgctcctccttctcccgcatggccttggtccgcagcacgctcagccgctccaccgcctcggacctgcacacgcgggccaggtcacgagggctggccggggttcttccaccccgccccgccccactctgctccgcggacgtcaggcccacctgagcctctgctcccgcttgatctcctctgctgtgaggttgaagaagtccccaggcagttcgaactgcgaggccaggggcgagggctggaagacgcggcgctgcctgtccagcttggcgcgcacgggctccgcagccagcagctgttccttgtgcctctccaggctctggggctgggccaaggtggtctcgctcagcacgtagaactcctcggggtcctctacagcgtggcaggacatgg

SEQ ID NO: 95952 - DNA, 30 bp, Homo sapiens; identical to SEQ ID NO: 31902
  chr19:4475259-4475289
  hypo

SEQ ID NO: 95953 - DNA, 238 bp, Homo sapiens
  chr19:4483096-4483334
  hypo
ctctcagcgttctccgtttgcggcctgacctacttagtattaccctttttaatcttgtcaaaaattacacagacagggccctgtcgcttgggccacgaagacacaagggagacaaaacgtgctcgggccgagcggtgacgcttcaccacacccggttctcgttttccttgtgtgctgattgggggccgctagcctgcggctgtgcgcacggaggctggtgtgcgcctgctgtgggctc

SEQ ID NO: 95954 - DNA, 30 bp, Homo sapiens; identical to SEQ ID NO: 31904
  chr19:4502010-4502040
  hypo

SEQ ID NO: 95955 - DNA, 30 bp, Homo sapiens; identical to SEQ ID NO: 55452
  chr19:4523780-4523810
  hypo

SEQ ID NO: 95956 - DNA, 38 bp, Homo sapiens; identical to SEQ ID NO: 31905
  chr19:4544027-4544065
  hypo

SEQ ID NO: 95957 - DNA, 30 bp, Homo sapiens
  chr19:4550223-4550253
  hypo
gtcatccggcaaggcgctggaggcattgta

SEQ ID NO: 95958 - DNA, 333 bp, Homo sapiens
  chr19:4550675-4551008
  hypo
tcagtttttcccaactgtataacgggtacagctgaactcagcatcagctaaataaccacccggaagccccagccctcggccctggggatcaggacctcatccgggcatgtgactcaggatggagggggttctcaccggggtcgaggcacctgatcctccggcaccggcgtccagatggactcgggggacttctgctctcggaagcggccttcaaacacagctgccacctgtgtcaggtcaaaggcgcagacagccgagccagggatgctgaggggttgggatgaaagagtttggtgagcccggtgggaggccccatctcggacaagtgcgtgc

SEQ ID NO: 95959 - DNA, 30 bp, Homo sapiens; identical to SEQ ID NO: 31907
  chr19:4554409-4554439
  hypo

SEQ ID NO: 95960 - DNA, 39 bp, Homo sapiens
  chr19:4555022-4555061
  hypo
agggtgggcctgtccccgaggctgcggtagatgacagca

SEQ ID NO: 95961 - DNA, 254 bp, Homo sapiens
  chr19:4555920-4556174
  hypo
gaaaagccatggccagcggaggtcgggcgagcagaggcctggaggttggacctggggcgcagggagtctgaagactcacgctgtagttggcgcacaccgggttgaaggcgttggaaccgcacacaaagagcgtggactcgtcccgaaggagcagcacctttacgaagtttcgacactcgccctgaggtggggacaggaggaagcggggagcgcgatgtgggcgtggtcatggtgatgggcgtggccagaacctg

SEQ ID NO: 95962 - DNA, 219 bp, Homo sapiens
  chr19:4556921-4557140
  hypo
gctgattcgcaggggccgggaccgagccagggccaactcacctcctgtttgcccttcatccgacacacgtttatgtcgctggggttagatctccaggtcagcttctgcagacagagagagctggtgagggggtaacgggtcccagcagccctgagtgaccccgccgtgctgggccgaatccacccagctccccggcgcagtgccgcgtccccctggccc

SEQ ID NO: 95963 - DNA, 198 bp, Homo sapiens
  chr19:4566460-4566658
  hypo
tctggggttacccgacgcctgtgcgcctccccctatccccaagaccatctgcttctctccgtgaaactcgaggagcctctgccagcagccgctcggcgcctgcctgctcagaagcggccccaacacctgccacgctgcggctgccggacacctggtcacagggagccacggggctggcgggtgcgccccgtggcgtgc

SEQ ID NO: 95964 - DNA, 19 bp, Homo sapiens
  chr19:4572585-4572604
  hypo
cctcccctccactcttgac

SEQ ID NO: 95965 - DNA, 213 bp, Homo sapiens; identical to SEQ ID NO: 55454
  chr19:4580779-4580992
  hypo

SEQ ID NO: 95966 - DNA, 30 bp, Homo sapiens; identical to SEQ ID NO: 55455
  chr19:4581198-4581228
  hypo

SEQ ID NO: 95967 - DNA, 79 bp, Homo sapiens
  chr19:4627182-4627261
  hypo
agatcttacacattacgcagaaaaggcgcttatcaacattcttttgccagtcattaaaacaaccactcccacgataaca

SEQ ID NO: 95968 - DNA, 139 bp, Homo sapiens
  chr19:4670739-4670878
  hypo
gcgaacttctcataatcgttgcagccaagatgtgtgtgcatcgatattcaaaattagcagagggaaagtaggatgagaagcaggatgcttgcttttgtttccctcttgttgcccaggctggagggcagtggcgcgatct

SEQ ID NO: 95969 - DNA, 110 bp, Homo sapiens
  chr19:4672874-4672984
  hypo
catggccgagctctgcggctaacaaggaatttcagttgtgagctgttgggagtctgctacggaacccaggcaggttgtgcgtatgcgtgtgcatgcgtgtgtgtgttctt

SEQ ID NO: 95970 - DNA, 159 bp, Homo sapiens
  chr19:4675503-4675662
  hypo
acacatgtggctgggcggctgggctggggaggggacagccgccactgaccagcagagcgtggaagttcggtgcgtttcagtgcctgcctgaaagcttggggacaggagggctgtccacaggtggtgccccccgcgggccctggccgcttctcctgtggg

SEQ ID NO: 95971 - DNA, 642 bp, Homo sapiens; identical to SEQ ID NO: 31911
  chr19:4676078-4676720
  hypo

SEQ ID NO: 95972 - DNA, 208 bp, Homo sapiens
  chr19:4678844-4679052
  hypo
caagatacctcctgaatctcccgccggtacaactatggaccacgtcccactgtcccccacaggccatccacaaagcagccagagaaatgtgggtcaaatggcaagccgcccaactctatgctctgctcacaagcccgagtcacctcccaccaccctcagttgaaaatccagccgaagccccgcccccgctgaggccccacccctctat

SEQ ID NO: 95973 - DNA, 223 bp, Homo sapiens
  chr19:4679433-4679656
  hypo
tcagggaatgcttggccccagcgccttaggaaggagcctgctagggccttcagcactcagcggtttcttctacgcaatttctcagtttcaaataaagcccgtctgcggggcaatttcggtaagggttcctccctccattaggcccggagcaggggtgggtgtggcagcccccgatcccgtgcttccagcaccgaaggcaggcggaaccctgagctgtcaagac

SEQ ID NO: 95974 - DNA, 30 bp, Homo sapiens; identical to SEQ ID NO: 31912
  chr19:4682712-4682742
  hypo

SEQ ID NO: 95975 - DNA, 75 bp, Homo sapiens; identical to SEQ ID NO: 31913
  chr19:4683996-4684071
  hypo

SEQ ID NO: 95976 - DNA, 30 bp, Homo sapiens; identical to SEQ ID NO: 31914
  chr19:4685800-4685830
  hypo

SEQ ID NO: 95977 - DNA, 142 bp, Homo sapiens
  chr19:4687367-4687509
  hypo
gagcccagcagtgtgctgacccgctggttttcatcccacactctgtatatacagtttcgttgataaagaaacacttcatggtgatacgctgatgtgtgtgacggagccagcactggaacccggagtcaccaatgcagggtcc

SEQ ID NO: 95978 - DNA, 30 bp, Homo sapiens
  chr19:4691005-4691035
  hypo
ggaggtgatgcaggcgcccaaaggcaccca

SEQ ID NO: 95979 - DNA, 31 bp, Homo sapiens; identical to SEQ ID NO: 31915
  chr19:4693048-4693079
  hypo

SEQ ID NO: 95980 - DNA, 122 bp, Homo sapiens
  chr19:4697633-4697755
  hypo
caccagctccttctcctgggtcgagacgatctgaagggaaacaaacaggtgtgggtcatgccctggcctgcccggcgctgctcggaggagaaggccactgcgctgggtcccatcatgtcccc

SEQ ID NO: 95981 - DNA, 285 bp, Homo sapiens
  chr19:4714198-4714483
  hypo
gccgtggatgatgctccggagcccgtcccacgagtgcttctgcacctggaagcgggcggccgggtcatctgtggcggctgcgtcgcctcggtcggccgttggggtcccggtggtggccatcctctcagccccctcggaattcagcgagaagctgcggggaggaagcaaagactatgagaaaggagaactgttttacctacgagctgccccaatgctgccccttgcgaggcactcaggttcttccagacgagccccacccctgccgctttccccactccctaaaca

SEQ ID NO: 95982 - DNA, 21 bp, Homo sapiens
  chr19:4789385-4789406
  hypo
gcagaagtttatagcagcttt

SEQ ID NO: 95983 - DNA, 423 bp, Homo sapiens
  chr19:4795047-4795470
  hypo
agtacagtcttaatgcgataaatccactagctaagacgtcgagtgccaagaccagccttccagccgaggtttggacaaagtctcaggttcccgtgactcagggtaaggtgctggggctgccagaggacctgccccagcaagatttttgtcaagagcgagactccatcagcccaggcagacgggagcaggttcttggccagcgtagacagcagcaaacagcagcagggaagccattctcactgcatcctccctgcagtagccacggccaggcccttaggaggagcagtgaccgggggtgtccagaaatatcctgtccctggatggaaactaggtctcgtttggatttttttttttttttgccgtgttaggaaattatttattaatttacaagacaggttttaactcagccgaggtgggaaatgg

SEQ ID NO: 95984 - DNA, 121 bp, Homo sapiens
  chr19:4798238-4798359
  hypo
cgtctcaaaaaacaaacaaacaaacaaacaaaacaaagcaggtccggtatggcaggcgggggaactgaggctactaagagacattaagatgcttaaggacagccgggcgcggtggcagacg

SEQ ID NO: 95985 - DNA, 160 bp, Homo sapiens
  chr19:4798598-4798758
  hypo
gcgacagagcacaagactccatctcaaaaaaaaaaaaaagaaagaaaaatgcctaaggacacagcgcatgaaggaagggtcgagattggaacccaggaccgtcagagttcataccttgtgctgattctccatccgggacgccagacacatggatcccttt

SEQ ID NO: 95986 - DNA, 727 bp, Homo sapiens
  chr19:4816439-4817166
  hypo
ggctgctggctgtggggagggcggtgggggggtgccagcctgccatgcgtgcaggggtggcggctgcgggcaccccggccaagtgggaaagggtggcggggctcccaggggcacctggcccccaaagggcattcgagccccatagggcgccccagtcccaaatgacatgtggctcccaaaagccacctggagctgctccatctgtgcctggtaggacaagtagctctggaggtaggctgagtaggctgcgttcagtgccgccgcctgcatccgctcaccgtccaggtgttggctctgttcccgcagggctcgggtgtcctgttccttcctccacatggcctttcgggcctgaagcctgtggggcttgaaggtgttggccaccttcctggcgaagatctgggagtgttcgtccagccgcaccagcccggagagcaggctggccgtgtcggagctgagctgggccggggagctctccaggggcaggaaggggatgacacagtctggcgacccctgtcgcgtgaggttgctcatcatggcttggttcacctggtgcaggctcaggcgacagtcgaagttggaggtgagaagtaggatgatgaaagctgagtggtctatggcgtcctgcaggcagctcagctccccgcgccccggcacctggaaatcctcgcagaaggtggccccgtcgggcacgccaagggcctccagcttctcccgaacccgcagggcg

SEQ ID NO: 95987 - DNA, 606 bp, Homo sapiens
  chr19:4817457-4818063
  hypo
gggcctgcagacccctcggtgcactccactgggtagttggtgctggtttctggagctgcgggggtatcagggaggccagtggaggttgcatctggggccacttcgggaagcccaggaggtgggctgcttggcagctctggtgggctggcaatctcccccgatggcggccagctcatctcctcaggctcctggcagccaccggggacaggctcgggcaccaagctggcctgggggtcgtcacagagcttgctgggcccatgtgggctgcggtgcaggctgaggaagggcatggtaggggactggctgatttccaagttgctggccagggaggcagggctgccagtggatcgcagggagcacccttggctccagtccgaaacaccgtcaatggggcgtgggaggctcctggtcccagagggcaaagccgaggatggtgggaggcagcccagattggactggagcgtccggatgctccctggatccccagcaatgtcccacccacaccggtttcgggcctcatcctgaagttcccccagccggtggtcgtccctggagctgagggtgcggacggcttcctggtaggccacgtcccgcagcgaggcgggg

SEQ ID NO: 95988 - DNA, 30 bp, Homo sapiens; identical to SEQ ID NO: 31919
  chr19:4818344-4818374
  hypo

SEQ ID NO: 95989 - DNA, 57 bp, Homo sapiens; identical to SEQ ID NO: 31920
  chr19:4835701-4835758
  hypo

SEQ ID NO: 95990 - DNA, 102 bp, Homo sapiens; identical to SEQ ID NO: 31921
  chr19:4851494-4851596
  hypo

SEQ ID NO: 95991 - DNA, 30 bp, Homo sapiens
  chr19:4885981-4886011
  hypo
aatttaaaaaacaggccgggcgtggtggct

SEQ ID NO: 95992 - DNA, 30 bp, Homo sapiens; identical to SEQ ID NO: 31922
  chr19:4902561-4902591
  hypo

SEQ ID NO: 95993 - DNA, 35 bp, Homo sapiens
  chr19:4902799-4902834
  hypo
tcgggcagcactaattcgatcgacttcaccacaga

SEQ ID NO: 95994 - DNA, 30 bp, Homo sapiens; identical to SEQ ID NO: 31923
  chr19:4903937-4903967
  hypo

SEQ ID NO: 95995 - DNA, 30 bp, Homo sapiens
  chr19:4919640-4919670
  hypo
ccttttgccaaaaacggcaagtgggtttta

SEQ ID NO: 95996 - DNA, 53 bp, Homo sapiens
  chr19:4930798-4930851
  hypo
gcggaaggccccctcccgggacgagccctgcagctccacgtccaggccggcgc

SEQ ID NO: 95997 - DNA, 30 bp, Homo sapiens
  chr19:4933031-4933061
  hypo
actggctttgaagccgtccagccagcgctg

SEQ ID NO: 95998 - DNA, 192 bp, Homo sapiens
  chr19:4941803-4941995
  hypo
ctctgccgggtctgcgcctgccacctgtgcgggggccggcaggaccccgacaagcagctcatgtgcgatgagtgcgacatggccttccacatctactgcctggacccgcccctcagcagtgttcccagcgaggacgagtggtgagtgcggccctgcccgccgcggggagaccagagcgccccctacaaatcc

SEQ ID NO: 95999 - DNA, 105 bp, Homo sapiens
  chr19:4944383-4944488
  hypo
atgtaccatcgtcccgtccaaccactacggacccatcccggggatccccgtgggcaccatgtggcggttccgagtccaggtacctgcagcgtcccggggctccag

SEQ ID NO: 96000 - DNA, 30 bp, Homo sapiens
  chr19:4954612-4954642
  hypo
ggcagctcgggccacgcgcccctccctcac

SEQ ID NO: 96001 - DNA, 114 bp, Homo sapiens; identical to SEQ ID NO: 31926
  chr19:4962294-4962408
  hypo

SEQ ID NO: 96002 - DNA, 7 bp, Homo sapiens
  chr19:4973465-4973472
  hypo
ctgggat

SEQ ID NO: 96003 - DNA, 470 bp, Homo sapiens
  chr19:4986363-4986833
  hypo
cgatggcggagtaaacgggtgatggccactgagcgctggccgtggggactcttggtcctggctgccaagtagaagcttcaggggtgctcttcacagtcagctgactctgctgtccctgatagcagaagacagcgaaggcacctgccccctgccatggcaggtcggcgggcacagaggagggctcgggaggctgtgtcctccagcgtctccatgtttactgtgccaggccaggtgctgaggggccggcgaggaagacgtgaggactggagagagcctggattagggccctcgaggggcggcgctgctttagccgggggaacagggagggcctctcccagcaggtgacattcagtcagagacctctgagcgactcacacctgcccacctttgcaggatttgggacaagagtgctccaaagaagtgcaggcagcacgtgcggaggccccaaggcggaacgaggcgcagctcac

SEQ ID NO: 96004 - DNA, 82 bp, Homo sapiens
  chr19:4988234-4988316
  hypo
gtgtcctgagcttctgctggacgcgctggaaaccagccttctcatgaacccttctttttttttcttttttgagacggagtct

SEQ ID NO: 96005 - DNA, 283 bp, Homo sapiens
  chr19:4990571-4990854
  hypo
tattgggcaaagctcacatgccgtgttttaatactgtcattatggaagttggcctgggggtaatccagtgtctcttttagatctgtgttgtacaaacactgaactagttctggtcgcctctccggcctttgttttggggagaatattcgatgagatggcccgtaattctaacactgtgcattttgaaggatatttataaacccggatggataaggcccttcttagtgctattcttgtgttggttccctttattattttttttaaaaaactttattatgggccg

SEQ ID NO: 96006 - DNA, 43 bp, Homo sapiens; identical to SEQ ID NO: 31929
  chr19:4991093-4991136
  hypo

SEQ ID NO: 96007 - DNA, 152 bp, Homo sapiens
  chr19:5022643-5022795
  hypo
ctctgtgaccatgcgcggctgttcctgctccacctcttggagtgccgcctctgtctgttggtgttgcaggggagctgggttgggagagctcactcccttgtctgattttctggaaactgtgctcctgtctgagtgagcgcaggcagaggtgc

SEQ ID NO: 96008 - DNA, 675 bp, Homo sapiens
  chr19:5023034-5023709
  hypo
aaaagggacttttcgcgggtgggactgagtgaaggaccctgagctgggagatgaccctggatgatctggggagcccgatgtcctcaccgggtcctcatgagaggaggcaggagggtgagagtcagagagaggctggaagaggctgtgctgtggctgcggaggtggaggaagggccttgagctgagggaacctggcacgcgctggtgctctctggagtaggacgaagcagagaacgttctcgtgccaaggttttctctttcctgcctgagggccctttatgtagatcagaccagagacaagtgaatcccggtcttgccaggggaggcatttggagctgctcgtgggacgtggtgatgcggtgccaggccacatgcccggggctggggccgagtggcgttctcgtgctgcctctgtggccaggtttcacttgggaacctggctgcatcgcgggttcctcctgggccttctggtggcttggggctcctctgtcctcggtccctgctgggaaccgtgctttggcagcaggaaccagcgagatggcagcacaggggctggaggccggctgggactcactggggccgcatggggcttcacctgatgcccagccctcctgggacagggaccagtgggagcaggaggtgggacaagaggacgagggctcgagggagcccccac

SEQ ID NO: 96009 - DNA, 31 bp, Homo sapiens
  chr19:5030563-5030594
  hypo
gaggccatgtgtgcaccggcctgcagagagg

SEQ ID NO: 96010 - DNA, 135 bp, Homo sapiens
  chr19:5031055-5031190
  hypo
cacagtggtccagctgcggcctctgctccctctgagccggtggctccctggggacagtgcgcaggccctgggtgaacactacatggccacatctgggtgagagcgggagggcaggtgcagcgttggggggatcct

SEQ ID NO: 96011 - DNA, 448 bp, Homo sapiens
  chr19:5035320-5035768
  hypo
tttctggcttgggatccaaggcgtcctgatgtcaggacgttgaggggaatcagcatctcagaccgccctgcgctcttccgaggtgcctttaaatgcccgccccgtcacttcttcctcatccctcacctcccaccgggctccatgccccggtgtttccggctctctctgccctccacgtggcggccttgggtgcagcctgggttcccgggtggcctgtcctcccccgcgctggcacctccgcttcgtccctccctccctctgcctccttggctgccgcctctttgagccctcatgtcgctgcttcaggtttctgcactccccccaggccagttcccccgagattcttggcaccggcgtcttaagccagtgtggggagtatggtttccctgccttgcgttctgcgtgttccttcccatgcctctgcagcggcagctcccatgctgcttct

SEQ ID NO: 96012 - DNA, 74 bp, Homo sapiens; identical to SEQ ID NO: 31931
  chr19:5037634-5037708
  hypo

SEQ ID NO: 96013 - DNA, 30 bp, Homo sapiens; identical to SEQ ID NO: 31932
  chr19:5037979-5038009
  hypo

SEQ ID NO: 96014 - DNA, 30 bp, Homo sapiens; identical to SEQ ID NO: 31933
  chr19:5038228-5038258
  hypo

SEQ ID NO: 96015 - DNA, 30 bp, Homo sapiens
  chr19:5047451-5047481
  hypo
cgggcggttgccgacgctgctctgccgccc

SEQ ID NO: 96016 - DNA, 30 bp, Homo sapiens
  chr19:5047696-5047726
  hypo
gccctgccgccggccggaccgagagcccct

SEQ ID NO: 96017 - DNA, 30 bp, Homo sapiens
  chr19:5051095-5051125
  hypo
cacaggcgtcgccacgaggctgagcgcagt

SEQ ID NO: 96018 - DNA, 96 bp, Homo sapiens; identical to SEQ ID NO: 31934
  chr19:5058358-5058454
  hypo

SEQ ID NO: 96019 - DNA, 107 bp, Homo sapiens
  chr19:5058670-5058777
  hypo
gctgagtcctgtctgcggcccctcgctcacccgctggcttggtctggcaggagcagatggccttcattttggagtcttttgttcaaagcgggcgcttcgggttggag

SEQ ID NO: 96020 - DNA, 250 bp, Homo sapiens
  chr19:5060970-5061220
  hypo
cctttaattgcaggcgtgacatggcttgcctcggcgagtctgctcctaattaaagtgggctggcggtgtatgaagttcgcacggatcctcagggtgctgacccagccccggttccggagggccagtgtgacgacacctcgtggcccaggagagcagggcgggccacccatggccaccgtgccaggaatggggtcttctggctggccctgcgagagccgagagctctgtctcctccgcctgctgctccgct

SEQ ID NO: 96021 - DNA, 384 bp, Homo sapiens
  chr19:5064165-5064549
  hypo
cgggggcgccactggcgtttggatctgccgtggccctcctgggcttgcgtgggtggctcactctgccaggtggcctctgtccaacctgacacctggtctcgggtacttccagcgtgacgtgcacgggctctgcctccctcattctgtgtctgcgatgatagcgcattaaatggcgaaggcccgtctgcccaggcctgtgcagacactgtgaaattaactttctcaccctccagcacgcattgggctgtgccgacatctctgaagggctcttggtcggacctctgctcttggcacacattcctcggcggcgggggtggggggtagggaggagagcgttttcatccctggcacctaattgccgagagcttccgctggcaggagctg

SEQ ID NO: 96022 - DNA, 314 bp, Homo sapiens
  chr19:5068441-5068755
  hypo
tcctggggttggtcccctaagcgaacgcaagcgtgctttcagccctgtgtggacggagcgtggcgcctccagcctcactcagttctgtgtgtcctaagccgtgtcctggcactttctcttggaaactgaggtttttcttccgcctgtgtccttgggggtggccgggaggcaggtctgccagcatcaggtcttctggtccccgaggccgtcgctgggttgttccgagtggcgggaggtgcagctcgctgttgggcactggcggtggcggagcccagaagtctccgtggctgcccggcctcttgtccaagagtcct

SEQ ID NO: 96023 - DNA, 30 bp, Homo sapiens
  chr19:5070708-5070738
  hypo
cttttcagcctcctcgaggtggagtgccgc

SEQ ID NO: 96024 - DNA, 31 bp, Homo sapiens
  chr19:5070999-5071030
  hypo
cgtgcctcccttctctcgcaggtacgccatc

SEQ ID NO: 96025 - DNA, 31 bp, Homo sapiens
  chr19:5073396-5073427
  hypo
agcaggctctaggctccgcagtctgtactgg

SEQ ID NO: 96026 - DNA, 487 bp, Homo sapiens
  chr19:5080388-5080875
  hypo
gagataagaaaacaaatggcccgatgaattcggcgtgaggggcttgagcagacgcgttacgaaggagctgcaggaacgaaagccatggttcagtgcccagcatcggtagaagtcagaggcagccagctgggagacaccgccagccccaggacggccacgtcagaacaccgccaccagatgccagtgaggagggcgcagctgcacgctgctcccagccggggtggatgcagggcggtgccatggccatggaaaaccgttcggcattttcttggaaacggaagcatgtaccctgtgccccagcgatgccactctgtgcatatttactcaggagaaatgaaaacatatgtctccagaaagattggtacataagtgttcttagcagttttcttcacgagagccccaaactggaaacagcccgcacgtccatcaacaggaggatagataaataaataaccatagatccacgcgcaaccgagtactgtttaga

SEQ ID NO: 96027 - DNA, 158 bp, Homo sapiens
  chr19:5083117-5083275
  hypo
tgatttttttctggtgattctcgttcctggtctcagaaggccgattattggccagcaattggcgtctgaactgagcgcttgttccccactctcctaacgccacgtacagccatctgtgtggctgttctcgaccatgcggagggtgtgggaggctactg

SEQ ID NO: 96028 - DNA, 30 bp, Homo sapiens; identical to SEQ ID NO: 31937
  chr19:5094979-5095009
  hypo

SEQ ID NO: 96029 - DNA, 37 bp, Homo sapiens; identical to SEQ ID NO: 31938
  chr19:5102566-5102603
  hypo

SEQ ID NO: 96030 - DNA, 30 bp, Homo sapiens; identical to SEQ ID NO: 31939
  chr19:5107646-5107676
  hypo

SEQ ID NO: 96031 - DNA, 30 bp, Homo sapiens
  chr19:5110783-5110813
  hypo
cctggagtgcatcccgggcctcgctgaagg

SEQ ID NO: 96032 - DNA, 30 bp, Homo sapiens; identical to SEQ ID NO: 31940
  chr19:5112695-5112725
  hypo

SEQ ID NO: 96033 - DNA, 30 bp, Homo sapiens
  chr19:5114187-5114217
  hypo
aaactctttccacgcgagaagcgccatgtg

SEQ ID NO: 96034 - DNA, 30 bp, Homo sapiens
  chr19:5117544-5117574
  hypo
ttgcaccccagcgccggtctgaagcttcct

SEQ ID NO: 96035 - DNA, 30 bp, Homo sapiens
  chr19:5119316-5119346
  hypo
tcccgtggcacacgcggctcctgccgcccc

SEQ ID NO: 96036 - DNA, 30 bp, Homo sapiens
  chr19:5134103-5134133
  hypo
accccaggcaggggcggtgggagagggcga

SEQ ID NO: 96037 - DNA, 30 bp, Homo sapiens; identical to SEQ ID NO: 31941
  chr19:5138078-5138108
  hypo

SEQ ID NO: 96038 - DNA, 204 bp, Homo sapiens
  chr19:5144145-5144349
  hypo
aagtcggggggtcacgctgtgagtgcctgcccgcctccttgcccccagcccctggctcccgcccccaccgacacccgcgctgaccgccccccacaccctccgcaccctcccaggtccaactcctgagggccgtgtccctaggccaggtggtcatcaccaagaaccgcaacgggctgtactaccgctgtcgcgtcatcggtgccg

SEQ ID NO: 96039 - DNA, 30 bp, Homo sapiens
  chr19:5147840-5147870
  hypo
agccagcaagccaccgtggagtgcgcgcct

SEQ ID NO: 96040 - DNA, 30 bp, Homo sapiens; identical to SEQ ID NO: 31942
  chr19:5148115-5148145
  hypo

SEQ ID NO: 96041 - DNA, 30 bp, Homo sapiens
  chr19:5151566-5151596
  hypo
tggcatgccccgggcgttcgcttgctgtga

SEQ ID NO: 96042 - DNA, 30 bp, Homo sapiens
  chr19:5154720-5154750
  hypo
cagcagccagggctcggggggacgcggcca

SEQ ID NO: 96043 - DNA, 30 bp, Homo sapiens
  chr19:5155072-5155102
  hypo
agccttccctgtgtgcggggacagacacag

SEQ ID NO: 96044 - DNA, 85 bp, Homo sapiens
  chr19:5155321-5155406
  hypo
aaaagtgtcaccgtgcggagccgatgaggtctgcactcgggccggggtgggtgccccgatgccgaggtctcgtatctcggggcag

SEQ ID NO: 96045 - DNA, 30 bp, Homo sapiens
  chr19:5210832-5210862
  hypo
tatgagcccagggccggcagggagacccgg

SEQ ID NO: 96046 - DNA, 176 bp, Homo sapiens
  chr19:5218521-5218697
  hypo
gggttctgagtccttgcgtttactttaggagaagcaagcggaacagtccagttagtagtggcacatgttcatgtgtgaacacaattcaggccccaggaatgcatggtaagaaaaggaccatggacccgtatgactagggtttccaggaccaagtacagctacgtgtacaagctgtg

SEQ ID NO: 96047 - DNA, 30 bp, Homo sapiens
  chr19:5223007-5223037
  hypo
gggtggccacggggcgtgtcctccgggatg

SEQ ID NO: 96048 - DNA, 30 bp, Homo sapiens
  chr19:5223328-5223358
  hypo
tgtcagggtcccagcgccatccgccagccc

SEQ ID NO: 96049 - DNA, 365 bp, Homo sapiens
  chr19:5231253-5231618
  hypo
ggaaggcttcgaggcgggggccgggctggggcctgcggggggtcccgggcctggggcaggtacttaccatcctcgtcggtgcggacgaccacgggcgagctctcgggccctggtcccacctctgtgtgagcgacagtcgtgatgcggtactgggtccacttctccaaggcctccagcaggatctgagtggtggtcggggggatgccgttcacctccttgggttccgggtcctctgagcccagcggtcggtagcggacgctgtagcccaccagggccccgttgtgcgtttccggcggcggcgggcgccaacttaccaaaatggccgtggagcgcacgctgacacatttaacgtcttgagggggggc

SEQ ID NO: 96050 - DNA, 516 bp, Homo sapiens; identical to SEQ ID NO: 31943
  chr19:5238077-5238593
  hypo

SEQ ID NO: 96051 - DNA, 30 bp, Homo sapiens; identical to SEQ ID NO: 31944
  chr19:5239036-5239066
  hypo

SEQ ID NO: 96052 - DNA, 30 bp, Homo sapiens; identical to SEQ ID NO: 31945
  chr19:5240209-5240239
  hypo

SEQ ID NO: 96053 - DNA, 30 bp, Homo sapiens
  chr19:5244254-5244284
  hypo
gccgatggagttgacggccgacacccagat

SEQ ID NO: 96054 - DNA, 420 bp, Homo sapiens; identical to SEQ ID NO: 31946
  chr19:5245670-5246090
  hypo

SEQ ID NO: 96055 - DNA, 427 bp, Homo sapiens
  chr19:5269158-5269585
  hypo
tgggtacatgtgtgccgcatgtatgtgctcacgcttgcccgtgcccacgtgtccacacgtgagcaattcccgtgtgtatgtggccccgcaggggtccccataagcgtgtgtggacagcagccagccagggtgcagggggaggtctcggccgcctgacgctaccgagaacacctaattaaacaaaaacgtacatcgcgaaccacactctgcccagttcctcggagtttaattaaaacaacagtgcaggaggcgtgtgtggggtccacaatcagatggcagaggaggaggaaggcagggagtggccctggcagtccagatggtcccccaccaactgccagggactggccggaggtgcccggagctcagggctggtggcaaggtgggtgggatcgggtcagggtatccaaggccccgggccccagcagga

SEQ ID NO: 96056 - DNA, 101 bp, Homo sapiens; identical to SEQ ID NO: 31947
  chr19:5274367-5274468
  hypo

SEQ ID NO: 96057 - DNA, 411 bp, Homo sapiens
  chr19:5307583-5307994
  hypo
acaagggaatataaatccagccgcctactaaatgttcacagaagatttctagataaactgcgctcttcaaaaccgtagccacgagccgtatgtggctgtttaaatttaaacggaataaaatggaataaaatttaaaattcagttcctcggttgcactggacacatttcaaacgctcaatagccacattcggctcagggcgactgtaccacggtgcgtagacggagaccatttttatcatcgccatatcgggggccaaatccggcccaccgtttgtttttataaataaagctttattggcacatagccacgcccaccagtttacgtgtttgtctatggctgctttcacgctccaatggcggggttgagtagtagacagagatcatccggccggcaaagctggaaagatttac

SEQ ID NO: 96058 - DNA, 185 bp, Homo sapiens
  chr19:5312164-5312349
  hypo
gacaaatgggcatgtccgtcaggaggggctgggcatgtagatggcatactacacagccctgaaaaagaatgcatagtacgcagccctgaaaaagacatccctggctgtgtgcgtcctggtactgtcagtgaaagagcatggcagggacagcgggcataggatgtgtgggacgagaaggtgagcac

SEQ ID NO: 96059 - DNA, 410 bp, Homo sapiens
  chr19:5334918-5335328
  hypo
gcagagggcctggcacggggcgccaactctaaatagtcggagcagctgttattatccccccgacatcccctcatttgctgatcacgggggttaattataagcggcattaaattatacacacacagacgcgccaacctcgcttccccagaacccctgaatttccgcaaactctcaattacccacgtgacagcgcgacgatgggccatcctcccagcctctctccccacagcctgcctcatccgagggtcccaggcttccagagccatggcttctccgcccgccggatacccctctgggtgtccaggagcggaaggaaggatgcatgcgactgactgcggacgcgttgagagccaggggaggcatgtttacccacagcatctcatgtcaaggctcgccgcgacgcagactgc

SEQ ID NO: 96060 - DNA, 221 bp, Homo sapiens
  chr19:5455291-5455512
  hypo
gcttgcccgggtaccggcaaatcacagacctaggaatgatccattggccacaggcccaggcagctggcagctcctgggacagaatgtagcagggcgatgtcacagaagctgggggcatctagaaccctggtgactcctggtctccatgtcatctgccagaaaggccacctgcgccagcacctcctgagaccggccttcaaagacacgacgcatgccgctct

SEQ ID NO: 96061 - DNA, 30 bp, Homo sapiens
  chr19:5582462-5582492
  hypo
ggtctcagcctccctcgggctcagaacctt

SEQ ID NO: 96062 - DNA, 1058 bp, Homo sapiens
  chr19:5587165-5588223
  hypo
tttaaaaagatcccccaagttcgagggaaccctggctaccagattcaacagtgcgtctgcccacccgaaaactcgcagcgagtgggacttagtagcggcgggtgaagtgggggtacggggggggatgagggtgtgggtgagggactctgctgccccggtcctggctggccactccgccaccttccagtccgccacctggcaccacgtggccctgggaatgtccaccttgtgcaaagccgcctcgcctaggaacaaagtcagacaatttttttccccttgaagtgctcagcgttttcatcgtaacatgggttcagtaacggtcccgcagcctttagagcgcttgggttttttttccaggtgagaaaaatcatcatcgcacattgtattccaggtaactcaagagcgttatttgcataaattgcaaagagctgctttttgctttgttttcataacatccaacccagccagctgatcaaacatgcaaaaaagggagaggaagtgaggagcaggagtgaaccaccgtcctccacggacgacacaccttaccccgccactccaccgcggcttgccatgtgccccggccccgagggcccagacaggcccctctcgccacctagaagagaagaagggtctgcaaacactccgttcctggggaagcccctggacacatgtgggggccacagccaccctcgtccctggagccagccccgtaccttgccacctggcgtgctcccggctagccgcgcctgcgtccatggcaccctgccaggcgcgtgcctggtgctcctctagccgctggttgtgctctccccagtcacggccacccctttgccaaaagaaaaagacatgcagccatctaatgagcctccagggttgtgtcggcagcaggcgcacccaccctgacctcagctgcatggtgggtcatgccacacaacaagggctgcatgtcaagtgggcaaatcaagggaagggacatttccccaaagacagatgtgctagtaagcacgtgagaaggtgctcaacgccacccagaaatgccaatccgagccacaccgaga

SEQ ID NO: 96063 - DNA, 30 bp, Homo sapiens; identical to SEQ ID NO: 31952
  chr19:5593917-5593947
  hypo

SEQ ID NO: 96064 - DNA, 740 bp, Homo sapiens; identical to SEQ ID NO: 11970
  chr19:5608065-5608805
  hypo

SEQ ID NO: 96065 - DNA, 36 bp, Homo sapiens; identical to SEQ ID NO: 31954
  chr19:5609544-5609580
  hypo

SEQ ID NO: 96066 - DNA, 30 bp, Homo sapiens
  chr19:5630492-5630522
  hypo
ctgtaaggccaggtgcggtggcacacgtcc

SEQ ID NO: 96067 - DNA, 42 bp, Homo sapiens
  chr19:5641155-5641197
  hypo
caggcgtaagccatcgcatccggcccttcttttttcttttta

SEQ ID NO: 96068 - DNA, 30 bp, Homo sapiens
  chr19:5645595-5645625
  hypo
cttaactctaggcttcgacgagtggcctcc

SEQ ID NO: 96069 - DNA, 276 bp, Homo sapiens
  chr19:5661521-5661797
  hypo
tgtgcagcagggtgcgtgaacgcagtgaacgcgaacaacgcatgcaggcgcagtgggagcgcgaggagcgtgagcggctggagattgcccgagagaggctggccttccagcgccagcggctggagcgggagcgcatggagcgggaacggctggagcgcgaacgcatgcacgtggagcacgagcgcaggcgcgagcaggagcgcatccaccgtgagcgcgaggagctgaggcgccagcaggaactgcgctatgagcaggagcggcggcccgcggtgc

SEQ ID NO: 96070 - DNA, 247 bp, Homo sapiens
  chr19:5668102-5668349
  hypo
gctgtgcaggctgggatgggccggggagcaggaggacttcgcagtcaaaccaatgtgaatttgttcctaggcgcggcagctttgccccaggcggggcctcccggggccaccccatcccacacggtggcatgcagggcgggtttggaggccagagccgggggagcaggcccagcgatgcccgcttcactcgccgctactgagtacttggaatcctgtgtcctgtctcgtggcaacaaggctatgttct

SEQ ID NO: 96071 - DNA, 30 bp, Homo sapiens; identical to SEQ ID NO: 31956
  chr19:5677980-5678010
  hypo

SEQ ID NO: 96072 - DNA, 30 bp, Homo sapiens; identical to SEQ ID NO: 31957
  chr19:5683383-5683413
  hypo

SEQ ID NO: 96073 - DNA, 30 bp, Homo sapiens; identical to SEQ ID NO: 31958
  chr19:5684954-5684984
  hypo

SEQ ID NO: 96074 - DNA, 30 bp, Homo sapiens; identical to SEQ ID NO: 31959
  chr19:5694577-5694607
  hypo

SEQ ID NO: 96075 - DNA, 30 bp, Homo sapiens
  chr19:5694820-5694850
  hypo
tgcttgatgagcagcgtcagcacgtccgat

SEQ ID NO: 96076 - DNA, 297 bp, Homo sapiens; identical to SEQ ID NO: 31960
  chr19:5695909-5696206
  hypo

SEQ ID NO: 96077 - DNA, 31 bp, Homo sapiens
  chr19:5698922-5698953
  hypo
tcggttgcccacaacccggattgctctacca

SEQ ID NO: 96078 - DNA, 30 bp, Homo sapiens
  chr19:5699436-5699466
  hypo
gtgctaggagaccgcggccacccggcagtg

SEQ ID NO: 96079 - DNA, 30 bp, Homo sapiens
  chr19:5703604-5703634
  hypo
agacaccgtcagggcgcactgccacccaac

SEQ ID NO: 96080 - DNA, 119 bp, Homo sapiens
  chr19:5711964-5712083
  hypo
cgcctccggctcctcgggctccacctccagctgtctgctgatatggactctgacacgggagcaaggcaggtgtgaatcagccgctgaggctgggagctggacccggctgaggcctccct

SEQ ID NO: 96081 - DNA, 9 bp, Homo sapiens
  chr19:5759792-5759801
  hypo
aagggagtc

SEQ ID NO: 96082 - DNA, 30 bp, Homo sapiens
  chr19:5784169-5784199
  hypo
gcccctttgggggacgacatagatattgct

SEQ ID NO: 96083 - DNA, 41 bp, Homo sapiens; identical to SEQ ID NO: 31963
  chr19:5785226-5785267
  hypo

SEQ ID NO: 96084 - DNA, 199 bp, Homo sapiens
  chr19:5785479-5785678
  hypo
gatcctctgtgggagccgctccagcagccccacgggcacgtacctgcggcgggtgggcgggcaggacaggcttgagtcagctctaaccagccgcggcccacgcgccgcccaccccagccagccccggtgcccaccggcacaggaaggacagccactcgagcagaaagcgccgggtcttctccacgccctgcgtgtccga

SEQ ID NO: 96085 - DNA, 1122 bp, Homo sapiens; identical to SEQ ID NO: 31965
  chr19:5789243-5790365
  hypo

SEQ ID NO: 96086 - DNA, 202 bp, Homo sapiens; identical to SEQ ID NO: 55489
  chr19:5804851-5805053
  hypo

SEQ ID NO: 96087 - DNA, 44 bp, Homo sapiens
  chr19:5824985-5825029
  hypo
ggttggcccccgcggcgcagcagggggggcggtgggaggagaga

SEQ ID NO: 96088 - DNA, 621 bp, Homo sapiens
  chr19:5825263-5825884
  hypo
taatgcctgccccaccgcaggtgctgtggggtgagggtggtgcgtgggccctgacccctgtgcccacgcacatgtccatgcgtgcgcctgcgcgggcatctgaggcgtggatgccggcagggtgcgtgtgcagcgcctttgggtgtgggccacgagtacgcccatgtgcgcgtctgcgcccgcccctgccagcccacacaatcctcttttcttgtccttacaatgcacaagggtggcctccagcacgagctccacttctgtcctcccaccacttccctctctgcaagcggcgtgaagtccttcctaggactctgggacagagacccgggcgggacccccaaaatccagtgctccaggacttggggtgcggggggcaaagcacgaatggaggaatttcaggcactgcggagggtcagggcccatgggcgggtgcctgtctgccctactgcaaaaagcgagtggccactgactccccaagtccccatgttctaggctcctggtggaatttcaggctggggaccttgtgttctagcccctgtgcaagcagccagccccgctgcagggaggcagggacagacatcctaaaagatgattcattgttgccaggtgcggtggctcacg

SEQ ID NO: 96089 - DNA, 200 bp, Homo sapiens
  chr19:5826123-5826323
  hypo
cgacagagcgagactccgtctcaaaaaaaaaaaaaagattattcattgtttatatggaattcagatttagccgggcacctgtattgtatcgggcaagcccacaaatgtctgcttcgatgcacccctctggggttgggtgtgccccctaaccccccagcacagtcctggccactccagtcctgctccggggcttaaagaac

SEQ ID NO: 96090 - DNA, 30 bp, Homo sapiens; identical to SEQ ID NO: 31969
  chr19:5831156-5831186
  hypo

SEQ ID NO: 96091 - DNA, 39 bp, Homo sapiens; identical to SEQ ID NO: 31970
  chr19:5834508-5834547
  hypo

SEQ ID NO: 96092 - DNA, 30 bp, Homo sapiens
  chr19:5843646-5843676
  hypo
gccgtgaagcccagcgtgtgaggtcccagg

SEQ ID NO: 96093 - DNA, 495 bp, Homo sapiens
  chr19:5844273-5844768
  hypo
ccagctcggtcttggccgagaggttgagcggtgggtgggcaggctggccggaccacggctccagccagccgtagggcgtgaagatgtcggagtcgctgcggtaggacatggtgagattgaagtatctgtccagggcttccaggtgctggcagttagggggtggctccaagttgaaccagatccagcgctgcccctgcggcctcggggaaggtgggaggcgtgacttagggttggacatgatatcccagtggtgcacgatgaccatgtctgcctgtgggtacaccttgcggtcggcagtgatgtggcagtcggctgtgccgggcaccatctctgaacagcgggacagagccacagggatgtggaaaggccatgtccgtagcaggatcaggagggtggggcgggtgggagtggtgtcctgtcgggaggacccactgggagccctaggggatccagtggcatcgtctcgggacacacgcaggtaggagaagaaacaca

SEQ ID NO: 96094 - DNA, 76 bp, Homo sapiens
  chr19:5858549-5858625
  hypo
aaagcagaggtccaggcgcattagaggagctgaaggaaactctaggctgggtcttcacaagcggaagatgagacag

SEQ ID NO: 96095 - DNA, 31 bp, Homo sapiens
  chr19:5859463-5859494
  hypo
tacaagcgtgagccaccgcacccagccaggt

SEQ ID NO: 96096 - DNA, 42 bp, Homo sapiens
  chr19:5867191-5867233
  hypo
tagggcgtgaagatgtcggagtcgctgcggtaggacatggtg

SEQ ID NO: 96097 - DNA, 121 bp, Homo sapiens
  chr19:5878603-5878724
  hypo
tgagccaccacacccggcccaatgaaggtatttccgagaacgaaaacggttaggaggtggtctgttggaacctggaggtgaaaagtataattttctttcctttttttttttttttccagac

SEQ ID NO: 96098 - DNA, 31 bp, Homo sapiens
  chr19:5885338-5885369
  hypo
tttcttcattgctgcccggtgtatagtagca

SEQ ID NO: 96099 - DNA, 31 bp, Homo sapiens; identical to SEQ ID NO: 31972
  chr19:5895544-5895575
  hypo

SEQ ID NO: 96100 - DNA, 31 bp, Homo sapiens; identical to SEQ ID NO: 31973
  chr19:5895851-5895882
  hypo

SEQ ID NO: 96101 - DNA, 31 bp, Homo sapiens; identical to SEQ ID NO: 31974
  chr19:5896208-5896239
  hypo

SEQ ID NO: 96102 - DNA, 75 bp, Homo sapiens
  chr19:5896951-5897026
  hypo
cttcaaggaaggtgcccggaggattgagtgtgactctgtaggcagcggcggtcaggcctgcgagacagaggaggg

SEQ ID NO: 96103 - DNA, 292 bp, Homo sapiens
  chr19:5897315-5897607
  hypo
gcaccggccggcagacggagactcatccacgtggtggacacaagaacaggcctgagacctcagttctgcggctgcttccagcctcacaccgccagctcagcggcgccccccacgggccctggcaccagggccccagctccaggttcccatcaatggctctattctcctgtggggcccggggctcctgggcctaatcccccttggcagtggctctgcttccctgcctggctgccaacgcctcctccttgccactctcgaccccctcctgctggcagctcgggcctgggctcgt

SEQ ID NO: 96104 - DNA, 43 bp, Homo sapiens
  chr19:5910056-5910099
  hypo
tcagaccagaaaggtcggaggccacccacggccttcaggatgg

SEQ ID NO: 96105 - DNA, 116 bp, Homo sapiens; identical to SEQ ID NO: 31975
  chr19:5910338-5910454
  hypo

SEQ ID NO: 96106 - DNA, 40 bp, Homo sapiens
  chr19:5914453-5914493
  hypo
gcacagtgcctgtcccgcggggcctcgggcatccagggcc

SEQ ID NO: 96107 - DNA, 1512 bp, Homo sapiens
  chr19:5914795-5916307
  hypo
gcgacagaggatgctgagatgcggagacggggactcctccctaagagctgctgttaagaggcgcctgctggggcatacagccccagtgctctgcacagcgtcttgggggtttgggtgtgctacccaccacccccagtcaccacctcctgtcccagccccccatgtcccaggcccgggaggctgtcatcgcagctgcatttgccaagctggaccgcagtggggacggcgtcgtgacggtggacgacctccgcggggtgtacagtggccgtgcccaccccaaggtgcgcagtggggagtggaccgaggacgaggtgctgcgccgcttcctggacaacttcgactcctctgagaaggacgggcaggtgggtggctgcgcggggggccccctccccaggcagttcctcggccgtgccccctcacggccctctgttcccaggtcacactggcggaattccaggactactacagcggcgtgagtgcctccatgaacacggatgaggagttcgtggccatgatgaccagtgcctggcagctgtgagcagctccggctcagccctgctgccctggcctgtcactccccacccctgccggagacctcccttccctgggccccttctctcctgggcagccacaccacagagcggggaggggcaggtgggggaatggaggctgcaggactggctagaccaggtccctgccggtccaccaggcggaggtgggacaaaggtcctaacaggagtcactggctcaggaccccagggagaaacgctctccccacccacgccatgctgaccagagatcttgcagcccctgtggatgcccccgccgaggtcccccgatccccgcacccggactgctgctccctgcccctcccttgcgggtcccccaggaagccaggtgaccccaggtgggaggctgtgtgtggaggccatcctggaaggaagtttagacctgcccaggtgtggagcgaggggcacaggggcatcctaacctcagaaactgaaataaagcctttgaaaaaaaaatctgtaaaacatcaacccccaatcagaagatggcaaatggggaataaaaatagcaggtaacatgtccagcgggcccagtatctacattctggtgagcggcccgaggctgggagctctgggcgggggcagaccggcggggccttgcagcaggggtgggggtaaagtgcgggtggtggtggagagaacagggctgtggctggaccccagcactggtgacacgctgggtgggagcatgaggccccaggctgctggaggtcctcgcccggggaggtggaggccgttcctggtcaggggcttcctgaggcccctggggcatgcagaggccagggttttagttaaaagtttaatgtagttcccaaatacatttcatatgacaatcttacataaatgttccaaaacacatgggcgttatctcgttgtactcgtcactagctggctaaggcttaaagcagagacgtgtgactgggtctctcgggagggcctctgg

SEQ ID NO: 96108 - DNA, 30 bp, Homo sapiens; identical to SEQ ID NO: 31978
  chr19:5917299-5917329
  hypo

SEQ ID NO: 96109 - DNA, 226 bp, Homo sapiens; identical to SEQ ID NO: 31979
  chr19:5925830-5926056
  hypo

SEQ ID NO: 96110 - DNA, 151 bp, Homo sapiens; identical to SEQ ID NO: 31980
  chr19:5927749-5927900
  hypo

SEQ ID NO: 96111 - DNA, 327 bp, Homo sapiens; identical to SEQ ID NO: 31981
  chr19:5938100-5938427
  hypo

SEQ ID NO: 96112 - DNA, 65 bp, Homo sapiens
  chr19:5957769-5957834
  hypo
ttccctccaagctcaacgtgaaagtgtaaaggcctctgcttaggtctccccgtctgtgggcagaa

SEQ ID NO: 96113 - DNA, 138 bp, Homo sapiens
  chr19:5960698-5960836
  hypo
tgggagaggagtgcgcgctggtgttgagaaccgtgtcggtggatctgcaggtgcacggaagggactgcagctatttgagtaactatgggaggcctgggcaggctgtggtgccaaggtgctgcccggagccttctggac

SEQ ID NO: 96114 - DNA, 163 bp, Homo sapiens
  chr19:5985338-5985501
  hypo
tctggaaagtcctctggcatgcgcagttatctcttcatccctcatggagcgcatgtgcaagttcggggggcattagtctaaaccatgcggtagaaattgaggctatgacatcagcaagctcgttctgtgcaaactccagtccgccatattgttccaactgact

SEQ ID NO: 96115 - DNA, 665 bp, Homo sapiens
  chr19:5994752-5995417
  hypo
gaggcactaatttggtggagccggtgaaatccaggttcccagagtgaccaggcggcatcttttggaacctcgaggaggcgccggccggggctgctagatgccctgcagggagtggttggggtcactgcgctcccgctttaccaggggctcacccaggctgcgggcgtctgggcccgcctcgctgccacgctgctcatcgcccatgtcatctgcggagggaggggtagggtcagtgtccatcatcaggagggcacgagagggagagaaggaagtgcacgttccgagaactgctccggcacgccaggcagggcaccgaggatacatggcagcctgtggaccccacctcggcctctgctccaggctgacctgtcctccccacctgccgttacccagaggtgcccccagctcgggccaggcgaaagagcctctgccctgtgcctccctttcccagcgccgacgggcctggggcctgctccccacagggctggggcctctggggtcctcccacccgcatgggacagagacggggcccgggggtccctctggcctgcctgtcccactctcctgctgggcgtgggcgcaggagaccaggggctgcctagtctgggcctggtgctgaggtccctgggcagcggctacccagaggccagcggcagtctgagccc

SEQ ID NO: 96116 - DNA, 30 bp, Homo sapiens; identical to SEQ ID NO: 31985
  chr19:5995632-5995662
  hypo

SEQ ID NO: 96117 - DNA, 61 bp, Homo sapiens
  chr19:5996022-5996083
  hypo
tggctgccccaaagcccggcgttcacgccaatgtgcagagaacaggcggcttccacagttt

SEQ ID NO: 96118 - DNA, 54 bp, Homo sapiens
  chr19:5996648-5996702
  hypo
ttgtggatgtgctaagcgccacttgattgtgcgctttcacgtggaaatctctcc

SEQ ID NO: 96119 - DNA, 321 bp, Homo sapiens
  chr19:5997128-5997449
  hypo
aggtagaacatgtactcgtcgtagagcaggcggatgaggtggaaggagccgaagctggcagcgctgcgcagggtcaggtcccggatcaccatggagctggggacaagcggacagaggctggggaccctcaggggagcatggaacccgggccccaggccagacttcatggcagcaacacaccccctgctctacgttccctggggaacccagaggctgagtgatcctaagacgtgcaggcctacgcgggggctgacgggctgccgagaccctgggcccacgtgacggacaggtggggccggcctgcgcgctcagttccagaga

SEQ ID NO: 96120 - DNA, 350 bp, Homo sapiens
  chr19:5998650-5999000
  hypo
ccaaaggcctcccccacgcagatgaggtgctggcactctgcaaccagcttccccacagccccggtgtctggtgcgatgcttcagtccaaagtatttccagaacatcgcctgcggtcaccccggtatctctgggttcccaaatgggctcgcagctcccagagagtaggagcatcggccgaccaccaccaagggaggcccagccagagcttggggatgaccagccaaggcctcagtccacatgctaccattttctagtgggtgctacagaaataaatcccgtaaacctaatttttattttttatgactgcactgcacgtgcataagaatgaagtcagaccaggcgtggtggc

SEQ ID NO: 96121 - DNA, 209 bp, Homo sapiens
  chr19:5999239-5999448
  hypo
ctggtgacagagcgagactctgtctcaaaaaacaagcaaacaagagaatgaagtggaacagtgtctcggtctcccttgtgaagagcacccccaccttgcagacgtgaccccgatcccctccagctctgagctgtgctcttctctggctggcaggcacctcagtcctgcgctcactctgctcttctcaattcttccgcttgcaaccttcc

SEQ ID NO: 96122 - DNA, 30 bp, Homo sapiens
  chr19:5999660-5999690
  hypo
tgaggtcccggcactcgggtagcgtgcctg

SEQ ID NO: 96123 - DNA, 516 bp, Homo sapiens; identical to SEQ ID NO: 31988
  chr19:6001732-6002248
  hypo

SEQ ID NO: 96124 - DNA, 480 bp, Homo sapiens
  chr19:6002449-6002929
  hypo
gtcaacgtggtgccacgatcctggaagctgggggcctttgtgaggaaaatgagcagaagtgttggccacagcgcctggacgccagagggccctgagagatgatggagtggagagagctgggggctgtgggtgggctttggcctgggacccgtgtcatgcaacagaaccgtggccaggctcggggcaggggccaggttgtgccacgggctccacttggtgggtttgctggttttgctggagggcgggaagcccgggccctggggacggtgtggaggaagtcacctgcacgttggcaaagtccacgcggttgaggtcgctgagcatctggttgatctgggacgtgttctgcagcaccgcccgggccgcctgcgccaggtggttgagggacgtgtagcgccgcagcgtctgggcgaaggcactgacgacgcccacctgtaagccagggctcgtggtgagcaggggttcgcagggagagcctgt

SEQ ID NO: 96125 - DNA, 31 bp, Homo sapiens
  chr19:6003432-6003463
  hypo
aattccgaagagcaggcgggtgccctgcagc

SEQ ID NO: 96126 - DNA, 225 bp, Homo sapiens
  chr19:6003831-6004056
  hypo
agaacggtgggtaatcactctcttttccacaagtcggccaaggttctacatttcaaattcgactgatttgtggccaagattgcagcaataagggtcacagcaaggagattaaatttcccgaataagatgagcacagaaacacgcaatctgttctgaattgacccaaagatgtgacatcaaatgacatcttctgttgttccccttcctgccagcactgacgcgtca

SEQ ID NO: 96127 - DNA, 470 bp, Homo sapiens
  chr19:6004120-6004590
  hypo
cgctctctgggacacagtggtcctcatgctgtcctggactggagcccctcccagccatcgttggggagcccaggccccaccccggacgcaccttggtctggatgacctgttgtgggaagtcactcatggcatttgtcaaccagccttccaagctcttggcaaagttacggatggcctgtgtcaaggtacctgggggatacagaccatgatattaccagggagaaaggcagtgactggaccctggaaatcagcattcagtgtaagagctggcccaagtgcgatgaaaatgaccaccatgaagaacgagccacacaggcgacggggaaccgaggacacttagaaacgggaagaaccaggcatggcccagcgctgctggtcaccacccactgcctatgcgggtctcacaggggcgattctgccccaggggacactgggcaatgtctggggacgttaatggtggtcatgactgc

SEQ ID NO: 96128 - DNA, 404 bp, Homo sapiens
  chr19:6005134-6005538
  hypo
aaatattttaaaatgcaaaaggaaagataccccaaactcccaccataacatagaaactcagacgaggcattgccctgaacagttttcaggcagacaggcaaggccaggccaaatgagaaatgcaatacttttgctgtttcccatcttccagcaaagggagcatagagtttactcaacaggacggagagctgcctggtactaacgggcatgcatatttgtggatggcctgaggggcacggtccatgggcccggatgtttgtggatggactgcggggcatggcctgtggtcctgatgctgtgatttatgaagagaggcctctgtgcccagcttccttgacgacccccagggttttggggagcttggcacgggcctggcccgagggctccctcgtggtgggtgctgt

SEQ ID NO: 96129 - DNA, 200 bp, Homo sapiens
  chr19:6005977-6006177
  hypo
ggctactcccagaggccggcctgcatgcccccagtgaaccttctagaaagcaccgagcccagcccagctactcttggctgtgtcctgacagcaggtagagctcaccagagccactgtgaccttcccctcgagtcagagacaaggacaaataacgcatgccagaggggacacattctacggcccacagcggctctcactta

SEQ ID NO: 96130 - DNA, 483 bp, Homo sapiens; identical to SEQ ID NO: 31994
  chr19:6006878-6007361
  hypo

SEQ ID NO: 96131 - DNA, 568 bp, Homo sapiens
  chr19:6007826-6008394
  hypo
gaccggtgagacagacgggtgcgtgcgcccatcacgtgcactcagcacacgtcaagtgagcagccgtgatccgggctacagcggggtgccctggaatcccaagggaggccacagagaggagaggagcaggcgatggacatggatgcggaggggctgctgcttcagagaggatgcttgttggggggctcggggctccagctcctcagcgtcacccggggacgcctggcctgagcgctggcggttcccgggagggacacgcaggagctgcctgcctgggctggggcggtcacctcgcagtgccgtctgtacaccagctgcagggccttgacgtcgtgcagtgtgacgccgtcctgcagcaggaagctgcccaggtcgggcgctgggaactcggggaagacgtgggagacatctgggggaggaacacgggaacatcagaaatggcgaggctcttaggacaccgtggacaactggaaggccacggtggatgggggcccagaaacagatgttctgccccaccccatgcagtcagggaatttgttttttctttctttttctttttctttttttt

SEQ ID NO: 96132 - DNA, 95 bp, Homo sapiens
  chr19:6010176-6010271
  hypo
cggccatggtctgttccggagtgctgtgcaggccgctgtgggagccgctgtccccgaggctgtccgtcttctgggctggccggtacctaggccag

SEQ ID NO: 96133 - DNA, 61 bp, Homo sapiens; identical to SEQ ID NO: 31996
  chr19:6012585-6012646
  hypo

SEQ ID NO: 96134 - DNA, 47 bp, Homo sapiens; identical to SEQ ID NO: 31997
  chr19:6013008-6013055
  hypo

SEQ ID NO: 96135 - DNA, 273 bp, Homo sapiens
  chr19:6015906-6016179
  hypo
ttctaaagccgacaccgtgggctacacctggccacagccaaggctgccgccaattgaaagtaactgcaagcactccagaggtggctgcgaatcaggccacctggaaaggaggaggaagcctcgcattttcccaaaagctccatttcttgggaaaggaagaggaagaacaggtgggctggggatcgtctacccacctggtgcccagccgccgcgttctcagccccataaacacagaacggatcagtttcccgaaggaggcggcgttcactgggt

SEQ ID NO: 96136 - DNA, 399 bp, Homo sapiens; identical to SEQ ID NO: 31998
  chr19:6017219-6017618
  hypo

SEQ ID NO: 96137 - DNA, 77 bp, Homo sapiens; identical to SEQ ID NO: 31999
  chr19:6018260-6018337
  hypo

SEQ ID NO: 96138 - DNA, 118 bp, Homo sapiens
  chr19:6019775-6019893
  hypo
ttttcttcccagtggcttcaccgtccggatttgtcatgtgtgctgattgatttatcgcctgttccccgcagactatgctctccctgagggtggagacggagccaggtttgcccatgtg

SEQ ID NO: 96139 - DNA, 30 bp, Homo sapiens
  chr19:6020134-6020164
  hypo
tgaggccagattttgcgggcggtgagctgg

SEQ ID NO: 96140 - DNA, 31 bp, Homo sapiens
  chr19:6020513-6020544
  hypo
ctctgttcagggtctacgcctcaccagcagg

SEQ ID NO: 96141 - DNA, 137 bp, Homo sapiens
  chr19:6024057-6024194
  hypo
tgggattacaggcgtgagccaccgtgcccagcccattttcccatagacattttaactctcccgtggacttgctgcctgtccaggctctgcacccccatcctgcctgggtcacgcagccctctcgcccagggctgata

SEQ ID NO: 96142 - DNA, 522 bp, Homo sapiens
  chr19:6024681-6025203
  hypo
cctcattttacacatcggccagcacagaagtcaggatggaatcacagtgaggacgggagtgaggacgggatcacggtgaggacgggagtgaggacgggatcacggtgaggacgggagtgaggacgggatcacggtgaggacgggagtgaggacgggatcacggtgaggacgggagtgaggacgggatcacggtgaggacgggagtgaggacgggatcacggtgaggacgggagtcaggacgggatcacggtgaggacgggagtcaggacgggatcacggtgaggacgggagtcaggacgggatcacggtgatgactggggtccactgaaggggacttcttctctgatgtctgaattctcaagagaatgtcagagcccagtttaagtgctagagagcaactactagaaggacattctgacttcgatggcccgtcccagtgttaagatgccgaacacatttccagctatgtgcaaaaccgaatcaagagcgtttggggagaagtgaaagcgatgagtctgaggg

SEQ ID NO: 96143 - DNA, 197 bp, Homo sapiens
  chr19:6026054-6026251
  hypo
caaagtgctgggattacaggtgtgagccaccgcacctggttgccttcatttgtcttaaaaatgtctatgcaggttacaagcagagcagggacaggttgccaggtcagacgcacacttacatggctgttgagtaaaccgcttttgtgtgatgtgattccttcgcttttttggaggttttcaatcgccatttcaagcta

SEQ ID NO: 96144 - DNA, 278 bp, Homo sapiens
  chr19:6026462-6026740
  hypo
gtaagcccgagagcccgtccaacagaagcagcagaaatcatgttgtaaaaacttgctactgaactttaacctggcatatgtgtgtgcacgccgtagcattaatatgcagccactgcatccattccagtgtcagccaagccagcatcatagtcacctgctcctttccccacgccacatcgatggggaaccagaatgaaagcaaggagagatggcagccttgactccccagccaggctgtcctgtcgcaaatcccagggtctccccgctgctggaggctt

SEQ ID NO: 96145 - DNA, 488 bp, Homo sapiens
  chr19:6026958-6027446
  hypo
ggaggtggggagggaggtgggcggcaggtccacgcgatggaggaggcacacagctgtgcgtggccactaaggcattcgcacgcatttggtttgtcctagactcgcacacggaaaacagcgacgtaaaatctgctgcagcccaccctgacgaccagaggactgaagcgggaggagatgaacttgaagtatatgcttcctttcttaaggaggccaaagacttgacacttctgcaaagagcaggttgagtgtgtatttcagagagcaggcgagcggagctgagttcaagaatgagagggtaactgcttctcccacggcctccgaccacggtggttctgccttctctcattagctacccttgcttcaagccaaggaggacgtcagggtcacctttaagaagtgcagaaggtacactggaggaccaggggaaagtaggatggtgagacctctcccacccatcagcctcagggtgcaggcgatgagaaggcaat

SEQ ID NO: 96146 - DNA, 150 bp, Homo sapiens
  chr19:6033076-6033226
  hypo
cagtgtgagccaccgcgcccagcaggaccgattcttagagccactgggatgacaggcatcagccaccacactcagcaggaccgattcttacagagccactgcgcactcttaacttcaacactcttaactaatccacggacgttatagaat

SEQ ID NO: 96147 - DNA, 55 bp, Homo sapiens
  chr19:6040233-6040288
  hypo
gtaggtgtaggctgttcgtctgttagaaagagagaagtcacgcatgggacgctgt

SEQ ID NO: 96148 - DNA, 343 bp, Homo sapiens
  chr19:6044406-6044749
  hypo
caggactgatcagaggcgacggcggggtgatggtcagacttgcacactcacaccgacctgggcagacacacggcaggtacgtgcaggcacacaaacaatgcacatacatacacaagtgtgcacatacactcagcccatgcaccacacatatgcacgaattgtgggcacacacacacgtatgcacacacacatacacggaagcacatgcaccttcacccgcccaggcagctttgcctctgtgggtctgtagtctgcagcaaggtgacactgatcgtccctagtacagaggggactgctggggccctctggatagccatccgcaccactgcgtgggagagcactc

SEQ ID NO: 96149 - DNA, 687 bp, Homo sapiens
  chr19:6044992-6045679
  hypo
gggtcaaagtgaactcgagtcgagggaggaacaggagtgttttgtgtgtttattgagagctggggctttcggagtcattggctgcagtgctgtgatttcccggcatgaaccctgaatgtcacaggtagcagtgactgccatatatacatcacgaggggtgatgggtgaggacacgccatcccctgtgttgcaggagtggagctaaggatgaagatggtgctaataaggatgccagcgcaagggcattctgattccaggtgagctgggcgccgtgtgcttggagaattcacagggtcctggcaagtcctcagagagggaccacagtgatgaaacctgggacacacatggtggccgtgagtggcactgagacctgtccatggtggctgctgcagaggaaggcagagtccacctaggcctgggagagcctgagagaggggcttggcaggaagacctgagggctgactcctcttggacaatttcaagtgggcacggaaacatatcaattaggccacaactgctggcagggcgacggcgtctgatcctcacctcagatgggcttccaagacgccctccccactgccatatgtgcaagaaataaaagctaaagatgtctgaccatacacactacatcaaataaaccgcttcactgtctgcctttttgtttttgcggaattgtgtttttttgtt

SEQ ID NO: 96150 - DNA, 138 bp, Homo sapiens; identical to SEQ ID NO: 32007
  chr19:6046168-6046306
  hypo

SEQ ID NO: 96151 - DNA, 17 bp, Homo sapiens
  chr19:6046545-6046562
  hypo
ggcgacagagcgagact

SEQ ID NO: 96152 - DNA, 23 bp, Homo sapiens
  chr19:6052163-6052186
  hypo
ggtgtgagcgccacactcagcct

SEQ ID NO: 96153 - DNA, 22 bp, Homo sapiens
  chr19:6059281-6059303
  hypo
cgcctggccttgatttgactat

SEQ ID NO: 96154 - DNA, 162 bp, Homo sapiens
  chr19:6062945-6063107
  hypo
atattcaatatctgctcgtcctttccctccccttccagagaccaatgtcacctgtctgtccttttctggtgcctggcccttgctggggtcacccacatcccctcccgtgagctgctgtgtctcgtatccctcctgtcctgccgctctcgctcttgctcctag

SEQ ID NO: 96155 - DNA, 154 bp, Homo sapiens; identical to SEQ ID NO: 32010
  chr19:6064107-6064261
  hypo

SEQ ID NO: 96156 - DNA, 37 bp, Homo sapiens
  chr19:6076060-6076097
  hypo
aaacgaggttgggggcggtggctcatgcctgtaatcc

SEQ ID NO: 96157 - DNA, 97 bp, Homo sapiens
  chr19:6076336-6076433
  hypo
agagagagactctgtctcaaaataaataaatacataaataagaaacaaacgttcatcaactggaataccattaactaccttacggtgcatcctagct

SEQ ID NO: 96158 - DNA, 28 bp, Homo sapiens
  chr19:6081675-6081703
  hypo
atggagggctgggcgcggcggctcatgc

SEQ ID NO: 96159 - DNA, 31 bp, Homo sapiens
  chr19:6083196-6083227
  hypo
catgagccactgtgcccggccttcatcatga

SEQ ID NO: 96160 - DNA, 31 bp, Homo sapiens
  chr19:6095199-6095230
  hypo
atgtttctttattggccggtaatgatctaga

SEQ ID NO: 96161 - DNA, 26 bp, Homo sapiens
  chr19:6096746-6096772
  hypo
gcacctggcctcgtttcttataattt

SEQ ID NO: 96162 - DNA, 287 bp, Homo sapiens; identical to SEQ ID NO: 32012
  chr19:6105443-6105730
  hypo

SEQ ID NO: 96163 - DNA, 39 bp, Homo sapiens; identical to SEQ ID NO: 32013
  chr19:6107002-6107041
  hypo

SEQ ID NO: 96164 - DNA, 679 bp, Homo sapiens; identical to SEQ ID NO: 55496
  chr19:6110323-6111002
  hypo

SEQ ID NO: 96165 - DNA, 28 bp, Homo sapiens
  chr19:6146184-6146212
  hypo
aaaaaatcagatggagccaggcgcggtg

SEQ ID NO: 96166 - DNA, 30 bp, Homo sapiens
  chr19:6211911-6211941
  hypo
ggcgggccaggccgcgaccagagagaaagg

SEQ ID NO: 96167 - DNA, 31 bp, Homo sapiens; identical to SEQ ID NO: 32015
  chr19:6214703-6214734
  hypo

SEQ ID NO: 96168 - DNA, 268 bp, Homo sapiens
  chr19:6215001-6215269
  hypo
ccaggtctggctcacgttgcccaggcgacgcccctgcctgtgctcctgccggcctctgccccgcatcccacaggtgactgggatgacggctgggcaccgctgcagactgggcttcccaggcagcagaccagggtgtgcagaagctccgacggtgtggcctgggcgctccctgccccggcaacgcagggacaaggccggcaagccctcacccagggcccacacaaacgttccgggaggaatcaaaaggcgcttcgcgtgtggctcggtc

SEQ ID NO: 96169 - DNA, 30 bp, Homo sapiens; identical to SEQ ID NO: 32017
  chr19:6216390-6216420
  hypo

SEQ ID NO: 96170 - DNA, 30 bp, Homo sapiens; identical to SEQ ID NO: 32018
  chr19:6217626-6217656
  hypo

SEQ ID NO: 96171 - DNA, 236 bp, Homo sapiens
  chr19:6230444-6230680
  hypo
ctgctgggtgctgccgtgtgacctgcgccttgggtctcggcccccagcaccgacacctctggctgggcacagacggccgcagcaaagtagcctcggtggagcggccccttggcgggcaggggcggggcacactcaccccgccggcccgcaggagcttgtaccggaactccgtggtggggttgttgaaggtgagcttctcgcagcgcaggtggttcacgggcgggttgccttccagg

SEQ ID NO: 96172 - DNA, 142 bp, Homo sapiens
  chr19:6345240-6345382
  hypo
aatttttattggcacacggtcacacccatttgtttgtaagttgtctatggctacttttatgctataatgcagcaatctgcaagctttttgtcacccaggaccagttttgtgcaagacaattttatcacggaggtgtggaatg

SEQ ID NO: 96173 - DNA, 28 bp, Homo sapiens
  chr19:6363608-6363636
  hypo
tttaaagagctgcttctagaccggacgc

SEQ ID NO: 96174 - DNA, 424 bp, Homo sapiens
  chr19:6374176-6374600
  hypo
ctgggagctcccaggcttaaccgagctctctgtgcaggccatccacggcttccgagagacagagaagtcgcgctggtcagaagccagccgggccatcctgcagcgcgtgcaggcggccgcctttggccccggccagaccctgctctcctccgtgcacgtgctggacctggaagcccgcggctacatcaagccccacgtggacagcatcaaggtgggcagaggacggtgccttggcactcccagccagggggtaggcaggcccggttagatcctgacccatccccacgcctcttttgcagttctgcggggccaccatcgccggcctgtctctcctgtctcccagcgttatgcggctggtgcacacccaggagccgggggagtggctggaactcttgctggagccgggctccctctacatccttag

SEQ ID NO: 96175 - DNA, 144 bp, Homo sapiens
  chr19:6414853-6414997
  hypo
agcagttcagaagtcccgcctgcgagtctcagcgctccccagcatcacgacagcggcacacaggaacaagcagccggcgcagggaggcctcttcgtttaacctctggacccagcgaatgcttccctggcggtgcgtggggactc

SEQ ID NO: 96176 - DNA, 30 bp, Homo sapiens
  chr19:6421134-6421164
  hypo
ctctgcctcattcccgtctgagcactctgg

SEQ ID NO: 96177 - DNA, 506 bp, Homo sapiens
  chr19:6425393-6425899
  hypo
gacatgggtgggtgttcggtgactgacactggtctggacaaatgggaatgaaggaaatcaaagcgcccacttttggtgggagccagtggaagcgccgctgcattggggcggagtcggccaccagacagcgaggggattagcgggaactgtagtgaatggcagccgacgtgggcggtggcaatcggctgcccgaactcaggcctgatgtctgggttagctcaccggcagcctggttgggtaggcccggcacgtggcccgcttgaagccttagagatcgagcgcttccggaggtggggaggccggaaagcaggaaactcgggatcccccgggccttcttctctctcgaccccccatctagagcgtccagttctcttgcaggactcaaggaaccagccccactcacgagtccagaaccgttccaacaaccgggatcgagggatcacagcctcgatcacacccctcacttcacacccctcactcccttcgcctaaggccctgggatccaa

SEQ ID NO: 96178 - DNA, 31 bp, Homo sapiens; identical to SEQ ID NO: 55501
  chr19:6459633-6459664
  hypo

SEQ ID NO: 96179 - DNA, 32 bp, Homo sapiens
  chr19:6461800-6461832
  hypo
atccaaagatacagcattggccggtctcggtg

SEQ ID NO: 96180 - DNA, 30 bp, Homo sapiens
  chr19:6495178-6495208
  hypo
gccacctcctcctccgcctcctcctcgaac

SEQ ID NO: 96181 - DNA, 974 bp, Homo sapiens; identical to SEQ ID NO: 55507
  chr19:6590244-6591218
  hypo

SEQ ID NO: 96182 - DNA, 31 bp, Homo sapiens; identical to SEQ ID NO: 32024
  chr19:6676636-6676667
  hypo

SEQ ID NO: 96183 - DNA, 30 bp, Homo sapiens
  chr19:6707492-6707522
  hypo
ctccgtgagctgcacggaacggcgtcggcg

SEQ ID NO: 96184 - DNA, 30 bp, Homo sapiens; identical to SEQ ID NO: 32025
  chr19:6733676-6733706
  hypo

SEQ ID NO: 96185 - DNA, 30 bp, Homo sapiens; identical to SEQ ID NO: 32026
  chr19:6742892-6742922
  hypo

SEQ ID NO: 96186 - DNA, 237 bp, Homo sapiens
  chr19:6750238-6750475
  hypo
gggtccaaagtgggctgaccccggagctctgccctggaacgattttcctgtcccctcctcccaggcgtggctggcagaagctgaaagtcgagtccttagcaaccggggagacagcctgagccggcacgcccggcctcccgacccccccgctagcgccccgccagacagcagcagcaacagcgcatcacaggacaccaaggagaggtgaggggtgacgtcagagtgggtctgttccca

SEQ ID NO: 96187 - DNA, 30 bp, Homo sapiens; identical to SEQ ID NO: 11983
  chr19:7087694-7087724
  hypo

SEQ ID NO: 96188 - DNA, 121 bp, Homo sapiens; identical to SEQ ID NO: 32028
  chr19:7100508-7100629
  hypo

SEQ ID NO: 96189 - DNA, 30 bp, Homo sapiens; identical to SEQ ID NO: 32029
  chr19:7115751-7115781
  hypo

SEQ ID NO: 96190 - DNA, 166 bp, Homo sapiens
  chr19:7116308-7116474
  hypo
aaggagagagggggatgagctcgcacccttgagaagaaccttcatgagccaattcccaaagcatcaactccgcatggatactttgcacacacatcagccgtgtctaatggacacacacacgtgcatacacacgtgagcacacgccgggaccacagacccttatcca

SEQ ID NO: 96191 - DNA, 41 bp, Homo sapiens
  chr19:7135687-7135728
  hypo
ataccttccaccagctgggcacggtggttcacgcctataat

SEQ ID NO: 96192 - DNA, 90 bp, Homo sapiens
  chr19:7141679-7141769
  hypo
ggccttacctcatcaccatatcgccgataactcacttcatacagcacgatcagaccattgggctccttcggctcctgccacatcaagtgg

SEQ ID NO: 96193 - DNA, 84 bp, Homo sapiens
  chr19:7157582-7157666
  hypo
taagtaccgcagctggtcatgtcttaagccccgaagtcaaatcccagggttcttgtgacccacggtgcaagcacagttatgcct

SEQ ID NO: 96194 - DNA, 44 bp, Homo sapiens
  chr19:7158215-7158259
  hypo
aatgaagcataatgggccaggcgcggtgactcacgcctgtaatc

SEQ ID NO: 96195 - DNA, 104 bp, Homo sapiens
  chr19:7169225-7169329
  hypo
agccctatcctccctccttcccgctctctgttcacagaggtcagacacacgctattgtcaaaaggctcttcatggctgagcgtggtgactcacacctgtaatct

SEQ ID NO: 96196 - DNA, 97 bp, Homo sapiens
  chr19:7194736-7194833
  hypo
ggccaggctggtctcaaacacgtgacctccgtctgccttggcctcttaaagtgctggtacaggtgtgagccaccgcgccaggccagctttgctcttt

SEQ ID NO: 96197 - DNA, 35 bp, Homo sapiens
  chr19:7196502-7196537
  hypo
cagagaaataggagacgcagcgctgcattgttaaa

SEQ ID NO: 96198 - DNA, 669 bp, Homo sapiens
  chr19:7267298-7267967
  hypo
taagctttctagaacaaggcacgagacactgcttagaaccctgtatccccggcgtacctttctggcagtgactatgagtccaacatcgttcgacaaactgcccgttgatgacggtggcggggcagttggtcttgcccttcgcggtacccggacagatgtctccacactcctcgttgtcatctttgttcaacacgatgtaattatcctccacggaatccaggatacgggaccagtcgatagtggccaagtaacagagctcattgttcttctcgatgcggacagaaccccgggtgatgttcatcaggttgtagaggccgagttccttgaggtgaaccatctcgaagatgaccagcgcgtagttaaagaacagtcgtgatccccggatgaccgtgaggttggggaacaggtccttcaggctctcgagcccatagacccggaagagcagcaagtaatcagtgatcatgatgagtttggggaaactgaggtctcggaaatcttcgggcctcgttttgaacatcaagagtatctgcaagtgtccttcgatgacagagcaattctccagctcatgcaacctagtgaggttgttccggatatccatgccgggacacactacaagagaaaatgaacagaaagcaagacaggtgagcagacgcacggtggatgcatcag

SEQ ID NO: 96199 - DNA, 88 bp, Homo sapiens
  chr19:7274423-7274511
  hypo
tgcaggatttttttcccatgacgcctacgagatgtggtgtgtgctttaccctggcagcccatctcgaaacggaggctcatttttcttt

SEQ ID NO: 96200 - DNA, 1563 bp, Homo sapiens; identical to SEQ ID NO: 55519
  chr19:7293558-7295121
  hypo

SEQ ID NO: 96201 - DNA, 876 bp, Homo sapiens; identical to SEQ ID NO: 55520
  chr19:7459680-7460556
  hypo

SEQ ID NO: 96202 - DNA, 184 bp, Homo sapiens; identical to SEQ ID NO: 32035
  chr19:7484063-7484247
  hypo

SEQ ID NO: 96203 - DNA, 180 bp, Homo sapiens; identical to SEQ ID NO: 32036
  chr19:7484790-7484970
  hypo

SEQ ID NO: 96204 - DNA, 40 bp, Homo sapiens
  chr19:7489859-7489899
  hypo
cagagtgagactacgtctcggggaaaaaaaaaaaaaaggc

SEQ ID NO: 96205 - DNA, 176 bp, Homo sapiens; identical to SEQ ID NO: 32037
  chr19:7493829-7494005
  hypo

SEQ ID NO: 96206 - DNA, 30 bp, Homo sapiens
  chr19:7504652-7504682
  hypo
tttggcatgaagcacgccaggctcaccgtt

SEQ ID NO: 96207 - DNA, 30 bp, Homo sapiens
  chr19:7505329-7505359
  hypo
gccaacaccgagcccggctggccctgggac

SEQ ID NO: 96208 - DNA, 30 bp, Homo sapiens
  chr19:7509058-7509088
  hypo
tggctaagtcctgccgtctgtgtccctgca

SEQ ID NO: 96209 - DNA, 143 bp, Homo sapiens
  chr19:7525563-7525706
  hypo
tattaaggttcgcccgcgctcagtgagcactttgtcaagaacaattcctggtgccctgtagcctgcggcaagctcccttcttccctttcactgtctgtatttttttttattttatcttcttttttttttttaaacagagcctc

SEQ ID NO: 96210 - DNA, 221 bp, Homo sapiens
  chr19:7531951-7532172
  hypo
cgcagcttgtccagcggatccagacactgtcccagctgctcctgaaccttcaggtacaggggcggggtggggccggccacgcgtgccctttcctggttggctggggcgcaggtgcggctctcactcgcctggccctggccctccgcaggcggtaatcgcccaccaggacagctatgtggagacgcagcgggctgccatccaggagcgggagaagcagttcc

SEQ ID NO: 96211 - DNA, 30 bp, Homo sapiens; identical to SEQ ID NO: 32038
  chr19:7534774-7534804
  hypo

SEQ ID NO: 96212 - DNA, 317 bp, Homo sapiens; identical to SEQ ID NO: 32039
  chr19:7535297-7535614
  hypo

SEQ ID NO: 96213 - DNA, 25 bp, Homo sapiens
  chr19:7538928-7538953
  hypo
aaaaaagaaaaaagggctggacgca

SEQ ID NO: 96214 - DNA, 24 bp, Homo sapiens
  chr19:7539552-7539576
  hypo
cgcgcctggtctattttttcttca

SEQ ID NO: 96215 - DNA, 30 bp, Homo sapiens
  chr19:7543308-7543338
  hypo
gggttagctccacaacgctggccccggaca

SEQ ID NO: 96216 - DNA, 31 bp, Homo sapiens; identical to SEQ ID NO: 55521
  chr19:7553841-7553872
  hypo

SEQ ID NO: 96217 - DNA, 19 bp, Homo sapiens
  chr19:7554712-7554731
  hypo
ctttagactcttgtctgga

SEQ ID NO: 96218 - DNA, 181 bp, Homo sapiens
  chr19:7555030-7555211
  hypo
accgcacccggcctcaatgtccttttccttcgtcttgtcacttctccaaaaatttgctgctatatgttgaaggtgctatataagcaggagttatataagctatataagccacctcatttctcttggcatctcccatgtacacataaggtacacatgttaataaatttgtttttcccttgtt

SEQ ID NO: 96219 - DNA, 30 bp, Homo sapiens
  chr19:7584226-7584256
  hypo
tgaagatctggacccggtttctgaagaccc

SEQ ID NO: 96220 - DNA, 30 bp, Homo sapiens
  chr19:7584646-7584676
  hypo
cagcggcgagaagccgtaccgctgccccga

SEQ ID NO: 96221 - DNA, 30 bp, Homo sapiens
  chr19:7595253-7595283
  hypo
aggcgcagcagggccgcagcagcctggtgt

SEQ ID NO: 96222 - DNA, 30 bp, Homo sapiens; identical to SEQ ID NO: 32042
  chr19:7604873-7604903
  hypo

SEQ ID NO: 96223 - DNA, 30 bp, Homo sapiens; identical to SEQ ID NO: 32043
  chr19:7615585-7615615
  hypo

SEQ ID NO: 96224 - DNA, 736 bp, Homo sapiens
  chr19:7619581-7620317
  hypo
gggggaccaggagcctaccctcggccaggtcggaagcccgtgccccctgatctcacccacctcgggtcccgtcctttgccctcccgtgcctgcaccaggccacgtgcaccctcgccatgggggtaggcgatcagggacccaggtgtggccaggtggtggtggggcggctggtgacctcagccgtccgtattccgcagctggagcagatgctggagaacacggctgtgcgcgcccttaagcagctagtcctgctccaccgagaggagggcgcgggccccacgcgcaccgtggagtggctaaatatgcgcagctggtgctcggggcacctgcacctgcgctgtccgcgccgcctcttttcgcgccgcagccctgccaagctggtgaggagcgggccggcccccaccttctaggggcgtggctggtgggcgaggcttgggagactggggcggggcctgggagggctgaggacaggctcgaaggtcagggtacccctgggggatccgccggaccccgccctcatgctcctgggtcgcgactatctcccccatcccagcatgagctctacgagaaggttttctccaggcgcgcggaccggcacagcgacttctcccgcttggcgagggtgctcacggggaacaccattgcccttgtgctaggcgggggcggggccaggtgagggcggggcttgctctctgggggcggggcctggatgtccgagggtggagcttcctgggag

SEQ ID NO: 96225 - DNA, 30 bp, Homo sapiens; identical to SEQ ID NO: 32044
  chr19:7620582-7620612
  hypo

SEQ ID NO: 96226 - DNA, 173 bp, Homo sapiens
  chr19:7626303-7626476
  hypo
tgggtgctggctgacatgtgacgcatcagtgtcccgtgctgggtgacgtgtgtgtgaccttccctcgcaggaggaggagaagtcgattctccggcaacgacgctgtctgccccaggagccgcccggctcagccacagatgcctgaggacctcgacaggggtcaccccctccct

SEQ ID NO: 96227 - DNA, 20 bp, Homo sapiens
  chr19:7627586-7627606
  hypo
gtttatcttttttatgagtg

SEQ ID NO: 96228 - DNA, 30 bp, Homo sapiens
  chr19:7646039-7646069
  hypo
acgtgcgcagatgttcgcgttaatgcatgc

SEQ ID NO: 96229 - DNA, 130 bp, Homo sapiens; identical to SEQ ID NO: 11992
  chr19:7660555-7660685
  hypo

SEQ ID NO: 96230 - DNA, 278 bp, Homo sapiens; identical to SEQ ID NO: 55532
  chr19:7660714-7660992
  hypo

SEQ ID NO: 96231 - DNA, 1167 bp, Homo sapiens; identical to SEQ ID NO: 11994
  chr19:7676863-7678030
  hypo

SEQ ID NO: 96232 - DNA, 614 bp, Homo sapiens
  chr19:7680031-7680645
  hypo
gagggggtggctggctggactcggcgtctgtccccaggatgaagacaagcctgaggacgagatggcccaaaagcgggccagcctgctggagcggcagcagcggcgagcagaggaggcgcggcggcgcaagcagtggcaggaggtggagaaggaacagcggagggaggaggccgcgaggtgaggccgggcctgcccgggacgcccgctccttggcctgtctgccaccgcggaccccgtgagcggttctgatgccgattccctgtgatctgcaggctggcccaagaggaggccccgggcccagccccgcttgtgtccgcagtcccgatggcgactccagcccctgctgcccgggctccagccgaggaggaggtgggcccccggaagggggacttcacgcggcaggagtacgagcgccgggcccagctgaagctgatggacgacctcgataaggtgctgcggccccgggctgcggggtccgggggtccaggtcggggcgggcggagggccacccggcctcgctcgggttgctgtgacgactcagccctggcacgaagcccagcccgcggcctgctgggtgaggacccttgggggacggggcctgcccagtgcccttt

SEQ ID NO: 96233 - DNA, 100 bp, Homo sapiens
  chr19:7681576-7681676
  hypo
catctgggtgaacctagagggcggtatggctcgagtttatggatacgccatgaagagatggagggacgcgtgtgggcacgtgtgcatggggcatagtctg

SEQ ID NO: 96234 - DNA, 122 bp, Homo sapiens; identical to SEQ ID NO: 32049
  chr19:7682206-7682328
  hypo

SEQ ID NO: 96235 - DNA, 91 bp, Homo sapiens
  chr19:7682910-7683001
  hypo
actcccaagaagggcggcggcacccccaaatagccccacccgggcggtccacgggccgggccctgtgtgctgcggccgccatcccctggag

SEQ ID NO: 96236 - DNA, 91 bp, Homo sapiens
  chr19:7685313-7685404
  hypo
gccagaacgcgccggtcgtctgcgtggggggcagggcaggggtgggtgtgtgtgcccgtgagctggctgactccgccgcagcccccaaccc

SEQ ID NO: 96237 - DNA, 30 bp, Homo sapiens; identical to SEQ ID NO: 32052
  chr19:7688286-7688316
  hypo

SEQ ID NO: 96238 - DNA, 110 bp, Homo sapiens; identical to SEQ ID NO: 32053
  chr19:7701076-7701186
  hypo

SEQ ID NO: 96239 - DNA, 260 bp, Homo sapiens
  chr19:7711956-7712216
  hypo
gatcttggcccctgaataccccgtggggggcactcctgaccccggaccccatgcctggggttcctcccctaacctgcctctcggccgccaggacgccgtggaggaccggctggacaggaacctgtggcccttcgtatccgaccccgcccccacggccagctcccaggccgctgtcaggtgaggccccggggccgcccccgcccacgcctgggtctgtgttaggtgggcggcctggcggcggtgagggcctcctgcctgga

SEQ ID NO: 96240 - DNA, 30 bp, Homo sapiens
  chr19:7747730-7747760
  hypo
agagcccctccccacgtgtgtcttgtgtct

SEQ ID NO: 96241 - DNA, 31 bp, Homo sapiens; identical to SEQ ID NO: 11996
  chr19:7762517-7762548
  hypo

SEQ ID NO: 96242 - DNA, 20 bp, Homo sapiens
  chr19:7765409-7765429
  hypo
ttatttattgaaatggagtc

SEQ ID NO: 96243 - DNA, 16 bp, Homo sapiens
  chr19:7838386-7838402
  hypo
gcgcagtagcctgcca

SEQ ID NO: 96244 - DNA, 56 bp, Homo sapiens; identical to SEQ ID NO: 55543
  chr19:7853414-7853470
  hypo

SEQ ID NO: 96245 - DNA, 16 bp, Homo sapiens
  chr19:7853543-7853559
  hypo
cgcaagggtggggtct

SEQ ID NO: 96246 - DNA, 45 bp, Homo sapiens
  chr19:7862878-7862923
  hypo
agctcccgccgggcgcggtggctcatgcaggtaatcccagcactt

SEQ ID NO: 96247 - DNA, 24 bp, Homo sapiens
  chr19:7898966-7898990
  hypo
tcacgcctgtaatcccggcacttt

SEQ ID NO: 96248 - DNA, 337 bp, Homo sapiens
  chr19:7914803-7915140
  hypo
ccccagggccctgatgagcagcgagatgcccctccccgctgcgctgccctgagcccccccacctgcccgtcccccctagatgcctgaggaggaggccttctgtgtgttcgtgcggctgatgcaggagtaccggctgcgggagctcttcaaacccagcatggccgagctcgggctctgcatctatcagttcgagtacatgctgcaggtgagcagggccgcaggagagcagggctgcaggagggcagggccacaggtgggcagggccgcaagggagcaggatcgcagaagggcagggctggcaccctagaccatacccgggcacctcttggactgaaaa

SEQ ID NO: 96249 - DNA, 313 bp, Homo sapiens
  chr19:7920729-7921042
  hypo
attggccctgttttctgaaatcgctgacccagaacgtaagatgctggctgtgccctgcccggaaaagtggcctggccctaaggggactgaccccggcagtgggtaaatgaggggtgcatgtagacaggcgtggggggcgggctatgacgtgatctccccccacccccatagagacttcggacggagaaccggctcctgaaacagcggattgaaaccctagagaaggtgaggggcgtggccactgtgaggacatggtcgccatggggtgtgacccaccatgcggggcatggccgctaacctggggtggactcct

SEQ ID NO: 96250 - DNA, 31 bp, Homo sapiens
  chr19:7946856-7946887
  hypo
tcatagcagtagtattcgcaagaaccaaaag

SEQ ID NO: 96251 - DNA, 30 bp, Homo sapiens
  chr19:7964015-7964045
  hypo
ggagaaagtgctggcggaaccggagaaggt

SEQ ID NO: 96252 - DNA, 30 bp, Homo sapiens
  chr19:7965019-7965049
  hypo
aggtgttgtccctccggagcaacgccggga

SEQ ID NO: 96253 - DNA, 30 bp, Homo sapiens; identical to SEQ ID NO: 32058
  chr19:7966472-7966502
  hypo

SEQ ID NO: 96254 - DNA, 30 bp, Homo sapiens; identical to SEQ ID NO: 32059
  chr19:7970451-7970481
  hypo

SEQ ID NO: 96255 - DNA, 373 bp, Homo sapiens; identical to SEQ ID NO: 32060
  chr19:7972035-7972408
  hypo

SEQ ID NO: 96256 - DNA, 30 bp, Homo sapiens
  chr19:7977479-7977509
  hypo
gcctaccaagcccccgcccttcccaccccg

SEQ ID NO: 96257 - DNA, 17 bp, Homo sapiens
  chr19:7980157-7980174
  hypo
accgatgtcactctctt

SEQ ID NO: 96258 - DNA, 41 bp, Homo sapiens
  chr19:7989495-7989536
  hypo
ggcggatggggggcagcggtgggcaccggggcagggcgcgc

SEQ ID NO: 96259 - DNA, 81 bp, Homo sapiens; identical to SEQ ID NO: 55549
  chr19:7990125-7990206
  hypo

SEQ ID NO: 96260 - DNA, 268 bp, Homo sapiens; identical to SEQ ID NO: 55550
  chr19:7990893-7991161
  hypo

SEQ ID NO: 96261 - DNA, 390 bp, Homo sapiens
  chr19:7991809-7992199
  hypo
ccccaggtgaccaggcgccgggacccctgcagggcagagcaacagggcaggggttggccctgcgggggagtgtctccagctgccgcgcacccgcaacagcccgttgtcccctcccgggccagctggtcttgcagccgtcctggcagagctgggggcagagcccgcagtcttgttcccagaggtctggagttgccgcaggtggtgttgcggtgcctctgtgcctgatgacccaggccggggctacctggctccggcaccacactcagagaatctgctcggtgctggaggccgagatgtccaggagccgccaggccgcgtaggggttgagctcgtcctggtctcggcagagcgcccacacgtacagcatccgcagcaccttgtcctgcaggg

SEQ ID NO: 96262 - DNA, 146 bp, Homo sapiens
  chr19:7992971-7993117
  hypo
tcaatgtctaggatgcgagaatggaactggagacccagtgccttggcctgctggatggggtgggccagctggctgtaagtctgcaatgagaggccgacacgcctgcgtgatgccacccagggtgggcaccacgccacacagagctg

SEQ ID NO: 96263 - DNA, 30 bp, Homo sapiens
  chr19:7993372-7993402
  hypo
tacttccatattcgccgcactctgaatctt

SEQ ID NO: 96264 - DNA, 426 bp, Homo sapiens
  chr19:7993757-7994183
  hypo
gcgagtcagctgtggcgtaatggtcccaaggtaaaaacaaaacaaaaaaccaaaaaaaaaaaaaaaaaaaaaaaaatccacatcgaaactcataaatgcctgctggattagtcaccatgcaggggagtatttaaaaagaaaatctgacatcttctcctctgctttttccaagttgtttatgagctgggtgcagaatagaattagccaagaacgattctggatcgcttaatacgaagaagccaggggaaagaaacacacaggtcggggagcgaatagggtgagatgaggtggcctgaggagatgagagctgggagccccacagggatggactcgggcagggacagggaggctgccagggatggggcagacagctagaccagaccccaggtacgcggtgctgctggtggcccccgaaccccaagcttt

SEQ ID NO: 96265 - DNA, 30 bp, Homo sapiens; identical to SEQ ID NO: 32065
  chr19:7996730-7996760
  hypo

SEQ ID NO: 96266 - DNA, 134 bp, Homo sapiens
  chr19:7997638-7997772
  hypo
gcagggagcagagccgggagttcggggggaaggccggggaccccgccccaccaccagcctgcgaggtccagggatgactcactcacccagcaagtcggtgaccttgtccgtaagggcccgggatgcccggatga

SEQ ID NO: 96267 - DNA, 487 bp, Homo sapiens
  chr19:7998973-7999460
  hypo
ctgggagagggctctgaaggccgctgtcctgcccagcttctccccgcctttggataccgactcggccgactgcttggccgtcttggctgcttcctccacgccctccttgattttccggccgagatcacttttactgacttcgtgaaggctctactgagacagacacagagagggggcgttggcaccggccctggcggccggggggcggggcaggaggaatgaattcctgccggagagaagggcggatctggttccccgaggccggcagaggccttctgtgctcctgtggtacgcggcacccccagagccatgagcacaacggcacccccagagccacgagcacaccgccacccccagagccacgagcacaccggcacccccagagccatgagcacaccggcacccccagagccatgagcacaccgccacggcttccgggatgctggccctgggctctgggtgagacgctgggtctgctggccccttt

SEQ ID NO: 96268 - DNA, 98 bp, Homo sapiens; identical to SEQ ID NO: 32067
  chr19:8004777-8004875
  hypo

SEQ ID NO: 96269 - DNA, 30 bp, Homo sapiens
  chr19:8005986-8006016
  hypo
cagtggcagctctccgcccggccggcgcat

SEQ ID NO: 96270 - DNA, 30 bp, Homo sapiens
  chr19:8028746-8028776
  hypo
gggcaaggcctggacgcatgctgaccatgg

SEQ ID NO: 96271 - DNA, 90 bp, Homo sapiens
  chr19:8052776-8052866
  hypo
ggaggcctccttaagcaaacacgaccaggacctgaacggtttgaggaggggagtgacagggtcacatgcgggctgtcaaacaggcccctc

SEQ ID NO: 96272 - DNA, 31 bp, Homo sapiens
  chr19:8053914-8053945
  hypo
tggctgctgtggggctcggagacacccgtgt

SEQ ID NO: 96273 - DNA, 100 bp, Homo sapiens
  chr19:8057696-8057796
  hypo
ctaataatgggtgtggcggcgccatcacagctcacagcagccaaggctcctgggagatcctcaagcgatcctcacacctcagcctcctgagtagctggga

SEQ ID NO: 96274 - DNA, 23 bp, Homo sapiens
  chr19:8078955-8078978
  hypo
gtttgtttttttgagacggagtc

SEQ ID NO: 96275 - DNA, 104 bp, Homo sapiens
  chr19:8082512-8082616
  hypo
gggagttccagacagagggaccgacaggagtaacggcacaaatttgtcagggaggatcattcagggagcaggggtgccggttcggaggggagatcacagtgagg

SEQ ID NO: 96276 - DNA, 27 bp, Homo sapiens
  chr19:8092249-8092276
  hypo
ggcatgagccatcgcccagtctcactg

SEQ ID NO: 96277 - DNA, 454 bp, Homo sapiens; identical to SEQ ID NO: 55552
  chr19:8115154-8115608
  hypo

SEQ ID NO: 96278 - DNA, 176 bp, Homo sapiens
  chr19:8127042-8127218
  hypo
tagttactattattttacagccgtcaattttacttcggcctctctcattgcttctgcaggactgtgagccggctcatttctgggctccatcggcacaggaggggccggatctttctccgataaaaccgtcgccctacagacccagctgtccccacgcctctgtcttttgggtcaag

SEQ ID NO: 96279 - DNA, 192 bp, Homo sapiens; identical to SEQ ID NO: 32070
  chr19:8148276-8148468
  hypo

SEQ ID NO: 96280 - DNA, 31 bp, Homo sapiens
  chr19:8176033-8176064
  hypo
cagaggtccacgttctcggcacattcatccc

SEQ ID NO: 96281 - DNA, 31 bp, Homo sapiens
  chr19:8183831-8183862
  hypo
acttgtagctcccatccgtgttggtgcaagt

SEQ ID NO: 96282 - DNA, 30 bp, Homo sapiens
  chr19:8191150-8191180
  hypo
ggggtgagctggacacgggcaggcagttac

SEQ ID NO: 96283 - DNA, 170 bp, Homo sapiens
  chr19:8191555-8191725
  hypo
gcccagcctctggaacgccgtcgggctccggggccgctcacctagacagaaggtaccagaggggtccagccggctgccagggccacatttgcaggtgtaggagccggccaggttccgacagacgccactcacacacgggctggacaggcattcgtcgacatctgtgggga

SEQ ID NO: 96284 - DNA, 100 bp, Homo sapiens
  chr19:8201334-8201434
  hypo
gcgtgggcaggcagcggccattcagacacaggttggtgaagtgtcggcagatgtcaatggtctggttcagggtagcagtgcctacgggtggggccggcag

SEQ ID NO: 96285 - DNA, 38 bp, Homo sapiens
  chr19:8203389-8203427
  hypo
gaggtctccagcacagcggcccccgaaaagcactgaga

SEQ ID NO: 96286 - DNA, 534 bp, Homo sapiens; identical to SEQ ID NO: 55557
  chr19:8274334-8274868
  hypo

SEQ ID NO: 96287 - DNA, 30 bp, Homo sapiens
  chr19:8327050-8327080
  hypo
ggtgactggactggcgcccctgggccacct

SEQ ID NO: 96288 - DNA, 22 bp, Homo sapiens
  chr19:8332839-8332861
  hypo
tcaaaaaaggccgggcgcggtg

SEQ ID NO: 96289 - DNA, 30 bp, Homo sapiens
  chr19:8370150-8370180
  hypo
aggaaccacactggcggctgcttgttactg

SEQ ID NO: 96290 - DNA, 30 bp, Homo sapiens; identical to SEQ ID NO: 32072
  chr19:8382407-8382437
  hypo

SEQ ID NO: 96291 - DNA, 30 bp, Homo sapiens
  chr19:8438824-8438854
  hypo
cccgaggatgtggccgttccctgcctgggc

SEQ ID NO: 96292 - DNA, 30 bp, Homo sapiens; identical to SEQ ID NO: 32073
  chr19:8458778-8458808
  hypo

SEQ ID NO: 96293 - DNA, 30 bp, Homo sapiens; identical to SEQ ID NO: 32074
  chr19:8464613-8464643
  hypo

SEQ ID NO: 96294 - DNA, 30 bp, Homo sapiens
  chr19:8465083-8465113
  hypo
ctttagccatgcgccgtgggaccctcaggc

SEQ ID NO: 96295 - DNA, 254 bp, Homo sapiens
  chr19:8468434-8468688
  hypo
acctgtgacccctgcgcctccacccagcgtgcgtgcacgtcctccgcccgcccccgccacggtatcctctggcccctccctgctgtccctctgtggccggctcgttccagccctcccagtgagctctgcacggccgggccggggcccaggaaggacaggagccagtgctaccccgtcctgcccggggaaaagctagaagccccggtttgctgcacccatgaaactcgggtccccacagcgtcttggcggggtgg

SEQ ID NO: 96296 - DNA, 30 bp, Homo sapiens
  chr19:8468928-8468958
  hypo
cgcacacagcagctcgcacaggcctcccac

SEQ ID NO: 96297 - DNA, 121 bp, Homo sapiens
  chr19:8472050-8472171
  hypo
tcctgggattacaggcgtgagccaccgcgccagggcaacaggaggatttcaagtagaaactgccaatgaaaaaagagagagagagaaggatcacttgaacccaggagttacagtccaacct

SEQ ID NO: 96298 - DNA, 121 bp, Homo sapiens
  chr19:8474997-8475118
  hypo
aaaatgaaccagggctcttcggaaaaatggttgagtccaggcctggggcaggcaaaagacaagacaagtcagcctggaagagtttgttgagccagttagtaaggaaatgccccaagatgga

SEQ ID NO: 96299 - DNA, 148 bp, Homo sapiens
  chr19:8475417-8475565
  hypo
catctcaaaaaagaaaatcaccatttggttgctattatggtaataactgactcaggcaagggtcatcaattgatattaagctcttggaaacggcgtgtgttgaggaacaggctatttaattactttcgaagtatctccccagaaagca

SEQ ID NO: 96300 - DNA, 30 bp, Homo sapiens
  chr19:8491565-8491595
  hypo
ggcacgctgggtgccgtgcataagagctgt

SEQ ID NO: 96301 - DNA, 229 bp, Homo sapiens
  chr19:8495656-8495885
  hypo
cccaggaccacctccggctccacagccagctggaggccgtgggtctcattgccctcaccatcgccctcttcaccatctatgtcctctggacgctggtgagtggctgtggttgtgcagcacgcgtctcgagctctgccgctgggagcagcagggccaaggatttggcccctggcttgtggggcacggggctccctggctgcctctgtctatggccgtgggtggaagagag

SEQ ID NO: 96302 - DNA, 31 bp, Homo sapiens; identical to SEQ ID NO: 32076
  chr19:8501527-8501558
  hypo

SEQ ID NO: 96303 - DNA, 30 bp, Homo sapiens; identical to SEQ ID NO: 32077
  chr19:8503785-8503815
  hypo

SEQ ID NO: 96304 - DNA, 160 bp, Homo sapiens; identical to SEQ ID NO: 32078
  chr19:8526867-8527027
  hypo

SEQ ID NO: 96305 - DNA, 196 bp, Homo sapiens
  chr19:8528371-8528567
  hypo
cctccaaagggatgtgcgtaagtatcgtctagttacttattggtatttgagccttctaacttgtaggactggtttcactcgactcgtttccttttgactctatagtgttgttgaattcaagatggaagagagcatgaaaaaagctgcggaagtcctaaacaagcatagtctgagcggaagaccactgaaagtcaaa

SEQ ID NO: 96306 - DNA, 89 bp, Homo sapiens
  chr19:8535020-8535109
  hypo
gtctcccggccatttcggaggcttgacttcaaagccttcagtgctttgggagagtaagtcaccgtggcgatctcttgctgctgttgcta

SEQ ID NO: 96307 - DNA, 39 bp, Homo sapiens; identical to SEQ ID NO: 32080
  chr19:8539869-8539908
  hypo

SEQ ID NO: 96308 - DNA, 119 bp, Homo sapiens
  chr19:8546610-8546729
  hypo
acagaacaaagcaaagtaagacgtgttggacaagcttggtctaggtgctggaaagccagcctcggctcaggcatgccgggcaggatcgcaggcgtcccgggagaatgagctgtacctgc

SEQ ID NO: 96309 - DNA, 165 bp, Homo sapiens
  chr19:8554604-8554769
  hypo
ccttcccccagtgaagcgctctcaggatccactcaggccaagcaggtgtgcatacctggcaaggaggcctggctgctgctgttctgttggctgtggaggggcgcgtcctgcccggctgcctgcctggtagcacatgctgttctgatcacccggagccccccttgc

SEQ ID NO: 96310 - DNA, 259 bp, Homo sapiens
  chr19:8554977-8555236
  hypo
caggcagctctgtgactttcccgcgccgggatccagggctcctgggtgagcgggcgctgggctggctggctgtcctggccccacgcctaccggtcttaccgtcccagggggagtggttggttttccaggggatctgccgaggaagcgtgacttccatggacccctctccccagaagcccaatagtgagcagcgcccccggggaatcgccagggtccctccagccctcccagagtgtccacgtaccgcagaagtcgacat

SEQ ID NO: 96311 - DNA, 30 bp, Homo sapiens
  chr19:8575551-8575581
  hypo
gcccacccccaaagcggcgggattcagagc

SEQ ID NO: 96312 - DNA, 1179 bp, Homo sapiens
  chr19:8576016-8577195
  hypo
catcagcttccgggcgcctagttcagtttctcccgggtctgtctgcccctagagttgggggcacccaacttggcttctccgcgtcccctactatcatccccagattcactgttggggagaagcccgctccgaggtgaacggtgaaaggggcgcaaggtttatacgggaacgccggcgcagatgaaggcgcaggtgccagtcatttttaaggcaaaaatcctgtatttcgggacggtggcatttgtgccccctgggaaggggatgagcactgctgcctcctggtatccaccagaccccgcagggcgcaggaaagaaagcccctccacccctccctggtggtcacctgcacgcacctgagggcgcgtcggagccgccctggggtcttcgggggctgctgccagcacctgcggtaaaggggcgggtcaagttcagagtcagggcgagcccagccagccctcctggaggcccccgaccccacactcaccttggctctttttccagacggcggcgctggaagccggcggcccgggtgcagcggccaggaaggggcgcaggcgcggggggcttaggccaaagggcgcagggttcaagtagggcaggaacggtccggtgggggcaggggcgggggtcgtgaagggttccagcagcgggaacggcaggcccggcgctgatgcggggtcaacctccggggggcgctccggcgcgggcggctctcggtccagggccgggggtggcggcggggctgggctctgcgcatgctccgcgcaaacatgcaggtgcttgaagagcgagcggtgcgtgcggaagcgcaggaggcagttctcacacctggaggtgggcagagggctgggctgggctgggcctccaggggcaccagggagagtgtcctgtgcaatgccacccgcccttcgagcgtgggaacggagcctgggcactaatcacctccccgctcctgtacaactgtggcagcgacccttcctgaccacttcgggtgggaacctggggaaacccggaaagaagtctcaattttaagttaggcggccggttttccacttgggaggtaaagcctggctgggtggggccacgcccacgtatgccccgccccatccagggagttgagggcggggcttccccaaaggcccacccacatcaagtcccgccctccaacaccctgaccag

SEQ ID NO: 96313 - DNA, 228 bp, Homo sapiens; identical to SEQ ID NO: 55562
  chr19:8579004-8579232
  hypo

SEQ ID NO: 96314 - DNA, 205 bp, Homo sapiens
  chr19:8587384-8587589
  hypo
cacaccaggcactggccgttgccccacgctgcgcttcctctgcatgctgtgggcacagggggtttgagtcacagccccagacactcccctaccccctgcccacctcctggagctgccctcccaccccacctacccggccatgccctggtcaggcacgttgaggaattctgtgttgtgctctgagggcggacgtgcccggggtcgt

SEQ ID NO: 96315 - DNA, 30 bp, Homo sapiens
  chr19:8595369-8595399
  hypo
ggacagccacgtggcgccgccaggccttct

SEQ ID NO: 96316 - DNA, 145 bp, Homo sapiens
  chr19:8606637-8606782
  hypo
ctagtccatagaaacaccatcctggccgcacagccactcccctcgagtttgtggcgagatggcagttctgggtaagatggagtggggcccggtcctccctccatccccttggggggttgtagccggaggtccccatgcctgggac

SEQ ID NO: 96317 - DNA, 229 bp, Homo sapiens
  chr19:8618011-8618240
  hypo
cagagacttacaaagcggctggaattgttgttgcgcacagtcttggcgttgccgaaggcctcgagcagcgggttggactgcaggatgatatctttgacgtgctggggcagaggcaggtggagtgggaagaagtcagactgaggcaggagtgcagatgggtggggctgcactaccatgcaggtgagggcgacccagcttatccttctgttttcctcgtctcacctggacc

SEQ ID NO: 96318 - DNA, 26 bp, Homo sapiens
  chr19:8628969-8628995
  hypo
agaagtgggtgctggccgggcatggc

SEQ ID NO: 96319 - DNA, 86 bp, Homo sapiens
  chr19:8934835-8934921
  hypo
gcactacagctgcttccgccttggtctcctggatgttgctctagaggacaccagttgccatggtgggaagacgctcaagtggccct

SEQ ID NO: 96320 - DNA, 30 bp, Homo sapiens
  chr19:8951555-8951585
  hypo
taagacgtcatgtcacgtgattcttttttc

SEQ ID NO: 96321 - DNA, 31 bp, Homo sapiens
  chr19:9099750-9099781
  hypo
agtaatacttagttggcggggggggcgggtc

SEQ ID NO: 96322 - DNA, 29 bp, Homo sapiens
  chr19:9100231-9100260
  hypo
gaaagggcagctgaggctgggcgcggtgg

SEQ ID NO: 96323 - DNA, 262 bp, Homo sapiens
  chr19:9128986-9129248
  hypo
caccctcctccagttcccctccgcccgcccagccaacagagtgacctttcaaaaatgcaacaccggccatgccccgccccggtccgaattcttcagtgccttctcaccgccctcgggaccaagtccaaacgctgcagcctggcgttgaaggcccaccttgagccgggacccggcctgcattggactaacgtatgacttcgcttctcaccccgaagcctttgcctcggccgttccctgtgccggaattaccctccttcccttt

SEQ ID NO: 96324 - DNA, 158 bp, Homo sapiens
  chr19:9130021-9130179
  hypo
agcatggagcccggccgccgcagcacctctgctccgcgatccgtgggcatcctcttcactgtgtccattggatgtttgcctcccagactgagggggagctcagaatgacccaaattctcaaaacaagtttcctcaccgggcgcggtggctcacgcctg

SEQ ID NO: 96325 - DNA, 31 bp, Homo sapiens; identical to SEQ ID NO: 12009
  chr19:9267730-9267761
  hypo

SEQ ID NO: 96326 - DNA, 45 bp, Homo sapiens; identical to SEQ ID NO: 32087
  chr19:9371592-9371637
  hypo

SEQ ID NO: 96327 - DNA, 23 bp, Homo sapiens
  chr19:9374116-9374139
  hypo
gaaatgagatttatggcctggcg

SEQ ID NO: 96328 - DNA, 30 bp, Homo sapiens
  chr19:9416707-9416737
  hypo
gaggcagagaaggccgctatgctgtgatac

SEQ ID NO: 96329 - DNA, 38 bp, Homo sapiens
  chr19:9459897-9459935
  hypo
tatagacgtgagccaccgcacccagcttctggcagctt

SEQ ID NO: 96330 - DNA, 578 bp, Homo sapiens; identical to SEQ ID NO: 55571
  chr19:9648913-9649491
  hypo

SEQ ID NO: 96331 - DNA, 92 bp, Homo sapiens
  chr19:9845536-9845628
  hypo
ctatgttgcccagattggtcttgtaccccgggtacgagaccccgtaccccgggtgggcccctggtttgttcgtttgcttgggttttttgttg

SEQ ID NO: 96332 - DNA, 31 bp, Homo sapiens; identical to SEQ ID NO: 55574
  chr19:9896567-9896598
  hypo

SEQ ID NO: 96333 - DNA, 30 bp, Homo sapiens; identical to SEQ ID NO: 32089
  chr19:9908244-9908274
  hypo

SEQ ID NO: 96334 - DNA, 39 bp, Homo sapiens
  chr19:9921965-9922004
  hypo
gcatccagccctgtctcggtcacacggtaggtaccaccc

SEQ ID NO: 96335 - DNA, 31 bp, Homo sapiens
  chr19:9937500-9937531
  hypo
atatcatgaatggaggcggctctcaagcaca

SEQ ID NO: 96336 - DNA, 30 bp, Homo sapiens; identical to SEQ ID NO: 12013
  chr19:9942246-9942276
  hypo

SEQ ID NO: 96337 - DNA, 216 bp, Homo sapiens
  chr19:9960972-9961188
  hypo
cctcccctcccccaagcgctgagtttctaataaaggccaagcctcataaacaatcacctgtgcccgctcccatctggctggcttcgggagcaatcgctcattcgcctgctgcctgcctgccggagcatttgtcattaggaaggtttaatgggtttcctctcagctccagagggctggggagagccggctgcatggatacaccgccaggcagaatgt

SEQ ID NO: 96338 - DNA, 30 bp, Homo sapiens; identical to SEQ ID NO: 32092
  chr19:9965353-9965383
  hypo

SEQ ID NO: 96339 - DNA, 92 bp, Homo sapiens
  chr19:9967992-9968084
  hypo
gcaggtcctcatacccgtaggcacccatctcctcctgaatggccgccagactgccggagagattcctcacctcctcccgcaagcgtacaatg

SEQ ID NO: 96340 - DNA, 30 bp, Homo sapiens
  chr19:9968481-9968511
  hypo
aggtcgcgatacgtccgcaactcaaggacc

SEQ ID NO: 96341 - DNA, 31 bp, Homo sapiens; identical to SEQ ID NO: 32093
  chr19:9981318-9981349
  hypo

SEQ ID NO: 96342 - DNA, 34 bp, Homo sapiens
  chr19:10171190-10171224
  hypo
agccaccgtgcccggccaaaaaaaaaaaaaaaaa

SEQ ID NO: 96343 - DNA, 374 bp, Homo sapiens; identical to SEQ ID NO: 55582
  chr19:10197445-10197819
  hypo

SEQ ID NO: 96344 - DNA, 43 bp, Homo sapiens
  chr19:10204396-10204439
  hypo
ttgactgaaccatcttgcctccgctggatcacagtccagcctc

SEQ ID NO: 96345 - DNA, 115 bp, Homo sapiens
  chr19:10220394-10220509
  hypo
agcaggatgggagacgagggggtgccgggtgggggcctccacatgcggctgatgacagcacttctgctgagacgctgtgattgctctgtccaaagtaaacgccctgacgcactgt

SEQ ID NO: 96346 - DNA, 30 bp, Homo sapiens
  chr19:10221129-10221159
  hypo
ggatcttggtgacccgcgtctcttggctca

SEQ ID NO: 96347 - DNA, 30 bp, Homo sapiens
  chr19:10226324-10226354
  hypo
tcacacagccccaccgtgcctgcctgcctg

SEQ ID NO: 96348 - DNA, 181 bp, Homo sapiens
  chr19:10231204-10231385
  hypo
cctggggctgcagagtgagactccgtctcagaaaaataagtaaaattaaaataaataataataatcataaagctcacttattgagtgcttattgtatatgaagcatggtgaggaggatattacttccattttacagctgaagaaactgaggctcagactgggtgcagtggcgcctgcctgt

SEQ ID NO: 96349 - DNA, 30 bp, Homo sapiens
  chr19:10231945-10231975
  hypo
aacgtttgacaatgtcggacgcagtggctc

SEQ ID NO: 96350 - DNA, 862 bp, Homo sapiens
  chr19:10246095-10246957
  hypo
ctagttcatttgaacctacagcgagtgagctgtcgccaccatgggttttagcctgctcctttagcgcgacggactgtccttctggctcaatctctgcctcaaaaacaaacagtaaggaaccagcatagggacgcagcctgactcggatgtctcagcactgtccctcctgtgggccgtcttcccactgagagtgatggggctacccggcagccagcaggcgtcctcccggaagtgactgcgctggccccagccccacctggtgacaggcacagaagcctccttcctgtccagacccagcgggcgccgccccactgacctgccggtgcttgtccaggatgttgccgaagagccggtaggtgtcagggaagccctgggagcgggcacactcccgcacgctcaccacacggtgctgctctgggtggagcacgcggccctgggggaaagaggcgcggtgggcgagggcagtagcacccaggccgggtcaccgtcggggacagggagggaaatggcactgtgacagcatacggccatggccttggcctatgagcttgtcccgtggacgtggaggggcaggaggcagaggccaggtgcctggggtcctggggtgctgtcccccacttggctaaacccacacttccacctagttaggccgccaagtacagggcctgacccaggccctcggatgccccctccccacctacctgcttgcccatgggctcggggttggtgacggttgtgctgaagaagccgtcccactcgagccttccatagaggccagcccagtggttgtgccggttcccggtgtggggcaggcaccaggggatgagggtgttgaactgcctggctgcggggtcgcaggctt

SEQ ID NO: 96351 - DNA, 30 bp, Homo sapiens
  chr19:10250633-10250663
  hypo
gcctcagtgcagggcgaaaatgaccactgc

SEQ ID NO: 96352 - DNA, 260 bp, Homo sapiens; identical to SEQ ID NO: 55585
  chr19:10252655-10252915
  hypo

SEQ ID NO: 96353 - DNA, 211 bp, Homo sapiens; identical to SEQ ID NO: 55586
  chr19:10253328-10253539
  hypo

SEQ ID NO: 96354 - DNA, 91 bp, Homo sapiens
  chr19:10253814-10253905
  hypo
aagaggtggggacagcgggacagaacctggacagtcatagatggagcttgggaggttctctgggggtgcccaggcactctacccgtttttt

SEQ ID NO: 96355 - DNA, 30 bp, Homo sapiens
  chr19:10254519-10254549
  hypo
ttgatccggccaattcggtagggctcaggg

SEQ ID NO: 96356 - DNA, 31 bp, Homo sapiens; identical to SEQ ID NO: 32098
  chr19:10265327-10265358
  hypo

SEQ ID NO: 96357 - DNA, 31 bp, Homo sapiens
  chr19:10287834-10287865
  hypo
gtctagagaacagaaccgcaagatgaaaacc

SEQ ID NO: 96358 - DNA, 33 bp, Homo sapiens
  chr19:10295208-10295241
  hypo
agtgccgcggtgctgcgtgcctgtaaccccagc

SEQ ID NO: 96359 - DNA, 32 bp, Homo sapiens
  chr19:10295300-10295332
  hypo
caacatagggcgatcctatctcttcagaaaaa

SEQ ID NO: 96360 - DNA, 142 bp, Homo sapiens; identical to SEQ ID NO: 32099
  chr19:10295677-10295819
  hypo

SEQ ID NO: 96361 - DNA, 115 bp, Homo sapiens
  chr19:10338377-10338492
  hypo
tggtccagttgggggcgctctacggccagccctaccgatggggtcctttataggcgacgggagctcaggctttctgaggatagagttaatgctatgtggacgtccctagggggag

SEQ ID NO: 96362 - DNA, 147 bp, Homo sapiens
  chr19:10350516-10350663
  hypo
acgcccggccaggaagatttttattgtatctaaattgtgcaaaaaaagcaatacttttgtttaaaaaattctcacagcagccttattatttgtgtgtttgtttatttgttttcttgatcttagccaaaaggccgagaagcgatttat

SEQ ID NO: 96363 - DNA, 38 bp, Homo sapiens; identical to SEQ ID NO: 55590
  chr19:10363216-10363254
  hypo

SEQ ID NO: 96364 - DNA, 433 bp, Homo sapiens
  chr19:10370251-10370684
  hypo
ggcctgaccggccccccgccccgcccccaccccgcccccaggcctaaatgtgcacagcatgctcaagcaccagacgctggtcctgacgctgcccaccgtcgccttcctggaggacaagctgctctggcaggactcacgttacagacccctctaccccttcagcctgccctacagcgacttcccccgacccctaccccacgctacccagggcccagcggccaccccgtaccactgttgatgtgaagcacctcttctgagccaggccgagcccctggccgacttgggagcctcaggcccacgcccacccttcgaggaaggtgtcacctggaccccttcattccacggaggaagctgaggccacagggagcggccatcgccattgggaaggggcgactccacggaaagcccagacgggcttctgcatccattccct

SEQ ID NO: 96365 - DNA, 383 bp, Homo sapiens; identical to SEQ ID NO: 55592
  chr19:10381048-10381431
  hypo

SEQ ID NO: 96366 - DNA, 43 bp, Homo sapiens
  chr19:10394495-10394538
  hypo
ggggtggggtatcctgcaatgcggtgcctgtggccacaggatc

SEQ ID NO: 96367 - DNA, 500 bp, Homo sapiens
  chr19:10395579-10396079
  hypo
tggcactttcccactgcccatcggggaatcagtgactgtcactcgagatcttgagggcacctacctctgtcgggccaggagcactcaaggggaggtcacccgcaaggtgaccgtgaatgtgctctgtgagtgagccggcgggcagagctgggtgggggcaggggccatggacctaatgcaatcctcaccgcctgttgtatcctccccacagccccccggtatgagattgtcatcatcactgtggtagcagccgcagtcataatgggcactgcaggcctcagcacgtacctctataaccgccagcggaagatcaagaaatacagactacaacaggcccaaaaagggacccccatgaaaccgaacacacaagccacgcctccctgaacctatcccgggacagggcctcttcctcggccttcccatattggtggcagtggtgccacactgaacagagtggaagacatatgccatgcagctacacctaccggccctgggacgcc

SEQ ID NO: 96368 - DNA, 275 bp, Homo sapiens; identical to SEQ ID NO: 55596
  chr19:10399790-10400065
  hypo

SEQ ID NO: 96369 - DNA, 651 bp, Homo sapiens; identical to SEQ ID NO: 55597
  chr19:10400293-10400944
  hypo

SEQ ID NO: 96370 - DNA, 208 bp, Homo sapiens
  chr19:10420248-10420456
  hypo
ctgtgtggtgggagcgctcttggtagaggatgcgatgagccccagctgagagcgaccagcctcggcggcacctttcctctttctggcttttttcaggtcatccgcgcacccctgcgtggcaagggcggcctggaccccaccaaatccctccgcagctgccggggcggggccttccacgctagccctccccctcggaaatgggggctcc

SEQ ID NO: 96371 - DNA, 30 bp, Homo sapiens
  chr19:10429385-10429415
  hypo
ggcacgtgggtacccgcctcctcttcctcc

SEQ ID NO: 96372 - DNA, 31 bp, Homo sapiens
  chr19:10433903-10433934
  hypo
tgcaggatgttgggctcggggaggagtccct

SEQ ID NO: 96373 - DNA, 30 bp, Homo sapiens
  chr19:10439709-10439739
  hypo
cacgctcccgcaggcggctctggtggaaag

SEQ ID NO: 96374 - DNA, 30 bp, Homo sapiens; identical to SEQ ID NO: 32103
  chr19:10463022-10463052
  hypo

SEQ ID NO: 96375 - DNA, 101 bp, Homo sapiens; identical to SEQ ID NO: 32104
  chr19:10464756-10464857
  hypo

SEQ ID NO: 96376 - DNA, 30 bp, Homo sapiens
  chr19:10465242-10465272
  hypo
gacgccggtgagtccgggttcacagtcaag

SEQ ID NO: 96377 - DNA, 1628 bp, Homo sapiens; identical to SEQ ID NO: 55608
  chr19:10529970-10531598
  hypo

SEQ ID NO: 96378 - DNA, 279 bp, Homo sapiens; identical to SEQ ID NO: 12032
  chr19:10531608-10531887
  hypo

SEQ ID NO: 96379 - DNA, 30 bp, Homo sapiens
  chr19:10545681-10545711
  hypo
ggcatgagccacggcgcctggccatagttc

SEQ ID NO: 96380 - DNA, 30 bp, Homo sapiens
  chr19:10602572-10602602
  hypo
gaagtagccgcccgcggtgtagatcaggcg

SEQ ID NO: 96381 - DNA, 168 bp, Homo sapiens; identical to SEQ ID NO: 55611
  chr19:10616358-10616526
  hypo

SEQ ID NO: 96382 - DNA, 701 bp, Homo sapiens; identical to SEQ ID NO: 55613
  chr19:10624965-10625666
  hypo

SEQ ID NO: 96383 - DNA, 322 bp, Homo sapiens
  chr19:10665637-10665959
  hypo
acccaggtctcagagcggggggcgctgcattcccaaagtcatgcaacaagaggttgacggagccaagactcaagcctgggcctgacaggctccccacccacgcttccccagccagcactgcttactcttctcggcagagtgacttgaagacctgccgctttttccatgagttctgggccttctggctgtacgcccgcttgtcccgcagctcctcctgctctgacctgcagacagatgcccctgtgttgggtgctctgggaagtgcccgaggctgcccgccctgccccctgcgcatgtggccccgccgcgccccgccccatca

SEQ ID NO: 96384 - DNA, 117 bp, Homo sapiens
  chr19:10685491-10685608
  hypo
ggggactgaggtgactcgagccaagggacaggagagaggggaacccaccgaagtcaaggggaggatcctccctgcctgcttctctcacctggatcccagagacggtgaagtagggga

SEQ ID NO: 96385 - DNA, 121 bp, Homo sapiens
  chr19:10687539-10687660
  hypo
acccagctaatttttgtacttttactagagacggatgttagccgtctctatgttagccaggctgggatttcaggcgtgagccactgcgcccagctcctcttaatatttttatagaggcagg

SEQ ID NO: 96386 - DNA, 208 bp, Homo sapiens
  chr19:10687719-10687927
  hypo
cagcctctcaaagtactggcattccagtcatgagccatcacacctgactgggtctctgatttgttctctgccttgttctcatggctcctgggcagcccccacactactccagtcccctccacccccagatcccccgccagtccctggtacttaccgggaaagacttaatactccaaatcacgacgtttctctccggcacatacttggc

SEQ ID NO: 96387 - DNA, 43 bp, Homo sapiens
  chr19:10689001-10689044
  hypo
gggagatggaggcaggcgtggcggcaggagcctgtaatcccag

SEQ ID NO: 96388 - DNA, 30 bp, Homo sapiens
  chr19:10690421-10690451
  hypo
aaagtcaccatcaggcgggatgaaggagat

SEQ ID NO: 96389 - DNA, 304 bp, Homo sapiens; identical to SEQ ID NO: 55616
  chr19:10691748-10692052
  hypo

SEQ ID NO: 96390 - DNA, 31 bp, Homo sapiens; identical to SEQ ID NO: 32113
  chr19:10709085-10709116
  hypo

SEQ ID NO: 96391 - DNA, 31 bp, Homo sapiens
  chr19:10726540-10726571
  hypo
taaagatgaaatgaggcgggctggacatggt

SEQ ID NO: 96392 - DNA, 146 bp, Homo sapiens
  chr19:10732738-10732884
  hypo
aggtgatatttcaggcaaggcctgaaggcaacggagctgtatggatgtctgagagaagagcattctaagcagagggaccgagcagctagtgcaaaggccctgaggtcagaccatgcctgctgagcgtgggacgtacccaggaggcc

SEQ ID NO: 96393 - DNA, 105 bp, Homo sapiens
  chr19:10742230-10742335
  hypo
gaggctcaggtggtgacggggaggctctgcagaggctcagcctgactggtgccatcctctgctccatgcagtggcccggagatgcttccccgctatccacgccta

SEQ ID NO: 96394 - DNA, 30 bp, Homo sapiens; identical to SEQ ID NO: 32114
  chr19:10745509-10745539
  hypo

SEQ ID NO: 96395 - DNA, 109 bp, Homo sapiens
  chr19:10747313-10747422
  hypo
accgaccactccctcggcccgcaggtaccacacaggctccctggcctttggcgcgctcatcctggccattgtgcagatcatccgtgtgatactcgagtacctggatcag

SEQ ID NO: 96396 - DNA, 21 bp, Homo sapiens
  chr19:10761821-10761842
  hypo
tgagatggagtctcactctgt

SEQ ID NO: 96397 - DNA, 154 bp, Homo sapiens; identical to SEQ ID NO: 55617
  chr19:10762081-10762235
  hypo

SEQ ID NO: 96398 - DNA, 125 bp, Homo sapiens; identical to SEQ ID NO: 32116
  chr19:10792600-10792725
  hypo

SEQ ID NO: 96399 - DNA, 169 bp, Homo sapiens
  chr19:10792976-10793145
  hypo
acatggttagatggcgagtatttgccaagtcacgtggcaagaacgccttcccactgtggctggcaggcagaggggtccccaaacatgattggggcattagggcctcctgggagcaggagctgaaaggaaacagccctcctccagatggcttcccgggtgggtgcctgta

SEQ ID NO: 96400 - DNA, 30 bp, Homo sapiens; identical to SEQ ID NO: 32117
  chr19:10793760-10793790
  hypo

SEQ ID NO: 96401 - DNA, 37 bp, Homo sapiens; identical to SEQ ID NO: 32118
  chr19:10794361-10794398
  hypo

SEQ ID NO: 96402 - DNA, 30 bp, Homo sapiens
  chr19:10795742-10795772
  hypo
cttgtttgggaatgcgatattttgtggctg

SEQ ID NO: 96403 - DNA, 318 bp, Homo sapiens
  chr19:10818161-10818479
  hypo
gggccctgttgcaggtcaatccgctggctggaccggtgcattgcagcccatcagcggccggacaagcagaacctcttcgccattatccagggtgggctggacgcagatctccgggccacctgccttgaaggtagagccatgcgctggcaggcccagggcttggccatcgcggaggtccccacatgggcctggcgtatggcgggactggattgctaatgtgtagaagggcactgcgctagaaaaaatagccggagcaaaggctctcgggccacgtgcagtagaatgtattgagagaatggccatgattccagtagttaa

SEQ ID NO: 96404 - DNA, 654 bp, Homo sapiens
  chr19:10823280-10823934
  hypo
tgcgtcttccccacacggacagcggtgaggctctggcagaaggaggtcagggcgggagacgggtgggggactagggaggcaaggttaggggtggggggtggggagaatgaagccctgggtgacgcccctttccctgcccttcctctcccacagcgctttggctctgccctggtgcccactgggaacctgcagttgaggaagaaggtgtttgagaaggacttcggccccatagacccggagtgcacctgccccacgtgccaaaagtaggcaggatggcactgggagctggggcagggcatggaggggacagggcctggccgtgctgagctgtcccctgccgctctacaggcacagccgcgccttcctgcacgcactgctgcacagtgacaacacggccgcgctgcaccacctcacggtccacaacatcgcctaccaggtgagccagtgcccggggcaaggtgggcgggggtgtcctaggtgcgtatgccccacgctgacctcccctccccgcagctgcagctcatgagcgccgtccgcaccagcatcgtggagaagcgcttcccggacttcgtgcgggacttcatgggcgccatgtacggggatcccaccctctgtcccacctgggccactgacgctctggcctctgtgggaatc

SEQ ID NO: 96405 - DNA, 32 bp, Homo sapiens
  chr19:10824429-10824461
  hypo
tctttcttttttttttttttccgagactgagt

SEQ ID NO: 96406 - DNA, 30 bp, Homo sapiens; identical to SEQ ID NO: 32121
  chr19:10824831-10824861
  hypo

SEQ ID NO: 96407 - DNA, 23 bp, Homo sapiens
  chr19:10848454-10848477
  hypo
ccggcctatttgtttgatttctc

SEQ ID NO: 96408 - DNA, 30 bp, Homo sapiens
  chr19:10859008-10859038
  hypo
gaaaccagcaggactcgcggctggacaagg

SEQ ID NO: 96409 - DNA, 72 bp, Homo sapiens
  chr19:10859259-10859331
  hypo
cccacttctgctccaacagagcgacagagaagcccctgaggtgggtgcgggtgactgcgggtctgcctcatt

SEQ ID NO: 96410 - DNA, 30 bp, Homo sapiens
  chr19:10861306-10861336
  hypo
tgcctctaaaataaataaggccgggcgcgg

SEQ ID NO: 96411 - DNA, 225 bp, Homo sapiens
  chr19:10872392-10872617
  hypo
tccaggcagatctgacctcaacgccagctctcagcttggcctcccaagactcctcactttcgtcctctggccccgcccaacctggcaagaaggcgtgtctccagtgagagacagcagccgatgggcccaccacctcttctttatgagctctgctatttcgtacgccaccgatgggccaatgggctgccacctctgggttcaggcgtccaatcagctgtgccagga

SEQ ID NO: 96412 - DNA, 104 bp, Homo sapiens
  chr19:10874684-10874788
  hypo
ggaggtgggtgggaggtaggacgccttactaagaggagaggaaaatgaacacattgcgggcatcagtgattgctggggccggcggggccttgtggggtatacac

SEQ ID NO: 96413 - DNA, 156 bp, Homo sapiens; identical to SEQ ID NO: 32123
  chr19:10875503-10875659
  hypo

SEQ ID NO: 96414 - DNA, 156 bp, Homo sapiens; identical to SEQ ID NO: 32124
  chr19:10875958-10876114
  hypo

SEQ ID NO: 96415 - DNA, 30 bp, Homo sapiens
  chr19:10881731-10881761
  hypo
gtgctggataataggcgtgagccactgtgc

SEQ ID NO: 96416 - DNA, 30 bp, Homo sapiens
  chr19:10928062-10928092
  hypo
ttggggggcctgtctcgacgagccgctcac

SEQ ID NO: 96417 - DNA, 30 bp, Homo sapiens
  chr19:10928486-10928516
  hypo
gtgtgtgcgcgcgcgcgcacgcgtgcgtgc

SEQ ID NO: 96418 - DNA, 31 bp, Homo sapiens; identical to SEQ ID NO: 12036
  chr19:10929999-10930030
  hypo

SEQ ID NO: 96419 - DNA, 31 bp, Homo sapiens; identical to SEQ ID NO: 32126
  chr19:10940832-10940863
  hypo

SEQ ID NO: 96420 - DNA, 75 bp, Homo sapiens; identical to SEQ ID NO: 32127
  chr19:10941837-10941912
  hypo

SEQ ID NO: 96421 - DNA, 30 bp, Homo sapiens
  chr19:10942228-10942258
  hypo
tacatagtccttcccggccatattaaccac

SEQ ID NO: 96422 - DNA, 30 bp, Homo sapiens; identical to SEQ ID NO: 32128
  chr19:10943182-10943212
  hypo

SEQ ID NO: 96423 - DNA, 31 bp, Homo sapiens; identical to SEQ ID NO: 32129
  chr19:10943884-10943915
  hypo

SEQ ID NO: 96424 - DNA, 30 bp, Homo sapiens; identical to SEQ ID NO: 32130
  chr19:10949224-10949254
  hypo

SEQ ID NO: 96425 - DNA, 292 bp, Homo sapiens
  chr19:11002986-11003278
  hypo
ctgatgtgctggggaagtgcccgttcagggccatggctgcagggctcctggacacccagctccggtgctggagtggggttgggattcgcccagaggccagggctgcgccagaggagcccagggtgacctcatggtcctcagatacccggggctgggcagcacagtggaacagctgctccagagcttctccgaggacgacatcggaggatccgactcaggttacggcaggagagggaggccaggccgggttagggttctggggtttgggattctcttccgaggctggcattga

SEQ ID NO: 96426 - DNA, 414 bp, Homo sapiens; identical to SEQ ID NO: 32132
  chr19:11004801-11005215
  hypo

SEQ ID NO: 96427 - DNA, 198 bp, Homo sapiens; identical to SEQ ID NO: 32133
  chr19:11008195-11008393
  hypo

SEQ ID NO: 96428 - DNA, 46 bp, Homo sapiens; identical to SEQ ID NO: 32134
  chr19:11017076-11017122
  hypo

SEQ ID NO: 96429 - DNA, 59 bp, Homo sapiens
  chr19:11026625-11026684
  hypo
ggcctcaactgaggtccccagcggcgttggggtagcccggggcccaccaccctccctct

SEQ ID NO: 96430 - DNA, 562 bp, Homo sapiens
  chr19:11029961-11030523
  hypo
agtgtgtcgctaccacggacaatctaattatacatgtaagtttgttgatgtgttcatgtatctggaggttaaactcctgtagtgccaaatcttttatgtggataaacacttgtcatttggagagctgtcacctgattgccctcggtggcgttgtgccggtcccctcctcacggcgtgtctgggaagagcaagctcgttttagctgcacagcctagaagccgtgggcagacctgggggaaggggcagggctctcccctcccatgctggccctggcgtcagatgccacgtcacacctgtggtctctcccaggacacatttgacatccggatcctgatggccaagtctgtcaagtacacggtgaacttcttagaagccaaagaaggagatttgcacaggtactggcacccacactccatcctcccaggcctggctcaggccgaaggtcagggccacccctggctcccgccggcatcctgccgtcccagggcagatggtgggcgggggccccaggcctctgcacctggcaccccctcttctctctcggcagcgcctgtctggcttc

SEQ ID NO: 96431 - DNA, 30 bp, Homo sapiens
  chr19:11032157-11032187
  hypo
gctagcgtgtgagtcgccatcctctgtccg

SEQ ID NO: 96432 - DNA, 30 bp, Homo sapiens; identical to SEQ ID NO: 32137
  chr19:11034882-11034912
  hypo

SEQ ID NO: 96433 - DNA, 25 bp, Homo sapiens
  chr19:11063740-11063765
  hypo
actcagtcacccaggcaggagcgga

SEQ ID NO: 96434 - DNA, 40 bp, Homo sapiens
  chr19:11077566-11077606
  hypo
aaaagaaaaaaaaaaagccgggggttgggaaggataacag

SEQ ID NO: 96435 - DNA, 31 bp, Homo sapiens; identical to SEQ ID NO: 32138
  chr19:11083222-11083253
  hypo

SEQ ID NO: 96436 - DNA, 23 bp, Homo sapiens
  chr19:11087137-11087160
  hypo
cactgtggcttgggctaggtgcg

SEQ ID NO: 96437 - DNA, 37 bp, Homo sapiens; identical to SEQ ID NO: 32139
  chr19:11117136-11117173
  hypo

SEQ ID NO: 96438 - DNA, 22 bp, Homo sapiens
  chr19:11121908-11121930
  hypo
ttttttttttttgaaacggagc

SEQ ID NO: 96439 - DNA, 491 bp, Homo sapiens
  chr19:11128615-11129106
  hypo
cagggcaaaaggcagcagaagcgcaaggctgctgagcctctgctccccacgcttcttcaggaactctccccagccttcaccacagccatgcgtccttctgtctattggctgtgccgcctggttggctgtggcttccagcggggctggagatgggttcatggtggacacagcacctccctcgtggagctgcttgggggcaaaccacgagtagtccctgggactccagcttcgagccctgtctttacggaccaccccgtctagactttctgagtggcttccctcccccactgaaaactccctgccccagagttcctcccagagcccgtcccctttgggactcagctttattaccgcctccaccctctcctcagtctctaggctgtcggtctcaggtgactcacccctccccactgcattctgcctgcccccatgtcctccctcattccagccctggtcatcccacaggggaacagccacgagttgccgctccc

SEQ ID NO: 96440 - DNA, 68 bp, Homo sapiens; identical to SEQ ID NO: 32141
  chr19:11129499-11129567
  hypo

SEQ ID NO: 96441 - DNA, 31 bp, Homo sapiens
  chr19:11129840-11129871
  hypo
tccagtcacatggatccgggagtttggactg

SEQ ID NO: 96442 - DNA, 529 bp, Homo sapiens; identical to SEQ ID NO: 55625
  chr19:11144002-11144531
  hypo

SEQ ID NO: 96443 - DNA, 184 bp, Homo sapiens
  chr19:11145620-11145804
  hypo
cccgcaaccccaagcggaagccgcgcctcatggaggaggacgagctcccctcgtggatcatcaaggacgacgcggaggtggagcggctgacctgtgaggaggaggaggagaagatgttcggccgtggctcccgccaccgcaaggaggtggactacagcgactcactgacggagaagcagtggct

SEQ ID NO: 96444 - DNA, 249 bp, Homo sapiens
  chr19:11151829-11152078
  hypo
agtgtgtgttatgccccgagccagtcaagctgaagggagagcgggtgcgggggccctcctccgtgtcccagcccggcccctgggattgcgtcgcggcctctgcttgtcgacctgggtgctggctgtcctattttactactattgaccctgaaggccatcgaggagggcacgctggaggagatcgaagaggaggtccggcagaagaaatcatcacggaagcgcaagcgagacagcgacgccggctcctcc

SEQ ID NO: 96445 - DNA, 185 bp, Homo sapiens; identical to SEQ ID NO: 32144
  chr19:11152796-11152981
  hypo

SEQ ID NO: 96446 - DNA, 31 bp, Homo sapiens; identical to SEQ ID NO: 32145
  chr19:11159058-11159089
  hypo

SEQ ID NO: 96447 - DNA, 31 bp, Homo sapiens
  chr19:11159327-11159358
  hypo
ggtttagctgggcacccgctgctgtgttggg

SEQ ID NO: 96448 - DNA, 31 bp, Homo sapiens
  chr19:11160309-11160340
  hypo
gtccaagtgtcaaggccgcatgtgtgtcagg

SEQ ID NO: 96449 - DNA, 31 bp, Homo sapiens; identical to SEQ ID NO: 32146
  chr19:11161622-11161653
  hypo

SEQ ID NO: 96450 - DNA, 31 bp, Homo sapiens; identical to SEQ ID NO: 32147
  chr19:11161939-11161970
  hypo

SEQ ID NO: 96451 - DNA, 30 bp, Homo sapiens
  chr19:11168900-11168930
  hypo
ggggtgatagccgccggttctgccttgcag

SEQ ID NO: 96452 - DNA, 94 bp, Homo sapiens
  chr19:11172447-11172541
  hypo
tcccctctccaggaccgctcaggaagtggcagcgaagaagactgagccccgacattccagtctcgaccccgagcccctcgttccagagctgaga

SEQ ID NO: 96453 - DNA, 131 bp, Homo sapiens
  chr19:11172772-11172903
  hypo
ctggcagtactgttgcgccgcagtttggagtcactgtagttaagtgtggatgcatgtgcgtcaccgtccactcctcctactgtattttattggacaggtcagactcgccgggggcccggcgagggtatgtc

SEQ ID NO: 96454 - DNA, 144 bp, Homo sapiens; identical to SEQ ID NO: 55626
  chr19:11199836-11199980
  hypo

SEQ ID NO: 96455 - DNA, 381 bp, Homo sapiens; identical to SEQ ID NO: 55627
  chr19:11200921-11201302
  hypo

SEQ ID NO: 96456 - DNA, 22 bp, Homo sapiens
  chr19:11213285-11213307
  hypo
cggcctcagtgggtctttcctt

SEQ ID NO: 96457 - DNA, 185 bp, Homo sapiens
  chr19:11213950-11214135
  hypo
gcacatccaaatccaaaaccccgaaattcaaagtcttgagcacccgaaattctgaaacgtcttgagcactgacctttagaaggaaatgcttattggagcattttggatttcggatttttaccactgagtgtggagtcctaattaggaaaaaaaccaggctgaccgaaccaaaggaaagcaataaa

SEQ ID NO: 96458 - DNA, 234 bp, Homo sapiens
  chr19:11215984-11216218
  hypo
ttggacggctcagacgaggcctcctgcccggtgctcacctgtggtcccgccagcttccagtgcaacagctccacctgcatcccccagctgtgggcctgcgacaacgaccccgactgcgaagatggctcggatgagtggccgcagcgctgtaggggtctttacgtgttccaaggggacagtagcccctgctcggccttcgagttccactgcctaagtggcgagtgcatccactcc

SEQ ID NO: 96459 - DNA, 30 bp, Homo sapiens
  chr19:11280640-11280670
  hypo
tcctgcaaagtatccggtgctatgaatgac

SEQ ID NO: 96460 - DNA, 30 bp, Homo sapiens
  chr19:11285316-11285346
  hypo
tgcggcaggccaggcgcagccactcctgca

SEQ ID NO: 96461 - DNA, 31 bp, Homo sapiens
  chr19:11285561-11285592
  hypo
tttgcaatccccaacacgttccccaaggaag

SEQ ID NO: 96462 - DNA, 30 bp, Homo sapiens; identical to SEQ ID NO: 32151
  chr19:11289196-11289226
  hypo

SEQ ID NO: 96463 - DNA, 877 bp, Homo sapiens
  chr19:11303815-11304692
  hypo
gggggtcagcctgccgggcctgagctgcctgcagctcctgcagcgccttcttgagctgggtctccagcacagcgaccttggcggcgagggcagcctccccatcaggcatgcccaagtcccgttctcgaacccaggtgcccacactccgggtctccagtgccactgggtcctctgggggatcggggaggtccaggcagagctcgctgcgaccccggcccgctgtggggtggcccaggaacttctggctcttaagttgtactgtgagctgccgcttttcctcctggagcaccgagagcttcacctggagcacagggatcagcttcacctgctcctccagctgccgcagcttccgcagggcacccgccatctgctcccgcacgtgggccaggtgcccggcactgggaggcaccggtgtggacagtcctgaactccgtggtgtcgggggtggcaaccccacgcccaccagggaggctgtcgagccggccgcactgggggtcagggagcccaggccggtgggtgtggccgcctggtcctcgagacggcgacgggcatccagcagcgtgcgctccacccgcggattgaagccaccgcgggtctccagagcaccatactgagggtagaagccacggccgcagtaggaataggctgagtggcggctgtccccactggcattggagcacagcgactcagtggacgtccaccaggagccagggccacggggcagcgagctcaggcgggggcggcgctgcactgccacgcgtcgcagcgtgtggcccttctcgatgtcatccacgtacttgaggaagtccaggtccaggcggtagccatagggggtctccacggagtagggtggatcggggtccttggcagggaaggc

SEQ ID NO: 96464 - DNA, 172 bp, Homo sapiens; identical to SEQ ID NO: 55631
  chr19:11308101-11308273
  hypo

SEQ ID NO: 96465 - DNA, 60 bp, Homo sapiens
  chr19:11319673-11319733
  hypo
gcactgggcggcctcggcgtggttgcccagctccgcgtgcttcccggccatgttctgcaa

SEQ ID NO: 96466 - DNA, 177 bp, Homo sapiens
  chr19:11327509-11327686
  hypo
cactcagcccgcagcacgctgggtccctgggtacatccttagcctgcctcctccatcatctcctgcccacgccctcaaaccttgtactcaaaggcagctaggcaaaggtacagcaaatccaacagacgtcccagctgggggagtgtcaggtcagtggcccagcgctgcaggagcgcc

SEQ ID NO: 96467 - DNA, 64 bp, Homo sapiens
  chr19:11333606-11333670
  hypo
gatgtcaacattgctccgccttccatccatgccatgcccaccctgcccacgcccactcctacct

SEQ ID NO: 96468 - DNA, 151 bp, Homo sapiens
  chr19:11339622-11339773
  hypo
tggaagaagaaccaggcgtgctggaggatggcctcgcgtacggcactgctgctgaccacccactgcagagccagctcctcgtgaagcagctggggacagaggcaggggtcacagagtgcgaggtgccaccccttcccgtaccccctctgga

SEQ ID NO: 96469 - DNA, 31 bp, Homo sapiens
  chr19:11361414-11361445
  hypo
cccaataaacactgatcggattaatacaggt

SEQ ID NO: 96470 - DNA, 43 bp, Homo sapiens; identical to SEQ ID NO: 55632
  chr19:11373071-11373114
  hypo

SEQ ID NO: 96471 - DNA, 31 bp, Homo sapiens; identical to SEQ ID NO: 55633
  chr19:11399747-11399778
  hypo

SEQ ID NO: 96472 - DNA, 30 bp, Homo sapiens
  chr19:11453739-11453769
  hypo
ttccagccagcgggcgttgacagtggccag

SEQ ID NO: 96473 - DNA, 175 bp, Homo sapiens; identical to SEQ ID NO: 55634
  chr19:11465992-11466167
  hypo

SEQ ID NO: 96474 - DNA, 31 bp, Homo sapiens; identical to SEQ ID NO: 55635
  chr19:11466333-11466364
  hypo

SEQ ID NO: 96475 - DNA, 31 bp, Homo sapiens; identical to SEQ ID NO: 55636
  chr19:11466379-11466410
  hypo

SEQ ID NO: 96476 - DNA, 30 bp, Homo sapiens
  chr19:11468257-11468287
  hypo
tgaagccagggtcccggtgacctgagcctt

SEQ ID NO: 96477 - DNA, 301 bp, Homo sapiens
  chr19:11473073-11473374
  hypo
ggccactccctccagccccaacgctctggccatgcgctctagcccagaaaggagcgtccacttgggttcggcgacttgcctccgctatccccctgaccagtccggctccccgcagatgtacgtgactctcgtgttccgcgtgaagggctcccgcctggtcaaaccctcgctctgcctggccttgctgtgcccggccttcctggtgggcgtggtccgcgtggccgagtaccgaaaccactggtcggacgtgctggctggcttcctgacaggggcggccatcgccacctttttggtgagttgc

SEQ ID NO: 96478 - DNA, 30 bp, Homo sapiens
  chr19:11474847-11474877
  hypo
ctgcaggccgcattcgacaccggcacggct

SEQ ID NO: 96479 - DNA, 28 bp, Homo sapiens
  chr19:11490376-11490404
  hypo
attttttttttttttttgagacggagtt

SEQ ID NO: 96480 - DNA, 31 bp, Homo sapiens
  chr19:11515224-11515255
  hypo
aaaaaacaaatgatgacgacaacaacaacaa

SEQ ID NO: 96481 - DNA, 31 bp, Homo sapiens
  chr19:11527679-11527710
  hypo
cctcaccttgctggttcgatagtggaggaag

SEQ ID NO: 96482 - DNA, 864 bp, Homo sapiens; identical to SEQ ID NO: 55639
  chr19:11529237-11530101
  hypo

SEQ ID NO: 96483 - DNA, 41 bp, Homo sapiens
  chr19:11549271-11549312
  hypo
caggtaaagtatacaacggaaggaggccaggcgcggtggct

SEQ ID NO: 96484 - DNA, 185 bp, Homo sapiens; identical to SEQ ID NO: 32159
  chr19:11559277-11559462
  hypo

SEQ ID NO: 96485 - DNA, 402 bp, Homo sapiens
  chr19:11559904-11560306
  hypo
ggattggccccgaccacgacaagttcagtgccatgaagtatgagcaaggcacgggctgctggcagggccccaaccgctccaccaccgtgagtgcctgcaaggcaggggagctggggcggggagacccaggcctggcccagccgaaccctctcgagcacccgtctgcccatccccaggtgcgcctcctgtgcgggaaagagaccatggtgaccagcaccacagagcccagtcgctgcgagtacctcatggagctgatgacgccagccgcctgcccggagccaccgcctgaagcacccaccgaagacgaccatgacgagctctagctggatgggcgcagaggtgggcggggaggtggagtctcgtcggcctgccccagcaaggggaggcggcgggccctgagga

SEQ ID NO: 96486 - DNA, 156 bp, Homo sapiens
  chr19:11565668-11565824
  hypo
aacctggcgatgagcgacaggggactactttgggggtcacgcgggctctgccctgaccccccgcatgcttctgaccccgttgtgacccttcacacctttatgacccctgactgtgccatgaccttggaatggtgtgacccctgcaatgcaattttt

SEQ ID NO: 96487 - DNA, 281 bp, Homo sapiens; identical to SEQ ID NO: 12046
  chr19:11590856-11591137
  hypo

SEQ ID NO: 96488 - DNA, 61 bp, Homo sapiens; identical to SEQ ID NO: 55646
  chr19:11591577-11591638
  hypo

SEQ ID NO: 96489 - DNA, 304 bp, Homo sapiens; identical to SEQ ID NO: 55647
  chr19:11591672-11591976
  hypo

SEQ ID NO: 96490 - DNA, 1073 bp, Homo sapiens; identical to SEQ ID NO: 55648
  chr19:11592583-11593656
  hypo

SEQ ID NO: 96491 - DNA, 184 bp, Homo sapiens
  chr19:11594618-11594802
  hypo
tcatgtgccagttgagcgacgcgcgctgccggcactggtagccacagatctcgcacctgccgggagcccgtggcgggacggggcggggtcagagtgggcggggcggggcggggccctacaaggccgagcgcaggtggaaccgggcccagacactgcgttggggcgaagccgcccctgggacctg

SEQ ID NO: 96492 - DNA, 371 bp, Homo sapiens; identical to SEQ ID NO: 32164
  chr19:11605728-11606099
  hypo

SEQ ID NO: 96493 - DNA, 31 bp, Homo sapiens
  chr19:11608299-11608330
  hypo
taagggattcccatcccggagggctgccagg

SEQ ID NO: 96494 - DNA, 30 bp, Homo sapiens
  chr19:11617829-11617859
  hypo
ttcccttgctgactcgagggactaggtttg

SEQ ID NO: 96495 - DNA, 30 bp, Homo sapiens; identical to SEQ ID NO: 32165
  chr19:11649107-11649137
  hypo

SEQ ID NO: 96496 - DNA, 119 bp, Homo sapiens; identical to SEQ ID NO: 32166
  chr19:11658622-11658741
  hypo

SEQ ID NO: 96497 - DNA, 30 bp, Homo sapiens
  chr19:11660467-11660497
  hypo
agggcgcctcgcagcggggcatgacggtgt

SEQ ID NO: 96498 - DNA, 282 bp, Homo sapiens; identical to SEQ ID NO: 32167
  chr19:11662353-11662635
  hypo

SEQ ID NO: 96499 - DNA, 30 bp, Homo sapiens; identical to SEQ ID NO: 32168
  chr19:11666079-11666109
  hypo

SEQ ID NO: 96500 - DNA, 30 bp, Homo sapiens; identical to SEQ ID NO: 32169
  chr19:11688231-11688261
  hypo

SEQ ID NO: 96501 - DNA, 30 bp, Homo sapiens
  chr19:11773265-11773295
  hypo
ctgggcccggagcgcgttcatcgcccacag

SEQ ID NO: 96502 - DNA, 77 bp, Homo sapiens
  chr19:11788683-11788760
  hypo
agtgggagacgagggagaggctcagcatcagagggagaccgtggaaagtgggagacgagggagagcagcttcagttt

SEQ ID NO: 96503 - DNA, 157 bp, Homo sapiens
  chr19:11794319-11794476
  hypo
gcaagagagagagactccgtctcaaaaaaaaaaaaagtgcgtatgtgtatatatgtttaagacagggtcccttgctaggtctagaggcgagtgccaccatccccagctaatttttgtataatttttttgtaaggtggagggtcgtgaactcctggcc

SEQ ID NO: 96504 - DNA, 20 bp, Homo sapiens
  chr19:11850742-11850762
  hypo
cgttatggccgggcgcggtg

SEQ ID NO: 96505 - DNA, 101 bp, Homo sapiens
  chr19:11926328-11926429
  hypo
tcatctctgacaggttcgtgtgggaggagtagcggtctttggggtccccagtgcccacttttttctgttaaaaattaaactgaggtacgttaacaattaaa

SEQ ID NO: 96506 - DNA, 101 bp, Homo sapiens
  chr19:11926728-11926829
  hypo
tcacgaatgagaaacacccagtcctggcttgtggtttgtcaacggaaaaagccaagctatgtaaaataaagaagtttattaggagccgaataggagagccg

SEQ ID NO: 96507 - DNA, 31 bp, Homo sapiens; identical to SEQ ID NO: 12051
  chr19:11950106-11950137
  hypo

SEQ ID NO: 96508 - DNA, 777 bp, Homo sapiens; identical to SEQ ID NO: 55659
  chr19:11959421-11960198
  hypo

SEQ ID NO: 96509 - DNA, 90 bp, Homo sapiens
  chr19:11961500-11961590
  hypo
aggaaggaattcaagacgagtcacaaagtgcagtgcgaagagagtttattgaaagctactctgggccagcatgatggcttaggcctgtaa

SEQ ID NO: 96510 - DNA, 30 bp, Homo sapiens; identical to SEQ ID NO: 55664
  chr19:12146148-12146178
  hypo

SEQ ID NO: 96511 - DNA, 220 bp, Homo sapiens; identical to SEQ ID NO: 55665
  chr19:12146424-12146644
  hypo

SEQ ID NO: 96512 - DNA, 43 bp, Homo sapiens
  chr19:12177041-12177084
  hypo
ggggtttttcaaaggcagaatcggggaagaggtggtgggaaat

SEQ ID NO: 96513 - DNA, 38 bp, Homo sapiens
  chr19:12177362-12177400
  hypo
tttttttgttgttgttgttgacggaggctccctctgtc

SEQ ID NO: 96514 - DNA, 681 bp, Homo sapiens; identical to SEQ ID NO: 55668
  chr19:12203012-12203693
  hypo

SEQ ID NO: 96515 - DNA, 46 bp, Homo sapiens; identical to SEQ ID NO: 12059
  chr19:12204538-12204584
  hypo

SEQ ID NO: 96516 - DNA, 24 bp, Homo sapiens
  chr19:12217685-12217709
  hypo
caccctgggcgacagagcgagact

SEQ ID NO: 96517 - DNA, 30 bp, Homo sapiens
  chr19:12230739-12230769
  hypo
aaaattacattcaacgagttgttgctggca

SEQ ID NO: 96518 - DNA, 90 bp, Homo sapiens
  chr19:12260459-12260549
  hypo
gtgggcaaagtatttcagtgacgtttctcaaagatacatacaagtgacaagtaagcacgtgaaaaagggttcaacatcaggaatcattcg

SEQ ID NO: 96519 - DNA, 29 bp, Homo sapiens
  chr19:12263637-12263666
  hypo
gacggagcgagactccatcttaaaaaaaa

SEQ ID NO: 96520 - DNA, 923 bp, Homo sapiens; identical to SEQ ID NO: 55671
  chr19:12266888-12267811
  hypo

SEQ ID NO: 96521 - DNA, 31 bp, Homo sapiens; identical to SEQ ID NO: 32176
  chr19:12347792-12347823
  hypo

SEQ ID NO: 96522 - DNA, 44 bp, Homo sapiens
  chr19:12416131-12416175
  hypo
ggaggcagagttccggcagtaacgtgagtggcccagttcctaac

SEQ ID NO: 96523 - DNA, 112 bp, Homo sapiens; identical to SEQ ID NO: 32177
  chr19:12418637-12418749
  hypo

SEQ ID NO: 96524 - DNA, 146 bp, Homo sapiens
  chr19:12461695-12461841
  hypo
tctctccagtgtgagttctttcatgcatacgaaataaactaggccaaaaaaaggctttcccacacaacttacatatataaggtccacctccacgttgtactattatgtgtcttcgaaggtttcccgaagaactgaaggttttccca

SEQ ID NO: 96525 - DNA, 24 bp, Homo sapiens
  chr19:12479317-12479341
  hypo
cccgcaacagactacaagattgac

SEQ ID NO: 96526 - DNA, 870 bp, Homo sapiens; identical to SEQ ID NO: 55676
  chr19:12595122-12595992
  hypo

SEQ ID NO: 96527 - DNA, 31 bp, Homo sapiens
  chr19:12628508-12628539
  hypo
ccctaggggaaactttcggtaacaccctgga

SEQ ID NO: 96528 - DNA, 30 bp, Homo sapiens
  chr19:12666765-12666795
  hypo
gaagatttactgaccgtctatagaaggcct

SEQ ID NO: 96529 - DNA, 152 bp, Homo sapiens
  chr19:12691190-12691342
  hypo
aaggcttaatcacaccgtttacattccttgaatttctctccagcgtaagtactctcatacatccaaaaggaactaatacaactgacagcattaccacactttactttcttagggcttctgtctactatgagtcctttcgtgcacgtgcaaag

SEQ ID NO: 96530 - DNA, 96 bp, Homo sapiens
  chr19:12729966-12730062
  hypo
gtatatttctcatatgctagtatctgaagctgcaggctatccgttccaatggttgtggtgtttagactttttcacggttttgtttttgtttgcttt

SEQ ID NO: 96531 - DNA, 121 bp, Homo sapiens; identical to SEQ ID NO: 32180
  chr19:12746885-12747006
  hypo

SEQ ID NO: 96532 - DNA, 31 bp, Homo sapiens
  chr19:12747554-12747585
  hypo
acctcttgcccctgtgcggccccgccgaact

SEQ ID NO: 96533 - DNA, 30 bp, Homo sapiens
  chr19:12753314-12753344
  hypo
cgccactcttcttccgcgattctcaaagat

SEQ ID NO: 96534 - DNA, 79 bp, Homo sapiens
  chr19:12755552-12755631
  hypo
tcacaagctggcccagccctccgtcaagaaggaaacttgaaaaagaacacatctgggctgggcgcggtggctcacgcct

SEQ ID NO: 96535 - DNA, 31 bp, Homo sapiens
  chr19:12757980-12758011
  hypo
cattgcccccacctgccggccccaggtaaga

SEQ ID NO: 96536 - DNA, 31 bp, Homo sapiens
  chr19:12774321-12774352
  hypo
tccctggtttcaaagccggccatgtcccacc

SEQ ID NO: 96537 - DNA, 31 bp, Homo sapiens; identical to SEQ ID NO: 32181
  chr19:12787009-12787040
  hypo

SEQ ID NO: 96538 - DNA, 198 bp, Homo sapiens
  chr19:12794667-12794865
  hypo
gcgtgagccactgcgcccggccgagggtcacttcttaagcgtcacccatggacaagatttcggtcaccaggcagagttagacacagtttcatccttcctcagccacttttgtctaatgggatagtgagcccggttcgtgccctcacaagtctccaaagccttcacatgctgcataacgctctgttcttccttccctta

SEQ ID NO: 96539 - DNA, 34 bp, Homo sapiens
  chr19:12795862-12795896
  hypo
aaaatagggattggggctgggcgcggtggctcac

SEQ ID NO: 96540 - DNA, 281 bp, Homo sapiens; identical to SEQ ID NO: 55682
  chr19:12806991-12807272
  hypo

SEQ ID NO: 96541 - DNA, 52 bp, Homo sapiens; identical to SEQ ID NO: 32183
  chr19:12811289-12811341
  hypo

SEQ ID NO: 96542 - DNA, 205 bp, Homo sapiens
  chr19:12817327-12817532
  hypo
tcccagagggtggccgggggagagtgggggctgtgggatcaggggtccagggtcacctgcaggccgcctcctgtaccctcttgttgccatccaggatgcgtttgagcagctctgtcatcaggggcttgaggtgcatgtcgggtggctggctgaccacccagtgggcatagcggctcagcgtccagcaggcgatggagcggaccaa

SEQ ID NO: 96543 - DNA, 58 bp, Homo sapiens
  chr19:12885519-12885577
  hypo
ccctggagccatgcctcgttgaaccaggaggggtctctgggggcgagaaggtgggatg

SEQ ID NO: 96544 - DNA, 639 bp, Homo sapiens; identical to SEQ ID NO: 55689
  chr19:12900113-12900752
  hypo

SEQ ID NO: 96545 - DNA, 35 bp, Homo sapiens
  chr19:12906629-12906664
  hypo
gagccactgcgcccggccttgggagcagctcttaa

SEQ ID NO: 96546 - DNA, 30 bp, Homo sapiens
  chr19:12914979-12915009
  hypo
caggagcgcagccgcgaggtagtgggcaca

SEQ ID NO: 96547 - DNA, 30 bp, Homo sapiens; identical to SEQ ID NO: 55695
  chr19:12917469-12917499
  hypo

SEQ ID NO: 96548 - DNA, 30 bp, Homo sapiens
  chr19:12918079-12918109
  hypo
actttgtcggctgggcgctggatgtgctgt

SEQ ID NO: 96549 - DNA, 30 bp, Homo sapiens; identical to SEQ ID NO: 32186
  chr19:12920976-12921006
  hypo

SEQ ID NO: 96550 - DNA, 102 bp, Homo sapiens
  chr19:12928673-12928775
  hypo
cagaggtctgcggggtgaatgcggtggaataagtgactggaggatggagggggttccaggcattgggcacgtgttgaggcctagaaatgggagacctggctt

SEQ ID NO: 96551 - DNA, 150 bp, Homo sapiens
  chr19:12953397-12953547
  hypo
cgcccgtccagtttactgtctcacagccacacgcttacacatgcacatgctaatgtgtgttgtgcactcacatgagcacgcgccgatgtgtgtccctgtgtgtgtgcatctgcgtgcgagtgtgaatgagtgtgtcgctgtgtgcaagtt

SEQ ID NO: 96552 - DNA, 280 bp, Homo sapiens
  chr19:12969189-12969469
  hypo
ggccaagaaaccgccgggggagaatgacttcgataccatcaagctcataagcaacggtgcctacgggtgagccacccggggctctggcggggggagggtggcggaggccgggtgtctcggaggtgacggccggtcctcgctctctccccctgcagcgctgtctacctggtgcggcaccgcgacacgcggcagcgctttgccatgaaaaagatcaacaagcagaacttgatcctccgcaaccagatccagcaggcctttgtggagcgcgatatcctcacct

SEQ ID NO: 96553 - DNA, 30 bp, Homo sapiens
  chr19:12982061-12982091
  hypo
agaagggaagagcacgggaaaggtggcggg

SEQ ID NO: 96554 - DNA, 30 bp, Homo sapiens
  chr19:12985188-12985218
  hypo
tgtggccaaggcggcgctgagcccggtgca

SEQ ID NO: 96555 - DNA, 296 bp, Homo sapiens
  chr19:12985536-12985832
  hypo
tgcagtgaccccagtcccacccgcatccctcttgggctcaggcaccaagcctcaagtggggctgacctcccggtgccctgctgaagctgtgcccccagcaggcctgaccaaaaaaggagtgtccagtcccgcacccccgggaccatagccaagggggtcatcggccccgcgctgtacagcctccgtatacatatgtacacatataaataaagtgcgtccgtgctgcgtgagttttctggggctcactcctctccaggcaaggcgagacatcacacgaccccacccccatgcccagg

SEQ ID NO: 96556 - DNA, 74 bp, Homo sapiens
  chr19:12986929-12987003
  hypo
ctcctctccctggttccgattcatgtcacccacgcaggtccagggcccttttggggacacgcaccatttggagt

SEQ ID NO: 96557 - DNA, 760 bp, Homo sapiens; identical to SEQ ID NO: 55701
  chr19:12996030-12996790
  hypo

SEQ ID NO: 96558 - DNA, 30 bp, Homo sapiens; identical to SEQ ID NO: 32187
  chr19:13000767-13000797
  hypo

SEQ ID NO: 96559 - DNA, 46 bp, Homo sapiens
  chr19:13007715-13007761
  hypo
ccctacagggtcccttcggctgcctgaacaacgcccggtacggcat

SEQ ID NO: 96560 - DNA, 31 bp, Homo sapiens; identical to SEQ ID NO: 32188
  chr19:13010498-13010529
  hypo

SEQ ID NO: 96561 - DNA, 20 bp, Homo sapiens
  chr19:13016955-13016975
  hypo
cactgcgcccagcctgatgc

SEQ ID NO: 96562 - DNA, 76 bp, Homo sapiens
  chr19:13017982-13018058
  hypo
ccttgtcttggtgcatcctcacgaccacactcgggtcatctgctgttctctttacgacatgggcttagagtggtta

SEQ ID NO: 96563 - DNA, 37 bp, Homo sapiens; identical to SEQ ID NO: 55704
  chr19:13029430-13029467
  hypo

SEQ ID NO: 96564 - DNA, 584 bp, Homo sapiens; identical to SEQ ID NO: 55705
  chr19:13029785-13030369
  hypo

SEQ ID NO: 96565 - DNA, 472 bp, Homo sapiens; identical to SEQ ID NO: 12077
  chr19:13049976-13050448
  hypo

SEQ ID NO: 96566 - DNA, 829 bp, Homo sapiens; identical to SEQ ID NO: 12078
  chr19:13050857-13051686
  hypo

SEQ ID NO: 96567 - DNA, 932 bp, Homo sapiens; identical to SEQ ID NO: 12079
  chr19:13054372-13055304
  hypo

SEQ ID NO: 96568 - DNA, 30 bp, Homo sapiens
  chr19:13084197-13084227
  hypo
cccaggtgttctcccggcccggctgctcag

SEQ ID NO: 96569 - DNA, 31 bp, Homo sapiens
  chr19:13089222-13089253
  hypo
tgtgagcctgggaggcgcggtggctcaggcc

SEQ ID NO: 96570 - DNA, 132 bp, Homo sapiens; identical to SEQ ID NO: 55713
  chr19:13094455-13094587
  hypo

SEQ ID NO: 96571 - DNA, 30 bp, Homo sapiens; identical to SEQ ID NO: 32194
  chr19:13104659-13104689
  hypo

SEQ ID NO: 96572 - DNA, 1033 bp, Homo sapiens; identical to SEQ ID NO: 55714
  chr19:13106027-13107060
  hypo

SEQ ID NO: 96573 - DNA, 31 bp, Homo sapiens; identical to SEQ ID NO: 12084
  chr19:13107273-13107304
  hypo

SEQ ID NO: 96574 - DNA, 673 bp, Homo sapiens
  chr19:13108001-13108674
  hypo
gtgtgcagtggtgtcaaggggcgaggggtttgtcggggtgtgtgtcagctgtggctacaccacactcctgtatgcacaggtgagagtgtatgcaagtgtgaatcaatctagagtctgtgtgtagcccctgtgggccggccatgggcaggcctgcgtggcatggccgtgtgtgtggcccagggagcgggttttcctgtagaaagcaggcccaagtacgtgttggcgagggcgcaccggcatgcatacatgttgcagtgtgcatgcaggtgtgagcaggcaccctgagcaccatggcagtgtggggaacccccacatctgcacctccagttccacggccactccatgttgggcgcccctcacaacaactgcctacccagcggtgtctgagctgggcctctttggtgctacacttggctgggctgtgtggccgatgtttggggcctagtggaaccaagaccccacgctcaagcagccccttgcccaccaggctgccagcccggcctcccatgccaagcacgccagacatctgagcctgctcccccatggcttgggtgagacaccagcccctcagatttcacagcaccctgggagagaaaatgcctgtggatacgccggtgacatggctaggaaggggctggggcggctgcgagacccagggcgatggccggtgctt

SEQ ID NO: 96575 - DNA, 444 bp, Homo sapiens; identical to SEQ ID NO: 32199
  chr19:13109258-13109702
  hypo

SEQ ID NO: 96576 - DNA, 21 bp, Homo sapiens
  chr19:13109988-13110009
  hypo
ctattttttttttttttgaga

SEQ ID NO: 96577 - DNA, 211 bp, Homo sapiens; identical to SEQ ID NO: 32201
  chr19:13110308-13110519
  hypo

SEQ ID NO: 96578 - DNA, 181 bp, Homo sapiens
  chr19:13110779-13110960
  hypo
gatgagctggggctccgtgagatgttttgatgctgggccgagctcagagccgagggctctgccgggaacagggtgctccagtctctctagggcctggaatgtcttgtgtagcctcaagagctcccagacggaggctgcgggagcggagtcaagggctaggctttgccgtcagacagaaatg

SEQ ID NO: 96579 - DNA, 132 bp, Homo sapiens
  chr19:13111572-13111704
  hypo
gttgtcacctggacccgccatggagacaggacatatgtgcaggaccctatggtgggcacttggctggatcagggcacattgcgggtgggagcaatgctgggtgtttggccgtggcgccgtggctgtgggcaa

SEQ ID NO: 96580 - DNA, 344 bp, Homo sapiens; identical to SEQ ID NO: 32203
  chr19:13112074-13112418
  hypo

SEQ ID NO: 96581 - DNA, 94 bp, Homo sapiens
  chr19:13115951-13116045
  hypo
tcctgtcctccgtggggctgtctcactaatcctttggcctttgactccccagttctgaccccagagaaagaagagacagcggtcagcagaatgg

SEQ ID NO: 96582 - DNA, 30 bp, Homo sapiens
  chr19:13138801-13138831
  hypo
gagttggcgcagcccgggccaccagtgggc

SEQ ID NO: 96583 - DNA, 174 bp, Homo sapiens
  chr19:13150455-13150629
  hypo
tgctgggcgaggccccgtttctatgcaagttggccctgggctcagctgggggccagtttattttgctccgttgtgatacttagcatgcagtttttagtttctcttaggctggaatcttggagctgggactgtgttttatccgcctttgcatctgtctctcgcgcagcttatagt

SEQ ID NO: 96584 - DNA, 38 bp, Homo sapiens
  chr19:13154725-13154763
  hypo
cccaggagttcgagcctgggccacgtagcaagaccccc

SEQ ID NO: 96585 - DNA, 259 bp, Homo sapiens
  chr19:13156411-13156670
  hypo
tggagaccttggcccacggtgctcagcagtctgttgccagggaggtaggagagaggggcagcaggcacactgggttgacaactgcactgtgttgaccccatggcgggcatcaggggaccacaggctgtggttgcgcctgtccgttctccctcccttttctcgtaggcttcttcctcctccagtgcaagagctggatccaggattggagaatttgctcttgcccacctctccatgtcctcgttgccgactgaggcacctg

SEQ ID NO: 96586 - DNA, 99 bp, Homo sapiens
  chr19:13160323-13160422
  hypo
tatgtggtcttcatgtcgggcttctttcacggagcataatgttttcaaggttcctatatgttgtagcagcaagtgtcagtggttccttttttttttttt

SEQ ID NO: 96587 - DNA, 179 bp, Homo sapiens
  chr19:13177632-13177811
  hypo
aagatcctagaagccccgtgggcccagaccctggccaagcctcatcccccggccctctggctgccctgcattctcaaggacttccttggtcccctgagtctcctgtctgctgagacggggagaacccctctgtgacccgtccccttagccccccatctatccaccgttcccctcctcag

SEQ ID NO: 96588 - DNA, 40 bp, Homo sapiens; identical to SEQ ID NO: 32205
  chr19:13179792-13179832
  hypo

SEQ ID NO: 96589 - DNA, 30 bp, Homo sapiens
  chr19:13181439-13181469
  hypo
gcctccggctgaggccgccagccgtaagat

SEQ ID NO: 96590 - DNA, 155 bp, Homo sapiens
  chr19:13186059-13186214
  hypo
cagctgagggttttgccgacttctctgatgtgggcagcttggaggaccgtggcatcacagattgggaaggggcttgaggaagaggagcaggttgaagctgatggcttgaggggccctagggctgatcttggggttgggcacgcagtgagtgccca

SEQ ID NO: 96591 - DNA, 31 bp, Homo sapiens
  chr19:13186478-13186509
  hypo
gatgcaggtatgggtgcgggggatcctgacc

SEQ ID NO: 96592 - DNA, 81 bp, Homo sapiens; identical to SEQ ID NO: 32206
  chr19:13196306-13196387
  hypo

SEQ ID NO: 96593 - DNA, 212 bp, Homo sapiens
  chr19:13197661-13197873
  hypo
atctgtgaggacagaacgaggcactggctggagacatcaaggggatgggctcctcagggcttgctcaccgataggaggaggagcacacagcatcctctctgggtctcgcatccgggtgcccggaagggcggaactctatcccacaggagaggtgctggtttaggatgaagagcgcaggccaggccttcctgagcccacgctgcagtggtcat

SEQ ID NO: 96594 - DNA, 30 bp, Homo sapiens
  chr19:13198105-13198135
  hypo
catggcgtctgagggcgttgtacagggaag

SEQ ID NO: 96595 - DNA, 30 bp, Homo sapiens
  chr19:13198402-13198432
  hypo
ggagcagggtgagcgcgctcatctttcctg

SEQ ID NO: 96596 - DNA, 54 bp, Homo sapiens; identical to SEQ ID NO: 32207
  chr19:13199712-13199766
  hypo

SEQ ID NO: 96597 - DNA, 74 bp, Homo sapiens
  chr19:13201106-13201180
  hypo
ccacagcattcgcaacgacaggcgcctcctctgccaaccggtttgtcagcatcggaccccgggacggcaacttt

SEQ ID NO: 96598 - DNA, 89 bp, Homo sapiens; identical to SEQ ID NO: 12087
  chr19:13213673-13213762
  hypo

SEQ ID NO: 96599 - DNA, 3 bp, Homo sapiens
  chr19:13213789-13213792
  hypo
cgg

SEQ ID NO: 96600 - DNA, 90 bp, Homo sapiens; identical to SEQ ID NO: 32210
  chr19:13218630-13218720
  hypo

SEQ ID NO: 96601 - DNA, 30 bp, Homo sapiens
  chr19:13226095-13226125
  hypo
gcatctgcttggctcggctgtaccaggtgg

SEQ ID NO: 96602 - DNA, 108 bp, Homo sapiens
  chr19:13249108-13249216
  hypo
cttcatcagtgaaacgggcaagatcgagccggacatgatgggtgtggagcatggcttcgagaccgccagccacgagggcgaggcgggtccctcggctgaagccctgca

SEQ ID NO: 96603 - DNA, 113 bp, Homo sapiens
  chr19:13252909-13253022
  hypo
ttacagcaacactggctcactcggtgcccgcctgtgccgtggctgatatgccaagccccagaaacacatcccatacacacacactccacgccgcattcagaagagcattcatg

SEQ ID NO: 96604 - DNA, 82 bp, Homo sapiens; identical to SEQ ID NO: 55725
  chr19:13263792-13263874
  hypo

SEQ ID NO: 96605 - DNA, 465 bp, Homo sapiens; identical to SEQ ID NO: 55726
  chr19:13264168-13264633
  hypo

SEQ ID NO: 96606 - DNA, 1230 bp, Homo sapiens; identical to SEQ ID NO: 12090
  chr19:13265820-13267050
  hypo

SEQ ID NO: 96607 - DNA, 63 bp, Homo sapiens; identical to SEQ ID NO: 55728
  chr19:13274018-13274081
  hypo

SEQ ID NO: 96608 - DNA, 43 bp, Homo sapiens
  chr19:13287253-13287296
  hypo
agaatcaaaagggaaatttcacgacatggggaaaagtatatgc

SEQ ID NO: 96609 - DNA, 56 bp, Homo sapiens; identical to SEQ ID NO: 32213
  chr19:13332534-13332590
  hypo

SEQ ID NO: 96610 - DNA, 206 bp, Homo sapiens
  chr19:13346306-13346512
  hypo
taacagattctctgcacgactacatcacagaggcacttccaatctgacttctacattcagccagagcatgagggtcacctgtcttctcagccctgggccagcagcagggacgaggactcaccttgaaggactgcacaaaggtccagagaagaatgcggatggtgtaaccctgacggagaagtttgatgagccgggcagctcggaag

SEQ ID NO: 96611 - DNA, 30 bp, Homo sapiens
  chr19:13347110-13347140
  hypo
aaatgcatctgtcacgggactcaccgggca

SEQ ID NO: 96612 - DNA, 30 bp, Homo sapiens
  chr19:13347764-13347794
  hypo
ctgttttgttgggcccgagcagtgtttttt

SEQ ID NO: 96613 - DNA, 159 bp, Homo sapiens
  chr19:13397500-13397659
  hypo
ccggcggctggcggcgttctgggggttggtggccatggcagggatggccagcatggggccggggtcggtgctgtttcccatcttggctgggctctggggcaggccggcgtggccaaggctgccgtggggagcggccgactccgcggtggccagcttgtt

SEQ ID NO: 96614 - DNA, 106 bp, Homo sapiens
  chr19:13490330-13490436
  hypo
caaggggaaaggacgcgtcagtgacatggggctggcgggatgaagggagtggtgacatttctatcagtaaaggcacctgctctttaccacctggaaggcaaacagt

SEQ ID NO: 96615 - DNA, 39 bp, Homo sapiens
  chr19:13580550-13580589
  hypo
gtgtgggccaccgcgcccggctgaaccacctcctcttta

SEQ ID NO: 96616 - DNA, 31 bp, Homo sapiens
  chr19:13838455-13838486
  hypo
ctaagctgtggctggacgaggcagctcatgc

SEQ ID NO: 96617 - DNA, 31 bp, Homo sapiens
  chr19:13861042-13861073
  hypo
tttttgtttgtttgtttgagacggagtctca

SEQ ID NO: 96618 - DNA, 160 bp, Homo sapiens
  chr19:13873456-13873616
  hypo
ttcccctctgcccccggatccgcctccagcagcaaggtcagcggcgtcctgaagaagctggcacagagccgcagaaccgcgcttgccacctcccccatcaccgtcggggacctgggcatcgtgcggcggaggtctcgggacgtcccggagagcccccagc

SEQ ID NO: 96619 - DNA, 30 bp, Homo sapiens
  chr19:13873839-13873869
  hypo
ctcctccctcgtggcggactactccgactc

SEQ ID NO: 96620 - DNA, 216 bp, Homo sapiens
  chr19:13879645-13879861
  hypo
gtgggagctgaccgcgtggttgccaacggcgacacagccaacaaggtgggcacctaccagctggccattgtcgccaagcaccatggcattcccttctacgtggctgcccccagctcttcatgtgacctccgtctggagaccggcaaggagatcattattgaagagcgaccgggccaggagctgaccgatgttaatggggtccggattgcagcacct

SEQ ID NO: 96621 - DNA, 22 bp, Homo sapiens
  chr19:13881105-13881127
  hypo
atagttcatgcactcagatgcc

SEQ ID NO: 96622 - DNA, 30 bp, Homo sapiens; identical to SEQ ID NO: 32218
  chr19:13889419-13889449
  hypo

SEQ ID NO: 96623 - DNA, 30 bp, Homo sapiens
  chr19:13919890-13919920
  hypo
agatgctgcgaatgcgggactccaacgggg

SEQ ID NO: 96624 - DNA, 256 bp, Homo sapiens
  chr19:13936527-13936783
  hypo
gtgagggctgccaggtggatgcgggagggcgatggtggctcggggccaggactgactgtgagctgcgcctcccggggcatgggctgagtgtgagccacttcgctgggggcccggcatttgcgtgagctattcctctgtggctggggactgagcgagaaccactcttggggcggggactgtgagtgagacacacctctgggggcgtggcctgagtgtgggccacttccttgggggcgtggcatgagtgagccactcc

SEQ ID NO: 96625 - DNA, 30 bp, Homo sapiens
  chr19:13940700-13940730
  hypo
gctcagggcttggccgggagggaatggctg

SEQ ID NO: 96626 - DNA, 137 bp, Homo sapiens
  chr19:13941060-13941197
  hypo
gaggcggctaccatcgtggcagtgacgggcaccacacacgccactctgctgcgactgcagctggacacatcgcggagggaggagctctgggcctgcgcccgcaccctggccttgcagtgcgcgatgaaggaccctca

SEQ ID NO: 96627 - DNA, 30 bp, Homo sapiens
  chr19:13942596-13942626
  hypo
gagacccccacccccgatctggaaaggaaa

SEQ ID NO: 96628 - DNA, 163 bp, Homo sapiens
  chr19:13943490-13943653
  hypo
gagggaacacagggctgaatgcgttaccgctgtcatttaatcgtcaccacagccctatgagttggtaggattatcttttccattttacagatgagaaaactgaggttgcaaagtggaaagaaagggcacccagcggccgggcgcggtggctcacgtctgtaat

SEQ ID NO: 96629 - DNA, 74 bp, Homo sapiens; identical to SEQ ID NO: 12098
  chr19:13961396-13961470
  hypo

SEQ ID NO: 96630 - DNA, 83 bp, Homo sapiens
  chr19:13965915-13965998
  hypo
cttccaaagtgctgggattacagcatgagtgaccacgccctgcccaactttagaacatttccatcacccgcaaaagaaatctc

SEQ ID NO: 96631 - DNA, 30 bp, Homo sapiens
  chr19:13969431-13969461
  hypo
cggctgccattacttcgaagaatagctgta

SEQ ID NO: 96632 - DNA, 30 bp, Homo sapiens
  chr19:13987417-13987447
  hypo
ttcccccctacccccgcaaccagcccatga

SEQ ID NO: 96633 - DNA, 30 bp, Homo sapiens
  chr19:13988423-13988453
  hypo
gcgcccacacccgacgcttctgcccactta

SEQ ID NO: 96634 - DNA, 31 bp, Homo sapiens
  chr19:13994001-13994032
  hypo
tgaggtgcctgaccctcgctgcccacctagg

SEQ ID NO: 96635 - DNA, 31 bp, Homo sapiens; identical to SEQ ID NO: 32220
  chr19:13997267-13997298
  hypo

SEQ ID NO: 96636 - DNA, 293 bp, Homo sapiens
  chr19:14000114-14000407
  hypo
atgaggcaggtggtctcgctgccctgccagctctgaggtggtgtctggaatgccctgctgagccccgggctcctggagagggtcgtctgctatttctctgtgttccagcacaacagaggcttgcggggacacacggaacccctcgaggtctcgttcgaggttctggccacctaactcggcttcctcttgagcaggacctggctcctgcttctgattgacacatggacctgtgtccggggatgcatgaccggaatctccagcacccatcatggactctccgctcccaggtgcca

SEQ ID NO: 96637 - DNA, 210 bp, Homo sapiens
  chr19:14000961-14001171
  hypo
tgttccttttggccaccgtcacctggaaccctgtctgtctcaggcttgctgtcatcggccccttgttctgacaggtggtcttggctggccctctgtgaggcggacaaccccgtccccctgtctggagggtcatcaggctgagaatccccactgccgggcaccgcctgcacagggctctggctgctctgctcagggcgggcactgtctgcc

SEQ ID NO: 96638 - DNA, 30 bp, Homo sapiens
  chr19:14041290-14041320
  hypo
aagcagacaatcagcggacaatcggttctg

SEQ ID NO: 96639 - DNA, 30 bp, Homo sapiens; identical to SEQ ID NO: 32222
  chr19:14042825-14042855
  hypo

SEQ ID NO: 96640 - DNA, 30 bp, Homo sapiens
  chr19:14043631-14043661
  hypo
ccaggtgcctggcccgatgtcgccgacccg

SEQ ID NO: 96641 - DNA, 30 bp, Homo sapiens
  chr19:14043896-14043926
  hypo
agctccgtcaggcccggtgtggcgaccagg

SEQ ID NO: 96642 - DNA, 30 bp, Homo sapiens
  chr19:14066697-14066727
  hypo
gtgctgcccctgaacgtgcctcacaggtcc

SEQ ID NO: 96643 - DNA, 89 bp, Homo sapiens
  chr19:14066987-14067076
  hypo
accaccgtgacatctacgtcagcaccgtggccgtgccaccgccaggccgctgtgctgcttgccaggatgccagccgagcccacccaggt

SEQ ID NO: 96644 - DNA, 30 bp, Homo sapiens
  chr19:14071807-14071837
  hypo
gggccaggccgccccggacactgactccaa

SEQ ID NO: 96645 - DNA, 274 bp, Homo sapiens
  chr19:14072644-14072918
  hypo
aacccaacaagttaccaactccgctcgggcggcgctcacgaatcgcacaatagtcatggggtgggggtcgcacggcacggaggagaagcgtggtctccgggaagataggggcacagaaaaggttccattacaaaccagcggcggagggcgggggcgcgggggctggggtctgtgggcactccccggctccgcggctcgctgctctttggaagctggaggccgtgccccctgccgccctcctcacagccgggccgggcagtgcccccttcttgag

SEQ ID NO: 96646 - DNA, 163 bp, Homo sapiens
  chr19:14073131-14073294
  hypo
ataagttaacagtttcgcacgggagggggcctgcctgcctgccccctggggtggtgggaggacggggctggggagaagacgctggggcctgggaggggggcggccaaggggccgagctggatgccccgcggggcacctgggcacgcggcgggttccttaaggc

SEQ ID NO: 96647 - DNA, 1344 bp, Homo sapiens; identical to SEQ ID NO: 12100
  chr19:14073500-14074844
  hypo

SEQ ID NO: 96648 - DNA, 30 bp, Homo sapiens
  chr19:14084905-14084935
  hypo
aaaagccccggcccccggaaccgtctagtt

SEQ ID NO: 96649 - DNA, 30 bp, Homo sapiens
  chr19:14085152-14085182
  hypo
ctccttcagatatcgcgtgacgggatgggc

SEQ ID NO: 96650 - DNA, 30 bp, Homo sapiens; identical to SEQ ID NO: 32224
  chr19:14093009-14093039
  hypo

SEQ ID NO: 96651 - DNA, 31 bp, Homo sapiens
  chr19:14107952-14107983
  hypo
ctggcaagggggaagccggcccaagcagccc

SEQ ID NO: 96652 - DNA, 636 bp, Homo sapiens
  chr19:14181142-14181778
  hypo
catcaatcttcccgcgtccgccgattcctcctccttggtcgccgcgtccttggctggcgtcagaaaaatggctacaaacttcctagcacatgagaagatctggtttgacaagttcaaatatgacgacgcagaaaggagattctatcagcagatgaacaggcctgtggcaggtgcctcccgccaggagaacggcgccagcgtgatcctccatgacattgtgagagccagagagaacatccagaaatccctggctggaagctcaggccccggggcctccagtggccccagcggagaccacagcgagctcgttgtccggatcgccagtctggaagtggagaaccagagcctgcgtggcgtggtacaggagctgcagcaggccatctccaagctggaggcccagctgaacgtgctggagaagagctcgcctggccaccgggccacggccccgcagacccagcacgtgtctcctatgcgccaagtggagtccccggccaagaagccagcctcaccagcagaggatgacgaggatgatgacatcgacctgtttggcagcgacaatgaggaggaggacaaggaggcggcacagctgcgggaggagcggctacggcagtacgcggagaaggccaagaagcctgc

SEQ ID NO: 96653 - DNA, 30 bp, Homo sapiens; identical to SEQ ID NO: 32226
  chr19:14181997-14182027
  hypo

SEQ ID NO: 96654 - DNA, 31 bp, Homo sapiens; identical to SEQ ID NO: 12103
  chr19:14205671-14205702
  hypo

SEQ ID NO: 96655 - DNA, 105 bp, Homo sapiens
  chr19:14209030-14209135
  hypo
attccatttatatcatgtccacgcccagacaaaacaaaggcacggtgtttgaagtcagaaaggacaactgcctttggtggggaggtgacgtgtcaagagagggat

SEQ ID NO: 96656 - DNA, 41 bp, Homo sapiens; identical to SEQ ID NO: 32228
  chr19:14225012-14225053
  hypo

SEQ ID NO: 96657 - DNA, 31 bp, Homo sapiens
  chr19:14262993-14263024
  hypo
aaggcaaggatgagctcgaaatgcaagtcca

SEQ ID NO: 96658 - DNA, 470 bp, Homo sapiens
  chr19:14263405-14263875
  hypo
cacatcctccgaattcggctctgggaacacaacccaaatgtgaggggatccttgggccacccaccctctggcgtctttctgagactgctcacctgatcatcacgatcagaaacctaggccaagccactccccacctctcaggctccaggttccaacactcagccccagggagtcctgtctggcccgatacctgggtccctgtgtagtagcgggtgttgcttcgcatggctgaggtcttgagggatccgtgagtgcccccgggtggggagcggatgcagcagtaggagtgacgcaggcacttgctgtactccttgtgcacctgggaggtggaggacagtcagctggctgggacactggcctcctctgtgatccagtctcccacagggctggtcacaagacaggcagccttgggaggccggagaccgagcttccaatgactgtgttcccctgttcagcgacttgcaggccac

SEQ ID NO: 96659 - DNA, 30 bp, Homo sapiens
  chr19:14272327-14272357
  hypo
tggtgaggggtgcccggcggagcggggtgg

SEQ ID NO: 96660 - DNA, 30 bp, Homo sapiens
  chr19:14273661-14273691
  hypo
acacaccatgaaggcgttggatgccgagcg

SEQ ID NO: 96661 - DNA, 31 bp, Homo sapiens; identical to SEQ ID NO: 12105
  chr19:14306908-14306939
  hypo

SEQ ID NO: 96662 - DNA, 49 bp, Homo sapiens; identical to SEQ ID NO: 55751
  chr19:14316560-14316609
  hypo

SEQ ID NO: 96663 - DNA, 34 bp, Homo sapiens
  chr19:14352485-14352519
  hypo
tgaccccaagtgacttgcccgcttcagtctccta

SEQ ID NO: 96664 - DNA, 31 bp, Homo sapiens; identical to SEQ ID NO: 32230
  chr19:14388271-14388302
  hypo

SEQ ID NO: 96665 - DNA, 44 bp, Homo sapiens
  chr19:14447096-14447140
  hypo
tgggattacaggcgtgagccaccgtgcccagcctattctttata

SEQ ID NO: 96666 - DNA, 143 bp, Homo sapiens
  chr19:14509046-14509189
  hypo
ctctagtcagagacacacatgcgcataacatacacacaccacatacagtatgtgcacaaacatacacacccggacacgtgaagacacacgcatgcacacacacacaccaggtataatggcaacagagtgcagcacttaagaac

SEQ ID NO: 96667 - DNA, 30 bp, Homo sapiens; identical to SEQ ID NO: 32232
  chr19:14515259-14515289
  hypo

SEQ ID NO: 96668 - DNA, 30 bp, Homo sapiens; identical to SEQ ID NO: 32233
  chr19:14515594-14515624
  hypo

SEQ ID NO: 96669 - DNA, 31 bp, Homo sapiens; identical to SEQ ID NO: 32234
  chr19:14517833-14517864
  hypo

SEQ ID NO: 96670 - DNA, 30 bp, Homo sapiens
  chr19:14519974-14520004
  hypo
caaagcgacccgcccgggccacctgcaggc

SEQ ID NO: 96671 - DNA, 94 bp, Homo sapiens
  chr19:14522819-14522913
  hypo
tcaggatgtgctctgagataacgagggcacgggcgccaatatgaagcccaaagatgtgcacctggcctgactcgggagcaagacaccagaattc

SEQ ID NO: 96672 - DNA, 31 bp, Homo sapiens; identical to SEQ ID NO: 32235
  chr19:14532655-14532686
  hypo

SEQ ID NO: 96673 - DNA, 374 bp, Homo sapiens
  chr19:14551928-14552302
  hypo
cactgaccctgttctgtcctccgcagagtgagcctcgcagctggtccctgctagagcagctgggcctggccggggcagacctggcggcccccggggtacagcagcagctggagctggagcgggagcggctgcggcgggaaatccgcaaggagctgaagctgaaggagggtgctgagaacctgcggcgggccaccactgacctgggccgcagcctgggccccgtagagctgctgctgcggggctcctcgcgccgcctcgacctgctgcaccagcagctgcaggagctgcacgcccacgtggtgcttcccgacccggcggccacccacggtgagctgggatgcctctggggatgcgggactccagggattccactg

SEQ ID NO: 96674 - DNA, 251 bp, Homo sapiens; identical to SEQ ID NO: 55754
  chr19:14583264-14583515
  hypo

SEQ ID NO: 96675 - DNA, 30 bp, Homo sapiens
  chr19:14589133-14589163
  hypo
tcaggctggaggctcgggtcctgacgtcag

SEQ ID NO: 96676 - DNA, 30 bp, Homo sapiens
  chr19:14593751-14593781
  hypo
ggggcgcctttttccgccgccccagtccca

SEQ ID NO: 96677 - DNA, 30 bp, Homo sapiens
  chr19:14600119-14600149
  hypo
gatgctgggcctaccgcggtagcgtgaggg

SEQ ID NO: 96678 - DNA, 58 bp, Homo sapiens; identical to SEQ ID NO: 55758
  chr19:14607123-14607181
  hypo

SEQ ID NO: 96679 - DNA, 291 bp, Homo sapiens
  chr19:14616945-14617236
  hypo
tgcgggctatgggaagtggctcggtcagtttaatgagttgaatgatgccccaccctaaaatatatgtccacattccagaactgtgaatgtgacttgacttggagtaagtgtcttcaaagatgtaattcagtggaggatctcgagatgagatcatcctggattagggtggctggccccgaaatccaatgatgggtgtccttataagagatggaaaaggagaagacacaaagacacacagaggggagggccacgggacggcagcggcagagattggagcgatgcagctacaag

SEQ ID NO: 96680 - DNA, 82 bp, Homo sapiens
  chr19:14630484-14630566
  hypo
ctgggtccccagtgcctggaacgcagtgagaacctcataaatattccccgttcttacacacgtgcttctttttcttccccaa

SEQ ID NO: 96681 - DNA, 108 bp, Homo sapiens
  chr19:14636953-14637061
  hypo
atccttggaagctgccgcagcttaggccgtctcttgcagtttctcccttggaaattactttaataaaggagctagttaccatcagctcaacaacgacccaacagatct

SEQ ID NO: 96682 - DNA, 47 bp, Homo sapiens
  chr19:14660821-14660868
  hypo
ctttctttcttctttccatgtcgcacgtcacctttgaacatattaca

SEQ ID NO: 96683 - DNA, 445 bp, Homo sapiens
  chr19:14663745-14664190
  hypo
aacgggcgagatcagcgtcgctctgggtgggccagtgctcctcggaggccctgagggcacaaccgcagggatgggtgtaggctgtgggtaccactgagaatggggggcaggcccagggctgagacccaggttctccaacttcccactgtgtttgtcttgtgccatattcatcctctatgaatggctgtggctgctcgcccaagccaggagctcgtgcgtccgatgaccatcttccaaggctggattgctacctgctcgctcggggctctgctggatgggaacagcagctccagcttctccgggtcccgggctaccgctgcctctgcacctggccctggcctcggatccgagagcccagagacattggcattgagaccctggcacctctcgtcttgccagcacaggtagaagacaggagcagagcggtccagggacctgggagtgg

SEQ ID NO: 96684 - DNA, 391 bp, Homo sapiens
  chr19:14664451-14664842
  hypo
ccgagagggctgagccgctgagccggagtccagatgaatgtgccggagtctctgcatttgtgatgggggcgaggtgatgggggcgaggtggccggcgtggctctgggcatgatcgggccaggcctccgacctctatgctgggcattggctggacagggagctcaggcgatgagtgcagcagcgcttgtgcccggcgcggggatggtgagtgcctggctggccagctgcaggacctgtcaggccctttgtgtctttacctggggccctggttgcactgaccagggctcgcacccccagccaggcctcttgtgccccagactcgggagatgcttcctaccaggaagtgcagtcccctgcggggtccgagagagcctgccggagctttgagctc

SEQ ID NO: 96685 - DNA, 30 bp, Homo sapiens
  chr19:14676446-14676476
  hypo
tttcgccatcatgacgcagtgtctcccagg

SEQ ID NO: 96686 - DNA, 142 bp, Homo sapiens
  chr19:14815853-14815995
  hypo
gtcttttgccaggggccggggctgttcctgaggatgcagctggtgccctccatagaagagagggagacaccattgactcgagaggaccggccagctctccaggagccgccttggtctctgggatgcacggtaagcctgggag

SEQ ID NO: 96687 - DNA, 208 bp, Homo sapiens; identical to SEQ ID NO: 32240
  chr19:14863014-14863222
  hypo

SEQ ID NO: 96688 - DNA, 198 bp, Homo sapiens; identical to SEQ ID NO: 12113
  chr19:14887409-14887607
  hypo

SEQ ID NO: 96689 - DNA, 97 bp, Homo sapiens
  chr19:14912988-14913085
  hypo
agttcctggtgctgaagatagcggaaatgtatggcaatgttctgttttaatatgtccaatgggccgggcgtggtggctcacgcctgtaatcccagca

SEQ ID NO: 96690 - DNA, 86 bp, Homo sapiens
  chr19:15033673-15033759
  hypo
agaccagaaccagaactagagcgtgcccgtgggattgtaaataaagagatcaaaatccaaaacccccaaaaaaatagcaaagaata

SEQ ID NO: 96691 - DNA, 44 bp, Homo sapiens
  chr19:15044830-15044874
  hypo
atgaggattaaattggctgggcgcggtggctcacgcctgtaatc

SEQ ID NO: 96692 - DNA, 30 bp, Homo sapiens
  chr19:15052132-15052162
  hypo
taactgtaacttgtcggcaaagaaatccaa

SEQ ID NO: 96693 - DNA, 28 bp, Homo sapiens
  chr19:15056944-15056972
  hypo
tttgcttttttttttttgagacggactt

SEQ ID NO: 96694 - DNA, 28 bp, Homo sapiens
  chr19:15057211-15057239
  hypo
ctgggattataggcgtgagccaccaagc

SEQ ID NO: 96695 - DNA, 387 bp, Homo sapiens
  chr19:15073002-15073389
  hypo
tcctgcagggtacccaaggcccgagtgacattttccaggaagctggttccgttctccactgagaatggaggaggcatggaggcacccggctcagacccgttctctgtcctcaccatggtcctggttaccaccctcgtgctgtactgcgtcttgaactgaaatagagagagattgcgcccagattcaattcagcggatgcattagaatcgcctggagaaattccttgagaccactgattcccagttcccacaccctggaagatcgataagatcttcattatcgattatcactcattatcgactatcactcattcagcagatctgaatgagtgaatgaatgacttgaatagtgcatggaagaatgagcgaatgaatcagtaaacccatt

SEQ ID NO: 96696 - DNA, 563 bp, Homo sapiens; identical to SEQ ID NO: 55763
  chr19:15089970-15090533
  hypo

SEQ ID NO: 96697 - DNA, 276 bp, Homo sapiens; identical to SEQ ID NO: 55764
  chr19:15090813-15091089
  hypo

SEQ ID NO: 96698 - DNA, 30 bp, Homo sapiens
  chr19:15220998-15221028
  hypo
actgcgaggggggccggacttcctgcggct

SEQ ID NO: 96699 - DNA, 31 bp, Homo sapiens
  chr19:15221469-15221500
  hypo
agcgggagcggccccccggccaggtgcccct

SEQ ID NO: 96700 - DNA, 160 bp, Homo sapiens
  chr19:15224769-15224929
  hypo
tctgagccagatgacggggtgggaccccggttagtaaggaccgggcgcccagtggctaaggcggtgccctggtgaccaaggagagccagacctgttgctcaggccgagctcctggttgccagcgagttaccacgggaccagtcgcgtgtatggctgagac

SEQ ID NO: 96701 - DNA, 30 bp, Homo sapiens
  chr19:15233783-15233813
  hypo
acttacagagtggccggaaaagggacagct

SEQ ID NO: 96702 - DNA, 210 bp, Homo sapiens; identical to SEQ ID NO: 55767
  chr19:15235758-15235968
  hypo

SEQ ID NO: 96703 - DNA, 418 bp, Homo sapiens; identical to SEQ ID NO: 32245
  chr19:15251999-15252417
  hypo

SEQ ID NO: 96704 - DNA, 42 bp, Homo sapiens
  chr19:15252899-15252941
  hypo
agagtgattaataagggtctgcgatgcatcaggtagcagtgt

SEQ ID NO: 96705 - DNA, 72 bp, Homo sapiens
  chr19:15276697-15276769
  hypo
ttggctgcatcagcacgggcataacgggcagccaggtgcaaagcagtctcgccagtacggtcagtccgtgcc

SEQ ID NO: 96706 - DNA, 30 bp, Homo sapiens; identical to SEQ ID NO: 32246
  chr19:15281185-15281215
  hypo

SEQ ID NO: 96707 - DNA, 233 bp, Homo sapiens
  chr19:15281502-15281735
  hypo
acgggaagtccaggcgctccaccgctgacaacgctcccaggtagtcagcggcgctctgggcatcggggaagcagtgatcattctcaggcgactgcaggcagagccggttgtcaatctccagcattactaccgagctgcagggacagcagggagggaccagagggctcaaaaattgcccgatgcaccccctggtaccaagccccactttccctccccagcgcctggctctgaag

SEQ ID NO: 96708 - DNA, 168 bp, Homo sapiens
  chr19:15284955-15285123
  hypo
ggcctggccgtgcgcgtccaggcggaagcgcagcgaggtgcgcaggatggcgctgagccgctgcagaaagtcggcgctggaacgcagtagctcctctggcggcagcagcactgtgagcaccagcacgccgcgggccagcagggccggcacctcgctggcacaatccag

SEQ ID NO: 96709 - DNA, 573 bp, Homo sapiens; identical to SEQ ID NO: 12117
  chr19:15288254-15288827
  hypo

SEQ ID NO: 96710 - DNA, 30 bp, Homo sapiens
  chr19:15289891-15289921
  hypo
tcccgggtgtgtgccgcgtggcaggcacct

SEQ ID NO: 96711 - DNA, 294 bp, Homo sapiens; identical to SEQ ID NO: 32248
  chr19:15292358-15292652
  hypo

SEQ ID NO: 96712 - DNA, 30 bp, Homo sapiens
  chr19:15298063-15298093
  hypo
ggcgatgccatccacgcagcgaccatggtg

SEQ ID NO: 96713 - DNA, 31 bp, Homo sapiens
  chr19:15300298-15300329
  hypo
accccttgagtattgttttgtcgttgttgtt

SEQ ID NO: 96714 - DNA, 30 bp, Homo sapiens
  chr19:15302529-15302559
  hypo
ccgctccctctggccgcagtgcccacctgt

SEQ ID NO: 96715 - DNA, 31 bp, Homo sapiens
  chr19:15337909-15337940
  hypo
agcgactttggcaaagcgcagagtgaggccc

SEQ ID NO: 96716 - DNA, 706 bp, Homo sapiens; identical to SEQ ID NO: 12121
  chr19:15342706-15343412
  hypo

SEQ ID NO: 96717 - DNA, 30 bp, Homo sapiens
  chr19:15348788-15348818
  hypo
catcacgaacgtcacgttcttggggacaga

SEQ ID NO: 96718 - DNA, 189 bp, Homo sapiens; identical to SEQ ID NO: 32250
  chr19:15352348-15352537
  hypo

SEQ ID NO: 96719 - DNA, 30 bp, Homo sapiens; identical to SEQ ID NO: 32251
  chr19:15352957-15352987
  hypo

SEQ ID NO: 96720 - DNA, 150 bp, Homo sapiens
  chr19:15360267-15360417
  hypo
cctgggtagggacagacccaccgcccgcttagaaaggtcacagaggcagaatgcatggatgccttggaaaccgcccccagcctgctcagcttctagagagtggccctggttcccactagcaagctccacgtgtgccctgcctgagcgcac

SEQ ID NO: 96721 - DNA, 397 bp, Homo sapiens; identical to SEQ ID NO: 32252
  chr19:15375240-15375637
  hypo

SEQ ID NO: 96722 - DNA, 129 bp, Homo sapiens
  chr19:15401108-15401237
  hypo
ccatttcaattctcttcaagacgcagcactgacttagaatggaatttttgatgcgcctccactaatcctgttacgttagaaaacagaaatagaatttgttcccttggcgttcactggttgccatagaaa

SEQ ID NO: 96723 - DNA, 142 bp, Homo sapiens
  chr19:15421597-15421739
  hypo
gcctggccttaaacagtcctttaggcagtcctgaaagacacctggctgcaccactgtttgaaccatctcccgtacctttgtgcctactcttcaccgatgcccaatatccatccccaaaatcagtttccgtgtggaggcagga

SEQ ID NO: 96724 - DNA, 106 bp, Homo sapiens
  chr19:15422153-15422259
  hypo
catgttcactgctgtattattcacaacagccaagaggtggaagcaacccaactccatcaacaaaggagtggaattctgacatgctacaacacggatggacctggag

SEQ ID NO: 96725 - DNA, 123 bp, Homo sapiens
  chr19:15427087-15427210
  hypo
cttacttccccccaaccatcccgcttctatattcccagacttgctctgagtagcaaaaggataaatggaagtgaaggcccggagcggtggatcacctgagatcaggagttcgagaccagcctg

SEQ ID NO: 96726 - DNA, 30 bp, Homo sapiens; identical to SEQ ID NO: 55773
  chr19:15479820-15479850
  hypo

SEQ ID NO: 96727 - DNA, 31 bp, Homo sapiens; identical to SEQ ID NO: 32254
  chr19:15484900-15484931
  hypo

SEQ ID NO: 96728 - DNA, 30 bp, Homo sapiens
  chr19:15487976-15488006
  hypo
caactggctaatggcgtcatcgcattccac

SEQ ID NO: 96729 - DNA, 18 bp, Homo sapiens
  chr19:15493025-15493043
  hypo
tttttttttttaagacag

SEQ ID NO: 96730 - DNA, 23 bp, Homo sapiens
  chr19:15505812-15505835
  hypo
atattttgctatcacctctcccg

SEQ ID NO: 96731 - DNA, 121 bp, Homo sapiens; identical to SEQ ID NO: 32255
  chr19:15506074-15506195
  hypo

SEQ ID NO: 96732 - DNA, 30 bp, Homo sapiens
  chr19:15512029-15512059
  hypo
accaaagcgggagccgcccgggaaggcgcc

SEQ ID NO: 96733 - DNA, 141 bp, Homo sapiens
  chr19:15531275-15531416
  hypo
ccaaggcagggccccaggacacgtcttctgcgccctgcaggttcgttccttcatcgcacttgccacagtcatcattgtaccgatttgatttcgttcacatccaacaccctcagagaccacggctcaaaagctgagactttg

SEQ ID NO: 96734 - DNA, 341 bp, Homo sapiens; identical to SEQ ID NO: 32256
  chr19:15538868-15539209
  hypo

SEQ ID NO: 96735 - DNA, 30 bp, Homo sapiens; identical to SEQ ID NO: 32257
  chr19:15547836-15547866
  hypo

SEQ ID NO: 96736 - DNA, 30 bp, Homo sapiens
  chr19:15550835-15550865
  hypo
gtagatgctgcactcgatgcatgggaacac

SEQ ID NO: 96737 - DNA, 30 bp, Homo sapiens
  chr19:15630865-15630895
  hypo
aaagtctcagcccggcgtggtggctcaagc

SEQ ID NO: 96738 - DNA, 512 bp, Homo sapiens; identical to SEQ ID NO: 12122
  chr19:15695277-15695789
  hypo

SEQ ID NO: 96739 - DNA, 30 bp, Homo sapiens; identical to SEQ ID NO: 32259
  chr19:15917817-15917847
  hypo

SEQ ID NO: 96740 - DNA, 30 bp, Homo sapiens
  chr19:15932929-15932959
  hypo
ggtttgcgtccaaggcgatctctgatgtgc

SEQ ID NO: 96741 - DNA, 78 bp, Homo sapiens
  chr19:15937636-15937714
  hypo
gatgctttttcaagagtcgccttaacatgaagtcactgtgtgagggtttcggctctcgagtcaagataattcacttac

SEQ ID NO: 96742 - DNA, 188 bp, Homo sapiens; identical to SEQ ID NO: 32260
  chr19:16025605-16025793
  hypo

SEQ ID NO: 96743 - DNA, 54 bp, Homo sapiens
  chr19:16147949-16148003
  hypo
tgtcttgagctagggacggcctggccacaccctgagccccggaggttcccagag

SEQ ID NO: 96744 - DNA, 826 bp, Homo sapiens; identical to SEQ ID NO: 55780
  chr19:16186793-16187619
  hypo

SEQ ID NO: 96745 - DNA, 655 bp, Homo sapiens; identical to SEQ ID NO: 55781
  chr19:16187640-16188295
  hypo

SEQ ID NO: 96746 - DNA, 44 bp, Homo sapiens
  chr19:16218035-16218079
  hypo
tacaggcatgagccaccgcgcccggccctcaagagctatttaga

SEQ ID NO: 96747 - DNA, 39 bp, Homo sapiens
  chr19:16221418-16221457
  hypo
ttgcagtggggcgatcacggcttactgcaccctcaacct

SEQ ID NO: 96748 - DNA, 82 bp, Homo sapiens; identical to SEQ ID NO: 55783
  chr19:16222616-16222698
  hypo

SEQ ID NO: 96749 - DNA, 31 bp, Homo sapiens; identical to SEQ ID NO: 32264
  chr19:16228440-16228471
  hypo

SEQ ID NO: 96750 - DNA, 917 bp, Homo sapiens; identical to SEQ ID NO: 32265
  chr19:16232438-16233355
  hypo

SEQ ID NO: 96751 - DNA, 95 bp, Homo sapiens; identical to SEQ ID NO: 32266
  chr19:16235971-16236066
  hypo

SEQ ID NO: 96752 - DNA, 619 bp, Homo sapiens
  chr19:16238411-16239030
  hypo
ctctgccccaggggcctgagacgagttggtcaccccagtggggcacgtgccatgggatgacagaagcacacacccagccggggcttcttgggtgcactctgcgggcatctcatcaaaacctaccatggccccgctccagactttcaagaccacaggagcggggaacagagccatagtttgatcccagcaggtccccgccaccctcccatctcagctgccatccccagcaactccatgccctgtgaggccctgtggaggggcattcactatagaattgagggagtgatccaggaagtcacgcccacagccccagccctgttgctgctccctcttggcgccggccctgccttcagctcctgttttaggcaagctcagatgcgcccggcggctggtgtgctcatgcgtgtgcctccctctctcacagctggccctcgactatggaatcaagttcatggagaccagcgcgaaggccaacatcaatgtggaaaatgtgagtcccgggccctgctgggagacatggggcctgcaggatcggccccttcaggctaaagggggagctggcgtcctccgaggaggtcctgccagacggaccagcctcgggctcagggctgccagtcag

SEQ ID NO: 96753 - DNA, 240 bp, Homo sapiens
  chr19:16243046-16243286
  hypo
accagggagtcaaaatcacaccggaccagcagaagaggagcagctttttccgatgtgttcttctgtgaggaacaccgccttactctgagcctcgctcagcccagctgactgtgcctgttctgagtgagcccctcactcagccggggccctcccacctccaacgccccgcccacgccgcggccaccgggcccacggccaccagaatgcaattgagaaatcgtttattttagtaactgtctg

SEQ ID NO: 96754 - DNA, 171 bp, Homo sapiens; identical to SEQ ID NO: 32268
  chr19:16320830-16321001
  hypo

SEQ ID NO: 96755 - DNA, 163 bp, Homo sapiens
  chr19:16328980-16329143
  hypo
gggtagccccgctccatagggagcagtgcctctgctgccgtgcacatggctgctttagtaaaagttctgtttatcaccaccagctcgcccttgagttctttcctggctgaaaccaagaaccctcccgggctgtctcagttttggggctcgcctgccctgcatc

SEQ ID NO: 96756 - DNA, 470 bp, Homo sapiens
  chr19:16337581-16338051
  hypo
gtcacccggcctcacacgccaggtcctgcaccctgccctgctctgcctggggcactggggcctaggctaaggccttgctctctccctcccaggccaggtttctcccctcaccttgggccctaggtgtgggccgtgtgaaggccacgcatggtgattctcgctcccgccgcctggcctctaacacttcccacagcagggcgggggcagaggggcccagggcctggttttgtgaactgtgcctcccactcagctgtcacaggccactggaagagggtgcagtggctgggcatgcccccgttcctagcccggtgagggcttctcgggcatcagtctatcagggcagctccccgcctggggctgggcagggccccacccacatagccctcagtgaggtggcaaaccaaggtaggacccaggaccccgtggatgccagggcctgagcccttggggagccccgagccatcccccag

SEQ ID NO: 96757 - DNA, 53 bp, Homo sapiens; identical to SEQ ID NO: 32271
  chr19:16343121-16343174
  hypo

SEQ ID NO: 96758 - DNA, 43 bp, Homo sapiens
  chr19:16469772-16469815
  hypo
ccagagagggaagaggtttcccgggaacagccacacacgcaaa

SEQ ID NO: 96759 - DNA, 201 bp, Homo sapiens
  chr19:16472525-16472726
  hypo
aaatcccagggaagctgcaagcggaagggagtggggtggcccggaggcggaggactcaacttacagaggtgaagtctgcaaagcccgaggcagaggccttagaaggtttagctgcagaggaggggacaaatgggtcttttccactaaacgggtccccaaacccctttttactttggaacgggtcgccgctgtcagccccga

SEQ ID NO: 96760 - DNA, 133 bp, Homo sapiens; identical to SEQ ID NO: 32272
  chr19:16485581-16485714
  hypo

SEQ ID NO: 96761 - DNA, 30 bp, Homo sapiens
  chr19:16494484-16494514
  hypo
tgggatctgctgcgccgccagggcacgcac

SEQ ID NO: 96762 - DNA, 31 bp, Homo sapiens; identical to SEQ ID NO: 32273
  chr19:16495005-16495036
  hypo

SEQ ID NO: 96763 - DNA, 264 bp, Homo sapiens
  chr19:16512163-16512427
  hypo
aagtgtggtgtttagagagcacgagcgctcactcttattccagggaggaagaggaatccatgacgtacagaggcccaggagcagaagggctccagggaggagccctgggagagagggtggcagcacggagagagctgctggaggcagcagagcaccaaggaaacatccagacatgcgcggcccggcccatccgctcccggaacagcaccaagacgaaatgggaaactacatgtccccaggttcgaggctgcaggggcagactct

SEQ ID NO: 96764 - DNA, 55 bp, Homo sapiens; identical to SEQ ID NO: 32275
  chr19:16513150-16513205
  hypo

SEQ ID NO: 96765 - DNA, 102 bp, Homo sapiens
  chr19:16528387-16528489
  hypo
tgatgtcatcaagctccttcacgccagtaaactccccggagccgagagagcctgaactgtcctagaattgaattcagaggcgagatctctaattagcaacct

SEQ ID NO: 96766 - DNA, 36 bp, Homo sapiens; identical to SEQ ID NO: 32276
  chr19:16550466-16550502
  hypo

SEQ ID NO: 96767 - DNA, 31 bp, Homo sapiens
  chr19:16590107-16590138
  hypo
taagccccaccgggtgcgatggctcgtgcct

SEQ ID NO: 96768 - DNA, 26 bp, Homo sapiens
  chr19:16608170-16608196
  hypo
tttttttttgagacagattctcgctc

SEQ ID NO: 96769 - DNA, 85 bp, Homo sapiens; identical to SEQ ID NO: 32278
  chr19:16608435-16608520
  hypo

SEQ ID NO: 96770 - DNA, 75 bp, Homo sapiens
  chr19:16620060-16620135
  hypo
gttaaatgccatccacgtgccacctaagcatgcgtcacaccatcaggattcctgcagccccgtggacatgccgta

SEQ ID NO: 96771 - DNA, 531 bp, Homo sapiens
  chr19:16620367-16620898
  hypo
ctgggcaggatgccccgaggcaggcccaggcgaggagctgggcatcacagggaaaggccgcctctgcagagggggatgagagcgaggtctcggagcatctcagtgccagctcggcttctgccatccagcaggacagcacttccagcatgcagccaccatctgaagcccccatggtgaacacagtcagctcagcttattcggaggattttgaaaactctccaagtctgacagcatctgagccaaccgcccattccaaggagtctcttgacagaacactggacgctttgtctgaatcctcttcaagtgtgaagacagaccttccacaaacagccgagtctaggaaaaagtcgggcaggcacgtgacaagagtgcttgtgaaggacacagctgtgcagacgccagatcctgccttcacctacgagtggaccaagggtaagccttggggcccgtgggggccggggcagccgggacaggagctcagcgtgtggtttacagcatcctgggagacacgtgggagagctcaggttcctg

SEQ ID NO: 96772 - DNA, 44 bp, Homo sapiens; identical to SEQ ID NO: 32280
  chr19:16631182-16631226
  hypo

SEQ ID NO: 96773 - DNA, 30 bp, Homo sapiens
  chr19:16636621-16636651
  hypo
tacgctgacgcctgcgaggatgctgggcac

SEQ ID NO: 96774 - DNA, 31 bp, Homo sapiens; identical to SEQ ID NO: 12128
  chr19:16638140-16638171
  hypo

SEQ ID NO: 96775 - DNA, 150 bp, Homo sapiens
  chr19:16638586-16638736
  hypo
aaacagaacaccctgccgtgccttgcagcgttaaactcccctgcactcgcaggacaatggtgatctatactacagagaagcccaaaccatcaaagctcggggaagggacgtgaagacctgtcacttgacctgtcccggagccacaggaag

SEQ ID NO: 96776 - DNA, 30 bp, Homo sapiens
  chr19:16640948-16640978
  hypo
cgagcaacgacagccgtgtcctggccgctt

SEQ ID NO: 96777 - DNA, 188 bp, Homo sapiens
  chr19:16643384-16643572
  hypo
tgggcacggggtggcggcgctcaccagtggtgcagcacgtcattgatcaggtagatgaggtgcagccgcagctcgaagtgtgccccatcagccgtgatgcggttccggaggtggccggccatcagctcacagtgcggcggggacttggcattgctgaacatccagttcttcccggcctgcaacaaccg

SEQ ID NO: 96778 - DNA, 30 bp, Homo sapiens
  chr19:16646886-16646916
  hypo
gatgtcacagccaccgggcctctgcacatc

SEQ ID NO: 96779 - DNA, 127 bp, Homo sapiens
  chr19:16662011-16662138
  hypo
gggattgactcttcacgttttacacagcaattgtctcagcttgggaccaaagtatttacaaagcaagcgaacaagagacgaagcaagagggacacttctgaggccggtggtgcggaaactcaccgcc

SEQ ID NO: 96780 - DNA, 25 bp, Homo sapiens
  chr19:16679842-16679867
  hypo
ttttttttttttgagacggagtctc

SEQ ID NO: 96781 - DNA, 84 bp, Homo sapiens; identical to SEQ ID NO: 32282
  chr19:16680106-16680190
  hypo

SEQ ID NO: 96782 - DNA, 391 bp, Homo sapiens
  chr19:16680656-16681047
  hypo
aaaaacaaacactcttaaggagagataggagaggtggagattttaggagggagtggtcatgccacaaggagggcagaccgagggctgtggacctgaattccagcttcccgaatatcaggctgtggccctcaggcacatgattctcccctctcagtccatctcaggaaaacctgagatcaggaatgatgactactggccttatctgccttgcagggcaggttcctagaagttatgatgtcattataattagtctggctgcctaaccgggccaattcccagtctttcctcactgtgtgaagttccggctccttgcccaagctgggtacaatgtcccgtacaacggggaaacctgatacacacgatgatatccggtgatgcagctacacacctc

SEQ ID NO: 96783 - DNA, 59 bp, Homo sapiens
  chr19:16681527-16681586
  hypo
tttgctggattttgccaagatcgaactccttggatcgcgtctggcttctgatcccagag

SEQ ID NO: 96784 - DNA, 31 bp, Homo sapiens
  chr19:16715769-16715800
  hypo
acctacctgcagtactcgacagcacccacca

SEQ ID NO: 96785 - DNA, 118 bp, Homo sapiens
  chr19:16735188-16735306
  hypo
aaagaaagcagctcccaaggacgtttcccgctcagagcctggcagctggaggcactgacacacgcggccagggctagttcaagtccctctttgctgcgggaccttctcaggcctctcc

SEQ ID NO: 96786 - DNA, 221 bp, Homo sapiens
  chr19:16735747-16735968
  hypo
tcatacctccacagaacgagtgtcccaggcagatgggaaccgaatcacctgctgaggagactgctcactatgactgctgtgcgagagtaagacacagtccttcactttacccacaatgcagtgagagtaagctggaacaatcatgcacacactgcgcttcggagagattttcaacaccctgggctgaaagggtgcacgacgaaaagaaaagctccaactgc

SEQ ID NO: 96787 - DNA, 30 bp, Homo sapiens
  chr19:16736432-16736462
  hypo
gaggagagagcggcacgccggcagcacctg

SEQ ID NO: 96788 - DNA, 130 bp, Homo sapiens; identical to SEQ ID NO: 32285
  chr19:16756121-16756251
  hypo

SEQ ID NO: 96789 - DNA, 141 bp, Homo sapiens
  chr19:16757896-16758037
  hypo
ccatgcacacctcggcgaacacttttccacccaccacgagcttggactttctgggaaggttgtcggttttctggtcaaaaacattcttgaagtcatcaggaatggaggaatggagactcggcatcccgggaaagtgagttc

SEQ ID NO: 96790 - DNA, 201 bp, Homo sapiens
  chr19:16763516-16763717
  hypo
gccactggggtggcacgcagactggacagcaaccccacattcggagtctcaatcactcaggacagacaactttttgtcctctctctttctgggggaagcatacagggatggacccacagaggccaagaacaccagattctcccgtcgtgtcttttcctaaatccatttacagcaaatctcacaattcgttaacagtagtat

SEQ ID NO: 96791 - DNA, 112 bp, Homo sapiens
  chr19:16763931-16764043
  hypo
ccatgggctcagggacggcatctcctggcagcccctgcagaggtgccgggcatagccgggggctggagaactccatgttccaataaaagttccagcccggtttggtggggac

SEQ ID NO: 96792 - DNA, 210 bp, Homo sapiens; identical to SEQ ID NO: 32286
  chr19:16766707-16766917
  hypo

SEQ ID NO: 96793 - DNA, 30 bp, Homo sapiens
  chr19:16767425-16767455
  hypo
ccagccgggtgccgtcgctcaagtctgtaa

SEQ ID NO: 96794 - DNA, 141 bp, Homo sapiens
  chr19:16781234-16781375
  hypo
gctaccgtgcccagccgaggcagagctgatttttaaaaaatccatctactgaaatttccacccacaggtactttccatttccgcactgttccagaaatacctcttgcgtcgttgctaggcgctaagcaatctctttttcac

SEQ ID NO: 96795 - DNA, 30 bp, Homo sapiens; identical to SEQ ID NO: 55792
  chr19:16830271-16830301
  hypo

SEQ ID NO: 96796 - DNA, 98 bp, Homo sapiens
  chr19:16835421-16835519
  hypo
gctcaggtgggaggatcgtttgttggcaggagcctgccaagttccagccttgaactcaacccagtgagaccccatttctacaaaaaaaatattttttt

SEQ ID NO: 96797 - DNA, 30 bp, Homo sapiens
  chr19:16918653-16918683
  hypo
ccctgcccggtcatcgatgggccaagatac

SEQ ID NO: 96798 - DNA, 30 bp, Homo sapiens
  chr19:16989069-16989099
  hypo
aagcggctggtgggcgtggagagcgcctgc

SEQ ID NO: 96799 - DNA, 30 bp, Homo sapiens; identical to SEQ ID NO: 32287
  chr19:16989666-16989696
  hypo

SEQ ID NO: 96800 - DNA, 18 bp, Homo sapiens
  chr19:17048895-17048913
  hypo
cagcctaaccttcttgct

SEQ ID NO: 96801 - DNA, 190 bp, Homo sapiens; identical to SEQ ID NO: 55798
  chr19:17137168-17137358
  hypo

SEQ ID NO: 96802 - DNA, 428 bp, Homo sapiens
  chr19:17160622-17161050
  hypo
aatagctacagtgctacggtagtatataaagtgctcaagtatcctgaatgtaaccatgagtcatgacaagtccctccctgaacgagagagagagggcgggacttctgcctggctgcttgaagaaaaatcttcgcttgggctgatgaacgtggcctgagcgggggctgacgaggcacccgggttgtcgtcctcagacaggggcgtgttcttgggtgctcccccagattctctgcaggcactgtcttgattgaaataccaccggctggggggcgccatgccctgggtctcttcccagacttcctggtttgccaaggctgcctctttgcttgcctctgcggagagttccagcacctgggcaaagctcctgttgaggatgggagaaagaataacggctttcaccctctgaggtgaagcgcatgtgtgtggtg

SEQ ID NO: 96803 - DNA, 31 bp, Homo sapiens; identical to SEQ ID NO: 32289
  chr19:17161932-17161963
  hypo

SEQ ID NO: 96804 - DNA, 393 bp, Homo sapiens
  chr19:17172562-17172955
  hypo
cagacactgcctaagcgttccctgggggtcagaatcgcccttgagtaagaactggttttaaggtgtggcaggcccagtctgatcccctggccacaccagcattcccagcttcatgcatggccttcaacccaattagatggggaaagactagcaggctggctctagtgtgcctgcttctcaaccacgcctgggaagggcatagcgcgaattctcacaaacatctacaccaggagtggcaaattgtagctcataggccaaatccagcccgcttcctttgcttgtaaatagttttattggcacacagctatacctgttcctctatgtctggtctggggttgtttttaatgttacaaacagcagagctgagtcttcttgttgatgttgttgagacgg

SEQ ID NO: 96805 - DNA, 138 bp, Homo sapiens
  chr19:17220149-17220287
  hypo
caagcatgagccactgcgcccggccatcattttctaataagaggaataagacctcaggcccactgggtatcagggtttgggcttcgtgattttcctccatcatctctaatccctcacggcagctctgcccattttaaa

SEQ ID NO: 96806 - DNA, 343 bp, Homo sapiens; identical to SEQ ID NO: 32292
  chr19:17240192-17240535
  hypo

SEQ ID NO: 96807 - DNA, 121 bp, Homo sapiens
  chr19:17255381-17255502
  hypo
gggtgacattgtgtgaccctgtctcaaacaaaaaaaaaaagagtgaaagaaaatgggctactctctgcttactgggtagccctactttgcaggaacagttaaagaaaaaataagagaccag

SEQ ID NO: 96808 - DNA, 304 bp, Homo sapiens
  chr19:17264699-17265003
  hypo
atgttagtagtggttcgcagagtagctattacttggcctccaaaaacaactattttcctcccaattttgacctgtaggaactaccatgtgttttattatttgttacttggggtcagcgaggaagagcgccaagaatttcagctcaagcagcctgaagattatttctacctcaaccaggtaaacagcctcaagcccgagccacaaacgccacctctgttcccggcctcaagctgtttatgtatagccgggaagtcagaggcagcctgccctggcccccgaacccgctcccagaaggcagcattaa

SEQ ID NO: 96809 - DNA, 30 bp, Homo sapiens
  chr19:17279594-17279624
  hypo
agagacaggattggcgagttgttacaaagg

SEQ ID NO: 96810 - DNA, 161 bp, Homo sapiens
  chr19:17283463-17283624
  hypo
gggccccaccccaccgtcagcccttcctgcgccagcccggggtctttggtaggcgccggtgagtgactatccccgagtgaccgcccacatccatcccccaccaggacttccgggagaagaacatggactacatgcggccagacatcgtggccctgctgcgg

SEQ ID NO: 96811 - DNA, 148 bp, Homo sapiens
  chr19:17303674-17303822
  hypo
cagatgaagcgggccgccgtcaccatccaggcctgctggcggtcctaccgggtccggagggcgctggagaggacgcaggctgccgtgtacctccaggcctcatggaggggctactggcagcggaagctctaccggcaccagaaacaga

SEQ ID NO: 96812 - DNA, 151 bp, Homo sapiens
  chr19:17312744-17312895
  hypo
tccgttcccagaagacgcccattgagagcttgtttatcgaagccaccgagaagttcaggagcaacatcaaaacgatgtactctgtcccggtatgtggcggcccggccttcagcctttcccataccctgctcagacccgtcattcccatccg

SEQ ID NO: 96813 - DNA, 30 bp, Homo sapiens
  chr19:17323275-17323305
  hypo
aggcagggagaggccggctggagccaggcc

SEQ ID NO: 96814 - DNA, 31 bp, Homo sapiens; identical to SEQ ID NO: 32294
  chr19:17335975-17336006
  hypo

SEQ ID NO: 96815 - DNA, 30 bp, Homo sapiens; identical to SEQ ID NO: 32295
  chr19:17336185-17336215
  hypo

SEQ ID NO: 96816 - DNA, 30 bp, Homo sapiens
  chr19:17343130-17343160
  hypo
ctggccacagcacacgtggccccgtcatgg

SEQ ID NO: 96817 - DNA, 99 bp, Homo sapiens; identical to SEQ ID NO: 12135
  chr19:17355756-17355855
  hypo

SEQ ID NO: 96818 - DNA, 27 bp, Homo sapiens
  chr19:17365791-17365818
  hypo
gagctgcattaaggacaggtgcggcga

SEQ ID NO: 96819 - DNA, 57 bp, Homo sapiens
  chr19:17369110-17369167
  hypo
tcactcatgggggcttcgtctcctgctcctgagtcggcctcccgcagagcaagcaga

SEQ ID NO: 96820 - DNA, 30 bp, Homo sapiens; identical to SEQ ID NO: 55801
  chr19:17389688-17389718
  hypo

SEQ ID NO: 96821 - DNA, 377 bp, Homo sapiens; identical to SEQ ID NO: 55802
  chr19:17392549-17392926
  hypo

SEQ ID NO: 96822 - DNA, 178 bp, Homo sapiens
  chr19:17404643-17404821
  hypo
tggcgtgaaccacctcgccgggctagtatccagggctattctaagtgctaaggatccccagaccctttctaatctgaactcgctaattagagtttctaatctaaagatcccctggtgccggtcttctagaattatataggtcaccggtctcatacaaatcctccgctgtgaggagagc

SEQ ID NO: 96823 - DNA, 651 bp, Homo sapiens
  chr19:17405066-17405717
  hypo
agctgtggcgccccaggtgcccgcctctacctcggccatgcgctggtcttcctccaccggcacaaacttatcgtgcatgccgtggacaagcaggacgggcacggtgagctcggcgtggtagacctcgtcgccctcgggccagtactggccgctcatcatggcccggagtacgaaggatgacacgttgaaagcgttgccctcctttaacagctgcttctccttggctccttggcgggcgaagccggccctggtggtggtggaggcaccgctagagccccttatgccagcccgactgccgtggggtgcccccgatgccagccctagtcccagcggtacagtcccccctcccatccaactcgagcagatgcctgggttcgccagggccaggatcacggtctttggggtggggacactcacttgaggaagctccaggccaggcagggcgacaagcagtgcaggacgcaggtgggcatgttgaagattgagcagaagctgggctccagcgccgtagggcccccgccattgatcatgatcaccttgtgcactaggtctgggtactcatgtgccaggaatgtgcagaaagagacactgcccggaacgggtggggtgataggaggattgaagggaggcggtcagcaggatacaagcagt

SEQ ID NO: 96824 - DNA, 508 bp, Homo sapiens
  chr19:17411812-17412320
  hypo
cctcatagcctaggcgcacaaagaagtccagctgctccttccagatggccagggaaccgccgacaccatggatgaaaaagagcaccacgtcggcctgggcgcctttgcagctagtgatgcgcttctcacagtcaatatggatggtcctcttggggcgcctggctcgccgccgccgcccaccactgccactgccgctgccgctgcctgcgctgccgggggccaagcggccatcgctgcccgccggatctgccagctccacctccagggcggccggcggctccccagagccattctgcccgtgtaggaggtcggctcgaggggctcggcccaggttttccaccagcaaccgcccattgcggtacacggtgatccggcgctgacagcggaccaagccggagaggtccccctgggctgcatccgaggatgcggatgatggtggaggtggggcagcggctggggcgggtcctgcatgcttcacccgcagcacgcggccgggcttgacctctac

SEQ ID NO: 96825 - DNA, 141 bp, Homo sapiens
  chr19:17415103-17415244
  hypo
ccctttgctgatgtgtgacctcgggcaagttacttcactttcctgagcctccgtttatttctctatgaaattaatcctctcataagtttgctacgcaggtaaagcactcatcatagtgtcgtgcatataacaaatgctcca

SEQ ID NO: 96826 - DNA, 441 bp, Homo sapiens
  chr19:17422759-17423200
  hypo
gacaggaaggctgcacgtaccctgccttcattcatttgtccaacgcagacatgttgatcctaaaggctgcccctgagggagctctgtgcaaagcattccccttgttgtcttatgactcagagtaaccctgggaggtggccctgttggaatgcgtctcttcacagggaggcccagaggctgggaagtccctcgtcccaggtcacacaaccagggacgggctaagccaggattgagagcagaatgcccggagtacctgcacctctcgccactcagccaccgggccctgtgtgagcccggccagggttcagtcagccctgtcctgtcctcttcccttggggaggtaccagtccagccagggaggtggacatgtaagcagatgacctcgccggggtgtgagggaggctctgggagaggctcccgaagtgtcgggggaacaaaggg

SEQ ID NO: 96827 - DNA, 70 bp, Homo sapiens
  chr19:17423434-17423504
  hypo
tctgccttgcacctcacactgcgccctcgaggcaccctgtcctgcagccgcttcctgtgcactgtgcagc

SEQ ID NO: 96828 - DNA, 31 bp, Homo sapiens; identical to SEQ ID NO: 32302
  chr19:17430595-17430626
  hypo

SEQ ID NO: 96829 - DNA, 30 bp, Homo sapiens
  chr19:17435634-17435664
  hypo
ccgggcctgcccgcccgccccgttggaccc

SEQ ID NO: 96830 - DNA, 324 bp, Homo sapiens; identical to SEQ ID NO: 32303
  chr19:17435941-17436265
  hypo

SEQ ID NO: 96831 - DNA, 266 bp, Homo sapiens
  chr19:17438170-17438436
  hypo
gaggaggctgcaggctgcagacgctggggccgccctctcgcctcccagctgcccccgcccctgtcgccggccccacctcgagcactaccaccgacacgatggctgcctccgggctcagccaggggaagaggcgctgcagctgcccgcactggccgattaagtagcagttgaccacaatcgctaggacacccatggcctccatcaccttctgcagggcggcaggagggctcaggcggggtccagccggcctccccagaccccaggct

SEQ ID NO: 96832 - DNA, 867 bp, Homo sapiens
  chr19:17443705-17444572
  hypo
gcctgtgattggtgttgaccccgccctgctcactgattggctggtcctccaggaagcgcacgttgtggagtgcttctccctgcttggcacgcaaattctgcagccagaagcggatgatgctctggcgttcctgcgaggaagagggcgtgagctcagggaactcataggcacaggatgcatgcgggggcccagagccggcctcacctgggaggtgaagaagcgtagctcgctctccacattctcatagataaagtcctcctcgcaggagaagccgcgggtgcccccgccaaactcggccttcactgctttgcgcagacccagctcgtcggcccctcggagtaggctgtgaagaaggcggaggaggtgggctcacagggaggccccggcccaccatcctggagctgaggatggtgcacctggcagcctttgggacaaacgcagggcggctggatagcatggttggcacttggtagagcggggagtcgggtggcaggctcagcgagaggccagggacaggggactcgcctctcatacgtggcggtgacaaagaaggcgtaggcacgcgtgtggcggtggtggcggacttgcacgatgagctcgggaatgcccacgcggatgtggttcagcagccatagcagcgtgtggtcatcggtcgtgtctgccaaggggcacagggaccgatggctcctgccacgagggggcccaaggcctcctacgtattcccgttctgggaagccgagctcaggagagccgcatctgggcactgggcgggcgggcgggcgggcttgggtacctgggaaggtcatcagcacgtcgcagttctctgtaggcaccgtcttcatccacgccttgtgggacaccaggtag

SEQ ID NO: 96833 - DNA, 31 bp, Homo sapiens; identical to SEQ ID NO: 32305
  chr19:17447345-17447376
  hypo

SEQ ID NO: 96834 - DNA, 226 bp, Homo sapiens
  chr19:17449330-17449556
  hypo
ctgggaccttcctgcaggcagcgtgccagggcttcgaccggcggaggcaggcgagttcaccagacgggcgttcgccaatgggaagctgaacctgaccgaagtggaggggctggcggaccttatccacgcggaaacagaggcgcagcggcggcaggccctcaggcagctggacggagagctgggccacctctgccgtggctgggccgagaccctcaccaaagcaagt

SEQ ID NO: 96835 - DNA, 30 bp, Homo sapiens
  chr19:17462847-17462877
  hypo
ctgcatctgcacgacgccatcgctatatct

SEQ ID NO: 96836 - DNA, 30 bp, Homo sapiens; identical to SEQ ID NO: 12140
  chr19:17501242-17501272
  hypo

SEQ ID NO: 96837 - DNA, 30 bp, Homo sapiens
  chr19:17534336-17534366
  hypo
gaaggccaaggccccgaggccagtgcccaa

SEQ ID NO: 96838 - DNA, 43 bp, Homo sapiens
  chr19:17536625-17536668
  hypo
atcatagagaagaccttgtcccggcccttcatcattgggcata

SEQ ID NO: 96839 - DNA, 373 bp, Homo sapiens
  chr19:17597311-17597684
  hypo
tcccagaggccaggcggggcagggcaccagtgacgctgtcccctccgtcctccctcccagcggtctctctgtgctgatccgcgtgcgcctggagctgcggcggcaccagcgtgccggccacaccatcccgcgcatctttcaggcggtagtgcagcgacagcccgagcgcctggcgctggtggatgccgggaccggcgagtgctggacctttgcgcagctggacgcctactccaatgcggtagccaacctcttccgccagctgggcttcgcgccgggcgacgtggtggccatcttcctggagggccggccggagttcgtggggctgtggctgggcctggccaaggcgggcatggaggccgcgctgctcaacgtg

SEQ ID NO: 96840 - DNA, 30 bp, Homo sapiens
  chr19:17611383-17611413
  hypo
accagcaagaagatcgcccacagcgtcttc

SEQ ID NO: 96841 - DNA, 30 bp, Homo sapiens
  chr19:17615526-17615556
  hypo
agctgtacctggcacggcccatcctggact

SEQ ID NO: 96842 - DNA, 30 bp, Homo sapiens
  chr19:17626393-17626423
  hypo
cgggggtggctgctcggaggaggtggcctg

SEQ ID NO: 96843 - DNA, 30 bp, Homo sapiens
  chr19:17628138-17628168
  hypo
ctgggggtgggccccgatggtcacacctgc

SEQ ID NO: 96844 - DNA, 63 bp, Homo sapiens
  chr19:17631821-17631884
  hypo
tgctggttcttggacgaggcggccgcccgcctcctgaccgtgcccttcgagaagcattccact

SEQ ID NO: 96845 - DNA, 259 bp, Homo sapiens
  chr19:17657446-17657705
  hypo
agaggggccctcctctccatccgagcccctaacccgccatggttccaggagctgcctgagttcgagggggatgtccttgccgtgggcagccaggctctgaccactgagggcatctatgaggacgtcatccgggggtgcttgctgcagaggattgaccaaggtgagtcccgccctgccatggctcagaggagcctggcgtcccttggctgtatgtaccgagccccaccagggccacatcgactctcacttcctgtgaata

SEQ ID NO: 96846 - DNA, 586 bp, Homo sapiens
  chr19:17687843-17688429
  hypo
ggaggggctcctagagggcagcgctgatgtgggcggagccaggtcgactttgtgggccgagccagtctgactgggagccatggagtgggtggggaaagcgtgttggagagaggctggaggctccttaccccagcgactcctcaacgtctgtgccccacagtgaagcacccgcccgcagagccctcccgcttcatctcggctcccaccaagacaccggacaagatgggcttcgacgaggtgagctgggccttccctggaggcggggcgggggctggagggcccttgtttgcaggggctgatctggctggggactctccgggctgcaggtcttcatgatcaacctgaggcggcggcaggaccggcgggagcgcatgctgcgggcgctgcaggcacaggagatcgagtgccggctggtggaggccgtggacggcaagtgagtccgaggcctgggggtgggggggcgggtccgcacgtggatgtgggtgtagacctcgctggtagacggcaagtgattcagatgggggcgggcgtggtgtccaaacagatgtagacctcgtcagtgggcgtcctgaaggggaagtgaatg

SEQ ID NO: 96847 - DNA, 432 bp, Homo sapiens
  chr19:17691243-17691675
  hypo
tcagagaacgtctgcgtgatcctgctctccccagctccagatcctccatggctccctcacgccctttggaaaaactcactcttctcccccatgaccgccagacccctgggctcctgcattcactccatccagtcacagagctctgcaaacatgctgagcctgctcccatcccaggacctgacggggtaactagatccctggctttctgggcaagctccctccggagggcgggaggagagtgacaggcccgatcttgcaccccagctatgtgggccggaagcggatgcaggtggagcaccccgagaaggctgtgcctcgcgtgaggaacctggtggaggccgactattcctactggaccctggcctacgtgatctccctgcaaggcgcccgcaaactgctggctgctgagccgctctccaagatgctgcctgt

SEQ ID NO: 96848 - DNA, 31 bp, Homo sapiens; identical to SEQ ID NO: 32310
  chr19:17692025-17692056
  hypo

SEQ ID NO: 96849 - DNA, 30 bp, Homo sapiens; identical to SEQ ID NO: 32311
  chr19:17693867-17693897
  hypo

SEQ ID NO: 96850 - DNA, 1043 bp, Homo sapiens; identical to SEQ ID NO: 12144
  chr19:17716508-17717551
  hypo

SEQ ID NO: 96851 - DNA, 30 bp, Homo sapiens
  chr19:17728622-17728652
  hypo
cttcttgaggcccacgccacccgcgtggaa

SEQ ID NO: 96852 - DNA, 140 bp, Homo sapiens
  chr19:17758104-17758244
  hypo
cgtgccgtccagcacgctctgcttgaccgccttcatctgctgcgtgtgcgccgtcttggtcaccgcgaagatctcctggatgagctcgaagatctcgggcttgttgcgctcccggatcttcatgcggtccttgagcacca

SEQ ID NO: 96853 - DNA, 475 bp, Homo sapiens
  chr19:17759136-17759611
  hypo
atggtgccccacccatcgccttgcccttcagcctttccccgccatgcaagccccggggctccccacgccaacccgtggccctgcgctcaggccctgcgctcacgctgcaggcagtcggcgttgagcaggtcctggcacttctcgtggcacttgacaccgcactcggtgcagcgcatgccctgcctcgcgatgccccacagcagcccctcgcactcgtagcagtaggtgggcgtggtggccgtccacacttcgaagttgtgtggcgtcgtgcacgagatggggtagattaaggcttgcagggtcttcttgtaaacgtggtttttctgcagggagggatggggtgcggtttgggggcgcctaacctggcgctgtccctgtcctgccccattccgccccatcactgagcgcggtaaagtcccaggccctcccctgcctccacgctgtcggaatccacgctgccttctgccagtctgtg

SEQ ID NO: 96854 - DNA, 28 bp, Homo sapiens
  chr19:17798705-17798733
  hypo
agaaccccggatacccgtccacgtccac

SEQ ID NO: 96855 - DNA, 298 bp, Homo sapiens; identical to SEQ ID NO: 55820
  chr19:17798754-17799052
  hypo

SEQ ID NO: 96856 - DNA, 89 bp, Homo sapiens; identical to SEQ ID NO: 55821
  chr19:17799310-17799399
  hypo

SEQ ID NO: 96857 - DNA, 30 bp, Homo sapiens; identical to SEQ ID NO: 32316
  chr19:17836626-17836656
  hypo

SEQ ID NO: 96858 - DNA, 30 bp, Homo sapiens
  chr19:17837839-17837869
  hypo
caacctcaagaagacgaatgcccaggcggc

SEQ ID NO: 96859 - DNA, 681 bp, Homo sapiens
  chr19:17838377-17839058
  hypo
tcggcttccccacacgatgtggacctgtgcctggtgtcaccctgtgaatttgagcatcgcaaggcggtgccaatggcaccggcacctgcgtcccccggcagctcgaatgacagcagtgcccggtcacaggaacgggcaggtgggctgggggccgaggagacgccacccacatcggtcagcgagtccctgcccaccctgtctgactcggatcccgtgcccctggcccccggtgcggcagactcagacgaagacacagagggctttggagtccctcgccacgaccctttgcctgaccccctcaaggtccccccaccactgcctgacccatccagcatctgcatggtggaccccgagatgctgccccccaagacagcacggcaaacggagaacgtcagccgcacccggaagcccctggcccgccccaactcacgcgctgccgcccccaaagccactccagtggctgctgccaaaaccaaggggcttgctggtggggaccgtgccagccgaccactcagtgcccggagtgagcccagtgagaagggaggccgggcacccctgtccagaaagtcctcaacccccaagactgccactcgaggcccgtcgggtgagtactggagctggggccctgggctgggttagcagctgcttaggctggagagcatagctcgtccccctgttttt

SEQ ID NO: 96860 - DNA, 39 bp, Homo sapiens
  chr19:17848806-17848845
  hypo
tacaggtagaacccaagtactcggatcaaggaatgggga

SEQ ID NO: 96861 - DNA, 197 bp, Homo sapiens
  chr19:17881491-17881688
  hypo
gtgatcacaccctgggtaccccgaggagttcacctgccaggtgatggggcctgggggaggccccctgagtatcgccctcccatccccgtttcctccctgtgctttgtaggcggagactaaaaccaagaaggcggcagagagcctgcggcgctcagtggaaaaatacaactcagcccgagctgactttgagcagaaga

SEQ ID NO: 96862 - DNA, 31 bp, Homo sapiens
  chr19:17986849-17986880
  hypo
gcttgtgggcgggccccgccaggtgctcacg

SEQ ID NO: 96863 - DNA, 106 bp, Homo sapiens; identical to SEQ ID NO: 32319
  chr19:17994704-17994810
  hypo

SEQ ID NO: 96864 - DNA, 337 bp, Homo sapiens; identical to SEQ ID NO: 32320
  chr19:18053353-18053690
  hypo

SEQ ID NO: 96865 - DNA, 833 bp, Homo sapiens
  chr19:18054209-18055042
  hypo
cccaggggtggagctggtcatcgggggcggggctacctgggggcggggccgggcttttcggggcaaggctgcgcccaaggccccctgacgctcatgtccacccccagcgtggcggaggaggcggccgaccggcacccagaaagacgcatgcgggcagccttcacagcctttgaggaagcccagctgccgcggctcaaacaagagaaccccaacatgcggctgtcgcagctgaaacagctgctcaagaaggagtggctccgctctcctgacaaccccatgaaccagcgggccgtgcccttcaatgcccccaagtgagcccagaacttggggagccagttcacccacgggtggtccaggtcacgactctgcacgcccttaggccaggtcagctgcgagggtcacagagcgttccgggggccaaggcgccgggccccggggccatgctcttatcaccagccacccgtcctcccgccagagggtccctgccccgagtgacaccccatcccctcccatcccccggcgcgtgtgtgtagagcctcagggctgagtgcccaataaaggtggcggcaaggctgcggtgaggcacttgaagcctaagtgagtgggtggggagaggcgggcgaagaatggggagaaggaacagctttggggacctgctgtgaaccgcactgggatcatagctagaaaagacaagagcccccaacagcgcgctccttcctgctgccagctgtgcttcatcggctcctgccagcacccctccttggctgtgccacttgtccagtgaggcacctgctccactgtctcctgcacacgcttagagaggtggaggtgga

SEQ ID NO: 96866 - DNA, 644 bp, Homo sapiens; identical to SEQ ID NO: 32322
  chr19:18084482-18085126
  hypo

SEQ ID NO: 96867 - DNA, 564 bp, Homo sapiens
  chr19:18092404-18092968
  hypo
gcctgtggggtttcaggccaggctgacgtcactctctgggggcgcggtggggctgggcagggagcgcggcgcgtgtctgacacccatggctggttccctcccgccctccacagctgttcatggtggacaacggggctgatgactggcgcatcgccatgacctgcgagcgcgtgttcctcatctcgctagagctggcagtgtgcgccattcacccggtgcccggccactaccgcttcacgtggacggcgcggctggccttcacgtacgcgccctcggtggccgaggccgacgtggacgtgctgctgtccatccccatgttcctgcgcctctacctgctgggccgggtgatgctactgcacagcaaaatcttcacggacgcctcgagccgcagcatcggggccctcaacaagatcaccttcaacacgcgcttcgtcatgaagacactcatgaccatctgccccggcaccgtgctgctggtcttcagcatctcctcctggatcatcgcagcctggaccgtgcgcgtctgcgagaggtgcgaccgccgcccctggagcccccccagcc

SEQ ID NO: 96868 - DNA, 261 bp, Homo sapiens; identical to SEQ ID NO: 55834
  chr19:18118052-18118313
  hypo

SEQ ID NO: 96869 - DNA, 385 bp, Homo sapiens; identical to SEQ ID NO: 12156
  chr19:18118522-18118907
  hypo

SEQ ID NO: 96870 - DNA, 177 bp, Homo sapiens; identical to SEQ ID NO: 12157
  chr19:18118965-18119142
  hypo

SEQ ID NO: 96871 - DNA, 31 bp, Homo sapiens; identical to SEQ ID NO: 55837
  chr19:18119199-18119230
  hypo

SEQ ID NO: 96872 - DNA, 48 bp, Homo sapiens
  chr19:18120712-18120760
  hypo
agtggtggccagcctcgcgggcgagccggtgggccccgggcagcgggc

SEQ ID NO: 96873 - DNA, 190 bp, Homo sapiens
  chr19:18121350-18121540
  hypo
aacctcacccaccctgtctctcgcttccagctcctcctgagtactcggaggtggtagccgacactgaggaggcagccttggggcagagccccttcccgcttccgcaggaccccgacatgagccttgaaggcccgttcttcgcctacatccaagagttccgctaccgcccgccacccctgtactctgaggt

SEQ ID NO: 96874 - DNA, 317 bp, Homo sapiens
  chr19:18123644-18123961
  hypo
atggctagatggggagcggtatttctgaatttctgtttccagtgttctctgaggcttaatgggaacatttctcttaggaggatccaaacccactcttgggggacatgaggccgcgctgcatgacttgctgaacggcacagggacccctcgaggaacaaggttgcacaccagctttcagccaccatgactgtggggagtggctggaccaagggctgacctccccgactgcatcaaagttggggaaccaagtctcagagtgaggcgggggcctttcggatatcacatgggacagaggaagagcccggctggaatctgac

SEQ ID NO: 96875 - DNA, 86 bp, Homo sapiens
  chr19:18207918-18208004
  hypo
gggtgagatcctcactcgcctcaccctagaacccgttctgctgtgtgtactgggcacattttttgttgttgttttgtttttgtttt

SEQ ID NO: 96876 - DNA, 247 bp, Homo sapiens
  chr19:18241243-18241490
  hypo
ctgtagtgcctgctggggcctcgatctccggtcccagcaagcctggccctctgtccccagggccgtctacctggtgcggcaccgtgacacacggcagcgctttgccatcaagaagatcaacaaacagaacttgatcctgcgtaaccagatccagcaggtctttgtggagcgtgacattctcacctttgccgagaacccctttgtggtcagcatgttctgctcctttgagacccggcgccacctatgt

SEQ ID NO: 96877 - DNA, 220 bp, Homo sapiens
  chr19:18242604-18242824
  hypo
gaccttttgcaggaggtaaagcgaggaggatgcataggcattgggcataacctaaggggcgggcggggggcgggggtgccccgggcctcatgactacatccgcccttctcccaggcggcgactgcgccacgctcctgaagaacatgggcccgctgcccgtggacatggcccgcctgtacttcgccgagacggtgttggcgctggagtacctgcataacta

SEQ ID NO: 96878 - DNA, 111 bp, Homo sapiens
  chr19:18255884-18255995
  hypo
actcttcgccgagccgagacccgtcccccgtgtgtggcagcctgcggccccccatcgttatccacagctctggcaagaagtacggcttcagcctgcgggcgatccgcgtct

SEQ ID NO: 96879 - DNA, 30 bp, Homo sapiens
  chr19:18256639-18256669
  hypo
ctggtgcacatggacgtcgtggagctgctg

SEQ ID NO: 96880 - DNA, 30 bp, Homo sapiens; identical to SEQ ID NO: 55838
  chr19:18272022-18272052
  hypo

SEQ ID NO: 96881 - DNA, 81 bp, Homo sapiens
  chr19:18272670-18272751
  hypo
tgtctcgtatatacccccaggcgtgcaagcgcacgcacaatcctgtgcacatgcgtgggcggacaggccctacccagccct

SEQ ID NO: 96882 - DNA, 65 bp, Homo sapiens
  chr19:18273253-18273318
  hypo
tggcaccttcctagtccgagatgcttctagcaagatccagggcgagtacacgctgaccctcaggt

SEQ ID NO: 96883 - DNA, 30 bp, Homo sapiens
  chr19:18276869-18276899
  hypo
gcttgagcagtctccgtatcagagttgaga

SEQ ID NO: 96884 - DNA, 31 bp, Homo sapiens
  chr19:18277901-18277932
  hypo
aaccctgaggtctctgcgccaccccacccct

SEQ ID NO: 96885 - DNA, 30 bp, Homo sapiens; identical to SEQ ID NO: 32331
  chr19:18307033-18307063
  hypo

SEQ ID NO: 96886 - DNA, 507 bp, Homo sapiens; identical to SEQ ID NO: 55843
  chr19:18343302-18343809
  hypo

SEQ ID NO: 96887 - DNA, 337 bp, Homo sapiens; identical to SEQ ID NO: 55844
  chr19:18343879-18344216
  hypo

SEQ ID NO: 96888 - DNA, 30 bp, Homo sapiens; identical to SEQ ID NO: 32332
  chr19:18368468-18368498
  hypo

SEQ ID NO: 96889 - DNA, 384 bp, Homo sapiens; identical to SEQ ID NO: 32333
  chr19:18368712-18369096
  hypo

SEQ ID NO: 96890 - DNA, 30 bp, Homo sapiens
  chr19:18371391-18371421
  hypo
ggctatagctggctcggctaggctggaggc

SEQ ID NO: 96891 - DNA, 254 bp, Homo sapiens; identical to SEQ ID NO: 12161
  chr19:18420496-18420750
  hypo

SEQ ID NO: 96892 - DNA, 77 bp, Homo sapiens
  chr19:18441764-18441841
  hypo
aggaaacgcagacaccctcctgggttgcgcttcgctggtcaaggcagtgaccctctcccatccggggaaccaggagc

SEQ ID NO: 96893 - DNA, 30 bp, Homo sapiens; identical to SEQ ID NO: 32335
  chr19:18492959-18492989
  hypo

SEQ ID NO: 96894 - DNA, 80 bp, Homo sapiens; identical to SEQ ID NO: 32336
  chr19:18496194-18496274
  hypo

SEQ ID NO: 96895 - DNA, 30 bp, Homo sapiens
  chr19:18509343-18509373
  hypo
tgccaccttaactgcgtgtgacaccatgtc

SEQ ID NO: 96896 - DNA, 92 bp, Homo sapiens
  chr19:18546999-18547091
  hypo
agccctccaggatgctggccacggcgaagagcgtggagggcgacacctccagaccgagctgtgggcaaggcgggcagtcagcacagagctgt

SEQ ID NO: 96897 - DNA, 572 bp, Homo sapiens; identical to SEQ ID NO: 55850
  chr19:18548567-18549139
  hypo

SEQ ID NO: 96898 - DNA, 30 bp, Homo sapiens; identical to SEQ ID NO: 32338
  chr19:18553980-18554010
  hypo

SEQ ID NO: 96899 - DNA, 30 bp, Homo sapiens; identical to SEQ ID NO: 32339
  chr19:18555395-18555425
  hypo

SEQ ID NO: 96900 - DNA, 68 bp, Homo sapiens; identical to SEQ ID NO: 32340
  chr19:18557167-18557235
  hypo

SEQ ID NO: 96901 - DNA, 30 bp, Homo sapiens; identical to SEQ ID NO: 32341
  chr19:18561249-18561279
  hypo

SEQ ID NO: 96902 - DNA, 30 bp, Homo sapiens
  chr19:18568991-18569021
  hypo
tgggggatgggaggcggcattaccggacga

SEQ ID NO: 96903 - DNA, 30 bp, Homo sapiens; identical to SEQ ID NO: 55851
  chr19:18571125-18571155
  hypo

SEQ ID NO: 96904 - DNA, 30 bp, Homo sapiens
  chr19:18572363-18572393
  hypo
acaagacatcggggcggcacccacctgctg

SEQ ID NO: 96905 - DNA, 143 bp, Homo sapiens
  chr19:18591738-18591881
  hypo
cagcccgcagcagatatttctatctgcattcacgaaggtgcatagaaagcttatggaaaagggtttttcagaaatcttgtagacaaaaatatgcagattgcccaaaactgtggcctctacacgctccacgcaccttgcttgct

SEQ ID NO: 96906 - DNA, 114 bp, Homo sapiens; identical to SEQ ID NO: 32342
  chr19:18600783-18600897
  hypo

SEQ ID NO: 96907 - DNA, 30 bp, Homo sapiens
  chr19:18642643-18642673
  hypo
ggctggcactcaggcggggactaggcaggg

SEQ ID NO: 96908 - DNA, 82 bp, Homo sapiens; identical to SEQ ID NO: 32343
  chr19:18675983-18676065
  hypo

SEQ ID NO: 96909 - DNA, 30 bp, Homo sapiens
  chr19:18686867-18686897
  hypo
tttgaatctgaggccgtgacatcactcatg

SEQ ID NO: 96910 - DNA, 88 bp, Homo sapiens
  chr19:18688220-18688308
  hypo
agcatgtggaagctttcctttcgcttcattcaataaacagctgctgctcactctcctggtccgtggactctttttgaactgttaacac

SEQ ID NO: 96911 - DNA, 447 bp, Homo sapiens
  chr19:18688367-18688814
  hypo
aggagaaactgactcatcgtgggggctcacccaggatttccaaagcggtaacatcggacctctttcgcttgctactctgctctacttttctttagaattgagggcaaacaccgggcacctgtcggccatttaaaagcgacaagtgccgccgcctgactaaagacacagatgtaagggtatctgagaaagggctctctaacaacccccagcccttctgaatcgagagtgttgttttgcctagaaaccagttcccactttctctgcattttctgggttgaaccgagggctggccaagggtggaaaacagtggccccaagctcctggtaacgcccagtcgagatgacagcgctttgtgaaacctttgttaaacagccacccaaacgcacttcacccacccttcgagaggcatgcctcctaggtccaaacgtctataaggaagactttctt

SEQ ID NO: 96912 - DNA, 57 bp, Homo sapiens
  chr19:18707294-18707351
  hypo
agtgcagatcacaccactatgcgacagaatgaggccgtgtctcaaaagaaaaaaaaa

SEQ ID NO: 96913 - DNA, 146 bp, Homo sapiens; identical to SEQ ID NO: 55861
  chr19:18722211-18722357
  hypo

SEQ ID NO: 96914 - DNA, 102 bp, Homo sapiens; identical to SEQ ID NO: 55862
  chr19:18722386-18722488
  hypo

SEQ ID NO: 96915 - DNA, 456 bp, Homo sapiens; identical to SEQ ID NO: 55863
  chr19:18722521-18722977
  hypo

SEQ ID NO: 96916 - DNA, 464 bp, Homo sapiens; identical to SEQ ID NO: 55864
  chr19:18723527-18723991
  hypo

SEQ ID NO: 96917 - DNA, 30 bp, Homo sapiens; identical to SEQ ID NO: 32345
  chr19:18757683-18757713
  hypo

SEQ ID NO: 96918 - DNA, 236 bp, Homo sapiens; identical to SEQ ID NO: 32346
  chr19:18757926-18758162
  hypo

SEQ ID NO: 96919 - DNA, 76 bp, Homo sapiens; identical to SEQ ID NO: 32347
  chr19:18771032-18771108
  hypo

SEQ ID NO: 96920 - DNA, 30 bp, Homo sapiens
  chr19:18772939-18772969
  hypo
ttgtcccagtgcaacgtgtttcttctgatg

SEQ ID NO: 96921 - DNA, 30 bp, Homo sapiens; identical to SEQ ID NO: 32348
  chr19:18782359-18782389
  hypo

SEQ ID NO: 96922 - DNA, 38 bp, Homo sapiens
  chr19:18783034-18783072
  hypo
ccaagggggcctctggggagccgtgtgaggtgggaatc

SEQ ID NO: 96923 - DNA, 33 bp, Homo sapiens
  chr19:18783151-18783184
  hypo
ggccctggagattcactttgcacggtgcagcct

SEQ ID NO: 96924 - DNA, 111 bp, Homo sapiens
  chr19:18783216-18783327
  hypo
tggatctcagcggcctggcgcctaacacagagcctggcaccgacggagcatagctcgaatgtttgctgcacaaaggagaggtgctggggcgggaaggtgagggcagccttc

SEQ ID NO: 96925 - DNA, 30 bp, Homo sapiens; identical to SEQ ID NO: 32349
  chr19:18798489-18798519
  hypo

SEQ ID NO: 96926 - DNA, 30 bp, Homo sapiens
  chr19:18826922-18826952
  hypo
cctgcccagtgccccgccctggggaccctg

SEQ ID NO: 96927 - DNA, 227 bp, Homo sapiens
  chr19:18830680-18830907
  hypo
gatgggcacaggcccgctccgggaaggccccaggcccgtccatgtgggcagcgtcggcgtcgggcttcttgcctgggacccaggggccgctcttggggagggagaccctgtttcaagtggccagcatccccgccagtggtttgcattattcaattggtgataagatttaaaattaaactgcaaaggatctgttcccccagctacaaatagacgtgtgcttgcacatt

SEQ ID NO: 96928 - DNA, 31 bp, Homo sapiens
  chr19:18835064-18835095
  hypo
tgttgttctctgcactcgctaggagtcaatt

SEQ ID NO: 96929 - DNA, 31 bp, Homo sapiens
  chr19:18836849-18836880
  hypo
tctctggagttgaggccgggccctggaacag

SEQ ID NO: 96930 - DNA, 733 bp, Homo sapiens; identical to SEQ ID NO: 32351
  chr19:18856003-18856736
  hypo

SEQ ID NO: 96931 - DNA, 260 bp, Homo sapiens
  chr19:18867538-18867798
  hypo
agaaaaggaagatggcgacagtcaccttgcagagggagacacaccccgatagtggagtggggtggtgggtgaatttttaatactgctcagaaatccattaatgtctccataatgttggtggaatgcttttcaaagtattcttgagaacgtgatcgccggtgtgctttgcagaaatccggtaatgaagcgaatgtttactctcagaatgaaggaggctctggccaagcagaaacccattcagccggcgttctccacagagg

SEQ ID NO: 96932 - DNA, 30 bp, Homo sapiens
  chr19:18868266-18868296
  hypo
tgccctgctaccctacggtgtcctcacagc

SEQ ID NO: 96933 - DNA, 164 bp, Homo sapiens
  chr19:18870912-18871076
  hypo
tcccctccccgctcccgaccccgctggaccccgaggagcccaccttccctgcactgagcagctccagcagcaccggcaacctcgcggccaacctgacgcacctgggcatcggtggcgccggccagggtaaggcagggacactccgccctcggacagagcactgg

SEQ ID NO: 96934 - DNA, 30 bp, Homo sapiens
  chr19:18872047-18872077
  hypo
cccacgttgctgctccgtccttagctgttg

SEQ ID NO: 96935 - DNA, 274 bp, Homo sapiens
  chr19:18872659-18872933
  hypo
agagggaacagggccccagcccgagcgcattgaggctgcattctgactcccacacctgggccctgggccctgggcccgcggggctctgccactggacagagggcaccagagaaggcccagaaaacacagccgattcggaggagccctcttcattgtctccagatagacagggccaggcaggcggcatccacacgcacctgcgcagaaccagaaagctgaaggtcagcgctggggctgcaggtacccctgccccgcatagaagccaccatctccc

SEQ ID NO: 96936 - DNA, 416 bp, Homo sapiens
  chr19:18874214-18874630
  hypo
gtattcaggacggtcaccctgtacaggtttgtagcctgggaacaagggccctaccgtctggccgaggtgtgcagaggctctgccatccaggtttgtgtaagttgccctgtgatcctcatgcacagccatgaaatcgccggacaacgcgttttttcagaagtcacccccattgttaagtgatgcttgactgtacttagaatcaacattgaaaaaccaggggaatgcccgtagaacaccagatttctggctgctcttgaagaatcagacagcccagtggccatggccgatgtcttgcacctcgagacgggccacagtgctctggtttgcctcaggccccacccgcccctgtcgtcccacatccataccctcacacgctcctgacgtttgcccctactttgtaccgagcccgacctctg

SEQ ID NO: 96937 - DNA, 90 bp, Homo sapiens; identical to SEQ ID NO: 55866
  chr19:18880024-18880114
  hypo

SEQ ID NO: 96938 - DNA, 30 bp, Homo sapiens; identical to SEQ ID NO: 55867
  chr19:18880167-18880197
  hypo

SEQ ID NO: 96939 - DNA, 30 bp, Homo sapiens; identical to SEQ ID NO: 32354
  chr19:18882238-18882268
  hypo

SEQ ID NO: 96940 - DNA, 426 bp, Homo sapiens
  chr19:18883577-18884003
  hypo
tcagcctggtgtctgcgcatgcttggtctgcccgcactggctctctgagctctcgggctctggcagcgtgtctggtctcgtcgtgtggtactgttggggatggggctggaggggctggagaagcggcaggtgaggcctgtcccaggtgggcagcccaggtggggctggttcctgagtgaggtccctcttgcatgtgagacaggacgggacaggaattaggagtcgagccagtttctctcaggagagagtcactggaatggttggtgaatttttgggccccaagccaaagcgggttagtctgctgggcagcgagcaggtggcggtgttgtcaagcccatgtctgtgtgtctggtgtccgtcgtgcgctgatgcaggaggcaggcggctcatggaggtatagggacatcagtacggggctctcagggg

SEQ ID NO: 96941 - DNA, 30 bp, Homo sapiens
  chr19:18885843-18885873
  hypo
cttgctgggaccctcgctgggacccgggcc

SEQ ID NO: 96942 - DNA, 30 bp, Homo sapiens
  chr19:18895773-18895803
  hypo
gcttccacatgaccacgtagaagctggagc

SEQ ID NO: 96943 - DNA, 362 bp, Homo sapiens; identical to SEQ ID NO: 55869
  chr19:18900553-18900915
  hypo

SEQ ID NO: 96944 - DNA, 43 bp, Homo sapiens
  chr19:18957752-18957795
  hypo
agatcgcaccactgcactccagcctgagcgacagtcacggcag

SEQ ID NO: 96945 - DNA, 151 bp, Homo sapiens
  chr19:18963589-18963740
  hypo
ggcctgtgtgtgttccggggactcctaatggcttctctttcagatgtgcccttggtggcatttggggctgcaggtgccactcacggcgcctgctctcacggcagaggcttgctgtagggcccgcctcatggggcctcgggcatgtggaggc

SEQ ID NO: 96946 - DNA, 152 bp, Homo sapiens
  chr19:18963996-18964148
  hypo
ctctccctggtggaagcgacggcgtgggttaaaatggccacctctctcacttttttacctcaagacatgcggctcatgcagggggatgagatatgcctgcggtacaaaggggaccttgcgcccctgtggaaagggatcggccacgtcatcaa

SEQ ID NO: 96947 - DNA, 31 bp, Homo sapiens; identical to SEQ ID NO: 32357
  chr19:18964686-18964717
  hypo

SEQ ID NO: 96948 - DNA, 30 bp, Homo sapiens; identical to SEQ ID NO: 32358
  chr19:18965878-18965908
  hypo

SEQ ID NO: 96949 - DNA, 30 bp, Homo sapiens; identical to SEQ ID NO: 32359
  chr19:18967261-18967291
  hypo

SEQ ID NO: 96950 - DNA, 30 bp, Homo sapiens
  chr19:18968204-18968234
  hypo
agtcgctcttcgagcgcctggtggtgctgg

SEQ ID NO: 96951 - DNA, 90 bp, Homo sapiens
  chr19:18988869-18988959
  hypo
ttccaaaaaacgtcacggagctctgagccactgcttccctgaaaccatcgttcccacgtcaccgatggcccccaccggccaaatcagagg

SEQ ID NO: 96952 - DNA, 550 bp, Homo sapiens
  chr19:18989665-18990215
  hypo
gcctgcccacgaacacgcttggacgggtgacactaaaggagggaacgcggggtgcgggcccctccacactcactcggctttgctgggcttcaggctctgggcctcggctgtgtcatactcccgcaggtccttcagctcgtgcacctggcctgtcaacaccttggctgcaaacgccacgatgtactgcgagaggggaggggaggtgccagtgagaagaaagcccccacgccactgccctgctgacagccatgtgctcctgtcccgggccctccacacgggctgtctgccacctaacgtgcccctccccgggactgcctgaggaggggacagggattgggacgaggacgggaccgccactgtggaggagagccggggccgactcaccaggaaccagtagaggttcataagggtgagcagcagcaggagcgcattgaagaagaagtagaaggggatgtcaggcaccgtgcgcagactgcagtgactggtggcatacaggaccttgagcgggaaccagtagaggcggaaccagaacctgcggtgggaggagtca

SEQ ID NO: 96953 - DNA, 404 bp, Homo sapiens
  chr19:18994721-18995125
  hypo
cctgcctctggtctgtcccctcgtcggacccctgagcactctgaccttggaaccctgagcactccgacctgatgtgatcccctccacggcctcctctgtgccccgccgcaacatcagcctccgcactctgtgtgggctgtgcctcggccccctgccacccgatcctgtccttaccggaaggcgtaggaggagacgatgaggatgagagtgaccacgtggtggagcagcatgaccaccgagtccttgcgccaggtgtccatgtatagcgtagcgtagatggagtggccatagaagcttccctggagcaggtaggcggctgcaatgtcccgtggcactgccatgcccggcgtccagtctggggagagccaaatctcacagtcagggccctgcgaagcctctagacg

SEQ ID NO: 96954 - DNA, 154 bp, Homo sapiens
  chr19:18996625-18996779
  hypo
cctcttcctgtctttaacagagccctgccttgcgggtgtcctgggcccactccctgcaaatccctggccctgacagatgcggctgcccacggagtcttgccatgcccgggcacaccatgccaccaagcgcagggtctcccgccaagcgggtcct

SEQ ID NO: 96955 - DNA, 31 bp, Homo sapiens
  chr19:18997500-18997531
  hypo
ctccagcctccatctgcggcttcctggcccc

SEQ ID NO: 96956 - DNA, 30 bp, Homo sapiens
  chr19:19011207-19011237
  hypo
gtgctgggacaggacgatgaggttgaccag

SEQ ID NO: 96957 - DNA, 31 bp, Homo sapiens; identical to SEQ ID NO: 32360
  chr19:19017312-19017343
  hypo

SEQ ID NO: 96958 - DNA, 30 bp, Homo sapiens
  chr19:19038979-19039009
  hypo
tcaagcagaagaaccggcgcttcaaggaga

SEQ ID NO: 96959 - DNA, 221 bp, Homo sapiens
  chr19:19040158-19040379
  hypo
cagtccctttccaggacgaatgggcccaactatgccgcctgcagcctggcccgcatcccaggccggaatcgttcatagaaaaccagccccggctcagggcgcagcctcagccaggcgggccaggccctcacgcagctcactcagctcaaacaggctgacgtccagcagctgcgctgcccggcccacctcagcccgcgcccgctcccgctctgcccgtgcct

SEQ ID NO: 96960 - DNA, 137 bp, Homo sapiens
  chr19:19104042-19104179
  hypo
gagcttcagagctttggtacccgagtgcagacttggtaattaccgggaatttgtctcccccgtataaattctggcgaacaacgagaaaacaccatctgtgatcgtttccacatcacgtttgctaacagagcacttct

SEQ ID NO: 96961 - DNA, 267 bp, Homo sapiens
  chr19:19109238-19109505
  hypo
gtgtaagccaccgcacacctttttttatcctgttaatcttcttattgtcagttcatttcaacaggcttagacttggaccttcaaaggcggagggaaattccctttgttctcttcagaggcatctccgagggtattatataaagtagctgtgtgtgtgtatgcatgtgtgtgtgcgtgtgtgtatgcatgtgtgtgtgcatatgcgtgcacatgtgtgtatcttgtgtgtgtgcgtgagttactggatgcaggcggcccctccataat

SEQ ID NO: 96962 - DNA, 282 bp, Homo sapiens; identical to SEQ ID NO: 32363
  chr19:19114949-19115231
  hypo

SEQ ID NO: 96963 - DNA, 31 bp, Homo sapiens; identical to SEQ ID NO: 32364
  chr19:19121157-19121188
  hypo

SEQ ID NO: 96964 - DNA, 241 bp, Homo sapiens; identical to SEQ ID NO: 32365
  chr19:19156741-19156982
  hypo

SEQ ID NO: 96965 - DNA, 31 bp, Homo sapiens
  chr19:19214216-19214247
  hypo
tataaggacaccaattcgcatttagggccca

SEQ ID NO: 96966 - DNA, 93 bp, Homo sapiens
  chr19:19218762-19218855
  hypo
ctaccatggatttatgcccaccgtgctgggggtcattccctacgctggcctgagcttcttcacctatgagacgctcaagagcttgcacagagg

SEQ ID NO: 96967 - DNA, 45 bp, Homo sapiens
  chr19:19226767-19226812
  hypo
gctttttgctataaacaattccgcgcagcctaggagtgtcctgaa

SEQ ID NO: 96968 - DNA, 217 bp, Homo sapiens
  chr19:19230752-19230969
  hypo
agtgctggtggaagtagaggccgaaaaggctggcgagcagctggcaggcagccgtccaccagatgaggtaggccaggacgccacggaggaagaggggagtaagcaggccacccagagccccggcaatccgcgctgcagtctgctggacttcgtcctccccagagccgatgggggcagcgctggctgaggatgggtcgggggatagtagaggagctgg

SEQ ID NO: 96969 - DNA, 169 bp, Homo sapiens
  chr19:19231814-19231983
  hypo
cacgggcttcgatgcggccagcctcccttcgcagctgctccacccgggccttggccaggcacaggtaggcctgcaggtggggccgggtcaccgccagccgcagcaggcacagcaccaccagcaaccagaggcgcccagagtcgaaggcagaatcggacagcctgtgcgg

SEQ ID NO: 96970 - DNA, 30 bp, Homo sapiens; identical to SEQ ID NO: 32366
  chr19:19335260-19335290
  hypo

SEQ ID NO: 96971 - DNA, 30 bp, Homo sapiens
  chr19:19369312-19369342
  hypo
tggggtgaggcctacgcacccggcaggttg

SEQ ID NO: 96972 - DNA, 329 bp, Homo sapiens
  chr19:19389260-19389589
  hypo
aagcaaaatttcccccgcagccccaggaaatgtttctgaggcagcagctgagctgctgtttgctaattccctacacagacggcgcctgtcattaacagatgcctcctgcagcgaaaaggcctggctcctgctgtgatcgagagggtagccaggctactttgggcacctgcagggtgaggcagctacaggaggggctggcatgtggcagaggctggagctagggcccctcctggctcaccttcagggccttgaaggtctccataaacttttccagctcgtctggaggcaggaagtctccgatgaagtgcttgccccggcccatctttgtc

SEQ ID NO: 96973 - DNA, 467 bp, Homo sapiens
  chr19:19391470-19391937
  hypo
gggcgcacgcacaaacgggctctcagaaggcagctccgttgctaacagacaccaggtgtaagcgcgcacagattcagagtctggcgtaagactcagctgtgcgactcccttagctccttcaggggaggcagccaaccatcctcagagcagctgacatttaatttggcatcagctgtggaacttggcaggctccagtaacactgacacatagaaagatgctgcaacagccccatccgggtggcagaaaccaccacccctcgggcggtgcggtgcttcccgggggagaaggtgagcaaaggggtgcagcgggccctctgggaagggaaaagatttgggtccttccagctcatcaacactcgggctttgccgctaagaatggcccacatttgcactcttagtccttccttggtttacagggcactgagggatgtgggggagccctgttggggagacgcaggagccgaagt

SEQ ID NO: 96974 - DNA, 195 bp, Homo sapiens; identical to SEQ ID NO: 32367
  chr19:19416789-19416984
  hypo

SEQ ID NO: 96975 - DNA, 30 bp, Homo sapiens
  chr19:19445759-19445789
  hypo
tgtgtgtggcacatgcgagtcgctggggac

SEQ ID NO: 96976 - DNA, 691 bp, Homo sapiens; identical to SEQ ID NO: 32368
  chr19:19446447-19447138
  hypo

SEQ ID NO: 96977 - DNA, 91 bp, Homo sapiens
  chr19:19447257-19447348
  hypo
accaccatgcctggctaattttttttatttgttctagagatgatctcgcccaggctggcctcaagcaatcctgcctcgacttcccaaagtg

SEQ ID NO: 96978 - DNA, 222 bp, Homo sapiens
  chr19:19447905-19448127
  hypo
taaggaatccagcttgattgccgccttgttttttttttttcttacattcccaaacgtgactatttcctttcagaattccgttgatgcagcaaagccgctgctgcggaaggcgatccagatctcacagcagaccccatattggcactgccgcctgctcttccagctcgctgtgagtaccgcggcccgggaacgagggtgcccggcagggaccatgaccctggg

SEQ ID NO: 96979 - DNA, 30 bp, Homo sapiens
  chr19:19466946-19466976
  hypo
ccccaggggcaccacgcctgactctccatc

SEQ ID NO: 96980 - DNA, 181 bp, Homo sapiens; identical to SEQ ID NO: 32369
  chr19:19494667-19494848
  hypo

SEQ ID NO: 96981 - DNA, 168 bp, Homo sapiens
  chr19:19540204-19540372
  hypo
aaggaggccaggtggttggagcgggagcatggaacgtgtatgctccttcacatgcacgtagcgcacttgcggctgaagtgggccgggccttgaaggccgtggtgaggtgctctgacgctgggtggacctgggaaattaaggagggccgtctggtttattatggggagt

SEQ ID NO: 96982 - DNA, 281 bp, Homo sapiens; identical to SEQ ID NO: 32370
  chr19:19576175-19576456
  hypo

SEQ ID NO: 96983 - DNA, 30 bp, Homo sapiens; identical to SEQ ID NO: 32371
  chr19:19576874-19576904
  hypo

SEQ ID NO: 96984 - DNA, 514 bp, Homo sapiens
  chr19:19604055-19604569
  hypo
acttagacaacaggtgtcaaggaagtggagcacagatgtctggtgccgctggaagcatgtttctgggtgaagcactctgtgcagaaaggccgcctgcactgtgggcgcaggggatgccccagtctctaccatcatccctcctgctgtgtgcgtctcagtcccctcccagctgcaagtgtgctgagctcccgtggatctcagccccaactgtcgggagggtcctgcttctgtttcttcttccctggagcccgaagctcgctgttgcgctgcttctagatgcagcttaatgggcagcgaggttaagtttattttgttaggctttttgagtgctctgttctgggaaactccgaccttccaagtactttagtcattgcctcagtgacccagaaagtaagtgtgttctgggcagcaggagctgaaggaaggacaggactctctctgctctggcttggggtttgttttttgaaaccctgcccccactgcccccgcgccccctccccgccccccaccttac

SEQ ID NO: 96985 - DNA, 31 bp, Homo sapiens; identical to SEQ ID NO: 32372
  chr19:19605784-19605815
  hypo

SEQ ID NO: 96986 - DNA, 129 bp, Homo sapiens
  chr19:19611885-19612014
  hypo
tcctggccctctgacgtgagccatgtgctgtctgcttgcagcaggcaggatgtcggccgccactgtgctgtcccgggagccctacatgtgtgcacagtgcaagacggacttcacgtgccgctggcggga

SEQ ID NO: 96987 - DNA, 133 bp, Homo sapiens
  chr19:19612752-19612885
  hypo
ttgctttcaacccccgtttgtgtaggtcataaaaccccggcgtaagttggcgttccgctcaggagaggcccgcgactggagtaacggggctgtgctacaggtcagaaccgcactgggcgccgggagcctcgcg

SEQ ID NO: 96988 - DNA, 30 bp, Homo sapiens; identical to SEQ ID NO: 32373
  chr19:19613150-19613180
  hypo

SEQ ID NO: 96989 - DNA, 30 bp, Homo sapiens
  chr19:19616200-19616230
  hypo
cctcggccgtggaccgccagcgagagtacc

SEQ ID NO: 96990 - DNA, 167 bp, Homo sapiens
  chr19:19617213-19617380
  hypo
tttccttttttctattcatttcgatggacgcaatcttaagccaccctggccttgctcctgggaggtgagcgtgcacaggtgtgtgcaggtcaggaggtgccgtccaggtgtgcggcgagccgctgcgcacagatgtcaggatttccgtttgggtctagtttagaacc

SEQ ID NO: 96991 - DNA, 407 bp, Homo sapiens
  chr19:19625739-19626146
  hypo
tctgggtagccatgggcctggcggccgaagccgaagtcggtgagcttgacgcggcgctcgtccgggctcagcagcacgttttcgcacttgaggtcgcggtgcaccaggtgatgatcgtgcaggtagcgcacggcgccggcgatctgcgcaaagaggtcgcgcgcctgaactccggggatgcgcccgttgcgctgcacggcttgcagcaggtcggtggcggccgcttccatcacgatgtacagtttcccgttgcacacctcgatgaactcgaagacgtgcacgatgtgcgggtgtcgcacgccccgcaggatggacagctctcgcggcaggaacttgttgacgaagtccgggggcgctcgccgccggtccaccaccttgatggccacggtacccttgtacttcttgga

SEQ ID NO: 96992 - DNA, 316 bp, Homo sapiens
  chr19:19636871-19637187
  hypo
gcagcctcactcctgagaagccgccagtgtcccctgattgcagagtgggcagcgcctggagctgtggaggagggtgtctgggggcgggctggcccgctgagcagcgcctctcttcacaggctacagcatgctggccatagggattggaaccctgatctacgggcactggagcataatgaagtggaaccgtgagcgcaggtagggcccctggtgggcgttgtctgaaagtgcccccccggcgagttgtcggggtcctgtagcattccgctgttgtctgtgctggcgaggggtgaacgggccccttggacttggctgt

SEQ ID NO: 96993 - DNA, 30 bp, Homo sapiens
  chr19:19656763-19656793
  hypo
cgcaggcacaggcccgggcctcaggtcccc

SEQ ID NO: 96994 - DNA, 66 bp, Homo sapiens
  chr19:19674353-19674419
  hypo
gagagaggccagagtccgcagggtgaggaaggcgtccccagcgctgggcagcgggaagggtccaga

SEQ ID NO: 96995 - DNA, 31 bp, Homo sapiens
  chr19:19723143-19723174
  hypo
tctgaaaacaaacttacggcaacaaaacatg

SEQ ID NO: 96996 - DNA, 418 bp, Homo sapiens; identical to SEQ ID NO: 12177
  chr19:19729111-19729529
  hypo

SEQ ID NO: 96997 - DNA, 162 bp, Homo sapiens; identical to SEQ ID NO: 12178
  chr19:19729585-19729747
  hypo

SEQ ID NO: 96998 - DNA, 51 bp, Homo sapiens
  chr19:19735077-19735128
  hypo
tccatcagtgggtggccgttctcgggaagcatgatgcgagtgctggcacct

SEQ ID NO: 96999 - DNA, 30 bp, Homo sapiens; identical to SEQ ID NO: 32378
  chr19:19737725-19737755
  hypo

SEQ ID NO: 97000 - DNA, 1062 bp, Homo sapiens; identical to SEQ ID NO: 55890
  chr19:19738577-19739639
  hypo

SEQ ID NO: 97001 - DNA, 30 bp, Homo sapiens; identical to SEQ ID NO: 32381
  chr19:19749053-19749083
  hypo

SEQ ID NO: 97002 - DNA, 30 bp, Homo sapiens
  chr19:19764724-19764754
  hypo
gtcacgggctgccccgcgcccccacccctt

SEQ ID NO: 97003 - DNA, 55 bp, Homo sapiens
  chr19:19766966-19767021
  hypo
tctgggctgaggtcttcgatgggctcctggggaggaagatcgtgaatctggatgg

SEQ ID NO: 97004 - DNA, 130 bp, Homo sapiens
  chr19:19769495-19769625
  hypo
atgaagggagagggtgtgcaccgcacattggccattgtactcagtacaaaagggcagacatggtcacggtcttccatcaccattctgaagcgctgagatgcgtagactcgaaacagtgaggactgaaatg

SEQ ID NO: 97005 - DNA, 30 bp, Homo sapiens
  chr19:19770845-19770875
  hypo
ttccaagacccccccgggaggttttgggtg

SEQ ID NO: 97006 - DNA, 113 bp, Homo sapiens
  chr19:19775582-19775695
  hypo
tctccaaaaaaaaaaaaaaaaaaaaaaagaaattaccactttaacataaaaaatgaaaaactggtgtttacttgaaattatatacttctaggccgggcgcggtggctcacccc

SEQ ID NO: 97007 - DNA, 30 bp, Homo sapiens; identical to SEQ ID NO: 32382
  chr19:19778579-19778609
  hypo

SEQ ID NO: 97008 - DNA, 127 bp, Homo sapiens
  chr19:19822260-19822387
  hypo
gtgtgagacctttcatgaattcgaacagaacttgaaaatctgaaggctttcccacattgtttacatcgatagggtttctctcccgtgtgagttctctcatgcattcgaaatttactggaagaaatga

SEQ ID NO: 97009 - DNA, 818 bp, Homo sapiens; identical to SEQ ID NO: 55893
  chr19:19843294-19844112
  hypo

SEQ ID NO: 97010 - DNA, 140 bp, Homo sapiens
  chr19:19974477-19974617
  hypo
caacagcctgggttccagagtcggccactcatttctgcacagatgaggacaggtctcatgaagctttggcgcagtctggtaccctcagttttttgtaacgagttgtttggcaggaggtccagtcacgagggccttccgca

SEQ ID NO: 97011 - DNA, 42 bp, Homo sapiens
  chr19:20115866-20115908
  hypo
aaatgctttcatataaactagcgttctttctttttttttgag

SEQ ID NO: 97012 - DNA, 26 bp, Homo sapiens
  chr19:20153115-20153141
  hypo
gccacgtgtctgcctttaaaagaaaa

SEQ ID NO: 97013 - DNA, 908 bp, Homo sapiens; identical to SEQ ID NO: 55905
  chr19:20162580-20163488
  hypo

SEQ ID NO: 97014 - DNA, 20 bp, Homo sapiens
  chr19:20186937-20186957
  hypo
tttgtaatgagttgtttggc

SEQ ID NO: 97015 - DNA, 29 bp, Homo sapiens
  chr19:21237756-21237785
  hypo
ggcgtgagccaccgcgcccggccgtcatt

SEQ ID NO: 97016 - DNA, 121 bp, Homo sapiens; identical to SEQ ID NO: 32386
  chr19:21261375-21261496
  hypo

SEQ ID NO: 97017 - DNA, 20 bp, Homo sapiens
  chr19:21263418-21263438
  hypo
gcaggcgtgagccaccgtgc

SEQ ID NO: 97018 - DNA, 90 bp, Homo sapiens
  chr19:21305620-21305710
  hypo
ttaactggtgagttcgcttatcaatataacattcagattagttaattaagataaaagccaggtgtggtggctcacgcctctaatcccagc

SEQ ID NO: 97019 - DNA, 30 bp, Homo sapiens; identical to SEQ ID NO: 32387
  chr19:21386946-21386976
  hypo

SEQ ID NO: 97020 - DNA, 19 bp, Homo sapiens
  chr19:21513268-21513287
  hypo
tttttatttttttagacgg

SEQ ID NO: 97021 - DNA, 258 bp, Homo sapiens
  chr19:21513406-21513664
  hypo
cgctggccaccatgcccggctaatttgtagccaaactttaaaaagagtttagctctatttttaaaaagaaacaaagaacaggtgaaattgattgtaacaatttaacccaatatatcgaaaatattgtcattttaatatgtgagaaatatgtaattattaatgaagtgtgtctatatatatggaactaaacctttgaaactaactcgtattttacctttctagcacatcgcagttcagaccaggcgcattccaggcagc

SEQ ID NO: 97022 - DNA, 350 bp, Homo sapiens
  chr19:21623089-21623439
  hypo
gaattggcaagcccctcttgccgccccaagcctctctgggtcggactactagttacaccccgggaggtgatcaggctccccttccgtccttacgggacgggtcctgccttggtccccaataacttaccgtggttcctaaagtgcgctatttctggaatcatcctgtagcccttctcaggctccgttgcactgctgggtagggatgccgggtcatgggagagctgatttcccctccgggctgaagttctcccggcggtgcctgggtcccaggtttcccttgaatcaaggctccagccccgattttcccttgaatccggggctccagccccgatttcaaggcaaaggagaca

SEQ ID NO: 97023 - DNA, 93 bp, Homo sapiens
  chr19:21627222-21627315
  hypo
ttactacatttttcaaccaaaaggttaaatacttaaatattgaaagtgacattctggattatccttttccacgcagactacattgcagttttt

SEQ ID NO: 97024 - DNA, 36 bp, Homo sapiens
  chr19:21642232-21642268
  hypo
aataaagtttaaggctaggagcggtggctcatgcct

SEQ ID NO: 97025 - DNA, 28 bp, Homo sapiens
  chr19:21644229-21644257
  hypo
ccaccgcgaccagctgaattaatataaa

SEQ ID NO: 97026 - DNA, 106 bp, Homo sapiens
  chr19:21645409-21645515
  hypo
gactacctaactgtacccaatcgattaatttgctttgcttcatcacacaccttatagaagccttttcttcaagaccctctggtagccccaaaaccacaaacgtcgg

SEQ ID NO: 97027 - DNA, 19 bp, Homo sapiens
  chr19:21647161-21647180
  hypo
caaaaagaaataagaaaaa

SEQ ID NO: 97028 - DNA, 30 bp, Homo sapiens; identical to SEQ ID NO: 32393
  chr19:21654950-21654980
  hypo

SEQ ID NO: 97029 - DNA, 31 bp, Homo sapiens; identical to SEQ ID NO: 55917
  chr19:21664417-21664448
  hypo

SEQ ID NO: 97030 - DNA, 28 bp, Homo sapiens
  chr19:21665141-21665169
  hypo
acataagaaataaaaaaaaatcggctgg

SEQ ID NO: 97031 - DNA, 30 bp, Homo sapiens
  chr19:21676650-21676680
  hypo
taagattatgacatataatcacgcccagct

SEQ ID NO: 97032 - DNA, 29 bp, Homo sapiens
  chr19:21676799-21676828
  hypo
ccatggtcgctggcctagggagtgtgact

SEQ ID NO: 97033 - DNA, 41 bp, Homo sapiens
  chr19:21717589-21717630
  hypo
ttgtgtttttttttttttgttcgtttgtttgtttttttttg

SEQ ID NO: 97034 - DNA, 29 bp, Homo sapiens
  chr19:21758572-21758601
  hypo
gttaagaagatttgctttggccgggcgcg

SEQ ID NO: 97035 - DNA, 140 bp, Homo sapiens
  chr19:21760987-21761127
  hypo
agtttaagggattctcctgcctcagcctcccatggtgttcaatttttaaaaatgcttttcctacatctgttaagataatcttgtagatttttctacttattctgttaatgaaataatttcatgagcggttctcaaccgag

SEQ ID NO: 97036 - DNA, 30 bp, Homo sapiens
  chr19:21766527-21766557
  hypo
gctcacgatggatcacgttcaataaaaaac

SEQ ID NO: 97037 - DNA, 91 bp, Homo sapiens
  chr19:21767645-21767736
  hypo
gcttaggaactgggattattccgagggcaatgaggagccactgaaaggcacagccagggctgggcgcggtggctcatgcctgtaatcccag

SEQ ID NO: 97038 - DNA, 34 bp, Homo sapiens; identical to SEQ ID NO: 32395
  chr19:21792702-21792736
  hypo

SEQ ID NO: 97039 - DNA, 174 bp, Homo sapiens
  chr19:21798908-21799082
  hypo
aggcgtgagccaccgcgcccggcctaaaacccttttctttatgcccctcaggtggacctcaaatcatggctgggtgctttccatttcaccaatcactgtttgctcaaataaacttgttaacgttttaacattgactccctttaatttttaacaggagagactgagcatggtggc

SEQ ID NO: 97040 - DNA, 43 bp, Homo sapiens
  chr19:21799321-21799364
  hypo
tgggcaataagagtgaaactccgtctcaaaaaaaaaaaaagtt

SEQ ID NO: 97041 - DNA, 27 bp, Homo sapiens
  chr19:21799850-21799877
  hypo
tttttatttgagatggagtttcgctct

SEQ ID NO: 97042 - DNA, 44 bp, Homo sapiens
  chr19:22239549-22239593
  hypo
gattacaggtgtaagccaccgcgcccggccgaatttagaaattt

SEQ ID NO: 97043 - DNA, 32 bp, Homo sapiens; identical to SEQ ID NO: 32396
  chr19:22606208-22606240
  hypo

SEQ ID NO: 97044 - DNA, 17 bp, Homo sapiens
  chr19:22623788-22623805
  hypo
ctttctttctttttttt

SEQ ID NO: 97045 - DNA, 28 bp, Homo sapiens
  chr19:22636973-22637001
  hypo
gtgtagggattaccgtcgtgagccacca

SEQ ID NO: 97046 - DNA, 43 bp, Homo sapiens
  chr19:22768072-22768115
  hypo
tgtgtggtggctttagtcaagcgttgttcattgttgttttata

SEQ ID NO: 97047 - DNA, 238 bp, Homo sapiens
  chr19:22799547-22799785
  hypo
gcctagggcacctgagctgagcgtttgaccgtgtcctgggagttcataggtaaaataactgccgcgacctgcactgacccggaccggagtgcctgaaaggggccagctgcctattccgccagtccgcctggagggctgggacaggcttggtcctgtggacgaggttccatctcccctgcctgcggaaggaagaacgtgaagcacagagaaaggaagcgggatgatgactgcccctgtg

SEQ ID NO: 97048 - DNA, 181 bp, Homo sapiens
  chr19:22815033-22815214
  hypo
ggcccatagtacatatttgaacaaaatgctaacttagtatctcagaataatggcaacatttttttgtttgttttatggtggaacacacacactcagggcataattatacagcttctaatattccaaaaagagtattcaagccctttttgtttgtttgtttgagacagaatctcgctctgct

SEQ ID NO: 97049 - DNA, 101 bp, Homo sapiens; identical to SEQ ID NO: 32398
  chr19:22815453-22815554
  hypo

SEQ ID NO: 97050 - DNA, 37 bp, Homo sapiens
  chr19:22824861-22824898
  hypo
taggattacaggcgtgagccagcgcgcccggccacgc

SEQ ID NO: 97051 - DNA, 30 bp, Homo sapiens; identical to SEQ ID NO: 32400
  chr19:22825460-22825490
  hypo

SEQ ID NO: 97052 - DNA, 28 bp, Homo sapiens
  chr19:22880323-22880351
  hypo
cccccccgccaaaaaaaaagaaatgaat

SEQ ID NO: 97053 - DNA, 28 bp, Homo sapiens
  chr19:22966070-22966098
  hypo
aaactccgtttcaaaaaaagaaagaaaa

SEQ ID NO: 97054 - DNA, 31 bp, Homo sapiens
  chr19:23083159-23083190
  hypo
attcctttggccttcacgttttcgggagctt

SEQ ID NO: 97055 - DNA, 689 bp, Homo sapiens
  chr19:23084163-23084852
  hypo
taggattacaggcgtgagccactgctcccagtctctttctgaatcttgactctgtgggcaccgcccgttagggaggctcgcgtccctgcccaggggccttcattaaccgaaggggacgtgccacgctgggggtgttcgaggtgtgggaggcctcctctgctggcgtcccacctctccgtttaccgccttctcccatcactccgctgggggctcatcccctgagacggggtccgggagcgtggtggaaatgatcgaggtgtagaggttggagggtcgtggcccagcggcttctgtcccagggggtggcggcgcgggcccgggggtggccatctgggtcccagcccttccttccctgtagcaggggcggacgaggtgcatcctgttccacccctgcacccttctcctccccgcccccctccgggtggaccagcagaccgcgggctgtggtgggaaggtgggcgggcttatgccaccagccgcccccactgcgccgcccacgtctaaggctccagctgggcggaacagtctcaggtctggagcgccacacttggctgtagggtggacccggtgcgccactgcccacggccaccggctggcttctcagtcgggccactgggtcgaccagatgtgggctgcgagccgcgaacattgctcttggccactagctcgaaatactaaaggtcaaccta

SEQ ID NO: 97056 - DNA, 18 bp, Homo sapiens
  chr19:23252729-23252747
  hypo
aaataaataaaaataaaa

SEQ ID NO: 97057 - DNA, 30 bp, Homo sapiens
  chr19:23256399-23256429
  hypo
caggctgggcactgtggctcacgcctgtaa

SEQ ID NO: 97058 - DNA, 293 bp, Homo sapiens; identical to SEQ ID NO: 12209
  chr19:23258305-23258598
  hypo

SEQ ID NO: 97059 - DNA, 83 bp, Homo sapiens
  chr19:23271992-23272075
  hypo
tagttctgttatatgatgcatcgtatttcttttttcctatttatttttttctgtctcccaggctggagtgtagtggtgtgatc

SEQ ID NO: 97060 - DNA, 40 bp, Homo sapiens
  chr19:23297429-23297469
  hypo
ggcgtgagccaccatgcccggccctaaagttgtttttctt

SEQ ID NO: 97061 - DNA, 43 bp, Homo sapiens
  chr19:23378284-23378327
  hypo
ctgggatcacatgtgagccaccgtgcctagcccaacagcatca

SEQ ID NO: 97062 - DNA, 38 bp, Homo sapiens
  chr19:23453187-23453225
  hypo
tatatttcagagtcaacgggtaacattttatttttaat

SEQ ID NO: 97063 - DNA, 31 bp, Homo sapiens; identical to SEQ ID NO: 32405
  chr19:23690008-23690039
  hypo

SEQ ID NO: 97064 - DNA, 31 bp, Homo sapiens
  chr19:23694934-23694965
  hypo
gggcctgggaatcccacggacaaaaagctct

SEQ ID NO: 97065 - DNA, 30 bp, Homo sapiens
  chr19:23793798-23793828
  hypo
ttcagttagaaatgccgaattcacctgctg

SEQ ID NO: 97066 - DNA, 47 bp, Homo sapiens
  chr19:24178251-24178298
  hypo
gattgatgccacaatgaatcacgatcgcatttctcttctgagcctga

SEQ ID NO: 97067 - DNA, 147 bp, Homo sapiens; identical to SEQ ID NO: 32406
  chr19:24270270-24270417
  hypo

SEQ ID NO: 97068 - DNA, 31 bp, Homo sapiens
  chr19:24273700-24273731
  hypo
agtttaggaagtttctcggacatgttttttt

SEQ ID NO: 97069 - DNA, 120 bp, Homo sapiens
  chr19:28296829-28296949
  hypo
acataggaccaccacggcctcggccacgctagctcactggccgcaccgctgcccgccttgctgttcaccagtccctgggcatcccgcatctggttgctgaggaacgcctgacgccgcctt

SEQ ID NO: 97070 - DNA, 494 bp, Homo sapiens
  chr19:28341877-28342371
  hypo
ctaccctccaccctcagcatccggcctgctggccgctcctctgtcaggtctccgggtcaactagatgtcggccacgaacgccagacttagcctccggctcgccatgtttgaggtcgaccagcaggccctctcaccggagtgagctgtaaggagggatgctcagtgaaccaatcaagacgtgggccacggaggtcagcagggctctgggcaattcatggtcctgacctggcaagcaccactctgggacctgagcgttgcaaacccatctacacccgtccaacctgtgttggccggcgctcctcgctcgctcaggcctccgggttgacaagagttcagccgtgagcgcctggtttagccgccagcttacagtgtcggaggtcaaacagcaagccctcccccggagtaagcagtgagaagggaagcccggcggaccgagtgcaacacgggctgcagcggggagctgggttcgggacgggtcagagtcctgaccatgc

SEQ ID NO: 97071 - DNA, 43 bp, Homo sapiens
  chr19:28663019-28663062
  hypo
cttcatccattcaactgcagacgtgctccacttgctctgagtc

SEQ ID NO: 97072 - DNA, 26 bp, Homo sapiens
  chr19:28668504-28668530
  hypo
atggccaaagaggaacagctccggtc

SEQ ID NO: 97073 - DNA, 38 bp, Homo sapiens
  chr19:29208560-29208598
  hypo
ctcgatctcctgacctcgtgattatattacagagctat

SEQ ID NO: 97074 - DNA, 36 bp, Homo sapiens; identical to SEQ ID NO: 32408
  chr19:29930744-29930780
  hypo

SEQ ID NO: 97075 - DNA, 121 bp, Homo sapiens; identical to SEQ ID NO: 32409
  chr19:29930899-29931020
  hypo

SEQ ID NO: 97076 - DNA, 238 bp, Homo sapiens
  chr19:29993078-29993316
  hypo
gcaagacacccctggcaactgcgcaggacacatctcagagctgggccacataagacgggaggaagctgcggcatttatccatccactccattcatccgtcactggctggagccactcctgggatgccgatgcccacacgcctccgtggctatagggagcccacaggctgagtcacaggaaccgagggtaaggtggctggtgtgcagggtggccgtgcgtgtccaggaggtacaggggg

SEQ ID NO: 97077 - DNA, 202 bp, Homo sapiens; identical to SEQ ID NO: 12228
  chr19:30015760-30015962
  hypo

SEQ ID NO: 97078 - DNA, 904 bp, Homo sapiens; identical to SEQ ID NO: 12229
  chr19:30016024-30016928
  hypo

SEQ ID NO: 97079 - DNA, 58 bp, Homo sapiens; identical to SEQ ID NO: 12230
  chr19:30017451-30017509
  hypo

SEQ ID NO: 97080 - DNA, 144 bp, Homo sapiens; identical to SEQ ID NO: 12231
  chr19:30017577-30017721
  hypo

SEQ ID NO: 97081 - DNA, 850 bp, Homo sapiens; identical to SEQ ID NO: 12232
  chr19:30017765-30018615
  hypo

SEQ ID NO: 97082 - DNA, 530 bp, Homo sapiens; identical to SEQ ID NO: 12233
  chr19:30019080-30019610
  hypo

SEQ ID NO: 97083 - DNA, 270 bp, Homo sapiens; identical to SEQ ID NO: 12234
  chr19:30019660-30019930
  hypo

SEQ ID NO: 97084 - DNA, 357 bp, Homo sapiens; identical to SEQ ID NO: 55963
  chr19:30019993-30020350
  hypo

SEQ ID NO: 97085 - DNA, 97 bp, Homo sapiens; identical to SEQ ID NO: 55966
  chr19:30021252-30021349
  hypo

SEQ ID NO: 97086 - DNA, 80 bp, Homo sapiens; identical to SEQ ID NO: 32418
  chr19:30102074-30102154
  hypo

SEQ ID NO: 97087 - DNA, 29 bp, Homo sapiens
  chr19:30131584-30131613
  hypo
tctttcttttttttttaagaacggagtct

SEQ ID NO: 97088 - DNA, 30 bp, Homo sapiens; identical to SEQ ID NO: 55970
  chr19:30165118-30165148
  hypo

SEQ ID NO: 97089 - DNA, 341 bp, Homo sapiens; identical to SEQ ID NO: 32419
  chr19:30185995-30186336
  hypo

SEQ ID NO: 97090 - DNA, 30 bp, Homo sapiens; identical to SEQ ID NO: 55972
  chr19:30215218-30215248
  hypo

SEQ ID NO: 97091 - DNA, 30 bp, Homo sapiens; identical to SEQ ID NO: 55973
  chr19:30296837-30296867
  hypo

SEQ ID NO: 97092 - DNA, 197 bp, Homo sapiens
  chr19:30314898-30315095
  hypo
agccacctccagacaccagtgcgtgctcccgatgctgctatggaaggtgctacttgacctaagggactcccacaacaacaaaagcttgaagctgtggagggccacggtggcgtggctctcctcgcaggtgttctgggctccgttgtaccaagtggagcaggtggttgcgggcaagcgttgtgcagagcccatagcca

SEQ ID NO: 97093 - DNA, 221 bp, Homo sapiens
  chr19:30495017-30495238
  hypo
ggtccaatttgctgccgtgagaaaaggtctaattgttgcagaaatttaatgatctagagcgacatcagggctgtgagattttatgaactgtttacaccgtaattttcattttgttaatgcagtcttttttttgtaacccattcatggctagagcataagtgattgtgttttatttaaaatagcattgcatagcatgagagccgtatcggagaacatgtgcc

SEQ ID NO: 97094 - DNA, 17 bp, Homo sapiens
  chr19:30534903-30534920
  hypo
ttatttttatttttttg

SEQ ID NO: 97095 - DNA, 163 bp, Homo sapiens
  chr19:30535944-30536107
  hypo
acttgaatgtgcttaagagcacggagccgaatgtgacctgtgcaggttttccacacggccaggactcagacctgtgtgtgtcttctgtgcggttgttgcacactccaaatctggtctgtgtgggttccttaataagaaagtcgctgtaggaaaagctgtccat

SEQ ID NO: 97096 - DNA, 43 bp, Homo sapiens
  chr19:30583763-30583806
  hypo
ggctgctcctccctgggccaccgagggacaggagacccatgga

SEQ ID NO: 97097 - DNA, 133 bp, Homo sapiens
  chr19:30635828-30635961
  hypo
tcccttcctccatcccggcctgtttatggattcctgactgagtccgccaggcggcttgaagcggttgtggacagctgggccgcttggcattttatggtgagtggcggcttcccaaggccgtaactgtgtatgc

SEQ ID NO: 97098 - DNA, 115 bp, Homo sapiens; identical to SEQ ID NO: 32423
  chr19:30637462-30637577
  hypo

SEQ ID NO: 97099 - DNA, 609 bp, Homo sapiens; identical to SEQ ID NO: 55977
  chr19:30716160-30716769
  hypo

SEQ ID NO: 97100 - DNA, 3088 bp, Homo sapiens; identical to SEQ ID NO: 55978
  chr19:30716952-30720040
  hypo

SEQ ID NO: 97101 - DNA, 31 bp, Homo sapiens; identical to SEQ ID NO: 55979
  chr19:30730220-30730251
  hypo

SEQ ID NO: 97102 - DNA, 914 bp, Homo sapiens; identical to SEQ ID NO: 32426
  chr19:30935127-30936041
  hypo

SEQ ID NO: 97103 - DNA, 338 bp, Homo sapiens; identical to SEQ ID NO: 32427
  chr19:30936340-30936678
  hypo

SEQ ID NO: 97104 - DNA, 22 bp, Homo sapiens
  chr19:31017826-31017848
  hypo
tccctttttctttttttgagac

SEQ ID NO: 97105 - DNA, 43 bp, Homo sapiens
  chr19:31126106-31126149
  hypo
aaggattcccatcccaaacaacgctaagtaaagaaacaggcat

SEQ ID NO: 97106 - DNA, 30 bp, Homo sapiens; identical to SEQ ID NO: 55981
  chr19:31210699-31210729
  hypo

SEQ ID NO: 97107 - DNA, 261 bp, Homo sapiens; identical to SEQ ID NO: 32428
  chr19:31217749-31218010
  hypo

SEQ ID NO: 97108 - DNA, 52 bp, Homo sapiens
  chr19:31275151-31275203
  hypo
ccactgacttggagagacagccggttggtgcggggtttgtgtgggtttattt

SEQ ID NO: 97109 - DNA, 57 bp, Homo sapiens
  chr19:31493090-31493147
  hypo
ggagctgcccatatggggaggcggtctttcaccgacgattctgcagacagaaattgc

SEQ ID NO: 97110 - DNA, 1184 bp, Homo sapiens
  chr19:31767643-31768827
  hypo
ctatctgactgttaatctgttcggtggacagtttggataagtcccgtagccggaagcctaagtgtgactctaggtgactgatgtacgtggaaggagtcctgatttgggacgcacaatcgttacaaaagaagacggggtggccagtgtccaagtttttgaggaactttgttccacctgtccttcgaagctggtatttcacgttggccagccagtggctgatggtggtcatggacagcccggtgaacctggagatatgcatccgctcctgggggctcaggtctgacatgatgtacttcccttctgaggtctgccggaggctggcggcaaactgggcctggaggatcaggaggtgctgggggttccagtttgactggcggcccttcctcttctgggcgggcgtcgactcctcagcctcctccagagtggccccgtcaatgtcagacttctcggagatgctggaaggagtggaggattttgacgtgtggctctctgtcaagttcttcagcatatcggatatatctgacaaggcattctcgcgtagcggcgagtttgacatgaatgatacgacggcagatgtctttgccgttgtcaccgtggatgaggaggttgccggggctgtggacgtgggtgacagaagcactgaacccaaggagcagcctttgtcactcttcccttttgtcaagtctatgggctggtcgttgttgacgtggtagaaatagcggtcgaggtggtctgccttcttggactgcaggggcggcggggtggccacagcagccttctccgccaggctgttgctcatcttgaaaagcatgctcatggggtccagggcaggcagggagggcttggcggccttgcccaggtgaatgttcatgactgactgcagggcgctcaaagggttaacaaaaggctgttcaggcgggtggtcggtgatgatggccgtgctgccactcaaactgctggctaggggcttcaccagctccttgccattctccaccggctcagcgagggggctcccatccttgcacccatcccgcggggggctggggctgttctcctggctgcggaagcccccatcgctggatgcctccatcttgatgggttccccgacttcgctgctacatggggagggagtggcccgcttgggcggggaaagcttcccatccggctccttcatcttctcctcc

SEQ ID NO: 97111 - DNA, 802 bp, Homo sapiens
  chr19:31769866-31770668
  hypo
tgcacttcagcaccttctgggcgtcttccttcccttccatttccagcaaggagcgtttgcgaggcttggaccagcgcttggggttgttgttatcggtctcatggttgtcgtcgcggtaatgccccgtctcgttcatgtgcaccgtcaactccaccagggtgtcgtaggcagcgctgcagtccttacagcggaacttgctggcccccgtgaagatggagccatagagcttgctgctctgccggtacagctgcacggtgctgaagaggctgggctccgggagcatgcggctctgtgacacctgctgcagcgtcttagccatggcgctctggtgccagtcgaagctcccgctgccacagctgctgctgctgctactgctgctgctgctgctgccgttgttcttctccgaggagggctggtgcaggttgaggttgaggttggaccagtaggagttggagaggaagttgttgtacacggccttcatctgctccaggctatccgacacagtcgtgtcttccagtgggaccgtgacctccttggtctcctcttcgttcttgatggagccgctttcaaagtcagccattcggtcactggtctcactgatgtgtgactcgctgtccatttcatggcaggaaaactcggcggccggggagttctggtagctggggcaggccctggcgagctccttctccgggcacatgtacttggccgagggctctccatctgccgtatgctcctctgggtctaaaccttcgtccaccagggcagcagcctttaactcttcggaaacataggctgccatgat

SEQ ID NO: 97112 - DNA, 108 bp, Homo sapiens
  chr19:31792446-31792554
  hypo
gggctgcctgagacatgcctgcgggaaggcactggccctgtgctgggcatcgtcatagagcaggagacaccccggcaaagggattccgcaaggtccaccctcaggcct

SEQ ID NO: 97113 - DNA, 240 bp, Homo sapiens
  chr19:31794097-31794337
  hypo
ctaacagccaagccttcactccggcaaatcgccccccatctctctgggaagagactgaagatggtggagctgctgacccgcaggcctgagtgttgtaaagggacctttctccactacgctaaggaatacgcccgggtctgcactgcgacattggtcgtgctgcaacacaggacagagacggcagcctctgagatggcatagacctggctcaccggagacgcacttggtccacataggcac

SEQ ID NO: 97114 - DNA, 129 bp, Homo sapiens
  chr19:31827454-31827583
  hypo
atcttcatgttttaaaaaatccggttatctaaggaacgaagtttcagacccaccagaactgtagaagggcatcggatcctggtcagcagggtctcactccagttcttcggggtctgagactctctggaa

SEQ ID NO: 97115 - DNA, 25 bp, Homo sapiens
  chr19:31839540-31839565
  hypo
tgacaatacccagaccctgtgcgct

SEQ ID NO: 97116 - DNA, 90 bp, Homo sapiens; identical to SEQ ID NO: 12245
  chr19:31839837-31839927
  hypo

SEQ ID NO: 97117 - DNA, 182 bp, Homo sapiens; identical to SEQ ID NO: 12246
  chr19:31839941-31840123
  hypo

SEQ ID NO: 97118 - DNA, 36 bp, Homo sapiens; identical to SEQ ID NO: 12247
  chr19:31840722-31840758
  hypo

SEQ ID NO: 97119 - DNA, 188 bp, Homo sapiens; identical to SEQ ID NO: 55986
  chr19:31841146-31841334
  hypo

SEQ ID NO: 97120 - DNA, 25 bp, Homo sapiens
  chr19:31987294-31987319
  hypo
cagagttttgctcttattgcccgca

SEQ ID NO: 97121 - DNA, 43 bp, Homo sapiens
  chr19:32063824-32063867
  hypo
gaggttttgtcatcccacccacgacaacctctgttagtcaata

SEQ ID NO: 97122 - DNA, 43 bp, Homo sapiens
  chr19:32064207-32064250
  hypo
gattcatttagcattcaaagtcgagtaaaaggaggatttggtc

SEQ ID NO: 97123 - DNA, 43 bp, Homo sapiens
  chr19:32078977-32079020
  hypo
tctcccctgattcttcccttgcggtgggctgtgcccatgtaca

SEQ ID NO: 97124 - DNA, 70 bp, Homo sapiens
  chr19:32083442-32083512
  hypo
caagggaatggtgacagcttgcgcttgccggggagtcctgctgccttccgaggtgtgaagggaaggcatg

SEQ ID NO: 97125 - DNA, 190 bp, Homo sapiens
  chr19:32088783-32088973
  hypo
ccactcccatgtcaccaggggcgaggctggccttctggagtctgcagctctgtgagtccccaacagggtggggcttatttagcgatggcatcaggctgcaatgtaggctgaaacacacctaccacacactgcgtgtgcagaatgctttcacacgcattaattagtatgcgagctctcctctgccctggag

SEQ ID NO: 97126 - DNA, 30 bp, Homo sapiens; identical to SEQ ID NO: 32437
  chr19:32323971-32324001
  hypo

SEQ ID NO: 97127 - DNA, 149 bp, Homo sapiens
  chr19:32366588-32366737
  hypo
agcttcctgctcacagagaggcgaggctggctcaggccccgacggtgacgctgacgacggcgacagggaggtgtgcgaagccgggcgcgagctgtgccagctctcgctaatcctctgcagtatggttcgctgctaatttgtcatggcac

SEQ ID NO: 97128 - DNA, 83 bp, Homo sapiens
  chr19:32374418-32374501
  hypo
aagcttggcattagtcacagccgggccggctgtgacaggcctgaagtgagggagattaatgcgaggctgggacactttattat

SEQ ID NO: 97129 - DNA, 82 bp, Homo sapiens
  chr19:32380866-32380948
  hypo
acaggtcctcaatgagtgttgcgggtggaagcgtcgcaggccagctgagcccaaaaatggggcttagcccacagggttctcg

SEQ ID NO: 97130 - DNA, 119 bp, Homo sapiens
  chr19:32537989-32538108
  hypo
aaaaaataaatcactgggaaccgcagcagggtgagaacccagacctcagcaagtcccaatttcagaggtgacagcatctttaaatgccgcaggagtgcgctcctagctgaggcaggtgt

SEQ ID NO: 97131 - DNA, 75 bp, Homo sapiens; identical to SEQ ID NO: 32438
  chr19:32672522-32672597
  hypo

SEQ ID NO: 97132 - DNA, 346 bp, Homo sapiens
  chr19:32718519-32718865
  hypo
agctatgctagggaggggttccgggagggccactcagaggaggtgacggtgaggagacctgagtgtggtgagcagcgagtcacctgtgaatctgggacaagcatttccccgcagagggaacagccgaggcgaaggcccgaggaggggaggggcttggtgtgcctgcggaacagttgcgcggagccccgtgtggctgaaaaggagaaggcgaaggagaggcgtaggggaggggacaggtggcaagagcccagagaaccttctggggcacaggagggagtgtggattttcttttgtgtatgatgggagccgttggagactttgtgcgtgagagcgacgagacctgatt

SEQ ID NO: 97133 - DNA, 30 bp, Homo sapiens
  chr19:32834787-32834817
  hypo
acgaagatacactttcgttcgcttgtttta

SEQ ID NO: 97134 - DNA, 138 bp, Homo sapiens; identical to SEQ ID NO: 32439
  chr19:32835110-32835248
  hypo

SEQ ID NO: 97135 - DNA, 291 bp, Homo sapiens
  chr19:32845481-32845772
  hypo
catcagcatgtccttactcaccgtcattgaaaaattgagagaaaggacagaccaaaacgcttcagacgatgacattttgaaagagttgcaggacaacgcccagtgccaacccaacagcgatacaagtttgtccggaaacaatgtggtggaatacatcccgaatgctgaacgaccctaccgttgccgcctgtgtcactacacaagtggcaacaagggctacatcaagcagcacttacgagtccatcgacagagacagccttatcagtgtcctatctgcgagcacatagcgga

SEQ ID NO: 97136 - DNA, 50 bp, Homo sapiens
  chr19:32849469-32849519
  hypo
tatgtcagcagataccgcaggagctcaaatagagccgcaagcaaagccct

SEQ ID NO: 97137 - DNA, 30 bp, Homo sapiens; identical to SEQ ID NO: 32441
  chr19:32850267-32850297
  hypo

SEQ ID NO: 97138 - DNA, 193 bp, Homo sapiens
  chr19:32850566-32850759
  hypo
tttagtaacatggctacttttcgttggatccatgtctcctgcgtttcggagagctgcatattcatgtcagtcataacctttgtccctgtaacctgtcagttaactagaaagaattatacattgcatagcacttaaaaatttgcggccgcttttcctttcttgttgcgttggtagctgacgtttagtggtaaac

SEQ ID NO: 97139 - DNA, 30 bp, Homo sapiens
  chr19:32853027-32853057
  hypo
caagtgtccgcccaccttggcctcccaaag

SEQ ID NO: 97140 - DNA, 410 bp, Homo sapiens; identical to SEQ ID NO: 32443
  chr19:32898171-32898581
  hypo

SEQ ID NO: 97141 - DNA, 30 bp, Homo sapiens
  chr19:32975185-32975215
  hypo
accaaatctctcaacgaatcatgttattaa

SEQ ID NO: 97142 - DNA, 29 bp, Homo sapiens
  chr19:33084514-33084543
  hypo
ttaagcacgtgtaccagcatgactctacc

SEQ ID NO: 97143 - DNA, 46 bp, Homo sapiens
  chr19:33143456-33143502
  hypo
ggctacaagagcgaaactccatcccgggggtagggtgtggggttgg

SEQ ID NO: 97144 - DNA, 175 bp, Homo sapiens; identical to SEQ ID NO: 12251
  chr19:33166793-33166968
  hypo

SEQ ID NO: 97145 - DNA, 499 bp, Homo sapiens; identical to SEQ ID NO: 12252
  chr19:33166988-33167487
  hypo

SEQ ID NO: 97146 - DNA, 455 bp, Homo sapiens; identical to SEQ ID NO: 12253
  chr19:33167496-33167951
  hypo

SEQ ID NO: 97147 - DNA, 97 bp, Homo sapiens
  chr19:33209599-33209696
  hypo
taactttacttcaccgtcttcatttacatcgggcgtaccccaagcagaaggtatttaaattcacagaaattctgccgggcctttgagtccctgtgtt

SEQ ID NO: 97148 - DNA, 30 bp, Homo sapiens
  chr19:33211876-33211906
  hypo
ccaagcgacactggcgtccccagggccccg

SEQ ID NO: 97149 - DNA, 43 bp, Homo sapiens
  chr19:33304761-33304804
  hypo
tgaataactgctgcatagaaacggtgacttatttggggatttg

SEQ ID NO: 97150 - DNA, 31 bp, Homo sapiens
  chr19:33334782-33334813
  hypo
ggagtgaggcgcctgacgctgatgtaagaaa

SEQ ID NO: 97151 - DNA, 30 bp, Homo sapiens
  chr19:33355088-33355118
  hypo
tgaggcagatgatggcgaaggacgtgggct

SEQ ID NO: 97152 - DNA, 225 bp, Homo sapiens
  chr19:33355333-33355558
  hypo
tatggaggggcccaccgtggtccgccctcgctggacggccctgagctccagcgttggacattcagtccagcctgatttacacctgtttgccatacatgtgccaagagggatactggcagggtgagggctggcacaggtagcagctgcctggcgtgcccctgcatgcttccggggctgcaacaggctcccaagtctctttacccagcgtcgcgaggaccccgcaag

SEQ ID NO: 97153 - DNA, 31 bp, Homo sapiens; identical to SEQ ID NO: 32447
  chr19:33357609-33357640
  hypo

SEQ ID NO: 97154 - DNA, 151 bp, Homo sapiens
  chr19:33365574-33365725
  hypo
gtagagtgctgacacacgggtggactgtggaacaaggggatggcggcccagagcacccagcacagacgcggggagccagcctgggtcctcagtagcaggtggcatgcccagttccaggaagcagcctcatgcgctccgtaggtttgaagtc

SEQ ID NO: 97155 - DNA, 146 bp, Homo sapiens
  chr19:33367849-33367995
  hypo
caacagtggttctctaggtcacgatggcgggagcagcattcctgctgacaagcactcctgccccgcgcagccacgctgggctgccgccgcctgtcagcctgtctacaggaggctgcagagcggccgtaaatgcctttgaaatagca

SEQ ID NO: 97156 - DNA, 211 bp, Homo sapiens; identical to SEQ ID NO: 32448
  chr19:33415225-33415436
  hypo

SEQ ID NO: 97157 - DNA, 31 bp, Homo sapiens
  chr19:33488746-33488777
  hypo
gaaagagcagcaggtgcgagggccctggggc

SEQ ID NO: 97158 - DNA, 31 bp, Homo sapiens
  chr19:33515046-33515077
  hypo
aaactgcacaggaggccgggtgtggtggctc

SEQ ID NO: 97159 - DNA, 30 bp, Homo sapiens; identical to SEQ ID NO: 55999
  chr19:33532284-33532314
  hypo

SEQ ID NO: 97160 - DNA, 585 bp, Homo sapiens; identical to SEQ ID NO: 56001
  chr19:33555490-33556075
  hypo

SEQ ID NO: 97161 - DNA, 18 bp, Homo sapiens
  chr19:33557061-33557079
  hypo
gctgaagtgcaatggcgc

SEQ ID NO: 97162 - DNA, 31 bp, Homo sapiens
  chr19:33557325-33557356
  hypo
ggttcttaaccacctccgttttctaggctgc

SEQ ID NO: 97163 - DNA, 30 bp, Homo sapiens; identical to SEQ ID NO: 56003
  chr19:33575048-33575078
  hypo

SEQ ID NO: 97164 - DNA, 95 bp, Homo sapiens; identical to SEQ ID NO: 32450
  chr19:33585138-33585233
  hypo

SEQ ID NO: 97165 - DNA, 30 bp, Homo sapiens
  chr19:33672363-33672393
  hypo
ccccaccagctccacgtggatttaactatt

SEQ ID NO: 97166 - DNA, 30 bp, Homo sapiens
  chr19:33682962-33682992
  hypo
tggagagacccaggcgattgcagctagcgt

SEQ ID NO: 97167 - DNA, 30 bp, Homo sapiens
  chr19:33693397-33693427
  hypo
attctccactgacccgaggccacgaggcta

SEQ ID NO: 97168 - DNA, 120 bp, Homo sapiens
  chr19:33693686-33693806
  hypo
tccccccactgcaacccgcatcccaaccaaagatgggccggcctttctcggcctcctctcccgacagcggcctgcagtgggaagctggagcagcacacggagcggcgtggggtcatctac

SEQ ID NO: 97169 - DNA, 31 bp, Homo sapiens
  chr19:33694485-33694516
  hypo
ccacgggcctctgtggcgaggtgcccaagct

SEQ ID NO: 97170 - DNA, 31 bp, Homo sapiens
  chr19:33696683-33696714
  hypo
ggaggccgcccagggccgcctcactgtggcc

SEQ ID NO: 97171 - DNA, 38 bp, Homo sapiens
  chr19:33697259-33697297
  hypo
ggaatacaggtgggcgctgtgcccgcagccaggggacc

SEQ ID NO: 97172 - DNA, 218 bp, Homo sapiens
  chr19:33697589-33697807
  hypo
agggcctcattccacccgtggaggactttcctgtctacagtgcgtcccaggtgagcccccggagggcgtgaggcccctccggggccacttgggacagtgtgcggaggaggctggtccaggggtcacaggagcaggaggcaaggcctgcgcagggtgacctgagggcccatggccaggtggggggggtggacaaggtggtctctcgggtctcaggtccc

SEQ ID NO: 97173 - DNA, 95 bp, Homo sapiens; identical to SEQ ID NO: 32452
  chr19:33698373-33698468
  hypo

SEQ ID NO: 97174 - DNA, 216 bp, Homo sapiens; identical to SEQ ID NO: 32453
  chr19:33701376-33701592
  hypo

SEQ ID NO: 97175 - DNA, 153 bp, Homo sapiens
  chr19:33710895-33711048
  hypo
tcctctgagacctgagccacccgggaccccaacaccccggggtgatcggctgcggcctgggtgaagcctactcgcctcaagcgcacgggtgtcctcacatcctcacggtaagcctgtgtcaggtacctctccgggatgctgactgtgactact

SEQ ID NO: 97176 - DNA, 311 bp, Homo sapiens; identical to SEQ ID NO: 56006
  chr19:33717597-33717908
  hypo

SEQ ID NO: 97177 - DNA, 191 bp, Homo sapiens
  chr19:33772907-33773098
  hypo
aggccacgcttgcagccgcccttgtcccagtgcttggagagccaccaggcagactttatctgcatccctggaagtgacctgaagagactgccgggcactagaggggtccatgtgggacccggaacccaaaggatcaggttcaccaaagcctggacttccctggagggcccctgacccgtctcagcggccgt

SEQ ID NO: 97178 - DNA, 3867 bp, Homo sapiens; identical to SEQ ID NO: 12259
  chr19:33790838-33794705
  hypo

SEQ ID NO: 97179 - DNA, 30 bp, Homo sapiens
  chr19:33869569-33869599
  hypo
ttagaacatggaacccgcaggggtgatagc

SEQ ID NO: 97180 - DNA, 30 bp, Homo sapiens
  chr19:33878886-33878916
  hypo
atgaagtagatgcccggctccacggtgagc

SEQ ID NO: 97181 - DNA, 82 bp, Homo sapiens; identical to SEQ ID NO: 32455
  chr19:33882201-33882283
  hypo

SEQ ID NO: 97182 - DNA, 30 bp, Homo sapiens
  chr19:33917881-33917911
  hypo
tgtgttttatggcagcgaaccggctgttag

SEQ ID NO: 97183 - DNA, 179 bp, Homo sapiens; identical to SEQ ID NO: 32456
  chr19:33926620-33926799
  hypo

SEQ ID NO: 97184 - DNA, 184 bp, Homo sapiens
  chr19:33939088-33939272
  hypo
ggattttctaaaaaccggcaccaaacctcacagcataatcactactgcctgcctgttctgggagccaaacctcaataactgctcctgcggggctgctcctcactagatgcgcccaggacttggagccacgccttctcacgggcagaaccagacaggacacagccacctccgaggtgggcgtctg

SEQ ID NO: 97185 - DNA, 34 bp, Homo sapiens
  chr19:33996126-33996160
  hypo
acaaacaatgctgcctcgccgactctcactctgc

SEQ ID NO: 97186 - DNA, 30 bp, Homo sapiens
  chr19:33998062-33998092
  hypo
ctgcatacccagagccggggacggaatgcg

SEQ ID NO: 97187 - DNA, 31 bp, Homo sapiens
  chr19:34039505-34039536
  hypo
gttgctaccgttgcaacgcaagccaccttaa

SEQ ID NO: 97188 - DNA, 284 bp, Homo sapiens; identical to SEQ ID NO: 56010
  chr19:34112445-34112729
  hypo

SEQ ID NO: 97189 - DNA, 157 bp, Homo sapiens; identical to SEQ ID NO: 12261
  chr19:34113145-34113302
  hypo

SEQ ID NO: 97190 - DNA, 683 bp, Homo sapiens; identical to SEQ ID NO: 12262
  chr19:34113366-34114049
  hypo

SEQ ID NO: 97191 - DNA, 87 bp, Homo sapiens; identical to SEQ ID NO: 12263
  chr19:34114286-34114373
  hypo

SEQ ID NO: 97192 - DNA, 25 bp, Homo sapiens
  chr19:34127407-34127432
  hypo
agtgttacaggaaaggggtcccgat

SEQ ID NO: 97193 - DNA, 64 bp, Homo sapiens
  chr19:34158694-34158758
  hypo
cttaccttaatttgacaagtacgcaagaaataatgcaagactcgtttatgttcaggtaatgcac

SEQ ID NO: 97194 - DNA, 289 bp, Homo sapiens; identical to SEQ ID NO: 32462
  chr19:34177590-34177879
  hypo

SEQ ID NO: 97195 - DNA, 30 bp, Homo sapiens
  chr19:34208371-34208401
  hypo
gaaaaaaaaagtacacgctcaagaaaggag

SEQ ID NO: 97196 - DNA, 840 bp, Homo sapiens; identical to SEQ ID NO: 56015
  chr19:34263011-34263851
  hypo

SEQ ID NO: 97197 - DNA, 22 bp, Homo sapiens
  chr19:34270569-34270591
  hypo
tattttttgtaccctgcccctc

SEQ ID NO: 97198 - DNA, 139 bp, Homo sapiens
  chr19:34272609-34272748
  hypo
ctggagagtgaccaaggaacacggctgagggtggggggccctggcctggacccccgctgagtgcccgaagactgatggagcatgcgacctcctagcgctggctctcaggacatgaatcgggaccagaaggaggagtggg

SEQ ID NO: 97199 - DNA, 30 bp, Homo sapiens; identical to SEQ ID NO: 12265
  chr19:34287110-34287140
  hypo

SEQ ID NO: 97200 - DNA, 30 bp, Homo sapiens
  chr19:34302227-34302257
  hypo
aggagcaggagcagcggcgccgcagccggg

SEQ ID NO: 97201 - DNA, 484 bp, Homo sapiens
  chr19:34303784-34304268
  hypo
tgccgggaggagcggcggccgcagcccacccccactgctgttcgaatcaagcaggaacccctggactaggccctgcttcagtgcccacctgggcccccccagggacctggaaacagtgctggggagttctgcctgtgtatacttggccgtgggcatgagaccgagggtgaggctggagggtccaaagctggcccagcgagcaccagggtcccaggtgtcatggcaacagaacgtgggatgctggaggcatgcctgcagaaggactgttgatgcgacccaaagatacagcggtgggatctctgctgccagctctcccagcccctcagcttcgcagcctggcgcagcatcctctgaggccccggggcctgttggggcggggttggaagagccgtctgcagctacttcagaggagctgtttatccctctccacgcggggcagactctggcgggtctcctagcgtccgagagatggcttattttctac

SEQ ID NO: 97202 - DNA, 17 bp, Homo sapiens
  chr19:34317009-34317026
  hypo
gggcgggatggctcacg

SEQ ID NO: 97203 - DNA, 89 bp, Homo sapiens; identical to SEQ ID NO: 32465
  chr19:34421530-34421619
  hypo

SEQ ID NO: 97204 - DNA, 32 bp, Homo sapiens
  chr19:34538208-34538240
  hypo
agcgagactccgtctcaaaaaaaaaaaaaaaa

SEQ ID NO: 97205 - DNA, 35 bp, Homo sapiens
  chr19:34538664-34538699
  hypo
gggtgaaattttttttttagacggagtctcggtct

SEQ ID NO: 97206 - DNA, 35 bp, Homo sapiens
  chr19:34538938-34538973
  hypo
gagccaccgcgcccggcccatgggtgaaatttttt

SEQ ID NO: 97207 - DNA, 35 bp, Homo sapiens
  chr19:34603233-34603268
  hypo
caccgcacccggccgctagggaacagattctaaga

SEQ ID NO: 97208 - DNA, 31 bp, Homo sapiens; identical to SEQ ID NO: 32466
  chr19:34625925-34625956
  hypo

SEQ ID NO: 97209 - DNA, 38 bp, Homo sapiens
  chr19:34630391-34630429
  hypo
cgtgagccaccgctcccggccttctcttgaacttttct

SEQ ID NO: 97210 - DNA, 30 bp, Homo sapiens
  chr19:34803406-34803436
  hypo
atttgactactctaggaacctcgtataaat

SEQ ID NO: 97211 - DNA, 191 bp, Homo sapiens
  chr19:34846159-34846350
  hypo
ggctgtgagactgtgtgaagccgtttgtgtggtctccatgtaggtgctgtgttcccggcaccgccttgctctgaacactggtaattccaggtgctgcgcttggcagaggggtctcgccaaagcgcatgtgtgtgcatgtgtgaacgtgtgtgtcctttgcatggttgggcgtgggtgccttgctagggcat

SEQ ID NO: 97212 - DNA, 30 bp, Homo sapiens
  chr19:34893000-34893030
  hypo
accgcgcccggctcattttaaaatttttgt

SEQ ID NO: 97213 - DNA, 90 bp, Homo sapiens; identical to SEQ ID NO: 32467
  chr19:34949545-34949635
  hypo

SEQ ID NO: 97214 - DNA, 94 bp, Homo sapiens; identical to SEQ ID NO: 32468
  chr19:34963040-34963134
  hypo

SEQ ID NO: 97215 - DNA, 50 bp, Homo sapiens
  chr19:34988797-34988847
  hypo
agattgtccagtaccgagggcagcaaaaggttgacgctgagagtgagagc

SEQ ID NO: 97216 - DNA, 43 bp, Homo sapiens
  chr19:34989428-34989471
  hypo
atggaaggttctgctgtttgccgtcttctcttttctagtgatc

SEQ ID NO: 97217 - DNA, 310 bp, Homo sapiens
  chr19:35050088-35050398
  hypo
ccaggccctgtcagacgctgcaagcccagctcagaagcctggcctgggaccaagttcactgcagcaggctgggcccttgcattctgagctgggtgcggatgcgctggtgctctgggaagtcaggggctttgacaactgaaggcaaaggagccgggcacctgagggggtcccgggggagggggtgccgggggaggggatccggcgtcgtcaccctccagtccttgcccacaggtcagggagcccctgccatgggggaaggaggctgtttcttttgtaaactggtggaggcgtgcctcgcccctgggcctga

SEQ ID NO: 97218 - DNA, 62 bp, Homo sapiens
  chr19:35082485-35082547
  hypo
ccacctttctgcaaggtcctgcgtgacctggcacttgcctcgttttctgacgtgacctcctt

SEQ ID NO: 97219 - DNA, 30 bp, Homo sapiens
  chr19:35087274-35087304
  hypo
gctgagactctcagccggctctgtggcctg

SEQ ID NO: 97220 - DNA, 219 bp, Homo sapiens; identical to SEQ ID NO: 12274
  chr19:35168867-35169086
  hypo

SEQ ID NO: 97221 - DNA, 104 bp, Homo sapiens; identical to SEQ ID NO: 56029
  chr19:35169516-35169620
  hypo

SEQ ID NO: 97222 - DNA, 74 bp, Homo sapiens
  chr19:35298302-35298376
  hypo
gcctccagcccagcactgacacgagatcacaatgggtggcaccctagcctagcgtcagagcctcagtcttacct

SEQ ID NO: 97223 - DNA, 91 bp, Homo sapiens
  chr19:35323412-35323503
  hypo
atgatctggtgtcctctgtggcggctgcctgaaaagaagaggccgagggttctttgtcctatgtctctccgaatcttaatacctgccctgc

SEQ ID NO: 97224 - DNA, 46 bp, Homo sapiens
  chr19:35324045-35324091
  hypo
ttctcctctactccaaggattcgccggctcacaattgctcttcata

SEQ ID NO: 97225 - DNA, 81 bp, Homo sapiens
  chr19:35367987-35368068
  hypo
agtccttgggtttggtgcacacgaacaaatgacagttaacaatttaaaccaaataggccgggcgcggcgactcacgcctgt

SEQ ID NO: 97226 - DNA, 29 bp, Homo sapiens
  chr19:35394770-35394799
  hypo
gacagagcgagactccctctcaaaaataa

SEQ ID NO: 97227 - DNA, 35 bp, Homo sapiens
  chr19:35497191-35497226
  hypo
ctccagcctgggtgacagcgcgactctttgtctcc

SEQ ID NO: 97228 - DNA, 140 bp, Homo sapiens
  chr19:35497759-35497899
  hypo
cctgccttaggctggatgatgcggaaggagagcatttgagctgaaggggacagagctggtgatgccggggccatggaaggacattcaggcggagggactacaaatgtggaggccttggcgtgggaatgagattggagagc

SEQ ID NO: 97229 - DNA, 36 bp, Homo sapiens
  chr19:35512755-35512791
  hypo
attcacacctcgggtacgttccgttggggccgggtt

SEQ ID NO: 97230 - DNA, 89 bp, Homo sapiens
  chr19:35523453-35523542
  hypo
cgtggaggtggactcggagaccgaggccgtgtatgggatgaccttcaaaattctttgcatctcctgcaagcgccgcagcgagaccaacg

SEQ ID NO: 97231 - DNA, 22 bp, Homo sapiens
  chr19:35527937-35527959
  hypo
cgtatgagccaccacactgacc

SEQ ID NO: 97232 - DNA, 30 bp, Homo sapiens
  chr19:35550797-35550827
  hypo
tggacgtgcgaacggcgggcgccaatggca

SEQ ID NO: 97233 - DNA, 202 bp, Homo sapiens
  chr19:35551107-35551309
  hypo
gcccttggggaggccacgtcccctcaagctccccaggatggggccatgtactttcagaccccctagggcagggccaagcctgggctctggggacctgggctccagtcccctgtcgccgccccctgctgacccttgtcccacagactgtggccgcaggaagctgcccgtggaccgcatcgtgggaggccgggacaccagcttg

SEQ ID NO: 97234 - DNA, 31 bp, Homo sapiens
  chr19:35566027-35566058
  hypo
accaaattccattttacggggcacttggtcc

SEQ ID NO: 97235 - DNA, 30 bp, Homo sapiens
  chr19:35571066-35571096
  hypo
tgactggggctcggccgatcgaagtggacg

SEQ ID NO: 97236 - DNA, 19 bp, Homo sapiens
  chr19:35582529-35582548
  hypo
gactctgtctcaaaaaata

SEQ ID NO: 97237 - DNA, 31 bp, Homo sapiens
  chr19:35587924-35587955
  hypo
gggaccaggaagggcccgggttgggagaaat

SEQ ID NO: 97238 - DNA, 17 bp, Homo sapiens
  chr19:35589422-35589439
  hypo
aaaaaaaaaaaattaat

SEQ ID NO: 97239 - DNA, 48 bp, Homo sapiens
  chr19:35589863-35589911
  hypo
gcgccctgcgctgcgcgttgcctgcccgcgtggcgagccagcctggga

SEQ ID NO: 97240 - DNA, 31 bp, Homo sapiens
  chr19:35590624-35590655
  hypo
ctgccacctgcagggccgctatatccgcctg

SEQ ID NO: 97241 - DNA, 33 bp, Homo sapiens
  chr19:35591099-35591132
  hypo
gcgtgaagaacagcaacgccgggcgtgggagct

SEQ ID NO: 97242 - DNA, 36 bp, Homo sapiens
  chr19:35599308-35599344
  hypo
aaaaaaaaaaaaaaagaatggcgttcattcatccac

SEQ ID NO: 97243 - DNA, 120 bp, Homo sapiens
  chr19:35608852-35608972
  hypo
tgaggacatagtggacgacgtcggggattgctggggggttaagtgagtgagaacacggcaaggtcagtgtgcactccagggcaaggtggaggaagtgccagctctcgctatcaaaattat

SEQ ID NO: 97244 - DNA, 88 bp, Homo sapiens
  chr19:35613702-35613790
  hypo
cgctggggttctgtgcgccatgggcatcatcatcgtcatgagtgagtggaggagctcgggggagcaggcgggccggggctggggctcc

SEQ ID NO: 97245 - DNA, 523 bp, Homo sapiens
  chr19:35615954-35616477
  hypo
gggcttaaggcctagacgtgtggctgatgaacgtggcccacggtcagcagctcacaggcgggccatcaccccaagtagggccaggagccagccaaggggccgtccaggggccccagccatgcccagagtcccgttggtggtctcaggcactgaggtcgatctcgtgatgctggtagatctgtgtggggcccttaaagcaagcagcaaagaggaagcgtctgccggccatagtgatgtgggcaaaggcacggggggccaccagggccggaggccccagctcctgcagtggctccaggagccccttgtcaggctcaaggcggaggacctggctgaaggcgaagtcgctgcctaggatggccagctggtccctggcgatgagcagtggctggaagacgtgggcaccgcgcgagggaagttgctgcagcagacgaaacatggagccgtcccagcgcatgacctgtgggggtgtggccagtgagggcctggggtcccgggggtctctgggggccgtggaacagcttgg

SEQ ID NO: 97246 - DNA, 423 bp, Homo sapiens
  chr19:35617131-35617554
  hypo
agtgctgaaaagccagccccccgcccccaggcccagcctcaccatggagtccccaatgtagcgtgtgaggcacaggaacacgtccccaccagcctggaagtggcgtgtggcatagacatcctcggcctcggggatgtctgtgcgtctctcgaagcggccaccggtccagtggaagagcacgggccgctgggaagccgaggccagcagcaggtggggccggccgtccagctccagggcctcagcgtccgtgtcccggtgccaggcgtgcaggctctggtgcgggtaaaagccgggcccgtcgcggcacagcagcgtggtgctgcccgccttggaggcatcggccaccacgaagcagggttgcccttccagccacaggagctcggcgtcattgggccgcagcagccgccgcggggccagggtctg

SEQ ID NO: 97247 - DNA, 116 bp, Homo sapiens
  chr19:35619188-35619304
  hypo
aggctgtaatatttcactctgcgtgccaggccctgtttccaggtgccagcgttgaagcaatgagccaaactacatataatgcccacctaaagggcgaatcttttttaaatggctat

SEQ ID NO: 97248 - DNA, 62 bp, Homo sapiens
  chr19:35621940-35622002
  hypo
cattgcacctgcagttcttagcgcaatacttggcacttaacgaagaatttttaaattggttg

SEQ ID NO: 97249 - DNA, 30 bp, Homo sapiens
  chr19:35625481-35625511
  hypo
tagagcaggagcagcgcaggggacactttc

SEQ ID NO: 97250 - DNA, 30 bp, Homo sapiens
  chr19:35649040-35649070
  hypo
tggcatctgtgggacgtaaggtcccaaaga

SEQ ID NO: 97251 - DNA, 42 bp, Homo sapiens
  chr19:35677473-35677515
  hypo
ggattacaggtgtgagccaccgtgcccagaccaattttaaaa

SEQ ID NO: 97252 - DNA, 262 bp, Homo sapiens; identical to SEQ ID NO: 56039
  chr19:35738723-35738985
  hypo

SEQ ID NO: 97253 - DNA, 30 bp, Homo sapiens
  chr19:35781374-35781404
  hypo
gacagggcacctgcccgccagtcacaggtc

SEQ ID NO: 97254 - DNA, 31 bp, Homo sapiens
  chr19:35795098-35795129
  hypo
tggttctgttccctagcggggctgatgtgat

SEQ ID NO: 97255 - DNA, 194 bp, Homo sapiens; identical to SEQ ID NO: 32479
  chr19:35797938-35798132
  hypo

SEQ ID NO: 97256 - DNA, 31 bp, Homo sapiens
  chr19:35804027-35804058
  hypo
tggtgaccgcagggctcgctgggcctgcggt

SEQ ID NO: 97257 - DNA, 30 bp, Homo sapiens
  chr19:35835484-35835514
  hypo
gtcacaggctctgggcgtgccacgtctgtg

SEQ ID NO: 97258 - DNA, 30 bp, Homo sapiens
  chr19:35835768-35835798
  hypo
actcgggtcctgcctcgccatcctcatcct

SEQ ID NO: 97259 - DNA, 185 bp, Homo sapiens; identical to SEQ ID NO: 32480
  chr19:35842416-35842601
  hypo

SEQ ID NO: 97260 - DNA, 415 bp, Homo sapiens
  chr19:35843038-35843453
  hypo
ggccatcacagccttctgctacgtgggctgcctccgggcactggcccgctccggcctgacgcacaggcggaagctgcgggccgcctgggtggccggcggggccctcctcacgctgctgctctgcgtaggaccctacaacgcctccaacgtggccagcttcctgtaccccaatctaggaggctcctggcggaagctggggctcatcacgggtgcctggagtgtggtgcttaatccgctggtgaccggttacttgggaaggggtcctggcctgaagacagtgtgtgcggcaagaacgcaagggggcaagtcccagaagtaacgccactgctcgggggaaggagcatggggcaggagggcccggctgcttctccaggcccctgcggggggctgcttcggaggaactgcagggcagcct

SEQ ID NO: 97261 - DNA, 6 bp, Homo sapiens
  chr19:35888402-35888408
  hypo
gggcgt

SEQ ID NO: 97262 - DNA, 31 bp, Homo sapiens; identical to SEQ ID NO: 32481
  chr19:35889405-35889436
  hypo

SEQ ID NO: 97263 - DNA, 222 bp, Homo sapiens
  chr19:35940915-35941137
  hypo
ggcgggcatcagcatcgagcgctacctgggagtggctttccccgtgcagtacaagctctcccgccggcctctgtatggagtgattgcagctctggtggcctgggttatgtcctttggtcactgcaccatcgtgatcatcgttcaatacttgaacacgactgagcaggtcagaagtggcaatgaaattacctgctacgagaacttcaccgataaccagttgga

SEQ ID NO: 97264 - DNA, 55 bp, Homo sapiens; identical to SEQ ID NO: 32482
  chr19:35983489-35983544
  hypo

SEQ ID NO: 97265 - DNA, 145 bp, Homo sapiens; identical to SEQ ID NO: 32483
  chr19:36041201-36041346
  hypo

SEQ ID NO: 97266 - DNA, 254 bp, Homo sapiens
  chr19:36042034-36042288
  hypo
caggccattaggaattggggacgtgatggaaatcaggatactgtgggtcaaagtaggtcagatgtcagcagcagcagggaggtgttctacacactgaacactggagtggcccgggcctctcagcaccacccctttagtgaaatgtggagggggccgtggggggagttattggccagttagaaaggtttttttggcatgtcaccatctggcactggcacccgctggcatttgccggctgttctaaaccacagtca

SEQ ID NO: 97267 - DNA, 35 bp, Homo sapiens
  chr19:36115284-36115319
  hypo
gcatgagccaccgcgcctgaccacattgccatatc

SEQ ID NO: 97268 - DNA, 136 bp, Homo sapiens; identical to SEQ ID NO: 12281
  chr19:36123861-36123997
  hypo

SEQ ID NO: 97269 - DNA, 30 bp, Homo sapiens
  chr19:36125016-36125046
  hypo
ctgggggagggaggcggacacatgtgcccc

SEQ ID NO: 97270 - DNA, 30 bp, Homo sapiens; identical to SEQ ID NO: 32486
  chr19:36128478-36128508
  hypo

SEQ ID NO: 97271 - DNA, 194 bp, Homo sapiens
  chr19:36156234-36156428
  hypo
cggcccctggggacacgcgctggctcagtccccacctccgccagggaagcggtctgatgatacccatttcgcagatgggcaaatccacaagccaagtcgtgccgcccagaagaggcagaaccgggatttgaacctaggtttctcattctgcacctgaagaaataaatgtctggtccatgcgtgtgttggggggc

SEQ ID NO: 97272 - DNA, 174 bp, Homo sapiens
  chr19:36157518-36157692
  hypo
agtgactgccccaccggagcccgggtgtcctcttgtgcaaaatgcctccccaccagggctgtgggtacatcagtaccagcctgggccccgcagagagctggagcaacccctcgaagccagggtgtggctcagagatggggggtccggctggccctttacgctcctggcctcatc

SEQ ID NO: 97273 - DNA, 121 bp, Homo sapiens
  chr19:36167373-36167494
  hypo
gagccaccacgctgggtcccctctctgattttctagtgctcccccaactctctctcaagtcagcaggatgcacccagggtctgtctgaaccagacctggcacctacaactttactcaggtt

SEQ ID NO: 97274 - DNA, 79 bp, Homo sapiens
  chr19:36172745-36172824
  hypo
aggcgtgagccaccgcgcccggcctgtattttttataaaaatacaaaaaccgttctgcgcctggtagaacacttcttta

SEQ ID NO: 97275 - DNA, 89 bp, Homo sapiens
  chr19:36199996-36200085
  hypo
caggtgtgagccactgcgcctggcgaaagagtaaacatacttaaagttcatgtaagatttggataatcgctcttaatctatataaaatg

SEQ ID NO: 97276 - DNA, 132 bp, Homo sapiens
  chr19:36210796-36210928
  hypo
aggaaggcacagaacggatggtgcaggcactgactgaacttctccggcgggcccaggcaccccaagcaccccggagccgggcatgtgagccctccaccccccggcggtctcggggacggcccccaggacggc

SEQ ID NO: 97277 - DNA, 345 bp, Homo sapiens
  chr19:36221571-36221916
  hypo
tcccaagcatcctaaccgtcttatcccacatgccaggtgctcccgtctgtactggagcacagtggatgctcggaggcgctgctggtatcggtgccgaattctggagtatcggccatgggggccgagggaagagccagctcacctggaggctgcagaggagaaccagaccattgtgcacagccccgccccttcctcaggtgtggctttggctctgtcttcttcctgaataccgctctccctaaacaaacctacagatctctgttccccgctcccttttggaaagtccaggaggcttgcttttgcttcagttgctgtaatgtaacggcagctcgcttactgccatgc

SEQ ID NO: 97278 - DNA, 256 bp, Homo sapiens
  chr19:36222350-36222606
  hypo
gagggtacacccatcccgtctggaaaccagggagttttgggtggaggagggagatcagtttgcagaggttgggtggagccaggtaatggagagcctccgggccggggcgggcgggagcgtctgatgtggcttggatgcaccaggcaagtaagaaagtggtaggactggccgtgctggagggagggcagttccccatggcgtgcaaagcctgcagcagaggcagagaggagatggcaaggagcgagtggggagaggc

SEQ ID NO: 97279 - DNA, 30 bp, Homo sapiens
  chr19:36229236-36229266
  hypo
atgcatggcaatgccgcccgcttcatcaac

SEQ ID NO: 97280 - DNA, 34 bp, Homo sapiens
  chr19:36260604-36260638
  hypo
accaggaaatcctgccatctccgcctttatttta

SEQ ID NO: 97281 - DNA, 78 bp, Homo sapiens
  chr19:36262373-36262451
  hypo
ttcatggtaggatctaagtggcggatatgcgggtgtccactgtaaaatttttcaactttgctgtaatttagaaacttt

SEQ ID NO: 97282 - DNA, 30 bp, Homo sapiens
  chr19:36269372-36269402
  hypo
cctggccggttctccggagttacgatgact

SEQ ID NO: 97283 - DNA, 31 bp, Homo sapiens
  chr19:36275628-36275659
  hypo
tgccctcgctggctgccgggagctgcctcct

SEQ ID NO: 97284 - DNA, 30 bp, Homo sapiens; identical to SEQ ID NO: 32489
  chr19:36297655-36297685
  hypo

SEQ ID NO: 97285 - DNA, 28 bp, Homo sapiens
  chr19:36308811-36308839
  hypo
agactccgtctcaagaaaaaaaaaaaaa

SEQ ID NO: 97286 - DNA, 224 bp, Homo sapiens; identical to SEQ ID NO: 56051
  chr19:36336411-36336635
  hypo

SEQ ID NO: 97287 - DNA, 263 bp, Homo sapiens; identical to SEQ ID NO: 56052
  chr19:36336895-36337158
  hypo

SEQ ID NO: 97288 - DNA, 42 bp, Homo sapiens; identical to SEQ ID NO: 56053
  chr19:36347892-36347934
  hypo

SEQ ID NO: 97289 - DNA, 31 bp, Homo sapiens
  chr19:36362341-36362372
  hypo
ccaccagcatcctcttcgcacttgggatcta

SEQ ID NO: 97290 - DNA, 80 bp, Homo sapiens; identical to SEQ ID NO: 32491
  chr19:36388610-36388690
  hypo

SEQ ID NO: 97291 - DNA, 216 bp, Homo sapiens
  chr19:36435528-36435744
  hypo
gtgtatgaggacagcgccacggggctcacggccacgcggcctgtgggctgcgcccgcttctccaccgaacctgcgctgcggccatgcggggcgccgcacgctcccttcctgggcggcacgatgatcatcgcgctgggcggcgtcatcgtagcctcggtactggtcttcatcttcgtgctgctaatgcgctacaaggtgcacggcggccagcccccc

SEQ ID NO: 97292 - DNA, 83 bp, Homo sapiens
  chr19:36500939-36501022
  hypo
catccaggagcatgcagggctcgagggcaagcctcaaggagtgggtcggcgtgttcaggggcgtttctgtgaacactggggtg

SEQ ID NO: 97293 - DNA, 321 bp, Homo sapiens
  chr19:36510003-36510324
  hypo
agtcagcagcatcagaactgccgagtggacacccagccacacccctcttgggcccgaggtcggactaaccctgcttgggagggcagatgaagtaccgaacgcccccaacgctgccatcgttcttgccctcaggttcgtccagctccacgcccacccactggccgctggcaaactccgtggtcccacagaaccgcagtgtgcccgtctggggagagaagggaggcgatggctaaggaaggaatgctgggaggccaacgtggagtgcccacacacgggcagcaaggtgggttgcatgaggccgccctgggcccaaaccccagg

SEQ ID NO: 97294 - DNA, 31 bp, Homo sapiens
  chr19:36525680-36525711
  hypo
ttctccatagcaacaccgcctcccagacctg

SEQ ID NO: 97295 - DNA, 30 bp, Homo sapiens; identical to SEQ ID NO: 32493
  chr19:36531714-36531744
  hypo

SEQ ID NO: 97296 - DNA, 31 bp, Homo sapiens; identical to SEQ ID NO: 12288
  chr19:36544541-36544572
  hypo

SEQ ID NO: 97297 - DNA, 37 bp, Homo sapiens
  chr19:36562068-36562105
  hypo
gcactccagcctgggcgcaacaaaaaactctatctca

SEQ ID NO: 97298 - DNA, 637 bp, Homo sapiens
  chr19:36592528-36593165
  hypo
caggctgtgggctcctgaccccgactctgtccttcagactcgggggagtcagaggccgacctggagtgcagcttcgcagccatccactccccagctccgcctcctgaccctgcccctcggtttgccacgtcgctgccccatttcccaggtaagcaggggccagacacgcaggggactcgctgctcgggcctggcttagggccagtcacaatgtctaagcacaggccctgcacttggagcccactgagcctggaagacggggatccctgcttctcagcctgcgggcaacagggcagggatgggtggggcccgctttctccatttcaggtggcgtctgctgtgactcatggtgttggctcctcttgtccctcccctccttccctgtcaggatgcgcaggtcccacagaagatgagctgtccctgcccgagggacccagcgtccccagcagctccctaccccagactccggagcaggagaagttcctccgccaccactttgagacactgactgagtccccctgcagaggtagggccctgcctcacccacacctgccgaggccgtctgtgcagcctgggcacagcattggcgtccctggagttggctccccagcagggccaggagggtgagtggagagcaa

SEQ ID NO: 97299 - DNA, 30 bp, Homo sapiens
  chr19:36602530-36602560
  hypo
ccaggcaccagggccggcagccacagggat

SEQ ID NO: 97300 - DNA, 310 bp, Homo sapiens
  chr19:36604468-36604778
  hypo
gccgcgagaagctgcacgtgtgcgaggactgcggcttcaccagctcccggcccgacacctacgcacagcaccgcgccctgcaccgcgcagcctgatacggtgtgccagcgtcctccccacgaggcaaataaacacagaaaactcacgcatggaatctggtgtttattacactcgggggagagaggaggtcactcggtccagcggtggccgcagtgtggggctgtgcacacgtagtaaaggcgcatggcgtcctggcagaaatgatgcatggttaggaaggatttggacccagcagcgccttaccccaaaa

SEQ ID NO: 97301 - DNA, 30 bp, Homo sapiens
  chr19:36612356-36612386
  hypo
cctcgtgggtggagcgtcatcctgttaggc

SEQ ID NO: 97302 - DNA, 30 bp, Homo sapiens
  chr19:36612616-36612646
  hypo
gtaggtgcgtggctcgcgggcccggtcccg

SEQ ID NO: 97303 - DNA, 81 bp, Homo sapiens; identical to SEQ ID NO: 32496
  chr19:36632701-36632782
  hypo

SEQ ID NO: 97304 - DNA, 30 bp, Homo sapiens
  chr19:36640798-36640828
  hypo
ggtctctcccagggccgatcctgtctgcag

SEQ ID NO: 97305 - DNA, 355 bp, Homo sapiens
  chr19:36641048-36641403
  hypo
gatgcctccatgccccgagggccctctctcagttctgggaggatgactccagtccctgcacgccctggcacacccttcacggttgctacccaggcggccaagctccagaccgtgccagacccaggtgccccagtgcctttgtctatattctgctcccagcctgccaggcccaggaggaaataaacatgccccagttgctgatctctatgggatctgcctcctgatctgacccgagagaggaggggtggctcgggctctgggtcctggggagcaggggaggtagtagattcgtccccagggctggatccgtggatttcctcgtctttttctcgtcggcattttttgtctcatcctg

SEQ ID NO: 97306 - DNA, 36 bp, Homo sapiens
  chr19:36645414-36645450
  hypo
ggggccaggcactgtggctcacgccagtaattccaa

SEQ ID NO: 97307 - DNA, 28 bp, Homo sapiens
  chr19:36656271-36656299
  hypo
agaaaagatatctttcttggccgggcgc

SEQ ID NO: 97308 - DNA, 30 bp, Homo sapiens; identical to SEQ ID NO: 32498
  chr19:36673714-36673744
  hypo

SEQ ID NO: 97309 - DNA, 33 bp, Homo sapiens
  chr19:36707254-36707287
  hypo
gatcttggtcgggtgcggtggctcatgcctgta

SEQ ID NO: 97310 - DNA, 4 bp, Homo sapiens
  chr19:36707526-36707530
  hypo
tcca

SEQ ID NO: 97311 - DNA, 176 bp, Homo sapiens
  chr19:36746787-36746963
  hypo
ttcttctggtgagtctctcctcgcatctctgtctgggtcatgtggccgggtgtcattcgttttccaggcggttacagtttgggttcgtgaccggtgggcaacgtggggagctacatgagacacggcggggattaaatcagctcccaatcatgagcggcctcattgctagaatcaag

SEQ ID NO: 97312 - DNA, 187 bp, Homo sapiens
  chr19:36853753-36853940
  hypo
aaattcatcacaaactcgggttttattataaacactttctcttttataaccaattctttagtaaactttcaaaaattcgttcgatggcagtctacatttttaatatattagattcttttttctttagatattttaattcaataaaatctcgaaagtcttccccaattctcaacgtctacaatatcta

SEQ ID NO: 97313 - DNA, 31 bp, Homo sapiens
  chr19:36858741-36858772
  hypo
gaaattgacagtatttcgaaaaggacagaga

SEQ ID NO: 97314 - DNA, 33 bp, Homo sapiens; identical to SEQ ID NO: 32499
  chr19:36870582-36870615
  hypo

SEQ ID NO: 97315 - DNA, 31 bp, Homo sapiens
  chr19:36871043-36871074
  hypo
gcgaaactccgtttcaaaagaaaaagactaa

SEQ ID NO: 97316 - DNA, 26 bp, Homo sapiens
  chr19:36901690-36901716
  hypo
ccgcacccacccggcctgttttatat

SEQ ID NO: 97317 - DNA, 270 bp, Homo sapiens; identical to SEQ ID NO: 12295
  chr19:36909078-36909348
  hypo

SEQ ID NO: 97318 - DNA, 319 bp, Homo sapiens; identical to SEQ ID NO: 12296
  chr19:36909623-36909942
  hypo

SEQ ID NO: 97319 - DNA, 94 bp, Homo sapiens
  chr19:36928985-36929079
  hypo
caaatatattagtaatcacatcgaataaaagtgaatataatactttacttaaaagacaaaggtggggccgggcgcggtggctcacgcctgtaat

SEQ ID NO: 97320 - DNA, 29 bp, Homo sapiens
  chr19:36931792-36931821
  hypo
aagactccgtctcaaaacaacaacaacaa

SEQ ID NO: 97321 - DNA, 27 bp, Homo sapiens
  chr19:36952281-36952308
  hypo
aaaactcttggctggacgcagtggctt

SEQ ID NO: 97322 - DNA, 31 bp, Homo sapiens
  chr19:36957676-36957707
  hypo
aaaaatacagacaattcggccaggcgcagtg

SEQ ID NO: 97323 - DNA, 31 bp, Homo sapiens; identical to SEQ ID NO: 32504
  chr19:36970716-36970747
  hypo

SEQ ID NO: 97324 - DNA, 28 bp, Homo sapiens
  chr19:36971640-36971668
  hypo
aagcttcggggccaggcgtggtggctta

SEQ ID NO: 97325 - DNA, 17 bp, Homo sapiens
  chr19:37020551-37020568
  hypo
ggagtctcgcactgtcg

SEQ ID NO: 97326 - DNA, 29 bp, Homo sapiens
  chr19:37093854-37093883
  hypo
cgtgatgcggccaaacctcatgcaagaac

SEQ ID NO: 97327 - DNA, 78 bp, Homo sapiens
  chr19:37103347-37103425
  hypo
tttatttttcttcagtaaacacgtagcagcgatatcgctgattcataaggcagatgcgtatttcatttctttagaaac

SEQ ID NO: 97328 - DNA, 20 bp, Homo sapiens
  chr19:37124247-37124267
  hypo
gacttttcaaaaccctagat

SEQ ID NO: 97329 - DNA, 31 bp, Homo sapiens
  chr19:37128452-37128483
  hypo
ccgggcatagtggctgcgcatgcctgtagtc

SEQ ID NO: 97330 - DNA, 380 bp, Homo sapiens; identical to SEQ ID NO: 32505
  chr19:37159073-37159453
  hypo

SEQ ID NO: 97331 - DNA, 31 bp, Homo sapiens
  chr19:37173450-37173481
  hypo
tctatgtctgtaatggcggttgcatgggttt

SEQ ID NO: 97332 - DNA, 37 bp, Homo sapiens; identical to SEQ ID NO: 32506
  chr19:37179404-37179441
  hypo

SEQ ID NO: 97333 - DNA, 163 bp, Homo sapiens; identical to SEQ ID NO: 56083
  chr19:37262837-37263000
  hypo

SEQ ID NO: 97334 - DNA, 1113 bp, Homo sapiens; identical to SEQ ID NO: 56084
  chr19:37263315-37264428
  hypo

SEQ ID NO: 97335 - DNA, 156 bp, Homo sapiens; identical to SEQ ID NO: 56085
  chr19:37266862-37267018
  hypo

SEQ ID NO: 97336 - DNA, 31 bp, Homo sapiens
  chr19:37270682-37270713
  hypo
gcaaaactccgtctcacaaaaaaaagtaagc

SEQ ID NO: 97337 - DNA, 39 bp, Homo sapiens
  chr19:37272528-37272567
  hypo
acaaacaaaacaaaacccgtaagccagatattcattcat

SEQ ID NO: 97338 - DNA, 30 bp, Homo sapiens; identical to SEQ ID NO: 56090
  chr19:37289216-37289246
  hypo

SEQ ID NO: 97339 - DNA, 100 bp, Homo sapiens
  chr19:37293600-37293700
  hypo
tgctgggattaaaggcgtaagccactgcgcctggctgttttttcatttctattatgatttgtcctgtggaatgtcagtgacttagcggtatttttatcac

SEQ ID NO: 97340 - DNA, 622 bp, Homo sapiens
  chr19:37501126-37501748
  hypo
aaggacggtctctggatgccaggagtcgcggagggcggaccagcatgaggaaaccattggcggaaaatggcagaagcagtgcggcatcccagcctcaactgccgggacggtgttcaagtgagtctccccaaaagtcatgccccccgtgatctcgacgacatgtctgcttgtgtgcccgtgggctgctctctcacttgagaatcgttctcgcaaagagcagaaccccgcagcctcaggggttgcctggggctatgtgtttctgtgccactgctctatgtctgtgtgtgtgtgtctcccattctctcttctctctctgtcactctgtttctctctctctgtctgtgagtgtgtgtgccggtgtgcgtgtgtgtgttgaatgaatgtgccctgtgcatcaaaaagcgatttcttgcatatcggcctgtctttggtgcgcctcttgctgcgtctctgcctgggacatgttgccggttgtcaatcggtttcgcggcagttccactttgggtttctaaaggcctcgacgacgtgaggagaggcgtcggtcctggaggaactgaaatttcatctccatcctgagcggcctcttttctaggatcaagacgaccacactccagccaaggac

SEQ ID NO: 97341 - DNA, 121 bp, Homo sapiens
  chr19:37503358-37503479
  hypo
ccggcctgacctctccagggtgtcaacaggatggtctgcggatgccaagagtggtggaggtccgaccaggatgatgaagccacaggcggagtctgggggaagcagctcggcatcccagctt

SEQ ID NO: 97342 - DNA, 505 bp, Homo sapiens; identical to SEQ ID NO: 32508
  chr19:37504005-37504510
  hypo

SEQ ID NO: 97343 - DNA, 328 bp, Homo sapiens; identical to SEQ ID NO: 32509
  chr19:37505283-37505611
  hypo

SEQ ID NO: 97344 - DNA, 30 bp, Homo sapiens
  chr19:37528223-37528253
  hypo
caggggtcctcttgccgagatggatggcta

SEQ ID NO: 97345 - DNA, 683 bp, Homo sapiens
  chr19:37546261-37546944
  hypo
tgagagtcctgaaaccccagccggcgacctgaagctcctcctccaccggtaaaagtcggctcaaaaaggccctgaggacaggggtcctgggggtccggccccgaagtcccctctccaacaacgcccgctactccatcaacactccagccaccacagcgactgccacaggagcccccgtccacgcagagccgaaaccgtttaaaggggctacagcctgacttccaagggcaaagcacgagtcggcttaggcaatgcggatgcatgaggcgacaccgctactcctgtcacagtgaccccaatggttgcctgaggacgactccatcaaccttgacaaagcaggagccgtccgtggcagtgcgtcagtgttgaggcgccaggctgacatctccagaaggtcaacaaaactgtttcaggattccaggagacacggaggggcaaacaggatgaagaaacagcaggcggagtctgggaaaagcagcgcggaattccagcccgaggcctgcccggatggtgtttgggtgagtctccccaaaagtcgtgccccacatcatctcgaggaagcgtctgcctgtgtgcccgtggactactctctaaaccgatggttgttcttttgaaaagcagaaccccgcagcctcaggggttgcctggggtggtgtgtttccgttccactgctgtgtatctgt

SEQ ID NO: 97346 - DNA, 217 bp, Homo sapiens
  chr19:37550816-37551033
  hypo
gtatgtgtgtgtgcccatgagcgtgtgtgtgttgggacgtatatgccccctgcgccaaaaagggatttcttgtatgtccgcctgtcgttggcgagcctttttctgcgtctgcctgggtcacgtggctggttgtctcgttttcgcggcggttgcacttcgggtttttgaaggcctccaccacctcaggagatgcgtcggtcccagagcaactgaagtc

SEQ ID NO: 97347 - DNA, 37 bp, Homo sapiens
  chr19:37551264-37551301
  hypo
ggcctctttggacaagtcacccgtttggcactcctcc

SEQ ID NO: 97348 - DNA, 166 bp, Homo sapiens
  chr19:37551900-37552066
  hypo
tcaaattgtggcttggactcacgcacaggccccctcctggttcccaggtgttctatgattttcgttggcatcgatggaaaggtcacctgtgccccccttcctccggaacatgcctggacaccattgtttgtttcgccatcgccccgtatgccctctgtgacacaca

SEQ ID NO: 97349 - DNA, 98 bp, Homo sapiens
  chr19:37666950-37667048
  hypo
acacatagaacacaggctacccgagatagcaggaatatgctttttaaaaaaccctccaaatcggctgggcgcgatctcggctcactgcaacctccgcc

SEQ ID NO: 97350 - DNA, 37 bp, Homo sapiens
  chr19:37674959-37674996
  hypo
gtacaaaacactgtgctgggccgggcgcagtggctca

SEQ ID NO: 97351 - DNA, 37 bp, Homo sapiens
  chr19:37682219-37682256
  hypo
agcaagaatgtcagagggggccggacacggtggctca

SEQ ID NO: 97352 - DNA, 31 bp, Homo sapiens
  chr19:37693190-37693221
  hypo
cacggcacccggcctcatctactcttgaata

SEQ ID NO: 97353 - DNA, 31 bp, Homo sapiens; identical to SEQ ID NO: 32510
  chr19:37699579-37699610
  hypo

SEQ ID NO: 97354 - DNA, 86 bp, Homo sapiens
  chr19:37702064-37702150
  hypo
gctggggttataggcgtgagccaccgcctccggctgttatatttacaatacctaagttaccccttggttacggcacactgcagaaa

SEQ ID NO: 97355 - DNA, 44 bp, Homo sapiens; identical to SEQ ID NO: 32511
  chr19:37702590-37702634
  hypo

SEQ ID NO: 97356 - DNA, 31 bp, Homo sapiens
  chr19:37725643-37725674
  hypo
aattataataatttgacgtgcaagttgtaac

SEQ ID NO: 97357 - DNA, 24 bp, Homo sapiens
  chr19:37735566-37735590
  hypo
cactgcggccggtctttttatttt

SEQ ID NO: 97358 - DNA, 20 bp, Homo sapiens
  chr19:37818354-37818374
  hypo
tttcattaaactaatacgga

SEQ ID NO: 97359 - DNA, 18 bp, Homo sapiens
  chr19:37829030-37829048
  hypo
tctcttttctttgaggcg

SEQ ID NO: 97360 - DNA, 38 bp, Homo sapiens
  chr19:37831816-37831854
  hypo
tgggattacaggcgtgagccaccgcgtctggccttgtg

SEQ ID NO: 97361 - DNA, 154 bp, Homo sapiens
  chr19:37853602-37853756
  hypo
gtgcagggaatgtgggcgaggctttacgtggaagtcaaacctgatcacacatcagaggacacactcaggggagaaaccttatgtgtgcaaggattgtggacgaggctttacttggaagtcgaacctctttacacatcagcggacacactcaggg

SEQ ID NO: 97362 - DNA, 31 bp, Homo sapiens
  chr19:37854102-37854133
  hypo
atgtctgcctggagtgcgggcagtgctttag

SEQ ID NO: 97363 - DNA, 896 bp, Homo sapiens; identical to SEQ ID NO: 12318
  chr19:37959873-37960769
  hypo

SEQ ID NO: 97364 - DNA, 44 bp, Homo sapiens
  chr19:37995766-37995810
  hypo
gaattcagaaatggggttgggcgcggtggctcacacctgtagtc

SEQ ID NO: 97365 - DNA, 27 bp, Homo sapiens
  chr19:38009872-38009899
  hypo
aaaaattctgatagggctgggcgcggt

SEQ ID NO: 97366 - DNA, 26 bp, Homo sapiens
  chr19:38030890-38030916
  hypo
aaagaaaacttctgctgggtgcggtg

SEQ ID NO: 97367 - DNA, 30 bp, Homo sapiens; identical to SEQ ID NO: 32514
  chr19:38040325-38040355
  hypo

SEQ ID NO: 97368 - DNA, 142 bp, Homo sapiens
  chr19:38069704-38069846
  hypo
gcacctctgcagcaaccgcacctccgcctaaactctggtggcctgaggttctgtgttcctctggggcagaactcccagaggtaacagataacacttggcacctctgtatgccctaaacagtgaagttcggcattgtttggaa

SEQ ID NO: 97369 - DNA, 18 bp, Homo sapiens
  chr19:38124062-38124080
  hypo
ctccgtctcaaaaaaaaa

SEQ ID NO: 97370 - DNA, 24 bp, Homo sapiens
  chr19:38141042-38141066
  hypo
caggcttttgctctgtcgctcagg

SEQ ID NO: 97371 - DNA, 33 bp, Homo sapiens
  chr19:38172705-38172738
  hypo
aactgatagctttgccaggcacggtggctcatg

SEQ ID NO: 97372 - DNA, 28 bp, Homo sapiens
  chr19:38180496-38180524
  hypo
ggcttttccctagcacacccccgccttt

SEQ ID NO: 97373 - DNA, 28 bp, Homo sapiens
  chr19:38180763-38180791
  hypo
gtgagccgagatcatgccactgcactcc

SEQ ID NO: 97374 - DNA, 260 bp, Homo sapiens; identical to SEQ ID NO: 12321
  chr19:38182699-38182959
  hypo

SEQ ID NO: 97375 - DNA, 370 bp, Homo sapiens; identical to SEQ ID NO: 56111
  chr19:38183111-38183481
  hypo

SEQ ID NO: 97376 - DNA, 36 bp, Homo sapiens
  chr19:38185143-38185179
  hypo
acagagcgagactccgtctcaacaaacaaacaaaaa

SEQ ID NO: 97377 - DNA, 428 bp, Homo sapiens
  chr19:38187607-38188035
  hypo
cagcttccagcttgcacagctcgctctggccgtcccctgcagtggccagtgagttggcgatcagctcagctgccttggagtcaccctcagcagagatgatggccgccttttccaccacaaatctggcgctctctgcttcctggggggccacctgtctgttaactccttcaagaaggtcagatgtgtcaaagacacgtcgtccagaatgagcccaaaggtggctgctcactccataaggttgttgctcacctggctggagaccagctccctctgggtgattagttctccagcatcaaagcgagccaccagtgacttgaggatctccgtggtaatgaacggcagcacacactcatcgtagtcctctccaatgctggtgaagatgcgaggaagctggctagtgatgggccggaagaggatgcacagtgtga

SEQ ID NO: 97378 - DNA, 71 bp, Homo sapiens; identical to SEQ ID NO: 12323
  chr19:38210086-38210157
  hypo

SEQ ID NO: 97379 - DNA, 447 bp, Homo sapiens; identical to SEQ ID NO: 56113
  chr19:38210326-38210773
  hypo

SEQ ID NO: 97380 - DNA, 22 bp, Homo sapiens
  chr19:38222906-38222928
  hypo
ctgtgcccggcaaaaattaact

SEQ ID NO: 97381 - DNA, 83 bp, Homo sapiens
  chr19:38273673-38273756
  hypo
gcaacaagagcgaaactctgtctcaaaaaaaaaaaaaaaatcactgccacaaactttttcacataggacgatgaaggattcca

SEQ ID NO: 97382 - DNA, 93 bp, Homo sapiens; identical to SEQ ID NO: 32519
  chr19:38287059-38287152
  hypo

SEQ ID NO: 97383 - DNA, 103 bp, Homo sapiens; identical to SEQ ID NO: 32520
  chr19:38309038-38309141
  hypo

SEQ ID NO: 97384 - DNA, 277 bp, Homo sapiens
  chr19:38345147-38345424
  hypo
cacagccagaatgtggcagggcgaagagtcagactccagacatgtgctgagccattatgccattgtcccgcctggccgtgctgggatgtgcatgggacgctctggcctttgtgacagaggccttgcatcagcggtttgcaagcatggccggctctttacggttctacggggtccccatgcagcccttcataaaggcaacgcttgagttccaccaggccggaagaagccatgaaacaaaagctatgagaaggccgggcgcggtggctcacgcctgtaa

SEQ ID NO: 97385 - DNA, 115 bp, Homo sapiens; identical to SEQ ID NO: 32521
  chr19:38347217-38347332
  hypo

SEQ ID NO: 97386 - DNA, 31 bp, Homo sapiens
  chr19:38364519-38364550
  hypo
gtgagactccgtctcaaaaaaaaaaaaaaaa

SEQ ID NO: 97387 - DNA, 98 bp, Homo sapiens
  chr19:38383007-38383105
  hypo
agtaagaccctgtctcaaaaaaagaaggaagaggaggaggaagaggagtgaacagtcgggattgtcaaggatagtcatctaggcgtgagcaaaggcta

SEQ ID NO: 97388 - DNA, 58 bp, Homo sapiens; identical to SEQ ID NO: 56118
  chr19:38398220-38398278
  hypo

SEQ ID NO: 97389 - DNA, 31 bp, Homo sapiens; identical to SEQ ID NO: 56119
  chr19:38417473-38417504
  hypo

SEQ ID NO: 97390 - DNA, 195 bp, Homo sapiens; identical to SEQ ID NO: 32522
  chr19:38446270-38446465
  hypo

SEQ ID NO: 97391 - DNA, 30 bp, Homo sapiens
  chr19:38472317-38472347
  hypo
agcagcagtgcccttcgttagctgtaccac

SEQ ID NO: 97392 - DNA, 79 bp, Homo sapiens
  chr19:38480527-38480606
  hypo
ccagaatgagccttggcttcccgtgcactcagtcggggtgctggggcctggctgagccgggccattggagagtagagga

SEQ ID NO: 97393 - DNA, 340 bp, Homo sapiens
  chr19:38481032-38481372
  hypo
gaaagcagccagtgagacaggcggggtcgtggggtgaatacctgtggaactttggcggaagccaggtccgatgggatctggagtaccagctttgacttcagagcgctctcttctggctgggcatggagacaaggaatagatacagcaatagccacataactgcaggtggacgatgagtacagctcttgctcagctagtcagcccacagcgagaaccccgccccagtctgggctaacgtgtcctctgctgccagcagcccagtagggttctttgctggagtctggtttttccttgacttgtagctggcaagtgcttacacgctctcagaggcccagcagac

SEQ ID NO: 97394 - DNA, 197 bp, Homo sapiens
  chr19:38500326-38500523
  hypo
cacgtccacaggatgctaagccgcagacctgtgatttgattctggctctagctgaccaccaagatggcgctccctggcctcgttgccacactgcttccccatctgctttggggattttcccagtgaccaggaggacagggtctggttttctatgacggcgtgatatggatggttaatcatgtcgcaaagccctgctg

SEQ ID NO: 97395 - DNA, 30 bp, Homo sapiens
  chr19:38553592-38553622
  hypo
tcacgagggcagactcgagtcagccaatcc

SEQ ID NO: 97396 - DNA, 432 bp, Homo sapiens
  chr19:38564441-38564873
  hypo
atgctcttagaaacctcgcacggagtcctaggagaggaccctgggccgaccaagcccacgtcctgtgcccactccaactgtgcttctgtggggggaaaggggaagcacttctgccaaagatacacaacagaactgtagtaagagcaggtggtattatacccattttacagattgaaactgagtcactatttccataacccgtccatgacacacgaggattgagcccaggaggcagtctggttcctgcctatgctgtgcttctctcatcacgggggttccccatcgggaaggtccaagtgcttttagggaggaggagctcggtagaagacagctggaaagagaccagtgtgcaccctctgagtcccagaggctgcgggtgccactcagcctctgaatgtcacaggaagactcgactgcagctgctaggagaag

SEQ ID NO: 97397 - DNA, 43 bp, Homo sapiens
  chr19:38568580-38568623
  hypo
ggttataggcatgagccactgcgcctggccaatatttttgctt

SEQ ID NO: 97398 - DNA, 43 bp, Homo sapiens; identical to SEQ ID NO: 32527
  chr19:38572015-38572058
  hypo

SEQ ID NO: 97399 - DNA, 143 bp, Homo sapiens
  chr19:38572719-38572862
  hypo
gcgagatcaccctcagcgagtgtgacgcggaggacgcgggggagccgcggggggcccggcacacgggggcgctgcccctcttccgcgagtacgggagcacctcgtccatcgacgtgcagggcatgcccgagcagagcttcttc

SEQ ID NO: 97400 - DNA, 31 bp, Homo sapiens
  chr19:38613383-38613414
  hypo
gcgcatgctagggcggcgtccagcctcaggg

SEQ ID NO: 97401 - DNA, 31 bp, Homo sapiens
  chr19:38621444-38621475
  hypo
gtggcagctcccagatcgctggcatgaggcc

SEQ ID NO: 97402 - DNA, 52 bp, Homo sapiens; identical to SEQ ID NO: 32529
  chr19:38625642-38625694
  hypo

SEQ ID NO: 97403 - DNA, 128 bp, Homo sapiens
  chr19:38626518-38626646
  hypo
ctgttgtagtgagctctgaggcgagcagtgaggacgggatagaagtgccctcgctgccaccagccaggccgcatggcttgcacgctgaccccatgctctcagacaccgaggagaatgcatggggtctt

SEQ ID NO: 97404 - DNA, 199 bp, Homo sapiens
  chr19:38636780-38636979
  hypo
ggcgtgagccaccacacccaacctgtcttttaattattgttatttcatgatgaatgttagataaaaagaatcagatgtacgtatgcttcagaggttgtctttttcactcagcagaatgtccttaaggttcatccacgttgtcgcgagtctctagttcactcattatgctgtttattccgtggtctagatataccacagt

SEQ ID NO: 97405 - DNA, 43 bp, Homo sapiens; identical to SEQ ID NO: 32531
  chr19:38639130-38639173
  hypo

SEQ ID NO: 97406 - DNA, 181 bp, Homo sapiens
  chr19:38679124-38679305
  hypo
aaaatttagacaacagaggcaactcagagatgatgtccagtcctgtcagtcagaacctggaggatgttttcttcactgaggttttgaaagataaaacatgcacaaggtaaaaaataaaatactacaaaagggtttgcaatagaaagtaagcctctcggccaggcgcggtggcgcatgcctg

SEQ ID NO: 97407 - DNA, 32 bp, Homo sapiens; identical to SEQ ID NO: 32533
  chr19:38679544-38679576
  hypo

SEQ ID NO: 97408 - DNA, 49 bp, Homo sapiens; identical to SEQ ID NO: 32534
  chr19:38689955-38690004
  hypo

SEQ ID NO: 97409 - DNA, 92 bp, Homo sapiens; identical to SEQ ID NO: 32535
  chr19:38691719-38691811
  hypo

SEQ ID NO: 97410 - DNA, 30 bp, Homo sapiens
  chr19:38697928-38697958
  hypo
ggagcactgcaccccgcgaaccccactgga

SEQ ID NO: 97411 - DNA, 276 bp, Homo sapiens
  chr19:38704116-38704392
  hypo
aagaggaaaaagggccaggttcgatttatggacaccggcataatgataacacaggggactggtgttcaccagggaaggctcaggcacaggctttaggcttaaggggcagaggtggacgtgccaggcggggcgggcagcagggcacgcggggggcgggcggcactcacgtcgttctcggaggttccgcacaggctgcaggatttgcactcgatgcactgccagcggtaggtccgcacggctgccgtcatgttcaccgtgaattgtaaacacgagggg

SEQ ID NO: 97412 - DNA, 431 bp, Homo sapiens
  chr19:38706578-38707009
  hypo
atccctaaagcctcactgatccgacccaattcccacaatcctcagcagttgcatcagcctcgctagctctggttatccacagtatcccctacatgctccgggtcccctcggtcctcaccgccttgcctccctccctccaggtctgcactcctgaatgtcctctgcacccggcccccagaaacctcaggtggggagcatcacctgatcgcccacagtccgcacaggagatgaggtcctcgggacaccccgtcttcttggagccccccaggcagaagtcacagtagccgttggggatgacagtgccgtcgggcgccttcttggctgcaagacagcagacaggcattggcacggggcaggcaagggcaccccgcaaaggtggctgcagactttaggagcagaaggaggcatccgtacctgtgtgtttcctttgt

SEQ ID NO: 97413 - DNA, 380 bp, Homo sapiens
  chr19:38711356-38711736
  hypo
gcttggacacatagcggggagataccgacatactcagggagaatcactcagctagatacacacaaacacacacaggagacagacaggaagagacacagccaggtgggcactgccacgctcctgggtacacacagaccctcggactcaggaagagaaactgaccccgaggatcccgatattcctaaacacattcaagggtaagtccagatcctctgatggactggcacacacgtgcagaaatacacctgatacgccagacaccatcaggaagattctcccagacactccgaggcacccacacacccacagaaagagacggccgcaccgcctaacacacccagacacactcgggaggagccggacaccctgacagaccagac

SEQ ID NO: 97414 - DNA, 30 bp, Homo sapiens; identical to SEQ ID NO: 56124
  chr19:38720220-38720250
  hypo

SEQ ID NO: 97415 - DNA, 86 bp, Homo sapiens; identical to SEQ ID NO: 56125
  chr19:38720561-38720647
  hypo

SEQ ID NO: 97416 - DNA, 30 bp, Homo sapiens
  chr19:38745366-38745396
  hypo
gtgcctgtgagcagcggtgggttctgcagt

SEQ ID NO: 97417 - DNA, 43 bp, Homo sapiens
  chr19:38747774-38747817
  hypo
tctataccagacactgctttacgctccagggatagagcaggga

SEQ ID NO: 97418 - DNA, 658 bp, Homo sapiens; identical to SEQ ID NO: 12330
  chr19:38754870-38755528
  hypo

SEQ ID NO: 97419 - DNA, 88 bp, Homo sapiens
  chr19:38764529-38764617
  hypo
tcataaaaaatacaatcgtaaagatacaatatctactatttgttaaaagttttgtgctaggccaggtgcggtggctcacgcctgtaat

SEQ ID NO: 97420 - DNA, 30 bp, Homo sapiens
  chr19:38771382-38771412
  hypo
tctcaggtgtggtgtcgggtggttcctgcc

SEQ ID NO: 97421 - DNA, 31 bp, Homo sapiens
  chr19:38779795-38779826
  hypo
ctgaagaccactccagcgatatgttcaacta

SEQ ID NO: 97422 - DNA, 184 bp, Homo sapiens
  chr19:38780286-38780470
  hypo
gggtcaaggtgacaggccccacgtggatgccgccagcagtgggaaggaggctgcgcctgtggagatgtgcgttagaggcgtagcctggcacgtggctctgcaatttacattgtccctgaacctctcgccagcggcttggctgtgggcaagtgactgttgccccgcctcagagttcccatgtata

SEQ ID NO: 97423 - DNA, 262 bp, Homo sapiens; identical to SEQ ID NO: 32537
  chr19:38781915-38782177
  hypo

SEQ ID NO: 97424 - DNA, 214 bp, Homo sapiens
  chr19:38782529-38782743
  hypo
gcctccatggtctacctgatccgggtggcacggaggaaccaggagcgtgccctgcgcaccgtctggagctccggagatgacaaggagcagctggtgaagaacacatatgtcctgtgaccgccctgtcgccaagaggactggggaagggaggggagactatgtgtgagctttttttaaatagagggattgactcggatttgagtgatcattaggg

SEQ ID NO: 97425 - DNA, 21 bp, Homo sapiens
  chr19:38787238-38787259
  hypo
gacagagtgggactctgtctc

SEQ ID NO: 97426 - DNA, 46 bp, Homo sapiens
  chr19:38817273-38817319
  hypo
ttctccatcgcctttgcgctcctgggcgtgccgaccaccatgctgc

SEQ ID NO: 97427 - DNA, 30 bp, Homo sapiens
  chr19:38818115-38818145
  hypo
tacaggaatgtccacgagcacagcaggtga

SEQ ID NO: 97428 - DNA, 267 bp, Homo sapiens
  chr19:38828110-38828377
  hypo
catgctggtggactcacccatcgacccgagcgaggtgaggggaccagggtcaagtgaaccagagggattttgaacccgcactccactcatttctggacgtgtggcctaacctctctttgcagaaatacctgggcttcccttactacctgaagatcaactactcctgcgaggaaaaggtgagtgggtgcagcacggataggctcattctatgagccttggttttcccacctctaacatttttatttatttatttattttatttttttg

SEQ ID NO: 97429 - DNA, 153 bp, Homo sapiens
  chr19:38838187-38838340
  hypo
gtaaggatcttttggcttcagcgacagaactatgttggaattagtgcagctacaggagaacgccaaggcaggttggtttacccagagaactggctttaagaagtgcacccacagccggtgcagtggctcacgcctataatcccagcactttgg

SEQ ID NO: 97430 - DNA, 30 bp, Homo sapiens; identical to SEQ ID NO: 32539
  chr19:38851408-38851438
  hypo

SEQ ID NO: 97431 - DNA, 434 bp, Homo sapiens; identical to SEQ ID NO: 56131
  chr19:38852094-38852528
  hypo

SEQ ID NO: 97432 - DNA, 740 bp, Homo sapiens; identical to SEQ ID NO: 56132
  chr19:38852765-38853505
  hypo

SEQ ID NO: 97433 - DNA, 93 bp, Homo sapiens
  chr19:38855367-38855460
  hypo
cggccaacaccccgttagcctattcctgagtagaaaatggcagccttccgttttcctaccagccaccacctcgccccagctatgggttatttg

SEQ ID NO: 97434 - DNA, 31 bp, Homo sapiens
  chr19:38858044-38858075
  hypo
cccaccctttttcctgcggcatctcactttc

SEQ ID NO: 97435 - DNA, 30 bp, Homo sapiens
  chr19:38864241-38864271
  hypo
gggtttgagaaaaacgtgctgcccaggcgc

SEQ ID NO: 97436 - DNA, 121 bp, Homo sapiens
  chr19:38868584-38868705
  hypo
ctcttaatatagttatagctaacactttgtgtttatttgggccaggtattgttctaatcaccttacctgggttgaatcatttaattcacttaacccttgttcattcaacccatctctacga

SEQ ID NO: 97437 - DNA, 426 bp, Homo sapiens
  chr19:38873746-38874172
  hypo
gtgaagttacttgtcaagggtcgttgggcagagtacgattggtgagaaaagagagcataggacacgtgggcaagtgctggccccatagggtggggatggagcctttgtgatcactctactcgtctctaatccctcctttcctgcagcgagggtgggtcctgggccccaacaactactacagttttgccagccagcagcagaagccggaagacaccaccattccctccacagaactggccaaacaggtcatcgagtatgcccggcagctggagatgatcgtctgagccccccgggcactgggtggggcagggcacgagttatttaaaacagttacactgcagggtttcgcccaataaaggtggactgacattccctcttccaggcccttgtctccccagttgggacggcagagagacaagttcttat

SEQ ID NO: 97438 - DNA, 30 bp, Homo sapiens
  chr19:38875028-38875058
  hypo
ggagggtgttgagccgactacactcagttg

SEQ ID NO: 97439 - DNA, 454 bp, Homo sapiens
  chr19:38875945-38876399
  hypo
atgtggcagagatgaaggccacgggtcattctagggtcaggaagccaaagggctgagtaggactctatccagcagtctggggttcggcaccctcctgtcccttctcccctctcaccaggcagagacgttgcgtggcaggcggcgatggcgtggctggtggtggcagtaacacttgcagggacaggagttaagcacctggaagggcagccagtggcgcgcagcgcgggtgttagctgccccagtctgagaggccccgctgccaccaccccctccaccactgctgtcaggcacggtagctgtagctcgttcgcgaggaccatctccatgcaagccatccttacgggtcgcgccccgggctgcacgggaacccttgttcctgcgcgtgcgggtcttgatgggcgcagccgcgggtgcgggcgcggacacaggcggcgagggctcagccacggtggga

SEQ ID NO: 97440 - DNA, 34 bp, Homo sapiens
  chr19:38900083-38900117
  hypo
tgcagaaaaacaggagctgggcgtggtggctcac

SEQ ID NO: 97441 - DNA, 30 bp, Homo sapiens
  chr19:38904845-38904875
  hypo
tgagccactgcgcccggctagacactgtct

SEQ ID NO: 97442 - DNA, 32 bp, Homo sapiens
  chr19:38905670-38905702
  hypo
aggcagccggaaacccgcgcagccagcccagg

SEQ ID NO: 97443 - DNA, 43 bp, Homo sapiens
  chr19:38921074-38921117
  hypo
caaccataatagaaaaatggccgggctcagtggctcctgcgcc

SEQ ID NO: 97444 - DNA, 30 bp, Homo sapiens
  chr19:38953126-38953156
  hypo
acatccccccgaccccgctttcctcatccc

SEQ ID NO: 97445 - DNA, 425 bp, Homo sapiens
  chr19:38956606-38957031
  hypo
cattatatcaaaggtcagaaacgccgaagctgggacaagggtcagcagtcagggatcccatatagtgcagagcccggaagtggaggtgagggccttgtcccatggagccctaccatgcccgcaggtatatgatgagcaatgggtacaagccggctccgctggacctgagccacgtgcggctgacgccggcgcagacgacactggtggaccgtctggcagaaaatgggcacaacgtgtgggcccgagaccgcgtgggccagggctggagctacagcgcagtgcaggacatcccagcgcgccgaaaccctcggctggtgccctaccgcctgctggatgaagccaccaagcgcagcaaccgggacagcctctgccaggccgtgcgcaccctcctgggctacggctacaacatcgagcctcctgaccag

SEQ ID NO: 97446 - DNA, 30 bp, Homo sapiens
  chr19:38973983-38974013
  hypo
ccgcagtgcccaccgcggctggagatgcag

SEQ ID NO: 97447 - DNA, 43 bp, Homo sapiens
  chr19:38974226-38974269
  hypo
tgcccctcctcaacacaaccccgggattccagactacacccca

SEQ ID NO: 97448 - DNA, 617 bp, Homo sapiens; identical to SEQ ID NO: 12334
  chr19:38976231-38976848
  hypo

SEQ ID NO: 97449 - DNA, 30 bp, Homo sapiens
  chr19:38990372-38990402
  hypo
ctgctggctgccatcgaagaggccatccgc

SEQ ID NO: 97450 - DNA, 87 bp, Homo sapiens
  chr19:38993196-38993283
  hypo
cctggccgtgctgccgctcatcaccaagtgtgcgccgctctttgcgggcacagaacaccgcgccatcatggtggactctatgctgca

SEQ ID NO: 97451 - DNA, 43 bp, Homo sapiens
  chr19:38998406-38998449
  hypo
ggcttcctgcagcagctgctgcgctggatggacatttctcagg

SEQ ID NO: 97452 - DNA, 30 bp, Homo sapiens; identical to SEQ ID NO: 32544
  chr19:39010003-39010033
  hypo

SEQ ID NO: 97453 - DNA, 158 bp, Homo sapiens; identical to SEQ ID NO: 32545
  chr19:39026969-39027127
  hypo

SEQ ID NO: 97454 - DNA, 596 bp, Homo sapiens; identical to SEQ ID NO: 32546
  chr19:39051722-39052318
  hypo

SEQ ID NO: 97455 - DNA, 249 bp, Homo sapiens
  chr19:39087752-39088001
  hypo
gggcccccagagctcgcaccctccgctgtggcatgggcaaggatgagtcaagatcaatgccctctatcctcctcgccacccacactaccacccatcttctgggttctggacacattgccttaactctgtaaccttctcaggtggatgcagttcaagcccctcctctggcctggccccgcccactctctgcacacccgtgaagctctctctcacccacacagcacgcccggcagcctttggtgtcctgga

SEQ ID NO: 97456 - DNA, 106 bp, Homo sapiens
  chr19:39092088-39092194
  hypo
gagggatgtgtccaggcggccgtgctgtggatccggagggggcagccattgaacaactttacgagaagggcacatccctgggcaggtcgccgcggggccaggcagc

SEQ ID NO: 97457 - DNA, 104 bp, Homo sapiens
  chr19:39094629-39094733
  hypo
aaaaaaaaaaaattagccaagcgctactagggagggtgaggtgcatggattgcttgagtctccgaggtcaaggctgcagtgagccatgatcgcgccactgcact

SEQ ID NO: 97458 - DNA, 233 bp, Homo sapiens
  chr19:39125642-39125875
  hypo
aaaggtgtggatgagcaaatacggctggagtgccgacgagtcggggcagatcttcatctgtagccaagaagagagcattaaacccaagaacattgtggagaagattgactttgacagtgagtggtgacccacggcctcgggctttggggctaagggggtgcccctcaagggaggccgaggcaggggcccagaggacctgggtagatctgctcgtgttctgggctgggaagtct

SEQ ID NO: 97459 - DNA, 32 bp, Homo sapiens
  chr19:39128242-39128274
  hypo
cgcgcccagccgggattgtgcctctctaattc

SEQ ID NO: 97460 - DNA, 27 bp, Homo sapiens
  chr19:39135434-39135461
  hypo
cagggcgagactccacctccaataaaa

SEQ ID NO: 97461 - DNA, 80 bp, Homo sapiens; identical to SEQ ID NO: 32550
  chr19:39144876-39144956
  hypo

SEQ ID NO: 97462 - DNA, 41 bp, Homo sapiens
  chr19:39149968-39150009
  hypo
ttacaggtatgagccaccgcgcccagcccctttgtaacttt

SEQ ID NO: 97463 - DNA, 56 bp, Homo sapiens
  chr19:39151296-39151352
  hypo
aagtgctgggattacaggcgcgagccaccatgcccgacccatggactcacttgtat

SEQ ID NO: 97464 - DNA, 155 bp, Homo sapiens
  chr19:39151590-39151745
  hypo
ggcatttcagctgttccttaacggatgagaaagagagaaccaagagagcaccagaggaacgcgcttccaacagagaaaaccaagcaagggggcccccgaggagcagaaaggcccgagtggtcagagcggagcccgtggaagagatgggcacagcc

SEQ ID NO: 97465 - DNA, 35 bp, Homo sapiens; identical to SEQ ID NO: 32551
  chr19:39159903-39159938
  hypo

SEQ ID NO: 97466 - DNA, 30 bp, Homo sapiens; identical to SEQ ID NO: 32552
  chr19:39182246-39182276
  hypo

SEQ ID NO: 97467 - DNA, 155 bp, Homo sapiens
  chr19:39189492-39189647
  hypo
gtctgggagggggctttgtgtcgagtctccctgaatgagcagggctggcgacagttgtcaaaacacatggtgcttggtcagagcccccgtagaagccccttgtcctccgcatggcctccgcctgcacccggggcgtggaatgtgctcttgtgtgt

SEQ ID NO: 97468 - DNA, 101 bp, Homo sapiens
  chr19:39201701-39201802
  hypo
tagtctgtctccagcccaggccggttagaaaaggaatgcaccctattcggactccacaaaaccccgcaaggcatgtccacgcaggcctggggctggcttcc

SEQ ID NO: 97469 - DNA, 129 bp, Homo sapiens
  chr19:39210536-39210665
  hypo
tttagaagccagctcagtctccggccagggcccagctggttcagcggcctccacacgtccctgccccacccctacctgactgggcatccacgcgggtctgcccatggcgtctgccagagcccccaggca

SEQ ID NO: 97470 - DNA, 87 bp, Homo sapiens
  chr19:39211067-39211154
  hypo
tggagaagggaattgcaaggccgccttgtggctgagcctcctgccccagggctgcgcagcagggccggtggagccagagtctcccag

SEQ ID NO: 97471 - DNA, 300 bp, Homo sapiens
  chr19:39211596-39211896
  hypo
aggatcagggactaataacagcgttcctcctttcctttaaagggcctgatggtgggcccgccccaatgcacacaggacaccttaggacagcgtggggcacttagacgtggagaggaccaccacctgtgcgggtgcagggtcagggtcctagaagaagctggctctgatgcttccccttccccaagcctgctgggacatgggctttgaccccgggtgcttctccggatcaaagccctccagaaacaggtgctacctttctaagccgtgctaccacggcccgatttgtatggtttcctacta

SEQ ID NO: 97472 - DNA, 30 bp, Homo sapiens
  chr19:39214617-39214647
  hypo
ggaatacgccaagcgcgcggcccccttcaa

SEQ ID NO: 97473 - DNA, 306 bp, Homo sapiens
  chr19:39221968-39222274
  hypo
caccccaactctgccccatcccggcagggtgagtacaggctgatcccttcaatcctctgggcctgtttcctcatccatcaaacggactaagacagccccgaccccatagggtgtgtgaagacagaacgctcaggacagcgtctgacacgtgactcgatgtgtgggtactgttactccttaaatcctgtggggctttctccttgccagtgggcactggaggatatttctgtgcagcaaaaaatatagtcaatcccatatggagtcagtttccttacagtctacctcagaggcgatttctaaagctga

SEQ ID NO: 97474 - DNA, 33 bp, Homo sapiens; identical to SEQ ID NO: 32555
  chr19:39238368-39238401
  hypo

SEQ ID NO: 97475 - DNA, 92 bp, Homo sapiens
  chr19:39259919-39260011
  hypo
gggattacaggcctgaggcatcgcgcccagctccaaatctccattctcggtgaaccatttgagaaaaaatcgcaaacatgttgcatctccaa

SEQ ID NO: 97476 - DNA, 288 bp, Homo sapiens
  chr19:39277438-39277726
  hypo
ttacatccagccacagtgaagcgatcactaaaaagttgagttcctgggaaacacggtacacagcatgaggcgtcagtaatgtgaggagtgtgttctttagaatggtcaataatgttagaatgatggagttcaccattcaagggaacattctcgggaactaactgagctgcgctggtggtgtgatcaccggacaccctgctgtcctctctgtccgtgcccatgacatgtccttggcacagacacccctgtggagcccagggcctggccgcttccttggctgagaagctg

SEQ ID NO: 97477 - DNA, 179 bp, Homo sapiens; identical to SEQ ID NO: 32557
  chr19:39279302-39279481
  hypo

SEQ ID NO: 97478 - DNA, 105 bp, Homo sapiens; identical to SEQ ID NO: 32558
  chr19:39289870-39289975
  hypo

SEQ ID NO: 97479 - DNA, 78 bp, Homo sapiens
  chr19:39302317-39302395
  hypo
tatgaggccaatcattatcaacgtgttaaggccctttttaaaaagctaagactgggccaggcgcagtggctcacgcct

SEQ ID NO: 97480 - DNA, 123 bp, Homo sapiens
  chr19:39305779-39305902
  hypo
gtgccaggcagggcacgaacgccaccctcaaccccagggcaggcagggagaccaggaagccttgcaacccagagggaccccagcgacttttgctcactccctccgccccggaattccttgtgc

SEQ ID NO: 97481 - DNA, 433 bp, Homo sapiens; identical to SEQ ID NO: 32560
  chr19:39306226-39306659
  hypo

SEQ ID NO: 97482 - DNA, 29 bp, Homo sapiens
  chr19:39309628-39309657
  hypo
gtgtgtgtgtgtgtgtgtgtgcgggcacg

SEQ ID NO: 97483 - DNA, 37 bp, Homo sapiens
  chr19:39310979-39311016
  hypo
gtgagccacggcgcccggcaatcccccttacttttaa

SEQ ID NO: 97484 - DNA, 234 bp, Homo sapiens
  chr19:39327430-39327664
  hypo
gagacaagtttggttggttcccgtctttggaggctccccaaacccaggtcccctcaagtttgtacccatctcccattttctgcaggtcaacggcaggggtctaaggagtgactgcccaacgtgaggcttcaagatgagccaattaccaattatgcacggcgtttctccttctcttccttcattcccatagagaatcccattcctatctccttcgccagcccaaggcaatgggcc

SEQ ID NO: 97485 - DNA, 146 bp, Homo sapiens
  chr19:39329500-39329646
  hypo
acctctgctgccctcccgagcctgagcacctaccagacattcagcttctgcccaaacatgaagttgttgttgaggtgggtaatggcccggtctacagcgtagccatcagccatctccaccatggcggcccccggcttgcttttcat

SEQ ID NO: 97486 - DNA, 21 bp, Homo sapiens
  chr19:39364460-39364481
  hypo
ggtccagctgatagttcttag

SEQ ID NO: 97487 - DNA, 31 bp, Homo sapiens; identical to SEQ ID NO: 56144
  chr19:39379455-39379486
  hypo

SEQ ID NO: 97488 - DNA, 784 bp, Homo sapiens
  chr19:39406261-39407045
  hypo
tggccaggcagcccaggcttccggggctggttggggccgatgtactggagaggcacgtgggtaggggctgtgatccgatcagtgccgaggtaggactggagggcagggggcacgagcactgagccgtcctggggacagagcagacctcaggacactgcagatgccccagccctccccggcgctgagctgcctctctgggtgggcccctcagcccctcaccttctgctggttactctccaggagcgcgatgagaaggcgggggacagcacaggcggtggcgttcacctgtgagacagccatgctcggaactggcgcccaccccaagctgagcccggggaggagccaaggtgggtgggtctagggcggcagaggctgcgggcgagggcacgcgggcaggaggctgtgcgggcctcaccgtgtgggcaaactgcagctccccagcctcggtctggaacatgatgtggaggcggcggctctggaagtctgtgcagttggaagcactggtgacctggggtggaggagcggcaggctgagcggatcagggatggggggcaggcctgtcctcctgcccaccccgtccccagcggcacagggctcacctctccaaagcggcctcggcctggcatccaggcctcaatgtcaaacttgcggtaggcggggaggcccagttcttgggtgggcatatccaggaccctgcggtcaaggacgaaggtgtggggaaggtcagcgggtgagaggaggagcaagaggaacaaatggaaacgatggaagagaaggcagccaa

SEQ ID NO: 97489 - DNA, 91 bp, Homo sapiens
  chr19:39408600-39408691
  hypo
tgtcccgtgtttgtctctgcccggtagcaggtgctggagcaaaccatcctggcagagagcagggaaagtcgggtcaaggagggaagactga

SEQ ID NO: 97490 - DNA, 177 bp, Homo sapiens
  chr19:39415992-39416169
  hypo
ccccacagaactctgacgcagttcacccttccctggtagcctgtagttcaggggaagtgggcccaggtggaggatggcctctgatcagcctatgccggctgccggaactccattcctccggctgacaactggagtgtggtgggggtctgggcccaggggacacgaggggactttgct

SEQ ID NO: 97491 - DNA, 411 bp, Homo sapiens
  chr19:39435416-39435827
  hypo
ggttttgctaatgaaatgaatcgatatgtaagcgtcttgacacagggcttgggatgtaagaagggctcgatacttcttagctgttatgattatagatatccaggagtgacagaagggaaaccgagcagacgagaggctgggcgtgtgtgcctttagcgggtcggggggagctggaagctagtctggacccacctgtcggcagcccctctcagtccactgaaggaccgggtcaggtgaggctgagaacttgaccacttccttttcatacacatccagaaggcggacccggagctggtagacgcagccgcagttctctcgagcgccccacctgccaggcagcagtcagcctctatgcccccgtcacccagccagctctctgggtttcggggcgggaggctgagggctggctcc

SEQ ID NO: 97492 - DNA, 20 bp, Homo sapiens
  chr19:39437921-39437941
  hypo
atagaacaaagtgccaggaa

SEQ ID NO: 97493 - DNA, 148 bp, Homo sapiens
  chr19:39439159-39439307
  hypo
tggggcctttgccccagggatcggggcctctcacttgggccactcactcgaaagaggtcacgaagcaggtctgcgaaggagccccaggcaccggtgttaggttcttttctatggcccagccgttcccgccatgctccacctcccagcc

SEQ ID NO: 97494 - DNA, 19 bp, Homo sapiens
  chr19:39525039-39525058
  hypo
ttaaatataaaacctccag

SEQ ID NO: 97495 - DNA, 99 bp, Homo sapiens
  chr19:39553664-39553763
  hypo
gcacagagcagggcactcagccgacaacatgagggctgacggttgtcaccaagcagcgatgtctctccactgggagcctttaaaaaggctacacttggc

SEQ ID NO: 97496 - DNA, 643 bp, Homo sapiens; identical to SEQ ID NO: 56147
  chr19:39574161-39574804
  hypo

SEQ ID NO: 97497 - DNA, 165 bp, Homo sapiens; identical to SEQ ID NO: 56148
  chr19:39574877-39575042
  hypo

SEQ ID NO: 97498 - DNA, 91 bp, Homo sapiens
  chr19:39595964-39596055
  hypo
tcctttcatcagaaacattctctactctttcttcatttttcatgaccttgacaattttgaaaagcacagcgagttgttttgtggaatttcc

SEQ ID NO: 97499 - DNA, 246 bp, Homo sapiens; identical to SEQ ID NO: 32566
  chr19:39597517-39597763
  hypo

SEQ ID NO: 97500 - DNA, 158 bp, Homo sapiens
  chr19:39642873-39643031
  hypo
gtgatgaaatcttgagccatcccactctgtcccgcccgggacgtgaatcacctttcttaccccacatatccatggtgtatgtgctacccatctgtggctactcagtagctttctcggttctcacatccactgttgccgtatcacagtgcttatgttca

SEQ ID NO: 97501 - DNA, 30 bp, Homo sapiens
  chr19:39643268-39643298
  hypo
tcacacctcaaactgcgaaagtcaacagcc

SEQ ID NO: 97502 - DNA, 31 bp, Homo sapiens
  chr19:39644633-39644664
  hypo
aggatggagtattgttcgatgtttttgcctc

SEQ ID NO: 97503 - DNA, 31 bp, Homo sapiens
  chr19:39645861-39645892
  hypo
ctagggtgtcaactcccgtgggcaggaagtt

SEQ ID NO: 97504 - DNA, 115 bp, Homo sapiens
  chr19:39646345-39646460
  hypo
gctggttaagggcacagacaccgggacagacatccagcctgggagtcccagcgcctgacctcccctcgggcatcaagtcactccgcctctccgcgcctcagtttcctccatgatg

SEQ ID NO: 97505 - DNA, 226 bp, Homo sapiens
  chr19:39650785-39651011
  hypo
aagacccattttctccccaggcgtcaaggtcagacttccagggagtgagtgtacgaggcccagggacttgtgtctgtctcggccccatccccgtgccctgcgcctcctcagggaccaggctcattactttggtaatggcatcacccatttgttccacagatatgtctcgagcacctactgtgttccagccactgctctagatgccggcaagaaccagacagacaga

SEQ ID NO: 97506 - DNA, 60 bp, Homo sapiens; identical to SEQ ID NO: 32568
  chr19:39653249-39653309
  hypo

SEQ ID NO: 97507 - DNA, 30 bp, Homo sapiens
  chr19:39662331-39662361
  hypo
ccccaggcagggtccgggtttcgtgggatc

SEQ ID NO: 97508 - DNA, 66 bp, Homo sapiens
  chr19:39663616-39663682
  hypo
gtttgagaacatgtcggtgacacgctccaactccctgcggagagacagcccgccgccgcccgcccg

SEQ ID NO: 97509 - DNA, 271 bp, Homo sapiens; identical to SEQ ID NO: 32570
  chr19:39664415-39664686
  hypo

SEQ ID NO: 97510 - DNA, 30 bp, Homo sapiens
  chr19:39669993-39670023
  hypo
gcccacccctgcctcgagttagttttacaa

SEQ ID NO: 97511 - DNA, 86 bp, Homo sapiens
  chr19:39670669-39670755
  hypo
gccaggagtgagcctccgtccccaaagccagccaggcgtcatcagcaccagagacctcagcctggtcctctcgggaagtgagtggc

SEQ ID NO: 97512 - DNA, 18 bp, Homo sapiens
  chr19:39671781-39671799
  hypo
ctatgttgcctaggctgg

SEQ ID NO: 97513 - DNA, 197 bp, Homo sapiens
  chr19:39671858-39672055
  hypo
caggcgtgagccaccgtgcccagcccgctcactgcagtttgaaggcatggctttgggtggcgtggggtgaaagctgcccgaggccccgttcctccccacgtggctgcctcctgccagagccagtcaggaaaacagaccccaactagagttgtttcaaatggcagggatttggtaccggtggttggatcatgacaaag

SEQ ID NO: 97514 - DNA, 638 bp, Homo sapiens
  chr19:39672254-39672892
  hypo
gcagacccttcctgaccccaccggcccggggggtctacagatccatgtttcaggcgtccgcctggagcggaacaggggagtgcttaggacaagggtggtgccagaggatccactctgcccacatttagttgaccagctgaggcactccacgggaatgaatgactctcgacaggtgccggaggtgaggaggggcccggaggcccaggaggggcacagggatggattcgtccgcctgggggctggaggtgtgtttacagagccccaaaataaacaatgcaaccaggtcagaccagcggttctcacagtgtggttcccagaccagcagcatcactgggagcttactggacacgcaaataaatccctgtgtgccaccccagctgcatcagatgctggtggggcccagtgatctgtatttaacacaccctccgggggatgccggtgcccactcacgtttgagaacccctgcgatccacgactgccctcccgtgtaaaaggcccacctctgtgggactccaagtcatcagcaccctagggtccttccgtctttttccttcctcctgggacacctgcctctcccatgtcgtattagagaattccttatgctcccaagtgggcacggggagaggaaggcactcctc

SEQ ID NO: 97515 - DNA, 273 bp, Homo sapiens
  chr19:39690955-39691228
  hypo
gacagctgaaggccttgactccgcctgcaggttcgaggacagccggctggatgcgtgcgtctatgagctgcatgtctggctgctggcggccgaccgccgcacggtcattgctcagcaccacgtggccccccgaacttctgggagaggaccccctggccgctgggtccaggtgagactctccgcgccggggccctcaaccccagacgtgtgttcttgtcccaagacctcacagagggaggagaacaggtccgcgggtcctcaaaaagggctcct

SEQ ID NO: 97516 - DNA, 427 bp, Homo sapiens; identical to SEQ ID NO: 56151
  chr19:39754805-39755232
  hypo

SEQ ID NO: 97517 - DNA, 133 bp, Homo sapiens; identical to SEQ ID NO: 12342
  chr19:39755264-39755397
  hypo

SEQ ID NO: 97518 - DNA, 924 bp, Homo sapiens
  chr19:39804540-39805464
  hypo
aggccctgggactgcagcacccgcacccacctgtagacgagggagtcatcaacggaactgttgtactgaacctggtacatgcgtattccgggcacaggcctctgggctggccagcggatgagcacggagttcgaggtgagctcggctgccacgagccgacgctcagccgcagaatcgttggcacctggtctgcccggcgtggcgatgtcagaggagccgggctcggtgagaggcggcggggcagccggcgggggtgccatcagaggcagaggtaccacgcacacctccacgggcgccgtcgcttccccagcagcattggaggcgatacaagtgaaggtgccactgtccctcaaggtggtgatggtcacatccagcgtcccgtccccccggacccgggtccggctggagttccccagcagccgcccatcaggtgccacccagtgcaccaccggctcggggtcacccaccgctcggcagcgcaggctcaccgcctggccttccaccaccagggcccggccccccgcctgccgtgtgatcagcgggggctcacacaggaactcctcctcggggatggaccagaagtagcggtcggtgaggtgttcgggcgtggcgcaggtctctaagtcgtcctcgcgggtcagccgccgcagccagagcagctcgcagttgcagtgcagggggttgccgccgaagctgacggtcagcggggtgggcggcttgggcccggtgccctgcgacctcaggaagagcccgtcgggcgggagtttatgcaggcggttggaggtcatgtccagacggaccagcttgtgaagctgcacgaaggtcccctccgcgatgtggtcgatgaggttgtggtccagcgtgagggtgtttaggttcaccatctggcccaccgcctcccacggcagggcctccaggttgttg

SEQ ID NO: 97519 - DNA, 30 bp, Homo sapiens
  chr19:39805835-39805865
  hypo
cagtgtgggcgccacgttctggcagatgca

SEQ ID NO: 97520 - DNA, 162 bp, Homo sapiens; identical to SEQ ID NO: 32577
  chr19:39816930-39817092
  hypo

SEQ ID NO: 97521 - DNA, 27 bp, Homo sapiens
  chr19:39895590-39895617
  hypo
gactccgtctcaaaaaaaaaaaaggaa

SEQ ID NO: 97522 - DNA, 301 bp, Homo sapiens
  chr19:39913956-39914257
  hypo
ttcccagatgagctggcattccgctcttgctcagaaatccggagcgcctggcaggcattggaacagggacagctggcccggccaggcttcccagagccactgctgatcctggaggattcggatctgggtggagacagcgggagcgggaaggcaggagccccgagttcagaaaggacggcgtcccgagtgcgagagctggcccggctttacagcgagcggatccagcagatgcagcgggcggagactcgggcatcagccaatgccccgcgccgccggcctcgggttctggcccaaccccagc

SEQ ID NO: 97523 - DNA, 175 bp, Homo sapiens
  chr19:39924223-39924398
  hypo
cacaattaaagggtacaggagcgctgtgaaggcctccctcccagagccacctcctccatgcgcccagttcctgggactcaccataaatctgggccacgtgaccaccaccctttacacggacacggatgtctacaccagcaaatcgctccttgccgagaagcagaactggctccag

SEQ ID NO: 97524 - DNA, 23 bp, Homo sapiens
  chr19:39928206-39928229
  hypo
gcgtgagccaccgcgcccagccc

SEQ ID NO: 97525 - DNA, 41 bp, Homo sapiens; identical to SEQ ID NO: 32578
  chr19:39934200-39934241
  hypo

SEQ ID NO: 97526 - DNA, 54 bp, Homo sapiens; identical to SEQ ID NO: 32579
  chr19:39964613-39964667
  hypo

SEQ ID NO: 97527 - DNA, 185 bp, Homo sapiens; identical to SEQ ID NO: 12349
  chr19:39993471-39993656
  hypo

SEQ ID NO: 97528 - DNA, 109 bp, Homo sapiens; identical to SEQ ID NO: 56166
  chr19:39997623-39997732
  hypo

SEQ ID NO: 97529 - DNA, 410 bp, Homo sapiens; identical to SEQ ID NO: 56167
  chr19:39997748-39998158
  hypo

SEQ ID NO: 97530 - DNA, 261 bp, Homo sapiens; identical to SEQ ID NO: 56168
  chr19:40006186-40006447
  hypo

SEQ ID NO: 97531 - DNA, 142 bp, Homo sapiens; identical to SEQ ID NO: 56169
  chr19:40006498-40006640
  hypo

SEQ ID NO: 97532 - DNA, 166 bp, Homo sapiens; identical to SEQ ID NO: 32582
  chr19:40015703-40015869
  hypo

SEQ ID NO: 97533 - DNA, 35 bp, Homo sapiens
  chr19:40016712-40016747
  hypo
cagagtgagactccgtctcaaaaacaaaacaaaac

SEQ ID NO: 97534 - DNA, 121 bp, Homo sapiens; identical to SEQ ID NO: 32583
  chr19:40019819-40019940
  hypo

SEQ ID NO: 97535 - DNA, 421 bp, Homo sapiens
  chr19:40020179-40020600
  hypo
acaggagtgagccaccacgcccacccaacatttttctgcatggcaaaaggatcacagcagtctgaactgctgtgaactatattccatgtcatcacaaagggctaacttctttagtgactgacacataacttacaagccaataaaaaataagaatatggacagatagttcgctgagaaatgaaaacaaatggctcttaagcatttgaaaacatgcgtcctcactcgtaattagagaaattcaaattaaaaccatagtgagaaaccatcttttactgtcagatgcttccaaagctgtcagattagccaggccgtggcgagaggcacaactatccctggctgaatggaaggtaaactggttgagccccaaggacagcactctggtgacacattaaaaataccaaggtggggccgggtgcggtgg

SEQ ID NO: 97536 - DNA, 32 bp, Homo sapiens
  chr19:40026201-40026233
  hypo
ctcaaggcctcgtgtttattgatacatgtaat

SEQ ID NO: 97537 - DNA, 63 bp, Homo sapiens
  chr19:40038442-40038505
  hypo
cttccaggccaatggacccctcgcttctaaaagagttccagcgttgggttctgatcatgtccc

SEQ ID NO: 97538 - DNA, 31 bp, Homo sapiens
  chr19:40099332-40099363
  hypo
tcagaactagttcccacataccgaaaacact

SEQ ID NO: 97539 - DNA, 106 bp, Homo sapiens
  chr19:40269169-40269275
  hypo
accaacttatttttctctcagcgccttgtttatttactcattgatcccaagtgacatttttgaacattttatccattttcagttcgctccactttcttttgttttc

SEQ ID NO: 97540 - DNA, 176 bp, Homo sapiens; identical to SEQ ID NO: 32585
  chr19:40316372-40316548
  hypo

SEQ ID NO: 97541 - DNA, 30 bp, Homo sapiens; identical to SEQ ID NO: 32586
  chr19:40317479-40317509
  hypo

SEQ ID NO: 97542 - DNA, 30 bp, Homo sapiens
  chr19:40321071-40321101
  hypo
ctcgccactgcgcacgatgtagtcatggtt

SEQ ID NO: 97543 - DNA, 77 bp, Homo sapiens; identical to SEQ ID NO: 32587
  chr19:40322484-40322561
  hypo

SEQ ID NO: 97544 - DNA, 30 bp, Homo sapiens; identical to SEQ ID NO: 32588
  chr19:40325390-40325420
  hypo

SEQ ID NO: 97545 - DNA, 61 bp, Homo sapiens
  chr19:40329780-40329841
  hypo
attgctgctgctagcttggagcggaaggggttccaggctcggtactcaattttgtcatctc

SEQ ID NO: 97546 - DNA, 96 bp, Homo sapiens
  chr19:40343349-40343445
  hypo
cgtgagtcaccacacctggcctgaaaagtgtattttaaaagagggatcaaaggctgcatgaagggatggatcaacggatggatacataataaaacc

SEQ ID NO: 97547 - DNA, 17 bp, Homo sapiens
  chr19:40352796-40352813
  hypo
ataaaaaataattcccc

SEQ ID NO: 97548 - DNA, 30 bp, Homo sapiens; identical to SEQ ID NO: 32589
  chr19:40362758-40362788
  hypo

SEQ ID NO: 97549 - DNA, 30 bp, Homo sapiens
  chr19:40364136-40364166
  hypo
gggcccacaggctgcgccctcctggcaggt

SEQ ID NO: 97550 - DNA, 30 bp, Homo sapiens
  chr19:40365794-40365824
  hypo
agccaccacgcccacactctgactaggtgt

SEQ ID NO: 97551 - DNA, 42 bp, Homo sapiens
  chr19:40386022-40386064
  hypo
ctcacttttccctcaccgacactcaaacgactgttcacctgg

SEQ ID NO: 97552 - DNA, 43 bp, Homo sapiens
  chr19:40405682-40405725
  hypo
agaaacttacctctgagggtccgcacagcctagattcccctta

SEQ ID NO: 97553 - DNA, 120 bp, Homo sapiens
  chr19:40408774-40408894
  hypo
tctgaaccatgctgggaggcacggatctggccgttggccagcaccacgggcagcttcatgtccacaccgttcacctgggaggtgagagaggcaggccacgcttcagaaagtagactttga

SEQ ID NO: 97554 - DNA, 30 bp, Homo sapiens; identical to SEQ ID NO: 32590
  chr19:40411955-40411985
  hypo

SEQ ID NO: 97555 - DNA, 24 bp, Homo sapiens
  chr19:40412849-40412873
  hypo
gccgggattgcaggaatgagccac

SEQ ID NO: 97556 - DNA, 30 bp, Homo sapiens; identical to SEQ ID NO: 56172
  chr19:40424134-40424164
  hypo

SEQ ID NO: 97557 - DNA, 66 bp, Homo sapiens
  chr19:40441596-40441662
  hypo
tcctctggtgtgggcgcaggccaggctgcaggtgggcactgggactgaggcggtgtgtgaagaagg

SEQ ID NO: 97558 - DNA, 71 bp, Homo sapiens
  chr19:40449595-40449666
  hypo
tgtgtcctccagcctttccaccgccgcctgggcttgctgcgttctccttcgcagtcctcattctccttatt

SEQ ID NO: 97559 - DNA, 121 bp, Homo sapiens; identical to SEQ ID NO: 32592
  chr19:40474757-40474878
  hypo

SEQ ID NO: 97560 - DNA, 87 bp, Homo sapiens
  chr19:40660159-40660246
  hypo
tcaatagcttctcataaggagcgagcaacctaggtcccttgcctgcaccgttcacagtacggttcacgctcctatgagaatctaatg

SEQ ID NO: 97561 - DNA, 78 bp, Homo sapiens
  chr19:40660697-40660775
  hypo
ccctcctgtcttaaaatatcacgtagaccaggcgcggtcccagcactttgggaggctaaggtgggcagatcacaaggt

SEQ ID NO: 97562 - DNA, 43 bp, Homo sapiens
  chr19:40706864-40706907
  hypo
tgcaggatatccacacctccccgccataaacttcagtaacatt

SEQ ID NO: 97563 - DNA, 30 bp, Homo sapiens; identical to SEQ ID NO: 32594
  chr19:40708309-40708339
  hypo

SEQ ID NO: 97564 - DNA, 31 bp, Homo sapiens
  chr19:40710378-40710409
  hypo
cccctgcctgcagcttcggggtgctgctgtg

SEQ ID NO: 97565 - DNA, 176 bp, Homo sapiens
  chr19:40711780-40711956
  hypo
taagcccctccccccagccaccgcctctccttcccaggagcttcggagccgtgaggaggagctgctgcgggcggcacaggagcagcgcttccaggaggagcagctgcggcggcgggagcaggagctggcagaacgtgagatggacatcgtggaacgggagctgcacctgctcatgt

SEQ ID NO: 97566 - DNA, 30 bp, Homo sapiens
  chr19:40719820-40719850
  hypo
cctcgtgtcgctgtcgtccgtgtccgactg

SEQ ID NO: 97567 - DNA, 43 bp, Homo sapiens
  chr19:40720418-40720461
  hypo
ctgttaactgggtgggagatgcggccatagcagtgttattaag

SEQ ID NO: 97568 - DNA, 35 bp, Homo sapiens
  chr19:40727175-40727210
  hypo
cctggctgctttacgtatattttaactcacatcct

SEQ ID NO: 97569 - DNA, 151 bp, Homo sapiens
  chr19:40739500-40739651
  hypo
attaaaacctgaatctccaaccgcccaacagcccaggcctgggcgggaggtggagtcttccaaatgcgagtctgggcacaaaggtgaggctggaggctggaggcaggggctgcaggggccgctggggtgcgtctgggaggggcctgaagaa

SEQ ID NO: 97570 - DNA, 126 bp, Homo sapiens
  chr19:40741216-40741342
  hypo
gctccatgacctccttggcatcgctgggccccccaccaagcctgtgcagagacggccgtcagcacctgcctcccggagcagctgggttcgggcagacgggctttcggagcaggcaggccctgtatg

SEQ ID NO: 97571 - DNA, 368 bp, Homo sapiens
  chr19:40741639-40742007
  hypo
ctccctaagtgccactgtggacgttttcaggggctgtgtggggacgacacactgcgaccctacaagcgagcacccttgtggacgctgccccctccaggccgcagggacagtggcagcagctggcgctgggctgggtggggccgacgccagccctcacctctgcttggggtccttcttaagcagcccagcaagcagggacttggcctcggggctgagcgtgcgcgggaagcggatctcttccatgaggatgagctcgaagaggcgctcgtggtcctggttgtagaagggcaggcggccgcacatcatctcgtacatgaccacacccagcccccaccagtccacggcccggccatagtcattgtcctcca

SEQ ID NO: 97572 - DNA, 138 bp, Homo sapiens
  chr19:40743495-40743633
  hypo
gagccgagatcacaccactgcactcaacagagtaagactcctcaaaaataaataaataaataaatacaaataaagtaggtattgtggcagttgacactccgctagtggcctaggagcgctcatgggaggcttgggaag

SEQ ID NO: 97573 - DNA, 234 bp, Homo sapiens
  chr19:40744254-40744488
  hypo
atggaggcaaaaagaagcacacgtcatgaccaagtaacaataggccatgggcaagcccagatcagacagatgagcaaaccacgcatcccaaagcaggtgtgccaaccactgcacagagaaggcgcgaggcaaggagtgggtgacaaaagtgaggcgactctgtaaggggaagctgagcggctgcgggaattcacttcgagaggacacgggaacggagggctgctaggttttaac

SEQ ID NO: 97574 - DNA, 166 bp, Homo sapiens
  chr19:40744733-40744899
  hypo
acccacagctcctctccatcccgccccaccctaaagaaggaggccccagagggcaaagtcaaggcagccgcggctcacctcacccccgttggcatactccatcacaaagcacaggcggtcgtgggtctggaaggcatacttcagcgcctgggggatgaaggcagca

SEQ ID NO: 97575 - DNA, 162 bp, Homo sapiens; identical to SEQ ID NO: 32598
  chr19:40745939-40746101
  hypo

SEQ ID NO: 97576 - DNA, 261 bp, Homo sapiens
  chr19:40748511-40748772
  hypo
acttgtagtccatggggtcctcgcctggggcccgctgcttgaggctgttggcgaccatctggatggcccgcatccactcctccctgtgcagggacacacgtgagtcccagcagccaggagtcctgggcctcagagtcgaacagctgagtgccacctcccagccacccccagcaacaggcaagcaaatgaccacataaccatgggaatttgggcaagatctgtcagaaccagagagagctgaagggacctgagtgaaattcc

SEQ ID NO: 97577 - DNA, 21 bp, Homo sapiens
  chr19:40749071-40749092
  hypo
caagagcgatcaccaatttcc

SEQ ID NO: 97578 - DNA, 75 bp, Homo sapiens
  chr19:40752790-40752865
  hypo
ggcctggggctaagaggttggcgggctgtcggcgcagagcaccgcgcgcagggcggggtggaagggagggtgccg

SEQ ID NO: 97579 - DNA, 174 bp, Homo sapiens
  chr19:40753396-40753570
  hypo
tgtccctgagcctcagtgaagcgctgaaagctacacgagactcaggagggtaaagcagggaccctctctagggaaggctcatgggacacccagccagggagcccacgggaaaagcaaaggaagaactctcctcgtaagccatgatctgcacccgcttttcagagaggggccccc

SEQ ID NO: 97580 - DNA, 27 bp, Homo sapiens
  chr19:40756120-40756147
  hypo
acatcaaggccaggcacggtggctcac

SEQ ID NO: 97581 - DNA, 73 bp, Homo sapiens
  chr19:40757958-40758031
  hypo
accaggagcccagtgaggaggcgctgcagcacctagccaacaagcagtcaccgactggcacccacctgccctg

SEQ ID NO: 97582 - DNA, 230 bp, Homo sapiens
  chr19:40773000-40773230
  hypo
ttccccgagttcctacgctccactcttgctccctcccactcaccccacattcagcagctagagggatccccaacgctgaacctgtctttctcctgctcagaacctttgtggctccctggtgttcccagcaaaaaagccaaactcctcagctgaggatccaaggcccttcaggacctcgcctctgctgccctgcgttccaggtgcatgagctgagacgtgcacctagaaag

SEQ ID NO: 97583 - DNA, 208 bp, Homo sapiens
  chr19:40778364-40778572
  hypo
gacactgggaccatcagcattcgctaacgaaggctcgcggcacgacagaatgcaggcgggatgccttttctgaaacgcacacacacacgccctgtcacctcaattctacaatatgcgtattgtttcacatgctgatgtcattgagattggcatgtaccttgcaatccatggacaaaactcacctatcgcattcttttcagaaaagcag

SEQ ID NO: 97584 - DNA, 170 bp, Homo sapiens; identical to SEQ ID NO: 32602
  chr19:40828671-40828841
  hypo

SEQ ID NO: 97585 - DNA, 446 bp, Homo sapiens
  chr19:40829073-40829519
  hypo
attcttggaagtgagcaagcccgagttgctgcaccctgcagagcaggacactggcaggcaggaaacgcagctgggaggctctgcaatagttcaccaacaggcgccgcacaccccagcaccatgcggggatgatcttaactctacagccatccttggaggtgggtctatacagatgaggaggctgaagtacaaaggacttaagtgacatggccaaagccacgcagtcaggcccctgtgggcttcagggtgtactctgagctacacaccaggcctggggcctgtgggactgcgggccgcggcaggaagtacaggctgcatcatgggcacagtgaagagcctctgcagggcttccagtgaggggacgggccctgtcctgtgggccgcacacactgctgctgtggggataggggctggggtccatggtaactgtgcgagaccattcagga

SEQ ID NO: 97586 - DNA, 243 bp, Homo sapiens
  chr19:40829748-40829991
  hypo
agacagatgggaaagccgccagtgcaaagccaggaactgaggctggaaaggcaggttagacggccctgggccgagtgaggttgagatgtgttaaagagtcaggagcaccgctcagggaagacaacagctcgcacgcccagaatcgctcccccatccccactcactttactccctgtcgtggtgtctgccttggtctcggcgccgaggcggtcaaacacagacgtcctatggagacctgggagg

SEQ ID NO: 97587 - DNA, 31 bp, Homo sapiens
  chr19:40834858-40834889
  hypo
agttccccaagcacagcggaattgctgcgtc

SEQ ID NO: 97588 - DNA, 27 bp, Homo sapiens
  chr19:40852718-40852745
  hypo
caccacgcccagccaaggacccattct

SEQ ID NO: 97589 - DNA, 110 bp, Homo sapiens; identical to SEQ ID NO: 32606
  chr19:40873916-40874026
  hypo

SEQ ID NO: 97590 - DNA, 30 bp, Homo sapiens; identical to SEQ ID NO: 32607
  chr19:40885226-40885256
  hypo

SEQ ID NO: 97591 - DNA, 30 bp, Homo sapiens
  chr19:40886883-40886913
  hypo
ggggctgatgcgttcgtgtgactcccaggt

SEQ ID NO: 97592 - DNA, 84 bp, Homo sapiens
  chr19:40889833-40889917
  hypo
gtagcgcacctggtcgtactcgttgttgccggggtagagaggccagcccaggtgcagctcagccatgacgcagcccagggacca

SEQ ID NO: 97593 - DNA, 30 bp, Homo sapiens
  chr19:40895574-40895604
  hypo
agaactcaaggaagcggatgacgtgggcct

SEQ ID NO: 97594 - DNA, 44 bp, Homo sapiens
  chr19:40900556-40900600
  hypo
gcccgcctgtgcctctcggcttagccccacgtccagctcaagct

SEQ ID NO: 97595 - DNA, 52 bp, Homo sapiens; identical to SEQ ID NO: 32608
  chr19:40900950-40901002
  hypo

SEQ ID NO: 97596 - DNA, 30 bp, Homo sapiens
  chr19:40901948-40901978
  hypo
cttcggaagatgcacgtcgggaaccttcgg

SEQ ID NO: 97597 - DNA, 30 bp, Homo sapiens
  chr19:40903627-40903657
  hypo
cggcggcggccagccgggctgcctgagcct

SEQ ID NO: 97598 - DNA, 30 bp, Homo sapiens
  chr19:40920599-40920629
  hypo
gactcaccagaccccggggggcggcacagg

SEQ ID NO: 97599 - DNA, 114 bp, Homo sapiens; identical to SEQ ID NO: 32609
  chr19:40928721-40928835
  hypo

SEQ ID NO: 97600 - DNA, 44 bp, Homo sapiens; identical to SEQ ID NO: 12359
  chr19:40939938-40939982
  hypo

SEQ ID NO: 97601 - DNA, 25 bp, Homo sapiens
  chr19:40951174-40951199
  hypo
taatattattttttgccgggcgcag

SEQ ID NO: 97602 - DNA, 31 bp, Homo sapiens
  chr19:40951613-40951644
  hypo
aaggtttcctcctctccgaagccctccctgg

SEQ ID NO: 97603 - DNA, 31 bp, Homo sapiens; identical to SEQ ID NO: 32612
  chr19:40952443-40952474
  hypo

SEQ ID NO: 97604 - DNA, 30 bp, Homo sapiens; identical to SEQ ID NO: 32613
  chr19:40953819-40953849
  hypo

SEQ ID NO: 97605 - DNA, 32 bp, Homo sapiens
  chr19:40955775-40955807
  hypo
aaacctttaatgctttcaaatcgggaggtgtg

SEQ ID NO: 97606 - DNA, 30 bp, Homo sapiens
  chr19:40975446-40975476
  hypo
ggtgtgagccaccacgcccagccgttagtc

SEQ ID NO: 97607 - DNA, 45 bp, Homo sapiens; identical to SEQ ID NO: 32614
  chr19:40995691-40995736
  hypo

SEQ ID NO: 97608 - DNA, 629 bp, Homo sapiens; identical to SEQ ID NO: 12363
  chr19:41025293-41025922
  hypo

SEQ ID NO: 97609 - DNA, 30 bp, Homo sapiens
  chr19:41084370-41084400
  hypo
gtcgcctgcagcttcgagaggagttggatc

SEQ ID NO: 97610 - DNA, 248 bp, Homo sapiens
  chr19:41133574-41133822
  hypo
gacctcaagtcatagggtccccgcatttcccacaggttccctggctgagccctacgaggagctggaggcggaggagtgcgggatcctggacggctgcaccaacggccgctgcgtgcgcgtccccgaaggcttcacctgccgttgcttcgacggctaccgcctggacatgacccgcatggcctgcgttggtgagggcgggcccggggccagcatgcgcagggagaggcgaggcttgtccagggagggtg

SEQ ID NO: 97611 - DNA, 30 bp, Homo sapiens
  chr19:41135578-41135608
  hypo
acgcctggaagctgcgacgccctgcactgc

SEQ ID NO: 97612 - DNA, 31 bp, Homo sapiens
  chr19:41174214-41174245
  hypo
tcaccattctggaccacgtaatggttctgga

SEQ ID NO: 97613 - DNA, 390 bp, Homo sapiens; identical to SEQ ID NO: 56208
  chr19:41190145-41190535
  hypo

SEQ ID NO: 97614 - DNA, 31 bp, Homo sapiens
  chr19:41201589-41201620
  hypo
gctgtgatcttgggcacgtgacttaacccct

SEQ ID NO: 97615 - DNA, 387 bp, Homo sapiens
  chr19:41281424-41281811
  hypo
cactctcttgctcacagtccacgatggcccggtccctggtgtgccttggtgtcatcatcttgctgtctgccttctccggacctggtgtcaggggtggtcctatgcccaagctggctgaccggaagctgtgtgcggaccaggagtgcagccgtaagaatggggaggggagaattgggggcttgggcgttagcctgtgtggagggtgctgcattcccttctattccttccctagaccctatctccatggctgtggcccttcaggactacatggcccccgactgccgattcctgaccattcaccggggccaagtggtgtatgtcttctccaagctgaagggccgtgggcggctcttctggggaggcagcgtgagtcttgggagagtgaaa

SEQ ID NO: 97616 - DNA, 231 bp, Homo sapiens
  chr19:41292577-41292808
  hypo
ttcctggagaccagcgctctcacaggcgagaacgtggaggaggcgttcctcaagtgtgcccgcactatcctcaacaagattgactcaggtgaggccccgaccggcccgagtgggagcgaagggcaggcccgggggtctccaggcaaccaatgctgacctctccccttccccacaggcgagctagacccggagaggatgggctctggcattcagtacggggatgcgtccctc

SEQ ID NO: 97617 - DNA, 22 bp, Homo sapiens
  chr19:41294369-41294391
  hypo
gacagagcgagactcttaaaaa

SEQ ID NO: 97618 - DNA, 30 bp, Homo sapiens; identical to SEQ ID NO: 56212
  chr19:41304118-41304148
  hypo

SEQ ID NO: 97619 - DNA, 31 bp, Homo sapiens
  chr19:41328143-41328174
  hypo
cgtgtccctagtgatgcggtgcggcaagttc

SEQ ID NO: 97620 - DNA, 42 bp, Homo sapiens; identical to SEQ ID NO: 32619
  chr19:41616325-41616367
  hypo

SEQ ID NO: 97621 - DNA, 30 bp, Homo sapiens; identical to SEQ ID NO: 32620
  chr19:41630531-41630561
  hypo

SEQ ID NO: 97622 - DNA, 99 bp, Homo sapiens; identical to SEQ ID NO: 32621
  chr19:41665354-41665453
  hypo

SEQ ID NO: 97623 - DNA, 343 bp, Homo sapiens; identical to SEQ ID NO: 32622
  chr19:41675690-41676033
  hypo

SEQ ID NO: 97624 - DNA, 30 bp, Homo sapiens
  chr19:41787123-41787153
  hypo
cggtttgaaaactacggagacaagtttgca

SEQ ID NO: 97625 - DNA, 30 bp, Homo sapiens
  chr19:41798357-41798387
  hypo
ttccccttagtgagcgtatccggggcaccg

SEQ ID NO: 97626 - DNA, 30 bp, Homo sapiens
  chr19:41816099-41816129
  hypo
gcgcagcggtgcacccggacccggaacatt

SEQ ID NO: 97627 - DNA, 123 bp, Homo sapiens
  chr19:41854192-41854315
  hypo
tcctcacctggtacagctccacgtgctgctccacttttaacttgagcctcagcagacgcagctctgcccgggagagcaacacgggttcaggtaccgcttctcggagctctgatgtgttgaaga

SEQ ID NO: 97628 - DNA, 31 bp, Homo sapiens; identical to SEQ ID NO: 12385
  chr19:41859851-41859882
  hypo

SEQ ID NO: 97629 - DNA, 30 bp, Homo sapiens; identical to SEQ ID NO: 56226
  chr19:41860280-41860310
  hypo

SEQ ID NO: 97630 - DNA, 31 bp, Homo sapiens; identical to SEQ ID NO: 32624
  chr19:41872642-41872673
  hypo

SEQ ID NO: 97631 - DNA, 19 bp, Homo sapiens
  chr19:41881146-41881165
  hypo
agcatgcaagtgagcccgt

SEQ ID NO: 97632 - DNA, 121 bp, Homo sapiens; identical to SEQ ID NO: 32625
  chr19:41881464-41881585
  hypo

SEQ ID NO: 97633 - DNA, 184 bp, Homo sapiens
  chr19:41919911-41920095
  hypo
gcataaccaattgtgggaccccggtcccctctacacccccagggccggatctccttctacatgaccaactatggtgaggagggcacgcacgtggggagtgccgccgccctggacaacacggacctggtgtttggccagtaccgggaggcaggtacgtctgtccgtggtttggccctgtggtccc

SEQ ID NO: 97634 - DNA, 123 bp, Homo sapiens
  chr19:41921079-41921202
  hypo
cacatgctctaggagggcaaacgccctgtggtgtttgtctaaggtctagtgtcatccgtgcggaaaaagatttccagacaccaggcagcaagctgggcccccgccagctgtgctgagcactgc

SEQ ID NO: 97635 - DNA, 91 bp, Homo sapiens
  chr19:41932288-41932379
  hypo
ggcagccactgtgggaagctccggcaggctgctgacagcaagaagcggcggaggtccttggggtaggaggcgaagtcagggatctcggtgg

SEQ ID NO: 97636 - DNA, 136 bp, Homo sapiens
  chr19:41932387-41932523
  hypo
gccccccaagcctggcagccccccgtttcagtgctgtccccactgggcagggaccccagccgccactgctgctggttccagtaagcaaagggcagcgggatagtctggcccaggcgggtggagaggttggcaggta

SEQ ID NO: 97637 - DNA, 31 bp, Homo sapiens
  chr19:41946358-41946389
  hypo
gatggggtgttcttcccggcagagtaccttt

SEQ ID NO: 97638 - DNA, 471 bp, Homo sapiens; identical to SEQ ID NO: 12387
  chr19:42028282-42028753
  hypo

SEQ ID NO: 97639 - DNA, 22 bp, Homo sapiens
  chr19:42234040-42234062
  hypo
tttaaaaaagtctgtgtgggcc

SEQ ID NO: 97640 - DNA, 27 bp, Homo sapiens
  chr19:42282955-42282982
  hypo
taagagtcaaggggctgggtgcggtgg

SEQ ID NO: 97641 - DNA, 30 bp, Homo sapiens
  chr19:42348887-42348917
  hypo
aggcagcggtggcgcgaggctcaactcgaa

SEQ ID NO: 97642 - DNA, 242 bp, Homo sapiens; identical to SEQ ID NO: 32628
  chr19:42398489-42398731
  hypo

SEQ ID NO: 97643 - DNA, 309 bp, Homo sapiens
  chr19:42400291-42400600
  hypo
ggtcttaacatctgtccgtcccgtgctgaagtacagagcagccatgtggtgtctgccaggcactgggtagctttagcccccgcaattccaggcccccagagtgtgggtctcgtggccgcagaggccttccagccagccctgctccctccaccccacaggtgctgacgcccccctggagctgggggactcatccccgcagggcccaatgagcctggagtccttggcgcccccagagagtaccgacgagggggccgaaaccgagaggtgcccaggctggggtgcaggggcgggaggtgtggcttactgggc

SEQ ID NO: 97644 - DNA, 30 bp, Homo sapiens; identical to SEQ ID NO: 32630
  chr19:42407456-42407486
  hypo

SEQ ID NO: 97645 - DNA, 353 bp, Homo sapiens; identical to SEQ ID NO: 32631
  chr19:42408202-42408555
  hypo

SEQ ID NO: 97646 - DNA, 305 bp, Homo sapiens
  chr19:42408827-42409132
  hypo
ccacaaacactggaagcggctggagggtgggagtggctggaggggtttcgttaggtaagccagggtacatgcccgattccataaggaggtgtgagaggtggggctcaggaggacacatcgggccctggatattagcagacagtgagtggtgagttgagccatgggagccctgagagcgccaccactgtgggtgacttctccagcttgtgcttagggaggggcaggcactggggggacctgggctctgagccccatctccccctctccctgcagatcacaaagccttctacgtcctttttacctgg

SEQ ID NO: 97647 - DNA, 30 bp, Homo sapiens
  chr19:42412448-42412478
  hypo
gtcagagctgcagccgctgacgtcggtgat

SEQ ID NO: 97648 - DNA, 537 bp, Homo sapiens
  chr19:42424110-42424647
  hypo
ctcacagacatgacacgcccacagacgtgacacacccagacatgacgaactcacagacatgacgcgctcacagacatgatacgctcacagacatgacacacccagatgtgacacactcacagacatgacacgctcacagacatacactcacagacatgacacgctcacacatgcgctcacagacatgacacgcccagacatgatgcactcagacatgacacgctcacagacatgcgctcacagacatgacatgcccagacgtgacactcagacgtgacgtgctcagacgtgaggcacagacatgacatgctcacagacatgataacgctcacagacatgcgctcacagacatgacatgcccagacgtgacacactcagacgtgatgcactcagacgtgacgcacagacatgacatgttcacagacatgacatgcccagatgtgacacactcacagacatgacacactcacagacatgacacgctcacagacatgacacgcccagacatgatgaactcacagacgtgacacacagaca

SEQ ID NO: 97649 - DNA, 546 bp, Homo sapiens
  chr19:42460852-42461398
  hypo
taacagctttattttcaaaggcgggatccctccccgggcttgtgatgggacggcgctgtgggcccgagcagcagagccgtgcaggacaggcatgggcaggggtggggcagctggcccgggaggccggcaggtcccagaagacacctcacacgggttccatctgcagctcctccccgtccacagcctcaatctggtggaaggcagcgtgggagccgatgaccaccagggtggctcctgcaggaaagccggcagctcagggccacactcctgcacctggctcccaccatccaccccagctgctcagaccctgtactcacccagcacccagaagacggccgagcccgcaccagccagccagaagaaggggaaggagatgcctccagccagagcatactgatgcgctgggctcacctctcggcctgggggcagatggcattggggtgctgttccgactctccatgccctctcccagagtaacccctgctgccccccaacaatccgtacaagctccaggttctcgggatcgaatccaaactcctcatgcca

SEQ ID NO: 97650 - DNA, 30 bp, Homo sapiens; identical to SEQ ID NO: 32634
  chr19:42509931-42509961
  hypo

SEQ ID NO: 97651 - DNA, 30 bp, Homo sapiens
  chr19:42578890-42578920
  hypo
catagaattggccccgggtctcactgtgag

SEQ ID NO: 97652 - DNA, 57 bp, Homo sapiens
  chr19:42657374-42657431
  hypo
gattctaggactgcacatacccgagcgtcttggcccgagtcatgtctgtgtgtgaac

SEQ ID NO: 97653 - DNA, 186 bp, Homo sapiens
  chr19:42700690-42700876
  hypo
cctccgtggggccacgccggcctcccacatctcccatgggctccgatctcctgtggccccacgccctgtccccacacgatcctgtttctctacccgatgctcccagggttgtcctccgggctcagatctgacccacctccgggccccgagggtcagtccctcaccccccgcgcctcgcccgcactc

SEQ ID NO: 97654 - DNA, 393 bp, Homo sapiens; identical to SEQ ID NO: 32635
  chr19:42722505-42722898
  hypo

SEQ ID NO: 97655 - DNA, 32 bp, Homo sapiens; identical to SEQ ID NO: 32636
  chr19:42723737-42723769
  hypo

SEQ ID NO: 97656 - DNA, 47 bp, Homo sapiens
  chr19:42729403-42729450
  hypo
ctcagcaggggctcgccggcaacaccggcggacggctcacagcccgg

SEQ ID NO: 97657 - DNA, 30 bp, Homo sapiens
  chr19:42738763-42738793
  hypo
tgtcgcggtgacacacgccctgggagtgga

SEQ ID NO: 97658 - DNA, 31 bp, Homo sapiens
  chr19:42739032-42739063
  hypo
gggcgtggcgggtcacgcctgtaatcccggt

SEQ ID NO: 97659 - DNA, 26 bp, Homo sapiens
  chr19:42771609-42771635
  hypo
gtttcggggaaaaaaataataataat

SEQ ID NO: 97660 - DNA, 30 bp, Homo sapiens
  chr19:42776864-42776894
  hypo
accaggcagcctcccgcagcccccacagcc

SEQ ID NO: 97661 - DNA, 376 bp, Homo sapiens; identical to SEQ ID NO: 32637
  chr19:42791225-42791601
  hypo

SEQ ID NO: 97662 - DNA, 70 bp, Homo sapiens
  chr19:42796491-42796561
  hypo
ctgggtaccagccctgcgtccagccaggctggaacagtcacctcgtacgggcccacgagctctgtagctc

SEQ ID NO: 97663 - DNA, 31 bp, Homo sapiens
  chr19:42809712-42809743
  hypo
agccaccatacccaaccgagaaaaaaatttt

SEQ ID NO: 97664 - DNA, 183 bp, Homo sapiens
  chr19:42813634-42813817
  hypo
acaggcataagccaccgcgcccagccctccctattcactttgctactccccttgacttatctgcatgctgatggccaccctatctttatattccaggacaccatggatacccagggaccagtctcccagccttttcagcagcctgagaaacctggtcgtgtccgtcgtcggaagactaggcgg

SEQ ID NO: 97665 - DNA, 20 bp, Homo sapiens
  chr19:42815749-42815769
  hypo
ccctgcgaaccctctatttt

SEQ ID NO: 97666 - DNA, 237 bp, Homo sapiens
  chr19:42873731-42873968
  hypo
tcatgtgtggagcccgaccactgccgctgccactttggctttgtgggccgcaactgctccacggaatgccgctgcaaccgccacagtgaatgcgctggtgttggggcgcgtgaccactgcttgctctgccgcaaccacaccaaggtgggccgcccggagcctcagacccccgaccctgggacccaggccctcacttgccttcatcccacgctcaggcggctcgcatctcatcctgag

SEQ ID NO: 97667 - DNA, 30 bp, Homo sapiens
  chr19:42880142-42880172
  hypo
cagtgctggtggtccgcggcgtgcgggacc

SEQ ID NO: 97668 - DNA, 30 bp, Homo sapiens; identical to SEQ ID NO: 32639
  chr19:42893088-42893118
  hypo

SEQ ID NO: 97669 - DNA, 316 bp, Homo sapiens
  chr19:42906775-42907091
  hypo
gcaggctcttgagcatgctgtcgggtgccagcagcggcgacatgaaggggttcttgactatgggtgaggagtagaggggcatctgtgtggcaccctggctggagcgtcgggggtggaaaccctcggggaaggcggcacggacgcccaggcctctgtccatggggctcagctcatttttggcctcagcctcttcccctgcatcctcaggtggtaataagaagttgacatcggagggtgtggaggggctaagtgtctcagctgacagcgacatctcgggggtgtccgacgacgtctcggagtttcccctcaggctcaa

SEQ ID NO: 97670 - DNA, 30 bp, Homo sapiens; identical to SEQ ID NO: 32641
  chr19:42909504-42909534
  hypo

SEQ ID NO: 97671 - DNA, 30 bp, Homo sapiens
  chr19:42914486-42914516
  hypo
catcccttatgcagcgtgacatactcccgg

SEQ ID NO: 97672 - DNA, 525 bp, Homo sapiens; identical to SEQ ID NO: 56253
  chr19:42927409-42927934
  hypo

SEQ ID NO: 97673 - DNA, 85 bp, Homo sapiens
  chr19:43181319-43181404
  hypo
atctatagtaattttgtctttcgatgcacgttcacagccagcgatggccaatggtgtctctcacgctgcatcattctcaccctga

SEQ ID NO: 97674 - DNA, 31 bp, Homo sapiens; identical to SEQ ID NO: 56255
  chr19:43866888-43866919
  hypo

SEQ ID NO: 97675 - DNA, 30 bp, Homo sapiens
  chr19:43918988-43919018
  hypo
caccaatggggtttcgagtgctgtgtggcc

SEQ ID NO: 97676 - DNA, 442 bp, Homo sapiens; identical to SEQ ID NO: 56256
  chr19:43967733-43968175
  hypo

SEQ ID NO: 97677 - DNA, 37 bp, Homo sapiens
  chr19:43975085-43975122
  hypo
ttacaggcgtgagccaccatgccgggcccaaagtgtc

SEQ ID NO: 97678 - DNA, 128 bp, Homo sapiens
  chr19:44005793-44005921
  hypo
ggacaaccccggggcgcaggtggctaggagcacaccaacatccatggaccaggaaggacactgctgatgaagacccggtgagccaaacagacctgttcccgctgctggcggccgcgctgctccgaggc

SEQ ID NO: 97679 - DNA, 30 bp, Homo sapiens
  chr19:44022620-44022650
  hypo
gggcgtggtgtctcacgcctgtaatcccag

SEQ ID NO: 97680 - DNA, 21 bp, Homo sapiens
  chr19:44023448-44023469
  hypo
ccaccgcgcccggcctgtgct

SEQ ID NO: 97681 - DNA, 22 bp, Homo sapiens
  chr19:44033883-44033905
  hypo
cgtctcaaaaaaaaaaaaaatt

SEQ ID NO: 97682 - DNA, 30 bp, Homo sapiens
  chr19:44096446-44096476
  hypo
ccagggcacgctcacgtcgagccagtgccg

SEQ ID NO: 97683 - DNA, 123 bp, Homo sapiens
  chr19:44096723-44096846
  hypo
tagccctgggagtccgccaggccgtagggggaacactggcggcggcgcctcctccagcacctcccacgtctcgtcctccgggcttaacgcagcggcccgctctgagtcgccaccacctgattt

SEQ ID NO: 97684 - DNA, 2 bp, Homo sapiens
  chr19:44128765-44128767
  hypo
ct

SEQ ID NO: 97685 - DNA, 555 bp, Homo sapiens; identical to SEQ ID NO: 56264
  chr19:44143853-44144408
  hypo

SEQ ID NO: 97686 - DNA, 91 bp, Homo sapiens
  chr19:44207877-44207968
  hypo
tgcgtacaagagacatagccacagagctcagcatagtggttcagaggatgtactcaggttccagtctgtctgggttcgaaagccaacactt

SEQ ID NO: 97687 - DNA, 716 bp, Homo sapiens; identical to SEQ ID NO: 32644
  chr19:44222770-44223486
  hypo

SEQ ID NO: 97688 - DNA, 168 bp, Homo sapiens
  chr19:44243553-44243721
  hypo
acttgacaaggtcacacaattcgttggtggtttcaggtaaaaacgggatatgcgaagtccagagaagagagagatcagtgtgtgtgtgctgggggtctggtggctcctccagaggcgaggataggcagtctgagggaggcaagccacaccctccgaatgccagcttaa

SEQ ID NO: 97689 - DNA, 267 bp, Homo sapiens
  chr19:44273508-44273775
  hypo
atggacatgcacacacacagccgtgcagagaggtgacttggacatgggtgcacatggacacgtgtgcatacaaagcggccctcacgcgttgatggcggccagcagcttgcgctgatgcctgcgggcagcatgagactccttcctgcgagtatgtttgtagaacatccaggcttcttgtagcactcgggcagcggactccttcatctgggggtgggtggcacagtgtccgtggagatagacccttacggttctgggaaggcagggcta

SEQ ID NO: 97690 - DNA, 30 bp, Homo sapiens; identical to SEQ ID NO: 56267
  chr19:44286497-44286527
  hypo

SEQ ID NO: 97691 - DNA, 30 bp, Homo sapiens; identical to SEQ ID NO: 12408
  chr19:44511186-44511216
  hypo

SEQ ID NO: 97692 - DNA, 30 bp, Homo sapiens
  chr19:44530308-44530338
  hypo
ctcgggcatgggtgtcgataatgattaagc

SEQ ID NO: 97693 - DNA, 35 bp, Homo sapiens
  chr19:44530713-44530748
  hypo
ttttttacagagtttcgctcttgttgcttaggctg

SEQ ID NO: 97694 - DNA, 35 bp, Homo sapiens
  chr19:44530807-44530842
  hypo
tcctgcctcagtctcattttcgtcaaagggcccgc

SEQ ID NO: 97695 - DNA, 45 bp, Homo sapiens; identical to SEQ ID NO: 32646
  chr19:44564103-44564148
  hypo

SEQ ID NO: 97696 - DNA, 38 bp, Homo sapiens; identical to SEQ ID NO: 32647
  chr19:44575623-44575661
  hypo

SEQ ID NO: 97697 - DNA, 57 bp, Homo sapiens; identical to SEQ ID NO: 32648
  chr19:44578498-44578555
  hypo

SEQ ID NO: 97698 - DNA, 29 bp, Homo sapiens
  chr19:44655369-44655398
  hypo
tggtaaggacattgctcgctctgtcgccc

SEQ ID NO: 97699 - DNA, 32 bp, Homo sapiens
  chr19:44988474-44988506
  hypo
ctggcagccaccgcgcccggcctatttcctca

SEQ ID NO: 97700 - DNA, 601 bp, Homo sapiens; identical to SEQ ID NO: 56290
  chr19:45004315-45004916
  hypo

SEQ ID NO: 97701 - DNA, 94 bp, Homo sapiens; identical to SEQ ID NO: 32650
  chr19:45108542-45108636
  hypo

SEQ ID NO: 97702 - DNA, 31 bp, Homo sapiens
  chr19:45141558-45141589
  hypo
ttaaaatttttttggccgggcacagtggctc

SEQ ID NO: 97703 - DNA, 151 bp, Homo sapiens; identical to SEQ ID NO: 32651
  chr19:45149596-45149747
  hypo

SEQ ID NO: 97704 - DNA, 504 bp, Homo sapiens
  chr19:45150350-45150854
  hypo
tccccctccccccacaccccacggtccaccggggatccagggccccagcgtgcaagtcgcgccaggtgcccgggctcctggagcccctccctatctagtccaagaacgccccgggtctgacaccttctcttcggttctccgcaggggacgtcgtcgtgcaggcgcccacccaggtgcccggcttcttgggcgactccgtgacgctgccctgctacctacaggtgcccaacatggaggtgacgcatgtgtcacagctgacttgggcgcggcatggtgaatctggcagcatggccgtcttccaccaaacgcagggccccagctattcggagtccaaacggctggaattcgtggcagccagactgggcgcggagctgcggaatgcctcgctgaggatgttcgggttgcgcgtagaggatgaaggcaactacacctgcctgttcgtcacgttcccgcagggcagcaggagcgtggatatctggctccgagtgcttggtgagcaggggg

SEQ ID NO: 97705 - DNA, 30 bp, Homo sapiens
  chr19:45153470-45153500
  hypo
tccatcatctgcaccggctcccctgactcc

SEQ ID NO: 97706 - DNA, 36 bp, Homo sapiens
  chr19:45162025-45162061
  hypo
gcactcaggcatatcccgtaacgccatcatcttcct

SEQ ID NO: 97707 - DNA, 207 bp, Homo sapiens
  chr19:45164647-45164854
  hypo
cgtcttcagatgcccacggcccggcctcaggagcctgggtcttttctcctggtgcctcgagcagcatttcccaacccttcctgctgggcggaatcccctgtagagtttgctaagacgcagccccagacagtctggtctgtgatggggccagggaatctgcattttaatatccgctctctcccccctgccccacgccccttcaattcc

SEQ ID NO: 97708 - DNA, 148 bp, Homo sapiens; identical to SEQ ID NO: 32654
  chr19:45186850-45186998
  hypo

SEQ ID NO: 97709 - DNA, 105 bp, Homo sapiens
  chr19:45193692-45193797
  hypo
ccgagcacttattatacgccatgcactatgctaagggctttacatttattcactgatatcctcacaacggttctgtgagtgaagttataccattgaaagtaatgg

SEQ ID NO: 97710 - DNA, 31 bp, Homo sapiens
  chr19:45202941-45202972
  hypo
cggccatgagccaccacgcccggccagagcc

SEQ ID NO: 97711 - DNA, 262 bp, Homo sapiens; identical to SEQ ID NO: 56294
  chr19:45207312-45207574
  hypo

SEQ ID NO: 97712 - DNA, 123 bp, Homo sapiens
  chr19:45211219-45211342
  hypo
aggacctgctggtctacgcctggtaccgcgggcctgcctccgagcccaaccggctgctcagccagctgccgtcaggaacctggattgcaggccccgcgcacacaggccgggaggtgggcttcc

SEQ ID NO: 97713 - DNA, 91 bp, Homo sapiens
  chr19:45268258-45268349
  hypo
tcctctcctcctatgcagtggcggcaaacagcagtgccctcagtagtatacgcagcctgctgcgtgtagcggtggccttaagagaccttgg

SEQ ID NO: 97714 - DNA, 193 bp, Homo sapiens
  chr19:45279713-45279906
  hypo
gcctaggatggggcgcggccagaatgccttgcttaggggcgaggcccacagcgccccgatggctgcccagcgagcaactgagcaaccaggctgatgttacaggttctacaggttgggtgaaagccacgcccggccacccctacacaaatgagttgctccccgcccccacagtcttgaacgccatcctcccgcc

SEQ ID NO: 97715 - DNA, 82 bp, Homo sapiens
  chr19:45280160-45280242
  hypo
aaagacccataccttcgacaaggcgctgtgtccaagtcccacctctcggtagctcccagcccttcccctcccctctccaaga

SEQ ID NO: 97716 - DNA, 199 bp, Homo sapiens; identical to SEQ ID NO: 56299
  chr19:45312125-45312324
  hypo

SEQ ID NO: 97717 - DNA, 378 bp, Homo sapiens
  chr19:45314499-45314877
  hypo
gcttgtctgtacccccgctggtggaggtgatgcgaggaaagtctgtcattctggactgcacccctacgggaacccacgaccattatatgctggaatggttccttgtgagtgcttggggctggggggcctggagtcagggcacagcagggcagcaaaggttcattctctcatcagtgcctaaggcctgtagagatccaccaagccacactccttgttacagatggggtcactgagtcccactgaggggaagggatctgcaaggtgccccgtgtctaggcacagccaagtctagaatgacattgacctgctctggactgcgggctcttgagagagagaacagagacagacatcaagaaagcagaagccaggcacggtggc

SEQ ID NO: 97718 - DNA, 179 bp, Homo sapiens; identical to SEQ ID NO: 32659
  chr19:45315557-45315736
  hypo

SEQ ID NO: 97719 - DNA, 30 bp, Homo sapiens
  chr19:45316667-45316697
  hypo
actgccacctcccccgatctctcccagagg

SEQ ID NO: 97720 - DNA, 31 bp, Homo sapiens
  chr19:45317398-45317429
  hypo
cttcccttagatcccacggagcacgtgcagt

SEQ ID NO: 97721 - DNA, 31 bp, Homo sapiens
  chr19:45322432-45322463
  hypo
gccaattggggggcagcgtaagggaccttcc

SEQ ID NO: 97722 - DNA, 39 bp, Homo sapiens
  chr19:45328103-45328142
  hypo
gagacaccgtgcctggccgataatttggtcttgaggtcc

SEQ ID NO: 97723 - DNA, 369 bp, Homo sapiens; identical to SEQ ID NO: 56300
  chr19:45347905-45348274
  hypo

SEQ ID NO: 97724 - DNA, 264 bp, Homo sapiens; identical to SEQ ID NO: 56301
  chr19:45348807-45349071
  hypo

SEQ ID NO: 97725 - DNA, 553 bp, Homo sapiens; identical to SEQ ID NO: 56302
  chr19:45349504-45350057
  hypo

SEQ ID NO: 97726 - DNA, 221 bp, Homo sapiens
  chr19:45368652-45368873
  hypo
cgcccagatgcacctgcgaaccaccagaatgtggccgccttccaccctaagatgggtcccagcttccccagcccgaagcctggcagcgagcggctgtccttcgtctctgccaagcagagcactgggcaagacacagaggcagagctccaggacgccacgctggccctccacgggctcacggtggaggacgagggcaactacacttgcgagtttgccacctt

SEQ ID NO: 97727 - DNA, 36 bp, Homo sapiens
  chr19:45377061-45377097
  hypo
gtacctcctgccaacccgccccgtttctttagcatt

SEQ ID NO: 97728 - DNA, 31 bp, Homo sapiens
  chr19:45377456-45377487
  hypo
ggcaatttggggtctccgggagtacttaggt

SEQ ID NO: 97729 - DNA, 45 bp, Homo sapiens
  chr19:45382929-45382974
  hypo
agtaagggacaggtttttacccgcgtcacctctgctctcccaagc

SEQ ID NO: 97730 - DNA, 24 bp, Homo sapiens
  chr19:45384656-45384680
  hypo
aaggcaggccgagcacggcataat

SEQ ID NO: 97731 - DNA, 18 bp, Homo sapiens
  chr19:45384932-45384950
  hypo
gaccgtctcaaaaaaaac

SEQ ID NO: 97732 - DNA, 30 bp, Homo sapiens
  chr19:45385432-45385462
  hypo
ctggagaccccctcacgctgtccctctcct

SEQ ID NO: 97733 - DNA, 28 bp, Homo sapiens
  chr19:45386809-45386837
  hypo
gcatgagccactgcgcccagccaatgcc

SEQ ID NO: 97734 - DNA, 73 bp, Homo sapiens; identical to SEQ ID NO: 32664
  chr19:45390078-45390151
  hypo

SEQ ID NO: 97735 - DNA, 30 bp, Homo sapiens; identical to SEQ ID NO: 32665
  chr19:45412584-45412614
  hypo

SEQ ID NO: 97736 - DNA, 216 bp, Homo sapiens
  chr19:45465160-45465376
  hypo
tgtctaagacagcccccgtgtccattctccctccttaccctggcctctgtcccccacaggtgaccagcaatggcagcatcgggagggacccgccagcggagacccagcctcagaacccaccggcccagccggcacccaatgcctggcaggtcatcaaaggtgtgctgtttaggtgagcagacgggacttgggtttgttcaccgaaaacattcaaat

SEQ ID NO: 97737 - DNA, 30 bp, Homo sapiens; identical to SEQ ID NO: 32667
  chr19:45496281-45496311
  hypo

SEQ ID NO: 97738 - DNA, 262 bp, Homo sapiens
  chr19:45515278-45515540
  hypo
gtctcgcggggctgcgtccctgagcacggtcaccctgggccctgtggcgcccccagccacgccgccgccttggggctgccccctgggccgactagtgtccccagcgccgggcccgggcccgcagccgcacctggtcatcacggagcagcccaagcagcgcggcatgcgcttccgctacgagtgcgagggccgctcggccggcagcatccttggggagagcagcaccgaggccagcaagacgctgcccgccatcgaggtgggc

SEQ ID NO: 97739 - DNA, 30 bp, Homo sapiens
  chr19:45536649-45536679
  hypo
gccagtgtgtaggccgggcgcagtggctca

SEQ ID NO: 97740 - DNA, 30 bp, Homo sapiens
  chr19:45540751-45540781
  hypo
cctgacctcctggacgatggctttgcctac

SEQ ID NO: 97741 - DNA, 30 bp, Homo sapiens
  chr19:45541177-45541207
  hypo
ttggcgagaagctccgttgcacgggtttcc

SEQ ID NO: 97742 - DNA, 102 bp, Homo sapiens; identical to SEQ ID NO: 32668
  chr19:45546674-45546776
  hypo

SEQ ID NO: 97743 - DNA, 29 bp, Homo sapiens
  chr19:45554926-45554955
  hypo
agaagtgagcttgctgcaggccgggcgcg

SEQ ID NO: 97744 - DNA, 240 bp, Homo sapiens
  chr19:45567165-45567405
  hypo
gtcgctgtggcccgcgctggcgctgctgttgatctgctgtgtgtgctgttcccgaagaggctccgggagcctgagctagtgagcctcctcctccctacccgcaggtcaccctcggagtccagctcagagtcccgctcccgctcccgctccccgaccccgggccgcgaggagaagatcacgttcatcaccagttttgggggcagcgatgaggaggcagccgcagccgctgctgccgcagca

SEQ ID NO: 97745 - DNA, 213 bp, Homo sapiens; identical to SEQ ID NO: 32669
  chr19:45567706-45567919
  hypo

SEQ ID NO: 97746 - DNA, 40 bp, Homo sapiens; identical to SEQ ID NO: 32670
  chr19:45569128-45569168
  hypo

SEQ ID NO: 97747 - DNA, 1124 bp, Homo sapiens; identical to SEQ ID NO: 32671
  chr19:45574504-45575628
  hypo

SEQ ID NO: 97748 - DNA, 30 bp, Homo sapiens; identical to SEQ ID NO: 32672
  chr19:45601444-45601474
  hypo

SEQ ID NO: 97749 - DNA, 239 bp, Homo sapiens; identical to SEQ ID NO: 32673
  chr19:45603141-45603380
  hypo

SEQ ID NO: 97750 - DNA, 529 bp, Homo sapiens
  chr19:45603729-45604258
  hypo
cccaggaggtaggtgccgtttgccccaatttgtagatgaggaaatggagcccatagaggtaaagtaattttcctgaggtcacacagtgggtaagtggtggagctgggattcaaatccaggcagccagcctggcgccgaagcctgcgcagtaataacccctgtgcggcggctgagtgcttggacgcattcggtgcaacgtgccatacggtctcttcatctataacccagaatcgtttataaaatagaggcaacagtgctggctttgcggtgttgtggcagggaggagaaacagaaacaggtggggtaagggcccagccttggtgggcacgcaggagggggtcactgtggttcgtggacagcttgagtccctggagatttgtgctgctcctctgtcctcagcattgcctgctgttctgacccttggcctctgggacgtgttcttcctgtgctactcagtgtctggtatgtgataggcgctcaatatattcttgctgcgtgagtgacttggtgaccccgtaaccagtcatgc

SEQ ID NO: 97751 - DNA, 30 bp, Homo sapiens
  chr19:45616604-45616634
  hypo
acccactgggtgccacgcatggcgttgagc

SEQ ID NO: 97752 - DNA, 326 bp, Homo sapiens
  chr19:45626601-45626927
  hypo
accaggaagaaacctacgagcgcatccttgctgagggcaggacccgctctccacatcctggaaacccaacagagaaagacagtctctctggcagcctccctgtcttgaagttcgagaaggctgcatttctaggctcccacaacctgtctgtccggtttgaagccggggcctgagggcttcagggtactgatgcaggacagacagctctggttcaaacctccctctgtccgctcccacaggtgtggcctcagaagaccattccctctgtagcgtggtagaggctggaaattctactctgcaggattatgatgcggattaaatgcagt

SEQ ID NO: 97753 - DNA, 30 bp, Homo sapiens
  chr19:45627574-45627604
  hypo
aagcaccgggcccttcgggggacgggaaga

SEQ ID NO: 97754 - DNA, 136 bp, Homo sapiens
  chr19:45629664-45629800
  hypo
gtcactgctctgtgctgttggcgacggagcagggattggaacccaggcgcctggcttcgaggcccgcatgctgtggggaaatggggctctgccatgttggtggttatttattgtcgtgaacaagagctcaggcctg

SEQ ID NO: 97755 - DNA, 30 bp, Homo sapiens; identical to SEQ ID NO: 56307
  chr19:45647943-45647973
  hypo

SEQ ID NO: 97756 - DNA, 109 bp, Homo sapiens; identical to SEQ ID NO: 56308
  chr19:45648468-45648577
  hypo

SEQ ID NO: 97757 - DNA, 57 bp, Homo sapiens; identical to SEQ ID NO: 56309
  chr19:45655080-45655137
  hypo

SEQ ID NO: 97758 - DNA, 137 bp, Homo sapiens
  chr19:45678711-45678848
  hypo
cttattgagtatgatgaagcctaccaagaaaaaagtgcgagagggagaccaggagaatgtataaaggagatccaaatttgactgggggctcagggaaggcatccctgaggaagggattgttacgctaagatctgaag

SEQ ID NO: 97759 - DNA, 120 bp, Homo sapiens
  chr19:45737163-45737283
  hypo
gtaagtgttgacagagcgctgaggtttttggaccacagtggtgccggagctcttattctaggactgcaagcgtccatggtactaaggtgctggaaccggaagcctcggtagcagtgagag

SEQ ID NO: 97760 - DNA, 135 bp, Homo sapiens
  chr19:45769020-45769155
  hypo
gagatgcaggtgtgagggtgccggggcatgtggggtaagcagatgtgcaggtgtgagggtgccgggcatgtcggctaggaagatgtgcaggtgtgagggtgtttctgccttgacgctgctgtcctgaactcaagg

SEQ ID NO: 97761 - DNA, 110 bp, Homo sapiens
  chr19:45805726-45805836
  hypo
tgatggcagctctgcgccaggccacagcagccgcccgctgccgctgccgccagccacagccgttcctgctggcctgcctgcacgggggtgcgggcgggcccgagcccctg

SEQ ID NO: 97762 - DNA, 79 bp, Homo sapiens
  chr19:45810101-45810180
  hypo
tgcacctgttctacttcggacgagcccagccgatcagcgttggacacgtcaaatactgagcccacggcagctgtgtcca

SEQ ID NO: 97763 - DNA, 169 bp, Homo sapiens
  chr19:45851274-45851443
  hypo
cctcgtgatccagtacgcggggcagggccgctatgaggtggcggtgcctctgtgccgccaggccttggaggacctggagcgcagctcgggccactgccaccctgacgtggccaccatgctcaacatcctggcgctggtgtaccggtgagcactgcggccagccatggct

SEQ ID NO: 97764 - DNA, 30 bp, Homo sapiens
  chr19:45854735-45854765
  hypo
gctgccttctcctgcgattaaaggctgtgg

SEQ ID NO: 97765 - DNA, 119 bp, Homo sapiens
  chr19:45856037-45856156
  hypo
acgccaaacatgatgacggcccgcccgtagtggtgcactggtgggcagaggagagggggcgaggggggttacaagtgtggctggtgggacagggacagcctcacgcgacccaggatgct

SEQ ID NO: 97766 - DNA, 87 bp, Homo sapiens
  chr19:45866859-45866946
  hypo
cagacaaggtcccacgtgcctcgcccagctcactcactcctgatgctgcagtggtgacctggggctacaggcgtggaggacacggct

SEQ ID NO: 97767 - DNA, 187 bp, Homo sapiens
  chr19:45867289-45867476
  hypo
cgtctcccgggcggcgctggcctcccgcagcccctccaccagacgccggtactcgtcccgcaggcgctgctcgtctgtctctttgatcctgcggagagatgagctggggctgggagggggctggcaaccctggggacaagtcagacaggggccagggtcccaggggcagggcgggcaccaccgccag

SEQ ID NO: 97768 - DNA, 208 bp, Homo sapiens
  chr19:45895250-45895458
  hypo
gggacagctctggctccggccccccgggccctggccccccatgacgatggaagaggcggctgatgatctgctggtactgtttcttgtgggtagggggcagggccacagcaggggcctgctccatggagcccctgcgtttgaggggccggggaatttccgccaacacccgtgccacctcctccagctcgggcaccgactgtgcctccgg

SEQ ID NO: 97769 - DNA, 126 bp, Homo sapiens
  chr19:45903692-45903818
  hypo
aggctggggcatgctgatacccgcctctgtctgggaagtcgaaggaacagaacctgttcaggctggcggctcatttggatgaacagggagtgtgtgaccttgggcgttgagtcctctccactccct

SEQ ID NO: 97770 - DNA, 47 bp, Homo sapiens; identical to SEQ ID NO: 56323
  chr19:45908809-45908856
  hypo

SEQ ID NO: 97771 - DNA, 83 bp, Homo sapiens
  chr19:45949939-45950022
  hypo
tcagtcacatggagccggtgtagaaagtaggagctgggccgggagaggtggctcacaactgtaatcccggaactttgggaggc

SEQ ID NO: 97772 - DNA, 263 bp, Homo sapiens; identical to SEQ ID NO: 12433
  chr19:45959072-45959335
  hypo

SEQ ID NO: 97773 - DNA, 27 bp, Homo sapiens
  chr19:45983200-45983227
  hypo
agtggcggccgggcgcggtagctcacg

SEQ ID NO: 97774 - DNA, 201 bp, Homo sapiens; identical to SEQ ID NO: 32681
  chr19:45997522-45997723
  hypo

SEQ ID NO: 97775 - DNA, 30 bp, Homo sapiens
  chr19:45998186-45998216
  hypo
cgtggtctcctcctcgtcctcctctgagaa

SEQ ID NO: 97776 - DNA, 632 bp, Homo sapiens; identical to SEQ ID NO: 12435
  chr19:46001720-46002352
  hypo

SEQ ID NO: 97777 - DNA, 275 bp, Homo sapiens; identical to SEQ ID NO: 12436
  chr19:46002431-46002706
  hypo

SEQ ID NO: 97778 - DNA, 91 bp, Homo sapiens
  chr19:46021492-46021583
  hypo
ttttgtgcattccagtgtgaccgtgtgcacctatgtgtaaaatgcaccattggcccggcgccgtggctcatgcctgtaatctcagcacttt

SEQ ID NO: 97779 - DNA, 166 bp, Homo sapiens
  chr19:46056762-46056928
  hypo
agcaagctcctatttcttggacgcaggcactgcgtgggaagcggaccggccgggattgcagagctgggcgcgcacctcttgcagctctgtgcgcagttcctccagggcgccctgtggcggcgccgcctgcacctgcgcctgcagcgcttccagcgccagcgccagg

SEQ ID NO: 97780 - DNA, 30 bp, Homo sapiens
  chr19:46136091-46136121
  hypo
cggggttagggtgggcgaaggacttacaga

SEQ ID NO: 97781 - DNA, 30 bp, Homo sapiens
  chr19:46198615-46198645
  hypo
catggctcaggtcacgtggcccttctcccc

SEQ ID NO: 97782 - DNA, 42 bp, Homo sapiens
  chr19:46208925-46208967
  hypo
gagccaccgtgcctggcccacgctgtccttaaggagacactt

SEQ ID NO: 97783 - DNA, 30 bp, Homo sapiens
  chr19:46215622-46215652
  hypo
gcactcatctaccacgcccgtcaccaccac

SEQ ID NO: 97784 - DNA, 25 bp, Homo sapiens
  chr19:46234862-46234887
  hypo
gcgcccggcccgtcccctcctttct

SEQ ID NO: 97785 - DNA, 30 bp, Homo sapiens
  chr19:46236414-46236444
  hypo
tacttgggatgcaacggccctggaccacgc

SEQ ID NO: 97786 - DNA, 226 bp, Homo sapiens
  chr19:46236679-46236905
  hypo
cctggcctcaggaacgcactcttgctctgctcctcacgcctcgcgcaggatcctcgcgccgggaggattcgcacccaaccccaagcccggttgggaacgtggtgtccgagaccgtctgggatccccgcgcgcacggccggcttcccgggacccgcgcgagacgctgtctgatcgggctccctagagtggggcccggagaaaccagaacggcgggggcagcctcacg

SEQ ID NO: 97787 - DNA, 349 bp, Homo sapiens; identical to SEQ ID NO: 56345
  chr19:46271266-46271615
  hypo

SEQ ID NO: 97788 - DNA, 34 bp, Homo sapiens; identical to SEQ ID NO: 56347
  chr19:46273812-46273846
  hypo

SEQ ID NO: 97789 - DNA, 30 bp, Homo sapiens
  chr19:46289727-46289757
  hypo
caccacgtagcggccgtcagggctccagca

SEQ ID NO: 97790 - DNA, 60 bp, Homo sapiens; identical to SEQ ID NO: 32687
  chr19:46307535-46307595
  hypo

SEQ ID NO: 97791 - DNA, 60 bp, Homo sapiens; identical to SEQ ID NO: 32688
  chr19:46308096-46308156
  hypo

SEQ ID NO: 97792 - DNA, 30 bp, Homo sapiens; identical to SEQ ID NO: 32689
  chr19:46315868-46315898
  hypo

SEQ ID NO: 97793 - DNA, 431 bp, Homo sapiens
  chr19:46321115-46321546
  hypo
tccaccgggctccctccggggtcagacgggggaaggggagggcaagcaggctagaagctgctgtctgcagcctggaggcggggtggccggggatgggttacctgcttcatgatgaggcgggacaggatgttcatgacgaagccccccaggcgggggtacatggtcagggactggatgacggtcctcatgagcagcatgggcagggggctctgctccatcagctgctgcatcaccacggccagcacctctgacgtgtacacgttccgctccgcaaagcacaggttggtggctgcgaggaggcggagagtgggcctgtcctctctgcccagctgccccctgggaggtgggagtcccggcctctgctgtctgcccatgtgaggggaagacttctaaagccctgacttctaaagcccctgcgggagagaggagac

SEQ ID NO: 97794 - DNA, 459 bp, Homo sapiens
  chr19:46330459-46330918
  hypo
ctgtgctggccaccacgggtggactaagagcgagagtgggactgcccttcccaggagggcaagcgcacgtgtgtgtgtgtacacactacaggcagactcaggcacggtaaccctggtttctaggcagcttgatgccactgaaaatgaaaataaaacagacagaaatagccaaaaaaccactgaaagaagggaatgggcccagagaaacttgcaagggagtgtggaagacgtgggctggttactcaggatagaggcggcctctgcaagctgcaggctgagggcagccaggaagtggaggaggggatcaccttgtccttctcatgggagctgaggtcgaggaggacatgcaggtactggaactggcgggacgggcgcttgaagatcaggtctcgaagtgtggacatgcccagataggtgcgactctgcagcaaaaggaaagggacccgagctcagcccacc

SEQ ID NO: 97795 - DNA, 154 bp, Homo sapiens
  chr19:46338326-46338480
  hypo
cacactcacctggtcccagtccggcagctgtcatctgtgtggccatgagccgagccaggtgcttgatctgggcttccgtgcctgctgactccacgggggtgtagatggcctggaaggaggctggcatggcctcgggtaggtacaccatgctgat

SEQ ID NO: 97796 - DNA, 106 bp, Homo sapiens
  chr19:46345642-46345748
  hypo
ggaactccaaggaagccgggtgcttcagcacactcaacaggtgcagcttcagattcttacgcacactgctcacctgcgatttggccagcgtcgggggcaggttggc

SEQ ID NO: 97797 - DNA, 150 bp, Homo sapiens; identical to SEQ ID NO: 32692
  chr19:46356446-46356596
  hypo

SEQ ID NO: 97798 - DNA, 131 bp, Homo sapiens
  chr19:46404483-46404614
  hypo
aaaaggcttgcaacagcgcaggcacacagcctactctgaagacactcacctgcacgtcggtcctcccggcggtcttccgacaacacgtagcgctgagggcaggcgcttgggggcggcggctgtgaagaggg

SEQ ID NO: 97799 - DNA, 856 bp, Homo sapiens; identical to SEQ ID NO: 56358
  chr19:46519146-46520002
  hypo

SEQ ID NO: 97800 - DNA, 30 bp, Homo sapiens
  chr19:46521554-46521584
  hypo
ctcggagcaccaggcggctgacatggccga

SEQ ID NO: 97801 - DNA, 33 bp, Homo sapiens
  chr19:46835961-46835994
  hypo
cagacataatgcctcacgcctgtaatcccagca

SEQ ID NO: 97802 - DNA, 39 bp, Homo sapiens
  chr19:46851844-46851883
  hypo
acaggcatgagccaccacgcccagccctacaagaagaca

SEQ ID NO: 97803 - DNA, 148 bp, Homo sapiens
  chr19:46875775-46875923
  hypo
caaatcaccttactaaaatccaaaaaattcccaatccccaaatacacgcagcccccagggcttcttcggggattgtgaacctgtgttaccatttcaccagctccagacatcattacccatgagtactcgctgacgaagataatgcttt

SEQ ID NO: 97804 - DNA, 398 bp, Homo sapiens
  chr19:46885286-46885684
  hypo
cactggggtgctctccgctctccagtctcgcccccacttctgtacctcaggaggtttctctgcacctcactccctcgcgcccaaccttccatgaagcccgtgtgagggagttggcagggggcagaggcgggctgtgctggggctccctggagtcctcatctgtcacgccagtccccacacggtcatgaacttccactcatttcccctcacgcagggcatcccgccctgctgcctcgcaccagggtgaaagctgtgggctccttccccaaggaagggctcgtcctgtctgcattttgattaatttaggtccctttgcattgccagctctcagatggctttacctttgattttgttgcttgtttggcttgttttcatctttagggcgagacagtcttttg

SEQ ID NO: 97805 - DNA, 30 bp, Homo sapiens
  chr19:46918350-46918380
  hypo
tctaccgaagctcccgccagttgagaggcg

SEQ ID NO: 97806 - DNA, 238 bp, Homo sapiens; identical to SEQ ID NO: 56365
  chr19:46932085-46932323
  hypo

SEQ ID NO: 97807 - DNA, 31 bp, Homo sapiens; identical to SEQ ID NO: 32696
  chr19:47111850-47111881
  hypo

SEQ ID NO: 97808 - DNA, 43 bp, Homo sapiens; identical to SEQ ID NO: 32697
  chr19:47113194-47113237
  hypo

SEQ ID NO: 97809 - DNA, 266 bp, Homo sapiens
  chr19:47116866-47117132
  hypo
gcgtgagccaccgcgcccggccgtgccaaactttatagacatcatttcacttagttcatacccaggctggatggactgattaaaacgcagcacccgctcaaggtgtgcggaccctgcccaggcttgccggcaggagtcactagagaaatctggcagtagaggagtggaggccgggcaggtgaagcctcttgcaccacacttactggaagcagctgagcggggtctcaaagcccagcgcactcggatcccaacgcccacgccttctc

SEQ ID NO: 97810 - DNA, 30 bp, Homo sapiens
  chr19:47177727-47177757
  hypo
atcctgtgaagaaccgctgtggagggcagc

SEQ ID NO: 97811 - DNA, 30 bp, Homo sapiens
  chr19:47181761-47181791
  hypo
gacgtacatgatcacgcccactgaccacat

SEQ ID NO: 97812 - DNA, 30 bp, Homo sapiens
  chr19:47197204-47197234
  hypo
ctcccagccccgggcggcctcagccccctg

SEQ ID NO: 97813 - DNA, 255 bp, Homo sapiens; identical to SEQ ID NO: 32698
  chr19:47200355-47200610
  hypo

SEQ ID NO: 97814 - DNA, 475 bp, Homo sapiens
  chr19:47223626-47224101
  hypo
ccgccgcctctagggcgcctctaaggcctcaacccctcccctgcatgcccagggctcccccagtgattctcacaggacgcccctgactggactgcggggctcagcacacctggcagtactaggcatgggcgtgcagagactcagaatgcggggtttctgccctcacctcagccccacctgcccggccctacaccccagccagcgtggcggccagggcagggccaggtgggcatcatacgaagaccttggccagggcatcagcgccagcactggcaatgagggccttgctggggtggcaggcaacagcgtggatggcctcctcgtgcttcttgcggtgggccgtgatctcctgcacgcacgttttgttgtccaggctccagagacgcagggagcagtcatggcctgcacatgtgtcggggacagaaggggtggtcactgggctcctcgctcagacgcagccctggaacccctcacc

SEQ ID NO: 97815 - DNA, 30 bp, Homo sapiens
  chr19:47259573-47259603
  hypo
caacaaggagaccacgcgctgcttcggaac

SEQ ID NO: 97816 - DNA, 39 bp, Homo sapiens
  chr19:47270416-47270455
  hypo
gcccagggatccccaccgccaggccggagccaaccccat

SEQ ID NO: 97817 - DNA, 45 bp, Homo sapiens
  chr19:47273988-47274033
  hypo
attacaggcatgagccactgcacccagccccggcttttattttaa

SEQ ID NO: 97818 - DNA, 30 bp, Homo sapiens; identical to SEQ ID NO: 32700
  chr19:47284568-47284598
  hypo

SEQ ID NO: 97819 - DNA, 51 bp, Homo sapiens
  chr19:47305319-47305370
  hypo
agatgatcttgggtaacggattccatctctgaacctcgggtcatctctgaa

SEQ ID NO: 97820 - DNA, 100 bp, Homo sapiens
  chr19:47334736-47334836
  hypo
atgcacccacataacgggattccacacagactatacacagaatcacctccaagatgcactgatagcaagctgcagaaccacatacggtgtgatcctaaga

SEQ ID NO: 97821 - DNA, 31 bp, Homo sapiens; identical to SEQ ID NO: 32701
  chr19:47350196-47350227
  hypo

SEQ ID NO: 97822 - DNA, 117 bp, Homo sapiens; identical to SEQ ID NO: 56384
  chr19:47363285-47363402
  hypo

SEQ ID NO: 97823 - DNA, 194 bp, Homo sapiens
  chr19:47368882-47369076
  hypo
tctgcatgtgaggaggtgaggcgtcaggtcaatatagttggagattgaaaaggtcggagtggttgttcgtctccatctagtctggtctgcttcccaactttggtccactgtggtctcctgagaggtgttaggccgcttgcagcgtcttcctgtgatctgctgtgacttttgtcggtcaccacctggcagtctaa

SEQ ID NO: 97824 - DNA, 31 bp, Homo sapiens; identical to SEQ ID NO: 32703
  chr19:47384471-47384502
  hypo

SEQ ID NO: 97825 - DNA, 30 bp, Homo sapiens; identical to SEQ ID NO: 32704
  chr19:47425476-47425506
  hypo

SEQ ID NO: 97826 - DNA, 187 bp, Homo sapiens
  chr19:47482457-47482644
  hypo
ggcaccagctctcctcggagtcacactgccatcactccagtgccactgggcctgcgtgggcatgccagcaaagtcacacttcagagcatgaagacgtctcacgttcttggcaggacggctctcccagctgctcctggctttgaatgttcactcccgttttgcagagcgcagtcggctcacctcgatt

SEQ ID NO: 97827 - DNA, 31 bp, Homo sapiens
  chr19:47498031-47498062
  hypo
ggcaggagcgggtccccgtaaatatctgctc

SEQ ID NO: 97828 - DNA, 30 bp, Homo sapiens
  chr19:47499887-47499917
  hypo
cagctgtgtttgggtcgtgcaggcacctac

SEQ ID NO: 97829 - DNA, 39 bp, Homo sapiens
  chr19:47500120-47500159
  hypo
gagtgtgcccatggccgggtgcggtggctcacgcctgta

SEQ ID NO: 97830 - DNA, 41 bp, Homo sapiens; identical to SEQ ID NO: 32705
  chr19:47502321-47502362
  hypo

SEQ ID NO: 97831 - DNA, 31 bp, Homo sapiens; identical to SEQ ID NO: 12471
  chr19:47523252-47523283
  hypo

SEQ ID NO: 97832 - DNA, 31 bp, Homo sapiens
  chr19:47540767-47540798
  hypo
ccaggtctgtctgttccggggtcagcacgcc

SEQ ID NO: 97833 - DNA, 30 bp, Homo sapiens
  chr19:47548967-47548997
  hypo
ggcccggctctgcccgtagccctgagaatt

SEQ ID NO: 97834 - DNA, 30 bp, Homo sapiens
  chr19:47549449-47549479
  hypo
aggcccacggcgtacgaggcgctgccccac

SEQ ID NO: 97835 - DNA, 18 bp, Homo sapiens
  chr19:47592631-47592649
  hypo
tgttgttggtcaggctgg

SEQ ID NO: 97836 - DNA, 78 bp, Homo sapiens
  chr19:47592708-47592786
  hypo
caggcatgggccactgcgccggcagagatgtgttctaagaggccagtcagggctaccgtgtctctggtgctcaagcct

SEQ ID NO: 97837 - DNA, 348 bp, Homo sapiens
  chr19:47593032-47593380
  hypo
accaccccaaccacagcccagcgggtgatctctccggtctcctgtgccatgcacatgcagagcctggcccttctttgtacacttatcccaaccctaagtgaccaaacttgaggttctgtgagaccaggccaccggggttggcccgggtggctccgatgccccagaggagaaactgtaagggcagggctcacctcggccgcggctgctgccctccttggcacgccggtactggttcagctctttggtgaagtcgtcatagtcctccttgcccatgtcctcctcctcgtcgccctcatattccccatactgctcattctcgtagtcctcgtacatgccataactcttgct

SEQ ID NO: 97838 - DNA, 85 bp, Homo sapiens
  chr19:47633341-47633426
  hypo
gagattacaggtgcgagtcaccgtgcctggcctattcctgttttcttaacgctcctctctcccactgggccgtgactgcctctaa

SEQ ID NO: 97839 - DNA, 203 bp, Homo sapiens
  chr19:47646677-47646880
  hypo
gtattttttgttcttctgtgattctgcaagctcactgttctgtatcatcaggttaacaatgtttgtcttacaggctgcgggcctctcgggtgcttcttgtcggcttgaaaggacttggggctgaaattgccaagaatctcatcttggcaggagtgaaaggactgaccatgctggatcacgaacaggtgcgctgttgtgagctc

SEQ ID NO: 97840 - DNA, 30 bp, Homo sapiens; identical to SEQ ID NO: 56394
  chr19:47676049-47676079
  hypo

SEQ ID NO: 97841 - DNA, 30 bp, Homo sapiens
  chr19:47724567-47724597
  hypo
gaggctagtggtcacgtttggctcatttgc

SEQ ID NO: 97842 - DNA, 31 bp, Homo sapiens; identical to SEQ ID NO: 12472
  chr19:47729938-47729969
  hypo

SEQ ID NO: 97843 - DNA, 30 bp, Homo sapiens; identical to SEQ ID NO: 12473
  chr19:47730015-47730045
  hypo

SEQ ID NO: 97844 - DNA, 283 bp, Homo sapiens; identical to SEQ ID NO: 56397
  chr19:47730759-47731042
  hypo

SEQ ID NO: 97845 - DNA, 294 bp, Homo sapiens; identical to SEQ ID NO: 12474
  chr19:47731297-47731591
  hypo

SEQ ID NO: 97846 - DNA, 31 bp, Homo sapiens; identical to SEQ ID NO: 56400
  chr19:47738880-47738911
  hypo

SEQ ID NO: 97847 - DNA, 30 bp, Homo sapiens; identical to SEQ ID NO: 56401
  chr19:47742814-47742844
  hypo

SEQ ID NO: 97848 - DNA, 30 bp, Homo sapiens; identical to SEQ ID NO: 32711
  chr19:47763928-47763958
  hypo

SEQ ID NO: 97849 - DNA, 31 bp, Homo sapiens; identical to SEQ ID NO: 32712
  chr19:47777369-47777400
  hypo

SEQ ID NO: 97850 - DNA, 31 bp, Homo sapiens; identical to SEQ ID NO: 12476
  chr19:47778088-47778119
  hypo

SEQ ID NO: 97851 - DNA, 43 bp, Homo sapiens
  chr19:47779444-47779487
  hypo
tctcagagccaatgaccaaagcgctgtgctgccttggaagact

SEQ ID NO: 97852 - DNA, 53 bp, Homo sapiens
  chr19:47817583-47817636
  hypo
cccaatatgtgggccacgtgccacaatgcagctacctacgtttatttttcact

SEQ ID NO: 97853 - DNA, 30 bp, Homo sapiens; identical to SEQ ID NO: 32714
  chr19:47843872-47843902
  hypo

SEQ ID NO: 97854 - DNA, 31 bp, Homo sapiens
  chr19:47844143-47844174
  hypo
gccatcgacccgctgcgcgtggccccgctcc

SEQ ID NO: 97855 - DNA, 138 bp, Homo sapiens; identical to SEQ ID NO: 32715
  chr19:47868800-47868938
  hypo

SEQ ID NO: 97856 - DNA, 118 bp, Homo sapiens
  chr19:47881177-47881295
  hypo
ctagtgctcctcgagcgtctttgtgatcctaggcctggcctcggagtcctcacgcagccctgtgggtctccctttatagaggggactgaagctcaggcaggggcggggatacgtcacc

SEQ ID NO: 97857 - DNA, 75 bp, Homo sapiens
  chr19:47881714-47881789
  hypo
gggacagaggattggcgaccagccgggccgcaggaagcggaacagacctgctacctgaggcgctctctccctgca

SEQ ID NO: 97858 - DNA, 25 bp, Homo sapiens
  chr19:47910558-47910583
  hypo
gcccgggctctcgccccgggccggc

SEQ ID NO: 97859 - DNA, 58 bp, Homo sapiens; identical to SEQ ID NO: 56409
  chr19:47910679-47910737
  hypo

SEQ ID NO: 97860 - DNA, 499 bp, Homo sapiens; identical to SEQ ID NO: 56415
  chr19:47950994-47951493
  hypo

SEQ ID NO: 97861 - DNA, 30 bp, Homo sapiens
  chr19:47969281-47969311
  hypo
tctcattccagatgcgaacggtgcccacgc

SEQ ID NO: 97862 - DNA, 83 bp, Homo sapiens; identical to SEQ ID NO: 32717
  chr19:47976276-47976359
  hypo

SEQ ID NO: 97863 - DNA, 31 bp, Homo sapiens
  chr19:47980239-47980270
  hypo
tgcccagcacccttggcggatgctaagctgg

SEQ ID NO: 97864 - DNA, 43 bp, Homo sapiens
  chr19:47989042-47989085
  hypo
tggagggcagtctgggaatgccgtcagtgctgctgtattccca

SEQ ID NO: 97865 - DNA, 103 bp, Homo sapiens; identical to SEQ ID NO: 32718
  chr19:47995718-47995821
  hypo

SEQ ID NO: 97866 - DNA, 732 bp, Homo sapiens
  chr19:48003382-48004114
  hypo
tgttctctggcaactacatctcgggctctgttctctctaattcctccccaggatgtagggaagccaggttgggctaatttccgctcctttttcggcagcaactcctacctggctggtctcagaatcctccccgccccccacaccgctcccttctgcatgttaattctgacaacagaacagattttcctctctccccggcaggcggtgggtctgcaatggaactcccactcccaaatgctccgggattgggaaggggtgatcagctgcaccgacaccaccgacacggtagataggggggcggagacttgagcagggcgcgaatgccaactggaaggaagagagccagttctaaagtcaacgctcactctgcctcaggcacgcccctgccagcctatcacatgtcggccactggaaaaaccagagccgccaggaaacctgaggaatcaatgcagggtgctaggatggcgctccggacagccagcccgtgtggcccgcagaggccctcaccttgggggtcggctttcttgaatgcgttgccagcgtccacaaagcaggtggctgcgtcgtgcttgctctggagctgcaggtgcagctgtgcagcctggcagaacgcgtttccagcagctggaacagaagagaagggcagtcctggcctcagtggggctccacactttatgaagccacagagacactgccctgggaggtgggtcgggctctcgagaatgcggaaag

SEQ ID NO: 97867 - DNA, 239 bp, Homo sapiens
  chr19:48012649-48012888
  hypo
acaggcctggcctcagcgccagctcatcgtgtgccagcctgcgtttccttatgtgtaactaggcataagactccacaccttgcagggctgctgaagcacgagcaatcttgcaggcagcaccccacggcgtgcccagcagagagctggccacaccacgggcgttcagtaaacgagagcatccctctcatcaggccccgcagaggaccgattccaggcacgcttccctacttcagaatagc

SEQ ID NO: 97868 - DNA, 45 bp, Homo sapiens
  chr19:48052286-48052331
  hypo
gatcatgccactacactccagcccggatgacagacaaaaaaaaaa

SEQ ID NO: 97869 - DNA, 31 bp, Homo sapiens
  chr19:48058859-48058890
  hypo
gaatcactgtccttcccggagtacagggaca

SEQ ID NO: 97870 - DNA, 31 bp, Homo sapiens
  chr19:48073242-48073273
  hypo
tttctctggccgggcacggtggctcacgact

SEQ ID NO: 97871 - DNA, 83 bp, Homo sapiens
  chr19:48077257-48077340
  hypo
agccatctggggcccctgctccgtgctgagctgtgttgggaagggcggtaggccctggtgccgactggccaaggaccatcttt

SEQ ID NO: 97872 - DNA, 95 bp, Homo sapiens
  chr19:48082924-48083019
  hypo
tgaggattttaggcatgagccaccgagcctggccaatgtttttgtagttttgacaaatgtatagttgtgtcacttaacaacggagatctgtctga

SEQ ID NO: 97873 - DNA, 31 bp, Homo sapiens
  chr19:48120570-48120601
  hypo
ttttgccatctagactcggcttggcagattt

SEQ ID NO: 97874 - DNA, 168 bp, Homo sapiens; identical to SEQ ID NO: 32721
  chr19:48137146-48137314
  hypo

SEQ ID NO: 97875 - DNA, 40 bp, Homo sapiens; identical to SEQ ID NO: 32722
  chr19:48145666-48145706
  hypo

SEQ ID NO: 97876 - DNA, 476 bp, Homo sapiens
  chr19:48150906-48151382
  hypo
tagaatcctccttcccgggtgaggattggaagccatgatcgcctgcctctgttgctggttttagtctttaacccttgctctgtggacttgagaaatgtgcttttccatggtgcctgtgaccaagatgtccgcatcgttagtgaagaccctgctatgtccttgaccacactgcacggggatcctgtccacgatggggggtgtcctgttgggcttgagtgtctagatatggagaccgtagttcgcggggggagtggggggccgtttggcatatttgccctggcatttggggttgtttattgggggtgggagtgctcctggcatttcctgggcgggaactactggtgtagacctactggattaacttgctcctgggtcggtgtgcgggatagggggagggtgcatcagtctttgtggagcgtctgccttctctccgtctccctgttttcctgttaccgtctccccgtccctctctctgt

SEQ ID NO: 97877 - DNA, 31 bp, Homo sapiens
  chr19:48154747-48154778
  hypo
catcttctcctcgggacgctgtctcttggtt

SEQ ID NO: 97878 - DNA, 22 bp, Homo sapiens
  chr19:48161875-48161897
  hypo
gagacttcgtctcaaaaaaaaa

SEQ ID NO: 97879 - DNA, 44 bp, Homo sapiens
  chr19:48166307-48166351
  hypo
aaggattaacaagtttggaggcgggcagcccatgaagagttatg

SEQ ID NO: 97880 - DNA, 30 bp, Homo sapiens
  chr19:48185440-48185470
  hypo
cacagacccagcctcgcccctcctgcccgc

SEQ ID NO: 97881 - DNA, 312 bp, Homo sapiens
  chr19:48202299-48202611
  hypo
tcctggaggagtcccgggtagggtcagagtcgccttcctcgcctctgggctcctcctcgctgggacactgcccctttccctcacccgctctgggcaaggtggagcctcccgcccctcctagccccgggagggaggttgggagggaggcgggagctcccatcacaaggacagtttggaccttgcacgcatcgtccccgtcgctcgcgccccttcccccttcttgctggttcactcgcacgtcgtcttttcccccaccccagagggtgagcccctcagcggagatggtaatgatcgaccgaatgttcattcagg

SEQ ID NO: 97882 - DNA, 272 bp, Homo sapiens; identical to SEQ ID NO: 56423
  chr19:48229019-48229291
  hypo

SEQ ID NO: 97883 - DNA, 30 bp, Homo sapiens
  chr19:48244446-48244476
  hypo
gacggcaagctgagcggctccaaggccaag

SEQ ID NO: 97884 - DNA, 40 bp, Homo sapiens
  chr19:48259083-48259123
  hypo
tcactgtgtcctgccgtggagccccgtgcccagtgatgac

SEQ ID NO: 97885 - DNA, 43 bp, Homo sapiens
  chr19:48305537-48305580
  hypo
agattgggcctgggatcgggcctgggttcgggcctgagattgg

SEQ ID NO: 97886 - DNA, 31 bp, Homo sapiens
  chr19:48326572-48326603
  hypo
gttttcccaaaaggaacgagcgagggctgtg

SEQ ID NO: 97887 - DNA, 142 bp, Homo sapiens
  chr19:48375655-48375797
  hypo
atcccctaaaactaccctctccgtcactctactcacacggggacttctgattctgcctcaaacgtggcaggcatccccactcctcagactattggcgtcccacgctccttctccttggaacgctgctctctcagattggccc

SEQ ID NO: 97888 - DNA, 39 bp, Homo sapiens; identical to SEQ ID NO: 32724
  chr19:48393223-48393262
  hypo

SEQ ID NO: 97889 - DNA, 45 bp, Homo sapiens
  chr19:48479210-48479255
  hypo
caaggtaatgcatttttaatacacgttattttttagagcagtttt

SEQ ID NO: 97890 - DNA, 22 bp, Homo sapiens
  chr19:48586354-48586376
  hypo
agccaccgcgcctggccctggc

SEQ ID NO: 97891 - DNA, 194 bp, Homo sapiens
  chr19:48640704-48640898
  hypo
gccttcctgacacacgcgtggcctcaggtccccaagatgtctggggtccgggatgagcggcccgccccactcacagcactgccagtgagcctggcgatgtcgcggaacttgctgaagaccccggaggcagtgagcggaggtggtggcagcatgagcctctgggtgctgcggctgttctcggccaccagccccac

SEQ ID NO: 97892 - DNA, 182 bp, Homo sapiens
  chr19:48675138-48675320
  hypo
gggccgagttcagccgcttcttcgacgcgtggtgccagcagcggctggcgctcttcttcgtcaagagctccatgcacctggcgcgctgccgctgggccagtgcgcccccgctctacacgctcatcgacgtgctcaagtacagctacgtgcggcttgtgtgcaaggacgtgcgtgcgcccagc

SEQ ID NO: 97893 - DNA, 31 bp, Homo sapiens; identical to SEQ ID NO: 32726
  chr19:48681748-48681779
  hypo

SEQ ID NO: 97894 - DNA, 331 bp, Homo sapiens
  chr19:48685674-48686005
  hypo
agtgatgtgaccagggcggtggtggttcctcccacaggcctccccagcccggctgccccgccttcatcatcgtcaagctgagcccgctgcgggaccgcctcgtggtgacggagtgccagctgacccactcacacccggcctgcccgctggagttcgcctactacttccgcccgggccacctgctggccaacgcctgcctgccggtgcgcaccaccaacaagatctccaagcagttcgtggccccagccgacgtgcgccgcctgctgtcctactgcaagggccgcgaccacggcgtcctggacgccctgcacgtgctcgagggcctcttccg

SEQ ID NO: 97895 - DNA, 30 bp, Homo sapiens
  chr19:48686762-48686792
  hypo
ccctgcagttctggcgggaaaaaccaacaa

SEQ ID NO: 97896 - DNA, 29 bp, Homo sapiens
  chr19:48790423-48790452
  hypo
tcacactgcagagactccttacggaaata

SEQ ID NO: 97897 - DNA, 116 bp, Homo sapiens
  chr19:48798923-48799039
  hypo
gactgcgcttcccggcgaccctttgaagttcggcgtaacctgctgacccgctctggctgagtgtgagctaagaggacaggtgtcatatcaggtccaagcctcgagagtcactgcct

SEQ ID NO: 97898 - DNA, 30 bp, Homo sapiens
  chr19:48800740-48800770
  hypo
tggcgctgcgcctccgcctgctcctggagc

SEQ ID NO: 97899 - DNA, 31 bp, Homo sapiens
  chr19:48801739-48801770
  hypo
cagccaggcagggggacggcactgctgtgca

SEQ ID NO: 97900 - DNA, 31 bp, Homo sapiens
  chr19:48806355-48806386
  hypo
ggagagttgggcaaggcggggcccagagaga

SEQ ID NO: 97901 - DNA, 159 bp, Homo sapiens; identical to SEQ ID NO: 12487
  chr19:48823577-48823736
  hypo

SEQ ID NO: 97902 - DNA, 30 bp, Homo sapiens
  chr19:48840512-48840542
  hypo
aacattgggacagccgggcgcggtggctca

SEQ ID NO: 97903 - DNA, 30 bp, Homo sapiens; identical to SEQ ID NO: 32730
  chr19:48844377-48844407
  hypo

SEQ ID NO: 97904 - DNA, 376 bp, Homo sapiens
  chr19:48857795-48858171
  hypo
acaagcgtgagtcactgtgcccggccaaatttcacttctgtaccttgttgctggtctcttcctcagtagaacagagcctgtgaggtacatctctcatgctgtccactgtctcccagagcctcaagccattccagagacacagtaggtgctcaataaatatttactgagcgaactcaatgaatgaatgaatcagcgaaaaaagatcagagagaggtcacccgccaaggtcacccgcaccactagtgaacaaccaagctattgtttgaaccgaggctatgctgcttctttccctgcccaggccacatcttcaaaggacttaagtcatcagcaaatggtcacccagcgggcctcacccgcctctgccacttctaccctg

SEQ ID NO: 97905 - DNA, 30 bp, Homo sapiens
  chr19:48858660-48858690
  hypo
ttggaggcaggcagacgggggcttgatctc

SEQ ID NO: 97906 - DNA, 145 bp, Homo sapiens; identical to SEQ ID NO: 32732
  chr19:48889257-48889402
  hypo

SEQ ID NO: 97907 - DNA, 642 bp, Homo sapiens; identical to SEQ ID NO: 12490
  chr19:48901492-48902134
  hypo

SEQ ID NO: 97908 - DNA, 24 bp, Homo sapiens
  chr19:48902532-48902556
  hypo
aggaatgggcctgggcgcggtggc

SEQ ID NO: 97909 - DNA, 288 bp, Homo sapiens; identical to SEQ ID NO: 32734
  chr19:48908062-48908350
  hypo

SEQ ID NO: 97910 - DNA, 30 bp, Homo sapiens
  chr19:48945115-48945145
  hypo
caaggtcttcgccacgacaggctatggcat

SEQ ID NO: 97911 - DNA, 35 bp, Homo sapiens; identical to SEQ ID NO: 32735
  chr19:48953830-48953865
  hypo

SEQ ID NO: 97912 - DNA, 21 bp, Homo sapiens
  chr19:48955644-48955665
  hypo
gcacccagcccatgccctcct

SEQ ID NO: 97913 - DNA, 30 bp, Homo sapiens
  chr19:48956874-48956904
  hypo
caggcgtgagccaccgcgtccggctcagga

SEQ ID NO: 97914 - DNA, 30 bp, Homo sapiens; identical to SEQ ID NO: 32736
  chr19:48957853-48957883
  hypo

SEQ ID NO: 97915 - DNA, 30 bp, Homo sapiens; identical to SEQ ID NO: 32737
  chr19:48958879-48958909
  hypo

SEQ ID NO: 97916 - DNA, 125 bp, Homo sapiens
  chr19:48964896-48965021
  hypo
cctgacgtttctgccggtttcttgtcccagcaggttgggggcgcctgccccccactaggccaagtggagggggtccctccgtccaatgggcctggccagggccctacgccgcctcagcggcgccc

SEQ ID NO: 97917 - DNA, 30 bp, Homo sapiens; identical to SEQ ID NO: 32738
  chr19:48965278-48965308
  hypo

SEQ ID NO: 97918 - DNA, 21 bp, Homo sapiens
  chr19:48989604-48989625
  hypo
cgcgcccggccttttggaaca

SEQ ID NO: 97919 - DNA, 31 bp, Homo sapiens; identical to SEQ ID NO: 12492
  chr19:48996514-48996545
  hypo

SEQ ID NO: 97920 - DNA, 123 bp, Homo sapiens
  chr19:49012369-49012492
  hypo
agacatggggtgagacactcacgggcccagaatccgatggacgcagggacggatggaaggatggacagacggacggacgcgtggagagccgggtggcgcggcggagtggtcaatggagtgagg

SEQ ID NO: 97921 - DNA, 146 bp, Homo sapiens
  chr19:49043365-49043511
  hypo
gcactccagcctggatgaaagagcgagactccatcccaaacaattaacaaaaataactgactgtgtatcttggagtgacagagctgtccctgcttgtgtaatgtgcctatccatgcattggcgaggcgtgtcgatcctgcagctgg

SEQ ID NO: 97922 - DNA, 30 bp, Homo sapiens
  chr19:49064840-49064870
  hypo
cagggtgcggttccacggtgtagtggagca

SEQ ID NO: 97923 - DNA, 41 bp, Homo sapiens
  chr19:49068458-49068499
  hypo
aggcatgagtcacggtgcccggcctaatccttacttttgat

SEQ ID NO: 97924 - DNA, 97 bp, Homo sapiens
  chr19:49117306-49117403
  hypo
tcctgctcatcagctctcacccgcagaccagccaggatgcctctccactgggcctgctcgctcagccttaaaggccgaaggcttggcaaacccttcc

SEQ ID NO: 97925 - DNA, 30 bp, Homo sapiens
  chr19:49129547-49129577
  hypo
gtgccgaggcccagcgctgggccactgccc

SEQ ID NO: 97926 - DNA, 79 bp, Homo sapiens
  chr19:49130356-49130435
  hypo
ctccatcctgggcgacaagaccgatactccatcacaaaaagcaaaacaaaacaaaaacgcaggcagagaaaagtgattt

SEQ ID NO: 97927 - DNA, 30 bp, Homo sapiens; identical to SEQ ID NO: 32741
  chr19:49131201-49131231
  hypo

SEQ ID NO: 97928 - DNA, 30 bp, Homo sapiens; identical to SEQ ID NO: 32742
  chr19:49132843-49132873
  hypo

SEQ ID NO: 97929 - DNA, 106 bp, Homo sapiens
  chr19:49143015-49143121
  hypo
ccctccctctgaatctcgcctccgctcacgttgacaaagaggctgagaatggccaggccattggggccgcgggaggcagcgctgaaattcccgtagagttcctggt

SEQ ID NO: 97930 - DNA, 31 bp, Homo sapiens
  chr19:49166052-49166083
  hypo
tagccagctgggtctgcggggcaggagatcc

SEQ ID NO: 97931 - DNA, 31 bp, Homo sapiens
  chr19:49173463-49173494
  hypo
ggaggtatgaggggaccgagtctgagactgg

SEQ ID NO: 97932 - DNA, 113 bp, Homo sapiens
  chr19:49173706-49173819
  hypo
gtggcggcagtggcagcgggggggccgggcacgggcggcacagcgggcagcgtggccatgacactggcagcggcctctcagcccagctgccgctagcccggcctggcccccaa

SEQ ID NO: 97933 - DNA, 30 bp, Homo sapiens; identical to SEQ ID NO: 32744
  chr19:49174376-49174406
  hypo

SEQ ID NO: 97934 - DNA, 30 bp, Homo sapiens
  chr19:49177489-49177519
  hypo
gtatgggactttgccgggggttcgcgctgg

SEQ ID NO: 97935 - DNA, 276 bp, Homo sapiens
  chr19:49180033-49180309
  hypo
tactgctggtggaaacggaaactggggcagccacctggcagctcccaaaacgattcaacgtagagttcaccctgtgacccagcacacaggttcgtggcagcactatttgcaacagccgaaaactggaaacaactccagtgcctatcacctgatgagtgaatacattgtggtctacctggacaatgggactttcagtcttgaaaggagtgaggcaattatctgggcgtggtggctgtacctgtagtcctacctgtagtcccagctactcgggaggct

SEQ ID NO: 97936 - DNA, 137 bp, Homo sapiens
  chr19:49180428-49180565
  hypo
aaggcgtgaggctgtgacacgtgctatagtgtggatggaccttgaaacacggtgccgagtgaggaagccagactcggaaggccatggagtgtgtgattgcagtcacatgaaaaatcgagaataggcaaatccataaa

SEQ ID NO: 97937 - DNA, 559 bp, Homo sapiens
  chr19:49183431-49183990
  hypo
ccagacacctgccccgggaggacctgttcactatcaactccaagggccgcctggggaaccagatgggcgagtacgccacgctgtacgccctggccaagatgaacgggcggcccgccttcatcccggcccagatgcacagcaccctggcccccatcttcagaatcaccctgccggtgctgcacagcgccacggccagcaggatcccctggcagaactaccacctgaacgactggatggaggaggagtaccgccacatcccggggcgctgtgtccgcctcacgggctacccctgctcctggaccttctaccaccacctccgccaggagatcctccaggagttcaccctgcacgaccacgtgcgcgaggaggcccagaagttcctgcggggcctgcaggccaagtgggcagggcaggcgaccttcgtgggggtccacgtgcgccggggggactatgtccgtgtcatgccgcgcgtatggaagggggtgctggccgaccggctacctgcagcgggccctggactggttccgggcctgctgccgcctcccggtctttgtggtca

SEQ ID NO: 97938 - DNA, 46 bp, Homo sapiens
  chr19:49207343-49207389
  hypo
ctcttctgtgaagatgcgttgggctgcaagtaacagaaatctcagt

SEQ ID NO: 97939 - DNA, 30 bp, Homo sapiens
  chr19:49218604-49218634
  hypo
cctggatccctgtctcggctctgggggcat

SEQ ID NO: 97940 - DNA, 174 bp, Homo sapiens
  chr19:49218941-49219115
  hypo
gaagaggaaaggggccgtgcccgagggcaaggccggggccagaggagggtctgaggctgagatccacgggtccggatccgagactggagagacggtgaaggaccctgagaggcctgcaggcagcaagccaggccgggaggagcaaggctgtgtggaaagcggggctccagggtg

SEQ ID NO: 97941 - DNA, 30 bp, Homo sapiens; identical to SEQ ID NO: 32748
  chr19:49221484-49221514
  hypo

SEQ ID NO: 97942 - DNA, 128 bp, Homo sapiens
  chr19:49227954-49228082
  hypo
gctcccagccaaccttcacctcgttccatcagcgagttgagaagggatgcgttggagaagaagaacaagtagccaaaagtctgagacacgaggtcagggtgcagctcgcactggctggtcagctccaa

SEQ ID NO: 97943 - DNA, 21 bp, Homo sapiens
  chr19:49232013-49232034
  hypo
gtctcaaaaacaaaagcaaac

SEQ ID NO: 97944 - DNA, 30 bp, Homo sapiens
  chr19:49233251-49233281
  hypo
gtgaactatcgcgcccggccccccaccgac

SEQ ID NO: 97945 - DNA, 99 bp, Homo sapiens
  chr19:49237046-49237145
  hypo
actgagaatccatctcaaaaaaaaaaaagtgtgggggggagggggcagtgcactcctacgaagaaaacacaggcttatccagaacgtgatcccaggcaa

SEQ ID NO: 97946 - DNA, 19 bp, Homo sapiens
  chr19:49241202-49241221
  hypo
tgtttgtttgttttttcga

SEQ ID NO: 97947 - DNA, 203 bp, Homo sapiens; identical to SEQ ID NO: 56453
  chr19:49242423-49242626
  hypo

SEQ ID NO: 97948 - DNA, 77 bp, Homo sapiens
  chr19:49246878-49246955
  hypo
ttcctagatggtcagacgaaggcacaggaccaggacgcaggtaagtagtaagtgggctccaacaaggctcagtaaag

SEQ ID NO: 97949 - DNA, 30 bp, Homo sapiens
  chr19:49253916-49253946
  hypo
ctgtgcggcccaggcggagctgacccagca

SEQ ID NO: 97950 - DNA, 30 bp, Homo sapiens
  chr19:49266108-49266138
  hypo
tccagactcagctcccggcaggttgtacag

SEQ ID NO: 97951 - DNA, 17 bp, Homo sapiens
  chr19:49266803-49266820
  hypo
ggcgacacagcgagact

SEQ ID NO: 97952 - DNA, 137 bp, Homo sapiens
  chr19:49274075-49274212
  hypo
tgggatttcaggcgtgagccaccgcgcccagtcgactcagagtgtcttatttttataatacagcctgaaaaacttgttctaagtcatagtattgtaataggttgggacatgagatgatttcacggctgtttgttcca

SEQ ID NO: 97953 - DNA, 27 bp, Homo sapiens
  chr19:49278471-49278498
  hypo
actccatctcaacgaacaaatatatac

SEQ ID NO: 97954 - DNA, 31 bp, Homo sapiens
  chr19:49280218-49280249
  hypo
tttttttttttttttttgagacggagtctca

SEQ ID NO: 97955 - DNA, 89 bp, Homo sapiens; identical to SEQ ID NO: 32752
  chr19:49281056-49281145
  hypo

SEQ ID NO: 97956 - DNA, 25 bp, Homo sapiens
  chr19:49285388-49285413
  hypo
ttttttgagacagctctctgtcgcc

SEQ ID NO: 97957 - DNA, 79 bp, Homo sapiens
  chr19:49287698-49287777
  hypo
ccgtgcgcagtccgggggacaaaattttaaacaagtgttggtcatgtaagcatggcagactgcacgtgtgactgacctc

SEQ ID NO: 97958 - DNA, 22 bp, Homo sapiens
  chr19:49292498-49292520
  hypo
gccacggcgcctagtcctgttt

SEQ ID NO: 97959 - DNA, 30 bp, Homo sapiens
  chr19:49318429-49318459
  hypo
aagccctgcatcttcgcagaccactgaaac

SEQ ID NO: 97960 - DNA, 18 bp, Homo sapiens
  chr19:49328485-49328503
  hypo
ctccgtcgcaaaaaaaaa

SEQ ID NO: 97961 - DNA, 21 bp, Homo sapiens
  chr19:49329359-49329380
  hypo
agccaccgtgcccagcccaac

SEQ ID NO: 97962 - DNA, 21 bp, Homo sapiens
  chr19:49335057-49335078
  hypo
tggacacagttgcccacgcct

SEQ ID NO: 97963 - DNA, 183 bp, Homo sapiens
  chr19:49348662-49348845
  hypo
ctcagggctggaagcccgggagaccctcggagacccaagacctggaaagacagaacgggacttggtgaggacgggaatttccgtaaagtcccacccaaccaggatgctcacctaagtgagggctggcgaggtctttgtcgcctccaggaggccgcccccagtcagtctcgggggacctagggg

SEQ ID NO: 97964 - DNA, 39 bp, Homo sapiens; identical to SEQ ID NO: 32755
  chr19:49402038-49402077
  hypo

SEQ ID NO: 97965 - DNA, 30 bp, Homo sapiens; identical to SEQ ID NO: 32756
  chr19:49419279-49419309
  hypo

SEQ ID NO: 97966 - DNA, 43 bp, Homo sapiens; identical to SEQ ID NO: 32757
  chr19:49463918-49463961
  hypo

SEQ ID NO: 97967 - DNA, 30 bp, Homo sapiens; identical to SEQ ID NO: 32758
  chr19:49465032-49465062
  hypo

SEQ ID NO: 97968 - DNA, 31 bp, Homo sapiens; identical to SEQ ID NO: 12505
  chr19:49466992-49467023
  hypo

SEQ ID NO: 97969 - DNA, 585 bp, Homo sapiens; identical to SEQ ID NO: 56462
  chr19:49467050-49467635
  hypo

SEQ ID NO: 97970 - DNA, 30 bp, Homo sapiens; identical to SEQ ID NO: 32760
  chr19:49472809-49472839
  hypo

SEQ ID NO: 97971 - DNA, 43 bp, Homo sapiens
  chr19:49482061-49482104
  hypo
aattacaggcatgagctgccgcgcccagctacccttaggtttc

SEQ ID NO: 97972 - DNA, 153 bp, Homo sapiens
  chr19:49490479-49490632
  hypo
caaagaggacagcgtcgttggcctcgcggtcgtaccacggcactccgatgttgcaggtatcccagagctctcccttccagcgctccagggcccaagctgaggcacccacgtccaggagcaccaccagagggcctccctcgatcagccagcgcc

SEQ ID NO: 97973 - DNA, 30 bp, Homo sapiens; identical to SEQ ID NO: 32761
  chr19:49494756-49494786
  hypo

SEQ ID NO: 97974 - DNA, 34 bp, Homo sapiens; identical to SEQ ID NO: 32762
  chr19:49525577-49525611
  hypo

SEQ ID NO: 97975 - DNA, 97 bp, Homo sapiens
  chr19:49540856-49540953
  hypo
ggaaatgcgtgtgcttcgggtgatttaactgattattgaataggcccgcaggaggtgtgtcctgcccccgaggccgcagcctcggaggacattatct

SEQ ID NO: 97976 - DNA, 202 bp, Homo sapiens
  chr19:49545492-49545694
  hypo
cctgcctaggggtgccgctgccgggccccctctggtcttcctgctggagactggggcctttcgggagtcagcaggcgcccgggccaaccgcagccagcgaggggtgagcaatacttcactggcgagtcatcagggtgaggctggccgtgtgtgatgcagtcactggctgggtgacagacccccggaccgctgtggactcagg

SEQ ID NO: 97977 - DNA, 266 bp, Homo sapiens
  chr19:49600442-49600708
  hypo
tcttcctgaaaaggtagcacccgagggttcggggaaggagcctggtagttcaagtgcccggggtgagaggtgaagtctgccttggcccttcgccactttaacacctccctttttctgtgtctcgagtttgttctgttttacttccatttgcaaaatagtaataaataaatatcagtgtccagcactgtgtctgggccatagtacgtgttcagtaaattatatgtctaatgttccattattggaacgctaagcatgtgggagttatt

SEQ ID NO: 97978 - DNA, 7 bp, Homo sapiens
  chr19:49600767-49600774
  hypo
aaaaatt

SEQ ID NO: 97979 - DNA, 31 bp, Homo sapiens; identical to SEQ ID NO: 32763
  chr19:49606779-49606810
  hypo

SEQ ID NO: 97980 - DNA, 30 bp, Homo sapiens
  chr19:49621172-49621202
  hypo
tgaagctggttgtccgttacacaccgcgag

SEQ ID NO: 97981 - DNA, 447 bp, Homo sapiens; identical to SEQ ID NO: 56470
  chr19:49660927-49661374
  hypo

SEQ ID NO: 97982 - DNA, 401 bp, Homo sapiens
  chr19:49703627-49704028
  hypo
tgcttcacatcttcacggtcaacaaacagctggggcccaagatcgtcatcgtgagcaagatggtgaggcaggggcggggccaaagtgggcggggacatagggaaaggggtggggccagggagggagtggtccgtggagaaggggcgtgactttggggagcaatggggcgtgtttttgggatataggggtggggccagagtaggaaagggcggggccagactcagccacatctccccacagatgaaggacgtgttcttcttcctcttcttcctcggcgtgtggctggtagcctatggcgtggccacggaggggctcctgaggccacgggacagtgacttcccaagtatcctgcgccgcgtcttctaccgtccctacctgcagatcttcgggcagattcccca

SEQ ID NO: 97983 - DNA, 157 bp, Homo sapiens
  chr19:49705147-49705304
  hypo
gcgcccggcagtcttcctgtctttcttaggtctctgtccccctcaccccatctctgaatgtctctcttcacagtggccctcatggagcacagcaactgctcgtcggagcccggcttctgggcacaccctcctggggcccaggcgggcacctgcgtct

SEQ ID NO: 97984 - DNA, 22 bp, Homo sapiens
  chr19:49784805-49784827
  hypo
ctgtgaatagcagcattgaaac

SEQ ID NO: 97985 - DNA, 30 bp, Homo sapiens
  chr19:49828332-49828362
  hypo
tcagtccagccagtcggacaaaaatgaggg

SEQ ID NO: 97986 - DNA, 31 bp, Homo sapiens
  chr19:49828593-49828624
  hypo
tcctctgactgctcacgcgccactcccttcc

SEQ ID NO: 97987 - DNA, 640 bp, Homo sapiens; identical to SEQ ID NO: 12511
  chr19:49925605-49926245
  hypo

SEQ ID NO: 97988 - DNA, 30 bp, Homo sapiens
  chr19:49950569-49950599
  hypo
gaccggggatctaccgaaggcccaccctga

SEQ ID NO: 97989 - DNA, 30 bp, Homo sapiens; identical to SEQ ID NO: 32766
  chr19:49964945-49964975
  hypo

SEQ ID NO: 97990 - DNA, 30 bp, Homo sapiens
  chr19:49965211-49965241
  hypo
gctgctgctgctgacggacacggcggacgt

SEQ ID NO: 97991 - DNA, 30 bp, Homo sapiens; identical to SEQ ID NO: 32767
  chr19:49967835-49967865
  hypo

SEQ ID NO: 97992 - DNA, 31 bp, Homo sapiens; identical to SEQ ID NO: 32768
  chr19:49969561-49969592
  hypo

SEQ ID NO: 97993 - DNA, 505 bp, Homo sapiens
  chr19:49971402-49971907
  hypo
tgagagtccgtctcaaaaaaaaaaaaaaagaaaggcggttatgcaggatgtttctcaccgcccgaacccccgtggaatgattcactttgaccagcgtctgcgaaatggcaggggcttccacaatggtgcggtttgggccaacaccaagtgttggggagaatgtagaggaactggatctctcatttactgcgggcggggctcccctgccccacacgtgacccacctgtccctgcaggtagccgggctgagaggccctgtgctgcgcctgcgggagccgctgggtgtgctggctgtggtgtgtccggacgagtggcccctgcttgccttcgtgtccctgctggctcccgccctggcctacggcaacactgtggtcatggtgcccagtgcggcctgtcctctgctggccctggaggtctgccaggtatagccccctgccttcctgcctctcctccccgtagcctcagggcagcagaaaaaggcgccccaaagtcggcaggagcttgtc

SEQ ID NO: 97994 - DNA, 132 bp, Homo sapiens; identical to SEQ ID NO: 32770
  chr19:49978919-49979051
  hypo

SEQ ID NO: 97995 - DNA, 30 bp, Homo sapiens; identical to SEQ ID NO: 12518
  chr19:49990679-49990709
  hypo

SEQ ID NO: 97996 - DNA, 172 bp, Homo sapiens
  chr19:49994082-49994254
  hypo
ctcaaggtgtttgacggcatcccaccgccctacgacaaggtgagctatgccaaaccccacaggcagcggccttacctgtggcgtccatgatgttccgcaactacctacattgtttgatcctcatgaaagcagcactggctgagacgccagtccagccgacctccttccctgt

SEQ ID NO: 97997 - DNA, 33 bp, Homo sapiens
  chr19:49997365-49997398
  hypo
ggcgtgagccatcgcgcccggccaatttttttt

SEQ ID NO: 97998 - DNA, 30 bp, Homo sapiens
  chr19:50001235-50001265
  hypo
atccgcaagtacaaccgcttcgagaagcgc

SEQ ID NO: 97999 - DNA, 84 bp, Homo sapiens
  chr19:50027929-50028013
  hypo
cttccacgcctcgtcgtcactaacagtcaaaagtggcgatgagcaccactactgctgcattgtgcagcacgcggggctggcgca

SEQ ID NO: 98000 - DNA, 492 bp, Homo sapiens
  chr19:50028309-50028801
  hypo
ctgctgctgctgctgctgctgcgggtcttcctggaatctgaccattcgttgtctgctatgcccgtcctcaccaagactgactgcctgctgctttgctactgcccgggcccatgagactgacttcccactgctctgcctgcctctccccactgcactggcacagccccgccttgccgctgctgatccattgccggtgtgaccgcggccgctcgtgctgtagctggttcttacgtccaacctgggggcagtctgcccagatcgcctgcctggcctcgcctctgcccatcagacacttggtgctggaatctccgaggctgggagggactgggagcgccccagttctgtgtcctgactgggtggggtggaggggctgctccacatctcacagcgttctctggctgcagaatctccagccaagtcctccgtgctcgtggtgggaatcgtcatcggtgtcttgctactcacggcagcggctgtaggaggagctctgtt

SEQ ID NO: 98001 - DNA, 121 bp, Homo sapiens
  chr19:50049636-50049757
  hypo
ttcggtttttttttttaggtttacctgggctttttggagtgtacccatgcagccaggtgtggttcagggtcagctagatatttgagtagagttgggccgtgtgcggtgactcacgcctgta

SEQ ID NO: 98002 - DNA, 274 bp, Homo sapiens; identical to SEQ ID NO: 56489
  chr19:50058956-50059230
  hypo

SEQ ID NO: 98003 - DNA, 880 bp, Homo sapiens
  chr19:50059647-50060527
  hypo
gcttctccacgcattcgagggtgaccacagccccactacggtgaggccgaaggcgggagactctgatcaggggccttcctggggacctactggccccaaagccggaccgccccgcaggttcccgagtggtcccttccctcccctcccaggtgactcacgagggccgcagcacagcgcagggggtggcgttgctcaggctgtcgcgggtcacggcacacacgtagcgctcgctgcgggtgatgagccccacgcggtccacggagctgtctagcggtgtgaagtgcacgggcgtcaggtccgacatgcgcaggggcttccctgacatggggcaggtcaccgtgcgggactgcaaggggcagagagaggcgggctcagtaggcagggctggcgcaggtggagagcgcgtggtccctgtgcgtgaggaggacggtggggaaccctggcgccctggcaccgtgcgtgccggggcgctgtgggggctcaccggcttctccagcttggtggccttggcttcgggcgtcagcgacgggatccagaagctgggcagcactttgtccttgtccttacttggaggacccacactgggcccaggttggacatcatctgtgggggaaggaagggactcagatgccgccccctgggcccgcccagcccgcggcgccccgccccccaacccacaagaagcccaacctgagtcacctgggctggtgcccgagagggccttggctgtgaaagggttgaggggccggctcacgatagccgactccttctccaggaagccccgcacatggtcctgcgaggccgcccgctgaagctccttctgctcctcgcgccgggtgccccgctgcttctcgtaggcctgcgtcggggaaagtgggct

SEQ ID NO: 98004 - DNA, 173 bp, Homo sapiens; identical to SEQ ID NO: 32776
  chr19:50060911-50061084
  hypo

SEQ ID NO: 98005 - DNA, 164 bp, Homo sapiens; identical to SEQ ID NO: 32777
  chr19:50061335-50061499
  hypo

SEQ ID NO: 98006 - DNA, 191 bp, Homo sapiens; identical to SEQ ID NO: 32778
  chr19:50063174-50063365
  hypo

SEQ ID NO: 98007 - DNA, 31 bp, Homo sapiens; identical to SEQ ID NO: 32779
  chr19:50092048-50092079
  hypo

SEQ ID NO: 98008 - DNA, 30 bp, Homo sapiens; identical to SEQ ID NO: 32780
  chr19:50097732-50097762
  hypo

SEQ ID NO: 98009 - DNA, 30 bp, Homo sapiens; identical to SEQ ID NO: 32781
  chr19:50098345-50098375
  hypo

SEQ ID NO: 98010 - DNA, 30 bp, Homo sapiens; identical to SEQ ID NO: 32782
  chr19:50119400-50119430
  hypo

SEQ ID NO: 98011 - DNA, 30 bp, Homo sapiens
  chr19:50128908-50128938
  hypo
aattgggacagaaccgtgtcctcaggagct

SEQ ID NO: 98012 - DNA, 142 bp, Homo sapiens; identical to SEQ ID NO: 32783
  chr19:50129650-50129792
  hypo

SEQ ID NO: 98013 - DNA, 30 bp, Homo sapiens; identical to SEQ ID NO: 32784
  chr19:50130465-50130495
  hypo

SEQ ID NO: 98014 - DNA, 35 bp, Homo sapiens; identical to SEQ ID NO: 32785
  chr19:50130773-50130808
  hypo

SEQ ID NO: 98015 - DNA, 30 bp, Homo sapiens; identical to SEQ ID NO: 32786
  chr19:50154362-50154392
  hypo

SEQ ID NO: 98016 - DNA, 30 bp, Homo sapiens
  chr19:50154592-50154622
  hypo
gtgacgagagcccccgcccggacgcgcagc

SEQ ID NO: 98017 - DNA, 30 bp, Homo sapiens
  chr19:50155028-50155058
  hypo
ggacctaggggagccggctcccgcgccgcc

SEQ ID NO: 98018 - DNA, 30 bp, Homo sapiens
  chr19:50155678-50155708
  hypo
gcgacagccgccgccggggggccgtgccac

SEQ ID NO: 98019 - DNA, 30 bp, Homo sapiens
  chr19:50165217-50165247
  hypo
ccccaggtcaaacacgcctccttccttgtc

SEQ ID NO: 98020 - DNA, 30 bp, Homo sapiens
  chr19:50171632-50171662
  hypo
ggcgtgagccactgcgcctggccccagctc

SEQ ID NO: 98021 - DNA, 30 bp, Homo sapiens
  chr19:50173387-50173417
  hypo
gaaccgggaagccacgcctcccggccctct

SEQ ID NO: 98022 - DNA, 200 bp, Homo sapiens
  chr19:50208441-50208641
  hypo
ggcagctcacagcccacggtttcctgcagactttgctgatgggaatgcgccccttatgctctgcccagtacgagaagatcttcaacaccacgcggattccaggggtccaaaaaggtgagaccctctcctgtccccactgatggaggcagaacaatatagtggctaagagcatgttttctggagtccgcctgactgagctg

SEQ ID NO: 98023 - DNA, 102 bp, Homo sapiens
  chr19:50218145-50218247
  hypo
cacacaaccaacacaacgtccaactccaagctccaccatccccaccaaatatcccttctcatttccaccataacccacactttaccttgacccatagtgatg

SEQ ID NO: 98024 - DNA, 31 bp, Homo sapiens; identical to SEQ ID NO: 32788
  chr19:50223822-50223853
  hypo

SEQ ID NO: 98025 - DNA, 31 bp, Homo sapiens
  chr19:50247504-50247535
  hypo
gttgccttggtgggaccgatccaggttcatg

SEQ ID NO: 98026 - DNA, 99 bp, Homo sapiens
  chr19:50249076-50249175
  hypo
ccttgctcaggtcactgccttcggggcactccctcctctgctcttggagaccccagccttgtcgccttccggttaagatctaggccgggcgcggtggct

SEQ ID NO: 98027 - DNA, 31 bp, Homo sapiens
  chr19:50264372-50264403
  hypo
tttaaaaataaaggaacgaatgtatgcatct

SEQ ID NO: 98028 - DNA, 30 bp, Homo sapiens
  chr19:50266321-50266351
  hypo
gcaacaaacccacccgtggaacgacacggc

SEQ ID NO: 98029 - DNA, 88 bp, Homo sapiens; identical to SEQ ID NO: 32789
  chr19:50274627-50274715
  hypo

SEQ ID NO: 98030 - DNA, 136 bp, Homo sapiens
  chr19:50289572-50289708
  hypo
atcactttgacactgaatcagcgtaaaaattattcacgagctattttatttgacatctgtgtttggtgctaagtctttggaatgcggcgttgcgggtgtctctcagtttggactcgctgcagttccagtgctctgg

SEQ ID NO: 98031 - DNA, 30 bp, Homo sapiens
  chr19:50292044-50292074
  hypo
cacaaatggagcatcgtctgtggccaggct

SEQ ID NO: 98032 - DNA, 30 bp, Homo sapiens
  chr19:50295555-50295585
  hypo
agccctcacgcccccggatacccagggctc

SEQ ID NO: 98033 - DNA, 40 bp, Homo sapiens; identical to SEQ ID NO: 32790
  chr19:50303026-50303066
  hypo

SEQ ID NO: 98034 - DNA, 147 bp, Homo sapiens; identical to SEQ ID NO: 32791
  chr19:50303125-50303272
  hypo

SEQ ID NO: 98035 - DNA, 52 bp, Homo sapiens
  chr19:50304795-50304847
  hypo
agctgcgcaatgctgacgtggagctgcagcagcgagccgtggagtacctcac

SEQ ID NO: 98036 - DNA, 227 bp, Homo sapiens
  chr19:50305175-50305402
  hypo
gtgcctggggctgggtcctgccgggcgccgcctgtcctcaccgtgacctgcgcttcctacagtcgacgccctcgccctccgccgacctcctggggctgcgggcagcccctcccccggcagcacccccggcttctgcaggagcagggaaccttctggtggacgtcttcgatggcccggccgcccagcccagcctggggcccacccccgaggaggccttcctcaggtag

SEQ ID NO: 98037 - DNA, 226 bp, Homo sapiens
  chr19:50306271-50306497
  hypo
gggagtggtgggggaggggaacgggacaggtgcggagcccaggccaggtgcagacaggcacccccgtcatcttgcgccccctgccccctcaggtttgtgtgtaagaacaacggggtcctgttcgagaaccagctgctgcagatcggagtcaagtcagagttccgacagaacctgggtgtgtcccgggggactgtgggaatgggtcggagggagaccttggggaagg

SEQ ID NO: 98038 - DNA, 53 bp, Homo sapiens
  chr19:50308599-50308652
  hypo
ggtccctcaaagacctgcaggcgggagctgccgggagctctggggttcctgac

SEQ ID NO: 98039 - DNA, 279 bp, Homo sapiens
  chr19:50308965-50309244
  hypo
caacaagttcttccagcccaccgagatggcggcccaggatttcttccagcgctggaagcagctgagcctgtgaggggtggggagggggcggagccaaagccgcgcctctgggtgggcgggtcgggccgtccaggtccctgacttgaaccttcccggtccccagccctcaacaggaggcgcagaaaatcttcaaagccaaccaccccatggacgcagaagttactaaggccaaggtgagagaccgcgggcgtgtttgccggcctatggctgctttgcttc

SEQ ID NO: 98040 - DNA, 121 bp, Homo sapiens
  chr19:50318973-50319094
  hypo
aataaaaataaaagataaaagaaaaatagaaacccaataaaaaataattttaaatgataaaggtaaaaacctttatcattaggctttctgtaagtacttttcaattggtgattattattat

SEQ ID NO: 98041 - DNA, 121 bp, Homo sapiens; identical to SEQ ID NO: 32793
  chr19:50319633-50319754
  hypo

SEQ ID NO: 98042 - DNA, 162 bp, Homo sapiens
  chr19:50320053-50320215
  hypo
ttctttctattaaaacaaatataaagtggcagggcacgatggctaacacctgggatcgctttagccgaggagtttgagacacgccagagcaacacagtgagaccccatctctacaaaaaatttaaaaattagctggaagtggtagtgcgcggctgtggtccc

SEQ ID NO: 98043 - DNA, 58 bp, Homo sapiens; identical to SEQ ID NO: 32795
  chr19:50331698-50331756
  hypo

SEQ ID NO: 98044 - DNA, 559 bp, Homo sapiens
  chr19:50353015-50353574
  hypo
acatggacaggcctacgggttcttctgccatttcactggccactcctccgtgtcctttgctggttgcttctcattgtcgtgactgctaaagggatgagtgtcccagtctctttgtgagctcatccagtctccattcaaacactgatgactcccgaatttctctctccaggctatgacatcaatatctatctacattgtttagtcaacatccgaaacagaagtagggactccgtctctaacctcctacagctgtgtctatttctcctctctaccttcactcgactccgcccacactggctcccttttattccttctactttcaggatttgtctttgctgttctgtcctctttgcacacttttccagccatctggaatggcaggttgctcacaggtcgttttcttgacttcccttgcttgctaactttacctcgctatggtcatatcccatcgccctgtggatgtgcgctagttaacacttagcacagcctgtgattatgtctctccccagtggaccgtggggcctgtgagggacgtggtctgattcggtcgtcgccgagc

SEQ ID NO: 98045 - DNA, 30 bp, Homo sapiens
  chr19:50358892-50358922
  hypo
ccatgacctggacccggggggctgccaagg

SEQ ID NO: 98046 - DNA, 49 bp, Homo sapiens
  chr19:50361409-50361458
  hypo
tagctcttccagagggcggggctgggggcaagagcgcctccccaggtgg

SEQ ID NO: 98047 - DNA, 30 bp, Homo sapiens; identical to SEQ ID NO: 32797
  chr19:50361778-50361808
  hypo

SEQ ID NO: 98048 - DNA, 390 bp, Homo sapiens
  chr19:50364772-50365162
  hypo
gggaacatcagaggggcggcaggcccaggggtcaggggaggaggggggtcagggggtgcagcccggggggtgtccgggctgagcgggctcacccggttgttgtggcgcgcctgctccagagtggcggtgaagaggaagcagcggcaggggacgcccgcggctcgggcacactggacgtacctgtgggggaaggagctggatgtgcaggccccgcccaccccgccgcaggccacctacggccccgcggtcacgctacctggcgcggctcgcggcgtctgggtttgtgttgtcgatggcgacccgtttcccttgcttcagggctgtctcacacgtggtcacacagcgctgccaggagcctagcgtgtcctggggacacgagaggtcacaaac

SEQ ID NO: 98049 - DNA, 30 bp, Homo sapiens; identical to SEQ ID NO: 32799
  chr19:50365744-50365774
  hypo

SEQ ID NO: 98050 - DNA, 30 bp, Homo sapiens; identical to SEQ ID NO: 32800
  chr19:50366037-50366067
  hypo

SEQ ID NO: 98051 - DNA, 30 bp, Homo sapiens
  chr19:50377322-50377352
  hypo
ccatcctgcctccacggccttccagagcct

SEQ ID NO: 98052 - DNA, 30 bp, Homo sapiens
  chr19:50385188-50385218
  hypo
aggggtggttgggacgctgcagctggaacc

SEQ ID NO: 98053 - DNA, 30 bp, Homo sapiens
  chr19:50387490-50387520
  hypo
ctgtgcccggtccccgcagaaagggatgtg

SEQ ID NO: 98054 - DNA, 205 bp, Homo sapiens; identical to SEQ ID NO: 32801
  chr19:50406381-50406586
  hypo

SEQ ID NO: 98055 - DNA, 30 bp, Homo sapiens
  chr19:50412981-50413011
  hypo
ggtgtggttgttgccgtctttgcagtgcca

SEQ ID NO: 98056 - DNA, 27 bp, Homo sapiens
  chr19:50415435-50415462
  hypo
ttttttttgagacgggagtctcgctct

SEQ ID NO: 98057 - DNA, 348 bp, Homo sapiens
  chr19:50423832-50424180
  hypo
gcctccatgaggctgtggaggcggataggcgtcaggctcagagctgactttaccccgagggcaacggctcgggcagagtttctaagggcaggcccatgccttccttggggtggccggtaatgctggttgagaacaggctggggaagagcctagagctgaaacgctctggttggcggtgcaggcacaggacatcaaggcctggagagggactgaggcatcagggctgagggactctgagagcagcggacaggcgtgtgtggcgggggaggaacggcgcacacctgtgccccatccgcagcccctcttcttgtcaacatcagcttccccggggagaggcagtgatgttgg

SEQ ID NO: 98058 - DNA, 326 bp, Homo sapiens
  chr19:50424484-50424810
  hypo
ggagaggacttcagtcacctgcgtaaagtcccacaaccagtaagggctggcccaggtgtctggccccacagctgagctcctaaccgcaccgagcctctccaaaacatggtctttttttgctccccactgccaccaccatcaccgtcccctgcctcatccagtcccccttcccattctccagagacttcctgggccatctccatgaccttccagaccagcctgggcttcactctcaaatccaattcaggatgatccgcccgccccagctgcagacgatggcctgagacgcctgcagggaagagaggggcgtccgctgctcgccaacc

SEQ ID NO: 98059 - DNA, 31 bp, Homo sapiens
  chr19:50477608-50477639
  hypo
tgtcctgagaaatgcacggttaggtgattct

SEQ ID NO: 98060 - DNA, 604 bp, Homo sapiens; identical to SEQ ID NO: 56504
  chr19:50553868-50554472
  hypo

SEQ ID NO: 98061 - DNA, 31 bp, Homo sapiens
  chr19:50673968-50673999
  hypo
aaatgccagcagcacccgcactcccagctgt

SEQ ID NO: 98062 - DNA, 38 bp, Homo sapiens
  chr19:50705040-50705078
  hypo
ctggaattagaggcgtgagccaccgctcctggccagta

SEQ ID NO: 98063 - DNA, 31 bp, Homo sapiens
  chr19:50726894-50726925
  hypo
tgatgcctgggtttgtcgtctaagtgaatgt

SEQ ID NO: 98064 - DNA, 31 bp, Homo sapiens
  chr19:50753943-50753974
  hypo
aggtaggggctggggccggccttggggcatg

SEQ ID NO: 98065 - DNA, 54 bp, Homo sapiens
  chr19:50756057-50756111
  hypo
ttctccaaatccacagcgtgagcacctttgtttcagaggcggaggtctgaacct

SEQ ID NO: 98066 - DNA, 23 bp, Homo sapiens
  chr19:50764002-50764025
  hypo
tgcgtgtgtgtgtgtgcgtgcat

SEQ ID NO: 98067 - DNA, 593 bp, Homo sapiens
  chr19:50764722-50765315
  hypo
ccctcacagatccaggcgctggaactggaccccaacctctaccgcgtgggacagagcaagatcttcttccgggctggggtcctggcccagctggaagaggagcgagacctgaaggtcaccgacatcatcgtctccttccaggcagctgcccggggatacctggctcgcaggtgggcagccacgctgtctcccggggtcctgttggccgagactgggtcagggaggggttgaccagatggctctaggtgtcagggcctccaggatgggtgcagggctgaggagcaggtggatggaggtgccgggtgtccaggcttcttggttctgcagtccctgaggggccctgtgggcagggcaggccctgttcagagtaagactggcaacacagaggctggacttagccgcagggtgaccagctgtcctagtgggcctgggtctgggtttcccagggtgcaggacttccagtgctaaaacagagaaagcccggggcaacccaggtcaagctgtccgctctccctggccagtccctcgaggggctccagtctggaggtgagacttccatgggcatagagtcccagtcccgggtgagacctgct

SEQ ID NO: 98068 - DNA, 31 bp, Homo sapiens; identical to SEQ ID NO: 32806
  chr19:50766646-50766677
  hypo

SEQ ID NO: 98069 - DNA, 31 bp, Homo sapiens
  chr19:50783166-50783197
  hypo
gccagactgttttccacggcagctgtaacat

SEQ ID NO: 98070 - DNA, 267 bp, Homo sapiens
  chr19:50784839-50785106
  hypo
cctcccctcagctttccgagtggcggcggcgccaggaggaggaggcaggggcactggaggcaggggaggaggcacggcgccgggcagcccgggaggccgaggccctgacccagcgcctggcagaaaagacagagaccgtggatcggctggagcggggccgccgccggctgcagcaggagctggacgacgccaccatggacctggagcagcagcggcagcttgtgagcaccctggagaagaagcagcgcaagtttgaccaggtggggc

SEQ ID NO: 98071 - DNA, 59 bp, Homo sapiens
  chr19:50789747-50789806
  hypo
gaggagaaggcagctgtacttcgggcagtggaggaacgtgagcgggccgaggcagaggg

SEQ ID NO: 98072 - DNA, 47 bp, Homo sapiens
  chr19:50789973-50790020
  hypo
gggacacactgggtgaggggagacacgtacatgcatgtatgctttca

SEQ ID NO: 98073 - DNA, 31 bp, Homo sapiens
  chr19:50819987-50820018
  hypo
atttcaaaaacaaaaacgaaagggttgggaa

SEQ ID NO: 98074 - DNA, 947 bp, Homo sapiens
  chr19:50826193-50827140
  hypo
ctccacctgtgcccccgatccctgacgcccaggctcacctgcccggttgatctcaatcacctcctcctgagccaacgggcaaggctcgccgggggctggcagaggaggcagccccatgatccccagcccacccgctccccccctgagcagcccggggtgcgtgtggggccccgctgggtaggccccggccacagtcacccccatggagggtggggtgatgggtggcggcgggctgatgcccccgctgccgtggtgcgggtggggcgggggtggcgggggtgggtcaggcttgcagtagttgggcgagcccggttgcgggggccgggggatgtgtttgttcttcttcttgggcagcttctgcttggccatggccagcgaatagtacatgccaaagttgttgacaatgacgggcacaggcatggcgatggtcagcacccccgccagggcacacagcgccccgaccagcatccccgaccacgtcttggggtacatgtctccatagcccagggtcgtcatggtgaccacagcccaccagaagccaatggggatgttcttgaagtaggtgtggttggagcccaggatgtcatcggggtcggcgccaatgcgctcagcgtagtaaatcatggtggcgaagatgagcacccccagggccaggaagatgatgagcagcaggaactcgttggtgctggcgcggagcgtgtgtcccagcacgcgcagccccacgaagtgccgggtcagcttgaagatgcgcaggatgcggacgaagcggaccacccgcaggaagcccagcacgtctttggcggccttggagctgaggcccgagaggcccacctcgagatagaagggcaggatggccacacagtcgatgatgttgaggctgcttttaagaaactccaccttgtctgggcagaaggtgatgcgcatgaggaactcgaaggtgaaccaga

SEQ ID NO: 98075 - DNA, 206 bp, Homo sapiens; identical to SEQ ID NO: 56515
  chr19:50828890-50829096
  hypo

SEQ ID NO: 98076 - DNA, 445 bp, Homo sapiens; identical to SEQ ID NO: 56516
  chr19:50831654-50832099
  hypo

SEQ ID NO: 98077 - DNA, 344 bp, Homo sapiens; identical to SEQ ID NO: 56518
  chr19:50833792-50834136
  hypo

SEQ ID NO: 98078 - DNA, 31 bp, Homo sapiens
  chr19:50838465-50838496
  hypo
gtcgccagccctcccccgccagccctaggaa

SEQ ID NO: 98079 - DNA, 14 bp, Homo sapiens
  chr19:50871400-50871414
  hypo
caagactccctctc

SEQ ID NO: 98080 - DNA, 13 bp, Homo sapiens
  chr19:50878666-50878679
  hypo
cccggtccgagac

SEQ ID NO: 98081 - DNA, 30 bp, Homo sapiens
  chr19:50885358-50885388
  hypo
gggccgcgtggaggcgttgcagcagcccta

SEQ ID NO: 98082 - DNA, 30 bp, Homo sapiens
  chr19:50885942-50885972
  hypo
aaggggccctgggccgagcctgtagaccta

SEQ ID NO: 98083 - DNA, 17 bp, Homo sapiens
  chr19:50898558-50898575
  hypo
ataaatagtgtaggccg

SEQ ID NO: 98084 - DNA, 77 bp, Homo sapiens
  chr19:50898814-50898891
  hypo
tgggagacagagcgagactccgtctccaaaaaaaaaaaaaaatagtgtaaagaacacctgcacgccctttgcccaga

SEQ ID NO: 98085 - DNA, 30 bp, Homo sapiens
  chr19:50902827-50902857
  hypo
cctggggcagaggccgggccaggtcagccc

SEQ ID NO: 98086 - DNA, 30 bp, Homo sapiens
  chr19:50905570-50905600
  hypo
ggcaggcctgggcacgcccagcttcgcgcc

SEQ ID NO: 98087 - DNA, 30 bp, Homo sapiens
  chr19:50905936-50905966
  hypo
atggcagcgcattgcgcccttgcgcgtgct

SEQ ID NO: 98088 - DNA, 31 bp, Homo sapiens; identical to SEQ ID NO: 32814
  chr19:50914693-50914724
  hypo

SEQ ID NO: 98089 - DNA, 503 bp, Homo sapiens
  chr19:50919572-50920075
  hypo
ccccaggccccatgaccaccccgtgtccaccccggtgccctttccctggctgcccgggtgtgactgccatgtggccgcaggacccgctgttcgtgctggagcacagcctgcccattgacacgcagtactacctggagcagcagctggccaagcccctcctgcgcatcttcgagcccatcctgggcgagggccgtgccgaggctgtgctactgcgtacgggggcaccaggggactgggggcaccctgggggggcagaggagatcaccggcccaccacctgcctcctctcctgcagggggggaccacacgcgctgcaagacggtgctcacgggcaaggtgggcggcctcctggccttcgccaaacgccgcaactgctgcattggctgccgcacagtgctcagccaccagggtgagcggccctggccactgggcccccactggccctcaacctgctctgccgtcaccccagatcctagacacccaccccatcggctggcactgcca

SEQ ID NO: 98090 - DNA, 220 bp, Homo sapiens
  chr19:50938503-50938723
  hypo
aaaggtgaggaggtgctccctcgggctcaaccgacctggcttctcatctccatcctcctcgctacgcctctccaggcctttccccagcctctatccttgaatctgtccccgcacagccccagggctgacccacgcctcccgtgctcccagccctcccggggctccctggcacccgcaggcagagcccagcccctcggctggcatcggctccggtcagctg

SEQ ID NO: 98091 - DNA, 84 bp, Homo sapiens
  chr19:50983971-50984055
  hypo
gctgttcaacacctcggtgcagctgcagccgcccaccacagccccagggtgagcctctgctgccttcgcggcgctcttgccacc

SEQ ID NO: 98092 - DNA, 1578 bp, Homo sapiens
  chr19:51020735-51022313
  hypo
ggctgtgggagggaggggtcccggtcaggctgcgcccgggctgggacctgggtggggggctccacgcccctcgcccgcccggccccgccgcctcagatctgcgtctcttgcacgttctccttggagccgctcttgaagagcagaggttcgtggatggagttgaggccaggcgggcctttgcccccgcagcccccgccgctggggttgctgctgtagtgcgccttgaaggcggcagccacgtagtggtggtggttgaggtggtctcgctccagggcgggcagggccaggtggctgtccccgcccacaccacccccactggccacggcggccgcggcggccacggacacggccgaggcggcgggcagctcgtcctccacgttgatgatctccacggtgcgcgtgggcccgtggtgcttgtggagctggtgctgcttgcgcagcttgtagaaggccacgagcatcaccgcggccatgaacgtgatggccacgaagcagccgatgatgattttggtggtcttcatgacgtcgtccaggtccttgagggcgttctccgtcacatccgtgatgggcaccgtgaacgccttctccgtgggccgcgaggagcgcggggcgggtgccgtggtagaagacgaggcagggccggccgcgtccccaggccggcccccaccccagacaccgtctgtcgtgggccctggcggttccttctccgtcccccgcggctgcagggcctcctctccgggctgcgtctccagggtctccacggtcaccgtggtgaagtaggtgtagccgccactgccccctccaacaccaccactgcccccagggccgcccccgccgctgccggtgcccccggccgccacggggtccacggccgagacgttgagcgtggccgaggcggtggtgttgccggctgagttcgtcaccatgcacgtgtactggcccgtgtcctgcacggtgacgttggtgaagttaagcgtgccgtcatgcaggacggagatgcgcacgcggtaggagccgtgggtcatgagggtgccgttgggcgtcagccagttgacggaggtcatggaggtgcccgtgcggcatttgagctcggcagccatgccctcggtgacgttgaggtccgtgggcggctccacgatgacgggcgcatagcaggtgaaatgcgactggtccagctccccaatgtagcgccccttgaggccggcgggcgcatgacagcgggcgcagcacgtcgtgttgctgggcaccgtctccttgagccaccagctcagccagagcacgtcgcagttgcaatgccaggggttgtggttgaggtgcacgcgctcgaggcggtgcaggggcgtgaagaggtcgtggggcagcgacatcaggttgttgtgggacaggttgagctcctccagcgacttgaggtcgtcgaaggcgttgcgctcgatggtggctacctgggcgtgcatgagccacagcttgcgcaggctggtgagaccctggaaggagcccgggcggatcaggtccagccggttgcccgacagctccagctcctccaggcgcaccagggccgtcaggttggggatgtccttg

SEQ ID NO: 98093 - DNA, 30 bp, Homo sapiens
  chr19:51047864-51047894
  hypo
gtggggagggtgtccgaatgcaaagacacc

SEQ ID NO: 98094 - DNA, 30 bp, Homo sapiens; identical to SEQ ID NO: 56524
  chr19:51071279-51071309
  hypo

SEQ ID NO: 98095 - DNA, 45 bp, Homo sapiens; identical to SEQ ID NO: 32817
  chr19:51098420-51098465
  hypo

SEQ ID NO: 98096 - DNA, 273 bp, Homo sapiens
  chr19:51128561-51128834
  hypo
gggtcagtgaggaccgtggagggtggtgggagggcctgtccccaccccagccctcctgcctgacccccgcccgggccgcgcccctcaccagtcgtagtctaccacggcgatgctgagccccacgttctccacgctctcgggggccacgtcgaacaccagcgcctcattataggtggggttcagcgtgttcttcttgatggaggttttccgcttcttcagacgccgcccctcgctgatcagggaggccttcacgtaggggtctgggaacagcaa

SEQ ID NO: 98097 - DNA, 30 bp, Homo sapiens
  chr19:51132622-51132652
  hypo
cagcaccacctggccgatgaggtcgtgccg

SEQ ID NO: 98098 - DNA, 23 bp, Homo sapiens
  chr19:51156311-51156334
  hypo
ggcactagagtcttgctttgtcg

SEQ ID NO: 98099 - DNA, 30 bp, Homo sapiens
  chr19:51203446-51203476
  hypo
ggagattggaggactcggggcattggagga

SEQ ID NO: 98100 - DNA, 628 bp, Homo sapiens; identical to SEQ ID NO: 12546
  chr19:51227640-51228268
  hypo

SEQ ID NO: 98101 - DNA, 270 bp, Homo sapiens; identical to SEQ ID NO: 12547
  chr19:51228368-51228638
  hypo

SEQ ID NO: 98102 - DNA, 201 bp, Homo sapiens; identical to SEQ ID NO: 12548
  chr19:51228702-51228903
  hypo

SEQ ID NO: 98103 - DNA, 31 bp, Homo sapiens
  chr19:51240466-51240497
  hypo
attagtacctagggatgggtgcggtggctca

SEQ ID NO: 98104 - DNA, 39 bp, Homo sapiens
  chr19:51269872-51269911
  hypo
ttttttttttgagtcttactccgtgacctaggctggagg

SEQ ID NO: 98105 - DNA, 137 bp, Homo sapiens
  chr19:51293555-51293692
  hypo
ggcccctgggggagcgtgccagggcctgctataatgggggtgctgagtgcagggctgggacaggcggggctgcggcccagacagtgggctgagctcagcgtctgggctgggtggaaatggccggcctggggttttgg

SEQ ID NO: 98106 - DNA, 30 bp, Homo sapiens
  chr19:51293916-51293946
  hypo
tccaccctgtggccacgaggcctgggccag

SEQ ID NO: 98107 - DNA, 31 bp, Homo sapiens
  chr19:51295127-51295158
  hypo
ccgcctgagctggctccgagaagcaagactg

SEQ ID NO: 98108 - DNA, 106 bp, Homo sapiens; identical to SEQ ID NO: 32822
  chr19:51302698-51302804
  hypo

SEQ ID NO: 98109 - DNA, 696 bp, Homo sapiens
  chr19:51303005-51303701
  hypo
gtgtttctctggaaaacgggactagagatgcctgcagacaggcacatctgtggggttcagtgagaggacggggccaaacccttctgcttgggcctcccatgcctaacgggatacccctcaatcgcctctgctgcccccggcccagctcttctaagctgctctgacttcaccagaaccttctgtgacatggggaaggggcagctgcctctcactgggaccctggcaggataagttcagtttattctccgcaaaagcactaacactgtgggtgctcgctcagtgggtgctgctgtttaacaacctcagaaacaccaaaagccccattttgcatagaaatatgctttgtaggaagaggggggtccttgtttaaactaatcaaggaaaattaaaaacccagcccccagccacaaactagccacattccaggtgtccaagagccacccgtggccagtggctgccagactggacaaggcgaggaacatttctatctggacagtcgtaaggaaggcgccggcccagaatccacaaatgctacgtgtcccttctgtctccctatcccgcatcagctctgtcgtctcacctctcacacatccctacccaactggcaccgacaccactcatgtccccaagaatcccctctaagccagccatgacaaacgctcagctccattcactaccccacagaggatctcggat

SEQ ID NO: 98110 - DNA, 61 bp, Homo sapiens
  chr19:51304554-51304615
  hypo
cccaccttcagaaggcgggaagcgctagtgccccgggccatttgctcggtgcctgttccac

SEQ ID NO: 98111 - DNA, 30 bp, Homo sapiens
  chr19:51355990-51356020
  hypo
tatgcttggggacaccggatccatgaggtt

SEQ ID NO: 98112 - DNA, 118 bp, Homo sapiens; identical to SEQ ID NO: 12555
  chr19:51527587-51527705
  hypo

SEQ ID NO: 98113 - DNA, 204 bp, Homo sapiens
  chr19:51535216-51535420
  hypo
aacgctgctggttacgcggacgggcaggcgcagccgcagcagccggaggtcgtgctcgtggctcgtcgaggctcccaggtagccgggatgggtcacagagaagccgctgtgccggatctgctcggtccagtcgagctggctgaggctgtgttcccccaggcgcacccagtacctgctgccggtggcgacggctgagcgggtggc

SEQ ID NO: 98114 - DNA, 30 bp, Homo sapiens; identical to SEQ ID NO: 32827
  chr19:51582826-51582856
  hypo

SEQ ID NO: 98115 - DNA, 30 bp, Homo sapiens
  chr19:51589547-51589577
  hypo
ttgccgtccccagcccggacctcagcacct

SEQ ID NO: 98116 - DNA, 328 bp, Homo sapiens
  chr19:51597215-51597543
  hypo
cttgcacatttgtccccatctcgccctttcctgtgctcattcttactcatctccagctcccggtttacacattacctctttcaggaagcgttccatgacgcaccgcactgagttagaagccccacctcaggcctcccctgtgtccctcctaagccccacggtggcacatatccctccggatcttgacttgccagtatccctgcccgcctccgctggcagacagggagcccattgagggcagggactggggctgactcagctgcattgccccaccgccctgcgcagggcccgccagctccaaggaggcgtcaggaaatgtttgctgcat

SEQ ID NO: 98117 - DNA, 254 bp, Homo sapiens
  chr19:51607193-51607447
  hypo
caccagggtctcctcgccgccttctggagcatgcgcctgaatcccctttcaggtcccgcctcctcgcctgtgcattcgccccactgcctcggagagtgccgctctgcggcccgtactacgctcacctgtcacgatgtgcgtggctcccacgcggcgcgccccttcctccagcgcccggcgccgcagcactccacagaaggtgcagcaggagcggctgcggccggagccggctgtgctgcgggccacggcgtcca

SEQ ID NO: 98118 - DNA, 179 bp, Homo sapiens
  chr19:51607824-51608003
  hypo
attgcgggaggggtcggcttctcctagacagggagagagaggaggtgggttacatatggattccggattgcagggtccctgccatcggggagattgtctggattgcacctctgcccggaatagaccagggagacgtgtgcgcgagtggagtagcttcttctagcgctggggataggatg

SEQ ID NO: 98119 - DNA, 108 bp, Homo sapiens
  chr19:51684621-51684729
  hypo
aaccgtgtgactagcgactgagtgccttacaggggacgacctcctaagaggctgactggcaggagcccagctaactgctggccagggcaggccgtgggggcgcgttac

SEQ ID NO: 98120 - DNA, 55 bp, Homo sapiens
  chr19:51753979-51754034
  hypo
ggcccacaaactacctggcaccgcccccagctgcggattggctcaagccctcaag

SEQ ID NO: 98121 - DNA, 239 bp, Homo sapiens; identical to SEQ ID NO: 32830
  chr19:51754290-51754529
  hypo

SEQ ID NO: 98122 - DNA, 204 bp, Homo sapiens; identical to SEQ ID NO: 12558
  chr19:51830798-51831002
  hypo

SEQ ID NO: 98123 - DNA, 5 bp, Homo sapiens
  chr19:51831120-51831125
  hypo
cgcct

SEQ ID NO: 98124 - DNA, 30 bp, Homo sapiens
  chr19:51844412-51844442
  hypo
cacccaccgtgaactcgtgagtctgctggg

SEQ ID NO: 98125 - DNA, 42 bp, Homo sapiens; identical to SEQ ID NO: 32833
  chr19:52026930-52026972
  hypo

SEQ ID NO: 98126 - DNA, 30 bp, Homo sapiens
  chr19:52033457-52033487
  hypo
cctggaccatggagacgcctgaggcagtag

SEQ ID NO: 98127 - DNA, 303 bp, Homo sapiens; identical to SEQ ID NO: 32834
  chr19:52058086-52058389
  hypo

SEQ ID NO: 98128 - DNA, 30 bp, Homo sapiens; identical to SEQ ID NO: 32835
  chr19:52101646-52101676
  hypo

SEQ ID NO: 98129 - DNA, 30 bp, Homo sapiens
  chr19:52102008-52102038
  hypo
gcgcacgctggcaccgggcctgggcatctt

SEQ ID NO: 98130 - DNA, 23 bp, Homo sapiens
  chr19:52125685-52125708
  hypo
ccggccttgacaacctgattcta

SEQ ID NO: 98131 - DNA, 23 bp, Homo sapiens
  chr19:52139147-52139170
  hypo
ttattttttttgagacagagtcg

SEQ ID NO: 98132 - DNA, 23 bp, Homo sapiens
  chr19:52151080-52151103
  hypo
gggcgcagtggctcacgcctgta

SEQ ID NO: 98133 - DNA, 687 bp, Homo sapiens; identical to SEQ ID NO: 56563
  chr19:52207057-52207744
  hypo

SEQ ID NO: 98134 - DNA, 300 bp, Homo sapiens; identical to SEQ ID NO: 56564
  chr19:52222620-52222920
  hypo

SEQ ID NO: 98135 - DNA, 39 bp, Homo sapiens; identical to SEQ ID NO: 32838
  chr19:52289293-52289332
  hypo

SEQ ID NO: 98136 - DNA, 503 bp, Homo sapiens
  chr19:52342885-52343388
  hypo
ttccccagcccttcccatcaccgatagccataatggcccccaactccgcatcgcttgctcgcttttcctggttccccagacaccgacttccactcgacgctgaggatgctccaatccagaccacagaagccctcagtggctaacccccagcttcagattccactgaccattccctgaagccttcttacaccgcaaacctccacaagtaccccatgctggtcgcatccggtcaaggaccccaacagcgctgggaaactcaccctacagctggagtcgcacaaacattcgcttgaggactagcaggtttccgtaacctcttcactcactgccgtagtcacgctcttgtgcagactcagtagcaccttcgcggaacacaagatgtctacagactttgaaaccaggcgtgcacatggaagcagcagtcttggaagatgcttcttacagatagcgagatggccattttctggcgactaaattccatcgtgctagaaaggaaagaggca

SEQ ID NO: 98137 - DNA, 83 bp, Homo sapiens
  chr19:52350891-52350974
  hypo
cacagctctaaacactgatgccggccctaaaagccctcaacaaccccgaagcggccttaaacggcaaccccagatggtactca

SEQ ID NO: 98138 - DNA, 42 bp, Homo sapiens
  chr19:52368626-52368668
  hypo
cacgtgagccaccatgcccgcgccttcccaaagatttctaac

SEQ ID NO: 98139 - DNA, 30 bp, Homo sapiens; identical to SEQ ID NO: 32840
  chr19:52405682-52405712
  hypo

SEQ ID NO: 98140 - DNA, 8 bp, Homo sapiens
  chr19:52406039-52406047
  hypo
catgtagg

SEQ ID NO: 98141 - DNA, 153 bp, Homo sapiens; identical to SEQ ID NO: 32842
  chr19:52406166-52406319
  hypo

SEQ ID NO: 98142 - DNA, 19 bp, Homo sapiens
  chr19:52406783-52406802
  hypo
aatcatagctaggcgcgat

SEQ ID NO: 98143 - DNA, 30 bp, Homo sapiens
  chr19:52431484-52431514
  hypo
tcaggatttaatatgcgactcagtgaggag

SEQ ID NO: 98144 - DNA, 26 bp, Homo sapiens
  chr19:52431824-52431850
  hypo
ggtaaggtggcctggcgcggtggctc

SEQ ID NO: 98145 - DNA, 25 bp, Homo sapiens
  chr19:52432149-52432174
  hypo
aaaaacaaaacgaagaaaatgataa

SEQ ID NO: 98146 - DNA, 121 bp, Homo sapiens; identical to SEQ ID NO: 32846
  chr19:52479227-52479348
  hypo

SEQ ID NO: 98147 - DNA, 321 bp, Homo sapiens
  chr19:52488647-52488968
  hypo
caggcgatatcatcacgaacatggaaaaagagattcaagaaattacatatttaaaaaagaaaatgctccctcagaaactcccaggcagattttcacatacatagttggctagaattgcaccatacgcctaagctcatttccatgtcaaacctatcactagcaatggcaattggaaccagcaagattggctaagaccaacaaggccttactaagaaactgggatttgggtcgccttgccacagggatgaatacttcacgaaatggagattctgttaagaaagtgtgaatataaggcgggcaagcaacactcactatatatta

SEQ ID NO: 98148 - DNA, 30 bp, Homo sapiens
  chr19:52491099-52491129
  hypo
tgtgagcctggccacgacagactaaaggaa

SEQ ID NO: 98149 - DNA, 66 bp, Homo sapiens
  chr19:52530499-52530565
  hypo
gcccatgtactggttcgaaagtctctgtaagctctttgggtatacatacctcgtgtcaagaccaat

SEQ ID NO: 98150 - DNA, 822 bp, Homo sapiens; identical to SEQ ID NO: 56569
  chr19:52531284-52532106
  hypo

SEQ ID NO: 98151 - DNA, 31 bp, Homo sapiens
  chr19:52565128-52565159
  hypo
ctctaagggtgaagagcgaccatccctatag

SEQ ID NO: 98152 - DNA, 219 bp, Homo sapiens; identical to SEQ ID NO: 32849
  chr19:52569173-52569392
  hypo

SEQ ID NO: 98153 - DNA, 31 bp, Homo sapiens; identical to SEQ ID NO: 12570
  chr19:52643470-52643501
  hypo

SEQ ID NO: 98154 - DNA, 36 bp, Homo sapiens; identical to SEQ ID NO: 56575
  chr19:52674676-52674712
  hypo

SEQ ID NO: 98155 - DNA, 161 bp, Homo sapiens; identical to SEQ ID NO: 12571
  chr19:52715131-52715292
  hypo

SEQ ID NO: 98156 - DNA, 37 bp, Homo sapiens; identical to SEQ ID NO: 32852
  chr19:52718577-52718614
  hypo

SEQ ID NO: 98157 - DNA, 33 bp, Homo sapiens
  chr19:52780412-52780445
  hypo
cttctaaagagtcatgttggccgggcgcggggg

SEQ ID NO: 98158 - DNA, 121 bp, Homo sapiens; identical to SEQ ID NO: 32854
  chr19:52780744-52780865
  hypo

SEQ ID NO: 98159 - DNA, 36 bp, Homo sapiens; identical to SEQ ID NO: 32855
  chr19:52801590-52801626
  hypo

SEQ ID NO: 98160 - DNA, 35 bp, Homo sapiens
  chr19:52801865-52801900
  hypo
aagagcaaaactccgtctcagggaaaaaaaaaaaa

SEQ ID NO: 98161 - DNA, 111 bp, Homo sapiens
  chr19:52838575-52838686
  hypo
acaggacccatcgccgaacgatgggtatggtggcatgtgcctgtagcgtttttaacacacagggaagcgaccgccagactctcacggagatgccccgttcgttctgccttg

SEQ ID NO: 98162 - DNA, 28 bp, Homo sapiens
  chr19:52845773-52845801
  hypo
tttttttttttttttttgagacggagtc

SEQ ID NO: 98163 - DNA, 43 bp, Homo sapiens
  chr19:52851165-52851208
  hypo
agcaatttctagtcctgcaagcgccattcatggtgagtgccct

SEQ ID NO: 98164 - DNA, 42 bp, Homo sapiens
  chr19:52860522-52860564
  hypo
atttttggaggctgaggtgggcgcattacttgatcccaggag

SEQ ID NO: 98165 - DNA, 32 bp, Homo sapiens; identical to SEQ ID NO: 32856
  chr19:52861438-52861470
  hypo

SEQ ID NO: 98166 - DNA, 30 bp, Homo sapiens
  chr19:52869632-52869662
  hypo
tcagagaagtcacacggcggaaaaacctta

SEQ ID NO: 98167 - DNA, 30 bp, Homo sapiens
  chr19:52870286-52870316
  hypo
ttaactgctggcaccgtaatttgtaactct

SEQ ID NO: 98168 - DNA, 609 bp, Homo sapiens; identical to SEQ ID NO: 12575
  chr19:52872924-52873533
  hypo

SEQ ID NO: 98169 - DNA, 17 bp, Homo sapiens
  chr19:52891004-52891021
  hypo
aatactattaaatgaaa

SEQ ID NO: 98170 - DNA, 28 bp, Homo sapiens
  chr19:52907489-52907517
  hypo
ttgtttttttaggtgaagtctcgctctc

SEQ ID NO: 98171 - DNA, 183 bp, Homo sapiens; identical to SEQ ID NO: 32858
  chr19:52917255-52917438
  hypo

SEQ ID NO: 98172 - DNA, 43 bp, Homo sapiens
  chr19:52927549-52927592
  hypo
cttttttctgagatggagtttcgctcttgtgtccctggatgga

SEQ ID NO: 98173 - DNA, 102 bp, Homo sapiens
  chr19:52927831-52927933
  hypo
cacacccggcccacttcctccatctttacaggcgagataaaatctctttatccctctattttcaacacatcacaactgtccgtccctcagggtctacctgca

SEQ ID NO: 98174 - DNA, 181 bp, Homo sapiens
  chr19:52931618-52931799
  hypo
tgagcttcagcctgggcaacgagcgaaactctcaaacaaacaaacaaacaaaaaaaatgtctttctttcgttctttcttgtctctccctttttctcacacacaggcacagacacctacattcttttctttgttgcactatttctctctagtcttattttctttctttcttttctttttttt

SEQ ID NO: 98175 - DNA, 22 bp, Homo sapiens
  chr19:53007622-53007644
  hypo
cgtgaaccaccatgcccagccc

SEQ ID NO: 98176 - DNA, 77 bp, Homo sapiens; identical to SEQ ID NO: 32859
  chr19:53027351-53027428
  hypo

SEQ ID NO: 98177 - DNA, 16 bp, Homo sapiens
  chr19:53027667-53027683
  hypo
gaagtggaattttttt

SEQ ID NO: 98178 - DNA, 23 bp, Homo sapiens
  chr19:53028922-53028945
  hypo
attgatttatttatttagagacg

SEQ ID NO: 98179 - DNA, 202 bp, Homo sapiens
  chr19:53029364-53029566
  hypo
acaagcgtgagcccccatgcccggtcctaaggtttatttattaacaaaatggtttttatttctttctctgttatcgtcgtggagatgatttctcatttgggataatattttttagttttcaattatattttgtcaacatttaaaaagcaaagtaaagaatatttcttgggccaggcatgttggctgacgcatgtaatcccag

SEQ ID NO: 98180 - DNA, 30 bp, Homo sapiens; identical to SEQ ID NO: 56587
  chr19:53030695-53030725
  hypo

SEQ ID NO: 98181 - DNA, 492 bp, Homo sapiens; identical to SEQ ID NO: 56588
  chr19:53030933-53031425
  hypo

SEQ ID NO: 98182 - DNA, 31 bp, Homo sapiens
  chr19:53034437-53034468
  hypo
tagtcctggccatgttcggtggctcacactt

SEQ ID NO: 98183 - DNA, 37 bp, Homo sapiens
  chr19:53045475-53045512
  hypo
agctgggatcacagtcgactttcaaaatgcttttggg

SEQ ID NO: 98184 - DNA, 39 bp, Homo sapiens
  chr19:53055547-53055586
  hypo
gcatgagccaccgcacccggcccaaaaattttttcaaaa

SEQ ID NO: 98185 - DNA, 34 bp, Homo sapiens
  chr19:53078218-53078252
  hypo
gtgtttgtttgtttgttttttcgagacggagtct

SEQ ID NO: 98186 - DNA, 31 bp, Homo sapiens
  chr19:53089213-53089244
  hypo
tagttttggaaagttcgcgttaattggtttt

SEQ ID NO: 98187 - DNA, 159 bp, Homo sapiens; identical to SEQ ID NO: 32863
  chr19:53089792-53089951
  hypo

SEQ ID NO: 98188 - DNA, 48 bp, Homo sapiens
  chr19:53090166-53090214
  hypo
ccacctacatggctccgtgtcccctgcaggcctcgccccggagctcta

SEQ ID NO: 98189 - DNA, 30 bp, Homo sapiens
  chr19:53090897-53090927
  hypo
tggtgagaacaagtccgtaagcggagagca

SEQ ID NO: 98190 - DNA, 41 bp, Homo sapiens
  chr19:53102421-53102462
  hypo
aggtatgaaccactatgcccggctaactttgtttttttttt

SEQ ID NO: 98191 - DNA, 2 bp, Homo sapiens
  chr19:53108456-53108458
  hypo
at

SEQ ID NO: 98192 - DNA, 46 bp, Homo sapiens
  chr19:53114550-53114596
  hypo
agacttcctattggctgggcacggtggctcacgccagtaatcccag

SEQ ID NO: 98193 - DNA, 32 bp, Homo sapiens
  chr19:53163139-53163171
  hypo
taatattatcaagatatttctcggctgggtgg

SEQ ID NO: 98194 - DNA, 516 bp, Homo sapiens
  chr19:53228719-53229235
  hypo
gttttgagcaggaaaactatgcgataggaagtgtatacattgccctatagcagaaagaccggggacgggaccagcctccaagcgacttcaaacccaaaaggaagcaacttccagactcttatgggcgtctcaatttgctctgggtgaaggaagacaggcaagaatttccaggtctgtgaggaccccacgtcccagggacagaagtgccagggacctgggaagtgcagacttaatacaaggcagagcaaaactcacgcgcctcggtaggacctttactccacgtgatccacttccgggtttgctgcgcaggacagaagccagtcccgggtggggcccccgaacatggtggcggggcctgggtgggacagaggcggggcgcgaggcggagagaccttgccctttagaacaggcaaagggcggggccgggaccagacctgtgcatctctccgcctcgcacccagcgcctctgtttttcgggtgtttggaggtgagagcggccaggaaggctgaggcatg

SEQ ID NO: 98195 - DNA, 14 bp, Homo sapiens
  chr19:53233353-53233367
  hypo
aacatgatgtaggc

SEQ ID NO: 98196 - DNA, 490 bp, Homo sapiens; identical to SEQ ID NO: 56595
  chr19:53237840-53238330
  hypo

SEQ ID NO: 98197 - DNA, 79 bp, Homo sapiens; identical to SEQ ID NO: 32865
  chr19:53241621-53241700
  hypo

SEQ ID NO: 98198 - DNA, 149 bp, Homo sapiens
  chr19:53242765-53242914
  hypo
taccaaatgttattttaccttcgattgtttgaaatgttaactgaaaacgggcaggaagcctccctgtgatattaggggtaatatgacggcacatcagaaacaatccaccaatcagaacccgggggatcgagtgctggagatcaagagga

SEQ ID NO: 98199 - DNA, 100 bp, Homo sapiens
  chr19:53297748-53297848
  hypo
tgtggctgattcccacgtgatggtctggaagcgccaataggctgtgttggtcttccttctctagaaaattccaggatgggccgggcatggcggctcaccc

SEQ ID NO: 98200 - DNA, 154 bp, Homo sapiens
  chr19:53316597-53316751
  hypo
cccagggagtggggcagggggcggcttattcactctggggattcgccatggacacgtctcaacagtgcaagctgctccccgtgtttccctgccccacttcgcccccgtaggggctgctccagggtaggcgggcgggggtggtaggaggtttttt

SEQ ID NO: 98201 - DNA, 42 bp, Homo sapiens
  chr19:53317557-53317599
  hypo
gtggggctgggcatgatggctcgtgtctgtaatcccagcatt

SEQ ID NO: 98202 - DNA, 27 bp, Homo sapiens
  chr19:53362266-53362293
  hypo
tacttcgctttttaaatgttgaaaaaa

SEQ ID NO: 98203 - DNA, 30 bp, Homo sapiens
  chr19:53362650-53362680
  hypo
agttttacgacatggcgacaggtgccctct

SEQ ID NO: 98204 - DNA, 30 bp, Homo sapiens
  chr19:53382158-53382188
  hypo
gagtaccggggcccacgtgacccaactgtc

SEQ ID NO: 98205 - DNA, 36 bp, Homo sapiens
  chr19:53398427-53398463
  hypo
ggtcctggggccgggcgtggtggctcacaccttaaa

SEQ ID NO: 98206 - DNA, 121 bp, Homo sapiens
  chr19:53412363-53412484
  hypo
ctccagcctgagcaaaaaagtgagactccatctcaaaaaaaaaagaaaatgttaataccatatttttctgaataactgttacaaaattacctatatccatgtggaacaggcgctttgtaac

SEQ ID NO: 98207 - DNA, 26 bp, Homo sapiens
  chr19:53412783-53412809
  hypo
gccactgcgcccgggggcacttttga

SEQ ID NO: 98208 - DNA, 18 bp, Homo sapiens
  chr19:53428257-53428275
  hypo
cccaagaaatactcttta

SEQ ID NO: 98209 - DNA, 30 bp, Homo sapiens; identical to SEQ ID NO: 32867
  chr19:53429034-53429064
  hypo

SEQ ID NO: 98210 - DNA, 35 bp, Homo sapiens
  chr19:53429314-53429349
  hypo
cactacataagaagggacaatcggccaggtgcggt

SEQ ID NO: 98211 - DNA, 38 bp, Homo sapiens; identical to SEQ ID NO: 32868
  chr19:53438069-53438107
  hypo

SEQ ID NO: 98212 - DNA, 697 bp, Homo sapiens; identical to SEQ ID NO: 56601
  chr19:53445370-53446067
  hypo

SEQ ID NO: 98213 - DNA, 157 bp, Homo sapiens; identical to SEQ ID NO: 56602
  chr19:53446325-53446482
  hypo

SEQ ID NO: 98214 - DNA, 35 bp, Homo sapiens; identical to SEQ ID NO: 32871
  chr19:53463665-53463700
  hypo

SEQ ID NO: 98215 - DNA, 26 bp, Homo sapiens
  chr19:53475611-53475637
  hypo
aaaatacacagcattgccaggcgcag

SEQ ID NO: 98216 - DNA, 154 bp, Homo sapiens; identical to SEQ ID NO: 32872
  chr19:53477543-53477697
  hypo

SEQ ID NO: 98217 - DNA, 25 bp, Homo sapiens
  chr19:53479270-53479295
  hypo
aataataataatggctgggcacggt

SEQ ID NO: 98218 - DNA, 24 bp, Homo sapiens
  chr19:53479534-53479558
  hypo
cccgagtgacagagtgagacttca

SEQ ID NO: 98219 - DNA, 22 bp, Homo sapiens
  chr19:53499829-53499851
  hypo
cgcccagccaaaaaagaaaact

SEQ ID NO: 98220 - DNA, 32 bp, Homo sapiens
  chr19:53506511-53506543
  hypo
agcgaaactccgtctccaagagaaaaaataat

SEQ ID NO: 98221 - DNA, 287 bp, Homo sapiens; identical to SEQ ID NO: 32875
  chr19:53507229-53507516
  hypo

SEQ ID NO: 98222 - DNA, 30 bp, Homo sapiens
  chr19:53508055-53508085
  hypo
ctcagagaacagtgtcgtggctgctggcca

SEQ ID NO: 98223 - DNA, 121 bp, Homo sapiens
  chr19:53509013-53509134
  hypo
agatggcgccactgcatgccagcttgggcaacgaaagcggaaaaaagaggccgggcatggtggctcacacctttgggagcactttgggaggctgaggtgggtaaatcacctgaggtccgga

SEQ ID NO: 98224 - DNA, 25 bp, Homo sapiens
  chr19:53516407-53516432
  hypo
ctccgtctcaaaaacaaaaagaaaa

SEQ ID NO: 98225 - DNA, 31 bp, Homo sapiens
  chr19:53520194-53520225
  hypo
ccaagattgcgccactgcactccagcctggg

SEQ ID NO: 98226 - DNA, 30 bp, Homo sapiens; identical to SEQ ID NO: 32876
  chr19:53550008-53550038
  hypo

SEQ ID NO: 98227 - DNA, 143 bp, Homo sapiens
  chr19:53601967-53602110
  hypo
ccaggacccctgactgcgagcgcatcacctgctggaaggcaaagcccctgcccaggatggccaccgggccccggtgatgtgtagagcgcggaagacccgggagctggagtaaggcggtggggacgcctcggcactggctgagg

SEQ ID NO: 98228 - DNA, 636 bp, Homo sapiens; identical to SEQ ID NO: 56609
  chr19:53606065-53606701
  hypo

SEQ ID NO: 98229 - DNA, 22 bp, Homo sapiens
  chr19:53624042-53624064
  hypo
tggtttaaaaacttggctgggc

SEQ ID NO: 98230 - DNA, 94 bp, Homo sapiens; identical to SEQ ID NO: 32877
  chr19:53667652-53667746
  hypo

SEQ ID NO: 98231 - DNA, 160 bp, Homo sapiens
  chr19:53668464-53668624
  hypo
tccagtatgaattcttcgatgatttgctaagtgtgaatactgagtgaaaaccttgacgcattcattacatttgaaaggcttttctccggtatggatgatctgatgcttagttaagtttgaatgcatactgaaggctttcccacactcattacacttgtaa

SEQ ID NO: 98232 - DNA, 30 bp, Homo sapiens; identical to SEQ ID NO: 32878
  chr19:53682616-53682646
  hypo

SEQ ID NO: 98233 - DNA, 50 bp, Homo sapiens; identical to SEQ ID NO: 32879
  chr19:53685320-53685370
  hypo

SEQ ID NO: 98234 - DNA, 160 bp, Homo sapiens; identical to SEQ ID NO: 32880
  chr19:53685609-53685769
  hypo

SEQ ID NO: 98235 - DNA, 39 bp, Homo sapiens
  chr19:53693898-53693937
  hypo
taggtaggccgggtgcggtagctcatgcctgtaatcccg

SEQ ID NO: 98236 - DNA, 635 bp, Homo sapiens; identical to SEQ ID NO: 12600
  chr19:53696029-53696664
  hypo

SEQ ID NO: 98237 - DNA, 198 bp, Homo sapiens
  chr19:53701620-53701818
  hypo
caacatataacacttctgacagcaaatgtgtgggagtttttttcccacacactaggcaattctccagtatacaccagttgcgtgtcctataattcaattcaattctgacactgtgcgcctggagttagagtcagatccaacaggttaaggtcttagtcccacaagaccacccccctgcccccccgccgccacttcaga

SEQ ID NO: 98238 - DNA, 36 bp, Homo sapiens
  chr19:53728436-53728472
  hypo
tacattttaaagagatttaaacggaagaaatacgtt

SEQ ID NO: 98239 - DNA, 35 bp, Homo sapiens
  chr19:53728771-53728806
  hypo
caaaaacaaaaaacgaaaaacaaaaacaaaaacaa

SEQ ID NO: 98240 - DNA, 21 bp, Homo sapiens
  chr19:53745484-53745505
  hypo
ggaatgtgtatttcaaaagca

SEQ ID NO: 98241 - DNA, 41 bp, Homo sapiens; identical to SEQ ID NO: 32883
  chr19:53756648-53756689
  hypo

SEQ ID NO: 98242 - DNA, 400 bp, Homo sapiens; identical to SEQ ID NO: 56618
  chr19:53757804-53758204
  hypo

SEQ ID NO: 98243 - DNA, 89 bp, Homo sapiens
  chr19:53764645-53764734
  hypo
aaataataaaaaggatattaattcaaacataggaaatattttaatatgatcctctgtaaattataaacggttataattttttaaattaa

SEQ ID NO: 98244 - DNA, 39 bp, Homo sapiens
  chr19:53786609-53786648
  hypo
gcgtgagccaccgcgcccggcctcaggttctttatttga

SEQ ID NO: 98245 - DNA, 29 bp, Homo sapiens
  chr19:53790981-53791010
  hypo
ccgcgcccggcccagcaattattaatctt

SEQ ID NO: 98246 - DNA, 74 bp, Homo sapiens
  chr19:53793745-53793819
  hypo
ctcctgtgttctgaccaggcacgatcaccaggttcccagtttttcagttttccgccacaacagaagcactgcac

SEQ ID NO: 98247 - DNA, 672 bp, Homo sapiens
  chr19:53794080-53794752
  hypo
gacaccaggatttgcaggtttcgtggcactgtcttcaaaataaaagctgcggataaacctgcaattcggcgctgctttcttgtgtttgtcaactcctgagcccccacgttgccacctgtctaccgcttcagggcagctaaggccccccagggcgtctcctccaacgcgccgatgcccaggcaggcccaccacctgcaaagccagcaaacgtttttgatctattaatctcttctactaattcttcatcctcattgatgtctgcagacacatacgttttagatccttcgaaactgttcaaagttatcttctcttgaatataggacttgtccaccgtctcgcgccaggatagcggctccaaccgcccaggcgatcggccttgtcccaacgggagggtcccgcggagggacggtccgagccccctaccattggaaatgccaaaccctgccctaagccgggcccagccacccaggctgacgacccacgattagcaccgcgcgctctggggagccgccaaggtgcagccacttcccagagctccgaagggtcagcaagaaaagaggaagccacgaacgctcccagcctccagctggaaaccacgcggtggagtgggcgcttgcgcagtgagcacctcgtgccccacgcccgtgtctcgttcttttttgtgcttgtttc

SEQ ID NO: 98248 - DNA, 166 bp, Homo sapiens
  chr19:53806010-53806176
  hypo
tgcgacgctgacacatatgtgcgtgttcacgccaggcttcgcacacatcactggccgtgtcatggggggacacgcaagacggaagcctccaggcgtgttcagcagaaacctcgagcccacactgtgcttcagagtctcccatgccgtccctaccttactccctaat

SEQ ID NO: 98249 - DNA, 30 bp, Homo sapiens
  chr19:53807154-53807184
  hypo
cctcccaggtgaccccgcagctcccgtact

SEQ ID NO: 98250 - DNA, 241 bp, Homo sapiens
  chr19:53813500-53813741
  hypo
gaaagaaacaacatgcaatcacggtggagccgcagtacacgtgtcagaaccacccaataatctgcatgttcgcacatcagtgtgttcagccacctacactcccggcagcgtttcacagcaggagacagacaagcacatgcgactctgtacaggggtaaacaggagcgattcagtaacatgcttcattcatacgcaccaggaaataggatgcagtgtttccgagaaggaggtatagaaacat

SEQ ID NO: 98251 - DNA, 35 bp, Homo sapiens; identical to SEQ ID NO: 32885
  chr19:53821073-53821108
  hypo

SEQ ID NO: 98252 - DNA, 32 bp, Homo sapiens
  chr19:53827528-53827560
  hypo
aaaaaaacttcgtctcaaataaataaataata

SEQ ID NO: 98253 - DNA, 34 bp, Homo sapiens
  chr19:53854270-53854304
  hypo
gaaatcaaacagttgacgggtagtacaaaccgac

SEQ ID NO: 98254 - DNA, 94 bp, Homo sapiens
  chr19:53854363-53854457
  hypo
tcgcatctgcctgaactccacatgtttcagaccgaagggaaaattggtaatcaagttgagaagtctatcaacagtgcttcgttggtttcaacat

SEQ ID NO: 98255 - DNA, 30 bp, Homo sapiens; identical to SEQ ID NO: 32886
  chr19:53886323-53886353
  hypo

SEQ ID NO: 98256 - DNA, 327 bp, Homo sapiens; identical to SEQ ID NO: 32887
  chr19:53886594-53886921
  hypo

SEQ ID NO: 98257 - DNA, 30 bp, Homo sapiens
  chr19:53938250-53938280
  hypo
gtgtgtgtggagacacgtatggggtaacct

SEQ ID NO: 98258 - DNA, 198 bp, Homo sapiens
  chr19:53977469-53977667
  hypo
cctctgtcggatgcacggagcagttcggtaaagtttataaccaagttttcacaaggcatggctcctgcttcttgaattcttgggggccaagtgggcccccataacggttattctgagcacaggttaaacattgtttacaaatggctcaaatgacagcagagagccacagcacatagaaatggcactttcgtggccggg

SEQ ID NO: 98259 - DNA, 30 bp, Homo sapiens
  chr19:53993423-53993453
  hypo
ttggaaatagggttccgtagagatgatttg

SEQ ID NO: 98260 - DNA, 163 bp, Homo sapiens
  chr19:54017722-54017885
  hypo
gggattacaggcgtgagccaccgcgcctagccctaactaatatattttaaataactttttgctcttggcacatggactaaaaccacatcactaggccttcaatgacgtccaatgtctgccatcttatttccactccagctccgccccaggcatagttgctttt

SEQ ID NO: 98261 - DNA, 43 bp, Homo sapiens
  chr19:54048833-54048876
  hypo
acactcagtaggccacactcccgatcacccagccacagtccta

SEQ ID NO: 98262 - DNA, 31 bp, Homo sapiens
  chr19:54072512-54072543
  hypo
gaccccagatgcacctcgttttaatctcttt

SEQ ID NO: 98263 - DNA, 43 bp, Homo sapiens
  chr19:54074925-54074968
  hypo
tcagagggacctgtactgggacgtgatgctggagaactacagt

SEQ ID NO: 98264 - DNA, 191 bp, Homo sapiens
  chr19:54081058-54081249
  hypo
atgtgggaagagctttagtcacggccatcagcttacacaacatcagaaaacgcacagtggggcgaaatcctacgaatgtaaggagtgcgggaaggcatgtaaccacctaaaccatctccgagaacatcagaggatccacaacagttgaagagccttttgaacgcagtagcccgctcgtatctatggtttcg

SEQ ID NO: 98265 - DNA, 43 bp, Homo sapiens
  chr19:54087416-54087459
  hypo
aaaggaggtacatgagttgtacgcaaaagctacaaaacagttg

SEQ ID NO: 98266 - DNA, 464 bp, Homo sapiens
  chr19:54109745-54110209
  hypo
tccaatgtggacaaaagcctccggcaaggggttctcgggacatatcaggtagtaggggcactatgagggtgagcgccgctgagacaccaaaataggccaagaagcagatgaagatcgaggtcacagtgcccaaggggatggagcggtgagggtggaggcggtgagggtggagggcttcttctcctgcgggacaggtatatgcaccgggcggtgagggtggagggcttcttctcctgcgggacaggtatatgcaccgggcggtgagggtggagggcttcttctcctgcaggacaggtatacgcactgggccaggaaaatgcacggaagtgaaggtacaaaaccctcttccctcttccccatctgagaacagggtagcctttaatgaaacctgtgcccagcggcagcccaaacagtgcccaaacccccgatgagacagaatgaccgtgttacctgtggtggcaatg

SEQ ID NO: 98267 - DNA, 27 bp, Homo sapiens
  chr19:54115041-54115068
  hypo
atttgaggtgaactggctgggcgcagt

SEQ ID NO: 98268 - DNA, 40 bp, Homo sapiens
  chr19:54115654-54115694
  hypo
cagcatagaaataggattggacgtggccgggtgcagtggc

SEQ ID NO: 98269 - DNA, 141 bp, Homo sapiens; identical to SEQ ID NO: 32891
  chr19:54120020-54120161
  hypo

SEQ ID NO: 98270 - DNA, 109 bp, Homo sapiens
  chr19:54120402-54120511
  hypo
caatagatttcttcttctattcgttggattcgtctgtgtcctattgagtttttttcacggctagagtattcgtgagaatgaaactaccgggctctctgatgggttagag

SEQ ID NO: 98271 - DNA, 447 bp, Homo sapiens
  chr19:54135107-54135554
  hypo
agtggggctggtttgtggactcgcctttgagtcgttggtctccgctcaatcaatattagataaaatgacagtattgggagaaatccagggggctctggaggaccgagggatcatattggaggcagatagggcagagaaaggtggaggaggtgggagtcgggtgtggctgtggaggaagctacttaaatccggatttgatctttgctagttcttatccctggacctgaacccaggcgcacatctggattagaagatgccaggctcagaggatcttcgtaaaggtaagccagaaaaaatgagaaccgaagcaaagacacgtgaagaagtggaaagcagctggcggcgggaaaaggcagagggaccaggcggccgaagctggtgcttcgtccacgtgggtggcagggacttcccacagaggctgtcatcgtttttgttgttgttgttttg

SEQ ID NO: 98272 - DNA, 38 bp, Homo sapiens
  chr19:54136227-54136265
  hypo
aaaccattttcaggcatgatgcgattcagatcttttag

SEQ ID NO: 98273 - DNA, 37 bp, Homo sapiens
  chr19:54137675-54137712
  hypo
gtcacttgatcatcacgttgtacctcagtggaaagga

SEQ ID NO: 98274 - DNA, 43 bp, Homo sapiens
  chr19:54140110-54140153
  hypo
atagtccattttggctgctgccgagatcctaatatatactgcc

SEQ ID NO: 98275 - DNA, 35 bp, Homo sapiens
  chr19:54141501-54141536
  hypo
gttagaaagaacctactggcccggcgtggtggctc

SEQ ID NO: 98276 - DNA, 304 bp, Homo sapiens
  chr19:54150799-54151103
  hypo
gagagacatgagtcacactgacggctttgcctgcctgcgatctctctatgtgtgttgattcttgcggaacaaggcgcttcgagcatctcctctgcccctacgcccgtgaccctgtccctcttcttgtctccattgccccccaagcgggtacatttgcccaccttctcacctgggacaccctgggcgtggatctcctcacctgcagcgctaggtgtgctcccagggtctccacatccctaacccccgcaaggctggcctctttacctgcaaagccccccgccgcggcctcctccctctaccatac

SEQ ID NO: 98277 - DNA, 30 bp, Homo sapiens; identical to SEQ ID NO: 32893
  chr19:54151509-54151539
  hypo

SEQ ID NO: 98278 - DNA, 226 bp, Homo sapiens
  chr19:54152257-54152483
  hypo
aagaggggtccaggctgggcacggtggttcccatcagggcgcccattaagaggggtccaggctgggcacggtggttcgcatcagagcacccgttaagaggggtccaggctgggcacggtagttcgcatcggagcaccagttaagagggatgcaggccgggcacggtggctctaatccgagcactttgggaggatcacccgaggtgaggagttcgagaacagcctgg

SEQ ID NO: 98279 - DNA, 46 bp, Homo sapiens; identical to SEQ ID NO: 32894
  chr19:54153202-54153248
  hypo

SEQ ID NO: 98280 - DNA, 34 bp, Homo sapiens; identical to SEQ ID NO: 32895
  chr19:54161841-54161875
  hypo

SEQ ID NO: 98281 - DNA, 162 bp, Homo sapiens
  chr19:54170238-54170400
  hypo
aaccaatccagaccccaaaagcgggttcttggatctcttgctggaaagaatttcgaggcaagtcacaacacagcgaaagaagcaagctgaggcctgggctcaatcctcctgcttcgtcctcccaaagtgctgggattacacgcatgatcccctgtgccctgc

SEQ ID NO: 98282 - DNA, 41 bp, Homo sapiens
  chr19:54171163-54171204
  hypo
tctgggcaacagagcaagacgcttgtcttaaaaaagagaga

SEQ ID NO: 98283 - DNA, 241 bp, Homo sapiens
  chr19:54196083-54196324
  hypo
cgcccggctatcaacaacttttcctacgtagaaattattcgggcactggtttatagaacctcacgtgggttcacgtagaattgaaggggacctcagcgtcccttgcagatgggatgtgcaatgtatttgagatgtactcgaacattgctgttgaggtgtgggcatcttttgctttttcctaattttaaatatgggactagtctgggtatggtgacttccaccagtaattctagcactttgg

SEQ ID NO: 98284 - DNA, 81 bp, Homo sapiens; identical to SEQ ID NO: 56629
  chr19:54206967-54207048
  hypo

SEQ ID NO: 98285 - DNA, 34 bp, Homo sapiens
  chr19:54212283-54212317
  hypo
tatttttgtgtgtgtgtgagacggagtctcgctc

SEQ ID NO: 98286 - DNA, 23 bp, Homo sapiens
  chr19:54224258-54224281
  hypo
ccgtcaaaaagaaacaaaaacaa

SEQ ID NO: 98287 - DNA, 173 bp, Homo sapiens
  chr19:54224587-54224760
  hypo
tatttttgattttttgagatgcgctctcattccgtttcccaggctggagtgcagcggcaggatccctgttgaccggaaactccgcctcccagcttccggcgattctcccacctcagcctgccgaatagttgggaatagagatgcccgccatcgtgtcctgctagttattattt

SEQ ID NO: 98288 - DNA, 65 bp, Homo sapiens
  chr19:54254581-54254646
  hypo
cagagaatgcttataatcagacgtggatgatgttgaagttttgcgtttgttttgttttgtttttt

SEQ ID NO: 98289 - DNA, 22 bp, Homo sapiens
  chr19:54261208-54261230
  hypo
cgagacttcatctcaaaaaata

SEQ ID NO: 98290 - DNA, 24 bp, Homo sapiens
  chr19:54269957-54269981
  hypo
gagattttattggttgaagatcgg

SEQ ID NO: 98291 - DNA, 83 bp, Homo sapiens
  chr19:54271335-54271418
  hypo
tttgtctgaagatgtatccttcgttgctgcctttttcggcttcatttccactggtttttttgttttgttttgttttgttttgt

SEQ ID NO: 98292 - DNA, 241 bp, Homo sapiens; identical to SEQ ID NO: 32899
  chr19:54271717-54271958
  hypo

SEQ ID NO: 98293 - DNA, 22 bp, Homo sapiens
  chr19:54302746-54302768
  hypo
tttttttttgagatggaatctc

SEQ ID NO: 98294 - DNA, 407 bp, Homo sapiens; identical to SEQ ID NO: 32900
  chr19:54313978-54314385
  hypo

SEQ ID NO: 98295 - DNA, 30 bp, Homo sapiens; identical to SEQ ID NO: 56630
  chr19:54371915-54371945
  hypo

SEQ ID NO: 98296 - DNA, 229 bp, Homo sapiens; identical to SEQ ID NO: 56631
  chr19:54372392-54372621
  hypo

SEQ ID NO: 98297 - DNA, 30 bp, Homo sapiens; identical to SEQ ID NO: 12610
  chr19:54373028-54373058
  hypo

SEQ ID NO: 98298 - DNA, 505 bp, Homo sapiens; identical to SEQ ID NO: 56633
  chr19:54382456-54382961
  hypo

SEQ ID NO: 98299 - DNA, 30 bp, Homo sapiens
  chr19:54395005-54395035
  hypo
accctcggaacctgacgaaacagaagaccc

SEQ ID NO: 98300 - DNA, 135 bp, Homo sapiens; identical to SEQ ID NO: 56636
  chr19:54411653-54411788
  hypo

SEQ ID NO: 98301 - DNA, 2 bp, Homo sapiens
  chr19:54412746-54412748
  hypo
ga

SEQ ID NO: 98302 - DNA, 161 bp, Homo sapiens; identical to SEQ ID NO: 56638
  chr19:54412808-54412969
  hypo

SEQ ID NO: 98303 - DNA, 99 bp, Homo sapiens; identical to SEQ ID NO: 56639
  chr19:54413008-54413107
  hypo

SEQ ID NO: 98304 - DNA, 31 bp, Homo sapiens; identical to SEQ ID NO: 12614
  chr19:54415929-54415960
  hypo

SEQ ID NO: 98305 - DNA, 30 bp, Homo sapiens
  chr19:55602807-55602837
  hypo
tataaatacgggtgcgggaaagtccctccg

SEQ ID NO: 98306 - DNA, 30 bp, Homo sapiens; identical to SEQ ID NO: 32906
  chr19:55606063-55606093
  hypo

SEQ ID NO: 98307 - DNA, 41 bp, Homo sapiens; identical to SEQ ID NO: 32907
  chr19:55609522-55609563
  hypo

SEQ ID NO: 98308 - DNA, 31 bp, Homo sapiens
  chr19:55671890-55671921
  hypo
cagaatatcaagaagccgtcacttgcccagg

SEQ ID NO: 98309 - DNA, 105 bp, Homo sapiens; identical to SEQ ID NO: 32908
  chr19:55740667-55740772
  hypo

SEQ ID NO: 98310 - DNA, 30 bp, Homo sapiens
  chr19:55741461-55741491
  hypo
cgtctgcgctgcagcgtgggacagctgggc

SEQ ID NO: 98311 - DNA, 93 bp, Homo sapiens
  chr19:55775275-55775368
  hypo
aatctaatttgaatgtttccacgggtgtatacataagtcaaaacttctcatgtagtacactttttttttttttttttttgagatggagtctca

SEQ ID NO: 98312 - DNA, 262 bp, Homo sapiens
  chr19:55798403-55798665
  hypo
acgggtcagaaggtcgccatcaagatcgtgaaccgggagaagctgtcggagtcggtgctgatgaaggtgtgtgcgcctgctgcagtgtgcctgcgggtgggggggcctccggggctgagggcaggggcggggccgtgctgacctcttttcccgtgtccccacccctcttgaccctcaggtggagcgggagatcgccatcctgaagctcatcgaacacccacatgtcctcaagctccacgacgtctacgagaacaagaaatat

SEQ ID NO: 98313 - DNA, 30 bp, Homo sapiens; identical to SEQ ID NO: 32911
  chr19:55799280-55799310
  hypo

SEQ ID NO: 98314 - DNA, 30 bp, Homo sapiens
  chr19:55814053-55814083
  hypo
cacttccccagaggcgggaaacacgagcca

SEQ ID NO: 98315 - DNA, 30 bp, Homo sapiens; identical to SEQ ID NO: 32912
  chr19:55824448-55824478
  hypo

SEQ ID NO: 98316 - DNA, 101 bp, Homo sapiens
  chr19:55838910-55839011
  hypo
gccaaaaagttaaatttaataaataaataaataaacactttagcacattgactttagaggtgtccacattgggcagaaacggccaggctctgctccccacc

SEQ ID NO: 98317 - DNA, 94 bp, Homo sapiens; identical to SEQ ID NO: 32914
  chr19:55848033-55848127
  hypo

SEQ ID NO: 98318 - DNA, 30 bp, Homo sapiens; identical to SEQ ID NO: 32915
  chr19:55853653-55853683
  hypo

SEQ ID NO: 98319 - DNA, 210 bp, Homo sapiens
  chr19:55857842-55858052
  hypo
atctccccttcacccggtctcccaggaaaggtgaaggagctttccgaaccaggcctagggagcccgcgttgccaccacggcccctggacaagtaccagctgcgtgagaccaagcggcggctgcagcaaggcctggacagtggcagccgacagggcctgctgggccctcgggcctgcgtgcacccatccccgctgcgccgggacccattct

SEQ ID NO: 98320 - DNA, 37 bp, Homo sapiens; identical to SEQ ID NO: 32916
  chr19:55858738-55858775
  hypo

SEQ ID NO: 98321 - DNA, 471 bp, Homo sapiens; identical to SEQ ID NO: 56668
  chr19:55865889-55866360
  hypo

SEQ ID NO: 98322 - DNA, 405 bp, Homo sapiens; identical to SEQ ID NO: 32918
  chr19:55872207-55872612
  hypo

SEQ ID NO: 98323 - DNA, 30 bp, Homo sapiens; identical to SEQ ID NO: 32919
  chr19:55903269-55903299
  hypo

SEQ ID NO: 98324 - DNA, 213 bp, Homo sapiens; identical to SEQ ID NO: 32920
  chr19:55912228-55912441
  hypo

SEQ ID NO: 98325 - DNA, 162 bp, Homo sapiens
  chr19:55944090-55944252
  hypo
aaggaatgtcatggaacaaggcgtcgtctctgttattataccacaagaaggaagcctctgaggacaccatagaacatggacatggcctccagcgctgacctcacgggccggcctcttcctctgtgatgacctcatgggaacgaggctttgtccctgtgatga

SEQ ID NO: 98326 - DNA, 30 bp, Homo sapiens; identical to SEQ ID NO: 56671
  chr19:55953357-55953387
  hypo

SEQ ID NO: 98327 - DNA, 279 bp, Homo sapiens; identical to SEQ ID NO: 56672
  chr19:55953783-55954062
  hypo

SEQ ID NO: 98328 - DNA, 514 bp, Homo sapiens
  chr19:55986209-55986723
  hypo
ttgtaatgcctctgcgtgggcaggtaaatgaggggggctgagctgagggcccctttcactactgcagagaccaaaatggcccgaggcaagggggacggaagtgggatccgcacctctgggctttcctagcctggcagccagctgggcagtgcattcccatccacgtctccaccctgcatggcagccgctttgtgtggttaatgctgacgtgaaaggaatgttgggctgagctggatgccaagggtttttacacgcacgaatgcacggagacatcagcaccaagaccctgtaaggtaggggtgggtccacaccaccgcagatcagccctgagttccagcctgcttgtggacttgggaaacggtgtgggaggctggaaaaatccactcattcaacaaacaagtaccgtctgcttctccatcagggcccatgctggttgtttggaatacctgggcagcaaagacacgaaaggtcctcgctgtcatgggacatagataaatgtcgctgagcatgtaag

SEQ ID NO: 98329 - DNA, 134 bp, Homo sapiens; identical to SEQ ID NO: 32922
  chr19:55993944-55994078
  hypo

SEQ ID NO: 98330 - DNA, 97 bp, Homo sapiens
  chr19:55995220-55995317
  hypo
caacctgctggttgttcagagcggggcagctgaggagttgctcactggcccgggccccggggaggcgggggatggcgaggccagcactggtgtggtc

SEQ ID NO: 98331 - DNA, 30 bp, Homo sapiens
  chr19:55995629-55995659
  hypo
gtgcaagtggtccccgcaggagctgggcct

SEQ ID NO: 98332 - DNA, 30 bp, Homo sapiens; identical to SEQ ID NO: 32923
  chr19:55998066-55998096
  hypo

SEQ ID NO: 98333 - DNA, 30 bp, Homo sapiens
  chr19:56011513-56011543
  hypo
gtttaccagaaggccgaccacggaggcccc

SEQ ID NO: 98334 - DNA, 30 bp, Homo sapiens
  chr19:56041496-56041526
  hypo
gccaggcgcagcagcgtcccgcgaggcctc

SEQ ID NO: 98335 - DNA, 119 bp, Homo sapiens
  chr19:56047528-56047647
  hypo
tgtcctccagcgcgcgggcagcctcctggccctgctggagctcctctaatgtcaggccgcccagaccctcctcctcgctgtcctccgaagcccctgcctccgccggcccttcctcagac

SEQ ID NO: 98336 - DNA, 31 bp, Homo sapiens
  chr19:56052608-56052639
  hypo
aggccccaggagtccacggctggccgcagag

SEQ ID NO: 98337 - DNA, 31 bp, Homo sapiens
  chr19:56066672-56066703
  hypo
caaattaaaacaagatcgattaaataatgat

SEQ ID NO: 98338 - DNA, 30 bp, Homo sapiens
  chr19:56089478-56089508
  hypo
ttccttaatgtttgcgaggggcagcgggag

SEQ ID NO: 98339 - DNA, 109 bp, Homo sapiens
  chr19:56089713-56089822
  hypo
gcgtggcgcgccaggtcggccaggcgcttgaactcccgctggcagcgcacgcactggaaggggcgcgctcccgagtgggtcaccccgtgctgccgcaggtgcgcccggc

SEQ ID NO: 98340 - DNA, 83 bp, Homo sapiens
  chr19:56104272-56104355
  hypo
agggccgcggccgacgcaaagaaggtcccgcagtcgcactggtacagggtgtcttccgagggctcggcggccgccgcaggtgc

SEQ ID NO: 98341 - DNA, 82 bp, Homo sapiens
  chr19:56104955-56105037
  hypo
ggagaagcggagctcgcagaccaggcagcagtagggtttctcaccagtgtggacgacctaggggtgcgggaggaagggcaca

SEQ ID NO: 98342 - DNA, 261 bp, Homo sapiens
  chr19:56108940-56109201
  hypo
gtggtgcagcaggccggtggagtcgcggaaccccttggggcaggcagagcagcggtagggccgctccccggtgtgcgagcgcaggtggttggctaggttgaagctgtgcttgaaacccttgccgcagcgcggacatgcgtggggcttgagcgctgtgtgccgggcaaagtggcgccgcaggtctgagcggtagcggaagctcttgccacattcactgcagtgaaacgggaccctgggggcggcagcggcgggcggtgctgg

SEQ ID NO: 98343 - DNA, 176 bp, Homo sapiens; identical to SEQ ID NO: 56680
  chr19:56112770-56112946
  hypo

SEQ ID NO: 98344 - DNA, 304 bp, Homo sapiens
  chr19:56113854-56114158
  hypo
tctccgacctggagcgccacagcatctcgcactcagagctgaagccgcaccagtgcaaggtttgcggcaagaccttcaagcgctccagccacctgcggcggcactgcaacatccatgccggcctgcggcccttccgctgcccgctgtgcccccgccgcttccgcgaggcgggcgagctggcgcaccaccaccgcgtgcactcgggggagcgcccgtaccagtgccccatctgccggctgcgctttacagaggccaacacgctccggcgccatgcgaagcgcaagcacccggaggccatgggggt

SEQ ID NO: 98345 - DNA, 39 bp, Homo sapiens; identical to SEQ ID NO: 32924
  chr19:56115322-56115361
  hypo

SEQ ID NO: 98346 - DNA, 30 bp, Homo sapiens
  chr19:56125725-56125755
  hypo
ggggagaggccctacgaatgcggcgtctgc

SEQ ID NO: 98347 - DNA, 92 bp, Homo sapiens
  chr19:56126760-56126852
  hypo
ttgagcaagcatcacgtggtgcacacgcgcgagcggccctacaagtgcgagctctgcggcaaggtcttcggctacccgcagagcctcacccg

SEQ ID NO: 98348 - DNA, 30 bp, Homo sapiens
  chr19:56127132-56127162
  hypo
ctggtccaccaggccgcccccgagcgcctg

SEQ ID NO: 98349 - DNA, 30 bp, Homo sapiens; identical to SEQ ID NO: 32925
  chr19:56128012-56128042
  hypo

SEQ ID NO: 98350 - DNA, 30 bp, Homo sapiens
  chr19:56133665-56133695
  hypo
caaggccttgaaggcgcgggggcagagcgc

SEQ ID NO: 98351 - DNA, 39 bp, Homo sapiens; identical to SEQ ID NO: 56682
  chr19:56159540-56159579
  hypo

SEQ ID NO: 98352 - DNA, 879 bp, Homo sapiens
  chr19:56163305-56164184
  hypo
gcgtgagccaccgcgcatggcctgtcctgggtttacttttaagttttggtccaccgtcgagggcagggccaccttgggcacctccttaactttcatcagtaaggaggaggtgcgcagtaggacctacctcacggggagggtgagacttgaataagtgaattcacctgaggcagggagacgagggtgatggctcggggtgtcggggggtgctgggaccgcgtgggttgaacccggcctcttggctcattttgtctcctcactctccttcctgggcctgcctcttcccatttcccactggtccaagatctggctgcgattcttcccctcctctctgccccttccttgcctgttgttctccgtctccacctgcaccggcccgtgcctctgctcgccgagatcctttcttcccatggccgtttcccttcccgtgtccgccccctcagtcttgtgccctgcccctcactttcgtgtccccgcctccacccctcagtgaaggacgccgacggggtcctctgccggtacaagaagatcctgggcaccttccagaagctcaagagcatgtcgcgggccttcgagcaccaccgcgtggacaggaacaccgtggcgctgaccacgcccatcgccgagctgctcattgtggcccccgagaagctggccgaggtgggcgagttcgacccctccaaggagcgcctgctcgagtactcccgccgctgctttctggccctggacgacgagacgctcaagaaggtgcaggcgctcaagaagagcaagctgctgctgcccatcacctaccgcttcaagcggtgatcgcaccacgcctccgcgcctccacccgggccttcctcccccgtggaccccggtggatgacctgcccctctc

SEQ ID NO: 98353 - DNA, 30 bp, Homo sapiens; identical to SEQ ID NO: 32927
  chr19:56170602-56170632
  hypo

SEQ ID NO: 98354 - DNA, 55 bp, Homo sapiens
  chr19:56176621-56176676
  hypo
gtgccctccatgcacggcagttctacgacacagggattggcgctgtcctaagtgc

SEQ ID NO: 98355 - DNA, 79 bp, Homo sapiens; identical to SEQ ID NO: 32929
  chr19:56176925-56177004
  hypo

SEQ ID NO: 98356 - DNA, 30 bp, Homo sapiens; identical to SEQ ID NO: 32930
  chr19:56177778-56177808
  hypo

SEQ ID NO: 98357 - DNA, 214 bp, Homo sapiens
  chr19:56178937-56179151
  hypo
ctggtatgtcagccctcgaagacactggatcctgcatcccacagtcagcccacagttcccagtgagatcagagcagctaatgctgcggatgctgttctgagacttcccgggcagccgcggctgctcatcgtgtcgtgccacccctgtgagggcagttgcacccctgcagtggcacctgcagttctgacagggcgtgaagggaagggactgagct

SEQ ID NO: 98358 - DNA, 309 bp, Homo sapiens
  chr19:56179450-56179759
  hypo
actgagctttaatgggagccttgcctgggtggctgtcagagaaggggtggggtgtgttgtgactcaccagtaggtcccgagcccaggtgacctgccagcattccacagcagcaggtagcagatgtgggtgtgaactttgtgcctttggagcgttctggaggatgttctagtttgaggttcccctgaggctgggcagatttgggagacatggtgcgttctccccgaggagcctctgtgtgccactgcccaggaccctcactggtcagataaggctggggtggggtgggcacgtggcgacccctccctcgt

SEQ ID NO: 98359 - DNA, 30 bp, Homo sapiens
  chr19:56180119-56180149
  hypo
gccttctgtgagtacgtggacatcaacgtc

SEQ ID NO: 98360 - DNA, 43 bp, Homo sapiens
  chr19:56190514-56190557
  hypo
tcctcacagcagccaagtttccgctctgggccccatctatgaa

SEQ ID NO: 98361 - DNA, 30 bp, Homo sapiens
  chr19:56196832-56196862
  hypo
gtacgccgtgcagacgctgaaggacttcca

SEQ ID NO: 98362 - DNA, 31 bp, Homo sapiens
  chr19:56197525-56197556
  hypo
gggtggtgaccagcaccgaaaacaaaacttg

SEQ ID NO: 98363 - DNA, 31 bp, Homo sapiens
  chr19:56197772-56197803
  hypo
tcagttagtggggatacgtgggatggggagg

SEQ ID NO: 98364 - DNA, 760 bp, Homo sapiens
  chr19:56198985-56199745
  hypo
aggggtgtggtcctccctgtgcgctggcctcacctgtgccccacgctgcccttccatctgcccatcccctcagaaggccgcttacccacccaagtccgtcaatccctgctggttctctcgtcctttcctcactcataaccccagatggtcacccttcggccccgctctgccacccacatgctccctggagcatcccatgcacccagccctgctgggcacaccacacgggggccagcctgggggcccctggacccggtgcaggtggggccgccagacagctgcctgctgcggctccgggcaaggggagccagggcctgctcgtcagggagaggcctgggcctggggagtgggttgggtggggacacaagtacaggacacaggtgcaaggcggcgtcttggagctggagcagacagaacttgctgaccagtgcacagtggttgggagggcggggcaggagaggcagggtccgccctggggctttggaggctggggcaatggccctgtgctcggcgggcctagggcctggttggagcctgtcctctgcactgtggaggggggcaagggtccacaggccttgggggtggagagaacagtgtcaggacagagtttgagggtaggcggggttgctgagaggatgctgcagtggaggccggggatatctcagcagcctcctggagggtccggccctgccttcctgtgtcctctctctcccttcccctcctgctcttggaaccaagggctcctcgctagcccactccc

SEQ ID NO: 98365 - DNA, 31 bp, Homo sapiens
  chr19:56200565-56200596
  hypo
cagccctctctttcttcggctctatctgacc

SEQ ID NO: 98366 - DNA, 308 bp, Homo sapiens; identical to SEQ ID NO: 32935
  chr19:56201637-56201945
  hypo

SEQ ID NO: 98367 - DNA, 81 bp, Homo sapiens
  chr19:56205700-56205781
  hypo
ctgtgtactcaaggagcgtctgagggcaggctcctctgagcctggaggcacctgtgaacacgcccccgctgccttcccccg

SEQ ID NO: 98368 - DNA, 27 bp, Homo sapiens
  chr19:56213277-56213304
  hypo
gtgtgctgtctgcatcgagcagagtct

SEQ ID NO: 98369 - DNA, 27 bp, Homo sapiens
  chr19:56213603-56213630
  hypo
ggcgtgagccaccgcgccgggccccca

SEQ ID NO: 98370 - DNA, 51 bp, Homo sapiens
  chr19:56223262-56223313
  hypo
tcagtgttttgcaggcgatgagtgctgcggcgatgtcgtcgcagcaggcac

SEQ ID NO: 98371 - DNA, 163 bp, Homo sapiens; identical to SEQ ID NO: 32936
  chr19:56227937-56228100
  hypo

SEQ ID NO: 98372 - DNA, 24 bp, Homo sapiens
  chr19:56308069-56308093
  hypo
tgagatggagtcttgctctgtcgc

SEQ ID NO: 98373 - DNA, 30 bp, Homo sapiens
  chr19:56352598-56352628
  hypo
ctttctaactgtaagcgtgcctgttgacca

SEQ ID NO: 98374 - DNA, 220 bp, Homo sapiens
  chr19:56369327-56369547
  hypo
gcagagaactgagggagttgccgccaacgagtttggctgacttgatttccagagagtggcctgaccccgctgctcctataacagagatcgtgtctcaaccggagagactcttgttcgtcatcgacagcttcgaagagctgcagggcggcttgaacgaacccgattcggatctgtgtggtgacttgatggagaaacggccggtgcaggtgcttctgagcag

SEQ ID NO: 98375 - DNA, 323 bp, Homo sapiens
  chr19:56461800-56462123
  hypo
acacacacacacagagacacacgtacgcagttgatcctcattgttcatggattctgtattcgtgaatgtgcctactcattaaaatgtattcgtaacccccaaatcaatacttacagcgctttcaagatcattcccagacagcaacgcagcaaaaaaatcgagctgacctcctagccgaggtcaaacaaggtgacgctctgccttctggctttagctctcaccccgtaagccagtgtcatttccacgcctatgtggtgccacacttttgtgctttgagttggtggttttgctgtttaaaatagcacccaggctgggcacgatgg

SEQ ID NO: 98376 - DNA, 87 bp, Homo sapiens
  chr19:56467207-56467294
  hypo
ataaatgtgacccaccttctccgggcagtggggtcccgcagttattctactgtctgcatgaaatccgggaggaagcctttgtaagcc

SEQ ID NO: 98377 - DNA, 36 bp, Homo sapiens
  chr19:56475819-56475855
  hypo
tgtagaagaaatagccggtcgggcgtggtggctcac

SEQ ID NO: 98378 - DNA, 603 bp, Homo sapiens
  chr19:56538614-56539217
  hypo
agtggccagactcccaggctccggtgacggagatcatgtcccgaccagaaaggctgttgttcatcattgacggtttcgatgacctgggctctgtcctcaacaatgacacaaagctctgcaaagactgggctgagaagcagcctccgttcaccctcatacgcagtctgctgaggaaggtcctgctccctgagtccttcctgatcgtcaccgtcagagacgtgggcacagagaagctcaagtcagaggtcgtgtctccccgttacctgttagttagaggaatctccggggaacaaagaatccacttgctccttgagcgcgggattggtgagcatcagaagacacaagggttgcgtgcgatcatgaacaaccgtgagctgctcgaccagtgccaggtgcccgccgtgggctctctcatctgcgtggccctgcagctgcaggacgtggtgggggagagcgtcgcccccttcaaccaaacgctcacaggcctgcacgccgcttttgtgtttcatcagctcacccctcgaggcgtggtccggcgctgtctcaatctggaggaaagagttgtcctgaagcgcttctgccgtatggctgtggagggagtgt

SEQ ID NO: 98379 - DNA, 11 bp, Homo sapiens
  chr19:56543707-56543718
  hypo
ctcaaaaaaaa

SEQ ID NO: 98380 - DNA, 271 bp, Homo sapiens; identical to SEQ ID NO: 32938
  chr19:56564932-56565203
  hypo

SEQ ID NO: 98381 - DNA, 30 bp, Homo sapiens; identical to SEQ ID NO: 32939
  chr19:56599652-56599682
  hypo

SEQ ID NO: 98382 - DNA, 30 bp, Homo sapiens
  chr19:56609839-56609869
  hypo
ccgcaaggtgatgccgcccgggtgattacg

SEQ ID NO: 98383 - DNA, 30 bp, Homo sapiens
  chr19:56615088-56615118
  hypo
cgacactcccaacccgtgccacacaccgtg

SEQ ID NO: 98384 - DNA, 156 bp, Homo sapiens
  chr19:56615754-56615910
  hypo
accgggagggtccctacgcacgccgccgacccgtgccacgcaccgggagggtccctacgcacgccgccgacccgtgccacgcaccgggagggtccctacgcacgccgacccgtgccacgcacagtgagggtctctacacacgccactgatccgtgc

SEQ ID NO: 98385 - DNA, 523 bp, Homo sapiens
  chr19:56617296-56617819
  hypo
ccacggcagtcaccgcgcattcccccctccgcgcccacggcagtcaccgcgcattcccccctccgcgcccacggcagtcaccgcgcattccgcattcccccctccgcgcccacggcagtcaccgcgcattccgccctccgcgcccacggcagtcaccgcgcattcccccttccgcgcccacggcagtcaccgcgcattcccccgccgcgccctgcagcctctgaactcctttccgtccctctggacttgctgccgtgtgctctgcacaggagagggacagcatctgttcctgcgtgtctgactcttccacacagcatggtgctgcggcgtgccagcgtgtcgctcctctctcgggctgaaccccactccactgtacggcggccacagtggtccatgcacccacccatcgctggaggacaactgtgagctgcttccacagcgggcattgtgtatactccagcttcaacgccgcgtccatccatttatttctgtggacgttcgcgttcatctctctgggaaggag

SEQ ID NO: 98386 - DNA, 229 bp, Homo sapiens; identical to SEQ ID NO: 32942
  chr19:56658487-56658716
  hypo

SEQ ID NO: 98387 - DNA, 463 bp, Homo sapiens
  chr19:56671131-56671594
  hypo
cgagtgcggcaaaacgtccctgaaaccagctcacctgctgcgccaccggcagagccactcgggcgagaagccgcacgcctgccctgagtgcgggaaggcctttcggcgcaaggagcacctgcggcgccaccgcgacacgcaccccggcagccccggcagccccgggcccgcgctgcgccctctgcccgcccgtgagaagccccacgcgtgctgcgagtgtggcaagaccttctactggcgcgagcacctggtgcgccaccgcaagacgcactcgggagcgcggccctttgcctgctgggagtgtggcaagggcttcgggcgccgcgagcacgtgctgcgccaccagcgcatccacggccgggcagcggccagcgcgcagggggcggtagctccgggcccggatggtggaggccccttcccgccctggcccttgggttagccgcctcccggccagcgccatctc

SEQ ID NO: 98388 - DNA, 295 bp, Homo sapiens
  chr19:56688202-56688497
  hypo
cagtggggcagaaggcatgggcgctgggggaccaggtcggcctgatccgatgatgggggaaggagaggcttaattgcttgcacacgtccaaactcctcaagatgtgtacattaaatgtgcgccatttttgtatctcgatgatgcctccataaagctaaaaaataaattcctctgtccttatcggaaatgcacctggcccccgcttcggaaaatgactggccgctctctccttgcagcgtgttccgcagctgtaggcacctgtcgtcctgccttcgatggctcctccctccgtccc

SEQ ID NO: 98389 - DNA, 185 bp, Homo sapiens
  chr19:56708206-56708391
  hypo
tgggaattaaagaggttttcccgccaggttccctaagcgcccctgctcagaaagcggagatcgaggctgaggcgggcagattgcttgagccgaggagttcgagaccagactgggcaaagcagcgagaccacgtctctatagtaaataaaaaaatgcactcgggcggtgtggtggtgtgctcctgc

SEQ ID NO: 98390 - DNA, 30 bp, Homo sapiens
  chr19:56709041-56709071
  hypo
tgaaaccaaccccccgcatgccagctccga

SEQ ID NO: 98391 - DNA, 130 bp, Homo sapiens; identical to SEQ ID NO: 12634
  chr19:56728658-56728788
  hypo

SEQ ID NO: 98392 - DNA, 31 bp, Homo sapiens; identical to SEQ ID NO: 32945
  chr19:56733401-56733432
  hypo

SEQ ID NO: 98393 - DNA, 65 bp, Homo sapiens
  chr19:56761105-56761170
  hypo
ctcctcagtgttgatacgatggcctcctcttccttcttttccatccaaggcgccacattgccttg

SEQ ID NO: 98394 - DNA, 80 bp, Homo sapiens
  chr19:56805612-56805692
  hypo
gtactgggcgattcacgtgggctctttctcccggaccctcacattaacccaggatgcaagtggttcggtggagacagcct

SEQ ID NO: 98395 - DNA, 167 bp, Homo sapiens
  chr19:56806260-56806427
  hypo
tatgactctgtctctacgacatgtccacagcaggcaagtccacagatagggaaagcagcttagtggttgcctaggaccgcgggagaggggggtgagcccagagagatggggagtgactgctcaggggcaccaggtttggaggcaatggccaacgggtacacggtttc

SEQ ID NO: 98396 - DNA, 217 bp, Homo sapiens; identical to SEQ ID NO: 32946
  chr19:56806988-56807205
  hypo

SEQ ID NO: 98397 - DNA, 30 bp, Homo sapiens; identical to SEQ ID NO: 32947
  chr19:56807607-56807637
  hypo

SEQ ID NO: 98398 - DNA, 32 bp, Homo sapiens
  chr19:56877556-56877588
  hypo
agactgaaacctttgggaggccgaggcgggcg

SEQ ID NO: 98399 - DNA, 541 bp, Homo sapiens; identical to SEQ ID NO: 12636
  chr19:56879474-56880015
  hypo

SEQ ID NO: 98400 - DNA, 198 bp, Homo sapiens; identical to SEQ ID NO: 56692
  chr19:56904505-56904703
  hypo

SEQ ID NO: 98401 - DNA, 577 bp, Homo sapiens; identical to SEQ ID NO: 12638
  chr19:56904723-56905300
  hypo

SEQ ID NO: 98402 - DNA, 841 bp, Homo sapiens; identical to SEQ ID NO: 56694
  chr19:56915126-56915967
  hypo

SEQ ID NO: 98403 - DNA, 113 bp, Homo sapiens; identical to SEQ ID NO: 56695
  chr19:56987541-56987654
  hypo

SEQ ID NO: 98404 - DNA, 172 bp, Homo sapiens; identical to SEQ ID NO: 12641
  chr19:56988111-56988283
  hypo

SEQ ID NO: 98405 - DNA, 280 bp, Homo sapiens; identical to SEQ ID NO: 56697
  chr19:56988383-56988663
  hypo

SEQ ID NO: 98406 - DNA, 17 bp, Homo sapiens
  chr19:57014397-57014414
  hypo
tgagtggcagcatattc

SEQ ID NO: 98407 - DNA, 30 bp, Homo sapiens
  chr19:57129767-57129797
  hypo
cagtgctccatactcgcttatctggtacct

SEQ ID NO: 98408 - DNA, 664 bp, Homo sapiens
  chr19:57133005-57133669
  hypo
cagtaagccccccatgccctgcgaggagaagaaaacctacgactgcagcgagtgtggcaaggcctttagccgaagctcgtccctgataaagcaccaaaggatccacacgggagaaaagccgtttgagtgtgacacctgtgggaagcacttcatcgagcgctcgtccctcaccatccaccagcgggtgcacacgggcgagaagccctatgcctgcggggactgcggcaaggccttcagccagcgcatgaacctcactgtgcaccagcgcacgcacacgggcgagaagccgtatgtgtgcgacgtgtgtggcaaggccttccggaagacttcctctctcacccagcacgagcggatccacacgggggagaagccctacgcgtgcggggactgcggcaaggccttcagccagaacatgcacctcatcgtgcaccagcgcacgcacaccggggagaagccgtacgtgtgccccgagtgcgggcgagccttcagccagaacatgcacctgaccgagcaccagcgcacgcacaccggggagaagccgtacgcctgcaaggagtgcggcaaggccttcaacaagagctcctcgctcaccctgcaccagaggaaccacaccggcgagaagccctacgtgtgcggcgagtgcggcaaggccttcagccagagc

SEQ ID NO: 98409 - DNA, 41 bp, Homo sapiens; identical to SEQ ID NO: 32956
  chr19:57134084-57134125
  hypo

SEQ ID NO: 98410 - DNA, 30 bp, Homo sapiens
  chr19:57137101-57137131
  hypo
tggcccagcacccacgctgagcttcctcag

SEQ ID NO: 98411 - DNA, 1449 bp, Homo sapiens
  chr19:57175021-57176470
  hypo
gagcccaggtgttgagtcaggcgtgggagctgggcaaaggcgtcccgaactgtctgcatgcgtcctctggtgtcggatgagcgcggaggagaagctgaaggccttcccgcagccgctgcactcgtagggcttctccccggtgtgcacgatgtggtgctggatcaggtaggagcggttgctgaaggccttgccgcactcggggcaggtgtagggccgctcgcccgtgtgcgtgcgctggtgcagggcgagcgaggagccctggctgaaagctttgccgcactcgccgcacttgtagggccgctctccggtgtggatcttctggtgctctataagcgaggacacgtggctgaaggcggccccgcattgcaggcacctgtagggccgctcaccggtgtgcacgaggcggtgctggaggaggtgggagcggttgctgaagcgcttgccgcagtcgtggcaggggtaaggccgctctccggtgtgcgtgcgctggtgctgcgtcaggtgcgacacctgggtgaaggccttggcgcactggccgcacgcgtagggcttctcgcctgtgtggatgcgccggtgctcggccagagaggcgctctggctgaagagcgcgccgcagtcctggcacgtgtagggcttctcgcccgtgtgcacgcgccggtgctgggtcaggtgcgcgatctgcgcgaaggccttggcgcactggccgcagcggtagggcttctcctccgtgtggatgcgctggtggcggatgagcgctgaggagaagcggaaggccttggcgcacgcggagcactcgtagggcttctcaccggtgtggatgcgctggtgctctatcagggacgagcggttgcggaacgccttggcgcactgggcgcacgcgtagggccgctcgcccgtgtgcacgcgccggtgctgggtcaggtgcgtgacgcgcgtgaaggccttgccgcagtcggcgcagcggtgcggcttctcgcccgtgtgcgtgcgccagtgggacgccaggtacgagccctggctgaaggccttgccgcactcgtggcaggcgtagggcttctcgcccgtgtgcgtgcgctggtgcagggtcaggtgcacgctctggctgaaggccttgccgcactcggggcacgcaaatggcttctccccggtgtggattctctggtgtaagatgaacgctgaacagtagctgaaggccttcccgcagtccccgcatttccacggcttcttggggcctccacctctctcccgctggcggctgtcaggatgcctctccttcgggctctccccaggcgcgctgcacctccgggaactgctgtcgtcggggacactggcttgggtagcagcagggctcgatatggttcttgggattcggctgaattcatcgcgttcctgcatgctgtccccagcagggtctcccttgcaggccacggcctctggctctggacagct

SEQ ID NO: 98412 - DNA, 104 bp, Homo sapiens
  chr19:57182262-57182366
  hypo
acttgcccaaaggcagccacacgtgtatgtgacatgctgtgatatgcagacaccgcttcacatgaacgagcacataacacaccgataaagtgttacatgccttt

SEQ ID NO: 98413 - DNA, 33 bp, Homo sapiens
  chr19:57189203-57189236
  hypo
tttttttttgagacagattctcgctgtctggag

SEQ ID NO: 98414 - DNA, 40 bp, Homo sapiens
  chr19:57190502-57190542
  hypo
tttattggtaaaagaaaaattcggccaagcgcggtggctc

SEQ ID NO: 98415 - DNA, 31 bp, Homo sapiens; identical to SEQ ID NO: 32958
  chr19:57229771-57229802
  hypo

SEQ ID NO: 98416 - DNA, 92 bp, Homo sapiens
  chr19:57254043-57254135
  hypo
cccaaggtgctgggattacaggcatgagcctcgtgcctggcccagtgaaggaatttctatgggaagcgcacgtggcctccagttacatggat

SEQ ID NO: 98417 - DNA, 29 bp, Homo sapiens
  chr19:57280106-57280135
  hypo
ccgcgcccggcctgggtgactttaataaa

SEQ ID NO: 98418 - DNA, 30 bp, Homo sapiens
  chr19:57335777-57335807
  hypo
cttggtgcgggtctccggctgcaaccaatc

SEQ ID NO: 98419 - DNA, 30 bp, Homo sapiens
  chr19:57344735-57344765
  hypo
cgtggtgtgtggtctcgtctctcttcttgt

SEQ ID NO: 98420 - DNA, 31 bp, Homo sapiens
  chr19:57373747-57373778
  hypo
gcaagactccgtctcaaaaaaaaacaaaaaa

SEQ ID NO: 98421 - DNA, 62 bp, Homo sapiens
  chr19:57388568-57388630
  hypo
tgtaggtactaaagctgaaagcgtgcacaccctctgaccccgccattcttattcagggagcc

SEQ ID NO: 98422 - DNA, 21 bp, Homo sapiens
  chr19:57451244-57451265
  hypo
gagaccctgtctcaaaaaaaa

SEQ ID NO: 98423 - DNA, 164 bp, Homo sapiens
  chr19:57477085-57477249
  hypo
ctcaggtgatctgcccaccttggccgcctcccaacgtgccgctaatagaggcgtgagctaccgcacccggccggattttcccttgcgtgactggcttatttcacttagcctaatgtcctcaagcgtcatccacgttgcagcacgtgtcagaacttctttccttt

SEQ ID NO: 98424 - DNA, 159 bp, Homo sapiens
  chr19:57491358-57491517
  hypo
tggatgggccaccctcaggggcggttctgtaggccacctcgcgggactccatgacagacgttaagcatggagcctggagaggaggaccccaggtggaggccctggtcccgcctttacgaatgggtagaaagggcttccgtctactgagacaggggtctt

SEQ ID NO: 98425 - DNA, 17 bp, Homo sapiens
  chr19:57509118-57509135
  hypo
tttttttttttttttga

SEQ ID NO: 98426 - DNA, 17 bp, Homo sapiens
  chr19:57509374-57509391
  hypo
tccccaggtgctgggat

SEQ ID NO: 98427 - DNA, 88 bp, Homo sapiens
  chr19:57543652-57543740
  hypo
tttccttaacaattttaattgcggtaaaatacatgtatcataaaacgtaccatttgagggccaggtgttgtggctcacgcctgtaatc

SEQ ID NO: 98428 - DNA, 43 bp, Homo sapiens
  chr19:57579642-57579685
  hypo
gctgttgttgttgttaaggagcgaggctctgaggagtgggtaa

SEQ ID NO: 98429 - DNA, 30 bp, Homo sapiens
  chr19:57602304-57602334
  hypo
aattattgtttttgtatctttcgttttttg

SEQ ID NO: 98430 - DNA, 77 bp, Homo sapiens; identical to SEQ ID NO: 32962
  chr19:57604470-57604547
  hypo

SEQ ID NO: 98431 - DNA, 31 bp, Homo sapiens; identical to SEQ ID NO: 32963
  chr19:57617000-57617031
  hypo

SEQ ID NO: 98432 - DNA, 36 bp, Homo sapiens
  chr19:57627882-57627918
  hypo
tttttgttttttcttttgagacggagtctcgctctg

SEQ ID NO: 98433 - DNA, 35 bp, Homo sapiens
  chr19:57628157-57628192
  hypo
gcgtgagacacggcgcctggccaatcccaggtatt

SEQ ID NO: 98434 - DNA, 87 bp, Homo sapiens
  chr19:57630720-57630807
  hypo
ctaagacttttaagtctcttccgcaccctctcttctgtctcttccacctggaggatgaccgcttttttgggggttttgttgttgttt

SEQ ID NO: 98435 - DNA, 253 bp, Homo sapiens
  chr19:57631106-57631359
  hypo
acaattcccggcgtggtttctagcaccagcccacctaccacaccccacctcgcttgaggctgaatgggtaacaggatgaacccgcccctgggctggttttctctgaaccctaactcctgccgttacgccccaccagctctaggccaggaactctatgtgccccggccacgctagagcccgtacctagacccgtaggtcgggaggcctgcgcccggcactgcgcagacgcagcgtgctgtgcccagaactcttc

SEQ ID NO: 98436 - DNA, 33 bp, Homo sapiens
  chr19:57631761-57631794
  hypo
gatgacttgagccttggggatcgagggtgtagt

SEQ ID NO: 98437 - DNA, 27 bp, Homo sapiens
  chr19:57656935-57656962
  hypo
tctcacgtctcaaaaaaaaaaaaagaa

SEQ ID NO: 98438 - DNA, 38 bp, Homo sapiens; identical to SEQ ID NO: 32964
  chr19:57689866-57689904
  hypo

SEQ ID NO: 98439 - DNA, 464 bp, Homo sapiens; identical to SEQ ID NO: 56720
  chr19:57831522-57831986
  hypo

SEQ ID NO: 98440 - DNA, 409 bp, Homo sapiens; identical to SEQ ID NO: 56721
  chr19:57832024-57832433
  hypo

SEQ ID NO: 98441 - DNA, 31 bp, Homo sapiens
  chr19:58006805-58006836
  hypo
aagccttgactgagtgcggtggctcacgcct

SEQ ID NO: 98442 - DNA, 23 bp, Homo sapiens
  chr19:58036047-58036070
  hypo
atgaagtaagatttattcattcg

SEQ ID NO: 98443 - DNA, 15 bp, Homo sapiens
  chr19:58038569-58038584
  hypo
cagcgcggcggactg

SEQ ID NO: 98444 - DNA, 376 bp, Homo sapiens; identical to SEQ ID NO: 56731
  chr19:58038923-58039299
  hypo

SEQ ID NO: 98445 - DNA, 31 bp, Homo sapiens; identical to SEQ ID NO: 32969
  chr19:58054994-58055025
  hypo

SEQ ID NO: 98446 - DNA, 30 bp, Homo sapiens
  chr19:58069204-58069234
  hypo
gatctctctaaggctcgatttccgaatcaa

SEQ ID NO: 98447 - DNA, 814 bp, Homo sapiens; identical to SEQ ID NO: 12669
  chr19:58070514-58071328
  hypo

SEQ ID NO: 98448 - DNA, 729 bp, Homo sapiens; identical to SEQ ID NO: 12672
  chr19:58125364-58126093
  hypo

SEQ ID NO: 98449 - DNA, 31 bp, Homo sapiens
  chr19:58161230-58161261
  hypo
aactacacacatacaacgagtgtataaaatg

SEQ ID NO: 98450 - DNA, 42 bp, Homo sapiens
  chr19:58177291-58177333
  hypo
tgatacttaaaatatctttgcgaggcccaagtaggtttacag

SEQ ID NO: 98451 - DNA, 43 bp, Homo sapiens
  chr19:58180748-58180791
  hypo
gtggaccttgttacattttaccgcagattttgtatttttgtgt

SEQ ID NO: 98452 - DNA, 33 bp, Homo sapiens
  chr19:58201149-58201182
  hypo
gagtgagactccgtctccaaaaaaaaaaaagaa

SEQ ID NO: 98453 - DNA, 413 bp, Homo sapiens; identical to SEQ ID NO: 12679
  chr19:58238325-58238738
  hypo

SEQ ID NO: 98454 - DNA, 249 bp, Homo sapiens; identical to SEQ ID NO: 56743
  chr19:58238987-58239236
  hypo

SEQ ID NO: 98455 - DNA, 30 bp, Homo sapiens
  chr19:58297458-58297488
  hypo
ttgccatttcctaacgcccgtcgcggtgga

SEQ ID NO: 98456 - DNA, 82 bp, Homo sapiens
  chr19:58298050-58298132
  hypo
agagcgagactggccgagggaccggcttaggcaaaggcctggaggcacgactgcgccaggaggattcggaacacagggacat

SEQ ID NO: 98457 - DNA, 38 bp, Homo sapiens
  chr19:58304690-58304728
  hypo
tacaggcatgagcccccgtgcctggccaaaactgcaca

SEQ ID NO: 98458 - DNA, 40 bp, Homo sapiens; identical to SEQ ID NO: 32974
  chr19:58316855-58316895
  hypo

SEQ ID NO: 98459 - DNA, 39 bp, Homo sapiens
  chr19:58317134-58317173
  hypo
acaggcgtgagccaccacgccctgccctcaatttctttt

SEQ ID NO: 98460 - DNA, 30 bp, Homo sapiens
  chr19:58336936-58336966
  hypo
tgagccaccgtgcccggcaatggctgggct

SEQ ID NO: 98461 - DNA, 246 bp, Homo sapiens; identical to SEQ ID NO: 12685
  chr19:58385531-58385777
  hypo

SEQ ID NO: 98462 - DNA, 31 bp, Homo sapiens; identical to SEQ ID NO: 32976
  chr19:58416014-58416045
  hypo

SEQ ID NO: 98463 - DNA, 30 bp, Homo sapiens
  chr19:58442850-58442880
  hypo
taagccaccacgcccggccttacacatcat

SEQ ID NO: 98464 - DNA, 30 bp, Homo sapiens
  chr19:58457579-58457609
  hypo
cactaaccttggtgcgcacaacagccacat

SEQ ID NO: 98465 - DNA, 59 bp, Homo sapiens
  chr19:58465095-58465154
  hypo
gtgagcctcttctgaagcctgcgcatactcatggcttcggctgcagcagcagctaaagg

SEQ ID NO: 98466 - DNA, 34 bp, Homo sapiens; identical to SEQ ID NO: 32977
  chr19:58472251-58472285
  hypo

SEQ ID NO: 98467 - DNA, 28 bp, Homo sapiens
  chr19:58483127-58483155
  hypo
cgcacccggcccagaataaaggcttttg

SEQ ID NO: 98468 - DNA, 45 bp, Homo sapiens
  chr19:58484261-58484306
  hypo
ggctcatgcctgtaatcccagcgaggaaggcagatcacgaggtca

SEQ ID NO: 98469 - DNA, 29 bp, Homo sapiens
  chr19:58519550-58519579
  hypo
aagactccgtctaaataaataaataaata

SEQ ID NO: 98470 - DNA, 92 bp, Homo sapiens
  chr19:58524544-58524636
  hypo
acagagggtcagggaggtgagcggcgtgcagctgagagctctgttgttggccccgaccacaggtgtgtctcggtgcttcagaacagtctgag

SEQ ID NO: 98471 - DNA, 22 bp, Homo sapiens
  chr19:58548346-58548368
  hypo
cggccacaaaaggttattttaa

SEQ ID NO: 98472 - DNA, 684 bp, Homo sapiens
  chr19:58551436-58552120
  hypo
cctgaaccctgcttcagcagtcgtcctctgtgcactctgtgcacacagccccggggggcttggggagcagagggctcacagtgctcgggcctccctagttagtcagtgctgcagtgtgtgtcctcgtgggcttctggaggcgcacaggggtgtggagtatgagtgaagagggtacttgtcttcagcggccctcggtgtcaccacaggttcctgcccagcagccacatggagggacagaatgacagccctgcagccactcttgcctgcgcctcaggggtgctgcagggatgttcggggaaagtctgccctccccagaaggcctggagaattgggggctctgggaagaacaggcccctctcacgatccctttctcccgcacagttctggtatctctggactcggtcgaaccccaggactggagtttcggtgaggaggaagatgggaagagtccaaggtcccagaaagaaccatcgcaggtgagcccggggcccccagctccgtgctcctgcaccccagggcatgcgtgccgcttctgggacggcctcaaggatgccccatccaaggactgtgtgaggttgtccccagcgctcccaggaagcccggcctccaaactccccgcctgccccacagattccccaagcttcctggggctcagtgctgggcgagggcagtcagtgcagctgt

SEQ ID NO: 98473 - DNA, 32 bp, Homo sapiens
  chr19:58555624-58555656
  hypo
agcgaaactccgtctcaaaacaaaacaaaaca

SEQ ID NO: 98474 - DNA, 291 bp, Homo sapiens; identical to SEQ ID NO: 32980
  chr19:58556343-58556634
  hypo

SEQ ID NO: 98475 - DNA, 67 bp, Homo sapiens
  chr19:58556944-58557011
  hypo
tgctggagctacagcttcctgcgcttccagctcacgatgcggctgcgctccataaaggcagaggaca

SEQ ID NO: 98476 - DNA, 319 bp, Homo sapiens; identical to SEQ ID NO: 32981
  chr19:58557756-58558075
  hypo

SEQ ID NO: 98477 - DNA, 25 bp, Homo sapiens
  chr19:58561890-58561915
  hypo
ttcattttgttttgtttgagacggc

SEQ ID NO: 98478 - DNA, 185 bp, Homo sapiens
  chr19:58563695-58563880
  hypo
cagcatcagcatcccaaagcacgggaacaacaggcgcgacaccgcgcactgccctgggacagagcctttggggatgacgcccgttccttggttgttcggtggtggtggggaggatggctcctgaggggcagctgccgaacagtcctgtgcttgccattctaggcgtctgagctgattctggatgc

SEQ ID NO: 98479 - DNA, 737 bp, Homo sapiens
  chr19:58564631-58565368
  hypo
ccttgtatcttaaaggacagaacggaggacacaggggccgtattgagcagaggaagggcctggacttggctcagtcactggggtcctccgtgcccctggggagcacagggagatgccaaggccatccactcactacaggtgacccatctccctcgccctccacagggtcccgggcccgcttgcctctgaagccgagtatctgggacgagcctgaggaccttctcgcagggccctcctcagacctgcgggcagaagggactgtgatctcgagccccaagggtccaagtgctcagagaatcagtccccgaaggagaaacaggaacactgaccagagcggccgccaccagccatccctcaagcacaccaaaggtggtacccaagaggctgttgcaggcatctcggtagtgccgcgtgggccccgaggtgggcggcccttccagtgtgccgactgtgggatggtcttcacctgggtcacccacttcatcgagcaccagaagacccatcgcgaggaagggccctttccgtgccccgagtgtggcaaggtcttcctgcacaactccgtcctcactgagcatggcaagatccacctgctggagccaccgaggaagaaagccccccggagcaagggcccccgggagtccgtcccacccagggatggagcccagggcccagtggcccctcgcagccccaaaagacccttccagtgtagcgtctgcgggaaggccttcccctggatg

SEQ ID NO: 98480 - DNA, 26 bp, Homo sapiens
  chr19:58590371-58590397
  hypo
tcttcgattttgctagtcttaattat

SEQ ID NO: 98481 - DNA, 36 bp, Homo sapiens; identical to SEQ ID NO: 32983
  chr19:58593732-58593768
  hypo

SEQ ID NO: 98482 - DNA, 482 bp, Homo sapiens
  chr19:58595752-58596234
  hypo
gtcaaataacctagcatggggcggcactaaatggctgcaggaaagccgagtcttcttccacatccggcggctcccctcggatgcgagcgctggcccagggtgtgtttacagaggtgagggcttcccgtggacccttctcgttgggagcgcttagcctcaggagcggattcagggcacaggcagaggacgtccacaaacaccacaggaagccgccacccaggggcgtggaaaggcccaatgcctcgtctgggattcacggccggcaaagcggcccctccggaacgggacagcacagcggctcacctctgcgcctctgggggtgcggggggagcctcgccctccacgctctctgggggaccgcccgccctagcccccgcctgggcttcgcgggtggacggttgggggccccgggcgccccccagcgcgtagcttttctccttctcgtgggtcttctggtgctcggctagggccaggctgaagtg

SEQ ID NO: 98483 - DNA, 30 bp, Homo sapiens
  chr19:58596911-58596941
  hypo
cagcgcatgccccgcgcctgctgctgcaga

SEQ ID NO: 98484 - DNA, 366 bp, Homo sapiens
  chr19:58598367-58598733
  hypo
ttcagcttctgaaacattagtcgtggctgagacctcccacctgccctagagaagggaggacccgccgcagccccacagccacaggagcaggctaggagccagccctggccagggactctaacccaggtgcactgcaggaggcagcccccttcgcaccacaaagattccgccctcacgctcccaccagggtgggttctgggcctcagcgctgtggacgtttggggccacagccctctgctgagcactggtgatggggagggggatgcctctaagctgaggccaaggcccctcacccacctgctcgtgcccacccacctgctcggtgttggcagggccgtcctcttcggtctttgcttctctgaccct

SEQ ID NO: 98485 - DNA, 43 bp, Homo sapiens
  chr19:58605133-58605176
  hypo
aatcacttttttttttggagacggagtctcgccctgtcaccca

SEQ ID NO: 98486 - DNA, 105 bp, Homo sapiens; identical to SEQ ID NO: 56757
  chr19:58609254-58609359
  hypo

SEQ ID NO: 98487 - DNA, 53 bp, Homo sapiens; identical to SEQ ID NO: 12690
  chr19:58609472-58609525
  hypo

SEQ ID NO: 98488 - DNA, 318 bp, Homo sapiens; identical to SEQ ID NO: 12691
  chr19:58609712-58610030
  hypo

SEQ ID NO: 98489 - DNA, 29 bp, Homo sapiens
  chr19:58623721-58623750
  hypo
aaaaacatactcaaggctgggcgtggtgg

SEQ ID NO: 98490 - DNA, 27 bp, Homo sapiens
  chr19:58628395-58628422
  hypo
aagcgcgtgctttaggggacatgtgag

SEQ ID NO: 98491 - DNA, 591 bp, Homo sapiens; identical to SEQ ID NO: 12692
  chr19:58661716-58662307
  hypo

SEQ ID NO: 98492 - DNA, 542 bp, Homo sapiens; identical to SEQ ID NO: 12693
  chr19:58665952-58666494
  hypo

SEQ ID NO: 98493 - DNA, 238 bp, Homo sapiens; identical to SEQ ID NO: 12694
  chr19:58666550-58666788
  hypo

SEQ ID NO: 98494 - DNA, 982 bp, Homo sapiens; identical to SEQ ID NO: 56763
  chr19:58694196-58695178
  hypo

SEQ ID NO: 98495 - DNA, 157 bp, Homo sapiens
  chr19:58711830-58711987
  hypo
attggtgggggacaagcgaggtacgggtgggcagcagtagttcagaactaagtaggaagatggttctgaggaggtgacgtttgagctcagacctgaatgggaaaggcgaaccaggtgaagatgttggggaaggtgaaccaggcgaagatgttgggga

SEQ ID NO: 98496 - DNA, 690 bp, Homo sapiens
  chr19:58830637-58831327
  hypo
aaaggagaccctgtacgtgcgaagagtgtggcaaggcctttggacagagaagtcaccttgttcagcacaccagtgagaagctgtatgcatgccaggaatgtgggtgtaccttcagcaacaattcatctctagtcaagcactggcacgtccacacaggcgagaagccctacatgtgtggccactgtggcaagtgcttccgagagagctcatcccttgccaagcaccagcgtgtgcacacaggtgagaagccatacgtgtgtggtgagtgtggacgcaccttcagcgagagcacacaccttgtacagcactggtgattccacaccggggaaaagccatttgcctgccaagagcagcaaagcctttgctgacttctcggccctccttgcatgccacggaacctacacgggtgagaggccctacgagtgccgggtatgctgcaaggcattcagccccagcttgtccctggctgagcacatacgctgccacacgggagagaagctgtatgcgtgtcaggaatgtgggaaagctttcagccacagctcatccctcagcaagcaccagcaggtacacacaggtgagtggccctatgtgtgtgcagaatgtggaaaggccttcagccaggggtcctacctgacccagcacctcaagatccacagcggtgagaagccgtacatacgtggtgagtaaagg

SEQ ID NO: 98497 - DNA, 166 bp, Homo sapiens; identical to SEQ ID NO: 12699
  chr19:58858590-58858756
  hypo

SEQ ID NO: 98498 - DNA, 27 bp, Homo sapiens
  chr19:58858901-58858928
  hypo
cgaaggtgacgtcggggatgggtccct

SEQ ID NO: 98499 - DNA, 30 bp, Homo sapiens; identical to SEQ ID NO: 12701
  chr19:58859150-58859180
  hypo

SEQ ID NO: 98500 - DNA, 30 bp, Homo sapiens
  chr19:58869409-58869439
  hypo
gaacacgatggacccgtctccattcctgaa

SEQ ID NO: 98501 - DNA, 158 bp, Homo sapiens
  chr19:58872590-58872748
  hypo
tagttgacaaaaagaggttaacggggagcagaggtaggagggaagggtatgcggctctgtaagggcaacacggggatccttcgtgatggaaatattctgcatctcagttgtgatattgtactctagtttttctttctcttctctttttttgagacaga

SEQ ID NO: 98502 - DNA, 166 bp, Homo sapiens; identical to SEQ ID NO: 56771
  chr19:58874183-58874349
  hypo

SEQ ID NO: 98503 - DNA, 121 bp, Homo sapiens; identical to SEQ ID NO: 33000
  chr19:58874822-58874943
  hypo

SEQ ID NO: 98504 - DNA, 119 bp, Homo sapiens; identical to SEQ ID NO: 33001
  chr19:58878555-58878674
  hypo

SEQ ID NO: 98505 - DNA, 30 bp, Homo sapiens
  chr19:58887171-58887201
  hypo
ctgcagcctgtcaggcgtcggcccaccctg

SEQ ID NO: 98506 - DNA, 30 bp, Homo sapiens
  chr19:58905964-58905994
  hypo
gggtgagggcactccggttggggggtctta

SEQ ID NO: 98507 - DNA, 61 bp, Homo sapiens; identical to SEQ ID NO: 56775
  chr19:58907575-58907636
  hypo

SEQ ID NO: 98508 - DNA, 33 bp, Homo sapiens; identical to SEQ ID NO: 33002
  chr19:58915037-58915070
  hypo

SEQ ID NO: 98509 - DNA, 32 bp, Homo sapiens; identical to SEQ ID NO: 33003
  chr19:58915309-58915341
  hypo

SEQ ID NO: 98510 - DNA, 72 bp, Homo sapiens; identical to SEQ ID NO: 56779
  chr19:58920315-58920387
  hypo

SEQ ID NO: 98511 - DNA, 167 bp, Homo sapiens; identical to SEQ ID NO: 12705
  chr19:58951233-58951400
  hypo

SEQ ID NO: 98512 - DNA, 554 bp, Homo sapiens; identical to SEQ ID NO: 12706
  chr19:58951525-58952079
  hypo

SEQ ID NO: 98513 - DNA, 32 bp, Homo sapiens; identical to SEQ ID NO: 33006
  chr19:58964229-58964261
  hypo

SEQ ID NO: 98514 - DNA, 30 bp, Homo sapiens
  chr19:58975114-58975144
  hypo
tgagtagacatcttcgatcattccagatct

SEQ ID NO: 98515 - DNA, 30 bp, Homo sapiens
  chr19:58991826-58991856
  hypo
ccggggctagccaccggggaaagcacagag

SEQ ID NO: 98516 - DNA, 30 bp, Homo sapiens
  chr19:59008279-59008309
  hypo
agaattacagtgcacggccaccaccaatga

SEQ ID NO: 98517 - DNA, 30 bp, Homo sapiens
  chr19:59028505-59028535
  hypo
aacgcgcgggctggcgctgcttacggctgt

SEQ ID NO: 98518 - DNA, 30 bp, Homo sapiens; identical to SEQ ID NO: 33007
  chr19:59028749-59028779
  hypo

SEQ ID NO: 98519 - DNA, 30 bp, Homo sapiens
  chr19:59067545-59067575
  hypo
ctgcaggacctctgcggcctccttgttcag

SEQ ID NO: 98520 - DNA, 150 bp, Homo sapiens
  chr20:276871-277021
  hypo
gactggaaagtgcaaacggcccaagtcagtggctcccctgagaccaataccagcagttgggatgaagggaatctgcctgttaacaaggtttcctaggatctgatgcacagttcttgatccacggcgtcagaaataaagtggttaaataaa

SEQ ID NO: 98521 - DNA, 62 bp, Homo sapiens
  chr20:309114-309176
  hypo
cctcctttaagcttggtgctccggctctgggcctttcttgcgctctattttttttttttttt

SEQ ID NO: 98522 - DNA, 23 bp, Homo sapiens
  chr20:338667-338690
  hypo
gcgaaactccatctcaaaaaaat

SEQ ID NO: 98523 - DNA, 243 bp, Homo sapiens
  chr20:371969-372212
  hypo
tatgcgcggctgcccccgcacaagcatgtggctcggcccactgaggtcctggctggtacccagctcctctacgcctttttcactcggacccatggggacatgcacagcctggtgcgaagccgccaccgtatccctgagcctgaggctgccgtgctcttccgccagatggccaccgccctggcgcactgtcaccagcacggtctggtcctgcgtgatctcaagctgtgtcgctttgtcttcgct

SEQ ID NO: 98524 - DNA, 30 bp, Homo sapiens
  chr20:376991-377021
  hypo
gagcctgggcgtggcgctcttcaccatgct

SEQ ID NO: 98525 - DNA, 30 bp, Homo sapiens; identical to SEQ ID NO: 33011
  chr20:377335-377365
  hypo

SEQ ID NO: 98526 - DNA, 30 bp, Homo sapiens; identical to SEQ ID NO: 33012
  chr20:398167-398197
  hypo

SEQ ID NO: 98527 - DNA, 299 bp, Homo sapiens
  chr20:399990-400289
  hypo
atctgggcttcaaggacctcacgctgcagccgcggggccctctggagccaggccccccaaagcccggggtcccccaggaacccggacgggggcagccagatgcagtgcctgagcccccaccggtaagctgtccttggcctcagtatcctcttctgtgcccctcccttgcctcaccctgcccagtcgggctcacagcaccctctgctcccaggtgggctggcagtgccccgggtgcaccttcatcaacaagcccacgcggcctggctgtgagatgtgctgccgggcgcgccccgaggcct

SEQ ID NO: 98528 - DNA, 130 bp, Homo sapiens
  chr20:401015-401145
  hypo
gcattccccttggacccggtgctgcccctggccaccccactcctgttcccgtctcagctcctcggcttcgtcacttccccacccctgacgttgagtggctccaccagccctggcccgggccctgccctgc

SEQ ID NO: 98529 - DNA, 555 bp, Homo sapiens
  chr20:401566-402121
  hypo
agaggagcctggtgctgaacacggagcccgccgagtgccccgtgtgctactcggtgctggcgcccggcgaggccgtggtgctgcgtgagtgtctgcacaccttctgcaggtgcggcccccagtcccacccccggcaatgcagcttaatcaaagccgccaattacgcagggctggacgtgggtggggccctgtgctctgatacctcattggacgcccgcgaaaacctacgaggtaggctccgtctccccatgttgcggacgaggaacctgagggaaagagaggcccagcgccttaccccaggcccacggctcatgagagaagcagcctagacgtgagcgcaggcgtggggggagactcccttcccctctacctttcgccgcccgggctcctgcagccacgctgctctcagcctcgctgtgggcatctgccagtttctgagtctcctgtcatggcccccccacccctgaatgtggggaacacagacccgctcaccacagcggacccttgtggagccgcccctgggtgacaggctccgtgcctgcctcctgcagctta

SEQ ID NO: 98530 - DNA, 117 bp, Homo sapiens; identical to SEQ ID NO: 33015
  chr20:413053-413170
  hypo

SEQ ID NO: 98531 - DNA, 44 bp, Homo sapiens
  chr20:417444-417488
  hypo
gctttttttggttttaaagtgcgtagtggtggctgggcgtggtg

SEQ ID NO: 98532 - DNA, 150 bp, Homo sapiens; identical to SEQ ID NO: 33016
  chr20:488506-488656
  hypo

SEQ ID NO: 98533 - DNA, 24 bp, Homo sapiens
  chr20:491107-491131
  hypo
ctcgcccagcccaagaatatgtct

SEQ ID NO: 98534 - DNA, 30 bp, Homo sapiens
  chr20:516099-516129
  hypo
ataaatacacaaaacactggccgggcgcgg

SEQ ID NO: 98535 - DNA, 295 bp, Homo sapiens; identical to SEQ ID NO: 56805
  chr20:590303-590598
  hypo

SEQ ID NO: 98536 - DNA, 104 bp, Homo sapiens; identical to SEQ ID NO: 56806
  chr20:590967-591071
  hypo

SEQ ID NO: 98537 - DNA, 92 bp, Homo sapiens
  chr20:631994-632086
  hypo
ggttctggccctcagagcctacggttctagcacggaaggcaggtgtctagacaggacgttaaaagccagtgggctgtaatcccagcactttg

SEQ ID NO: 98538 - DNA, 30 bp, Homo sapiens; identical to SEQ ID NO: 33017
  chr20:688395-688425
  hypo

SEQ ID NO: 98539 - DNA, 361 bp, Homo sapiens; identical to SEQ ID NO: 56809
  chr20:708540-708901
  hypo

SEQ ID NO: 98540 - DNA, 474 bp, Homo sapiens; identical to SEQ ID NO: 56810
  chr20:708944-709418
  hypo

SEQ ID NO: 98541 - DNA, 30 bp, Homo sapiens
  chr20:799688-799718
  hypo
tgccgggatcacaggcgtgagccaccgcgc

SEQ ID NO: 98542 - DNA, 3 bp, Homo sapiens
  chr20:807352-807355
  hypo
att

SEQ ID NO: 98543 - DNA, 214 bp, Homo sapiens
  chr20:926438-926652
  hypo
gcaaagaattaggttgtgttccgtccattcactcacggctctgctcccacgcatggctgcgctatgcacactgccctgcagcttcctttgtctgctgcacaatgggctctggacggagccctgttggcgcaatgagtgagccctacatcaagcttcgtcatcgctgcatcgctttgcaccgtgtggctgggccgccatcagtacagccaactgc

SEQ ID NO: 98544 - DNA, 37 bp, Homo sapiens; identical to SEQ ID NO: 33021
  chr20:1276609-1276646
  hypo

SEQ ID NO: 98545 - DNA, 30 bp, Homo sapiens
  chr20:1276986-1277016
  hypo
tcccaccccttactcggacccacagcctca

SEQ ID NO: 98546 - DNA, 30 bp, Homo sapiens; identical to SEQ ID NO: 33022
  chr20:1286615-1286645
  hypo

SEQ ID NO: 98547 - DNA, 159 bp, Homo sapiens
  chr20:1323451-1323610
  hypo
gcaggacacccaaacacgtatgcaatgcgtacactggaagttaaggtccatgacgacggggactcttttgtttactattgtgttataggaccttaataaatatttcttcagtgagtcactggaaccacacttacagtatattaaaaatatgcatagaac

SEQ ID NO: 98548 - DNA, 30 bp, Homo sapiens; identical to SEQ ID NO: 33024
  chr20:1425545-1425575
  hypo

SEQ ID NO: 98549 - DNA, 30 bp, Homo sapiens; identical to SEQ ID NO: 33025
  chr20:1426332-1426362
  hypo

SEQ ID NO: 98550 - DNA, 193 bp, Homo sapiens; identical to SEQ ID NO: 33026
  chr20:1435436-1435629
  hypo

SEQ ID NO: 98551 - DNA, 985 bp, Homo sapiens; identical to SEQ ID NO: 56820
  chr20:1783320-1784305
  hypo

SEQ ID NO: 98552 - DNA, 30 bp, Homo sapiens
  chr20:2113542-2113572
  hypo
actgtaggctgtgtccggcgcagttcctag

SEQ ID NO: 98553 - DNA, 31 bp, Homo sapiens; identical to SEQ ID NO: 33028
  chr20:2143498-2143529
  hypo

SEQ ID NO: 98554 - DNA, 31 bp, Homo sapiens
  chr20:2150415-2150446
  hypo
caacaccacgacaacccggcttggatcctta

SEQ ID NO: 98555 - DNA, 850 bp, Homo sapiens; identical to SEQ ID NO: 56823
  chr20:2187673-2188523
  hypo

SEQ ID NO: 98556 - DNA, 305 bp, Homo sapiens; identical to SEQ ID NO: 33030
  chr20:2308757-2309062
  hypo

SEQ ID NO: 98557 - DNA, 30 bp, Homo sapiens; identical to SEQ ID NO: 33031
  chr20:2321545-2321575
  hypo

SEQ ID NO: 98558 - DNA, 30 bp, Homo sapiens
  chr20:2397911-2397941
  hypo
ggtgaacaggctgttcggcgtggaagcctc

SEQ ID NO: 98559 - DNA, 278 bp, Homo sapiens; identical to SEQ ID NO: 56824
  chr20:2444390-2444668
  hypo

SEQ ID NO: 98560 - DNA, 30 bp, Homo sapiens; identical to SEQ ID NO: 12726
  chr20:2489270-2489300
  hypo

SEQ ID NO: 98561 - DNA, 30 bp, Homo sapiens
  chr20:2636505-2636535
  hypo
gggagcagggctgtcgtgcaactgggcagg

SEQ ID NO: 98562 - DNA, 28 bp, Homo sapiens
  chr20:2645502-2645530
  hypo
ctggacaacatagggagacctcgactct

SEQ ID NO: 98563 - DNA, 28 bp, Homo sapiens
  chr20:2646009-2646037
  hypo
cagtcacgattttaggtgtgtacaattg

SEQ ID NO: 98564 - DNA, 22 bp, Homo sapiens
  chr20:2674696-2674718
  hypo
cgggctgtctatggctctgaga

SEQ ID NO: 98565 - DNA, 208 bp, Homo sapiens
  chr20:2739579-2739787
  hypo
gtttcactctccagcccgggggcttcagggcctggcatactcctaattacggtaggtctctggctgggtctggcctcccccgccccacctggccctgagatgtgcttgctctctaaaggccttcatcctgtgctcaagcctccccgctagcagccccacagggatggggagctggggtccaagtcttcctccccggggcccatctaga

SEQ ID NO: 98566 - DNA, 31 bp, Homo sapiens; identical to SEQ ID NO: 33035
  chr20:2751260-2751291
  hypo

SEQ ID NO: 98567 - DNA, 30 bp, Homo sapiens
  chr20:2820172-2820202
  hypo
acaatgcaacgctttcgtgatggaaattat

SEQ ID NO: 98568 - DNA, 193 bp, Homo sapiens; identical to SEQ ID NO: 33036
  chr20:2820434-2820627
  hypo

SEQ ID NO: 98569 - DNA, 30 bp, Homo sapiens
  chr20:2843510-2843540
  hypo
tgtgtcaggacctgcgtgtgctcaatgctg

SEQ ID NO: 98570 - DNA, 179 bp, Homo sapiens; identical to SEQ ID NO: 33037
  chr20:2939674-2939853
  hypo

SEQ ID NO: 98571 - DNA, 130 bp, Homo sapiens
  chr20:3003331-3003461
  hypo
cagtgcaggtgtagggcgtacaggtacctttgtcgtcattgatgccatgctggacatgatgcatacagaacggaaggtggacgtgtatggctttgtgagccggatccgggcacagcgctgccagatggtg

SEQ ID NO: 98572 - DNA, 30 bp, Homo sapiens; identical to SEQ ID NO: 33038
  chr20:3019131-3019161
  hypo

SEQ ID NO: 98573 - DNA, 30 bp, Homo sapiens
  chr20:3066628-3066658
  hypo
tcaggccatggcgtcggtcttttcaggaat

SEQ ID NO: 98574 - DNA, 16 bp, Homo sapiens
  chr20:3073375-3073391
  hypo
acgcagccagacaccc

SEQ ID NO: 98575 - DNA, 359 bp, Homo sapiens; identical to SEQ ID NO: 56847
  chr20:3073560-3073919
  hypo

SEQ ID NO: 98576 - DNA, 46 bp, Homo sapiens
  chr20:3109207-3109253
  hypo
aaagccaagaaaaaacaaagccgggcggagtggctcacacctataa

SEQ ID NO: 98577 - DNA, 301 bp, Homo sapiens; identical to SEQ ID NO: 56849
  chr20:3154655-3154956
  hypo

SEQ ID NO: 98578 - DNA, 31 bp, Homo sapiens; identical to SEQ ID NO: 33042
  chr20:3175799-3175830
  hypo

SEQ ID NO: 98579 - DNA, 158 bp, Homo sapiens
  chr20:3202085-3202243
  hypo
gcatctggcttgtccacggagttcagggtacttagcttcctattaggagaaaacgttttctgtctatctttctttctgtctatctttcaaagtagcctcattgttcttcagtgatgtcccaatttgtcccgggtgtggctggcgagggcgcgtggccc

SEQ ID NO: 98580 - DNA, 30 bp, Homo sapiens; identical to SEQ ID NO: 33044
  chr20:3204883-3204913
  hypo

SEQ ID NO: 98581 - DNA, 136 bp, Homo sapiens
  chr20:3208370-3208506
  hypo
tccagagccagcctgggaggacgtggagggctggcgaatggggcgtgggcagggtctgccagtcaaggcctgtgctcagcgtccatgacatccaagtacttggcttcaatgattcggggcagcaggatatagctgt

SEQ ID NO: 98582 - DNA, 42 bp, Homo sapiens; identical to SEQ ID NO: 33045
  chr20:3208778-3208820
  hypo

SEQ ID NO: 98583 - DNA, 30 bp, Homo sapiens
  chr20:3209930-3209960
  hypo
tgctatgcctgcagcgcctggggagctacc

SEQ ID NO: 98584 - DNA, 49 bp, Homo sapiens
  chr20:3211454-3211503
  hypo
cccccgatgctctgcccggctatggtcttctgcacgtctgtgggggtgc

SEQ ID NO: 98585 - DNA, 35 bp, Homo sapiens
  chr20:3211813-3211848
  hypo
gtacaaggggaacctgcgtgcgatgtcctcccgga

SEQ ID NO: 98586 - DNA, 30 bp, Homo sapiens
  chr20:3212162-3212192
  hypo
cgcgccacctccatcgcagtcttagtgctt

SEQ ID NO: 98587 - DNA, 155 bp, Homo sapiens
  chr20:3214741-3214896
  hypo
gggtgccccggcatcggtgaagagcatggccatgagcaggtccaggttgcagttgggctcattgttgtcagggtccctggcgaagcggcgaagcatggtccgcagcacgttatccagggaggtggccgtctcgttcaggacgatgctggcctgcg

SEQ ID NO: 98588 - DNA, 941 bp, Homo sapiens; identical to SEQ ID NO: 12741
  chr20:3220009-3220950
  hypo

SEQ ID NO: 98589 - DNA, 299 bp, Homo sapiens; identical to SEQ ID NO: 12742
  chr20:3229180-3229479
  hypo

SEQ ID NO: 98590 - DNA, 238 bp, Homo sapiens; identical to SEQ ID NO: 56855
  chr20:3229526-3229764
  hypo

SEQ ID NO: 98591 - DNA, 437 bp, Homo sapiens; identical to SEQ ID NO: 12744
  chr20:3451348-3451785
  hypo

SEQ ID NO: 98592 - DNA, 30 bp, Homo sapiens
  chr20:3576319-3576349
  hypo
aagttccttcgagatcgcagatgtaggcag

SEQ ID NO: 98593 - DNA, 30 bp, Homo sapiens
  chr20:3594928-3594958
  hypo
tccatagtttgggggcgtgggcggtaggta

SEQ ID NO: 98594 - DNA, 30 bp, Homo sapiens; identical to SEQ ID NO: 12746
  chr20:3632574-3632604
  hypo

SEQ ID NO: 98595 - DNA, 237 bp, Homo sapiens; identical to SEQ ID NO: 56860
  chr20:3641310-3641547
  hypo

SEQ ID NO: 98596 - DNA, 173 bp, Homo sapiens; identical to SEQ ID NO: 56861
  chr20:3641773-3641946
  hypo

SEQ ID NO: 98597 - DNA, 30 bp, Homo sapiens
  chr20:3728771-3728801
  hypo
agccccacaggccgcggttccccacctcac

SEQ ID NO: 98598 - DNA, 151 bp, Homo sapiens
  chr20:3763352-3763503
  hypo
tcttgttggaacctgcggtgaggtagctgggttaaacaggagcacctgggcaagcaggcaatgctcctcctgctcactcgagagcaggtggggcttccttgtggccttctggtctccaactccagggctcggatttcgggagggaaggtgg

SEQ ID NO: 98599 - DNA, 99 bp, Homo sapiens
  chr20:3781391-3781490
  hypo
gaggctgctgggccacagccccgtgcttcggaacatcaccaactcccaggcgcccgacggccggaggaagagcgaggcgggcagtggagctgccagcag

SEQ ID NO: 98600 - DNA, 30 bp, Homo sapiens
  chr20:3820924-3820954
  hypo
ccactgcactccagtcgctgcactctcgcc

SEQ ID NO: 98601 - DNA, 168 bp, Homo sapiens
  chr20:3838302-3838470
  hypo
acactctcagggaaccgggacaccctctggcatctcttcaatacccttcagcggcggcccggctgggtggagtacttcattgcggcactgaggggctgtgagctagttgatctcgcggacgaagtggcctctgtctaccagagctaccagcctcgtgagcgtcctgcc

SEQ ID NO: 98602 - DNA, 30 bp, Homo sapiens
  chr20:3838714-3838744
  hypo
cagtgggtgatactgcgggacgatgcgtgt

SEQ ID NO: 98603 - DNA, 150 bp, Homo sapiens
  chr20:3909804-3909954
  hypo
agcattttcttttcaaagtgtgtgcacagagtgaggaggccagcctgggcaacatagtgagttgagacctgtctctacaaaaaaataattacgaaaattagccaggtgtgctggtgtgcacctgtagacgcagctacagactgaggcggg

SEQ ID NO: 98604 - DNA, 56 bp, Homo sapiens
  chr20:4085051-4085107
  hypo
tcaaaactcatgttgtagaggcgcaaaagccattcggcaccctttcatgtttttgt

SEQ ID NO: 98605 - DNA, 892 bp, Homo sapiens; identical to SEQ ID NO: 56870
  chr20:4129264-4130156
  hypo

SEQ ID NO: 98606 - DNA, 30 bp, Homo sapiens
  chr20:4133638-4133668
  hypo
agttatgtgtcagccgagggcttcctaaga

SEQ ID NO: 98607 - DNA, 30 bp, Homo sapiens
  chr20:4168217-4168247
  hypo
tctccaggctgggccgtgagcaggtgggcc

SEQ ID NO: 98608 - DNA, 30 bp, Homo sapiens; identical to SEQ ID NO: 33055
  chr20:4665554-4665584
  hypo

SEQ ID NO: 98609 - DNA, 30 bp, Homo sapiens
  chr20:4786492-4786522
  hypo
cgcacaggctgctggcgaggaccgcaacgt

SEQ ID NO: 98610 - DNA, 1406 bp, Homo sapiens; identical to SEQ ID NO: 56872
  chr20:4803015-4804421
  hypo

SEQ ID NO: 98611 - DNA, 31 bp, Homo sapiens
  chr20:4865129-4865160
  hypo
cagctagctgtgctggcgggtgtgagtggac

SEQ ID NO: 98612 - DNA, 147 bp, Homo sapiens
  chr20:4869815-4869962
  hypo
gtgggactctgcaggtgcagtcgcttgagcgagtcttaaagaacgagaagtgcttcgccacgtgtgtgggggattatgggtattccgggcagagagaggggaggtgcaaaacaagagccacaggacggacccaggaaccctcagagg

SEQ ID NO: 98613 - DNA, 218 bp, Homo sapiens
  chr20:4951347-4951565
  hypo
actccaccctgggtgatagagcaagaacctgtttcagaaaaagtaagaaaaggaaaaggaaacacaactggagattgtgttttacacgcacctaagtgatgtggcgtagacctgtccatatgctttccattacaattcgctgagttacatttgcttatgcaccaaggtccaagttcaaagccgtatgagaagtccccgttagtggagtcaagacctag

SEQ ID NO: 98614 - DNA, 106 bp, Homo sapiens; identical to SEQ ID NO: 33057
  chr20:4966923-4967029
  hypo

SEQ ID NO: 98615 - DNA, 30 bp, Homo sapiens; identical to SEQ ID NO: 33058
  chr20:4990305-4990335
  hypo

SEQ ID NO: 98616 - DNA, 54 bp, Homo sapiens; identical to SEQ ID NO: 33059
  chr20:5072893-5072947
  hypo

SEQ ID NO: 98617 - DNA, 18 bp, Homo sapiens
  chr20:5135599-5135617
  hypo
ttccgattctgcttagag

SEQ ID NO: 98618 - DNA, 47 bp, Homo sapiens; identical to SEQ ID NO: 33060
  chr20:5178250-5178297
  hypo

SEQ ID NO: 98619 - DNA, 790 bp, Homo sapiens; identical to SEQ ID NO: 12758
  chr20:5296191-5296981
  hypo

SEQ ID NO: 98620 - DNA, 42 bp, Homo sapiens; identical to SEQ ID NO: 12759
  chr20:5297005-5297047
  hypo

SEQ ID NO: 98621 - DNA, 193 bp, Homo sapiens; identical to SEQ ID NO: 12760
  chr20:5297225-5297418
  hypo

SEQ ID NO: 98622 - DNA, 168 bp, Homo sapiens; identical to SEQ ID NO: 12761
  chr20:5297672-5297840
  hypo

SEQ ID NO: 98623 - DNA, 30 bp, Homo sapiens
  chr20:5565428-5565458
  hypo
aagctttacgaacagcgtgaacttacctgt

SEQ ID NO: 98624 - DNA, 38 bp, Homo sapiens
  chr20:5610248-5610286
  hypo
gggattacaggcgtgagccaccacgcctggcccatctt

SEQ ID NO: 98625 - DNA, 30 bp, Homo sapiens; identical to SEQ ID NO: 33066
  chr20:5610575-5610605
  hypo

SEQ ID NO: 98626 - DNA, 22 bp, Homo sapiens
  chr20:5732772-5732794
  hypo
ggctcacacctgtaatctcaac

SEQ ID NO: 98627 - DNA, 181 bp, Homo sapiens; identical to SEQ ID NO: 33067
  chr20:5734497-5734678
  hypo

SEQ ID NO: 98628 - DNA, 197 bp, Homo sapiens
  chr20:5762407-5762604
  hypo
agctaccacacccggccaatcttacactacttctttccttccagctccaatcaaaaagctcctctgccttgttttcgggactctgtgtaatctgctgcctggaatatttgttcaaaatatttaataaccaatacagcagtattgcaatatttcaacaaccggcacgactgtacaggtgcacacgagctgaatagagg

SEQ ID NO: 98629 - DNA, 93 bp, Homo sapiens; identical to SEQ ID NO: 33069
  chr20:5765407-5765500
  hypo

SEQ ID NO: 98630 - DNA, 19 bp, Homo sapiens
  chr20:5766163-5766182
  hypo
aggcacgatgtctcacgcc

SEQ ID NO: 98631 - DNA, 36 bp, Homo sapiens; identical to SEQ ID NO: 33071
  chr20:5801859-5801895
  hypo

SEQ ID NO: 98632 - DNA, 19 bp, Homo sapiens
  chr20:5812594-5812613
  hypo
ttttcatttctttctttga

SEQ ID NO: 98633 - DNA, 138 bp, Homo sapiens
  chr20:5812852-5812990
  hypo
ctgggattacaagcatgagcctctgcgctgggcctctcttcatttctagagaataatggaagtgaatccaggagacagacttctccacattgttaaaagctcctcgggcagagtggaactgcacgtgttgccactttg

SEQ ID NO: 98634 - DNA, 26 bp, Homo sapiens
  chr20:5819405-5819431
  hypo
ggagcgagactctgtctcaaaaataa

SEQ ID NO: 98635 - DNA, 580 bp, Homo sapiens; identical to SEQ ID NO: 12762
  chr20:5891857-5892437
  hypo

SEQ ID NO: 98636 - DNA, 30 bp, Homo sapiens
  chr20:5918825-5918855
  hypo
ccatgttttagttacgttgtattattccac

SEQ ID NO: 98637 - DNA, 91 bp, Homo sapiens
  chr20:5934378-5934469
  hypo
aaagtgctaggattccagacgtgagccaccgcacccagccgcatactttttttttttaggaaaactagacgtttgaggtccaggaccctcc

SEQ ID NO: 98638 - DNA, 30 bp, Homo sapiens; identical to SEQ ID NO: 33073
  chr20:6019325-6019355
  hypo

SEQ ID NO: 98639 - DNA, 155 bp, Homo sapiens
  chr20:6021569-6021724
  hypo
agaaaccctaggagcggatggggtcgtttttgaccgtctgtgtcttcctttttgcgctcagatccagttcgatgagacgcgttatcccagaagctgggctaactgacggtctggagccccagcgggtaatcatcaaaggccgggtttttgtaggc

SEQ ID NO: 98640 - DNA, 31 bp, Homo sapiens; identical to SEQ ID NO: 33075
  chr20:6022361-6022392
  hypo

SEQ ID NO: 98641 - DNA, 202 bp, Homo sapiens; identical to SEQ ID NO: 33076
  chr20:6022781-6022983
  hypo

SEQ ID NO: 98642 - DNA, 31 bp, Homo sapiens; identical to SEQ ID NO: 33077
  chr20:6023267-6023298
  hypo

SEQ ID NO: 98643 - DNA, 33 bp, Homo sapiens; identical to SEQ ID NO: 33078
  chr20:6302594-6302627
  hypo

SEQ ID NO: 98644 - DNA, 24 bp, Homo sapiens
  chr20:6302866-6302890
  hypo
ggcgtgagccactgctcccagcct

SEQ ID NO: 98645 - DNA, 30 bp, Homo sapiens; identical to SEQ ID NO: 56886
  chr20:6404265-6404295
  hypo

SEQ ID NO: 98646 - DNA, 144 bp, Homo sapiens
  chr20:6663945-6664089
  hypo
taccatttctttagtaagctgcgaggttatatttcttcctcctgtcacagaagcagaatttgatctgtgtttgttggcgcgggtagatgtgtgaagatcaaacgcaagctttgtcaaacagacggtagtcttctactgaggaaa

SEQ ID NO: 98647 - DNA, 35 bp, Homo sapiens
  chr20:6732280-6732315
  hypo
taaggcagaattggccaggcacggaggctcactcc

SEQ ID NO: 98648 - DNA, 35 bp, Homo sapiens
  chr20:6732554-6732589
  hypo
caaaaggagactccgtctcaaaaaaaaaaagaaaa

SEQ ID NO: 98649 - DNA, 1193 bp, Homo sapiens; identical to SEQ ID NO: 56887
  chr20:6748426-6749619
  hypo

SEQ ID NO: 98650 - DNA, 53 bp, Homo sapiens
  chr20:6759074-6759127
  hypo
taaaacctgcaacagccaactcgaaattccccgtgaccagacttttggacacc

SEQ ID NO: 98651 - DNA, 162 bp, Homo sapiens
  chr20:6837484-6837646
  hypo
cagctctccaaactcacgctggctccagtgcacccctgctagaacccaggccaagacaattgtcataactgaccatcaggaaatatcaattaagagtgtggatattattaacgttctgttagataccctaacacattatactgcatatcgattttttctttt

SEQ ID NO: 98652 - DNA, 36 bp, Homo sapiens; identical to SEQ ID NO: 33080
  chr20:6861140-6861176
  hypo

SEQ ID NO: 98653 - DNA, 30 bp, Homo sapiens; identical to SEQ ID NO: 56888
  chr20:7812334-7812364
  hypo

SEQ ID NO: 98654 - DNA, 34 bp, Homo sapiens
  chr20:8731860-8731894
  hypo
gattacaggcatgagccaccgcgcccggccggaa

SEQ ID NO: 98655 - DNA, 1412 bp, Homo sapiens; identical to SEQ ID NO: 56892
  chr20:9048804-9050216
  hypo

SEQ ID NO: 98656 - DNA, 30 bp, Homo sapiens; identical to SEQ ID NO: 12766
  chr20:9112082-9112112
  hypo

SEQ ID NO: 98657 - DNA, 30 bp, Homo sapiens; identical to SEQ ID NO: 56894
  chr20:9329023-9329053
  hypo

SEQ ID NO: 98658 - DNA, 30 bp, Homo sapiens
  chr20:9460920-9460950
  hypo
aaagccaagaggagcgcatggaaacccggt

SEQ ID NO: 98659 - DNA, 508 bp, Homo sapiens; identical to SEQ ID NO: 12767
  chr20:9487211-9487719
  hypo

SEQ ID NO: 98660 - DNA, 209 bp, Homo sapiens; identical to SEQ ID NO: 56896
  chr20:9487788-9487997
  hypo

SEQ ID NO: 98661 - DNA, 28 bp, Homo sapiens
  chr20:9513984-9514012
  hypo
agttttagccaggcgcggtggctcacgc

SEQ ID NO: 98662 - DNA, 28 bp, Homo sapiens
  chr20:9598483-9598511
  hypo
gagccacgacgcccggcaagaatcccaa

SEQ ID NO: 98663 - DNA, 31 bp, Homo sapiens; identical to SEQ ID NO: 12785
  chr20:10491693-10491724
  hypo

SEQ ID NO: 98664 - DNA, 168 bp, Homo sapiens
  chr20:10515151-10515319
  hypo
agccttagaaggtttccgtaaagaaggagcctcgagtcaagcctgagcctaggggaaggtggggtagaagaaggaatggggagctccttccagcagagccaaggtcctttctgctttgtcctgctccgtgttcagctcctggcgcagggctggcgtctggggtatgct

SEQ ID NO: 98665 - DNA, 43 bp, Homo sapiens
  chr20:10571269-10571312
  hypo
aagtgctagaattacaggcatgagccaccgcacccggctgagt

SEQ ID NO: 98666 - DNA, 401 bp, Homo sapiens; identical to SEQ ID NO: 56916
  chr20:10653623-10654024
  hypo

SEQ ID NO: 98667 - DNA, 1020 bp, Homo sapiens; identical to SEQ ID NO: 56918
  chr20:10654668-10655688
  hypo

SEQ ID NO: 98668 - DNA, 206 bp, Homo sapiens
  chr20:10687192-10687398
  hypo
atgaggaaaggatggtgggaacggaaggagcctgaggcctggagggggattcggaggccccgacggaccgcactgtggaggagctttctgtagagcgcaggatccacttaagctccgcgtgtgtgtagggattgtgtgtagggatacggcaaatatcctgcagttgattgccagacgtacagatcgattgcaacttcagtcccttt

SEQ ID NO: 98669 - DNA, 362 bp, Homo sapiens
  chr20:10774347-10774709
  hypo
acagtggctgcaaagcggctttttgtcctcaaagtttaggctccttgaggccccagaatgacaaaatggagaggcagggccaggggaagagggcctggtgagacccgccctggctcccgccggccttctgccaatgcccgcagatggtgggggcccatggccgggacgcccgctcaggccctggcagcctcatgtgccccagcacctccttaaaagctgattatccggcttgtctcctttgtgagccggctcattaccatttcattgtgtggtggcaattcttacccgcaccatgaatattgactttatgcttgcttttctacctgaattacaggcgggcaggccggcggctcgcattgctt

SEQ ID NO: 98670 - DNA, 30 bp, Homo sapiens; identical to SEQ ID NO: 56919
  chr20:10961919-10961949
  hypo

SEQ ID NO: 98671 - DNA, 415 bp, Homo sapiens; identical to SEQ ID NO: 33089
  chr20:11589405-11589820
  hypo

SEQ ID NO: 98672 - DNA, 1710 bp, Homo sapiens; identical to SEQ ID NO: 56921
  chr20:11871114-11872824
  hypo

SEQ ID NO: 98673 - DNA, 186 bp, Homo sapiens
  chr20:11903618-11903804
  hypo
tgggctgaagtagaatgccaacgacaagatctggcgttgagcattgaaaataaacgcaaggttctaggaaaggcactttacttgatccgcatacccacaatggccctcgatgattttgcaaatggtgctgcacagtccggggtattaactctcaatgagaccaacgacatcttcctctggtatact

SEQ ID NO: 98674 - DNA, 30 bp, Homo sapiens; identical to SEQ ID NO: 12794
  chr20:12947867-12947897
  hypo

SEQ ID NO: 98675 - DNA, 129 bp, Homo sapiens
  chr20:13279832-13279961
  hypo
cctggagagcaccacgctggcggcacagcactgctgctacggcgacaacatgcagctcatcaccaggggcaagggggcgggcacgcccaacctcatcagcaccgagttctccgcggagctccactacaa

SEQ ID NO: 98676 - DNA, 43 bp, Homo sapiens; identical to SEQ ID NO: 33093
  chr20:13417378-13417421
  hypo

SEQ ID NO: 98677 - DNA, 18 bp, Homo sapiens
  chr20:13596452-13596470
  hypo
aatcttaaaaattatgta

SEQ ID NO: 98678 - DNA, 25 bp, Homo sapiens
  chr20:13626963-13626988
  hypo
ccaccacgcccggccaagaccacct

SEQ ID NO: 98679 - DNA, 31 bp, Homo sapiens
  chr20:14115133-14115164
  hypo
acattaacctctttttcgtttataaagagaa

SEQ ID NO: 98680 - DNA, 59 bp, Homo sapiens
  chr20:14812473-14812532
  hypo
gcacacgttgtcctgccgagttgttgtgagtttgtcatcgttttcgtttgttgttgctg

SEQ ID NO: 98681 - DNA, 169 bp, Homo sapiens
  chr20:15011656-15011825
  hypo
agggtgagctaggcacggagcagtgaagggtatgtgagggagctcagggtctggccactgtgcacagccaggctgtggtggggcgggcagcaccaggtgcctgcacaggcgccagctctatgcaaggctccagctgaaccaggcatactgcaaatggcttccgctgtgg

SEQ ID NO: 98682 - DNA, 30 bp, Homo sapiens
  chr20:15012241-15012271
  hypo
acaggcaggccatcccgactaagtggagga

SEQ ID NO: 98683 - DNA, 30 bp, Homo sapiens; identical to SEQ ID NO: 56932
  chr20:15816804-15816834
  hypo

SEQ ID NO: 98684 - DNA, 67 bp, Homo sapiens
  chr20:16431606-16431673
  hypo
gtgagtgtatgaagagagtgccgcgcatcttctgtcatacctgcgcgtttacagacaggtctgggtc

SEQ ID NO: 98685 - DNA, 299 bp, Homo sapiens
  chr20:16510986-16511285
  hypo
gatggtctgtcacttcccaggcgggctttcaagactgtgacttctgtcttgctggctctctcttctgccctctctgtttgagccctggcagtgtgaaaagtcagggacgacagagtgaggacccctgtggacagacccagccagcaggaaacaggggcccgctagcagcacgccagacagcctggcagggcacgctccccaagcccgcaccgggacatgatgatgagagatgactgggaagccgtctggcaccctgactgcagcgctaggggagagccggagtcagaggaccctgctca

SEQ ID NO: 98686 - DNA, 209 bp, Homo sapiens
  chr20:16543129-16543338
  hypo
caatgtgagacatgcaacaaacgccgtgactacggatcccaatccctcacgagcaaccacagaaagtaagaggcatgtgtggagggtgagtggagatacttataaatgtaacaaatactttctgagtgctcaggtcttcccggcacagttccaggccccggggaaacagccatgaacaagatctacacggtgactggctctcagagagt

SEQ ID NO: 98687 - DNA, 30 bp, Homo sapiens; identical to SEQ ID NO: 33097
  chr20:16552552-16552582
  hypo

SEQ ID NO: 98688 - DNA, 193 bp, Homo sapiens
  chr20:16555032-16555225
  hypo
gtatcttaaggcttagggcctctggtagaagtgagctccacctcccttcctgtgtagaaggtaaatgcattcattcattcagtgaatcgagcatgcatgaaatcgtttgcgcacacccagaagcccacctgcgagccacaggagcagccattccaggaagccaagctataatgggagacgcaaggaatggagg

SEQ ID NO: 98689 - DNA, 30 bp, Homo sapiens; identical to SEQ ID NO: 12804
  chr20:17429350-17429380
  hypo

SEQ ID NO: 98690 - DNA, 31 bp, Homo sapiens
  chr20:17471843-17471874
  hypo
gcgagaagctggagtgcggtgagacttgggg

SEQ ID NO: 98691 - DNA, 152 bp, Homo sapiens; identical to SEQ ID NO: 33100
  chr20:17481232-17481384
  hypo

SEQ ID NO: 98692 - DNA, 385 bp, Homo sapiens
  chr20:17489361-17489746
  hypo
ccaggccagagcagagcgcttggccacccactcagaaaaccccgtttctgccaggaacataggatatgttcagcgtgtgacagctcctcaagctgcatgcgtgtgcctgcgcgtaacacctccatgaaacatgtgggaagccccaatgcacacgcggcagactcgagcgtacctgtgcctgcagctccactctctgcgcctgcaggtgggagagcacctcccggccctcctccagctgactccgcagggcggccacctcccgctccgtcaggagcttctcctgcacagagaaggccagagtcagactcatgggacatgcagagaggaaaagggcagagaaggtgcggggccctggtatggacggaatatccgtgtccccctgaat

SEQ ID NO: 98693 - DNA, 43 bp, Homo sapiens
  chr20:17512773-17512816
  hypo
gggcctgtaataggtggttcacgcctgtaatcctagcactttg

SEQ ID NO: 98694 - DNA, 30 bp, Homo sapiens; identical to SEQ ID NO: 56943
  chr20:17518082-17518112
  hypo

SEQ ID NO: 98695 - DNA, 242 bp, Homo sapiens; identical to SEQ ID NO: 56944
  chr20:17549809-17550051
  hypo

SEQ ID NO: 98696 - DNA, 179 bp, Homo sapiens; identical to SEQ ID NO: 12806
  chr20:17661563-17661742
  hypo

SEQ ID NO: 98697 - DNA, 43 bp, Homo sapiens; identical to SEQ ID NO: 33103
  chr20:17971880-17971923
  hypo

SEQ ID NO: 98698 - DNA, 37 bp, Homo sapiens
  chr20:17987478-17987515
  hypo
aggtgtgagccaccgcgcctggccatggatacttata

SEQ ID NO: 98699 - DNA, 305 bp, Homo sapiens; identical to SEQ ID NO: 56954
  chr20:18039722-18040027
  hypo

SEQ ID NO: 98700 - DNA, 37 bp, Homo sapiens
  chr20:18041676-18041713
  hypo
aacaaacctgcacatgtacccccgaatctaaaattaa

SEQ ID NO: 98701 - DNA, 21 bp, Homo sapiens
  chr20:18073435-18073456
  hypo
gggggataacgcggctttctt

SEQ ID NO: 98702 - DNA, 30 bp, Homo sapiens
  chr20:18123337-18123367
  hypo
agtcggcatgatgacgaagccacgagaaca

SEQ ID NO: 98703 - DNA, 170 bp, Homo sapiens
  chr20:18233459-18233629
  hypo
gtcacctagaaaagccctccacgtatttgcctggttaatgcaacaatagaagggttacgccccagcaactttggtctcctcactcggtcacctcaagaaagcctcatcaaacctttgccatgaaagcacaatgccagaaacgcggctgcgtgcctggcttagccatactt

SEQ ID NO: 98704 - DNA, 31 bp, Homo sapiens
  chr20:18449103-18449134
  hypo
atacatttgttgatgtcgactaggtgaagat

SEQ ID NO: 98705 - DNA, 156 bp, Homo sapiens
  chr20:18489631-18489787
  hypo
tgggattacaggcgtgagccaccgcgcccggccgccagtgccttttaataaagaacgttttgagagagagacggttatttaatgaaatctgctgacatacttgctgagagttgtgatagaacttgctttcattccgactttagttatccctttgct

SEQ ID NO: 98706 - DNA, 73 bp, Homo sapiens
  chr20:18724826-18724899
  hypo
tccccgaaaagaagaccgcagtgccagcagcggggctgagggcgacgtgtcctctgaacgggagccgtagctc

SEQ ID NO: 98707 - DNA, 30 bp, Homo sapiens; identical to SEQ ID NO: 56965
  chr20:19192928-19192958
  hypo

SEQ ID NO: 98708 - DNA, 305 bp, Homo sapiens; identical to SEQ ID NO: 56966
  chr20:19193407-19193712
  hypo

SEQ ID NO: 98709 - DNA, 45 bp, Homo sapiens
  chr20:19207655-19207700
  hypo
caaaaggcatgcccatcgtaaaggctcacacgtactatcatgtaa

SEQ ID NO: 98710 - DNA, 185 bp, Homo sapiens
  chr20:19497028-19497213
  hypo
aattccattctagttatttatcgctgtgaagcgagctccccacattcagtggcatgcctggtcaccatgttgttttgttcttgggttgtttgtgttgagtgctcagaaggagcacagtgggaatgctgctccacggaatccagggcctcagatggaccgactccgatggctgtggctagaccagt

SEQ ID NO: 98711 - DNA, 214 bp, Homo sapiens
  chr20:19673881-19674095
  hypo
tggcctttttcatttttccagcgggtaaactggaaacagtgaaatgggcgttcacctggccgctgagtttcgtcttatacttcactgtacccaactgcaacaagccgcgctgggagaaatggttcatggtgacgtttgcttcctccacgctgtggatcgcagccttctcctacatgatggtgtggatggtgagtgcaatcgggaccccatggca

SEQ ID NO: 98712 - DNA, 31 bp, Homo sapiens; identical to SEQ ID NO: 56968
  chr20:19738269-19738300
  hypo

SEQ ID NO: 98713 - DNA, 30 bp, Homo sapiens; identical to SEQ ID NO: 12813
  chr20:19738506-19738536
  hypo

SEQ ID NO: 98714 - DNA, 31 bp, Homo sapiens
  chr20:19952936-19952967
  hypo
tctcagttctctctcccgacctctgtccaca

SEQ ID NO: 98715 - DNA, 31 bp, Homo sapiens; identical to SEQ ID NO: 56973
  chr20:19997854-19997885
  hypo

SEQ ID NO: 98716 - DNA, 489 bp, Homo sapiens; identical to SEQ ID NO: 12818
  chr20:20347220-20347709
  hypo

SEQ ID NO: 98717 - DNA, 485 bp, Homo sapiens; identical to SEQ ID NO: 12819
  chr20:20347736-20348221
  hypo

SEQ ID NO: 98718 - DNA, 2586 bp, Homo sapiens; identical to SEQ ID NO: 56978
  chr20:20348257-20350843
  hypo

SEQ ID NO: 98719 - DNA, 173 bp, Homo sapiens; identical to SEQ ID NO: 33113
  chr20:20372435-20372608
  hypo

SEQ ID NO: 98720 - DNA, 692 bp, Homo sapiens
  chr20:20376598-20377290
  hypo
caactgctcgccttccgcctgtgagcctgggaggtggtgcagcccaggccacacgggacagggttttcagacagccttgccaaggcggctgccatccatcagagcgctctgggcagggcctggaccccagacccaggacagaaaggcaggctggggaggtcacacctgccatggccagcctatcctctgggtcctagaccgcagcccattcctaggtctccaccctctgcgctcccgcagcttttgtccgcttttccttccccagctgttccattcagcagcccccgccacaacctgccctccccgcatggaggtctcagaggcctccattaaggctggcggtcaaaggccggcccagcacgtgccgtgtcttatcggcccatctcaagaccctgctccttcaggcctgggcaacaaaaaagggggcggccccagcgcccgctggctccctgcagccccacacacaaaagggcaggcgacaaagacattttccgggatggcaggtgttggtgtcggattcctccccgagtgcacgggcagaagaaaggcaaggctgggcttccccgggcagcgcagacatgcaggggcaggagtgtgggcagggcccccggggaggggaaggcccaggagggcgaggagcactgatgcagggtccgctaccgagggcagccgattagaaaagtcccaccccc

SEQ ID NO: 98721 - DNA, 169 bp, Homo sapiens
  chr20:20378094-20378263
  hypo
gccatcctatttcctacggcggggtttccttggcaaatgcatcctctttctgcgtcaggcagtagcttctcctgaactctcagcccccacaactctcctgaattctgtgtcagtagacgaccatcagatctggacaaaggacatttatcagtgacgtggaccattgtct

SEQ ID NO: 98722 - DNA, 31 bp, Homo sapiens; identical to SEQ ID NO: 33115
  chr20:20380169-20380200
  hypo

SEQ ID NO: 98723 - DNA, 223 bp, Homo sapiens; identical to SEQ ID NO: 33116
  chr20:20392200-20392423
  hypo

SEQ ID NO: 98724 - DNA, 120 bp, Homo sapiens; identical to SEQ ID NO: 33117
  chr20:20392661-20392781
  hypo

SEQ ID NO: 98725 - DNA, 270 bp, Homo sapiens; identical to SEQ ID NO: 33118
  chr20:20421238-20421508
  hypo

SEQ ID NO: 98726 - DNA, 284 bp, Homo sapiens
  chr20:20435757-20436041
  hypo
gtgtccctaggaagggtgttacgaatctaagccccggagctgctgcctccacagtcccgtgtaatgccacctaagtgctctgcctcgcatgacttgctgcaggctgccacggattagagctatcgatcgctgcctgcagaagggtctcgctgtgcgaaaggaaggtgagcgctagagacagacagctcaagtatcgatctgctctggcagaaggccgtggttccagatgcagagtggcactccttcacatcacccatgagttactataacgtgcacggaaacac

SEQ ID NO: 98727 - DNA, 31 bp, Homo sapiens; identical to SEQ ID NO: 12822
  chr20:20692668-20692699
  hypo

SEQ ID NO: 98728 - DNA, 33 bp, Homo sapiens
  chr20:21115584-21115617
  hypo
gccatgaacccccatgcccgacccatctttcag

SEQ ID NO: 98729 - DNA, 30 bp, Homo sapiens; identical to SEQ ID NO: 33121
  chr20:21115989-21116019
  hypo

SEQ ID NO: 98730 - DNA, 155 bp, Homo sapiens; identical to SEQ ID NO: 33122
  chr20:21371532-21371687
  hypo

SEQ ID NO: 98731 - DNA, 39 bp, Homo sapiens; identical to SEQ ID NO: 12833
  chr20:21378678-21378717
  hypo

SEQ ID NO: 98732 - DNA, 328 bp, Homo sapiens; identical to SEQ ID NO: 57010
  chr20:21494664-21494992
  hypo

SEQ ID NO: 98733 - DNA, 256 bp, Homo sapiens; identical to SEQ ID NO: 12849
  chr20:21502443-21502699
  hypo

SEQ ID NO: 98734 - DNA, 336 bp, Homo sapiens; identical to SEQ ID NO: 12850
  chr20:21502837-21503173
  hypo

SEQ ID NO: 98735 - DNA, 557 bp, Homo sapiens; identical to SEQ ID NO: 57024
  chr20:21503454-21504011
  hypo

SEQ ID NO: 98736 - DNA, 193 bp, Homo sapiens; identical to SEQ ID NO: 33128
  chr20:21555353-21555546
  hypo

SEQ ID NO: 98737 - DNA, 30 bp, Homo sapiens
  chr20:21663255-21663285
  hypo
catggtactgtctcccgctccatgtccgag

SEQ ID NO: 98738 - DNA, 1176 bp, Homo sapiens; identical to SEQ ID NO: 12855
  chr20:21686206-21687382
  hypo

SEQ ID NO: 98739 - DNA, 36 bp, Homo sapiens
  chr20:22324532-22324568
  hypo
tgtccccgcacgcccacgttccgcatgggacctgac

SEQ ID NO: 98740 - DNA, 30 bp, Homo sapiens; identical to SEQ ID NO: 57037
  chr20:22515568-22515598
  hypo

SEQ ID NO: 98741 - DNA, 220 bp, Homo sapiens; identical to SEQ ID NO: 57046
  chr20:22563415-22563635
  hypo

SEQ ID NO: 98742 - DNA, 1497 bp, Homo sapiens; identical to SEQ ID NO: 57047
  chr20:22563663-22565160
  hypo

SEQ ID NO: 98743 - DNA, 32 bp, Homo sapiens
  chr20:22877100-22877132
  hypo
tgaaccaccgcgcccagccacaacacagattt

SEQ ID NO: 98744 - DNA, 184 bp, Homo sapiens
  chr20:23015165-23015349
  hypo
gggtgaaggttctgagatgtccggctcccgtagcttctgccagttcccgagggagctagcacaggcttggccttctttggtggcatctctgcctccacctgtccgtctccattccttgtgcccatagcacctcagctgctcggacacagaagttaaaaggtccggcatctgcacttgtccagag

SEQ ID NO: 98745 - DNA, 501 bp, Homo sapiens
  chr20:23016425-23016926
  hypo
cgtggcctcgtcggccgccctgcgccactggcccttcggctccgtgctgtgccgcgcggtgctcagcgtcgacggcctcaacatgttcaccagcgtcttctgtctcaccgtgctcagcgtggaccgctacgtggccgtggtgcaccctctgcgcgcggcgacctaccggcggcccagcgtggccaagctcatcaacctgggcgtgtggctggcatccctgttggtcactctccccatcgccatcttcgcagacaccagaccggctcgcggcggccaggccgtggcctgcaacctgcagtggccacacccggcctggtcggcagtcttcgtggtctacactttcctgctgggcttcctgctgcccgtgctggccattggcctgtgctacctgctcatcgtgggcaagatgcgcgccgtggccctgcgcgctggctggcagcagcgcaggcgctcggagaagaaaatcaccaggctggtgctgatggtcgtggtcgtctttgt

SEQ ID NO: 98746 - DNA, 245 bp, Homo sapiens; identical to SEQ ID NO: 33133
  chr20:23092301-23092546
  hypo

SEQ ID NO: 98747 - DNA, 31 bp, Homo sapiens
  chr20:23108362-23108393
  hypo
agttagtacatggacccggagatgcctggac

SEQ ID NO: 98748 - DNA, 26 bp, Homo sapiens
  chr20:23114971-23114997
  hypo
tgggcgacagagtgagactctgtctc

SEQ ID NO: 98749 - DNA, 162 bp, Homo sapiens
  chr20:23117578-23117740
  hypo
gcagcagcagctgtggcctctcgcgggcaggcgggaaaccgacaccgttcactggtaggtattctgctggttaggcgtgagtcagcgcctggcccagattccaccctggaggggctgcaccagggcgtgaactctcggggcgtggctccccaaccctcttta

SEQ ID NO: 98750 - DNA, 167 bp, Homo sapiens
  chr20:23137427-23137594
  hypo
agagaggatagccaaagacatcgaggcacaggcgaggttgaggagcttcgacagtggccctgaaaggtgtatggagaccacgtttcaggactttggccacagtggaatcccccgactgtttttggggactgtggtcagggtgacccggctgtggcacatagtgccca

SEQ ID NO: 98751 - DNA, 74 bp, Homo sapiens; identical to SEQ ID NO: 33134
  chr20:23138480-23138554
  hypo

SEQ ID NO: 98752 - DNA, 43 bp, Homo sapiens
  chr20:23283472-23283515
  hypo
aaagtagtgtgtacagtgtggcgatgatggagaggttgaagga

SEQ ID NO: 98753 - DNA, 92 bp, Homo sapiens
  chr20:23336929-23337021
  hypo
ggtagggtacagggcgtgcgtccccacctacactagcctggttgcaggcggcctccaagggcacagcgggaagctccgcccttgccatgccc

SEQ ID NO: 98754 - DNA, 156 bp, Homo sapiens
  chr20:23337305-23337461
  hypo
tgctgaggagtataatcagcacgcagtgcgagttcttatagtggccacgtccacaaaccctgtgttgtggaagaacagaaggcgttctgctttctgtgtttcaccgtctctccctcgctttaacttccaggtcccggagtagtggtgacagcaagg

SEQ ID NO: 98755 - DNA, 384 bp, Homo sapiens
  chr20:23346217-23346601
  hypo
catgagggcggcggcgagcggcaccgctgcggccagtgcggcaagggcctgagttccaagacagcgctgcggctgcacgagcgcacacacacgggagaccggccctacggctgcaccgagtgcggcgccaggttctcgcagccgtccgcgctcaagacgcacatgaggtacgcggggagccgtccggaggggtccctgcgcactggaagggtgtgtcaagcactgaggtcgtcctgggatttgatgtctcactgcttaatttctccgctccaaacctgggggcttatttcgagacagcgtttagttctctgtcaaggtacaggggctgcgagtgatggctctgctcccttgttctgagacccctggggcgcccctgctggccgg

SEQ ID NO: 98756 - DNA, 158 bp, Homo sapiens
  chr20:23380017-23380175
  hypo
actgccttgttccttccaccacgtgaggacatagcaagaaggcgccatcgtggaaggtgagaacagtcctcaccaaatacgggatctgctggcaccttgatcttaaacgacccagcctccagaactctgaacaatacgttcattttctttataaatta

SEQ ID NO: 98757 - DNA, 31 bp, Homo sapiens; identical to SEQ ID NO: 33135
  chr20:23490570-23490601
  hypo

SEQ ID NO: 98758 - DNA, 687 bp, Homo sapiens; identical to SEQ ID NO: 57058
  chr20:23618040-23618727
  hypo

SEQ ID NO: 98759 - DNA, 121 bp, Homo sapiens; identical to SEQ ID NO: 33137
  chr20:23969311-23969432
  hypo

SEQ ID NO: 98760 - DNA, 241 bp, Homo sapiens
  chr20:24188721-24188962
  hypo
gtgcgcgtgcgtgtgtgtgtaatctcccatgtgtgtgcacgcacgtgtgtgtaatctcctgtgtgtgtgcccgtgcgtgtgtgtaatctcccgtgtgtgcgtgcgtgtgtgtgcaatcgcctgtgtgtgtgcatgcgtgtgtgtgtaatctcgtgtgtgtgcgtgcttgcgtgtgtaatctcctgtgtgtgcgtgtaatttcctgtgtgtgtaatctcctgtgtgtgtgtgcgtgcatgtg

SEQ ID NO: 98761 - DNA, 259 bp, Homo sapiens
  chr20:24189021-24189280
  hypo
gtgtgtgcgcgcaagtgtgtgtaatctcctgtgtgtgcccgtgcgtgtgtgtaatctcccgtgtgtgcatgcgtgtgtgtgtgtaatctcgtgtgtgtgcgtgcgtgcgtgtaatctcctgtgtgcgtgcgtgtgtgtttgtgtgtgtaatctcctgtgtgtgcgtgtaatttcctgtgtgtgtaatctcctgtgtgtgtgtgcgtgcatgtgtgtaatctcctgtgtgtgtgtgcgcgtgcatgtgtgtgtgtaatct

SEQ ID NO: 98762 - DNA, 77 bp, Homo sapiens
  chr20:24236949-24237026
  hypo
gcccaccttcaggtagaaagacgcaggaggcctcagcctgtagggagctgtgcggcggtggtcactgggggtgactg

SEQ ID NO: 98763 - DNA, 36 bp, Homo sapiens
  chr20:24467577-24467613
  hypo
ccgccgtgcgcagccgagagtgtgcatttctaacaa

SEQ ID NO: 98764 - DNA, 44 bp, Homo sapiens
  chr20:24484893-24484937
  hypo
aggagagcagttttatgctttgcggactttcattggtgtggcta

SEQ ID NO: 98765 - DNA, 173 bp, Homo sapiens
  chr20:24523967-24524140
  hypo
ctgcagcagtcagtggagtcccgctaccggcccaacatcatcctctattcagagggcgtgctgcgctcctggggggacggtgtggccgccgactgctgcgagaccaccttcatcgaggaccggtcgcccaccaaagacagcctcgagtacccggatgggaagttcattgacct

SEQ ID NO: 98766 - DNA, 31 bp, Homo sapiens; identical to SEQ ID NO: 12884
  chr20:24564177-24564208
  hypo

SEQ ID NO: 98767 - DNA, 231 bp, Homo sapiens; identical to SEQ ID NO: 33140
  chr20:24570953-24571184
  hypo

SEQ ID NO: 98768 - DNA, 178 bp, Homo sapiens
  chr20:24646764-24646942
  hypo
ctcaggatgtcaagccacctccggaacgtgtctacactccacagctaccccgcagcaatacgcactcttgggacctcgctgatctaggatggggaggcaggccaccgcccctcccaagactcctcaagaaagagccccgcggttgctccggaaactcgaggcactgcagctatgggca

SEQ ID NO: 98769 - DNA, 196 bp, Homo sapiens
  chr20:24944572-24944768
  hypo
cttctccggaaggcaccgctgtcgctgagttctaggacgaggctgtaccgcggcacaaacttcatcaccgtctcttgactaaagagctagagggaagcacagtgcagggaaagttcaccagctggccaagaacactgtgcgcagatcaaccgtgccgcccccaccatccaggaacggtctgactccttcccatgac

SEQ ID NO: 98770 - DNA, 31 bp, Homo sapiens; identical to SEQ ID NO: 33142
  chr20:24947028-24947059
  hypo

SEQ ID NO: 98771 - DNA, 38 bp, Homo sapiens; identical to SEQ ID NO: 33143
  chr20:24950216-24950254
  hypo

SEQ ID NO: 98772 - DNA, 282 bp, Homo sapiens
  chr20:25028525-25028807
  hypo
ccaggcaggctagaccggcttttactgtgtttcattctgcttgcgttcacatttacttttcctggataagagagcacttgcaaagccaaaatgcactccctgagactcagacggcccctccctgacagccagactcagcacacaggactgggctgggcgcctccctcgcaccttgaacattcgagggcacagtacctgtaggtgatcctcacttccgttccaggctcatcgcgctcccagatcaaagcaacgctctcgggggacttccgaacatgctggtcc

SEQ ID NO: 98773 - DNA, 56 bp, Homo sapiens
  chr20:25030307-25030363
  hypo
taattactgcaagagcctccacggagacagcgcccgcaccaccagcatctcccatt

SEQ ID NO: 98774 - DNA, 30 bp, Homo sapiens; identical to SEQ ID NO: 33144
  chr20:25040599-25040629
  hypo

SEQ ID NO: 98775 - DNA, 30 bp, Homo sapiens; identical to SEQ ID NO: 33145
  chr20:25042641-25042671
  hypo

SEQ ID NO: 98776 - DNA, 489 bp, Homo sapiens
  chr20:25187624-25188113
  hypo
ttttgtccctgggcctggggacgtctgactctccttggatcctagcaccctaacgtgcttttcctgcctctccccccttcccaccagcagccgcagcacggtccttggcaaacaaggatgagaaaaatatccaaccacgggagcctgcgggtggcgaaggtggcataccccctggggctgtgtgtgggcgtgttcatctatgttgcctacatcaagtggcaccgggccaccgccacccaggccttcttcagcatcaccagggcagccccgggggcccggtggggtcagcaggcccacagccccctggggacagctgcagacgggcacgaggtcttctacgggatcatgtttgatgcaggaagcactggcacccgagtacacgtcttccagttcacccggccccccagaggtacccgcctctcatggcagggctctcgggatctcctcccctgtgctacagtgttggccgggtcccctgccacagactca

SEQ ID NO: 98777 - DNA, 128 bp, Homo sapiens
  chr20:25202579-25202707
  hypo
gagccagacagtgaagctcatcgggaaagccttccaagagaaataacacggggcggggatctgagagggcgatcgcagctgtaactaggacagccaaggacggcctcgtggggtaacatgggatctaa

SEQ ID NO: 98778 - DNA, 30 bp, Homo sapiens; identical to SEQ ID NO: 57076
  chr20:25203124-25203154
  hypo

SEQ ID NO: 98779 - DNA, 19 bp, Homo sapiens
  chr20:25212064-25212083
  hypo
tttataagaacctactggg

SEQ ID NO: 98780 - DNA, 231 bp, Homo sapiens
  chr20:25223053-25223284
  hypo
gtctgtgttcatttgcaaacacgaaattgaccagcacagatctgccagtggcgttgctgggatcccagagagattttccctccgcacctgcggtctcaagggccggcggtgcttctgagtcactcatttcaccagcgatcaatgagacactcttcaggtcctcaagaagcttaagcctagccgaccaaaaatgtctgttttccacaccccgcttctaagtcccacagcatc

SEQ ID NO: 98781 - DNA, 17 bp, Homo sapiens
  chr20:25230503-25230520
  hypo
attctgagtcttgccct

SEQ ID NO: 98782 - DNA, 196 bp, Homo sapiens
  chr20:25230759-25230955
  hypo
caggcgtgagccaacgcacccgacccgcaacatcatttttattgtctaagtggcggatggcaaggacatagctctgccttcacattcaagggcatttccttggagctggaccaggactcagctctacaccttagggtgcccattggagtatttatgtataatcacatcctggagaggccagcgatgggctcaggga

SEQ ID NO: 98783 - DNA, 332 bp, Homo sapiens
  chr20:25231670-25232002
  hypo
tttgtggtacatagcgaaagagtagaagttggggtgttcagaggaagatttgtcaagctttgccatgcttggcaaatcagcacgtcaaaacatctggctaacatggagagctttgtgcttggcaagaggtggcggttggtcatgaagacatttaatggattctctgaagtggtggcaaggtggcaaggagagtccaacctgaagctgcagagcctgggattgcgctgcatggagaagaaagggtgtgcgtgattccacgctccttttcatcctggcctttccattcggtctgtgcaactgtgggcttgggcggatttctttgccattattgg

SEQ ID NO: 98784 - DNA, 123 bp, Homo sapiens
  chr20:25251585-25251708
  hypo
ctgccactgctgtgccggcttcactcaggagtagggtgaggcttgatgtgttgatgtgtccctgctgtcagaacagcctgggtttcagtggaacgtgcaagggattggcgaggcctcagcctc

SEQ ID NO: 98785 - DNA, 30 bp, Homo sapiens; identical to SEQ ID NO: 33151
  chr20:25276724-25276754
  hypo

SEQ ID NO: 98786 - DNA, 34 bp, Homo sapiens
  chr20:25278857-25278891
  hypo
cactaggtgtggaacccggggtcatgtgtgcctg

SEQ ID NO: 98787 - DNA, 34 bp, Homo sapiens; identical to SEQ ID NO: 33153
  chr20:25284745-25284779
  hypo

SEQ ID NO: 98788 - DNA, 164 bp, Homo sapiens
  chr20:25290091-25290255
  hypo
gagagtggccccagatgtacacggggttgtcaccacttcttgctttgatccagtcaaaaacgtggagtgcgtcataggtcatgccccgctcagatggcgttcccactgagtcaccccaacctgggagggagaaacggcaggacggggaggtcaaaggcagctca

SEQ ID NO: 98789 - DNA, 30 bp, Homo sapiens
  chr20:25300297-25300327
  hypo
gcccattcccaagagcgcgaggcacccaca

SEQ ID NO: 98790 - DNA, 190 bp, Homo sapiens
  chr20:25310087-25310277
  hypo
gtccaccctccagtcacgtcatcatgtaccagcaaccacaaacatcaacgggcaggatggagaatggatcctgcacacatgggtgccgtggagggtgaagaagtgagaatgtgagtgaatggaaaacgacctgctctgtcatacttcttttagctcacctgcaaaatatttgttgcgggaaaggctgaaa

SEQ ID NO: 98791 - DNA, 216 bp, Homo sapiens
  chr20:25320326-25320542
  hypo
taacctcgtatcaggaaagagcggcctcctcaggcctcccgatccgtcttctgtgagacaactgcaggcaggcgtaggttacttattagctcctggtaggaagcacgtagaccaaggacatcaacagaacctgcctgaccaggtcctcagagagcaggaggctaagaactggcacggtgtgtccttgcatttacgcgtgggcgagcccctctgtac

SEQ ID NO: 98792 - DNA, 22 bp, Homo sapiens
  chr20:25344141-25344163
  hypo
cgcacctggctgacatttactt

SEQ ID NO: 98793 - DNA, 200 bp, Homo sapiens
  chr20:25377962-25378162
  hypo
gataaaggtaacatgcgagtaagggcggcagtattttggtgcagaagcatgtgagacacttgagcttgctgaaacacagaaccaatcagcttgtctgctttctcattacctagagatagtggcccaggaagttgtgtgtgaaagtgaatatgagaaatatgaaaaagagcttcaggagagcgaatagcttgttgaagtct

SEQ ID NO: 98794 - DNA, 30 bp, Homo sapiens; identical to SEQ ID NO: 33156
  chr20:25392097-25392127
  hypo

SEQ ID NO: 98795 - DNA, 31 bp, Homo sapiens; identical to SEQ ID NO: 33157
  chr20:25451905-25451936
  hypo

SEQ ID NO: 98796 - DNA, 167 bp, Homo sapiens
  chr20:25470594-25470761
  hypo
aatctccttctgtaggcgactgttttcctaggagacacaggccagtggctcatcaggctcctgcaggacggaggggatgtgtgcaggatggaggtgagaggcttgcttctcataggactgggcatcaggaaagaacccccacccaccgcaggcgaggcacctggtgc

SEQ ID NO: 98797 - DNA, 39 bp, Homo sapiens
  chr20:25605595-25605634
  hypo
atttatttttatttttattttcgagatggagtcttgctc

SEQ ID NO: 98798 - DNA, 39 bp, Homo sapiens
  chr20:25605873-25605912
  hypo
acaggcgtgagccaccgcgcctggctaagggtgattttt

SEQ ID NO: 98799 - DNA, 30 bp, Homo sapiens; identical to SEQ ID NO: 33158
  chr20:25657013-25657043
  hypo

SEQ ID NO: 98800 - DNA, 30 bp, Homo sapiens
  chr20:25967102-25967132
  hypo
gtaagcgaccgtgaccggccttgtcttcta

SEQ ID NO: 98801 - DNA, 197 bp, Homo sapiens; identical to SEQ ID NO: 33159
  chr20:25971829-25972026
  hypo

SEQ ID NO: 98802 - DNA, 36 bp, Homo sapiens
  chr20:26062266-26062302
  hypo
ggaaggtgatggggttcgcagcgccaggggacccag

SEQ ID NO: 98803 - DNA, 21 bp, Homo sapiens
  chr20:30110867-30110888
  hypo
ttatgagacagagtctcgctc

SEQ ID NO: 98804 - DNA, 181 bp, Homo sapiens
  chr20:30134130-30134311
  hypo
gcccggccgtagcactctctcttactggtgcctagcacatgctgccttgtccctaatcggcagcaattttatgtgattgctttgtgcatctctaaggaacctctgttaaacaattgttgattttttttttttaaagactgagcttgggccaggtgagatggctcacgcctcccagcacttt

SEQ ID NO: 98805 - DNA, 155 bp, Homo sapiens; identical to SEQ ID NO: 33162
  chr20:30139495-30139650
  hypo

SEQ ID NO: 98806 - DNA, 140 bp, Homo sapiens
  chr20:30153939-30154079
  hypo
tttggggtgctgggcacggccctgaggcagtgccgtgcccagcatggcttcaccagcctgtgtcctctcatagcctgccctcctatacctggtccccgcctgcatcggttttcctgtcctggtggcgctggccaagggag

SEQ ID NO: 98807 - DNA, 31 bp, Homo sapiens; identical to SEQ ID NO: 33163
  chr20:30169440-30169471
  hypo

SEQ ID NO: 98808 - DNA, 36 bp, Homo sapiens
  chr20:30174476-30174512
  hypo
gaaagggatttttttttgagacggagtctcaccctg

SEQ ID NO: 98809 - DNA, 144 bp, Homo sapiens
  chr20:30181152-30181296
  hypo
acatcgttgcttttgcatcagccagaaaaaaaaaatactttttagaagaaaacgtacattatcatgagtcatagtatttgaggagtacagctctgaagcggcctgaggtgagggtgcagctggaggcgccgccccctggtgact

SEQ ID NO: 98810 - DNA, 1267 bp, Homo sapiens; identical to SEQ ID NO: 12895
  chr20:30192833-30194100
  hypo

SEQ ID NO: 98811 - DNA, 30 bp, Homo sapiens; identical to SEQ ID NO: 33165
  chr20:30232723-30232753
  hypo

SEQ ID NO: 98812 - DNA, 82 bp, Homo sapiens
  chr20:30297084-30297166
  hypo
tctgtctgggtggttcttacccgtctggcctgctcgtgtgtgtgtgtgcgcgcgtgcacgcgtgtgtaactagcctgatctt

SEQ ID NO: 98813 - DNA, 31 bp, Homo sapiens
  chr20:30302783-30302814
  hypo
gaatacagaccaggcctggcacggtggctca

SEQ ID NO: 98814 - DNA, 27 bp, Homo sapiens
  chr20:30326141-30326168
  hypo
gctaccgcacccagcctaggcttaatt

SEQ ID NO: 98815 - DNA, 36 bp, Homo sapiens; identical to SEQ ID NO: 33166
  chr20:30334934-30334970
  hypo

SEQ ID NO: 98816 - DNA, 30 bp, Homo sapiens; identical to SEQ ID NO: 33167
  chr20:30407130-30407160
  hypo

SEQ ID NO: 98817 - DNA, 19 bp, Homo sapiens
  chr20:30468302-30468321
  hypo
ttttttttttttgagacgg

SEQ ID NO: 98818 - DNA, 42 bp, Homo sapiens; identical to SEQ ID NO: 33169
  chr20:30468560-30468602
  hypo

SEQ ID NO: 98819 - DNA, 1282 bp, Homo sapiens; identical to SEQ ID NO: 57101
  chr20:30555390-30556672
  hypo

SEQ ID NO: 98820 - DNA, 30 bp, Homo sapiens
  chr20:30584444-30584474
  hypo
agcattgccgcccgcggcctggccttcgcg

SEQ ID NO: 98821 - DNA, 122 bp, Homo sapiens
  chr20:30585102-30585224
  hypo
ctcgcaagaagtacccggcctgggatgctcattttattgaccgccggctccggaagaccatcctggcactggagtactcctcacctgccacgccccggttgcagtaccggagtgtggggact

SEQ ID NO: 98822 - DNA, 606 bp, Homo sapiens; identical to SEQ ID NO: 57103
  chr20:30639975-30640581
  hypo

SEQ ID NO: 98823 - DNA, 41 bp, Homo sapiens; identical to SEQ ID NO: 33172
  chr20:30713762-30713803
  hypo

SEQ ID NO: 98824 - DNA, 79 bp, Homo sapiens; identical to SEQ ID NO: 33173
  chr20:30720983-30721062
  hypo

SEQ ID NO: 98825 - DNA, 31 bp, Homo sapiens; identical to SEQ ID NO: 33174
  chr20:30807275-30807306
  hypo

SEQ ID NO: 98826 - DNA, 96 bp, Homo sapiens; identical to SEQ ID NO: 57107
  chr20:30946057-30946153
  hypo

SEQ ID NO: 98827 - DNA, 111 bp, Homo sapiens; identical to SEQ ID NO: 12905
  chr20:30946218-30946329
  hypo

SEQ ID NO: 98828 - DNA, 290 bp, Homo sapiens; identical to SEQ ID NO: 12906
  chr20:30946345-30946635
  hypo

SEQ ID NO: 98829 - DNA, 84 bp, Homo sapiens; identical to SEQ ID NO: 12907
  chr20:30954185-30954269
  hypo

SEQ ID NO: 98830 - DNA, 30 bp, Homo sapiens; identical to SEQ ID NO: 12908
  chr20:30955515-30955545
  hypo

SEQ ID NO: 98831 - DNA, 110 bp, Homo sapiens; identical to SEQ ID NO: 12909
  chr20:30956816-30956926
  hypo

SEQ ID NO: 98832 - DNA, 387 bp, Homo sapiens; identical to SEQ ID NO: 12910
  chr20:30959965-30960352
  hypo

SEQ ID NO: 98833 - DNA, 296 bp, Homo sapiens; identical to SEQ ID NO: 12911
  chr20:31015929-31016225
  hypo

SEQ ID NO: 98834 - DNA, 105 bp, Homo sapiens; identical to SEQ ID NO: 12912
  chr20:31017139-31017244
  hypo

SEQ ID NO: 98835 - DNA, 154 bp, Homo sapiens; identical to SEQ ID NO: 12913
  chr20:31017702-31017856
  hypo

SEQ ID NO: 98836 - DNA, 360 bp, Homo sapiens; identical to SEQ ID NO: 12914
  chr20:31019122-31019482
  hypo

SEQ ID NO: 98837 - DNA, 107 bp, Homo sapiens; identical to SEQ ID NO: 12915
  chr20:31020681-31020788
  hypo

SEQ ID NO: 98838 - DNA, 635 bp, Homo sapiens; identical to SEQ ID NO: 12916
  chr20:31021085-31021720
  hypo

SEQ ID NO: 98839 - DNA, 4889 bp, Homo sapiens; identical to SEQ ID NO: 12917
  chr20:31022233-31027122
  hypo

SEQ ID NO: 98840 - DNA, 30 bp, Homo sapiens; identical to SEQ ID NO: 33189
  chr20:31046821-31046851
  hypo

SEQ ID NO: 98841 - DNA, 273 bp, Homo sapiens
  chr20:31051378-31051651
  hypo
aaggactgccgtgtccgtctatttgaacatggggcaatgtgctgctattcaaatggaggaattagtgatgaatgggggaaattgttcctccctctgtcccgtctccagaaggagacaaaaaccccttttacctcagcaaacaatgcccttatgtgggcgccagtgccccgcagcccgcacaagcccagctctgtgcgaaccaccaatcgccacaccgcgctctggggcccacagccagtggcaccctctcccggtgggcgactcccaccagct

SEQ ID NO: 98842 - DNA, 30 bp, Homo sapiens; identical to SEQ ID NO: 33190
  chr20:31055945-31055975
  hypo

SEQ ID NO: 98843 - DNA, 65 bp, Homo sapiens
  chr20:31081012-31081077
  hypo
gtgtgagactaacttacgttcactcggtccaaggaagccatgcagggaaacgggcaggttaccaa

SEQ ID NO: 98844 - DNA, 24 bp, Homo sapiens
  chr20:31092068-31092092
  hypo
gaaacatctcagaggccgggcgtg

SEQ ID NO: 98845 - DNA, 182 bp, Homo sapiens; identical to SEQ ID NO: 33191
  chr20:31115769-31115951
  hypo

SEQ ID NO: 98846 - DNA, 206 bp, Homo sapiens
  chr20:31144445-31144651
  hypo
ctccaggcatatcagcgaaggcatctggtgacacaagtgtcctcagccccaggggaaactgctctacctcctccattcattccactgggcaggtcgggtctgagccgaggtgggcctggcagaggtcctgggcctctgccactgagagcacgtgacctgcccaaggccacacaaccggttaacagtggagccagagctggacgtgc

SEQ ID NO: 98847 - DNA, 102 bp, Homo sapiens
  chr20:31144702-31144804
  hypo
acgtgactatgcaggaggcagcttgtgtgatattgatcgagctcctgatgcaaagcagggtgggaaatcctaggaatcaggtagacccgattttaaatccag

SEQ ID NO: 98848 - DNA, 57 bp, Homo sapiens; identical to SEQ ID NO: 33192
  chr20:31146688-31146745
  hypo

SEQ ID NO: 98849 - DNA, 107 bp, Homo sapiens
  chr20:31196056-31196163
  hypo
aaggcccctggagacccggcctcagccccctcccctgtctcttcctcccctgcagatctgcccccatctccctggaggtggcctgttctccacgccaccctcacagg

SEQ ID NO: 98850 - DNA, 36 bp, Homo sapiens
  chr20:31332338-31332374
  hypo
aaatgtcttctacccggcccggcgcggtggctcact

SEQ ID NO: 98851 - DNA, 35 bp, Homo sapiens
  chr20:31332613-31332648
  hypo
aagagcgaaactccgtctcaaagaaaaaacaaaaa

SEQ ID NO: 98852 - DNA, 163 bp, Homo sapiens; identical to SEQ ID NO: 12920
  chr20:31351104-31351267
  hypo

SEQ ID NO: 98853 - DNA, 69 bp, Homo sapiens; identical to SEQ ID NO: 33195
  chr20:31367768-31367837
  hypo

SEQ ID NO: 98854 - DNA, 60 bp, Homo sapiens
  chr20:31392268-31392328
  hypo
tgtaggcacggttcccgttctcatgtctgagttgtttggccttgacgttcctaacacagg

SEQ ID NO: 98855 - DNA, 31 bp, Homo sapiens; identical to SEQ ID NO: 33196
  chr20:31547891-31547922
  hypo

SEQ ID NO: 98856 - DNA, 30 bp, Homo sapiens
  chr20:31619405-31619435
  hypo
ggtctggtgggctgcgcccaattcaggccc

SEQ ID NO: 98857 - DNA, 31 bp, Homo sapiens; identical to SEQ ID NO: 33197
  chr20:31629661-31629692
  hypo

SEQ ID NO: 98858 - DNA, 30 bp, Homo sapiens; identical to SEQ ID NO: 33198
  chr20:31699289-31699319
  hypo

SEQ ID NO: 98859 - DNA, 31 bp, Homo sapiens
  chr20:31859916-31859947
  hypo
attggctgggaaggggcgaacagaactttcc

SEQ ID NO: 98860 - DNA, 82 bp, Homo sapiens; identical to SEQ ID NO: 33199
  chr20:31900462-31900544
  hypo

SEQ ID NO: 98861 - DNA, 30 bp, Homo sapiens
  chr20:31998164-31998194
  hypo
atgaggcctcaggccggaggcaaatagttc

SEQ ID NO: 98862 - DNA, 38 bp, Homo sapiens; identical to SEQ ID NO: 33200
  chr20:32151829-32151867
  hypo

SEQ ID NO: 98863 - DNA, 30 bp, Homo sapiens
  chr20:32155205-32155235
  hypo
tagtctccccttagtcgaagtttcgctttc

SEQ ID NO: 98864 - DNA, 30 bp, Homo sapiens
  chr20:32245601-32245631
  hypo
ggtcccggggccctcggcgtgtgcaggtct

SEQ ID NO: 98865 - DNA, 30 bp, Homo sapiens
  chr20:32264700-32264730
  hypo
aggagcgagtcggccgccaccagcggggac

SEQ ID NO: 98866 - DNA, 43 bp, Homo sapiens
  chr20:32270660-32270703
  hypo
aagcaaaacactgtcacagggcgatatatttatatgatccctt

SEQ ID NO: 98867 - DNA, 31 bp, Homo sapiens; identical to SEQ ID NO: 33201
  chr20:32301636-32301667
  hypo

SEQ ID NO: 98868 - DNA, 24 bp, Homo sapiens
  chr20:32306032-32306056
  hypo
aaggctgggtgtggtggctcacgc

SEQ ID NO: 98869 - DNA, 30 bp, Homo sapiens; identical to SEQ ID NO: 33202
  chr20:32311134-32311164
  hypo

SEQ ID NO: 98870 - DNA, 158 bp, Homo sapiens
  chr20:32332872-32333030
  hypo
tggcctcttcccactactctgcgggtatgaccccagatgacgaggatgtatttctctgcgggaagtgtaagaagcaattcaactcgctgccagcgtttatgacccacaagcgggaacagtgccaggggaatgcccccgccctggccacagtctcactg

SEQ ID NO: 98871 - DNA, 30 bp, Homo sapiens; identical to SEQ ID NO: 12926
  chr20:32342006-32342036
  hypo

SEQ ID NO: 98872 - DNA, 165 bp, Homo sapiens; identical to SEQ ID NO: 33204
  chr20:32370538-32370703
  hypo

SEQ ID NO: 98873 - DNA, 90 bp, Homo sapiens; identical to SEQ ID NO: 33205
  chr20:32376800-32376890
  hypo

SEQ ID NO: 98874 - DNA, 20 bp, Homo sapiens
  chr20:32377129-32377149
  hypo
tgagccactgtgcctggcca

SEQ ID NO: 98875 - DNA, 592 bp, Homo sapiens
  chr20:32378462-32379054
  hypo
tgtgggtggcctcaggcgtcacggcccctccctgagcctgagatgacctggcaaagcgagccaaggtgcagagagtgagcagctgttccaggcagaggagaatggcaagtacaaaggcgcagagggaggagccagcgtggcatctctgaggagagcgagtgtggctggcgcagagagtggctggaagaaggcagacgacgagggtggagagagctggggccagatcacacaggtgctggtggggaaagagcctggattttattcccagcgcagggcactgttgcggggtgaaggtctggatgcttctcactgactttcccttgccctccaggcatgaagctccacaaatgcgccctgtgcagcaagtccttcagccgccgtgcccacctcgccgagcatcagcgcgcccacacgggcaactacaagttccgctgtgctggctgcgccaagggcttttcccgccacaaatacctcaaagatcaccgctgtcgtctcggcccccaaaaggacaaggacctgcaaacccggcggcccccccagaggagggcagccccccgcagttgcggcagtggtgggcgcaaggtgctgaccc

SEQ ID NO: 98876 - DNA, 36 bp, Homo sapiens
  chr20:32381767-32381803
  hypo
cattgaaagaaatgtgaagaacgacatcttcagccg

SEQ ID NO: 98877 - DNA, 215 bp, Homo sapiens; identical to SEQ ID NO: 33209
  chr20:32413014-32413229
  hypo

SEQ ID NO: 98878 - DNA, 256 bp, Homo sapiens; identical to SEQ ID NO: 33210
  chr20:32436252-32436508
  hypo

SEQ ID NO: 98879 - DNA, 31 bp, Homo sapiens; identical to SEQ ID NO: 33211
  chr20:32441487-32441518
  hypo

SEQ ID NO: 98880 - DNA, 50 bp, Homo sapiens
  chr20:32450377-32450427
  hypo
gcccggctggcttgtgtttatttaaggaatggaagcgttcactcaagcca

SEQ ID NO: 98881 - DNA, 32 bp, Homo sapiens; identical to SEQ ID NO: 33212
  chr20:32584927-32584959
  hypo

SEQ ID NO: 98882 - DNA, 30 bp, Homo sapiens
  chr20:32667833-32667863
  hypo
gcctcctcccccaacgcatcccagccagtg

SEQ ID NO: 98883 - DNA, 30 bp, Homo sapiens
  chr20:32676483-32676513
  hypo
gcagatcacagcaccgacacagaagatggc

SEQ ID NO: 98884 - DNA, 295 bp, Homo sapiens
  chr20:32677609-32677904
  hypo
aacatctagaatgacaagtttcgcactgtaggaaatagagtcgtgtgtccttctgcaggattgtgtccggtgatcggcatgtgtgacaagtgacatattcctctgcaaataaagcaacacacagaattacctggtggctgcagtgaggtagagaagtttctgccttcttaaatacatctacaaagaactccacaagcccaggctgagaatttagctgggcacccagaccagggaagcgcagctattcgaggggtaagaaaacacaagctgtctgctgtggcgcttccggcactaa

SEQ ID NO: 98885 - DNA, 42 bp, Homo sapiens
  chr20:32768413-32768455
  hypo
gcaggtttagaaaacttcaatcgaaatattttctgggccgtg

SEQ ID NO: 98886 - DNA, 31 bp, Homo sapiens
  chr20:32950142-32950173
  hypo
agggaggatttgaatccggtcagtgtaactc

SEQ ID NO: 98887 - DNA, 101 bp, Homo sapiens; identical to SEQ ID NO: 33214
  chr20:33085650-33085751
  hypo

SEQ ID NO: 98888 - DNA, 140 bp, Homo sapiens; identical to SEQ ID NO: 33215
  chr20:33112447-33112587
  hypo

SEQ ID NO: 98889 - DNA, 19 bp, Homo sapiens
  chr20:33112826-33112845
  hypo
ccccatttgccactttata

SEQ ID NO: 98890 - DNA, 220 bp, Homo sapiens
  chr20:33131651-33131871
  hypo
gaagtggcagcttctcgggaggtgccgcagctgccatctcccgtcagcactcatgcctccgcctcagccctggccacggctccctggaattctgatcctcctctgtgagctggtattgctgtttctccaaaaattaaaaatgctcaaaggattataggttttctcctctttcgtatgtttggctctgagacactgcatgttggcacgtttttcattgaga

SEQ ID NO: 98891 - DNA, 245 bp, Homo sapiens; identical to SEQ ID NO: 33217
  chr20:33134795-33135040
  hypo

SEQ ID NO: 98892 - DNA, 26 bp, Homo sapiens
  chr20:33179692-33179718
  hypo
tagaaatttactttggtaggccggcg

SEQ ID NO: 98893 - DNA, 156 bp, Homo sapiens
  chr20:33183816-33183972
  hypo
tggagcgagaccctgtctcaaaaacaaaacaaaacaaaaaaagttacagtggagaaacctggcagacactaacgtcaccaagtgatcaaggtaaacattagcattgagaagatatggcaatatcatgaacccctcggtacagtgcactgaggacac

SEQ ID NO: 98894 - DNA, 107 bp, Homo sapiens
  chr20:33265906-33266013
  hypo
ctagttcaacaagtcgcttaacccttgtgtgctgaaaaatgtgctgattataggctaactagggacagttgaggaaggcttagaaattttttttttgttttggaaac

SEQ ID NO: 98895 - DNA, 26 bp, Homo sapiens
  chr20:33290606-33290632
  hypo
actccgtctcaaaaaaaaaaaaaaag

SEQ ID NO: 98896 - DNA, 30 bp, Homo sapiens; identical to SEQ ID NO: 12934
  chr20:33345729-33345759
  hypo

SEQ ID NO: 98897 - DNA, 16 bp, Homo sapiens
  chr20:33349757-33349773
  hypo
actgcatggtttctat

SEQ ID NO: 98898 - DNA, 30 bp, Homo sapiens
  chr20:33447336-33447366
  hypo
ggccgatgcagcaacgagccaggtagtggc

SEQ ID NO: 98899 - DNA, 590 bp, Homo sapiens; identical to SEQ ID NO: 57155
  chr20:33464342-33464932
  hypo

SEQ ID NO: 98900 - DNA, 22 bp, Homo sapiens
  chr20:33540535-33540557
  hypo
cgaggctttgtatttttaacaa

SEQ ID NO: 98901 - DNA, 50 bp, Homo sapiens
  chr20:33544842-33544892
  hypo
tgagaccctgtcctaaaaacaaaacaaacgagcagcgaaggcatataatt

SEQ ID NO: 98902 - DNA, 79 bp, Homo sapiens
  chr20:33547577-33547656
  hypo
ctttcctcactttcaaagtgaaatctgttttttcctaacaataactaccctttattgatctggtcgctaagtgtcaggt

SEQ ID NO: 98903 - DNA, 136 bp, Homo sapiens
  chr20:33572691-33572827
  hypo
tgccatggaggcctttggcaacgccaagaccctgaggaatgataactcctcccgctttgtgagtggctgaggtgggaggggtggcggggatgccgtaggccaccagcggcaggtcgggcacaggtggggacagtgc

SEQ ID NO: 98904 - DNA, 81 bp, Homo sapiens
  chr20:33579657-33579738
  hypo
ctaacagtctggcctggagatcgttccttatccccaggcgtatgcctgccatcgtcatccgtttttcttggctgtgaaaca

SEQ ID NO: 98905 - DNA, 30 bp, Homo sapiens
  chr20:33581478-33581508
  hypo
atcagcgtgtggcccggaggggtagcgatg

SEQ ID NO: 98906 - DNA, 30 bp, Homo sapiens
  chr20:33588409-33588439
  hypo
tggagcagggcgagcgcagccggcgactgg

SEQ ID NO: 98907 - DNA, 30 bp, Homo sapiens; identical to SEQ ID NO: 33223
  chr20:33589977-33590007
  hypo

SEQ ID NO: 98908 - DNA, 30 bp, Homo sapiens; identical to SEQ ID NO: 33224
  chr20:33665389-33665419
  hypo

SEQ ID NO: 98909 - DNA, 35 bp, Homo sapiens
  chr20:33696513-33696548
  hypo
gcgacagagacttcgtctcaaaaaacaaacaaaca

SEQ ID NO: 98910 - DNA, 82 bp, Homo sapiens
  chr20:33803019-33803101
  hypo
cctccattttctgccaattaaaacttcacacagtcttccattgcttgtaacttttgaacacgtgtgtggtaatgttctgtgt

SEQ ID NO: 98911 - DNA, 229 bp, Homo sapiens
  chr20:33854996-33855225
  hypo
cctctctccaggacccccagccgagcctctggagcccacaaggccactccctacactccccgtccgcaggatccactcaccatcggagaggaaacacgagcgccagcccaggccccctcggccgcccctcggggaccggccatccacaccaggcaccaaacccaacatctgtgacggcaacttcaacacagtggccctcttccggggcgagatgtttgtctttaaggta

SEQ ID NO: 98912 - DNA, 118 bp, Homo sapiens
  chr20:33864188-33864306
  hypo
cctgtccactcacatgaaactcgtgttaggccctgggaggccgacggtaactctcaccgtgccctcagatgaagcacagagaggttgttacttgcccgggccatccagtgggctggct

SEQ ID NO: 98913 - DNA, 460 bp, Homo sapiens; identical to SEQ ID NO: 33225
  chr20:33879775-33880235
  hypo

SEQ ID NO: 98914 - DNA, 20 bp, Homo sapiens
  chr20:33945866-33945886
  hypo
agaatgcaggctgggcgcgc

SEQ ID NO: 98915 - DNA, 21 bp, Homo sapiens
  chr20:33959417-33959438
  hypo
agccaccgcgcccagcctgag

SEQ ID NO: 98916 - DNA, 24 bp, Homo sapiens
  chr20:33988031-33988055
  hypo
ctcgtcctttttcctttccacctc

SEQ ID NO: 98917 - DNA, 30 bp, Homo sapiens; identical to SEQ ID NO: 33228
  chr20:34022336-34022366
  hypo

SEQ ID NO: 98918 - DNA, 42 bp, Homo sapiens
  chr20:34041980-34042022
  hypo
aatttatacacaaggccgggcgcggtggctcacgcctgtaat

SEQ ID NO: 98919 - DNA, 53 bp, Homo sapiens
  chr20:34055212-34055265
  hypo
gtctcgggaacccaacggatctggaagaatggatgggcgggagccggcccagc

SEQ ID NO: 98920 - DNA, 50 bp, Homo sapiens
  chr20:34092135-34092185
  hypo
aagagcagcatctcctcgagcaggcagaattgagccgcagtctggaggcc

SEQ ID NO: 98921 - DNA, 367 bp, Homo sapiens
  chr20:34147939-34148306
  hypo
agcactgcaggctgccggaactccgcctcctccagggcaaagggtccagacctgcgccagacgctcacctcccgctccgtgggcaggtagtcaaagcggaacacaaagcgccaattgaagttcccctccccagtcagggagttgaagtgaacgtctgtctcctgcttgtcatgctccaaccccttcacccagctggggccggggtgggtgagcgtcagggctggagctacatggagaacccactcctcaccccgctctcagcaccacggagggcctggggtcggggctctggactcagcccgagggcccacacccatttgcaatccccctagtgcaccgccgttgccccgcccggccagcagcctac

SEQ ID NO: 98922 - DNA, 37 bp, Homo sapiens; identical to SEQ ID NO: 33230
  chr20:34176525-34176562
  hypo

SEQ ID NO: 98923 - DNA, 148 bp, Homo sapiens
  chr20:34195357-34195505
  hypo
gtcggtcgtgggtgccggtcagccctgttagtcgttgcacgcgttaccgtcagagccatggtcccagtggcactggcacttcctctgcccgtctgcccttctgcccaccagcccgcccacctgaatcgcctctgactcactggactca

SEQ ID NO: 98924 - DNA, 84 bp, Homo sapiens
  chr20:34200332-34200416
  hypo
gtgagccactgtgcccggctcacctctattaaaaggacccaaaggagttaacggacagaaaacgtggcagaggcagagatgggg

SEQ ID NO: 98925 - DNA, 30 bp, Homo sapiens
  chr20:34242964-34242994
  hypo
tggcagtttcaaaacgcctacgactcagtt

SEQ ID NO: 98926 - DNA, 117 bp, Homo sapiens
  chr20:34312501-34312618
  hypo
tgtactatgattggcacgcctaaaactcgttggccagttaatcctattgctagaggcactgagctaacatcgacgaactccacataagcaattcctttggaacgtcttgaatttctg

SEQ ID NO: 98927 - DNA, 19 bp, Homo sapiens
  chr20:34345914-34345933
  hypo
actattggccgggcgcggt

SEQ ID NO: 98928 - DNA, 191 bp, Homo sapiens; identical to SEQ ID NO: 12943
  chr20:34359741-34359932
  hypo

SEQ ID NO: 98929 - DNA, 41 bp, Homo sapiens
  chr20:34472078-34472119
  hypo
attaacgtaagtaagcggaaatagggcgggaccatgaccat

SEQ ID NO: 98930 - DNA, 95 bp, Homo sapiens
  chr20:34655042-34655137
  hypo
cctgaaattgtggtccttggacgagcagtatctggaccacctgggaacttattaaaatacaaattctcaggtcaggagatcgagaccatcctggc

SEQ ID NO: 98931 - DNA, 87 bp, Homo sapiens; identical to SEQ ID NO: 33232
  chr20:34670677-34670764
  hypo

SEQ ID NO: 98932 - DNA, 185 bp, Homo sapiens; identical to SEQ ID NO: 57167
  chr20:34680179-34680364
  hypo

SEQ ID NO: 98933 - DNA, 988 bp, Homo sapiens; identical to SEQ ID NO: 57168
  chr20:34680572-34681560
  hypo

SEQ ID NO: 98934 - DNA, 24 bp, Homo sapiens
  chr20:34683669-34683693
  hypo
aaatgcaatttattggcagggcgt

SEQ ID NO: 98935 - DNA, 23 bp, Homo sapiens
  chr20:34683932-34683955
  hypo
gcgagactccatctcagggaaaa

SEQ ID NO: 98936 - DNA, 31 bp, Homo sapiens; identical to SEQ ID NO: 33235
  chr20:34730052-34730083
  hypo

SEQ ID NO: 98937 - DNA, 30 bp, Homo sapiens
  chr20:34844496-34844526
  hypo
tcttaaggcctttacgaagttttgtgcctt

SEQ ID NO: 98938 - DNA, 31 bp, Homo sapiens
  chr20:34859595-34859626
  hypo
gcctgcccagagcttccgagggtgctgacgg

SEQ ID NO: 98939 - DNA, 24 bp, Homo sapiens
  chr20:35088589-35088613
  hypo
aatcaaccttggctcacgcctgta

SEQ ID NO: 98940 - DNA, 83 bp, Homo sapiens; identical to SEQ ID NO: 33237
  chr20:35088672-35088755
  hypo

SEQ ID NO: 98941 - DNA, 166 bp, Homo sapiens
  chr20:35089001-35089167
  hypo
acaagagttgggtctgcgtctggcagacctaccacaggtgcggcctggagagatgaggcccacaaggcagcgacaggacctggattcagtgaggagaggggactcgcggggtagaagccaggaactgggaaggcgaggaggcgtgaaggcaccacctactgccaac

SEQ ID NO: 98942 - DNA, 15 bp, Homo sapiens
  chr20:35168996-35169011
  hypo
tgatccttgctgggt

SEQ ID NO: 98943 - DNA, 65 bp, Homo sapiens
  chr20:35169055-35169120
  hypo
ctattttcaacacatcacccagaaggattccgtcaaaacccaagccaggtcgtcaccccctgctc

SEQ ID NO: 98944 - DNA, 13 bp, Homo sapiens
  chr20:35169198-35169211
  hypo
cccccatcctcct

SEQ ID NO: 98945 - DNA, 30 bp, Homo sapiens
  chr20:35206985-35207015
  hypo
ccttctagcttgctcggtctgtgttacggc

SEQ ID NO: 98946 - DNA, 29 bp, Homo sapiens
  chr20:35380153-35380182
  hypo
ccgcacccggcactccctttttgtttata

SEQ ID NO: 98947 - DNA, 129 bp, Homo sapiens; identical to SEQ ID NO: 33239
  chr20:35441116-35441245
  hypo

SEQ ID NO: 98948 - DNA, 84 bp, Homo sapiens
  chr20:35442202-35442286
  hypo
taaatcgctctctttccctggaaatgaaaaattccctgccattgctctgaggatgaagatcaaacctcccgcatgctcagtgca

SEQ ID NO: 98949 - DNA, 856 bp, Homo sapiens; identical to SEQ ID NO: 33241
  chr20:35443719-35444575
  hypo

SEQ ID NO: 98950 - DNA, 85 bp, Homo sapiens
  chr20:35467711-35467796
  hypo
ggtactgcaggatgcggcaggtcttgctggcctggtccagctgctgtcgcagctcctgcagctgatacacgtcctcctccatata

SEQ ID NO: 98951 - DNA, 30 bp, Homo sapiens; identical to SEQ ID NO: 12950
  chr20:35491340-35491370
  hypo

SEQ ID NO: 98952 - DNA, 31 bp, Homo sapiens
  chr20:35553257-35553288
  hypo
ctattaaaaaattagatttctcggccgggca

SEQ ID NO: 98953 - DNA, 31 bp, Homo sapiens; identical to SEQ ID NO: 33243
  chr20:35612049-35612080
  hypo

SEQ ID NO: 98954 - DNA, 98 bp, Homo sapiens
  chr20:35615274-35615372
  hypo
tggacctggctagatacgactttcaccaacccgcaaagccacccttgctggaatcacagaagcctccttgagattttggtccacgaagacatggacca

SEQ ID NO: 98955 - DNA, 30 bp, Homo sapiens; identical to SEQ ID NO: 33245
  chr20:35627247-35627277
  hypo

SEQ ID NO: 98956 - DNA, 21 bp, Homo sapiens
  chr20:35748758-35748779
  hypo
ccaccgcgcctgcccttgaat

SEQ ID NO: 98957 - DNA, 37 bp, Homo sapiens; identical to SEQ ID NO: 33246
  chr20:35788335-35788372
  hypo

SEQ ID NO: 98958 - DNA, 137 bp, Homo sapiens; identical to SEQ ID NO: 33247
  chr20:35812618-35812755
  hypo

SEQ ID NO: 98959 - DNA, 88 bp, Homo sapiens
  chr20:35833167-35833255
  hypo
aggaccttgttgctcgcctggatgaactcgggggcgtgtatctccagtttgaagaaggactggaaacaacagcgttatttgtggctgc

SEQ ID NO: 98960 - DNA, 94 bp, Homo sapiens
  chr20:35860692-35860786
  hypo
cggcagcacctgttccgcgagcctgagaagaggccccccaccgtggtgtccaatacattcactgccctgatcctctcgccgttgcttctgctct

SEQ ID NO: 98961 - DNA, 517 bp, Homo sapiens
  chr20:35874022-35874539
  hypo
agaaaaatagcactccgtcttaagtaggaccctccccggagtgggaagctcccagctcctctgcggggcaagtggagtctctccgacgccattcgtgccgtggttaatggtatggagcactggagttgttgctatggtggtttttcccctataattgcattcacctccaaaaccacaagtagcagcaggtcccagcagtcgttattttatttgaaaaactaattggaagttgaaagagccctcggcttttgcttttgtcaggataggccaaggaaagagatgagcaggtgggtctgggaggaaggagggggtcttggggcaggccgggcgcgcctcccattcacagccccttcctttgtgcctgcctctcttggttgaagtgggccacctgccctctaaggccagccttttcctccgagggggcttttgtctcccattgttctgattgtctcctccgtggagccgcctcagtggccccctgcagacggtttcccaggcttcacgttttttttctcag

SEQ ID NO: 98962 - DNA, 30 bp, Homo sapiens
  chr20:35907768-35907798
  hypo
atggtgttcttgccccgcggccagctttct

SEQ ID NO: 98963 - DNA, 30 bp, Homo sapiens; identical to SEQ ID NO: 33251
  chr20:35924169-35924199
  hypo

SEQ ID NO: 98964 - DNA, 30 bp, Homo sapiens
  chr20:35925492-35925522
  hypo
gcggagaaatgaggacgcgttcttaagctt

SEQ ID NO: 98965 - DNA, 94 bp, Homo sapiens; identical to SEQ ID NO: 33252
  chr20:35929625-35929719
  hypo

SEQ ID NO: 98966 - DNA, 103 bp, Homo sapiens
  chr20:35940185-35940288
  hypo
ggcctgttgtcattgttttaggaaaatcgactctgaaaggaacgtaaagtaaactctgacgagcatggggaggtagaggcacgggcaggagagtctgtgggag

SEQ ID NO: 98967 - DNA, 283 bp, Homo sapiens
  chr20:35956276-35956559
  hypo
tgaaagggcctctcctccccccgctgcggggcttggagcctgtgagttcacggaactggacagtggccgagctttcagagactgccgagtccaactcagttttgcagacgaggaaacctgggctttcacatttatggaaacggagccaggagcagggccgaggccatgtgaatacgacccatccccactgctggcgggcctgtgggccgaggccatcttagtacgacccatccccactgctggcaggcctgtggttcatcccgcatcactctaagcttcagcc

SEQ ID NO: 98968 - DNA, 44 bp, Homo sapiens
  chr20:35987216-35987260
  hypo
catgtctgccggtgtccgccccggcctgccgtctccaccccagc

SEQ ID NO: 98969 - DNA, 30 bp, Homo sapiens; identical to SEQ ID NO: 33254
  chr20:36146054-36146084
  hypo

SEQ ID NO: 98970 - DNA, 248 bp, Homo sapiens
  chr20:36151105-36151353
  hypo
tgtcgcggaccgggcggcaggtgttgggggagcgcaggcagcgagcccccaactgaggccccagctcccagccctgggcggccgtatcatcaggtgctcctgtgcatctcggccagcacgggagccagtgccgcgcaggaatgtggggtcccctgtgttccctcgccagaggagcacttggcaaggtcagtgaggggccagtagacccccggagaagcagtaccgacaatgacgaagataccagatcc

SEQ ID NO: 98971 - DNA, 31 bp, Homo sapiens; identical to SEQ ID NO: 12954
  chr20:36235666-36235697
  hypo

SEQ ID NO: 98972 - DNA, 30 bp, Homo sapiens
  chr20:36475442-36475472
  hypo
gtattaaggaagatacggcgagtcaccctg

SEQ ID NO: 98973 - DNA, 51 bp, Homo sapiens
  chr20:36532324-36532375
  hypo
ccacctgcagacacactggtgcgcgcgcgcgcacacacacacaggcacaca

SEQ ID NO: 98974 - DNA, 31 bp, Homo sapiens
  chr20:36567344-36567375
  hypo
aaagacatgagaagaccgatctgtagtttat

SEQ ID NO: 98975 - DNA, 209 bp, Homo sapiens
  chr20:36572547-36572756
  hypo
gtcctgcatctgcccgaagcccctcccgccgcgcccgccccgccgccccccaagccaggcaaggagctgaggaagcgctcggtggaccaggaggcctgcagcctctagactgatgcccctgcccccgcccatccgcccccacgctgtacagagtgcatgaggagccgccggaccaccggggaccgactgcctgcgtccagccgcgcccc

SEQ ID NO: 98976 - DNA, 31 bp, Homo sapiens; identical to SEQ ID NO: 33257
  chr20:36627480-36627511
  hypo

SEQ ID NO: 98977 - DNA, 33 bp, Homo sapiens
  chr20:36666709-36666742
  hypo
tttttttttttttttttgagacggagtctctta

SEQ ID NO: 98978 - DNA, 31 bp, Homo sapiens; identical to SEQ ID NO: 33258
  chr20:36759315-36759346
  hypo

SEQ ID NO: 98979 - DNA, 301 bp, Homo sapiens
  chr20:36760811-36761112
  hypo
tccacgaggagggcccgcaccttgatgaggttggactccgtaaggcagtcacggtatttctcatagaggatgcaaagaggaacgctcttctctgcagaaggggagaaaggagggtgctcatgatgcagaatcacccctcccaactctcttgcaactccaagaggcacagagaggggaaggaatgtgcttggggtcacacagcgggggaatggctgggcggatccctgaactccccactgtggctccagggttcccagcgaggagctggagagtggacactgagcagcgggtagaggacgca

SEQ ID NO: 98980 - DNA, 281 bp, Homo sapiens
  chr20:36764033-36764314
  hypo
cctgtctcggactctcggggcctggatgagcagcgagggccgggtcctttctacaccaccgaggtgtcagggacacaggaacccccgagcccagggctgacaccactgcctgggacagaaggtgttcaggaaaggtcccgggcttctcgcctccccacgcctcttagcactcgcactcagggaggagtgagggccccaccgtgtgctggtgctgctgtgccctttccagatacctcctgagcacgcatcctctccctcagtcctcacggctgcgggcgcat

SEQ ID NO: 98981 - DNA, 218 bp, Homo sapiens
  chr20:36765890-36766108
  hypo
ctttagttctacggttgcaccagccacatttcaagcgcttagcagccacgtgcagctggtggcagccatgctggataggcggtgcagactcagcacgtctccatcactgtggaaagtgcaacaggcactttccaaggcgctgggttagagacttttctttgaggccgagagcaaccagaggcacaggagaggttctcgaagggcccatggagagaggc

SEQ ID NO: 98982 - DNA, 30 bp, Homo sapiens
  chr20:36766574-36766604
  hypo
tcccattgtagctgacggtgcgggcacaga

SEQ ID NO: 98983 - DNA, 42 bp, Homo sapiens
  chr20:36766839-36766881
  hypo
gggggctgcaacagggcgagctgtcttcgcagaggcctgatg

SEQ ID NO: 98984 - DNA, 354 bp, Homo sapiens
  chr20:36767669-36768023
  hypo
ctgaagatggagtatagcctacggggccattgctgtacgtaggctaccaattaaaacacacgcacacacatacacgagcctgccgggctgggaaaactggatgcttatcttcaaggctgcattaaagactctgagggcacataccctctgggtatttgtaggtgtgggtgatatcctcccgctcgtctcggcccacgctcttagtgctgatcttcagcccaacgatcagggaacggttgatggatttgtgcacagacccatcgtcctgctggatccagtctaccacgtcggcattgacctccgcaaagacaaagggcgcatcgtacttggtgctcaggtcgccctccttgatgg

SEQ ID NO: 98985 - DNA, 187 bp, Homo sapiens
  chr20:36770629-36770816
  hypo
aggtcctggagacatccgccctgctctgggcctccacctgcccatctgcattccagggaacactgtacctgctgtccaagtgctgagaacatgagccagcccttcctgccgggacaatggcgcccacctctctggtcaccccatgtccattctatgcccctcacatcacagttgccagaaggagact

SEQ ID NO: 98986 - DNA, 31 bp, Homo sapiens
  chr20:36774949-36774980
  hypo
ctattggataaaggaccggagagggtggtca

SEQ ID NO: 98987 - DNA, 161 bp, Homo sapiens
  chr20:36779358-36779519
  hypo
tatgttcttgatgaacttggccgagccctggtagataaagccctgctgggtgaggacatactcctgccgctcctcttccgagtccaggtacacagcatccgctgcaggcaggaagaaagggacctcagctctgggtctgcggaggcccagggtccctgcaa

SEQ ID NO: 98988 - DNA, 67 bp, Homo sapiens
  chr20:36802981-36803048
  hypo
ttgttgcaggtatcagcggttcattcctttttattactgagtactattctgtcgcatgaatatacca

SEQ ID NO: 98989 - DNA, 31 bp, Homo sapiens
  chr20:36848110-36848141
  hypo
agaacatgaagctgctcgtccacaaggctgt

SEQ ID NO: 98990 - DNA, 31 bp, Homo sapiens
  chr20:36992908-36992939
  hypo
acctctcaggtcttaacgcttccctcctcct

SEQ ID NO: 98991 - DNA, 121 bp, Homo sapiens
  chr20:37036240-37036361
  hypo
tctccgcccagcagccgccctgtccgggaggtggggggcagccccgccccccgggccagccgccccatcctggagggaggtggggggcagcccccccccgccagccgccccatcggggagg

SEQ ID NO: 98992 - DNA, 50 bp, Homo sapiens; identical to SEQ ID NO: 33264
  chr20:37054865-37054915
  hypo

SEQ ID NO: 98993 - DNA, 30 bp, Homo sapiens
  chr20:37057167-37057197
  hypo
gatgctgactaaaccgttcttctcacctga

SEQ ID NO: 98994 - DNA, 44 bp, Homo sapiens; identical to SEQ ID NO: 33265
  chr20:37114342-37114386
  hypo

SEQ ID NO: 98995 - DNA, 30 bp, Homo sapiens; identical to SEQ ID NO: 33266
  chr20:37217070-37217100
  hypo

SEQ ID NO: 98996 - DNA, 484 bp, Homo sapiens; identical to SEQ ID NO: 12962
  chr20:37274670-37275154
  hypo

SEQ ID NO: 98997 - DNA, 862 bp, Homo sapiens; identical to SEQ ID NO: 57196
  chr20:37302481-37303343
  hypo

SEQ ID NO: 98998 - DNA, 31 bp, Homo sapiens; identical to SEQ ID NO: 57197
  chr20:37351616-37351647
  hypo

SEQ ID NO: 98999 - DNA, 626 bp, Homo sapiens; identical to SEQ ID NO: 57198
  chr20:37351889-37352515
  hypo

SEQ ID NO: 99000 - DNA, 1112 bp, Homo sapiens; identical to SEQ ID NO: 57199
  chr20:37352606-37353718
  hypo

SEQ ID NO: 99001 - DNA, 25 bp, Homo sapiens
  chr20:37383057-37383082
  hypo
ctttaaaaaaaacaatggagtcggc

SEQ ID NO: 99002 - DNA, 152 bp, Homo sapiens; identical to SEQ ID NO: 57206
  chr20:37434200-37434352
  hypo

SEQ ID NO: 99003 - DNA, 233 bp, Homo sapiens; identical to SEQ ID NO: 12972
  chr20:37434488-37434721
  hypo

SEQ ID NO: 99004 - DNA, 157 bp, Homo sapiens; identical to SEQ ID NO: 12973
  chr20:37434736-37434893
  hypo

SEQ ID NO: 99005 - DNA, 439 bp, Homo sapiens; identical to SEQ ID NO: 12974
  chr20:37434930-37435369
  hypo

SEQ ID NO: 99006 - DNA, 429 bp, Homo sapiens; identical to SEQ ID NO: 57210
  chr20:37435487-37435916
  hypo

SEQ ID NO: 99007 - DNA, 30 bp, Homo sapiens; identical to SEQ ID NO: 33275
  chr20:37464579-37464609
  hypo

SEQ ID NO: 99008 - DNA, 121 bp, Homo sapiens; identical to SEQ ID NO: 33276
  chr20:37540090-37540211
  hypo

SEQ ID NO: 99009 - DNA, 121 bp, Homo sapiens
  chr20:37588338-37588459
  hypo
actccatctaaaaaagaaaaaagattatgatccaataatacaggcatggccgatttactgtctcttcataaacaggaaggtttcattatatgagtaatagataaaatagataagttatttt

SEQ ID NO: 99010 - DNA, 148 bp, Homo sapiens
  chr20:37596754-37596902
  hypo
tttctagtgcttagagtggtacgtgacatggagtgggcccttggtccatccttgctggtccttgctggaccacgatgaatgattggtagaggagttgtaagcgtgaaccctggcactgccggcagccgtctttccagctcctgtacag

SEQ ID NO: 99011 - DNA, 86 bp, Homo sapiens
  chr20:37622328-37622414
  hypo
tttttttttttttttcacgttggctatttttcaagggctctatagccacaggtggctagtggcttatgcatcggacagtacaaata

SEQ ID NO: 99012 - DNA, 199 bp, Homo sapiens
  chr20:37632408-37632607
  hypo
tgtgtcgatgctcatcgagcaggctcgagcactagctcgcactgggatgaagagacacctccgagttctccccatgtatgcaggactgccttcctttgagcaaatgaaagtgtttgaaagggtgtcacgcagtgtcagaaaggtgagactatcctgatgaccaagggtgttggcagccgtctataatcataatgatgct

SEQ ID NO: 99013 - DNA, 44 bp, Homo sapiens; identical to SEQ ID NO: 33278
  chr20:37632980-37633024
  hypo

SEQ ID NO: 99014 - DNA, 85 bp, Homo sapiens
  chr20:37646845-37646930
  hypo
gtatgagaagggcacaggacacgggatgccatcgataccatcctggcacatctgtggcctgtccggtcctggaggtggtagaaag

SEQ ID NO: 99015 - DNA, 152 bp, Homo sapiens; identical to SEQ ID NO: 33279
  chr20:37656984-37657136
  hypo

SEQ ID NO: 99016 - DNA, 45 bp, Homo sapiens; identical to SEQ ID NO: 33280
  chr20:37659949-37659994
  hypo

SEQ ID NO: 99017 - DNA, 26 bp, Homo sapiens
  chr20:37672973-37672999
  hypo
cacccggcctcttcatttcttattat

SEQ ID NO: 99018 - DNA, 168 bp, Homo sapiens; identical to SEQ ID NO: 33282
  chr20:37673287-37673455
  hypo

SEQ ID NO: 99019 - DNA, 27 bp, Homo sapiens
  chr20:37995836-37995863
  hypo
aagagcgaaactccatctcaaaaaaac

SEQ ID NO: 99020 - DNA, 23 bp, Homo sapiens
  chr20:38065080-38065103
  hypo
tcggcctcccaaagacctgggat

SEQ ID NO: 99021 - DNA, 35 bp, Homo sapiens
  chr20:38483395-38483430
  hypo
ctttttaaatatcaaataggccgagcgtggtggct

SEQ ID NO: 99022 - DNA, 19 bp, Homo sapiens
  chr20:38487554-38487573
  hypo
gtacagattagtggtttgt

SEQ ID NO: 99023 - DNA, 26 bp, Homo sapiens
  chr20:38787923-38787949
  hypo
ccaccgtgcccagcctcagttctctt

SEQ ID NO: 99024 - DNA, 82 bp, Homo sapiens
  chr20:38809043-38809125
  hypo
tcagaaccatgtcaccattgtcgcagaggaccagctgcgttaaagacctgtgattttatttcatagagatgatccattggct

SEQ ID NO: 99025 - DNA, 29 bp, Homo sapiens
  chr20:38877139-38877168
  hypo
ccgcgcccggcctatttgatattttctaa

SEQ ID NO: 99026 - DNA, 43 bp, Homo sapiens
  chr20:38888177-38888220
  hypo
agttaaaggaacttgaaaaaccgcagatccaagaaggacactc

SEQ ID NO: 99027 - DNA, 45 bp, Homo sapiens
  chr20:39054743-39054788
  hypo
ttacaggcgtgcaacaccgcgcccggccctaagacccatttctaa

SEQ ID NO: 99028 - DNA, 39 bp, Homo sapiens
  chr20:39076957-39076996
  hypo
ttagaaatgcctctgcttggccgggcgcagtggctcacg

SEQ ID NO: 99029 - DNA, 811 bp, Homo sapiens; identical to SEQ ID NO: 12976
  chr20:39316041-39316852
  hypo

SEQ ID NO: 99030 - DNA, 2220 bp, Homo sapiens; identical to SEQ ID NO: 57214
  chr20:39316983-39319203
  hypo

SEQ ID NO: 99031 - DNA, 91 bp, Homo sapiens
  chr20:39436087-39436178
  hypo
ccaagagggaaaaggagtgagcgaggatgaagggtacaaaaagcaaatcaataaacaggttagcgtctgcgtcattattaactctcagcct

SEQ ID NO: 99032 - DNA, 32 bp, Homo sapiens
  chr20:39632611-39632643
  hypo
atgaggcataggcatataggccgggcattgtg

SEQ ID NO: 99033 - DNA, 43 bp, Homo sapiens; identical to SEQ ID NO: 33285
  chr20:39672621-39672664
  hypo

SEQ ID NO: 99034 - DNA, 22 bp, Homo sapiens
  chr20:39687576-39687598
  hypo
ggattaaaaaaaagaatgtggc

SEQ ID NO: 99035 - DNA, 30 bp, Homo sapiens; identical to SEQ ID NO: 33286
  chr20:39739653-39739683
  hypo

SEQ ID NO: 99036 - DNA, 43 bp, Homo sapiens; identical to SEQ ID NO: 33287
  chr20:39831201-39831244
  hypo

SEQ ID NO: 99037 - DNA, 24 bp, Homo sapiens
  chr20:39847848-39847872
  hypo
gtcagccaccgcacctggccttcc

SEQ ID NO: 99038 - DNA, 22 bp, Homo sapiens
  chr20:39893818-39893840
  hypo
atcactgaagtcattacgataa

SEQ ID NO: 99039 - DNA, 30 bp, Homo sapiens
  chr20:39972290-39972320
  hypo
ggtgggggtcttgtcgtttaggctcttcca

SEQ ID NO: 99040 - DNA, 129 bp, Homo sapiens; identical to SEQ ID NO: 33290
  chr20:39989812-39989941
  hypo

SEQ ID NO: 99041 - DNA, 76 bp, Homo sapiens; identical to SEQ ID NO: 57218
  chr20:39994654-39994730
  hypo

SEQ ID NO: 99042 - DNA, 961 bp, Homo sapiens; identical to SEQ ID NO: 57219
  chr20:39994762-39995723
  hypo

SEQ ID NO: 99043 - DNA, 323 bp, Homo sapiens
  chr20:40020280-40020603
  hypo
tagaatcatggtggaaggcaaggagaagcaaggcacatcttacatgagggcaggaggtggcggggcagagagagagagcgcgcctcaatggctttcaatagttcaagtgcattcacaccaggcgcattcctgcgcttgagattcctagcatcagccaggagcggcttagtgggagaaagagctgcgacggtgatgatagtgacattccaaagttttgtggcaacatgaaggaggaggtgtgtctgcgcttgcacagtgactgcagcccttgggcagatgtggagaatgtgtgaggctaaaggctcccacgcagcatggggcat

SEQ ID NO: 99044 - DNA, 65 bp, Homo sapiens
  chr20:40161662-40161727
  hypo
ctcagagaagggagaaaggaacgtacctggccttcctggacttcgtcctggctgcagagtcagtg

SEQ ID NO: 99045 - DNA, 42 bp, Homo sapiens
  chr20:40352412-40352454
  hypo
actaaaacaataacttagtagcggtttttttttgttgttgtt

SEQ ID NO: 99046 - DNA, 30 bp, Homo sapiens
  chr20:41614691-41614721
  hypo
ttcattcatctctatcgatcattcattcca

SEQ ID NO: 99047 - DNA, 415 bp, Homo sapiens; identical to SEQ ID NO: 57222
  chr20:41817500-41817915
  hypo

SEQ ID NO: 99048 - DNA, 741 bp, Homo sapiens; identical to SEQ ID NO: 12983
  chr20:41818007-41818748
  hypo

SEQ ID NO: 99049 - DNA, 343 bp, Homo sapiens; identical to SEQ ID NO: 57224
  chr20:41818804-41819147
  hypo

SEQ ID NO: 99050 - DNA, 342 bp, Homo sapiens
  chr20:42088444-42088786
  hypo
tggcagagacaaatacggaccacctgttcgtacagaatacaggcttattgtagaaaatctttctagtcggtgcagttggcaagatttaaaggtatgttttgtaattcaagatagaaatgatatgactaatgctttaaagtaaactccttttatattcttatttctgggaatttattatggtatatagatgttttaagatttccgagtctgaccaatcttgtctttcaggattttatgcgacaagcaggtgaagtaacctatgcggatgcccacaaggaacgaacaaatgagggtgtaattgagtttcgctcctactctgacatgaagcgtgctttggacaaa

SEQ ID NO: 99051 - DNA, 144 bp, Homo sapiens; identical to SEQ ID NO: 33296
  chr20:42192720-42192864
  hypo

SEQ ID NO: 99052 - DNA, 92 bp, Homo sapiens; identical to SEQ ID NO: 33297
  chr20:42193731-42193823
  hypo

SEQ ID NO: 99053 - DNA, 28 bp, Homo sapiens
  chr20:42229176-42229204
  hypo
cttgtgatccgcccgccttggcctctgg

SEQ ID NO: 99054 - DNA, 29 bp, Homo sapiens
  chr20:42281345-42281374
  hypo
ttaaagagaaaccagagtggccgggcgcg

SEQ ID NO: 99055 - DNA, 170 bp, Homo sapiens; identical to SEQ ID NO: 33298
  chr20:42314842-42315012
  hypo

SEQ ID NO: 99056 - DNA, 31 bp, Homo sapiens; identical to SEQ ID NO: 33299
  chr20:42320467-42320498
  hypo

SEQ ID NO: 99057 - DNA, 262 bp, Homo sapiens
  chr20:42345994-42346256
  hypo
ttcttgatctaaagccgaggaggggcgggggctctgtgcttcccaccctgcaccccgcaccccgcagcccatgtggctgggctgcatgcacctgcaggttccatggatgaaccacacctaactcacgccctgagcttttgtgatttgtcagcatggagcctatcccctccccaacttcttccccaaggtctgtcactggccgctccctacagtccttggtcacccaaggtggatgacctgtgccccacggtgaggatggagg

SEQ ID NO: 99058 - DNA, 31 bp, Homo sapiens; identical to SEQ ID NO: 33300
  chr20:42565991-42566022
  hypo

SEQ ID NO: 99059 - DNA, 30 bp, Homo sapiens
  chr20:42712322-42712352
  hypo
gccaggtgaagagaacgtgaccggggctat

SEQ ID NO: 99060 - DNA, 43 bp, Homo sapiens
  chr20:42774215-42774258
  hypo
cctgagcgacagagtgaaactcgatctcaaaaaaaaaaaaaaa

SEQ ID NO: 99061 - DNA, 30 bp, Homo sapiens
  chr20:42788288-42788318
  hypo
cgatagcagcggcgcgctgggcaccctcca

SEQ ID NO: 99062 - DNA, 211 bp, Homo sapiens; identical to SEQ ID NO: 33301
  chr20:42833283-42833494
  hypo

SEQ ID NO: 99063 - DNA, 96 bp, Homo sapiens
  chr20:42885842-42885938
  hypo
gagcctgccacagagcgagcacaaggagccctggttcatgcggctcaacctgggcgaggaggtgcccgtcatcatccaccgcgacaacatcatcag

SEQ ID NO: 99064 - DNA, 108 bp, Homo sapiens; identical to SEQ ID NO: 33302
  chr20:42924600-42924708
  hypo

SEQ ID NO: 99065 - DNA, 152 bp, Homo sapiens
  chr20:42931303-42931455
  hypo
gcatttatattacaagacatacggggaaaaacaggagcaactctagccataaaataacccgtatatgacaagttaaattgagaaagaattacctactttcacgaagtgcgctgaggtttattgggctctgcgcttccttaagagtattagaa

SEQ ID NO: 99066 - DNA, 239 bp, Homo sapiens
  chr20:42965897-42966136
  hypo
cccagcccgagagcacggctatgcggctcctgagtggcctggaggtgcccaggtaccgccggaagcgccacatctctgtgagagacatgaatgccttactggattatcacaaccacatccgggccagtgtgtacccacctgccgccaacatggaatacatggtgagtccccgtacctgccccccaccccccgcagtgtcccttccggcaaacgcagccggactcatcttggcctagaat

SEQ ID NO: 99067 - DNA, 18 bp, Homo sapiens
  chr20:42998544-42998562
  hypo
gcccggccctgggctctt

SEQ ID NO: 99068 - DNA, 24 bp, Homo sapiens
  chr20:42999917-42999941
  hypo
tgttgctttttgtttttgagacgg

SEQ ID NO: 99069 - DNA, 196 bp, Homo sapiens
  chr20:43019102-43019298
  hypo
cagtttccatggagaccgcctcccaccatccctgaaatctcattgtgaccagtattaagggattaactctgcccagcggccctcgcagggtctggggtgctgagaggggccagcaggagctccctcaaggatgaagaggttgtgcactgtgcgggaccccatagcagcaggaggaggatgtcggactggggccagg

SEQ ID NO: 99070 - DNA, 31 bp, Homo sapiens
  chr20:43047810-43047841
  hypo
tagttattattttaaacgcttgtacagcaca

SEQ ID NO: 99071 - DNA, 131 bp, Homo sapiens
  chr20:43052652-43052783
  hypo
tgtagatgccaaggggctgagcgatccagggaagatcaagcggctgcgttcccaggtgcaggtgagcttggaggactacatcaacgaccgccagtatgactcgcgtggccgctttggagagctgctgctgc

SEQ ID NO: 99072 - DNA, 18 bp, Homo sapiens
  chr20:43113465-43113483
  hypo
aaaactggctgggcgcgg

SEQ ID NO: 99073 - DNA, 41 bp, Homo sapiens
  chr20:43154800-43154841
  hypo
aggaacgagccactgcgcccggccctactattttcaagagt

SEQ ID NO: 99074 - DNA, 155 bp, Homo sapiens
  chr20:43219719-43219874
  hypo
tagactagtagcagtagtctgcggtaggtccagagggctagtgggcagagggtgctgcggcttgaaaggtatgcaggagatgacttggagaagagtgggcggggacaggctgggggcttgcggagcagcacagcgaaggcctggaggcttggggg

SEQ ID NO: 99075 - DNA, 200 bp, Homo sapiens
  chr20:43356085-43356285
  hypo
aacaccaatattaacacgctgcctggtctgtctggatcccgaggtatggcagaggtgcaagacctagtcccctttcctctaactcactgcctaggaggctggccaaggtgtccagggtcctctagcccactccctgcctacacacacagcctatatcaaacatgcacacgggcgagctttctctccgacttcccctgggc

SEQ ID NO: 99076 - DNA, 425 bp, Homo sapiens; identical to SEQ ID NO: 12994
  chr20:43438793-43439218
  hypo

SEQ ID NO: 99077 - DNA, 267 bp, Homo sapiens; identical to SEQ ID NO: 57243
  chr20:43439247-43439514
  hypo

SEQ ID NO: 99078 - DNA, 30 bp, Homo sapiens
  chr20:43568409-43568439
  hypo
tgccctctcgtgtaccggagcggcccagtg

SEQ ID NO: 99079 - DNA, 200 bp, Homo sapiens
  chr20:43568747-43568947
  hypo
ccatttgtacccagtcgaggatgactccctgtttttttcttcagcccagtcaactcttaagagcacctgagtcacctctcttacattccaccgcctacctgccatcagctcctggttatcttggtaacactcatgtctaaattcaagcttatgatttaactaagtttctttctttttcattccttggttctttttttttt

SEQ ID NO: 99080 - DNA, 30 bp, Homo sapiens
  chr20:43569165-43569195
  hypo
gtgatccacccgcctcgggtggggtttaca

SEQ ID NO: 99081 - DNA, 30 bp, Homo sapiens
  chr20:43586155-43586185
  hypo
atacccactagtgtcggccattattttaaa

SEQ ID NO: 99082 - DNA, 30 bp, Homo sapiens
  chr20:43587107-43587137
  hypo
agggcatcaaccctgcgatccggacaagtc

SEQ ID NO: 99083 - DNA, 32 bp, Homo sapiens; identical to SEQ ID NO: 33307
  chr20:43717046-43717078
  hypo

SEQ ID NO: 99084 - DNA, 42 bp, Homo sapiens; identical to SEQ ID NO: 12996
  chr20:43726587-43726629
  hypo

SEQ ID NO: 99085 - DNA, 330 bp, Homo sapiens; identical to SEQ ID NO: 57248
  chr20:43726764-43727094
  hypo

SEQ ID NO: 99086 - DNA, 174 bp, Homo sapiens
  chr20:43926536-43926710
  hypo
ccccgagagagatgcgctcacctggacagatgctgcctctgaggttctccagcaggtgcgtcatggtgccgaagtccggggcataggacacgtgcagttccgctggctccgaggcgatctcgcgcagctccgcctccaccgccttgcccacgcccacggcgtacatgacgatgc

SEQ ID NO: 99087 - DNA, 30 bp, Homo sapiens
  chr20:43938169-43938199
  hypo
ctcctgtggctggtcgacctgcctgcccta

SEQ ID NO: 99088 - DNA, 25 bp, Homo sapiens
  chr20:43961085-43961110
  hypo
ccactgtgcccggcctatatatata

SEQ ID NO: 99089 - DNA, 31 bp, Homo sapiens
  chr20:43963003-43963034
  hypo
taaaacatttcctgggcgactatgtgagatg

SEQ ID NO: 99090 - DNA, 227 bp, Homo sapiens; identical to SEQ ID NO: 57251
  chr20:43976985-43977212
  hypo

SEQ ID NO: 99091 - DNA, 30 bp, Homo sapiens
  chr20:43995525-43995555
  hypo
tgctgtacttcatccggcgaggaaagcagt

SEQ ID NO: 99092 - DNA, 344 bp, Homo sapiens
  chr20:44005911-44006255
  hypo
agcttatgcagttcttggatccggcggtttgagctcttgagtagcttcaagagcgacaagttttttaacacctgccagggtcaagaaaccaggtaaatagaagcttcagctttcctggacagcctccctctcccctgcctgcctctggctccgctcagccaagggccggcctgctggctcccctgggccactcagcctggcaaccaggggcagtactgcatgagtatatgagcttccccaagctggggccaaaacagggcgtctcaccgttctcagacggttccgctcaattactttgctcacaggctgctctgtctcgtcccgcagtttctcatcttgcatct

SEQ ID NO: 99093 - DNA, 1196 bp, Homo sapiens; identical to SEQ ID NO: 57255
  chr20:44098523-44099719
  hypo

SEQ ID NO: 99094 - DNA, 30 bp, Homo sapiens; identical to SEQ ID NO: 33311
  chr20:44456136-44456166
  hypo

SEQ ID NO: 99095 - DNA, 74 bp, Homo sapiens; identical to SEQ ID NO: 57259
  chr20:44462766-44462840
  hypo

SEQ ID NO: 99096 - DNA, 189 bp, Homo sapiens
  chr20:44463584-44463773
  hypo
catgtgtctgcagaacggagccccccacctgatgggcagtggggcagtcagctcctggcgcggcagctgcaggatttctggaagaagtcccggaacaccttggcaccccagcggctgctcttcgaagtgaccagcgctaacgttgtcaaggacccgccctccaagtacgtggtgagtgagggtctagaa

SEQ ID NO: 99097 - DNA, 30 bp, Homo sapiens
  chr20:44469105-44469135
  hypo
ggactgggcttccccgccactgcgcagcag

SEQ ID NO: 99098 - DNA, 78 bp, Homo sapiens
  chr20:44469455-44469533
  hypo
ttgcccgccgtagccgggcctttgagcagtttttgggtcacctgcaggcagtgcctgagctgcgccatgccccggacc

SEQ ID NO: 99099 - DNA, 30 bp, Homo sapiens; identical to SEQ ID NO: 33313
  chr20:44470444-44470474
  hypo

SEQ ID NO: 99100 - DNA, 18 bp, Homo sapiens
  chr20:44498388-44498406
  hypo
aagaagcctttcttgccg

SEQ ID NO: 99101 - DNA, 42 bp, Homo sapiens; identical to SEQ ID NO: 33314
  chr20:44502011-44502053
  hypo

SEQ ID NO: 99102 - DNA, 30 bp, Homo sapiens
  chr20:44516335-44516365
  hypo
aatccactttacagcgttgacctattcatt

SEQ ID NO: 99103 - DNA, 24 bp, Homo sapiens
  chr20:44537143-44537167
  hypo
aaataaaaaaataggccgggcaca

SEQ ID NO: 99104 - DNA, 30 bp, Homo sapiens
  chr20:44538273-44538303
  hypo
accctcagctgaggcgttgatgtagccccc

SEQ ID NO: 99105 - DNA, 172 bp, Homo sapiens; identical to SEQ ID NO: 57263
  chr20:44540033-44540205
  hypo

SEQ ID NO: 99106 - DNA, 398 bp, Homo sapiens; identical to SEQ ID NO: 57264
  chr20:44540444-44540842
  hypo

SEQ ID NO: 99107 - DNA, 35 bp, Homo sapiens; identical to SEQ ID NO: 33316
  chr20:44560414-44560449
  hypo

SEQ ID NO: 99108 - DNA, 30 bp, Homo sapiens; identical to SEQ ID NO: 33317
  chr20:44567519-44567549
  hypo

SEQ ID NO: 99109 - DNA, 30 bp, Homo sapiens; identical to SEQ ID NO: 33318
  chr20:44577543-44577573
  hypo

SEQ ID NO: 99110 - DNA, 21 bp, Homo sapiens
  chr20:44601522-44601543
  hypo
gggcgctgtgagtcacgcctg

SEQ ID NO: 99111 - DNA, 301 bp, Homo sapiens
  chr20:44601782-44602083
  hypo
ctgggcgacagagcgagaccctctttcaaaaaataaataaatacaagtcaactacctatcctttaaaagtggagaaagaaaaaaaattttaattaaaagtcagctgcccttaaggtatgtccttcctccggaaatgtcaccttctgttttaagacttttagcagtttgcagtggaagagcacaagagggagtaaggcgctctggtttttgtccctaagtctctgtagttccataggctattttccttaattgaaagatacaaattttgggggaaaaaaatctcaaaaaaactcctaagcag

SEQ ID NO: 99112 - DNA, 121 bp, Homo sapiens; identical to SEQ ID NO: 33322
  chr20:44602322-44602443
  hypo

SEQ ID NO: 99113 - DNA, 615 bp, Homo sapiens; identical to SEQ ID NO: 57271
  chr20:44642404-44643019
  hypo

SEQ ID NO: 99114 - DNA, 607 bp, Homo sapiens; identical to SEQ ID NO: 57276
  chr20:44660334-44660941
  hypo

SEQ ID NO: 99115 - DNA, 23 bp, Homo sapiens
  chr20:44720299-44720322
  hypo
aaccctattgagaggtgacagcg

SEQ ID NO: 99116 - DNA, 121 bp, Homo sapiens
  chr20:44720741-44720862
  hypo
acctgcagccagccatgcccgagtctctccgccccaccaaccctcctccctcgggctcctgcgcggcctgagccttcctgacgagcgcagccccctgctccaaggtgcctggtcccatcga

SEQ ID NO: 99117 - DNA, 195 bp, Homo sapiens; identical to SEQ ID NO: 57283
  chr20:44803231-44803426
  hypo

SEQ ID NO: 99118 - DNA, 30 bp, Homo sapiens; identical to SEQ ID NO: 33324
  chr20:44869323-44869353
  hypo

SEQ ID NO: 99119 - DNA, 225 bp, Homo sapiens; identical to SEQ ID NO: 13016
  chr20:44935839-44936064
  hypo

SEQ ID NO: 99120 - DNA, 156 bp, Homo sapiens; identical to SEQ ID NO: 57288
  chr20:44936314-44936470
  hypo

SEQ ID NO: 99121 - DNA, 803 bp, Homo sapiens; identical to SEQ ID NO: 57289
  chr20:44936608-44937411
  hypo

SEQ ID NO: 99122 - DNA, 219 bp, Homo sapiens; identical to SEQ ID NO: 57290
  chr20:44937425-44937644
  hypo

SEQ ID NO: 99123 - DNA, 30 bp, Homo sapiens; identical to SEQ ID NO: 33329
  chr20:44978833-44978863
  hypo

SEQ ID NO: 99124 - DNA, 93 bp, Homo sapiens
  chr20:44982232-44982325
  hypo
ggctcagcagaactgcaaaggcgtcggcaaattgaagggaattcggggaagagcagcataagtaatgaaggcgcttgggggattaatttacca

SEQ ID NO: 99125 - DNA, 31 bp, Homo sapiens; identical to SEQ ID NO: 33330
  chr20:45000400-45000431
  hypo

SEQ ID NO: 99126 - DNA, 85 bp, Homo sapiens
  chr20:45337804-45337889
  hypo
gtgtccaaacccaagcgtggagtgaatgagggatgaatccatgagagagtgagcggctccagtgggtatgcgcgagtgtctcact

SEQ ID NO: 99127 - DNA, 1563 bp, Homo sapiens; identical to SEQ ID NO: 57298
  chr20:45523172-45524735
  hypo

SEQ ID NO: 99128 - DNA, 33 bp, Homo sapiens
  chr20:45829043-45829076
  hypo
aagccatctcttagccgccggctaaataaacag

SEQ ID NO: 99129 - DNA, 237 bp, Homo sapiens; identical to SEQ ID NO: 33332
  chr20:45833373-45833610
  hypo

SEQ ID NO: 99130 - DNA, 197 bp, Homo sapiens
  chr20:45837755-45837952
  hypo
gggggtgttcatgacctctcacggccccttctgtgtttggtcgtgcaaacctgacacagccatcccgaccaaatggaaaactgcaaattcgaggacgaccacggcatttttccaaaacagtttaattaaaaaaaggtaaagaaatctgaaaaaactgggggggtgggggaaggaacgggcaaacccaaaaaagcata

SEQ ID NO: 99131 - DNA, 22 bp, Homo sapiens
  chr20:45859283-45859305
  hypo
cccacctcggcctcccaaagtg

SEQ ID NO: 99132 - DNA, 41 bp, Homo sapiens; identical to SEQ ID NO: 33334
  chr20:45880360-45880401
  hypo

SEQ ID NO: 99133 - DNA, 108 bp, Homo sapiens
  chr20:45885507-45885615
  hypo
cgacttccaagataccgctttatgcacaaaaagaaaggatgcctcctgtcattaacagtggagaaataaacagaaagtctcggggtgtgacgacgttccctggccctg

SEQ ID NO: 99134 - DNA, 34 bp, Homo sapiens
  chr20:45908163-45908197
  hypo
aaagcgagaccccgcctcaaataaataaataaat

SEQ ID NO: 99135 - DNA, 50 bp, Homo sapiens; identical to SEQ ID NO: 33335
  chr20:45949145-45949195
  hypo

SEQ ID NO: 99136 - DNA, 37 bp, Homo sapiens; identical to SEQ ID NO: 33336
  chr20:45968503-45968540
  hypo

SEQ ID NO: 99137 - DNA, 121 bp, Homo sapiens
  chr20:46011001-46011122
  hypo
caccgcacccaggttgatatagtttttaaagagccccagctgattctaatgtgtagccacggttgagcgccactgttctagaaaactacaagtttaaactagaacaaaaagaggcattttg

SEQ ID NO: 99138 - DNA, 198 bp, Homo sapiens
  chr20:46013565-46013763
  hypo
tcagtactaaagctatagtgttgtgatgagagtccggcgtgctccctgaatgccggtgcccgattcataacctagtgcattcgttcacacattattcattcaacagataagcttttgcgtgcagtactattctgggtgctgggaccaccgaaatcagcagaacagacagaatctttgccttcacggatgcctcctgcc

SEQ ID NO: 99139 - DNA, 28 bp, Homo sapiens
  chr20:46103341-46103369
  hypo
tctggccgcctttcttcatttttgtggg

SEQ ID NO: 99140 - DNA, 20 bp, Homo sapiens
  chr20:46143916-46143936
  hypo
tttttttttgagatggagtc

SEQ ID NO: 99141 - DNA, 32 bp, Homo sapiens
  chr20:46175276-46175308
  hypo
ttttttttttttttttaagaccgaatttccct

SEQ ID NO: 99142 - DNA, 375 bp, Homo sapiens
  chr20:46234978-46235353
  hypo
tctcaacgtgtggtgcgtggactcccggtagtctctgagaaccttttaagggttctacatggttaagactattctcataataatgctaatgtgttatttgctattttcatcccgttggtgtttgcaccgatggtggaaatgcggtgatgcataaaattgctgacaccttaccatgaattaaggcagtggcgccagactccgctcctaggtagacattgcattcttcactgccaggagctcataaagaaaaaaaaaaatcagttttccactgaggattgtccatgatgaagcagcaacactacacctggccctcattcccttttttccttaagtacctttcactgtacccttaagtactgtcgttttaatgttctg

SEQ ID NO: 99143 - DNA, 102 bp, Homo sapiens; identical to SEQ ID NO: 33339
  chr20:46823498-46823600
  hypo

SEQ ID NO: 99144 - DNA, 30 bp, Homo sapiens
  chr20:47117781-47117811
  hypo
cgctgagactctgcacgtggcctcatccca

SEQ ID NO: 99145 - DNA, 31 bp, Homo sapiens; identical to SEQ ID NO: 33340
  chr20:47214550-47214581
  hypo

SEQ ID NO: 99146 - DNA, 31 bp, Homo sapiens
  chr20:47247200-47247231
  hypo
agtcctgactcctgagcgccccaccctgccc

SEQ ID NO: 99147 - DNA, 265 bp, Homo sapiens
  chr20:47252918-47253183
  hypo
tgggcaagggctccctcgacccggcctgggcgggcaccagtgggtgggccagcggggccgccctcccgccccactcactcaccactgtggctggcgagagcagggactggcagtgcagcaggacgcccgtggccgccacctgctccagccacttgcggctggcgtcgcggctgctctcctcgtactcgccattgttgttgtagcggtagcccagggccgccagcagctgcttggagaaggtgcacacggcggccaccagggcctg

SEQ ID NO: 99148 - DNA, 47 bp, Homo sapiens
  chr20:47268238-47268285
  hypo
gggcaggagtacattccgccagagtagagaggcgagtggggaagtga

SEQ ID NO: 99149 - DNA, 70 bp, Homo sapiens
  chr20:47274232-47274302
  hypo
cccacccacctgcacacgccccaggcaaagccggaaggccccagggctgaatcctcggccagccacaccc

SEQ ID NO: 99150 - DNA, 171 bp, Homo sapiens; identical to SEQ ID NO: 33341
  chr20:47296130-47296301
  hypo

SEQ ID NO: 99151 - DNA, 30 bp, Homo sapiens; identical to SEQ ID NO: 57302
  chr20:47340101-47340131
  hypo

SEQ ID NO: 99152 - DNA, 264 bp, Homo sapiens; identical to SEQ ID NO: 13025
  chr20:47443672-47443936
  hypo

SEQ ID NO: 99153 - DNA, 483 bp, Homo sapiens; identical to SEQ ID NO: 13026
  chr20:47443944-47444427
  hypo

SEQ ID NO: 99154 - DNA, 128 bp, Homo sapiens; identical to SEQ ID NO: 13027
  chr20:47444452-47444580
  hypo

SEQ ID NO: 99155 - DNA, 183 bp, Homo sapiens; identical to SEQ ID NO: 13028
  chr20:47444609-47444792
  hypo

SEQ ID NO: 99156 - DNA, 241 bp, Homo sapiens; identical to SEQ ID NO: 13029
  chr20:47444920-47445161
  hypo

SEQ ID NO: 99157 - DNA, 156 bp, Homo sapiens
  chr20:47490311-47490467
  hypo
aaaagcacaacaacagcggaaaatacgtcaccatgctcctcatcccaccatcttccccctactccctagaggtaaacacttttcccaggcgtttacacacagagaaagctattttgcccccttggtgccgagacagtcttgctctgtcacccaggc

SEQ ID NO: 99158 - DNA, 31 bp, Homo sapiens; identical to SEQ ID NO: 33347
  chr20:47559246-47559277
  hypo

SEQ ID NO: 99159 - DNA, 31 bp, Homo sapiens; identical to SEQ ID NO: 33348
  chr20:47601990-47602021
  hypo

SEQ ID NO: 99160 - DNA, 23 bp, Homo sapiens
  chr20:47617870-47617893
  hypo
ccggccctcactctgggactctt

SEQ ID NO: 99161 - DNA, 31 bp, Homo sapiens; identical to SEQ ID NO: 13030
  chr20:47663142-47663173
  hypo

SEQ ID NO: 99162 - DNA, 159 bp, Homo sapiens; identical to SEQ ID NO: 33350
  chr20:47688820-47688979
  hypo

SEQ ID NO: 99163 - DNA, 121 bp, Homo sapiens
  chr20:47698960-47699081
  hypo
gtgattcaccacgcctggcctaggttttaaatttttgtttgtataaatgacatcatactatgggtttcatttttctgttttttgttacttgtttgttttgagacggagtcttcgctctgtc

SEQ ID NO: 99164 - DNA, 30 bp, Homo sapiens; identical to SEQ ID NO: 33351
  chr20:47713208-47713238
  hypo

SEQ ID NO: 99165 - DNA, 31 bp, Homo sapiens; identical to SEQ ID NO: 33352
  chr20:47745702-47745733
  hypo

SEQ ID NO: 99166 - DNA, 96 bp, Homo sapiens
  chr20:47765229-47765325
  hypo
agatttcataggacccggtgaaaactcagcccagaagaacatgtctacaacagccgctgccctcaggactgtgccaaccaacgctgctctagtgag

SEQ ID NO: 99167 - DNA, 61 bp, Homo sapiens; identical to SEQ ID NO: 33353
  chr20:47766302-47766363
  hypo

SEQ ID NO: 99168 - DNA, 31 bp, Homo sapiens; identical to SEQ ID NO: 33354
  chr20:47768035-47768066
  hypo

SEQ ID NO: 99169 - DNA, 39 bp, Homo sapiens; identical to SEQ ID NO: 33355
  chr20:47799075-47799114
  hypo

SEQ ID NO: 99170 - DNA, 32 bp, Homo sapiens
  chr20:47805437-47805469
  hypo
gtgagataaaagacaatggcccgggcgcgttg

SEQ ID NO: 99171 - DNA, 40 bp, Homo sapiens
  chr20:47816847-47816887
  hypo
aggagcggccaggtgcggtggctcacgcctgtaatcccag

SEQ ID NO: 99172 - DNA, 29 bp, Homo sapiens
  chr20:47824321-47824350
  hypo
gctgggattataggcgtgagccaccacgc

SEQ ID NO: 99173 - DNA, 254 bp, Homo sapiens
  chr20:47837002-47837256
  hypo
tctgcgatacagtcacgttagagacctcccttgcttaaaactctccagcctgctggtagagacccccgggcctgtccaccttgcaaagactcctcaggcagcgtctgggtcccgtacactgtcgccatttccccgatgtcccctgtgggcgcgggcggccacccaggcctgctggctgcggccccctctcggacaggccttggctcagcccgctgcgtgggaggtcatgggccagtccccgaggagccaggccc

SEQ ID NO: 99174 - DNA, 28 bp, Homo sapiens
  chr20:47837521-47837549
  hypo
agagtcttgctcggtcgcccagggtgga

SEQ ID NO: 99175 - DNA, 254 bp, Homo sapiens
  chr20:47905349-47905603
  hypo
ttaaacattttgccaacgcaggtacaatatgggattcaataaaagtacagaattaaagttgtcttattagagattgggaagtttcccagctccgtttatcggtacttggccgtaccgataaaggggatggacttggagtgaccaggtcttagtcacatgtattttcataccctaaacaagaagcggtatagaccagaatggagcactgattgtaatccaccttctttcttagaaactggcgatggaatatgaga

SEQ ID NO: 99176 - DNA, 1194 bp, Homo sapiens; identical to SEQ ID NO: 57310
  chr20:47934764-47935958
  hypo

SEQ ID NO: 99177 - DNA, 30 bp, Homo sapiens
  chr20:47952200-47952230
  hypo
gcgctgctacggggacggtggtggggccaa

SEQ ID NO: 99178 - DNA, 30 bp, Homo sapiens; identical to SEQ ID NO: 33359
  chr20:47988940-47988970
  hypo

SEQ ID NO: 99179 - DNA, 30 bp, Homo sapiens; identical to SEQ ID NO: 33360
  chr20:48098627-48098657
  hypo

SEQ ID NO: 99180 - DNA, 30 bp, Homo sapiens; identical to SEQ ID NO: 13036
  chr20:48100397-48100427
  hypo

SEQ ID NO: 99181 - DNA, 31 bp, Homo sapiens
  chr20:48157030-48157061
  hypo
ctgtcagggctggccacgcaaggcaggcatt

SEQ ID NO: 99182 - DNA, 98 bp, Homo sapiens; identical to SEQ ID NO: 57316
  chr20:48194979-48195077
  hypo

SEQ ID NO: 99183 - DNA, 140 bp, Homo sapiens
  chr20:48252795-48252935
  hypo
atcggactgctttcttggtggcggtgggtaaagcaaacgtacattctctcctctcagtactcgttcacctgagccagctcgggtgtcaggttgacagttatgtttttatacaaggcgtcgtatgtgatgtttgcaaagta

SEQ ID NO: 99184 - DNA, 123 bp, Homo sapiens; identical to SEQ ID NO: 33362
  chr20:48259014-48259137
  hypo

SEQ ID NO: 99185 - DNA, 77 bp, Homo sapiens
  chr20:48300265-48300342
  hypo
gtcagctgaatgacctttggcaaattattcattctgtgtttcctcatccataaaacggggataataatatccctatc

SEQ ID NO: 99186 - DNA, 30 bp, Homo sapiens; identical to SEQ ID NO: 33363
  chr20:48334214-48334244
  hypo

SEQ ID NO: 99187 - DNA, 30 bp, Homo sapiens
  chr20:48477446-48477476
  hypo
tcatggaatgaggcacgacagtttcccatg

SEQ ID NO: 99188 - DNA, 536 bp, Homo sapiens
  chr20:48498752-48499288
  hypo
cgagtgagccgtgctcgctcattttctccacttcttcaccgcctgtccacggggctggaattggccttggcaggtcaccagtgacctcccgcagccagacctggaggggaggcgtccgcccccgtcctagcctacctccttcccactgcccctaccttctggcgaggaccacttcactctcttccccggcctctgggccatgctcctcctttctctcctttgacgtctccttgggctcgtcccccttcgctgacccctcaaatagtggcttcttcaggacttggccccagccccacttctgttcacgtgttctgcacttcactgagtgcgctcacccgtccactggccttcacttccacctagtcccaaagctgttcccgcgaacccagacctccctctgggatccgtactcctgtttccagctgcctgtttggatgccgtggggatgctgtcatccctatgcctttgcatcccccttgcccaagaaatcctactttgaattgcccggtggcctggctagccggtactaagcactt

SEQ ID NO: 99189 - DNA, 354 bp, Homo sapiens; identical to SEQ ID NO: 33364
  chr20:48504342-48504696
  hypo

SEQ ID NO: 99190 - DNA, 30 bp, Homo sapiens
  chr20:48520192-48520222
  hypo
ccatagggtaagttacgtggcatcacggtt

SEQ ID NO: 99191 - DNA, 673 bp, Homo sapiens
  chr20:48524516-48525189
  hypo
agccgggccagaaacggttcagaggtgatgctggagagacggggaaggttcggagcccggaaggatctgagagcacaggatggatgggatcagactggcatagcctctcaggagggactgccaggggcaggaagagagaaggagggcctgtatggaggctgctccaggacctcaccttgatgcttctgaattccttcttccacgggtagaggaagaggttgatgcccaccgtctccagcatgctgaaggcgccgtgcagagcccgcaggctagaggagctgagcgagcgcaaggagctctccaccacctcatagaactggatcagccggaatcgataaaagggatccaccttgtgcaggctgagcagggttgaggctgccacccgcaggcactcatcgctgccaggccgctgcctgctggtggtggtatccactttgctctcatggaactgcacgtacttccgaaataagtcatccttgaatttagtatccattgaactgggcttccccatccgatcgaggggggctaccttatctcctccatggcttctggattagaggcagggacatcactaaaagcatggacatgttgccgcctggaccagcggagtgctctggaaggaggggaacaagaagcatgtcattcctcgatacggtcgcgcttcggcttcagg

SEQ ID NO: 99192 - DNA, 40 bp, Homo sapiens
  chr20:48549956-48549996
  hypo
attacttgtccaggccgggcacggtagctcacacctgtaa

SEQ ID NO: 99193 - DNA, 858 bp, Homo sapiens; identical to SEQ ID NO: 57319
  chr20:48598695-48599553
  hypo

SEQ ID NO: 99194 - DNA, 31 bp, Homo sapiens; identical to SEQ ID NO: 33367
  chr20:48673064-48673095
  hypo

SEQ ID NO: 99195 - DNA, 131 bp, Homo sapiens
  chr20:48673853-48673984
  hypo
cttcctcctgcccctccgcttgtgcggctgaatccaggatttttcccttgacttgccccgcacagtgaggcctggcattttcttcccgctccccatgctggcacgtgacacagccccgggcacatgggagg

SEQ ID NO: 99196 - DNA, 20 bp, Homo sapiens
  chr20:48701734-48701754
  hypo
tccttctttaaaaggctaac

SEQ ID NO: 99197 - DNA, 121 bp, Homo sapiens; identical to SEQ ID NO: 33369
  chr20:48707850-48707971
  hypo

SEQ ID NO: 99198 - DNA, 25 bp, Homo sapiens
  chr20:48708210-48708235
  hypo
tgagttaccacgccccgcctcaaag

SEQ ID NO: 99199 - DNA, 121 bp, Homo sapiens
  chr20:48720798-48720919
  hypo
tagggccagactccgtctcaaaaaaaaaaaaaaaaaaggcagtatttcctattgtaaactctaatctactgggtccaaaatattggacactgttgccatataattaacatacctggctggg

SEQ ID NO: 99200 - DNA, 30 bp, Homo sapiens
  chr20:48741126-48741156
  hypo
cctgcccagcctcccggggtcagtatgcag

SEQ ID NO: 99201 - DNA, 80 bp, Homo sapiens
  chr20:48767151-48767231
  hypo
tgccaccactgggcacgtgagacagttatttgtcaagtttatggcccggctatttactaaaatgccagctccgttttttt

SEQ ID NO: 99202 - DNA, 19 bp, Homo sapiens
  chr20:48767530-48767549
  hypo
ccagctccatttttttctg

SEQ ID NO: 99203 - DNA, 27 bp, Homo sapiens
  chr20:48768093-48768120
  hypo
ctactgttaacaacagggaggcgccag

SEQ ID NO: 99204 - DNA, 204 bp, Homo sapiens; identical to SEQ ID NO: 57322
  chr20:48771156-48771360
  hypo

SEQ ID NO: 99205 - DNA, 43 bp, Homo sapiens
  chr20:48791872-48791915
  hypo
tagctgggcctacaaatgtgcaacaccacgcctggctaattaa

SEQ ID NO: 99206 - DNA, 40 bp, Homo sapiens
  chr20:48853283-48853323
  hypo
ggaattgctgcatcaacggggatcacgaggtcaggagatc

SEQ ID NO: 99207 - DNA, 50 bp, Homo sapiens
  chr20:48860988-48861038
  hypo
atcctctgtggatggggacagcggtgagcgaggtggtttatgctggcaac

SEQ ID NO: 99208 - DNA, 77 bp, Homo sapiens
  chr20:48868293-48868370
  hypo
agctgggattacaggcgtgtgccaacacacctggctaatttttcgcatacaaaatcccttctcgacgaaaaatactc

SEQ ID NO: 99209 - DNA, 31 bp, Homo sapiens; identical to SEQ ID NO: 33373
  chr20:48887085-48887116
  hypo

SEQ ID NO: 99210 - DNA, 31 bp, Homo sapiens; identical to SEQ ID NO: 33374
  chr20:48916106-48916137
  hypo

SEQ ID NO: 99211 - DNA, 31 bp, Homo sapiens
  chr20:48916376-48916407
  hypo
tgacagagcaagactccgtctgaagaaaaaa

SEQ ID NO: 99212 - DNA, 141 bp, Homo sapiens
  chr20:48968283-48968424
  hypo
gcctggagggtagctgcgactcagcctccacggggaacgcatcccagtcatgccaaaaagccatcttcctcaagagaagccagagatccagattttgatagaaactctcccaatttttaggccaggcgcagtggctcacac

SEQ ID NO: 99213 - DNA, 88 bp, Homo sapiens
  chr20:48974137-48974225
  hypo
ctgaacacggggttgcgtaggtaggattcgaacccaggccctgcagacagcagagactggcgctgctgagagtcgactgtggaacacg

SEQ ID NO: 99214 - DNA, 31 bp, Homo sapiens
  chr20:48975510-48975541
  hypo
gccttatactcatcatcggagacctgatgat

SEQ ID NO: 99215 - DNA, 31 bp, Homo sapiens; identical to SEQ ID NO: 33375
  chr20:48975789-48975820
  hypo

SEQ ID NO: 99216 - DNA, 31 bp, Homo sapiens; identical to SEQ ID NO: 33376
  chr20:48988162-48988193
  hypo

SEQ ID NO: 99217 - DNA, 55 bp, Homo sapiens
  chr20:49008037-49008092
  hypo
tggtcagcaggagcttcgtcctaggcctcttcactcccctcgctctgacctggtg

SEQ ID NO: 99218 - DNA, 31 bp, Homo sapiens
  chr20:49013290-49013321
  hypo
cctgcttacaattcaacgcagtgccctgagg

SEQ ID NO: 99219 - DNA, 99 bp, Homo sapiens
  chr20:49046545-49046644
  hypo
aaggggttttcttcagcgggtctagtgcagtgggtcttaaccagggacacttttgtaccctgggcgacatttgacaatgcccggaggcatttttttttc

SEQ ID NO: 99220 - DNA, 178 bp, Homo sapiens; identical to SEQ ID NO: 33377
  chr20:49046943-49047121
  hypo

SEQ ID NO: 99221 - DNA, 31 bp, Homo sapiens
  chr20:49054049-49054080
  hypo
gaggctgtgcctgtgtcgggggagggggtag

SEQ ID NO: 99222 - DNA, 26 bp, Homo sapiens
  chr20:49109304-49109330
  hypo
ttctttcttttcttttttagacgcag

SEQ ID NO: 99223 - DNA, 31 bp, Homo sapiens; identical to SEQ ID NO: 57326
  chr20:49131961-49131992
  hypo

SEQ ID NO: 99224 - DNA, 200 bp, Homo sapiens
  chr20:49178933-49179133
  hypo
ggacctagacttggtgtagaacgtgtgcctcttggcctgccaccatggttccctgcctggttttgtgtgtcagctctgccgcttaagaactgagtggcttcgggcaagttgttctctctcataggagtgtgtgaagatgaagcaacataagctgcttagcccagcgcccagtacctcacgcagacataagtgctcagtaa

SEQ ID NO: 99225 - DNA, 182 bp, Homo sapiens; identical to SEQ ID NO: 33378
  chr20:49197042-49197224
  hypo

SEQ ID NO: 99226 - DNA, 247 bp, Homo sapiens; identical to SEQ ID NO: 33379
  chr20:49203140-49203387
  hypo

SEQ ID NO: 99227 - DNA, 603 bp, Homo sapiens; identical to SEQ ID NO: 33380
  chr20:49204053-49204656
  hypo

SEQ ID NO: 99228 - DNA, 256 bp, Homo sapiens; identical to SEQ ID NO: 33381
  chr20:49206898-49207154
  hypo

SEQ ID NO: 99229 - DNA, 162 bp, Homo sapiens
  chr20:49210376-49210538
  hypo
aaggcaaattctggggaagaacgcagtccagccagcatttctagataccctcgtgggcccctgcctgcctcccttcccataaggttcattctttacccgtcaggctctggtgggaggcatggaatctgtccccagaaaaatgctctggcggccgggcgcagt

SEQ ID NO: 99230 - DNA, 43 bp, Homo sapiens
  chr20:49214095-49214138
  hypo
gctggaaggaggtgcactcaccggagaccctgggagcccccaa

SEQ ID NO: 99231 - DNA, 236 bp, Homo sapiens
  chr20:49218579-49218815
  hypo
ggccaccgcccggggcggggtggccataccttcagccggtcccggaagccgaggacctggtactccagctcccggagctggggctgggtggagtccgtgggcctcagcaactccaggacctcctgcagaggcccctcgagggccacgccaggcccgtcctctctgtccccggttgccccttcctcgtggccgttctggctactcgaggctgtgccgctgtggaacagggagccctg

SEQ ID NO: 99232 - DNA, 31 bp, Homo sapiens
  chr20:49222908-49222939
  hypo
atctaaggccaattaacgcaatcttcctaaa

SEQ ID NO: 99233 - DNA, 584 bp, Homo sapiens
  chr20:49223637-49224221
  hypo
tgttcaagtctttgttcaaaatgccagggacttggacaactcattgtcaagaccctccaccagtaacaactggacacccccagttagaggcccctttgagaagctcagccgatgagcaggggacactcggttcagaccccttgtctgtaaaaggggtgcgcttacagaagaacccccatgtggaacatgcacagggaagggtgggaatccaggcgagcgcatgggagcaccgaggcaagtgatgctcagcctggcccgtgatgctcagcctggcctgtgtccagccttgcactcggagtaggtaggtccccatagatccatttgcctcgaagaaacttgcttataattatttgcacaaaggcctggctcgtggcacctgggcctggcctgaccagaaggcctagagctcagaggctctgcaagtgcccacttctctgcccagggtgtctgcagacccgcaggcaccctgggtcctaggcttggatggcactgagctgcccgccaccctgtacacttcaggggcccctgggcgaggggtattctcagccctaccagacaggtgaggaccccgagggtgcaggtgg

SEQ ID NO: 99234 - DNA, 30 bp, Homo sapiens
  chr20:49224522-49224552
  hypo
ggggacgcaggtgaccgctcagccccaggc

SEQ ID NO: 99235 - DNA, 589 bp, Homo sapiens; identical to SEQ ID NO: 57328
  chr20:49224899-49225488
  hypo

SEQ ID NO: 99236 - DNA, 261 bp, Homo sapiens; identical to SEQ ID NO: 57329
  chr20:49225975-49226236
  hypo

SEQ ID NO: 99237 - DNA, 31 bp, Homo sapiens
  chr20:49228230-49228261
  hypo
tccaggggccagggtgcgaccaacacaaata

SEQ ID NO: 99238 - DNA, 100 bp, Homo sapiens
  chr20:49230487-49230587
  hypo
cctaccctgcccaccccgaggccctctctgctggagccaggatacagagacggccgcttgtttgcttgcttatttcattcattcattcattcattcattc

SEQ ID NO: 99239 - DNA, 30 bp, Homo sapiens
  chr20:49236160-49236190
  hypo
gtctgccgaggccctcgacgcactgtctct

SEQ ID NO: 99240 - DNA, 174 bp, Homo sapiens; identical to SEQ ID NO: 33387
  chr20:49236428-49236602
  hypo

SEQ ID NO: 99241 - DNA, 30 bp, Homo sapiens; identical to SEQ ID NO: 33388
  chr20:49237361-49237391
  hypo

SEQ ID NO: 99242 - DNA, 30 bp, Homo sapiens; identical to SEQ ID NO: 33389
  chr20:49240854-49240884
  hypo

SEQ ID NO: 99243 - DNA, 102 bp, Homo sapiens; identical to SEQ ID NO: 33390
  chr20:49244320-49244422
  hypo

SEQ ID NO: 99244 - DNA, 145 bp, Homo sapiens; identical to SEQ ID NO: 33391
  chr20:49247307-49247452
  hypo

SEQ ID NO: 99245 - DNA, 239 bp, Homo sapiens
  chr20:49261865-49262104
  hypo
tgtcataggacagagcctgttcgcaatccatcctgtgtctgcggattctcccaggtctgtaaggcagcagggagatgcggcctctcccactccacccaacacgtagccagggcgaggtggggccgggggagaggctgacattcaaaggcatctgagtggtaagaggtgagcgagtgaggtgaatggggactacgttagaaggaccctacgttagaagggtgaggcgctagggccatagc

SEQ ID NO: 99246 - DNA, 151 bp, Homo sapiens; identical to SEQ ID NO: 33393
  chr20:49264293-49264444
  hypo

SEQ ID NO: 99247 - DNA, 25 bp, Homo sapiens
  chr20:49281971-49281996
  hypo
ttttgagatggagtctcgccctgtc

SEQ ID NO: 99248 - DNA, 81 bp, Homo sapiens; identical to SEQ ID NO: 33395
  chr20:49282235-49282316
  hypo

SEQ ID NO: 99249 - DNA, 98 bp, Homo sapiens
  chr20:49284100-49284198
  hypo
ttacaggcgtgagccaccgcgcccggccgctgctttaagttcttaacacgtcctcaccgcggctcagctcactgtacggcccctgcatagagagggga

SEQ ID NO: 99250 - DNA, 31 bp, Homo sapiens
  chr20:49285098-49285129
  hypo
aattaggggaaatggccgggcacagtggctc

SEQ ID NO: 99251 - DNA, 146 bp, Homo sapiens; identical to SEQ ID NO: 33396
  chr20:49286717-49286863
  hypo

SEQ ID NO: 99252 - DNA, 30 bp, Homo sapiens; identical to SEQ ID NO: 33397
  chr20:49287169-49287199
  hypo

SEQ ID NO: 99253 - DNA, 23 bp, Homo sapiens
  chr20:49287930-49287953
  hypo
tctcacatgagcacgcgcgcgtg

SEQ ID NO: 99254 - DNA, 181 bp, Homo sapiens
  chr20:49289682-49289863
  hypo
gggctgcttctgtctgcgtcccagcctccactcttctctagataccatcaccaccatgacaactgcagttaacacttagtgaagacccctaggtgccacgcgcccatgcaatacccacagacccctctgaggtaggccctgtaatggtccctacgttagggaggggcggtcccaggcccag

SEQ ID NO: 99255 - DNA, 379 bp, Homo sapiens
  chr20:49290276-49290655
  hypo
ccatgctctcctcagcgtcaaagaaacagccttgtcctgccagggccttcgccaggcccggcctgggaagtcagggctctctgacccaatggagcgaatcgttgcgagcatttatttaatagcattatcttgatgatgaataaatcacaccttcatgaaccatttttccatttgtagccccaagtcaagactcccaaaatgttaccagatgtcaggcatgaaatatacacccctggcaagctctgccatgcacaggagtcatgctgctttcaatccacgggagagccggacacgagcgttccaaggcaggagcagaactccatgttggccattataaagacaagattccttttcccccgctttttatagcctctctggg

SEQ ID NO: 99256 - DNA, 31 bp, Homo sapiens
  chr20:49294666-49294697
  hypo
accatgggtgctaaaccggtggctgatatag

SEQ ID NO: 99257 - DNA, 77 bp, Homo sapiens
  chr20:49302563-49302640
  hypo
tgaatggcctgaaagcatagacgcctggctctttctttgttttttttaagaaggagtctcgctctgttgccccaggc

SEQ ID NO: 99258 - DNA, 91 bp, Homo sapiens
  chr20:49318872-49318963
  hypo
ctgctttttataatatttaagccatcctctttattcccccacgcaacccgccgcctccatccctgagaaacatctgcggcaggggccgtgc

SEQ ID NO: 99259 - DNA, 36 bp, Homo sapiens; identical to SEQ ID NO: 33399
  chr20:49323814-49323850
  hypo

SEQ ID NO: 99260 - DNA, 17 bp, Homo sapiens
  chr20:49330735-49330752
  hypo
ttttgagatagagtctc

SEQ ID NO: 99261 - DNA, 77 bp, Homo sapiens; identical to SEQ ID NO: 33400
  chr20:49331493-49331570
  hypo

SEQ ID NO: 99262 - DNA, 16 bp, Homo sapiens
  chr20:49331629-49331645
  hypo
tcgagaccagcctgga

SEQ ID NO: 99263 - DNA, 197 bp, Homo sapiens
  chr20:49345550-49345747
  hypo
ccttatacaacccaggcgcacgggttgaaataattttccttaagaaatccaggaagctctggcctggccctccctctagaaaggaaagtccaagtaaagagggatgccacacctggggaagggagagaggatgtgacgacacctccaggaatgcagggcccacgcaggtgcactggcacccacgaacttcctgataa

SEQ ID NO: 99264 - DNA, 212 bp, Homo sapiens
  chr20:49346547-49346759
  hypo
acccatctgagtacccgctgggagtcgggttctgtgccactcaatgccagcaaagcacaagccgtccctgcgccttcgggagctttcattctaggctggtggcagattactcacaaaactcagatgcacacaaaaatgggaaacctgtaacttgtaacaagtgctgggcaacaggggtacaagtgttaggaggcctccgaggtgggcaggga

SEQ ID NO: 99265 - DNA, 25 bp, Homo sapiens
  chr20:49350864-49350889
  hypo
aaccaaaactaggtagtgtgccggt

SEQ ID NO: 99266 - DNA, 102 bp, Homo sapiens; identical to SEQ ID NO: 33403
  chr20:49358021-49358123
  hypo

SEQ ID NO: 99267 - DNA, 41 bp, Homo sapiens; identical to SEQ ID NO: 33404
  chr20:49358362-49358403
  hypo

SEQ ID NO: 99268 - DNA, 139 bp, Homo sapiens
  chr20:49377932-49378071
  hypo
cttcctaaattggtaaaatctgattcatcagaattgcaattttgatcaaagccagtaactcctcacacaaatccttctatgtgtgcagaaagtgagcgtctgaaaactccaggcggagtttttgcgctaggttatctac

SEQ ID NO: 99269 - DNA, 78 bp, Homo sapiens
  chr20:49381162-49381240
  hypo
cagtctcaaaaaaaaggatggataaaatatttaacagtggtcatacataattcattcctgagtcgacacccatttcca

SEQ ID NO: 99270 - DNA, 31 bp, Homo sapiens
  chr20:49398687-49398718
  hypo
cccacctgtccacttgcgtgtgtctcacctt

SEQ ID NO: 99271 - DNA, 31 bp, Homo sapiens
  chr20:49399781-49399812
  hypo
gacacacatgttatctcggtttccctgggtc

SEQ ID NO: 99272 - DNA, 70 bp, Homo sapiens
  chr20:49406842-49406912
  hypo
tatggttttagagatcggggtcccagacaaagctatgccagtgctgaaacactgtcgatcggaaccacct

SEQ ID NO: 99273 - DNA, 30 bp, Homo sapiens; identical to SEQ ID NO: 33406
  chr20:49457312-49457342
  hypo

SEQ ID NO: 99274 - DNA, 194 bp, Homo sapiens
  chr20:49467236-49467430
  hypo
tgagtgggcccctgagcggcgtccctgcccagccagcatctggcctaccgtgctcactcttggtgcctgctggtgtgtttgagtctcccccccggtagagcacatagtaggtgttcaataaatagtcatcagcagatgttctgaaggcttcttgcctgcctcccagatttcttagggggcgtgtccaggcactg

SEQ ID NO: 99275 - DNA, 78 bp, Homo sapiens
  chr20:49468872-49468950
  hypo
gagtggccaggccttgcgctttttgtggctttgtgtgtgtgtgtgtgtgtgttttcttttttcttttttatagttaca

SEQ ID NO: 99276 - DNA, 30 bp, Homo sapiens
  chr20:49493591-49493621
  hypo
gatgggtttttgcacggggtgtgctctgcc

SEQ ID NO: 99277 - DNA, 34 bp, Homo sapiens; identical to SEQ ID NO: 33407
  chr20:49556445-49556479
  hypo

SEQ ID NO: 99278 - DNA, 31 bp, Homo sapiens
  chr20:49572852-49572883
  hypo
acaagaggctgggcgcggtggctcacacctg

SEQ ID NO: 99279 - DNA, 31 bp, Homo sapiens; identical to SEQ ID NO: 13044
  chr20:49574742-49574773
  hypo

SEQ ID NO: 99280 - DNA, 31 bp, Homo sapiens; identical to SEQ ID NO: 33409
  chr20:49610453-49610484
  hypo

SEQ ID NO: 99281 - DNA, 460 bp, Homo sapiens
  chr20:49620877-49621337
  hypo
aggcagggatgctggtgaactcggggctgtcggccatctcgttctcgatgacgtagagcaggggcgcgaagagggcgatggccacgcagaggaagagcagcaggagcccgaactcgcgggtgcagcggcgggccgtgagccccagcgtctgcagccccagggagtggcgcgccaggcgcatcacgtacaggatgcgcagcgcccgcagcacgcgcagcaccagccccaccttgtccaggtagctgttgcccgcgccgggcttgcgacggcctgcggcggcgccgtccaccagcagcgtgatgtagtagggcaggatggccaccaggtcgatcagcgtcagcgggctccgcaggaaggcgaacttgctgggcgcctgaatgagccgcaggaggaactccagggagaaccagcccacgcacaccgactccacgatgaagacgttgtggcacatctgggaaca

SEQ ID NO: 99282 - DNA, 134 bp, Homo sapiens; identical to SEQ ID NO: 13045
  chr20:49639050-49639184
  hypo

SEQ ID NO: 99283 - DNA, 639 bp, Homo sapiens; identical to SEQ ID NO: 13046
  chr20:49639217-49639856
  hypo

SEQ ID NO: 99284 - DNA, 114 bp, Homo sapiens; identical to SEQ ID NO: 13047
  chr20:49639882-49639996
  hypo

SEQ ID NO: 99285 - DNA, 131 bp, Homo sapiens; identical to SEQ ID NO: 57337
  chr20:49640094-49640225
  hypo

SEQ ID NO: 99286 - DNA, 31 bp, Homo sapiens
  chr20:49810091-49810122
  hypo
ccttgactgacttatacgttgctcatttcct

SEQ ID NO: 99287 - DNA, 18 bp, Homo sapiens
  chr20:49874168-49874186
  hypo
ctggaaagtgctaggatg

SEQ ID NO: 99288 - DNA, 42 bp, Homo sapiens
  chr20:49948350-49948392
  hypo
gtggcctcctgccaaccgagtgggattcggtacattggttta

SEQ ID NO: 99289 - DNA, 30 bp, Homo sapiens
  chr20:49994619-49994649
  hypo
ttctagaggaagactcgcaggtgttccact

SEQ ID NO: 99290 - DNA, 55 bp, Homo sapiens; identical to SEQ ID NO: 33415
  chr20:50084756-50084811
  hypo

SEQ ID NO: 99291 - DNA, 61 bp, Homo sapiens
  chr20:50104486-50104547
  hypo
cggcgctgagacgggctctgtcggtgacctggggagaggcgggacccactggcagatcaac

SEQ ID NO: 99292 - DNA, 30 bp, Homo sapiens
  chr20:50140407-50140437
  hypo
tgcctggatcagttcgtgggacggagtgat

SEQ ID NO: 99293 - DNA, 201 bp, Homo sapiens
  chr20:50150221-50150422
  hypo
ggtgccttccaggcaggctgccgcaaggccaggcgcccaggacacaggactgaggtgatccacaagcaatgaggcttgcagactggctctggcatgaccgcttgcaaaaacacacgaacccacgcgctgacacgtattgcttttggataggggtggagaaatgtatggaatctgcaacccgcaggcctcaaggtcaccttt

SEQ ID NO: 99294 - DNA, 285 bp, Homo sapiens
  chr20:50199800-50200085
  hypo
acaccgacgcggccacggtgcctggcaagatgaatttcttttttcaattcagccacaaccttatttatttattggatgctaacacctggtatttctttcgtctggaagttcgcggcttgctttggcacgttttaggttcagtaccgcggggtggctgagctacctgacggggtgacaggaggcctccctctgaggtggatccatggagcagaggcagcacaaaccaacttccaaggacatagtctagaccgaaaaggacaccctgaccctcgttttcaagcttta

SEQ ID NO: 99295 - DNA, 25 bp, Homo sapiens
  chr20:50203083-50203108
  hypo
tatagaaaagacaatgaaggccggg

SEQ ID NO: 99296 - DNA, 26 bp, Homo sapiens
  chr20:50205979-50206005
  hypo
accgcgcccagcccagaatccactct

SEQ ID NO: 99297 - DNA, 167 bp, Homo sapiens
  chr20:50208574-50208741
  hypo
ttcttttccacagcctgttctcgtttattctttctttcttccggaggaatttgaacacagcctgggctcccgcagttcatgactgcaaaaggcttcgccttcgaaatctgacccaagtgggcatattcgggaaatgtggcagcttcgaagaacatgagccagttaag

SEQ ID NO: 99298 - DNA, 24 bp, Homo sapiens
  chr20:50266158-50266182
  hypo
aatcgcacagctaggccgggtgca

SEQ ID NO: 99299 - DNA, 201 bp, Homo sapiens
  chr20:50293890-50294091
  hypo
gttaaattaaatacagcgcccaccctccctagccctgtttcatggccatataagctagtagctacctcatggaacagagaagacccagagccttctccttttaccacaaaacttgtactggtgaatgctggtctacggggcccagcggcttctaatggaaggtgactggggaaaggcgtggcttgccgtttgtgcctctgg

SEQ ID NO: 99300 - DNA, 31 bp, Homo sapiens
  chr20:50296832-50296863
  hypo
aggcaggaccacaaatcgatcttctacacat

SEQ ID NO: 99301 - DNA, 31 bp, Homo sapiens; identical to SEQ ID NO: 33417
  chr20:50309616-50309647
  hypo

SEQ ID NO: 99302 - DNA, 18 bp, Homo sapiens
  chr20:50316471-50316489
  hypo
gcccggccaacactactg

SEQ ID NO: 99303 - DNA, 32 bp, Homo sapiens
  chr20:50326110-50326142
  hypo
tagaaatttagcagggcgtggtggtgtgcacc

SEQ ID NO: 99304 - DNA, 103 bp, Homo sapiens; identical to SEQ ID NO: 33419
  chr20:50337347-50337450
  hypo

SEQ ID NO: 99305 - DNA, 42 bp, Homo sapiens; identical to SEQ ID NO: 33420
  chr20:50346532-50346574
  hypo

SEQ ID NO: 99306 - DNA, 142 bp, Homo sapiens
  chr20:50378296-50378438
  hypo
tcaaaaaaaaaaaaaaattagcacaacttgagtggcttaaaacaatgcaagtttattaccctacagttaggtccgaagtccaaaatgggcctcatgggactaaaatcaaggaaggtgtcagcagagccgtgttccttctgga

SEQ ID NO: 99307 - DNA, 1664 bp, Homo sapiens; identical to SEQ ID NO: 57344
  chr20:50383654-50385318
  hypo

SEQ ID NO: 99308 - DNA, 94 bp, Homo sapiens; identical to SEQ ID NO: 33423
  chr20:50390635-50390729
  hypo

SEQ ID NO: 99309 - DNA, 80 bp, Homo sapiens; identical to SEQ ID NO: 33424
  chr20:50405411-50405491
  hypo

SEQ ID NO: 99310 - DNA, 187 bp, Homo sapiens
  chr20:50406977-50407164
  hypo
tagcgccggtgctgccgttctcacccacggtcattggctcagaacccgtaaagtcacagggattctctggcaggggcgtgttgggaatctgaccgcccatgtgcatccgaatatgttgctgcagcatcacggcattagtgaacttcttctggcagatggggcacgaatgctgcgtcttaatggatgt

SEQ ID NO: 99311 - DNA, 31 bp, Homo sapiens; identical to SEQ ID NO: 33425
  chr20:50407492-50407523
  hypo

SEQ ID NO: 99312 - DNA, 146 bp, Homo sapiens; identical to SEQ ID NO: 33426
  chr20:50407904-50408050
  hypo

SEQ ID NO: 99313 - DNA, 30 bp, Homo sapiens; identical to SEQ ID NO: 33427
  chr20:50408412-50408442
  hypo

SEQ ID NO: 99314 - DNA, 39 bp, Homo sapiens
  chr20:50411954-50411993
  hypo
aaaacaaaaacagataaaaatgttcgtcaattcccagaa

SEQ ID NO: 99315 - DNA, 85 bp, Homo sapiens
  chr20:50419326-50419411
  hypo
aaaagaaaatggggagaaatgcgtactcattaaaaagtaggagcttacgtagaagttttggaacggctttatttggtagttactt

SEQ ID NO: 99316 - DNA, 32 bp, Homo sapiens
  chr20:50430799-50430831
  hypo
tacaggcatgagccaccgcgcccggccaataa

SEQ ID NO: 99317 - DNA, 39 bp, Homo sapiens; identical to SEQ ID NO: 33428
  chr20:50441825-50441864
  hypo

SEQ ID NO: 99318 - DNA, 158 bp, Homo sapiens
  chr20:50451580-50451738
  hypo
acacaaaaacgtgcctggcgtgtggcaaatgttgtcggtgtgggctttcgctattattaacctaaagtgttgtactttcacataacaactccattgagcgtcttcaggcatctcaaacttccccgtccagttggctcgttttctaatcctacccatct

SEQ ID NO: 99319 - DNA, 31 bp, Homo sapiens
  chr20:50462772-50462803
  hypo
gatttactgatctaggcgcccgccaccacgc

SEQ ID NO: 99320 - DNA, 31 bp, Homo sapiens
  chr20:50468578-50468609
  hypo
ctaatatagtaaaatacgaccatatttcaca

SEQ ID NO: 99321 - DNA, 27 bp, Homo sapiens
  chr20:50556883-50556910
  hypo
aatttgtgggccgggcgcggtggctca

SEQ ID NO: 99322 - DNA, 31 bp, Homo sapiens
  chr20:50557513-50557544
  hypo
ccctcagttttaagttcgtggtaatgttaca

SEQ ID NO: 99323 - DNA, 18 bp, Homo sapiens
  chr20:50569355-50569373
  hypo
tggcctttaatataattt

SEQ ID NO: 99324 - DNA, 30 bp, Homo sapiens
  chr20:50577008-50577038
  hypo
ttatcgtgacgcaagcgagtcagccagggc

SEQ ID NO: 99325 - DNA, 43 bp, Homo sapiens
  chr20:50591573-50591616
  hypo
cttagtataaaaatggcgatttcggccgggcgcagtgcctcac

SEQ ID NO: 99326 - DNA, 77 bp, Homo sapiens
  chr20:50602380-50602457
  hypo
gcccagctccaagctgcttctttcttggttctctgctttgcagagtcaaatgacctcattgccgaagatggcggcat

SEQ ID NO: 99327 - DNA, 75 bp, Homo sapiens
  chr20:50633364-50633439
  hypo
aataaaataggtatctcctattttaacgcatgatgtggctgttgcaggtggcattatcggcgggaggaccacacc

SEQ ID NO: 99328 - DNA, 30 bp, Homo sapiens
  chr20:50701251-50701281
  hypo
agagtcatccctgacgaaggaggcgccgca

SEQ ID NO: 99329 - DNA, 30 bp, Homo sapiens
  chr20:50704993-50705023
  hypo
ggcatttgtacggccgctcatcagagtgga

SEQ ID NO: 99330 - DNA, 30 bp, Homo sapiens
  chr20:50769068-50769098
  hypo
ggactgagggggggcgatcagactgacctg

SEQ ID NO: 99331 - DNA, 35 bp, Homo sapiens; identical to SEQ ID NO: 33430
  chr20:50805265-50805300
  hypo

SEQ ID NO: 99332 - DNA, 121 bp, Homo sapiens; identical to SEQ ID NO: 33431
  chr20:50805539-50805660
  hypo

SEQ ID NO: 99333 - DNA, 34 bp, Homo sapiens; identical to SEQ ID NO: 33432
  chr20:50805899-50805933
  hypo

SEQ ID NO: 99334 - DNA, 485 bp, Homo sapiens; identical to SEQ ID NO: 57354
  chr20:51589594-51590079
  hypo

SEQ ID NO: 99335 - DNA, 43 bp, Homo sapiens
  chr20:51794667-51794710
  hypo
ctcttttaccttccatttctgcgctaccctgctgttcctcttc

SEQ ID NO: 99336 - DNA, 30 bp, Homo sapiens; identical to SEQ ID NO: 13062
  chr20:51963662-51963692
  hypo

SEQ ID NO: 99337 - DNA, 44 bp, Homo sapiens; identical to SEQ ID NO: 33435
  chr20:52179946-52179990
  hypo

SEQ ID NO: 99338 - DNA, 339 bp, Homo sapiens
  chr20:52198074-52198413
  hypo
tttcatccagaggggcggcgaggtcaggagaacacgtccccggctgcctcccgtccacagacatggtgggcgactccgcgccggccctccggtccttcttgtggaccctggagtgcaagaccagctggtggtaggttctgaaagctttgccgcactcggagcagtgagtgggcttctccttgctactgggtaacttgggatccgcgtccacggagggcgcttcgccgtgggagtgtttgcacttctctttctcttgcgagaggcctgcacaactgcccttatttgtttctccaagctccttctcggaactcgaatcgtcgttgtcggtgctcccttctt

SEQ ID NO: 99339 - DNA, 167 bp, Homo sapiens; identical to SEQ ID NO: 13063
  chr20:52209196-52209363
  hypo

SEQ ID NO: 99340 - DNA, 31 bp, Homo sapiens
  chr20:52214964-52214995
  hypo
cccttgggtggttcagcgcctggaagtcaag

SEQ ID NO: 99341 - DNA, 251 bp, Homo sapiens
  chr20:52234389-52234640
  hypo
ttccctaggcatgtgggacctcgaagatgccgaatcagctaaacgggaggtggcttgagtaggatttgctgccagctaaagcgtgagatgctattgcatgtgcaaggcaaggctttcttcagcggcatcatcttccaaaatagcccaggtatatctcaccagaattaaaccgggctgcaggtggcctttcctcatacttgaccaatgacgtgattaatttagatctgttcggaagtatttatttaaatcca

SEQ ID NO: 99342 - DNA, 31 bp, Homo sapiens
  chr20:52275977-52276008
  hypo
ttttttttttttgagacggagaccccgtcgc

SEQ ID NO: 99343 - DNA, 10 bp, Homo sapiens
  chr20:52276247-52276257
  hypo
gccaccgcgc

SEQ ID NO: 99344 - DNA, 33 bp, Homo sapiens; identical to SEQ ID NO: 33437
  chr20:52281657-52281690
  hypo

SEQ ID NO: 99345 - DNA, 27 bp, Homo sapiens
  chr20:52285650-52285677
  hypo
gccaccgtgcccagcctttgctgtggg

SEQ ID NO: 99346 - DNA, 40 bp, Homo sapiens
  chr20:52305002-52305042
  hypo
atcaagactgtttctacaggccgggcgcggtggctcacgc

SEQ ID NO: 99347 - DNA, 19 bp, Homo sapiens
  chr20:52311457-52311476
  hypo
ctaatttaaagtagaagct

SEQ ID NO: 99348 - DNA, 78 bp, Homo sapiens; identical to SEQ ID NO: 33439
  chr20:52311775-52311853
  hypo

SEQ ID NO: 99349 - DNA, 23 bp, Homo sapiens
  chr20:52319011-52319034
  hypo
ccgtctcaaacaaaacaaaacaa

SEQ ID NO: 99350 - DNA, 154 bp, Homo sapiens
  chr20:52341603-52341757
  hypo
cggcccggccatatttttcatctcctcttccggatctcctctccgaccctgccctccggcctccgtggtggccttccctggacggtattcacacgttcccctactctatagtttccagttgggtttagccaacgggagacacctggaggagatg

SEQ ID NO: 99351 - DNA, 31 bp, Homo sapiens; identical to SEQ ID NO: 33441
  chr20:52360542-52360573
  hypo

SEQ ID NO: 99352 - DNA, 19 bp, Homo sapiens
  chr20:52361079-52361098
  hypo
tttgagacagtcttgctct

SEQ ID NO: 99353 - DNA, 19 bp, Homo sapiens
  chr20:52361157-52361176
  hypo
gttcaagtgattctcagct

SEQ ID NO: 99354 - DNA, 26 bp, Homo sapiens
  chr20:52374062-52374088
  hypo
gtgtgagccaccgcgcccggccttaa

SEQ ID NO: 99355 - DNA, 31 bp, Homo sapiens
  chr20:52401840-52401871
  hypo
tgactttctttcttgtcgtttcctgaataat

SEQ ID NO: 99356 - DNA, 31 bp, Homo sapiens
  chr20:52429880-52429911
  hypo
gaatcctggtaggtaccgtgggaatctagct

SEQ ID NO: 99357 - DNA, 30 bp, Homo sapiens; identical to SEQ ID NO: 33442
  chr20:52484679-52484709
  hypo

SEQ ID NO: 99358 - DNA, 68 bp, Homo sapiens; identical to SEQ ID NO: 33443
  chr20:52538602-52538670
  hypo

SEQ ID NO: 99359 - DNA, 30 bp, Homo sapiens; identical to SEQ ID NO: 33444
  chr20:52561278-52561308
  hypo

SEQ ID NO: 99360 - DNA, 162 bp, Homo sapiens
  chr20:52758813-52758975
  hypo
atgtggccggttccttacaggccacagactggtactggtctgtgccctgggggttggtgacccctgttgtatgtgatacattcttctaagtcataaagtcgttagtaatttcttacgtagcagcagaaaactaatataagtaccttacgttgtatctacacc

SEQ ID NO: 99361 - DNA, 30 bp, Homo sapiens
  chr20:52893383-52893413
  hypo
ccctaggccacaccccgatgtagaagtcag

SEQ ID NO: 99362 - DNA, 18 bp, Homo sapiens
  chr20:53530452-53530470
  hypo
tttagattagtcttttaa

SEQ ID NO: 99363 - DNA, 43 bp, Homo sapiens
  chr20:54931801-54931844
  hypo
ggcctggtgacaagaaaatcacgggcgctttgggaggccgagg

SEQ ID NO: 99364 - DNA, 394 bp, Homo sapiens; identical to SEQ ID NO: 57374
  chr20:54934125-54934519
  hypo

SEQ ID NO: 99365 - DNA, 30 bp, Homo sapiens; identical to SEQ ID NO: 33447
  chr20:54944843-54944873
  hypo

SEQ ID NO: 99366 - DNA, 31 bp, Homo sapiens; identical to SEQ ID NO: 33448
  chr20:54974275-54974306
  hypo

SEQ ID NO: 99367 - DNA, 55 bp, Homo sapiens
  chr20:55026782-55026837
  hypo
ggagcggcggagtgacgatgagatttaaacaacgcactcgcgccctctttggaaa

SEQ ID NO: 99368 - DNA, 30 bp, Homo sapiens
  chr20:55124678-55124708
  hypo
caaagttacttaatgcgtttttccttccct

SEQ ID NO: 99369 - DNA, 26 bp, Homo sapiens
  chr20:55198511-55198537
  hypo
cttttttttttgagaccgagtctagc

SEQ ID NO: 99370 - DNA, 136 bp, Homo sapiens; identical to SEQ ID NO: 13083
  chr20:55206293-55206429
  hypo

SEQ ID NO: 99371 - DNA, 134 bp, Homo sapiens; identical to SEQ ID NO: 13084
  chr20:55206463-55206597
  hypo

SEQ ID NO: 99372 - DNA, 22 bp, Homo sapiens
  chr20:55206736-55206758
  hypo
cgaggtgcaggtgagcggcgct

SEQ ID NO: 99373 - DNA, 27 bp, Homo sapiens
  chr20:55267421-55267448
  hypo
gctttatctcaacggcgcgatcttggc

SEQ ID NO: 99374 - DNA, 17 bp, Homo sapiens
  chr20:55379430-55379447
  hypo
cccggccagttcagcct

SEQ ID NO: 99375 - DNA, 30 bp, Homo sapiens; identical to SEQ ID NO: 33453
  chr20:55566744-55566774
  hypo

SEQ ID NO: 99376 - DNA, 620 bp, Homo sapiens
  chr20:55685232-55685852
  hypo
gtctccagctgaccactgttccgtgaggctgtctgagcaggcttcgctatgcacgcataatagcgacagcgcaaacagcagcagcagcagcagcctcagctggctcggcggggcttggctcagcgtgtgcggggtgctgagctaagtcttcccaaacggcgtgtgcggggtgctgcgctgtcttccagatccgcttgtgcagggcgctgtgctgtcttctggttcggcgtgtgcggggcgctgtgctaagtcttccggctgggcgtgtgcggggcgctgtgctaagtcttccggctgggcgtgtgcggggcgctgtgctaagtcttccggctgggcgtgtgcggggcgctgtgctgtcttccggttcggcgtgtgcggggcgctgtgctaagtcttccggctgggcgtgtgcggggtgctgtgctaagtcttccggctgggcgtgtgcggggcgctgtgctgtcttccggttcggcgtgtgcggggcgttatgctaagtcttccggctgggcgtgtgcggggcgctgtgctgtcttccggttcggcgtgtgcggggcgctgtgctaagtcttccggctgcattcgcactctttccctccgactcaaccatggcagtgagg

SEQ ID NO: 99377 - DNA, 104 bp, Homo sapiens
  chr20:55692828-55692932
  hypo
caccccatcaaagcaccgcccacccccaccccatcaaagcaccgcccacccccacctaagcaccgcccactctcccgcacctgcagcaccgcccaccccacccc

SEQ ID NO: 99378 - DNA, 241 bp, Homo sapiens
  chr20:55740617-55740858
  hypo
cccctgatcaggacccactcccgtgagcgcagacttctgttctgttacctgtacccactgcccgccatggtgcctggtgtacggtggacacacgatgaattagtgagtgagcagatgaagaatgaacacttccggccaaagaggaagctcgtgctgtccccagagcccaccctgctcctagaaagggcatcgcatcgcactttggctgccccaagccaccgtggtcatccttatttatggc

SEQ ID NO: 99379 - DNA, 31 bp, Homo sapiens; identical to SEQ ID NO: 33454
  chr20:55741638-55741669
  hypo

SEQ ID NO: 99380 - DNA, 123 bp, Homo sapiens
  chr20:55748183-55748306
  hypo
ggcagcaggatctggtggccccgcagcctgcccggcccaggtgaccacaccccaagatggcgtgacacccaccagcgtctgcacgatggcgtggttggtggcgttcatgtaggagttcagagg

SEQ ID NO: 99381 - DNA, 40 bp, Homo sapiens
  chr20:55797061-55797101
  hypo
gtggacccagctaaatcgatggaaacgtaaagagagcaga

SEQ ID NO: 99382 - DNA, 230 bp, Homo sapiens
  chr20:55904349-55904579
  hypo
aaattaggatgacacgttaggaacttcctggggttcttaagggaattagaagagggacctgagtgcaaagggctttggaggcattcaactgctatgaaacgttagtaaggacagggattgcgttcacctcaatcacagctgaacccattgccgagaactgttatcccacacagctggatcttcatcattatgtgttttaatgaaaaatcgctgatattgctgtccctaaa

SEQ ID NO: 99383 - DNA, 221 bp, Homo sapiens
  chr20:55925380-55925601
  hypo
tagtaagagtagttcacgtatgatttcacttgaccctaattaggaacagccctggcatcattttccccaccatgcagcaggaaactgaggcccaaagagccccgaggtgggctcagggtaccccagtgggcaaacagggagaggccagggcgggaaacccgcggccgacctcgccttgttcggaggcagcgttagagcagcttctcggaggttggccttgg

SEQ ID NO: 99384 - DNA, 65 bp, Homo sapiens
  chr20:55936562-55936627
  hypo
gtttgcggatttattcggaaatagttcttgaaattgagcatacgtgcatgcgtgagcatctattg

SEQ ID NO: 99385 - DNA, 30 bp, Homo sapiens; identical to SEQ ID NO: 33456
  chr20:55953199-55953229
  hypo

SEQ ID NO: 99386 - DNA, 106 bp, Homo sapiens; identical to SEQ ID NO: 33457
  chr20:55959113-55959219
  hypo

SEQ ID NO: 99387 - DNA, 226 bp, Homo sapiens; identical to SEQ ID NO: 33458
  chr20:55959338-55959564
  hypo

SEQ ID NO: 99388 - DNA, 30 bp, Homo sapiens; identical to SEQ ID NO: 33459
  chr20:55959781-55959811
  hypo

SEQ ID NO: 99389 - DNA, 146 bp, Homo sapiens; identical to SEQ ID NO: 57402
  chr20:55966823-55966969
  hypo

SEQ ID NO: 99390 - DNA, 219 bp, Homo sapiens; identical to SEQ ID NO: 33461
  chr20:55969521-55969740
  hypo

SEQ ID NO: 99391 - DNA, 30 bp, Homo sapiens
  chr20:55971332-55971362
  hypo
cggcagtggcaagcacgtggtagtcacagc

SEQ ID NO: 99392 - DNA, 209 bp, Homo sapiens; identical to SEQ ID NO: 33462
  chr20:56001370-56001579
  hypo

SEQ ID NO: 99393 - DNA, 134 bp, Homo sapiens
  chr20:56031268-56031402
  hypo
gacagcagggtgtgacgctgatggtttctggggcagaggcaagccaggcaggccacgtcggccacctccttggcgctccccaggtatgccgggcacatttcagccccggggcctttgcacggcctggaaggctc

SEQ ID NO: 99394 - DNA, 206 bp, Homo sapiens
  chr20:56099533-56099739
  hypo
cagcacacatcctgcgcctggcaaggttccgcctgagcacactctggcccagtgcatatcctgggcctagcaaggttaggcctgagccggttcagtcagtgaacatcctgggcctagtaaggtttgggcccagcaggctctcggccagtgcatatcctgggcctagcaagtttcaggtccaagcaggccccgggccagtgcacacc

SEQ ID NO: 99395 - DNA, 372 bp, Homo sapiens; identical to SEQ ID NO: 33464
  chr20:56126191-56126563
  hypo

SEQ ID NO: 99396 - DNA, 30 bp, Homo sapiens
  chr20:56155799-56155829
  hypo
tgtcctgctctgctgcgccgtcccccatgg

SEQ ID NO: 99397 - DNA, 156 bp, Homo sapiens
  chr20:56167907-56168063
  hypo
gcagggatgcgaagccgggcgagcctgctgcagctgccacctctttgggtgggagcgtgcctcactcgagggcttgctctctgtgtgaggctttttcttgtccaacaaacactcacttgctgtgtgtcaggcctgtccaagcgtgacaggtgtcca

SEQ ID NO: 99398 - DNA, 149 bp, Homo sapiens
  chr20:56186965-56187114
  hypo
ggtggcgtggaccggcggaacctggcaggggacagtggcacagcctcaccggagattactgcaggcttcttcctttccctcaccaccacacgcaggcctgtcctctgaattcttcctggacaccatcgaactggcggccaaagacttca

SEQ ID NO: 99399 - DNA, 30 bp, Homo sapiens
  chr20:56239139-56239169
  hypo
gcagtgcctgctggcgaggtcggtcgcaaa

SEQ ID NO: 99400 - DNA, 146 bp, Homo sapiens
  chr20:56239575-56239721
  hypo
cacggctctccacccgcggcagctcgcagaatcctcttcgtgcctgcatttgttccgaggagcgcagggaggctgctggggcccattcccagtcgcagcttgagagccggactctcaggatcagatgcctcgcgggcaagggaagg

SEQ ID NO: 99401 - DNA, 30 bp, Homo sapiens
  chr20:56252473-56252503
  hypo
agcaagaaagcgcctcgatgacccttattt

SEQ ID NO: 99402 - DNA, 146 bp, Homo sapiens
  chr20:56264916-56265062
  hypo
tgattcagcagctctatatatcggagggacacagacacggcgctgctggggctgacgtgggtcccaggggccagtggctgcatcgcccggcagcagccgaggtccatggggcacttactgtgtgcgaggcatttgctgagcttctc

SEQ ID NO: 99403 - DNA, 30 bp, Homo sapiens; identical to SEQ ID NO: 33466
  chr20:56265334-56265364
  hypo

SEQ ID NO: 99404 - DNA, 30 bp, Homo sapiens; identical to SEQ ID NO: 33467
  chr20:56265671-56265701
  hypo

SEQ ID NO: 99405 - DNA, 23 bp, Homo sapiens
  chr20:56577649-56577672
  hypo
acagaaagccaaacaccgcatgt

SEQ ID NO: 99406 - DNA, 1032 bp, Homo sapiens; identical to SEQ ID NO: 33469
  chr20:56780189-56781221
  hypo

SEQ ID NO: 99407 - DNA, 259 bp, Homo sapiens; identical to SEQ ID NO: 57407
  chr20:56784986-56785245
  hypo

SEQ ID NO: 99408 - DNA, 225 bp, Homo sapiens; identical to SEQ ID NO: 57409
  chr20:56811735-56811960
  hypo

SEQ ID NO: 99409 - DNA, 36 bp, Homo sapiens; identical to SEQ ID NO: 33471
  chr20:56941011-56941047
  hypo

SEQ ID NO: 99410 - DNA, 337 bp, Homo sapiens
  chr20:56941587-56941924
  hypo
cagtccattacacattcgatacaggtatcaaaatatcataggcacctcaaagacatgtacaactcttaatttaacatttttgaaagaaaaaaaaaccggccagagcattaaaacaaataaaataagaaacacagaggccagtgttaggtgaagaactccgctgcttcagaaagagaatagcagcgctcgcttaccgtgggaacacggccagttaacaaaatgggttttggttttttgttttgttttgttttaccattggtaataagatagttaacataagtggtcagaacttcgctgaatttgtaataaagcatttgttaagcgtgtaaaagtccaa

SEQ ID NO: 99411 - DNA, 155 bp, Homo sapiens
  chr20:56977719-56977874
  hypo
tctctgggtctaaggcataggcgaggaagggttggtgtttaggagaaagctgagaaagatgccaggcgcaatggctcacacctgtaatccaaggattttgggactccgaggcaagcgaatcagttgaggccaggaatttgagatgagcctgggca

SEQ ID NO: 99412 - DNA, 213 bp, Homo sapiens; identical to SEQ ID NO: 33474
  chr20:57009362-57009575
  hypo

SEQ ID NO: 99413 - DNA, 30 bp, Homo sapiens
  chr20:57036550-57036580
  hypo
cgggtggtgcacatcggagcgggcaatgag

SEQ ID NO: 99414 - DNA, 186 bp, Homo sapiens
  chr20:57037019-57037205
  hypo
cctcatcaaactggaatgcatcgtgccttacagtactaaaaagccctagaaagccgggactgtctctgcggctaccccatccccaccgcacagggcttggctcacagcaagcacatatttgttgcatgaataaatgagaaatgaatggaagcataggtggccttcgtcttgggacctgagagaact

SEQ ID NO: 99415 - DNA, 163 bp, Homo sapiens
  chr20:57041474-57041637
  hypo
gtgggcgagggtggcgccccagtggctgtgcggctaggtcagtgtgaggctcgcactgagatttcgagggggtggcatctgggctggtgtgcgcggccccagcggcgccctggaggaaagctgccctctccctaattcatccatccacgtttattggtcctga

SEQ ID NO: 99416 - DNA, 213 bp, Homo sapiens
  chr20:57154975-57155188
  hypo
gtgagaattcagaggcgccaagccccctgcccgtccccatggagccttctgagggctgcaacgtggatattttccaggcaggaattaatcacggcttcgttggcgctccaagccagaccctacataataccttctataaagagccttattacaccggaaggttgtatattatattcttcactgcacaccagctacgtgcgtaggctgctccct

SEQ ID NO: 99417 - DNA, 30 bp, Homo sapiens
  chr20:57212788-57212818
  hypo
caaccacccctatcccggcagaaatgccta

SEQ ID NO: 99418 - DNA, 30 bp, Homo sapiens
  chr20:57213158-57213188
  hypo
tgtggagcccgcggccgttccctgcgcaca

SEQ ID NO: 99419 - DNA, 281 bp, Homo sapiens; identical to SEQ ID NO: 13101
  chr20:57224798-57225079
  hypo

SEQ ID NO: 99420 - DNA, 375 bp, Homo sapiens; identical to SEQ ID NO: 57413
  chr20:57225218-57225593
  hypo

SEQ ID NO: 99421 - DNA, 161 bp, Homo sapiens
  chr20:57240787-57240948
  hypo
tgacactggccctgcagcatccgtgccacgcttgagcaccgttgggcttaatcacggctcctggacgtgctgggattagtgaatggggcctagtccttccagcgtggtcattgcctaagatgcgttccctgagtggacacgtgccccagagcacacagaaa

SEQ ID NO: 99422 - DNA, 39 bp, Homo sapiens; identical to SEQ ID NO: 33478
  chr20:57241749-57241788
  hypo

SEQ ID NO: 99423 - DNA, 235 bp, Homo sapiens; identical to SEQ ID NO: 33479
  chr20:57244308-57244543
  hypo

SEQ ID NO: 99424 - DNA, 322 bp, Homo sapiens
  chr20:57268839-57269161
  hypo
ctgtcccctctacctgaactacgccaccgtggctgccctgccctgcagggtgagccggcacaacagcccctcggccgcccacttcatcacgcggctggtgcggacctgcctgccgcccggagcgcatcgctgcattgtggtgagtgcttcgagaggaggcagccacggtgctcctagtcgggcagcggtgagctcgggcctggggagctcacagccctgctcagactgcagcgcacgcccagagggctgtggacgttatcatccctgctctgtagacagggaaacaggtccagagagacgcggggatttgccccagatcagt

SEQ ID NO: 99425 - DNA, 30 bp, Homo sapiens
  chr20:57270537-57270567
  hypo
tgtccccacggcagcggtcccagcctctgc

SEQ ID NO: 99426 - DNA, 157 bp, Homo sapiens
  chr20:57392357-57392514
  hypo
aggtcggggaaggagcgggggctttcccgaggaggcgtcagtgagggtggagagagcctccggaaggggagcgggcaccggcgaggatggcaccgcatcctgcaggtgctcgtggctgagggtgggaggtaggtaaaactcccggcagtggggaccc

SEQ ID NO: 99427 - DNA, 48 bp, Homo sapiens; identical to SEQ ID NO: 13103
  chr20:57415187-57415235
  hypo

SEQ ID NO: 99428 - DNA, 303 bp, Homo sapiens; identical to SEQ ID NO: 13104
  chr20:57415538-57415841
  hypo

SEQ ID NO: 99429 - DNA, 2077 bp, Homo sapiens; identical to SEQ ID NO: 13105
  chr20:57428310-57430387
  hypo

SEQ ID NO: 99430 - DNA, 34 bp, Homo sapiens; identical to SEQ ID NO: 13107
  chr20:57470652-57470686
  hypo

SEQ ID NO: 99431 - DNA, 252 bp, Homo sapiens; identical to SEQ ID NO: 13108
  chr20:57478607-57478859
  hypo

SEQ ID NO: 99432 - DNA, 30 bp, Homo sapiens; identical to SEQ ID NO: 13109
  chr20:57480439-57480469
  hypo

SEQ ID NO: 99433 - DNA, 438 bp, Homo sapiens; identical to SEQ ID NO: 13110
  chr20:57484404-57484842
  hypo

SEQ ID NO: 99434 - DNA, 30 bp, Homo sapiens; identical to SEQ ID NO: 13111
  chr20:57485068-57485098
  hypo

SEQ ID NO: 99435 - DNA, 205 bp, Homo sapiens; identical to SEQ ID NO: 57424
  chr20:57485750-57485955
  hypo

SEQ ID NO: 99436 - DNA, 98 bp, Homo sapiens
  chr20:57554934-57555032
  hypo
ggtaaaggctgaaaaagttgccgaaaggattagaagcatcacgcaatataccaatgtaacaaacctgcacacgcaccgaatctaaaattaaaacaaaa

SEQ ID NO: 99437 - DNA, 231 bp, Homo sapiens; identical to SEQ ID NO: 33490
  chr20:57577636-57577867
  hypo

SEQ ID NO: 99438 - DNA, 270 bp, Homo sapiens; identical to SEQ ID NO: 33491
  chr20:57578207-57578477
  hypo

SEQ ID NO: 99439 - DNA, 203 bp, Homo sapiens; identical to SEQ ID NO: 33492
  chr20:57578997-57579200
  hypo

SEQ ID NO: 99440 - DNA, 24 bp, Homo sapiens
  chr20:57616448-57616472
  hypo
tacaaatgcggacaacgttttaaa

SEQ ID NO: 99441 - DNA, 30 bp, Homo sapiens
  chr20:57679306-57679336
  hypo
catcagggatgctgtcgcaggtcgtgcccc

SEQ ID NO: 99442 - DNA, 240 bp, Homo sapiens
  chr20:57699765-57700005
  hypo
ctctgaacctcagatctctctcgtgtaaggggctggccccttcgagaggctcagtgtggaataaaatggctcttatcgcagtgggcttggcagcccgccactcctcatctttgctggtggaacctctagttggtttcggtgtccaccctcctccacgctgggagtgtgttcaggatgaggatcccatccccgtgcacggggtcaagtctgattggaggcgatcatttctggctgtcacat

SEQ ID NO: 99443 - DNA, 58 bp, Homo sapiens; identical to SEQ ID NO: 57429
  chr20:57797334-57797392
  hypo

SEQ ID NO: 99444 - DNA, 177 bp, Homo sapiens; identical to SEQ ID NO: 57430
  chr20:57797934-57798111
  hypo

SEQ ID NO: 99445 - DNA, 723 bp, Homo sapiens; identical to SEQ ID NO: 57431
  chr20:57875350-57876073
  hypo

SEQ ID NO: 99446 - DNA, 30 bp, Homo sapiens
  chr20:57895634-57895664
  hypo
ccggaggagctaggccggccgtggtttggt

SEQ ID NO: 99447 - DNA, 315 bp, Homo sapiens; identical to SEQ ID NO: 13116
  chr20:57978780-57979095
  hypo

SEQ ID NO: 99448 - DNA, 30 bp, Homo sapiens
  chr20:58014172-58014202
  hypo
gccagtcaggtctcgcggcctaggcacttg

SEQ ID NO: 99449 - DNA, 162 bp, Homo sapiens; identical to SEQ ID NO: 57435
  chr20:58179832-58179994
  hypo

SEQ ID NO: 99450 - DNA, 189 bp, Homo sapiens; identical to SEQ ID NO: 57436
  chr20:58180213-58180402
  hypo

SEQ ID NO: 99451 - DNA, 105 bp, Homo sapiens; identical to SEQ ID NO: 57437
  chr20:58180470-58180575
  hypo

SEQ ID NO: 99452 - DNA, 31 bp, Homo sapiens; identical to SEQ ID NO: 13120
  chr20:58323973-58324004
  hypo

SEQ ID NO: 99453 - DNA, 111 bp, Homo sapiens; identical to SEQ ID NO: 33500
  chr20:58397112-58397223
  hypo

SEQ ID NO: 99454 - DNA, 401 bp, Homo sapiens
  chr20:58507040-58507441
  hypo
aactactactatgtaacagaacgacttcggaaaccgagaacagaataataatgtttcaagagaagcgtggatttacctgacaagtaagcaggctctgggctccagtctactgaactgggggactggttagcgagcaacacagagaactagtaagatgatgattgtgtatctgcaggcagataaaagcgttacggataaaaacaacaacaaagaaaacaatttggcagatgggggaggcaaagattttcccccaaaggaaaaactgctgaatgaatgcaagcagcagtagataattcaaagtcccctctgccctggtaactaacatagctaaggtgtccaaaaagacattaaaggtgaatgaaggggagggaaggcgtcctcctcctcccatcattactaaa

SEQ ID NO: 99455 - DNA, 555 bp, Homo sapiens; identical to SEQ ID NO: 33502
  chr20:58507740-58508295
  hypo

SEQ ID NO: 99456 - DNA, 509 bp, Homo sapiens; identical to SEQ ID NO: 57439
  chr20:58514020-58514529
  hypo

SEQ ID NO: 99457 - DNA, 330 bp, Homo sapiens; identical to SEQ ID NO: 57440
  chr20:58514800-58515130
  hypo

SEQ ID NO: 99458 - DNA, 30 bp, Homo sapiens; identical to SEQ ID NO: 57441
  chr20:58515464-58515494
  hypo

SEQ ID NO: 99459 - DNA, 30 bp, Homo sapiens
  chr20:58987233-58987263
  hypo
tgcgttgtatcagtccgtgtttgtttacca

SEQ ID NO: 99460 - DNA, 143 bp, Homo sapiens
  chr20:59225185-59225328
  hypo
gcgtgtatatgtgcgagtatgtgtgcaagtgtgtgcacgagtgtgtacgtctgcaaatgtgtttgtgtttctacgtgtgtgtagtgtgtatacgagtgtcttgtatgagtgtgagtgtatacgtgtgaatgtatgtgtatgtg

SEQ ID NO: 99461 - DNA, 37 bp, Homo sapiens
  chr20:59330840-59330877
  hypo
gtgagctaccgcgcccggccctttccagccccctctt

SEQ ID NO: 99462 - DNA, 30 bp, Homo sapiens
  chr20:59600975-59601005
  hypo
tccatttatttttgcggtaacaagcgcagc

SEQ ID NO: 99463 - DNA, 30 bp, Homo sapiens; identical to SEQ ID NO: 57442
  chr20:59804406-59804436
  hypo

SEQ ID NO: 99464 - DNA, 21 bp, Homo sapiens
  chr20:59826956-59826977
  hypo
aatggaagtgcacactcccac

SEQ ID NO: 99465 - DNA, 67 bp, Homo sapiens; identical to SEQ ID NO: 13123
  chr20:59828340-59828407
  hypo

SEQ ID NO: 99466 - DNA, 28 bp, Homo sapiens
  chr20:59872425-59872453
  hypo
caagagcgaaactccatctcaaaaaaca

SEQ ID NO: 99467 - DNA, 268 bp, Homo sapiens; identical to SEQ ID NO: 33507
  chr20:59872749-59873017
  hypo

SEQ ID NO: 99468 - DNA, 520 bp, Homo sapiens
  chr20:59965386-59965906
  hypo
agcaccatgtctaggaaaccccgattgggttcgtacagtcataggttgcccatagtgccgtgtctgggaaaccccgattgagatcgtgcggtcatagggtgcccatagcaccatgtctaggaaaccccgattgggttcgtacagtcatagggtgcccatagtgccgtgtctgggaaaccccaattgagatcgtacggtcatagggtgcccatagcgccatgtctaggaaaccccgattgggttcgtgcggtcatagggtgcccatagtgccgtgtctgggaaaccccaattgagatcgtacggtcatagggtgcccatagtgccgtgtctgggaaaccccgattgagatcgtgcggtcatagggtgcccatagcaccgtgtctgggagaccccgattgagatcgtgcagtcatagggtgcccatagtgccgtgtctgggaaaccctaaatgagatcgtgcagtcatagggtgcccatagtgcggtgtctgggagaccccgattgagatcatgaggtcata

SEQ ID NO: 99469 - DNA, 23 bp, Homo sapiens
  chr20:60029502-60029525
  hypo
ttttttctttcttttttgagacg

SEQ ID NO: 99470 - DNA, 31 bp, Homo sapiens; identical to SEQ ID NO: 33508
  chr20:60079876-60079907
  hypo

SEQ ID NO: 99471 - DNA, 253 bp, Homo sapiens; identical to SEQ ID NO: 33509
  chr20:60094623-60094876
  hypo

SEQ ID NO: 99472 - DNA, 196 bp, Homo sapiens
  chr20:60098285-60098481
  hypo
aggaggcctcatctcaggccacggcctactgatccaggcgactccgtctttgggtggagctgcggcactgccagcgggcccacgctggtctctgctcgccggtctctgctctcttgtcaggtgaccatgcgtttgccacgtgtgatgattgcgtggcatggcgtgctcctcgcacgcacagacacacccttccagc

SEQ ID NO: 99473 - DNA, 30 bp, Homo sapiens; identical to SEQ ID NO: 33510
  chr20:60107463-60107493
  hypo

SEQ ID NO: 99474 - DNA, 30 bp, Homo sapiens; identical to SEQ ID NO: 33511
  chr20:60107959-60107989
  hypo

SEQ ID NO: 99475 - DNA, 30 bp, Homo sapiens
  chr20:60121966-60121996
  hypo
aggcatctcttcttccgtctccgtgcccac

SEQ ID NO: 99476 - DNA, 31 bp, Homo sapiens; identical to SEQ ID NO: 33512
  chr20:60170957-60170988
  hypo

SEQ ID NO: 99477 - DNA, 45 bp, Homo sapiens
  chr20:60176906-60176951
  hypo
tcagcatccagaaagcagtgtcgcgttcagttggaaacagctctg

SEQ ID NO: 99478 - DNA, 43 bp, Homo sapiens
  chr20:60194625-60194668
  hypo
agctttgtttccaggacagagcgatgtctgctcaagtctggtt

SEQ ID NO: 99479 - DNA, 71 bp, Homo sapiens
  chr20:60210048-60210119
  hypo
ggttgccattctatgtagaggcggcactttgctttcgtgcccgtctgcccgtggacactgggttggttgca

SEQ ID NO: 99480 - DNA, 264 bp, Homo sapiens; identical to SEQ ID NO: 33513
  chr20:60226060-60226324
  hypo

SEQ ID NO: 99481 - DNA, 30 bp, Homo sapiens
  chr20:60236253-60236283
  hypo
gctgtcaccgtcagccggtggttccgcccg

SEQ ID NO: 99482 - DNA, 171 bp, Homo sapiens
  chr20:60236696-60236867
  hypo
ggaccatggatccttcgtgtttgtcacctttgcctttgtgtttgtcacctttgtggcaagttgttgcaaagacgtcacagccaccgcacacatttccactttgggtctggactgaccatctttgagtgtccgcccatcattcaccaaacactgacgcggctcgtatgacag

SEQ ID NO: 99483 - DNA, 30 bp, Homo sapiens; identical to SEQ ID NO: 33514
  chr20:60237750-60237780
  hypo

SEQ ID NO: 99484 - DNA, 742 bp, Homo sapiens
  chr20:60238323-60239065
  hypo
cgacaaatgagtccacgcaggaaaggagtggcacccgcaggaggcctgtgctgcggagctcctgggagggtgacgctggggcaggggctgctgcggacaagcgttgggaggcctctctgaggaggcagtgtttgcgctgaaacctagaaaaagagctgcgtaaaagacaataattctgaaggctctgggtcgggggcatttcaggcgagggtcctagaaatgccaatgctggggatgccgccgagtgggtcagaggggccggaggaaggtgaacagggcagggggcagtggggctggattttatcccaagtgagtcgggagctgctgggacggcaggaccgggtgtgtgtgtccaagagaccatcttggctgcccaggggaagcggggactcgaggagagcagggagtgctgtcttcccggcgggagctggcggtactgaggaaggacgtgcagaaccaggcagggctgacagacgcggggtcgggggaagatcaggagctcccggtgtccaggctgcacaatgtgggcaccactgaacacggggtaaaccaatcaccagtcactcccacgctgggtcttccagctccctcgaggccgccctggccctccacactcccaccgctggcgccagcatctgtgcccgcggcagtttagagtgacactgtcctctgtccagcaccggtccacgttgaggtgtctgtgtgccaccgggacccttccgtagacatgcaccatgaagac

SEQ ID NO: 99485 - DNA, 29 bp, Homo sapiens
  chr20:60261374-60261403
  hypo
gagagaacaagcccaactgtgcgtgtata

SEQ ID NO: 99486 - DNA, 121 bp, Homo sapiens; identical to SEQ ID NO: 33518
  chr20:60261582-60261703
  hypo

SEQ ID NO: 99487 - DNA, 29 bp, Homo sapiens
  chr20:60261822-60261851
  hypo
attcgcgcgtgtgtgtgtgcatgtgtgca

SEQ ID NO: 99488 - DNA, 20 bp, Homo sapiens
  chr20:60272659-60272679
  hypo
gggggaacaaaaaaaaggaa

SEQ ID NO: 99489 - DNA, 167 bp, Homo sapiens
  chr20:60273114-60273281
  hypo
gtctcacactgccacactgcccgagacagcagccattagccgcacgttgctggacagcacagacctggcacgtgtcgtccaccctcggaggggtccccttgcacgggctccactccggacggtccctgagactctcccgccctcacgcctgctctctaagccaagca

SEQ ID NO: 99490 - DNA, 322 bp, Homo sapiens; identical to SEQ ID NO: 33521
  chr20:60275908-60276230
  hypo

SEQ ID NO: 99491 - DNA, 154 bp, Homo sapiens
  chr20:60304263-60304417
  hypo
ctctgctcactcctgtgttggcgtgagtgggaggacttcattagcgacatcgcccacatcaagagccactgtgcttcgttccagtgggcaccagtaggactggctaatgaggcgctcacagctcagtttctacggccactgtggaaaagaactt

SEQ ID NO: 99492 - DNA, 268 bp, Homo sapiens
  chr20:60313849-60314117
  hypo
ctcctcctctcaccaccttcacggcaatcccgctcctcctctcaccaccttgacgaaggcgtgaaacgtccctgaggctcagcttcctatctgcgagatgggccagttctactcgccagcgctgccttcccgtgcctggcagtgcacccgccgcgtggaggctgcaggggctgggacaggacgtgtgatctgcattggggtcgcagaggcggcttttcagggcattgtaggtgtttgctggtacatcgagggaaaagttttctgggaa

SEQ ID NO: 99493 - DNA, 220 bp, Homo sapiens; identical to SEQ ID NO: 33522
  chr20:60316297-60316517
  hypo

SEQ ID NO: 99494 - DNA, 184 bp, Homo sapiens
  chr20:60329679-60329863
  hypo
cacaccacacacacacgccccacacaccacacgcacacacgccccgcacacactatgcacaccacacacacagtgcatgccacacacaccgcacacacactgcacgccccgcacacactatgcacaccacacacacagtgcatgccacacacaccacacacacactgcacgccacacacaccac

SEQ ID NO: 99495 - DNA, 69 bp, Homo sapiens; identical to SEQ ID NO: 33523
  chr20:60334002-60334071
  hypo

SEQ ID NO: 99496 - DNA, 425 bp, Homo sapiens; identical to SEQ ID NO: 33524
  chr20:60352645-60353070
  hypo

SEQ ID NO: 99497 - DNA, 191 bp, Homo sapiens; identical to SEQ ID NO: 33525
  chr20:60361299-60361490
  hypo

SEQ ID NO: 99498 - DNA, 30 bp, Homo sapiens
  chr20:60424539-60424569
  hypo
ccaaaatcaaagtgccggccagcctgggtg

SEQ ID NO: 99499 - DNA, 329 bp, Homo sapiens; identical to SEQ ID NO: 33526
  chr20:60448754-60449083
  hypo

SEQ ID NO: 99500 - DNA, 202 bp, Homo sapiens
  chr20:60470146-60470348
  hypo
gcaggaatgcactggcgtgcggcacagcctcctctctctctgcggctctgcctgacgggcacttggcagatagcgtgtaagaaaggccctgggcagcggaggctgctgtgtggagtggctcgattcctgatgtgcgcagtaggagagaggccggggctcagtcagggaggggaccggcggcggaggtcggttgccacctggg

SEQ ID NO: 99501 - DNA, 250 bp, Homo sapiens
  chr20:60477329-60477579
  hypo
ctgaaaccaggacccccggggcctccattccaggagaagcagcctcactctgcccttcaccagccacggagacccggggtctatgggcagtgccctaaatgccagccatgccctggggcacgcggtcaccaccccgcagaaccgctcccgtgctcgttgcaggagtgcaagggcagatccacagaggagcgtgcggggccccaccttcccagggatttgcaggcaaatgagcggccgttgacacagggac

SEQ ID NO: 99502 - DNA, 93 bp, Homo sapiens
  chr20:60485025-60485118
  hypo
ggctgacgcacctgccgggcaggtctgcacgcctgcttcagtggggccccggcagccgtgctatgaggcgtgcactcccgtgcacccctgagc

SEQ ID NO: 99503 - DNA, 215 bp, Homo sapiens; identical to SEQ ID NO: 33527
  chr20:60485473-60485688
  hypo

SEQ ID NO: 99504 - DNA, 30 bp, Homo sapiens
  chr20:60493872-60493902
  hypo
cttccaggagccaccgtctcagttttcctt

SEQ ID NO: 99505 - DNA, 763 bp, Homo sapiens
  chr20:60494943-60495706
  hypo
gattgtgtggaagcatggtatcgtgattatgtggaagcgtggtgtcacggtgattgcgtggaagcgtgttgtgattgtgtggaagcgtggtatcgcggtgattgcatggaagtgtggtgtcacagtgattgcgtggaagcgtgtcgtgattgtgtggaagcatggtatcgtgattgtgtggaagcgtggtgtcacggtgattgcgtggaagcatgttgtgattggaagcgtgtcacggtgattgcgtggaagcgtggttttgtgattgcatggaagcatggcgtcacagtgactgcgtggaagcgtggtgtcatggtgactgcgtggaagcatggtgtcacggtgattgcatggaagcgtggtgtcacagtgattgcatggaagcgtgtcatgattgtgtggaagcatggtatcgtgattgtgtggaagcgtggtgtgattgtgtggaagcgtggtgtcatagtgattgcatggaagcgtgtcgtgattggaagcgtggtgtcgcggtgattgtgtggaagtgtggtgtgattgcgtggaagcgtgtcttggtgattgcatggaaatgtgtgattgcatggaagcgcagtgtcacggtgattgtgtggaagcgtgtcatggtgattatgtggaagtgtggtgtcgtgatgattgcatggaagcaccgtgtcatggtgattgtgtggaaatgtggtgtgattgcgtggaagcgtggtgtcacagtgattgcatggaagtgtggtgtcacagtgattgcatggaa

SEQ ID NO: 99506 - DNA, 558 bp, Homo sapiens
  chr20:60495765-60496323
  hypo
gtgtcacggtgattgcatggaagcgtggtgtggtgattgcatggaagcatggtgtcacagtaattgcatggaagcgtggtatcatggtgattgcgtggaagcgtggtgtcgtgattgcatggaaacgtggtgtgattgcatggaagcatggtgtcacagtaattgcatggaagtgtggtgtcatggtgattgcatggaagcgtggtgtcgtggtgattgcatggaagcatggtgtcacagtaattgcatggaagcatgtcatggtgattgcgtggaagtgtggtgtcgtgattgcatggaagcgttgtgtcacagtaattgcatggaagcgtgtcatggtgattgcgtggaagcgtggtgtcgtgattgcatggaagcattgtgtcacagtaattgcatggaagcgtggtgtcacggtgattgtgtggaagcgtggtgtcatgattgcatggaagcgtggtgtcacagtgattgcatggaagcgtggtgtcgtgattgcatggaagcactgtgtcacagtaattgcatggaagcatggtgtcacggtgattgcgtgga

SEQ ID NO: 99507 - DNA, 70 bp, Homo sapiens
  chr20:60502076-60502146
  hypo
ctccgatcacgtgccgtgccatcagctacatctcaaagcagttttcaaaggtagcgccgcgctgcgtcac

SEQ ID NO: 99508 - DNA, 528 bp, Homo sapiens
  chr20:60502539-60503067
  hypo
ctcatctggagcggccgcgcctgcttttctcacagacacttccaaaagcagcagttcttccacgcgatcatgcgtctgggctcagggcttccagcaccctggggctctgctgggcagggccagcaaaactcagggaggcaaggaaaggttttgccctaagaagtcccagatgggggcaagatgtggtgggcggatcccagccctcaggggccagtgcagagcccagcacccgcagaacccctccctggctccccagtgggagtgagtccccggtgcgtggctgtgacctccgtggctgtgagtttccacgtgaatgccacaccccgctgtgtgcgtgtgtgcaggtgtgggtgtggccgtgtgctctgccgtgtctgttgaggtgccgtgcgcagtggctgtgtgcgtgtgtgcagctgcgggtgtgggtgtggccgtgtgctttgccgtgtctgttgaggtgccgtacgcagtggtgtggctgcccatggcgtgtggcagggtgtcggtcaggagccatggctggac

SEQ ID NO: 99509 - DNA, 172 bp, Homo sapiens
  chr20:60503294-60503466
  hypo
gacatcaacgacaacgcccctgagctgctgcccaaggaggcgcagatctgcgagaagcccaacctgaacgccatcaacatcacggcggccgacgctgacgtcgaccccaacatcggcccctacgtcttcgagctgccctttgtcccggcggccgtgcggaagaactggacca

SEQ ID NO: 99510 - DNA, 198 bp, Homo sapiens; identical to SEQ ID NO: 33531
  chr20:60508053-60508251
  hypo

SEQ ID NO: 99511 - DNA, 372 bp, Homo sapiens
  chr20:60511743-60512115
  hypo
ggggctgagacaacgcgtcctgcaccctaactctgtgtctgtgacccccagggactccgcgctgctgacaacgaccccacggcacccccctatgactccctgctggtcttcgactacgaggggagcggctccaccgcaggctccgtcagctccctgaactcatccagttccggggaccaagactacgattacctcaacgactgggggcccagattcaagaagctggcggacatgtatggaggtggtgaagaggattgactgacctcgcatcttcggaccgaagtgagagccgtgctcggacgccggaggagcaggactgagcagaggcggccggtcttcccgactccctgcggctgtgtccttagtgctgtt

SEQ ID NO: 99512 - DNA, 30 bp, Homo sapiens
  chr20:60515748-60515778
  hypo
acacgggggaggtggcggccaccatgagct

SEQ ID NO: 99513 - DNA, 875 bp, Homo sapiens
  chr20:60544917-60545792
  hypo
cccatcggaacactcggccccctcatcggggcactcggccccccgtcggagcactcgcccccccgtcggggcactcggccccccgtcggaacactcggccccccgtcggggcactcggcccaccatcggggccattacatgccacgagtcctttggtgtcagatccctagtgcggggccaggtgacccacctgggtggggcccaagcctttcccggttgcttaactgaggtgcccttacactggctcaaatgcacagatattacctgtcagcttagtgtttcacattggcacgcgcctgtgtgacacccatgatgatcaaaacagaacattttcatcaccccagagggccctggcgccccttcccgacagtctcctcaccggagccccacaccctgcttctacccacccatgaacttccatcaggcggaatcagaatgcataggcttctgtgtccggcctcttccagtcagcgtagctcctctgagattcagctacctggtggagcatatcagtagttcgttcctttttattcctggggggcgtttcactgactaaatatgcatctgtttgactctccattcacctgctgaagggcatttgggctgcttccatcttgagcatcaatacggccattgtgaacattcttgtatgacttttccgcggacaaaggaactcattctcaagtagatgcttaggactggaactgctggtcacaggatagatgtgcattcggcttcgtcgctgtgtcacacactgaagagatgcccattcagcttcatcactgcatcatcacacaccgggtagacatgcattcaacactgggtagacgggcattcagcttcatcactgcatcacacaccgggcagacgtgcgt

SEQ ID NO: 99514 - DNA, 101 bp, Homo sapiens; identical to SEQ ID NO: 33535
  chr20:60549274-60549375
  hypo

SEQ ID NO: 99515 - DNA, 493 bp, Homo sapiens; identical to SEQ ID NO: 57446
  chr20:60552008-60552501
  hypo

SEQ ID NO: 99516 - DNA, 373 bp, Homo sapiens; identical to SEQ ID NO: 33538
  chr20:60563048-60563421
  hypo

SEQ ID NO: 99517 - DNA, 151 bp, Homo sapiens
  chr20:60563781-60563932
  hypo
tgctccccaaacagacgccggcgccaatcttcacccactcggcagtgcctcacctgggtcctccaggtccggcgttctcgatactccacgtacctcccagccccacaccccggcccttctcatgagtgaggacgcacgagctcccttactc

SEQ ID NO: 99518 - DNA, 30 bp, Homo sapiens
  chr20:60580209-60580239
  hypo
caggccaggccctgcggcgcagggaacctg

SEQ ID NO: 99519 - DNA, 71 bp, Homo sapiens; identical to SEQ ID NO: 33540
  chr20:60581686-60581757
  hypo

SEQ ID NO: 99520 - DNA, 30 bp, Homo sapiens; identical to SEQ ID NO: 33541
  chr20:60586705-60586735
  hypo

SEQ ID NO: 99521 - DNA, 30 bp, Homo sapiens
  chr20:60587250-60587280
  hypo
gctctcactacagacgagggatgtgagcgg

SEQ ID NO: 99522 - DNA, 30 bp, Homo sapiens
  chr20:60589397-60589427
  hypo
cacagccctgccaccgagaggaggacagga

SEQ ID NO: 99523 - DNA, 682 bp, Homo sapiens
  chr20:60615355-60616037
  hypo
ctactggcacgcacacgacacaccacttgggcaccacgcagaagtatcccgccaagggaaagggccagatgtgaggctcccactacataatctcatttatacaaaattctagaagaggcaaaatcacagtgacagcagcagctcagtggctgccggggaggaagctggagcaggggctcacccccaggggcacgaggctacagaatgattccgatcctgtactcgacggtggtggtgacgtgactatcgttaaaactcacagacctacaggctgagaaaggtgcgctctgccacgcgccaactacgcctccataaacggagatttaaaaagtagtatgtgctaacactgcatgcccactagaataggcaaaacagaaaagcctggccacgccaagagccagcaagatctcacggcagcagcactgagcccgcggatgaaactaaattcgcagagccgctcaggaacacagcctggcagtttctgacaagaccaaactcacaccttccgtacgactcagcgattccactcctaacatttacccaaaagaaaaggacgtctacacgtatgttcgcacaaaggcttgaacacaaatgttcaaaaagaagctttattcgtaatagccaaaaactggaaacatgccagactcctcagctggcaaatgtatagcgtacatccaaacag

SEQ ID NO: 99524 - DNA, 308 bp, Homo sapiens
  chr20:60620197-60620505
  hypo
ccacactgcaggaagagaactcgcaaagccatgccgctcaaacggaatcccatcgggatgctccccgctcaggactgtcacagggacaaccgtcccgcacctcctggcccatgcaccctccccaccggccacacaaggtctggaatgttcttccctgcccttcctgggaaagccctgcctgccgtgcctgcccgctcctctctacccttgactcgcttcaggtgcttggtggagacgatggcggtgaaactttcaacagcgcgcctgtttgggtttaagcttcagagaacaggcgcagaatccctgca

SEQ ID NO: 99525 - DNA, 30 bp, Homo sapiens
  chr20:60635127-60635157
  hypo
cagacgccgcctcccggcctccctgtgctg

SEQ ID NO: 99526 - DNA, 476 bp, Homo sapiens
  chr20:60662672-60663148
  hypo
tcctgtacactcacctgcacacgcactcacacatgctcctatacgctcacctgcacacgcacacgctcctgtacacccacctgcacacgcactcacacgcactcctgtacactcacctgcacgcttacccacacatgctctgtacactcacctgcatgcactcacacgcgctcctatacactcacctgcacacgcactcacacaagctcttgtacactcacctgcacacgcactcacacaagctcttgtacactcactgcagactcacccacacacgctcctgtacactcacctgcatgcactcacatgtactcctgtacactcacctgcacactcacctgcacacgcacgcacacgtgctcctgtacactcacctgcatgcacacacatgcgctcctgtacgctcacctgcactcactcacatgcactcccgtacactcacctgcagacgcacccacacgcgctcctgtacactc

SEQ ID NO: 99527 - DNA, 437 bp, Homo sapiens; identical to SEQ ID NO: 33544
  chr20:60725125-60725562
  hypo

SEQ ID NO: 99528 - DNA, 31 bp, Homo sapiens; identical to SEQ ID NO: 33545
  chr20:60731379-60731410
  hypo

SEQ ID NO: 99529 - DNA, 30 bp, Homo sapiens; identical to SEQ ID NO: 33546
  chr20:60736049-60736079
  hypo

SEQ ID NO: 99530 - DNA, 30 bp, Homo sapiens
  chr20:60738648-60738678
  hypo
ccatggcgccctaccggccctcccagcaag

SEQ ID NO: 99531 - DNA, 30 bp, Homo sapiens
  chr20:60739581-60739611
  hypo
gtgggagttggaggcggataattgtagctc

SEQ ID NO: 99532 - DNA, 114 bp, Homo sapiens
  chr20:60740451-60740565
  hypo
actgtcgccgtctccgtttcgcacaggccatggcgattacgcctaccagcagtcatcctacacggagcagagctacgaccggtccttcgaggagtccacgcagcactactatga

SEQ ID NO: 99533 - DNA, 194 bp, Homo sapiens
  chr20:60756173-60756367
  hypo
attctcccctctcctaggagacggatgtcacgcacaaatggggagagaagtgtttattttgtaggcactaagggtttctaaaacccttaacactggtaagggctcaaaaataaacgtatgtgttcatattcgatcaccgaaatgagagttcttaattgctaattgacaaacgcgttagcaatttcagttaggga

SEQ ID NO: 99534 - DNA, 31 bp, Homo sapiens; identical to SEQ ID NO: 33547
  chr20:60766097-60766128
  hypo

SEQ ID NO: 99535 - DNA, 1396 bp, Homo sapiens; identical to SEQ ID NO: 33548
  chr20:60772852-60774248
  hypo

SEQ ID NO: 99536 - DNA, 698 bp, Homo sapiens
  chr20:60781093-60781791
  hypo
cagtgccctgcccagacaccccgtgaaatgccctctagtcaaaaagccaaagacagccacacgcgcccaggctctgcacagttgggcccaccaccctctcgtgcacgcactttccacacttcacgttagccgccgtcgcccccccgccctaagctcctggagaacagagacctcgtttgtctgtatgcagtgcccgggtcggcgctggccccgggatggaggcctgaagggcagacatgctgaggcaaccggagcgtctcatcagtgaacacacgtgccggggacctgtcctggtgccgctaaagaggctgcagagccgcggggtgcggcagtgcttggcgggggcggggtgcagctctgcgtgcatggcgtccacctggggaccgcaggtgtcaagccggggagagccagtgccaggaggtcacacacgatggttccctctacagagtgttccagaaacgatgaggagaatggattggcggtcctcgggctgaggagggcgggagggtggaggtagccgtggacacaaaagggccatgccagggtcctcagaccatcaccctgtgtgttggcggtggggccacgagtctgcacgtgcgaaagaatcctgttggcttagtgtttcaggctgggaagatgaccggctctgaaggtggagggtggtgatgggagagccactgaaccgcacacttcagata

SEQ ID NO: 99537 - DNA, 30 bp, Homo sapiens; identical to SEQ ID NO: 33550
  chr20:60791487-60791517
  hypo

SEQ ID NO: 99538 - DNA, 213 bp, Homo sapiens
  chr20:60816040-60816253
  hypo
cacactgccttagagtacacacgtaggacatttttcttccacgcctcgagtgcgttgagagggtcagactctgctgtgttccacatgttaatgagaggtgctgtttgaatgtgaaaaaaatgccacttgactttcatcccagtgtctctcctctgtgccgtccaggagatgccagcagatgggtcttggaatttttttttttttgagatggag

SEQ ID NO: 99539 - DNA, 333 bp, Homo sapiens; identical to SEQ ID NO: 33552
  chr20:60816432-60816765
  hypo

SEQ ID NO: 99540 - DNA, 86 bp, Homo sapiens; identical to SEQ ID NO: 33553
  chr20:60842012-60842098
  hypo

SEQ ID NO: 99541 - DNA, 420 bp, Homo sapiens
  chr20:60842500-60842920
  hypo
tcaggcctatcctgtgcgtttactgtttggggtctggcatcatctacttgtccagggagagaaggagaattcaggaccacagccgggctctcaggaggccaccggggtagtcttatttcgaggtctgttcctacagctaggaactgtgtttttgtttgtttcagtgatgcttcaaatttgggccaacaggctccacctaacctctgcggcctcatgtctgcgtctcttttctccctcactgacagtcccagttttctgcagccctggcgaggacagatttagaccggcacgcagttgtgactcactcactttgccccacatacctgtgggaccagctctgctgccgacagtgtctttgctgagacagcacatgtctgtgcctcctgcagttgccacttgtcattgtcttcagggtatatc

SEQ ID NO: 99542 - DNA, 37 bp, Homo sapiens
  chr20:60843219-60843256
  hypo
tgggattacaagcgtgagccaccgcgcccggccaaat

SEQ ID NO: 99543 - DNA, 35 bp, Homo sapiens; identical to SEQ ID NO: 33555
  chr20:60845090-60845125
  hypo

SEQ ID NO: 99544 - DNA, 31 bp, Homo sapiens; identical to SEQ ID NO: 33556
  chr20:60848398-60848429
  hypo

SEQ ID NO: 99545 - DNA, 1252 bp, Homo sapiens
  chr20:60855789-60857041
  hypo
ctgccgtgtgtgtttcgtgaggtggcctttcttttgacgacttcacaggaaagccatttgtctttgttcagtcttctttgattgcttattaacttgtcttgacatttaagtagaaagctttgtagatgctacaaaggaaagaagaagtacatttcaaacgcatgctaaatacacagcctccgtcgcaggggcttcaaagcagcgtgctgctctcccgcgggtgccggttgctgtgacccagccccgcctggtcgttgcgtcttgggtcacgtcgtgtcttggcttttctggactctcactgcttgttttctggtgtcttcacagacataatgaagcctacacctggaccaaccccacctgctgcgtccacaacgtcatcatcgggaagctgtggatagagcagtatgggacagtggagattttaaaccacaggtgacagcaccccaccgttgggtgagagcgcgaggctccgggtggggatgggcgagccggggagcgtgagcatccgtgctcctggtgggttttagctcagcctcacgagctgctgccgtgtccccgccagcccaggcatagcagctgcctagacttgactctgaccggtgttggccatgaatgctcctcgttcaagacctcgtttttcgtcacggttgttactttaaggctttgagctatgctgaagagctgtgtcattgccaggtgcagcgcagtggccgtccacggccgttggccactgtctaggcttgaatgccctattcctggaagctcatgactggtgggctttgccttttcaccactttagtgaggtataatcgatgcatcataagactcgcccattctgaatggacacttaagtgatttttagtaaattgaccgaatcatggagccgtccccacagcccatttcaaacacttccatcgccccaaaggcccaccacacccatttgcagtcaccccccgcctgccccaggggcctccaccgcgcttctcctgttacagagttaccctttccggctgtttgctgtcttgcagcagaaacctgtgtttgtttttctcacagaactggacataagtgtgtgcttcactttaaaccgtgtggattatttggaaaagaacttcacaaggtggaaggacacattcaagacaaaaagtaggtccttgccaagtgttcatggggcaccactacagcctgtgtgtccacgttagaagggctcaggtgctcctgggcctgcgtgtgcctacgtgcatgagacgcg

SEQ ID NO: 99546 - DNA, 34 bp, Homo sapiens
  chr20:60866894-60866928
  hypo
cacacacacctggggacggcggggaggccccaca

SEQ ID NO: 99547 - DNA, 210 bp, Homo sapiens; identical to SEQ ID NO: 33557
  chr20:60868205-60868415
  hypo

SEQ ID NO: 99548 - DNA, 214 bp, Homo sapiens
  chr20:60868772-60868986
  hypo
cccagaacagggctgcgttttccttttgggctgagcatcttctgacccccctcccttgtatccggcaggtggttctacccaggcaataacccctacactgggacccccgactggttgtatgcaggggattactttgagcggaatttctccgactgcccagatatctactgagggcctggaggggcctggggcccgggaccggaggctgacgagg

SEQ ID NO: 99549 - DNA, 152 bp, Homo sapiens
  chr20:60875560-60875712
  hypo
ccaggtgccataccccacacacgcatagagcccgtgggctggcagcgggcacccacagtggcctctgcaaagcctgcctggctgcggctcgtttcctcactgcagcatgctcataggaatgtgggagtttcgcttgaagtgtgggtaaagag

SEQ ID NO: 99550 - DNA, 452 bp, Homo sapiens
  chr20:60880674-60881126
  hypo
agggactcccagtgtccctggcgccctgcagcttccatagccattcggggtgtgcgtgggtgctctgctcccagctctgtgagctcgcaggtcgatgcttctgacactgatctgtgcacatgtgtgtgcacacgcgtgtgctcgattgtgagcgcctgccgtggccctgggccgcggtgtgctgagcgggccagttcgctgccttccactggttgaaggaaggagacgggtgtgtaaagaaccgcaccccagagggcaggagggtgagagggcttggtctggcagcagctaagtgccttcggagctctaggctccccatttgtgaaatgggcggagggggacagggcacacccgggattgcggcggatggggacagggcgcagagcatcgtgctcaggaggcgccactgccgtcccctcacctgctgggccgggtcctgtctcctcagcatt

SEQ ID NO: 99551 - DNA, 30 bp, Homo sapiens; identical to SEQ ID NO: 33559
  chr20:60882632-60882662
  hypo

SEQ ID NO: 99552 - DNA, 30 bp, Homo sapiens
  chr20:60883812-60883842
  hypo
actgagccacgcgccgtcctccgaggaact

SEQ ID NO: 99553 - DNA, 30 bp, Homo sapiens
  chr20:60884313-60884343
  hypo
agacacctatgaggcgagcacaaggggcgg

SEQ ID NO: 99554 - DNA, 716 bp, Homo sapiens
  chr20:60891779-60892495
  hypo
ttggccaggagctgctgggctcggtccaccaggccctgccgcaccaccgtctgtggatgccagggcagaccgtggctcagacacgcaggccggggctgcgggaggtgcaggcagtgggggcgctcctgctggggctgaggggaagtgaggggcctcaccgcccacgtgtggtccgcctgctgcagggcctggccagcagcatcctcggcagcctgcacggcctgcaggatgcggctgtaggcgttggaggcctcgatggccctctgggtgaggcggtcctggttgacgtccaggatgatgctgcagcggaagggagggtcgaaggagtgggtaagcgcagacgccctcggcctggctctccagcctcctgcgctcacaaccagccgtgcccgtgcctgcccgccaagtcccgcctccaggtctttgcccgtgcctgtcgcctgctgggtgtactgctcctgtcactctgggccccagcttgccgtggagctgaggaaggcctggcttctttgaggacaacggcctcagcccctaggagccttcccagaccagctggccctcccaaggccctgtctgcatccccagggtgggcccagggcccctcctctcctggccacccacctggacagattgagtgccagctggcccagctgctgtgcgtgggcctcggcggcctccactagacgcagcttgctgcccgccggggagaaggtctg

SEQ ID NO: 99555 - DNA, 31 bp, Homo sapiens; identical to SEQ ID NO: 33561
  chr20:60893765-60893796
  hypo

SEQ ID NO: 99556 - DNA, 518 bp, Homo sapiens
  chr20:60905728-60906246
  hypo
aacctgccctgggttgggacccggagtcctgccctgacacccccgtccctctagagactatggccctcacctggggctcacgcagcagggtgggctctgcatcagggtccacagcggtggggggccgaggtcggggtccagctggggacatggctggagtgagatcctgcgcgtgggtcagcgggaggccgggcggcagcgggatcacctggcagtccctgaggatgatgggctggggcggctttgggaagcgcgagggcagacaggcggcactggtgagagcacagtgggtgagtcagagccggccctgccgccgggccctcggccgcgcccctcccagccccattacctgccattacctgttggggccaaaggcgccgtggctgctgatgcagctgacccggggctccacgaactccgggctgaactcctcaatgggcaccagagtgaccccgtgctgcaggcagagggacgagatgctgcaacgcccgtggtgcggggaggatagggggtgcagg

SEQ ID NO: 99557 - DNA, 31 bp, Homo sapiens; identical to SEQ ID NO: 33563
  chr20:60912468-60912499
  hypo

SEQ ID NO: 99558 - DNA, 273 bp, Homo sapiens; identical to SEQ ID NO: 33564
  chr20:60912906-60913179
  hypo

SEQ ID NO: 99559 - DNA, 112 bp, Homo sapiens; identical to SEQ ID NO: 33565
  chr20:60913463-60913575
  hypo

SEQ ID NO: 99560 - DNA, 30 bp, Homo sapiens; identical to SEQ ID NO: 57454
  chr20:60921028-60921058
  hypo

SEQ ID NO: 99561 - DNA, 87 bp, Homo sapiens
  chr20:60925164-60925251
  hypo
tccacacccaggtgcggtgagtcaggggatggcaatgtcttccctgcaggccaaggcaagccccggctcccgcgcccttcctctcct

SEQ ID NO: 99562 - DNA, 594 bp, Homo sapiens
  chr20:60925500-60926094
  hypo
ggctcccgcctctgctcggcactggccgtgagaatgggagtgaacctttgtcctgtctgagctccacccgcctccccacctcccctgtaaactggagcgtggacagagcagtaaggccccacagaaggcaagggcgggtcccaaatccaagcgcatgaaagttgggctgctcggttgcaggcactagatgagccctgccagctccctgctgggggtccaggagcctcgtcacacactcagcctcagctgcaccactctgagtggcttctgtccagccccatgcctgcactgccaccctagggtgttacaccctccgggcaccacgctgagtactggtttgcgtgtttcccagctgcctcccccggaacaggtgctcctgaggccgggctggggtcccaccctgtgttcccattcccaggaaaacggcccagcgtgtgttaggcgctcaacatacagctgctggctgaaagaaccaacgaagggagggaggaaaggacggacgtgccctggggttgcttctccgcagaatgagcccggccctaccttactgaggactctgggtgaggcccaggaatgtgccggtgccagcaccag

SEQ ID NO: 99563 - DNA, 30 bp, Homo sapiens
  chr20:60936631-60936661
  hypo
ctgggactggggcagcggcggagccggctg

SEQ ID NO: 99564 - DNA, 563 bp, Homo sapiens
  chr20:60936961-60937524
  hypo
ggggactggagagcaggcacccgaccccacctaaccctcagtggccgccacctcggcacaggtatcccaggaatgtccacttgcgccagcctcctctgcattcctgcagcccctcccgcacctgccaggaattccttaaacagcagggcgcctgacgcagggggcaccaccgcactgctcacagcacctccgccctcccagccccaagctgtctactcagcacccgcaaccaaactctgtggcctttggaaacacccccatgagcacccgctttccctgtgtcatggggacgctgaaagcacaaacaaaaggtgaccactgccgtgcctttgtccctgtggggactccccccaccaagtccttcgtgtccagcctcccaggccccaggtctcgctcacggtggagacctcgccttctggtcctgtggcccaaggtaggcccgacgggcacagacacagagatgggggctgcagcacgcaaagaagggtccctacctggcccaggtccagggtgacgttgacctcgttgtactccaggccgcgggacagcggtggactctgcca

SEQ ID NO: 99565 - DNA, 30 bp, Homo sapiens
  chr20:60937806-60937836
  hypo
gtgagctgctcacggcgctaaggacaagag

SEQ ID NO: 99566 - DNA, 244 bp, Homo sapiens; identical to SEQ ID NO: 13129
  chr20:60941670-60941914
  hypo

SEQ ID NO: 99567 - DNA, 285 bp, Homo sapiens
  chr20:60952095-60952380
  hypo
ggatgccagttgtcccgtcctaggctgcgagctccctgggcacagggctgtctgttccacgcaccaaggagcgcctgtacccagcacggggcttggaaatggcgggtggacatgacgggtgttctgtgctctacggttcccggcttctgatttgcaattgttcggtagaaaccgtacttccagtgcccacacaaccaatctgtttttctccttcttatagcattggacaaattacgtgaggcatttgatgcattattataaaggaggcttcgtgggggatgactt

SEQ ID NO: 99568 - DNA, 30 bp, Homo sapiens
  chr20:60953030-60953060
  hypo
atggcacgcagtggccggcccgggggtgca

SEQ ID NO: 99569 - DNA, 382 bp, Homo sapiens; identical to SEQ ID NO: 33570
  chr20:60953306-60953688
  hypo

SEQ ID NO: 99570 - DNA, 30 bp, Homo sapiens; identical to SEQ ID NO: 57458
  chr20:60956901-60956931
  hypo

SEQ ID NO: 99571 - DNA, 30 bp, Homo sapiens; identical to SEQ ID NO: 33571
  chr20:60967329-60967359
  hypo

SEQ ID NO: 99572 - DNA, 30 bp, Homo sapiens; identical to SEQ ID NO: 57459
  chr20:60969435-60969465
  hypo

SEQ ID NO: 99573 - DNA, 31 bp, Homo sapiens
  chr20:60970998-60971029
  hypo
tattcagcctctcctccgtgctcccaacaaa

SEQ ID NO: 99574 - DNA, 238 bp, Homo sapiens
  chr20:60976547-60976785
  hypo
cccatgagatggacccctgctcgccccgggccccacagagaggtgtcggtgtgtccggcagacatggagaggatcacgcatgtgcagatgtaccaccttacgcctagctggaagcagcacacacgccggtcagcaggaggcgggacatgcgcaatcaggggacggcatgcacagcatgctgcaggtgcacacagacgccacacgggttgagaggctcgtcatgtggtgacacaggtcc

SEQ ID NO: 99575 - DNA, 215 bp, Homo sapiens
  chr20:60983979-60984194
  hypo
agttcttctttgctggcgctaagctagactttgagggacaaggaggaatgctgaggaaggaacggggtctcttcctgggtctggtgaacccccttgctaggctcccgctgccagtcttctcccctccccagggtgtcgatgggtggccaaaagccaacctggcctgcgggcagtgtgtagggaacacacggcttttgtttcgtgtgattctggag

SEQ ID NO: 99576 - DNA, 30 bp, Homo sapiens
  chr20:60987214-60987244
  hypo
tgcccccatgcccctcggggctgtgccttc

SEQ ID NO: 99577 - DNA, 30 bp, Homo sapiens
  chr20:60987817-60987847
  hypo
aagggggtgtggtcacgaggaggactgcct

SEQ ID NO: 99578 - DNA, 278 bp, Homo sapiens
  chr20:60988928-60989206
  hypo
ttgctgagtgcctggggactgcgagtcaggggtccggactgggtgggtggctcggggctggcagtgtgggcagcggcagggctgagtgacccatgctggccggccggcttgggagtgtcctggccccgggcccggccccactccgagaggtccaggggcttgtctagggcacagtcctgcgtggctgcagcctctgtcctctgggcgcggcccgggcctgcaggctgtgtgtgccgccctccagacaggcctgctgcggccagagctgccctggtccc

SEQ ID NO: 99579 - DNA, 30 bp, Homo sapiens; identical to SEQ ID NO: 33573
  chr20:60996143-60996173
  hypo

SEQ ID NO: 99580 - DNA, 202 bp, Homo sapiens; identical to SEQ ID NO: 33574
  chr20:60997209-60997411
  hypo

SEQ ID NO: 99581 - DNA, 250 bp, Homo sapiens; identical to SEQ ID NO: 33575
  chr20:61000622-61000872
  hypo

SEQ ID NO: 99582 - DNA, 133 bp, Homo sapiens
  chr20:61013193-61013326
  hypo
gggagctggcagctgagtgccatccttccaaagacgtggtgctccagggcgcatggcccgtgaccaccaccggggtgtggagacacctgaatggagtcctcactgccggcccggcctgcgctgcctgctctcg

SEQ ID NO: 99583 - DNA, 223 bp, Homo sapiens
  chr20:61022049-61022272
  hypo
cacccataccttggagccatgcgcagcctcccgcccacccatgaagatgtagccctggcctcaacccagcccgggtcaccgcacatttgtccatgtggtcgttcattcgtatagcaactacgaataatcctctatagcctggcgcgccctcgcctgtgggcttggaaatggggaatcggggtcccgtggagccatctcctccggctcagtggccccaagtcag

SEQ ID NO: 99584 - DNA, 31 bp, Homo sapiens
  chr20:61024982-61025013
  hypo
tcccagtgaattctggcggccactgaggaag

SEQ ID NO: 99585 - DNA, 31 bp, Homo sapiens; identical to SEQ ID NO: 33576
  chr20:61025493-61025524
  hypo

SEQ ID NO: 99586 - DNA, 106 bp, Homo sapiens
  chr20:61275876-61275982
  hypo
ctaagcccagagaggccggctctcctcggggctctgatgggccccttggcttgaccaagccccattgcagttttggctccaggtcggtctgacttccaaatggcaa

SEQ ID NO: 99587 - DNA, 202 bp, Homo sapiens
  chr20:61285584-61285786
  hypo
ctctaaaaatgcacctgtcaccgggtttagggcccaccctaatccaggatgatctcttctcagatcacttgtcacatctgcaaagacgctttttccaaataaggtcatgcgctcaggtcccaggtgaacgtgactgcccggggaacacggggggcaccggtccgcccaccccagccccagcgcaggcccagtgagcagactc

SEQ ID NO: 99588 - DNA, 725 bp, Homo sapiens
  chr20:61287913-61288638
  hypo
cacacccctgagccccggctccctccgctccgctgcccatagccccctggacaccagcaagcagcccctctgccagctctgggccgagaagcatggcgcccgggggacccatgaggtgcggtacgtctcggccgggcagagcgtggcgtgcggctggtgggccttcgcaccgccgtgcctgcaggtcctcaacacgcccaagggcatcctgttcttcctgtgtgcggccgcattcctgcaggggatgactgtgaatggcttcatcaacacagtcatcacctccctggagcgccgctatgacctgcacagctaccagagcgggctcatcgccagctcctacgacattgccgcctgcctctgcctcaccttcgtcagctacttcgggggctcagggcacaagccgcgctggctgggctggggcgtgctgcttatgggcacggggtcgctggtgttcgcgctgccccacttcacggctggccgctatgaggtggagttggacgcgggtgtcaggacgtgccctgccaaccccggcgcggtgtgtgcggacagcacctcgggcctgtcccgctaccagctggtcttcatgctgggccagttcctgcatggcgtgggtgccacacccctctacacgctgggcgtcacctacctggatgagaacgtcaagtccagctgctcgcccgtctacattggtgagtggggctggcggggtaagtgctggcaggggt

SEQ ID NO: 99589 - DNA, 253 bp, Homo sapiens
  chr20:61289924-61290177
  hypo
cagaatggcgggtgcggggcttctcccaggcacggggccccacacggccctccgcagcccctgggtggtgcacagcggccctgacgcctctgcctctctcgcagccatcttctacacagcggccatcctgggcccagctgccggctacctgattggaggtgccctgctgaatatctacacggaaatgggccgacggtgagtggccgcgcacccagctgcctgcgctggagaggcccacgtgtctctggaaggg

SEQ ID NO: 99590 - DNA, 93 bp, Homo sapiens
  chr20:61297786-61297879
  hypo
gaacaagctcaggctccggggctccgcggtcatcaagttctgcctgttctgcaccgttgtcagcctgctgggcatcctcgtcttctcactgca

SEQ ID NO: 99591 - DNA, 31 bp, Homo sapiens; identical to SEQ ID NO: 33579
  chr20:61300098-61300129
  hypo

SEQ ID NO: 99592 - DNA, 289 bp, Homo sapiens; identical to SEQ ID NO: 33580
  chr20:61314588-61314877
  hypo

SEQ ID NO: 99593 - DNA, 30 bp, Homo sapiens
  chr20:61315816-61315846
  hypo
cttctgggagcctccggtctccccagaaca

SEQ ID NO: 99594 - DNA, 103 bp, Homo sapiens
  chr20:61323377-61323480
  hypo
ttccatccccagctctgcccacggccaccaggaacccacttggcaaccggtgagtggggccgcccttcccagcaagcccagcgaaagggctctgggttccaca

SEQ ID NO: 99595 - DNA, 43 bp, Homo sapiens
  chr20:61327559-61327602
  hypo
agtggggctgaggagtgcacccgtgcagtgtgcctgtggagtg

SEQ ID NO: 99596 - DNA, 155 bp, Homo sapiens
  chr20:61370411-61370566
  hypo
ctgttgtaaaggaaagccctgcgtggctgtgagggagacgcgtgtggaacctcatgtcgtgtggcgccgttggggacccgttgggctcttgagactgaaccgggacaggctgagaggctctccaggacacttccgggcagcaggccccctctggc

SEQ ID NO: 99597 - DNA, 36 bp, Homo sapiens
  chr20:61405633-61405669
  hypo
agagcacggctcacacgccaccgccctgctggctct

SEQ ID NO: 99598 - DNA, 31 bp, Homo sapiens
  chr20:61412199-61412230
  hypo
caccgagggaatgcaacgtgccacaccccaa

SEQ ID NO: 99599 - DNA, 30 bp, Homo sapiens; identical to SEQ ID NO: 33581
  chr20:61431296-61431326
  hypo

SEQ ID NO: 99600 - DNA, 30 bp, Homo sapiens
  chr20:61431861-61431891
  hypo
ggctgatgaggaggcggccgccccagtgct

SEQ ID NO: 99601 - DNA, 30 bp, Homo sapiens
  chr20:61445081-61445111
  hypo
ctcaggctctgcttcgtgacccgtgaccca

SEQ ID NO: 99602 - DNA, 531 bp, Homo sapiens; identical to SEQ ID NO: 57466
  chr20:61447608-61448139
  hypo

SEQ ID NO: 99603 - DNA, 284 bp, Homo sapiens; identical to SEQ ID NO: 33583
  chr20:61458964-61459248
  hypo

SEQ ID NO: 99604 - DNA, 31 bp, Homo sapiens; identical to SEQ ID NO: 33584
  chr20:61466382-61466413
  hypo

SEQ ID NO: 99605 - DNA, 39 bp, Homo sapiens; identical to SEQ ID NO: 33585
  chr20:61470100-61470139
  hypo

SEQ ID NO: 99606 - DNA, 31 bp, Homo sapiens
  chr20:61471156-61471187
  hypo
cccctccatgcacgcacgctgctctctgggt

SEQ ID NO: 99607 - DNA, 346 bp, Homo sapiens
  chr20:61471930-61472276
  hypo
ggacggtgctcccggcgagcctgggcctcccggagatcctgggcttccaggtgccattggggcccaggggacaccggggatctgcgacacctcagcctgccaaggagccgtgttaggaggggtcggggagaaatcaggctctcgaagctcataaaattcaacgtgaggaagcaagtgacaaggacgcccgaagcacagtggacggtcatgaaggagcgggggtgtggcaggcgggtgacgtccaggagagggagcgcccctggctgcccctcggccgccgactggacgcgcgggccttgccagcgagcaccctcatcgggctgtcgcctgacagcatacctcaaaa

SEQ ID NO: 99608 - DNA, 181 bp, Homo sapiens
  chr20:61473182-61473363
  hypo
tcaaagtccctactggagtcccgtcagcttgagtcacgcccttttcgagtcagactagccgagcagagctccagggttgcagaaggcgtgcacaggtcacgaaggaatggctgttcaccccccgaggattcctgttcagtccgatcacttgatctccatcgaggggctgctctgtaaactc

SEQ ID NO: 99609 - DNA, 58 bp, Homo sapiens
  chr20:61482262-61482320
  hypo
agcagcaccttccacccgcaaggccctgctcccactgtcttcacgtttactcgtcccc

SEQ ID NO: 99610 - DNA, 185 bp, Homo sapiens
  chr20:61488409-61488594
  hypo
aacctgcctgactccacagggcgcgctcttagaagcttgcacctcagctcctgccttctccccacgcgcctttgctgatcgcacctggcatcctttctccatagtaagtcacagcctgagagtgactgcatgcggagtcccgggagtcctcctagtgagccagcgagcctgggcatagtctgggg

SEQ ID NO: 99611 - DNA, 151 bp, Homo sapiens
  chr20:61488846-61488997
  hypo
ccgaggactgccaagcgccttgtgtggcggtggcaccttcgcccacattctgaatctctccaagggctcttcgctctacatttgtgtccaactgacgcattctactccgattcctcttcagtgcttgtttgcatagcgctgcttctttgcg

SEQ ID NO: 99612 - DNA, 639 bp, Homo sapiens; identical to SEQ ID NO: 57468
  chr20:61492376-61493015
  hypo

SEQ ID NO: 99613 - DNA, 620 bp, Homo sapiens
  chr20:61505951-61506571
  hypo
tctgccggtgaactccgcaggtcgtctttgaaggcacatgtggctcttctgccactgcctggggagctgagacccctttgcccaaagaccctcaagtgccttccctagggagctgccctgtaaggtgccgccgtcctgcccgggactcaccaccacctctgtgttccttctagacctagatccagactggagttccagcaggccccaaaagagaaagtgtgaggtgtggcctacaaatatgtttccctacgaaaacctgcggaaaatgtgtggaaatcgatgttgagagtgcgggatctgggtgggaggaatataagcttgcgtaagtggacagggactcagatacgagattctggatttgatgcgttggagggaacggctgggagtgacccaccccccacccccattttcttcatcagtcaccgaaactttcgccccacaggtagctgaccctaaattcagtgaaatccagaactttcctggcacactggagaggacggcagaacgctgggatggatttatcgtgcaagaccagcttgatgtccttagggcttggaggtcaccccttcacgaggattgtgaggagtgaattcatcggggagccccgcaccctcacctgc

SEQ ID NO: 99614 - DNA, 94 bp, Homo sapiens; identical to SEQ ID NO: 33592
  chr20:61518344-61518438
  hypo

SEQ ID NO: 99615 - DNA, 158 bp, Homo sapiens
  chr20:61527424-61527582
  hypo
gccagtgcaacaatacgtgggcggcagaaggatcacagaggagaaagaaacgtcttagctttcctggaaaggacacgaacatctcaaaatattggttgatccctttagcacccagcgaacagaacaggaatactccaatgcaccgacaccaggcacac

SEQ ID NO: 99616 - DNA, 314 bp, Homo sapiens; identical to SEQ ID NO: 33593
  chr20:61527971-61528285
  hypo

SEQ ID NO: 99617 - DNA, 30 bp, Homo sapiens
  chr20:61542481-61542511
  hypo
caaggtcaggccatcgctgtcactatcgga

SEQ ID NO: 99618 - DNA, 31 bp, Homo sapiens; identical to SEQ ID NO: 33594
  chr20:61576608-61576639
  hypo

SEQ ID NO: 99619 - DNA, 31 bp, Homo sapiens; identical to SEQ ID NO: 33595
  chr20:61577748-61577779
  hypo

SEQ ID NO: 99620 - DNA, 450 bp, Homo sapiens; identical to SEQ ID NO: 57473
  chr20:61583881-61584331
  hypo

SEQ ID NO: 99621 - DNA, 30 bp, Homo sapiens
  chr20:61597987-61598017
  hypo
gccatgggggatcccggagggcttttgctg

SEQ ID NO: 99622 - DNA, 30 bp, Homo sapiens
  chr20:61599110-61599140
  hypo
caggctggtgtggccgtcagggtgggtggg

SEQ ID NO: 99623 - DNA, 30 bp, Homo sapiens; identical to SEQ ID NO: 33596
  chr20:61619036-61619066
  hypo

SEQ ID NO: 99624 - DNA, 30 bp, Homo sapiens
  chr20:61625349-61625379
  hypo
ttgtccgtgggcaccgagtggggggccttt

SEQ ID NO: 99625 - DNA, 116 bp, Homo sapiens; identical to SEQ ID NO: 57475
  chr20:61637532-61637648
  hypo

SEQ ID NO: 99626 - DNA, 221 bp, Homo sapiens; identical to SEQ ID NO: 13139
  chr20:61637735-61637956
  hypo

SEQ ID NO: 99627 - DNA, 249 bp, Homo sapiens; identical to SEQ ID NO: 13140
  chr20:61638220-61638469
  hypo

SEQ ID NO: 99628 - DNA, 263 bp, Homo sapiens; identical to SEQ ID NO: 13141
  chr20:61638534-61638797
  hypo

SEQ ID NO: 99629 - DNA, 431 bp, Homo sapiens
  chr20:61665856-61666287
  hypo
ttagctcaatactcattcagacgcagagtgcgtgtgccctgccaggacagacgtcattgctgtgcggtgcttgagtgccatcaataagccacagaagagaaatccggaaacaagggacgcgcagcgtgattccgtgccacggcgtcaggagcggcatgtagcatcttttggtttgagagtaaaattccgcaatcagaaatgaaatccgagcaaagaagcaaagcgcacagaggctggagacgctaaagcatccaggcaggactccgccaggtgggcaggcagaggcctgtgcacaggcagacggtgtgcccgtgagcaggacatgcttgtagggtcacaggtcacccacccgcaggacacgcatgcaaggtcacgggtcagccaccagcaggacacgcatgcagggtcacgggtcagccacccacaggaca

SEQ ID NO: 99630 - DNA, 30 bp, Homo sapiens
  chr20:61666539-61666569
  hypo
cgcatgcagggtcacgggtcagccaccagc

SEQ ID NO: 99631 - DNA, 813 bp, Homo sapiens
  chr20:61674962-61675775
  hypo
cctgaaggaagaagggggcttcgcagtatagttcgagtcgggctctgtttctttccatcccaaacacatagagacgaccaaggccctgatcccaaaagaagaacccaggctgccggcgatcctggggacaacgatgttaactcagggacaggcgcagtctctggaccaggccaggtcgtggtgcacacactcgatctctgcagcgtttcccacatgggcactgcggaccgggaatgtcaggggaacgcgggcaccgtggaccgggaatgccaggggatcgtgggcaccgccgaccgggaatgtcaggggaacacgggcactgccgaccgggaatgtcaggggaacgggggcactgcagaccgggaatgtcaggggaacgtgggcactgcggaccgggaatgtcaggggaacgtgggcacggctgaccgggaatgtcaggggaacgcgggcacggccgaccgggaatgtcaggggaacgtgggcactgtggaccgggaatgtcaggggaacgcgggcacggctgaccgggaatgccaggggaacgcgggcactgcggaccgggaatgccaggggaacacgggcactgccgaccgggaatgtcaggggaacgtgggcacggccgaccgggaatgccaggggaacacgggcactgtggaccgggaatgtcaggggatcatgggcactgtggactgggaatgccaggggaacacgggcacggcggaccgggaatgtcaggggaacgcaggcacggctgaccgggaatgtcaggggatcgcgggcactgccgaccgggaatgtcgggaacgcaggcac

SEQ ID NO: 99632 - DNA, 512 bp, Homo sapiens
  chr20:61692614-61693126
  hypo
tgtccgtgtcctgtccgtgtctgtgtccatgtcctattcatgtccgtgtcctgtccgtgtcctgcctgtgtccgtgtctgtgtcctgtccgtgtcctgtctgtgtccgtgtcctgtccatatctgtgtccgtgtcctgtccatatctgtgtccgtgtccgagtccgtgtctgtgtctgtgtccatgtccatgtcctgtgtccgcgtctgtgtctgtgtccatgtccatgtcctgtctgtgtccatgtctatgtcctgtccgtgtcctgtcagtgtcctgtctatgtcttgtccataacctgtctgtgtccgtgtcctgtccatgtctgtgtcctgtctgtgtcctgtctgtgtccgtgtcctgtccatgtccatgtcctgtccgtgtctatgtcttgtctgtgtccatgtcctgtccatgtctgtgtccgagtcctgtccatgtccatgtccatgtcctgtccgtgtctgtgtccatgtccgtgtcctgtccgtgtctgtgtctgtgtcttg

SEQ ID NO: 99633 - DNA, 271 bp, Homo sapiens; identical to SEQ ID NO: 33602
  chr20:61693185-61693456
  hypo

SEQ ID NO: 99634 - DNA, 117 bp, Homo sapiens
  chr20:61725301-61725418
  hypo
cccaggtgtgaatctggagggcgcctccttggaaaacttggctggtgaccgcaccctcagttcaagctcaccggccgcccttccctgtgcacacacgtgagctctccagtatgtttg

SEQ ID NO: 99635 - DNA, 820 bp, Homo sapiens; identical to SEQ ID NO: 13143
  chr20:61733166-61733986
  hypo

SEQ ID NO: 99636 - DNA, 357 bp, Homo sapiens; identical to SEQ ID NO: 13144
  chr20:61734251-61734608
  hypo

SEQ ID NO: 99637 - DNA, 211 bp, Homo sapiens; identical to SEQ ID NO: 33605
  chr20:61749021-61749232
  hypo

SEQ ID NO: 99638 - DNA, 384 bp, Homo sapiens
  chr20:61749622-61750006
  hypo
tcacacaggaaagcacatgcccgctgtgtcctgctgcattgctgggcagtgtccactgcacgtcgctcgctgcattgctgggcagtgtccgcggcatgtcgctctctgcattgctgggcagtgtctactgcacgccgcttgctgcattgctgggcagtgtctactgcacgccgctcgctgcattgctggggagtgtccgctgcatgtcgctcgctgcattgctgggcagtgtccgctgcacgccgctcgttgcattgctgggcagtgtctactgcacggtggacgctcctgcactcatggatgctcaggctgcttcccgttggacgcgattgtgagtgacgctgctgtgagcctccaggtaccggccttggagccagcaaatgc

SEQ ID NO: 99639 - DNA, 30 bp, Homo sapiens
  chr20:61750361-61750391
  hypo
atgcgaccgcaaagccgctccattattaag

SEQ ID NO: 99640 - DNA, 31 bp, Homo sapiens
  chr20:61765375-61765406
  hypo
caggtaacaaagctgtcggcatccccagagc

SEQ ID NO: 99641 - DNA, 144 bp, Homo sapiens; identical to SEQ ID NO: 33606
  chr20:61771323-61771467
  hypo

SEQ ID NO: 99642 - DNA, 148 bp, Homo sapiens
  chr20:61772632-61772780
  hypo
gtgttgacagccaagcgtgacttcttgtcaagggcatcgttaaaggagaacatgaggcctgctcgggggctgagaggagagaggtgccagggcaggcgccccccgcacataccctgccactgccatgggatcccggcactgcagcctc

SEQ ID NO: 99643 - DNA, 30 bp, Homo sapiens
  chr20:61773095-61773125
  hypo
cacagatggaccggacggaccggagcccga

SEQ ID NO: 99644 - DNA, 696 bp, Homo sapiens; identical to SEQ ID NO: 57484
  chr20:61806195-61806891
  hypo

SEQ ID NO: 99645 - DNA, 339 bp, Homo sapiens; identical to SEQ ID NO: 13145
  chr20:61808666-61809005
  hypo

SEQ ID NO: 99646 - DNA, 413 bp, Homo sapiens; identical to SEQ ID NO: 13146
  chr20:61809218-61809631
  hypo

SEQ ID NO: 99647 - DNA, 294 bp, Homo sapiens; identical to SEQ ID NO: 13147
  chr20:61809840-61810134
  hypo

SEQ ID NO: 99648 - DNA, 397 bp, Homo sapiens; identical to SEQ ID NO: 13148
  chr20:61810159-61810556
  hypo

SEQ ID NO: 99649 - DNA, 7 bp, Homo sapiens
  chr20:61810632-61810639
  hypo
cgccgga

SEQ ID NO: 99650 - DNA, 192 bp, Homo sapiens
  chr20:61817484-61817676
  hypo
agggcatataatcacatgtgtcggtgtgtgcccatggaaggacacatgatcatacatgtcggtgcatccccatgttagggcacatgatcacgtgtgtcagtgcacgcccatgttagggcatatgatcacacgtgtctgtgtgcccatgacaggcatgtgtgttgtatgcacgtgtttgttgtatgttctctg

SEQ ID NO: 99651 - DNA, 31 bp, Homo sapiens
  chr20:61819971-61820002
  hypo
cagaaacaccccctcccgggactcctctagg

SEQ ID NO: 99652 - DNA, 30 bp, Homo sapiens
  chr20:61822876-61822906
  hypo
gggcgaggcctggcccgtgcccaacgctga

SEQ ID NO: 99653 - DNA, 86 bp, Homo sapiens
  chr20:61823113-61823199
  hypo
ccagggaggagcctggtggctcgaggagcctctgaaccgggcttttttttgctgtttcttttttttttgagacggagtttcactct

SEQ ID NO: 99654 - DNA, 30 bp, Homo sapiens
  chr20:61825692-61825722
  hypo
aggaattagccactcgaggttgaaaacaca

SEQ ID NO: 99655 - DNA, 31 bp, Homo sapiens
  chr20:61835627-61835658
  hypo
gaacagaccccaagctcgctgattactcagc

SEQ ID NO: 99656 - DNA, 268 bp, Homo sapiens; identical to SEQ ID NO: 33612
  chr20:61838280-61838548
  hypo

SEQ ID NO: 99657 - DNA, 70 bp, Homo sapiens
  chr20:61871012-61871082
  hypo
gagccggctgtgcccggccctcctgaacccatgcaggcccttcccgggtggcagcgtcagcttgttttta

SEQ ID NO: 99658 - DNA, 30 bp, Homo sapiens; identical to SEQ ID NO: 33614
  chr20:61874234-61874264
  hypo

SEQ ID NO: 99659 - DNA, 200 bp, Homo sapiens; identical to SEQ ID NO: 57495
  chr20:61884623-61884823
  hypo

SEQ ID NO: 99660 - DNA, 2 bp, Homo sapiens
  chr20:61885100-61885102
  hypo
tc

SEQ ID NO: 99661 - DNA, 355 bp, Homo sapiens; identical to SEQ ID NO: 57497
  chr20:61885195-61885550
  hypo

SEQ ID NO: 99662 - DNA, 426 bp, Homo sapiens; identical to SEQ ID NO: 13154
  chr20:61885777-61886203
  hypo

SEQ ID NO: 99663 - DNA, 72 bp, Homo sapiens; identical to SEQ ID NO: 57499
  chr20:61886256-61886328
  hypo

SEQ ID NO: 99664 - DNA, 56 bp, Homo sapiens; identical to SEQ ID NO: 33618
  chr20:61895762-61895818
  hypo

SEQ ID NO: 99665 - DNA, 30 bp, Homo sapiens
  chr20:61908468-61908498
  hypo
ggccgtggggggtgcgctggagtcgacggt

SEQ ID NO: 99666 - DNA, 38 bp, Homo sapiens
  chr20:61909561-61909599
  hypo
acttgagagctggggacgcctggcgtgggccaggccca

SEQ ID NO: 99667 - DNA, 59 bp, Homo sapiens; identical to SEQ ID NO: 33620
  chr20:61913594-61913653
  hypo

SEQ ID NO: 99668 - DNA, 30 bp, Homo sapiens; identical to SEQ ID NO: 33621
  chr20:61919435-61919465
  hypo

SEQ ID NO: 99669 - DNA, 74 bp, Homo sapiens
  chr20:61951424-61951498
  hypo
tctatgtggactgccggaaggtggctgagcggccccttggggagatgggcagcccacccgctgcgggcttcgtc

SEQ ID NO: 99670 - DNA, 97 bp, Homo sapiens; identical to SEQ ID NO: 33622
  chr20:61967698-61967795
  hypo

SEQ ID NO: 99671 - DNA, 96 bp, Homo sapiens; identical to SEQ ID NO: 33623
  chr20:61967914-61968010
  hypo

SEQ ID NO: 99672 - DNA, 78 bp, Homo sapiens
  chr20:61973524-61973602
  hypo
cttcttttcaaggctgcgtggaaccctgatgaggacagaccatatgctgaacccgataacaagcgtgaaggatttgaa

SEQ ID NO: 99673 - DNA, 460 bp, Homo sapiens
  chr20:61973900-61974360
  hypo
tcattgagccgaccacgcacccttccttcccacggcagagcgggagctcctgggtcagcctccctgccaaagtctgttcacagcagccccgagctggcgacgggtaaataagatggtggagccacgcggcggagcccgcagcacagtggccgcgcagcgagcaatgacccgggatcgggagccgacagaagggcacgcctggcgcggccacgcacagaacccagggccaggcaacgcggggcagaggtgttgggtgacctcgggcgggtcgtggccggccgggctgggcaggggattcctgggtgccggctctatgcgaatattcttcagtctgtgaaagaaaatgccttgtcatgccgctgaggattcatacgcacgctgtgtaccttaccccgcgaggcaggcaaatgccaagaaatgccagctcggattagcgcagcgggagcgcctgtctgcagac

SEQ ID NO: 99674 - DNA, 1785 bp, Homo sapiens; identical to SEQ ID NO: 33625
  chr20:61980719-61982504
  hypo

SEQ ID NO: 99675 - DNA, 271 bp, Homo sapiens; identical to SEQ ID NO: 33626
  chr20:61982563-61982834
  hypo

SEQ ID NO: 99676 - DNA, 30 bp, Homo sapiens
  chr20:61990530-61990560
  hypo
ggcccctgccccggccggttgtccctgttg

SEQ ID NO: 99677 - DNA, 381 bp, Homo sapiens
  chr20:61990837-61991218
  hypo
acccctgtgctccttgcagggcgacctcagtcacagtgcacgatggccacgccctcacctaccacgtcaatgagctgagcgatggacaggccgaagcggacgaggaccacgtccgagatgttggccacgggtcgggaccacttgttgtaaccggagaagagtttcttcaggagccgctcctcggcgtgggcccgggtctccacatggctgctggctgcggggagaggcaggccagtggctcaggtgcaggcgggacaggagccgggagctgtccaggagctctccaggctgccccagccccctgcccagcacgtccacttcctttcagctcctcacatgagcccttcccaccccaggacctgtgtgtgtgccgggcgtgcg

SEQ ID NO: 99678 - DNA, 20 bp, Homo sapiens
  chr20:61991277-61991297
  hypo
tgtgccgggcgtggcgtgcg

SEQ ID NO: 99679 - DNA, 36 bp, Homo sapiens; identical to SEQ ID NO: 33628
  chr20:62018864-62018900
  hypo

SEQ ID NO: 99680 - DNA, 85 bp, Homo sapiens
  chr20:62019256-62019341
  hypo
tgcacgtgcaagacccgatgcgcatacatgcacacgtgcacaaacaggcacacacacgcacgtgcacacacccacccacacatgt

SEQ ID NO: 99681 - DNA, 85 bp, Homo sapiens
  chr20:62019400-62019485
  hypo
cacacacgcgcacacacacgcccccacacacacatatgcacatgcacgtgcatgcccacacacgcaaacacgctaatcacacaca

SEQ ID NO: 99682 - DNA, 364 bp, Homo sapiens; identical to SEQ ID NO: 33630
  chr20:62031396-62031760
  hypo

SEQ ID NO: 99683 - DNA, 315 bp, Homo sapiens
  chr20:62032050-62032365
  hypo
ggggcgcgggcatggcgggcacacgtgggccgtgtggatcccgggcagagggatggcgtccagcgggaccaccagctctgggcgcctcagtgcgagacccctccgtgagacccctcctgccctgcgcgtgtctctggagcccgtcccttgggcccctcgcccgccccacctgttcgcagggtccagggcgtccgtacctggcacagccagggggcatggggcgacctcagggagttcctgtccacatgcattaaggcaacgactttgtaaaacccaggcggagttggcgtgtggcgatggcgatgtgcacgtgcc

SEQ ID NO: 99684 - DNA, 125 bp, Homo sapiens
  chr20:62038096-62038221
  hypo
tctgactctccctccgcaatgtagggcctgactttggcacaaggcgccacggccgcgtagcagctgttgagagcatccaggttctccttggactgggagatgctgaagccgctgaaggaacgctc

SEQ ID NO: 99685 - DNA, 30 bp, Homo sapiens; identical to SEQ ID NO: 33632
  chr20:62046255-62046285
  hypo

SEQ ID NO: 99686 - DNA, 78 bp, Homo sapiens
  chr20:62050909-62050987
  hypo
agcagggaggggcagaggagccgtgcagcagccgtcagtccgtgcggcgtgttccgcggtacctagagcgtccggggc

SEQ ID NO: 99687 - DNA, 30 bp, Homo sapiens
  chr20:62052603-62052633
  hypo
tgaagctccggctgtcgccaccaggcacct

SEQ ID NO: 99688 - DNA, 266 bp, Homo sapiens
  chr20:62052981-62053247
  hypo
catgcaccaaaaacacgcggacacgtgtgcttgagaagaggagggggagcccgaacaggcacgggggagcccgcacaggcatgagggggcagccggtgttgggggctcctcctccagcacgggggcaggaggcagtgagatggggtgtcggacaagacagcacaagtcagaaccgccgtggccaaagagaccccccgggacccccctggggcagcacggcccgagccccgcagcctgcctggctccccacccgaccccaacgtaga

SEQ ID NO: 99689 - DNA, 30 bp, Homo sapiens; identical to SEQ ID NO: 33633
  chr20:62056206-62056236
  hypo

SEQ ID NO: 99690 - DNA, 30 bp, Homo sapiens
  chr20:62075372-62075402
  hypo
gggagaggggccaccgggggctgacccctg

SEQ ID NO: 99691 - DNA, 30 bp, Homo sapiens; identical to SEQ ID NO: 33634
  chr20:62083296-62083326
  hypo

SEQ ID NO: 99692 - DNA, 30 bp, Homo sapiens; identical to SEQ ID NO: 33635
  chr20:62083854-62083884
  hypo

SEQ ID NO: 99693 - DNA, 256 bp, Homo sapiens
  chr20:62090335-62090591
  hypo
cagagacactcaccgcgtgtccacagcagcctcacggcagacgcaacccaacatccagttggtgggtgggtagataaactgaggtccgtccgtgcggccacaggaaggacgaggcagcggcccccagacacggagaggatgaaggagtaccctaaacacgaaggaacctgagggcaggctcggcaaggaaagccaggcacaaaacggcaccacgatgacaactccacttacacgaaacatccgaagcaaacaggcc

SEQ ID NO: 99694 - DNA, 30 bp, Homo sapiens; identical to SEQ ID NO: 33636
  chr20:62092325-62092355
  hypo

SEQ ID NO: 99695 - DNA, 89 bp, Homo sapiens
  chr20:62097172-62097261
  hypo
tccagccctgcaaagggcatccgcgttccgggcaccgccgtttccgctcgacgctccgtgctaaaggcggcctcatggctgggcgcgtg

SEQ ID NO: 99696 - DNA, 240 bp, Homo sapiens; identical to SEQ ID NO: 57502
  chr20:62103385-62103625
  hypo

SEQ ID NO: 99697 - DNA, 98 bp, Homo sapiens; identical to SEQ ID NO: 57503
  chr20:62103667-62103765
  hypo

SEQ ID NO: 99698 - DNA, 252 bp, Homo sapiens; identical to SEQ ID NO: 33637
  chr20:62110512-62110764
  hypo

SEQ ID NO: 99699 - DNA, 318 bp, Homo sapiens; identical to SEQ ID NO: 57504
  chr20:62119300-62119618
  hypo

SEQ ID NO: 99700 - DNA, 184 bp, Homo sapiens; identical to SEQ ID NO: 13157
  chr20:62119922-62120106
  hypo

SEQ ID NO: 99701 - DNA, 317 bp, Homo sapiens
  chr20:62126118-62126435
  hypo
ccagctcccgtggcccgccccgccctagccgccactcacgttgggggagggctccagcatgttgtcaccgtgccagccggagatgggcacaaagggcacggtggccgggttgtagccgatcttcttgatgtaggcgctgacttccttgacgatctcgtcgtagcgcttctcgctgtaggccggctctgtggagtccattttgttcacgcccacgatgagctgcttcacacccagcgtgtaggccagcagggcatgctcccgcgtctgcccattcttggagatgcccgcctcgaactcgcccacgcccgccgccacga

SEQ ID NO: 99702 - DNA, 31 bp, Homo sapiens
  chr20:62127228-62127259
  hypo
tgttcttgatgaagtcgcggtggccgggggc

SEQ ID NO: 99703 - DNA, 152 bp, Homo sapiens
  chr20:62149572-62149724
  hypo
tgatcacatcctagcagcaaccgggcctgaaccggcctgctatagcttgcgcacaatgcatcttccgtccgcttagcttttctgcccccatttcctacagccggggaggctcgggtgcagtgtctctcctcgctcctgcttcctgacccaga

SEQ ID NO: 99704 - DNA, 43 bp, Homo sapiens; identical to SEQ ID NO: 57507
  chr20:62152086-62152129
  hypo

SEQ ID NO: 99705 - DNA, 456 bp, Homo sapiens
  chr20:62153155-62153611
  hypo
gtggcctggctcgggacgccccgaggaagcagcccggcggtcagtccagcacagccagcgctgggcccccgtcctgacctgagcggttaccaccagccccaggcctgcggaggcgctagtccaccagagcccctccccgcccctctccccactccgcatccctcgcccccctccccacctcccaccccccaccctgtaaactaggcggctgcagcaagcagaccttcgcatcaacacagcagacaccaaaaaccagtgagagccccgctctctaccgcccggccccagcactcgctagctttcctgacacctggaactgtgcacctggcaccaagcggaaaataaactccaagcagccagtagccccgatggtgtgtgcctgagctgtgtggcccgaggttccatttgagtgtgagaaatggctgaatccctcccgacctcactgccttgtggggg

SEQ ID NO: 99706 - DNA, 31 bp, Homo sapiens; identical to SEQ ID NO: 33642
  chr20:62154842-62154873
  hypo

SEQ ID NO: 99707 - DNA, 17 bp, Homo sapiens
  chr20:62155944-62155961
  hypo
tgggcgcagtggctcac

SEQ ID NO: 99708 - DNA, 50 bp, Homo sapiens
  chr20:62165578-62165628
  hypo
ggctgaggaaggacaccgcctcgttcaggtgcagccggcccccggcacgc

SEQ ID NO: 99709 - DNA, 30 bp, Homo sapiens; identical to SEQ ID NO: 33643
  chr20:62167655-62167685
  hypo

SEQ ID NO: 99710 - DNA, 30 bp, Homo sapiens
  chr20:62168240-62168270
  hypo
ctgggcactcctgggcgccagcgcatgggg

SEQ ID NO: 99711 - DNA, 35 bp, Homo sapiens
  chr20:62172277-62172312
  hypo
ccgccgggcaggcagccgggcgcggcagccggtac

SEQ ID NO: 99712 - DNA, 30 bp, Homo sapiens
  chr20:62172574-62172604
  hypo
ctcgtgcagcaggacgccgaaggaccagac

SEQ ID NO: 99713 - DNA, 283 bp, Homo sapiens
  chr20:62172923-62173206
  hypo
gcaggcaaagcccaggagtggcggcagacgcagggcccggccctcgggggctgcaggagacagcgcggggtcttttagggcacggggccaacggccggtgaggccagcgtccacccacgtcaccttcccccatgcctcagcctcctcatctctaagacgtggcgaggatggcatggccggctaaggccacgggaagccccaagtgagacagggcgagggtcctgtactcaccacagtgacccggcagccggcccaggcccccgacaaagaccagggcagagaa

SEQ ID NO: 99714 - DNA, 157 bp, Homo sapiens
  chr20:62174492-62174649
  hypo
gagagcagaatgtgctggaaccgctgggatgctccgatgctcccaggcctgggcagggccctggagctgcgcctctgacagccccaggggttttgtgacggggtggggaggagcacctagaacagggccatgcctcgggcccagcatggggcagctt

SEQ ID NO: 99715 - DNA, 208 bp, Homo sapiens; identical to SEQ ID NO: 33644
  chr20:62174861-62175069
  hypo

SEQ ID NO: 99716 - DNA, 53 bp, Homo sapiens
  chr20:62175656-62175709
  hypo
agcagctgctgtgcctgggtccgactgaccccgctaaagtaccagctgcaaac

SEQ ID NO: 99717 - DNA, 144 bp, Homo sapiens
  chr20:62179511-62179655
  hypo
ctttcatgcagtaaaacgagatgctgattgcagggagctcggccgcaggccaggcacccagatgccccatgctgcccgatgaccggcttctgagtcagtcaatgcccaggccatacccaaaggccactgcggggaagtggaggc

SEQ ID NO: 99718 - DNA, 38 bp, Homo sapiens; identical to SEQ ID NO: 33645
  chr20:62180549-62180587
  hypo

SEQ ID NO: 99719 - DNA, 78 bp, Homo sapiens; identical to SEQ ID NO: 33646
  chr20:62190623-62190701
  hypo

SEQ ID NO: 99720 - DNA, 30 bp, Homo sapiens
  chr20:62194930-62194960
  hypo
ctccacgtccaccacgaagcccagcttgtc

SEQ ID NO: 99721 - DNA, 372 bp, Homo sapiens
  chr20:62204125-62204497
  hypo
gaccagggcctcctcgcgactgcgggcaaaggtgcaccggtttcggtggcgccggcagccgagcccagggctgtagtagtggcagacttggtagcacaggggccttgggaaggtgggccggcagcccaccacgcgccagaccttgctcttggtggcctgcttaaagcgggccagcaggatctcgcgggagcagtcatgctccaccctacggaggacgtaggtgctttcattgagccgctgggtgcagcgggagcagcccagacacaggtccaccagggcacacagccgggccagggacggccctctggtggccgcggggctgttgggcagcagggtggaccctggaggcgccacctcgaacaccagcttggc

SEQ ID NO: 99722 - DNA, 39 bp, Homo sapiens; identical to SEQ ID NO: 33647
  chr20:62214175-62214214
  hypo

SEQ ID NO: 99723 - DNA, 44 bp, Homo sapiens; identical to SEQ ID NO: 33648
  chr20:62218509-62218553
  hypo

SEQ ID NO: 99724 - DNA, 376 bp, Homo sapiens
  chr20:62220462-62220838
  hypo
cccacatgggaatcctcgacctccatagtgactggttctgtttatgcctctgccccaggactgaagccctagggacacacctcatggatctcagacccctgggaggggccggctcagggacaggctgcccaggacctccgcacccggtcaagtgcactcacaggggctcaggggccacccaaagagctaactcgggaagcctaggcactcaccattattttggttgaaaatgctataaatctgactcttcctagaagcctactaagcaattcacttaaaaacaccctcagtacatgtgcaacaatgcctggaccacgcctcgtctgtgcggcccctgggccacctgagcaccggctgggggcgggggaggcaggca

SEQ ID NO: 99725 - DNA, 962 bp, Homo sapiens
  chr20:62221114-62222076
  hypo
acccaggctccccctagcccccgcccacctggctcctgatcaaggcccaatgtgtaaacagtattaataagcaacagatggaaaaatatatttcccaagaaaaaagggggaggaaacgtgggacctgaagaccgattttccaggttgctctcgctgttctgtccccttctctcttctcgtgatttgttttggcgattcctctctttggttctgcagaccacgtgacccacctgcccgagccagccctgcggcctctgcccgctccctgctgccgcggctgagagacagccagccctgtccgtcccaggggcctcgccctcctgtcggctacttccgctcgtggtcctctgccatggcagccacctcaatggtggccgtgtgctcctcaggcccgggggcagcccctgcgggcactgtcacaattgtgctggagccaggcgaggcctgggccacgttctgcagggtggggcccaggccaggcaacgtgagcagctgtagcgggctgaccaccttgaacaccgtgctaccgtcctgcacggcggccgtgctcaggaccgtgaggctggacgcgtccgggtggatctccactgtgctggggtaggtggagccggaagaggccaagactgtgtatcccccgagcagcggggaggccggggagctggcggggggcgcctgaagggaacccttgcccaggacggtggacggcagggtggacaccactttaccaaggggcacgctggtcagctgggggacgggcacgcccgggccaagcgccagctgggcagactgggtgagcacctgcgaggccatggcggccggtcctgatgtggcacgtgcaagccggggccgcttcacaggcggtggcagggagaccggcgtcagcgtcatgagcacgttgctgaggtgctgggacttgtgcttcagctccttggctcggcgacgatgctcatcacactgctgct

SEQ ID NO: 99726 - DNA, 30 bp, Homo sapiens; identical to SEQ ID NO: 33651
  chr20:62225373-62225403
  hypo

SEQ ID NO: 99727 - DNA, 30 bp, Homo sapiens; identical to SEQ ID NO: 33652
  chr20:62242063-62242093
  hypo

SEQ ID NO: 99728 - DNA, 237 bp, Homo sapiens
  chr20:62242323-62242560
  hypo
cagcccaccaatgcccggatatgcaagtgagcccagcctggaccccccggcgaggcccagcagcaccagcccaggcccgaaaaccttaagaaatgaccagtgtctgctgctttaagccaccaagctctgcggtggtttgttaggctgcaagcatggctaattcagaaactgccagaaacaagcactgctgtccccagcctgggacacacagcaccgcctctgcgtggggagagggca

SEQ ID NO: 99729 - DNA, 422 bp, Homo sapiens
  chr20:62250722-62251144
  hypo
tgtgcacactcacgtcgggagtcgccatggctcagcggaaggggacgcccaggccagcagcgtcagtcctccagggtcccaagtcctggaggaagcaaggcagggcacagggatggagtcatctccacatccacacaacatagcactcacaaaggcatctctaatcagctccaaagacccacccttgagtcccagactgctacctcctgacaaaaacgagcggcaacagaagggctactccaggctctggttccgagggcggtgtaagcgcactccacccgtttttcccactggataagccgaaacccttgggtagaaagcacagagccactccctccacgtggggctcagagcaggaggacaggaggggcctggaattccaagcaacttccctggacgcaggctcccggcttgccagttct

SEQ ID NO: 99730 - DNA, 31 bp, Homo sapiens; identical to SEQ ID NO: 33654
  chr20:62266230-62266261
  hypo

SEQ ID NO: 99731 - DNA, 394 bp, Homo sapiens; identical to SEQ ID NO: 57509
  chr20:62273399-62273793
  hypo

SEQ ID NO: 99732 - DNA, 514 bp, Homo sapiens
  chr20:62281488-62282002
  hypo
tgctgggattacaggcgtgagcccccgcgcccggcccctccctctctttgactcccttctttctcaccgccccctccccaccatccttccccttcactgacttcagggagttaaaaacaattctcgcagtgagctgggcttgttttgtctccctgcttctctttgtactaaacattagataccgaggaaatgcggattggcctttggatgattcatgagcaggagtcagaaaaaggcaccaggttggcctcaagcagcagggtatagtagtgcccgctcccagggtcacacctcacgcccacccctcccgccgtccaggtggatggtgcccactcccagggtcacacctcacgcccacccctcccgccgtccaggtggatggtgcccactcccagggtcacacctcacgcccacccctcccgtcgcccaggtggatggtgcccactcccagggtcacacctcacgcccgcccctcccacccacccgggtggatggtgcccgctcccagggtcac

SEQ ID NO: 99733 - DNA, 30 bp, Homo sapiens; identical to SEQ ID NO: 13161
  chr20:62284063-62284093
  hypo

SEQ ID NO: 99734 - DNA, 296 bp, Homo sapiens
  chr20:62309943-62310239
  hypo
gcacacacactcccacgaacagcacacacactcccacgaacagcacacacactcccacggaacagcacacacacccacggaacggcacacacacccacggaacagcacacacactcccacggaacagcacacacacccacggaacggcacacactcccacggaacggcacactctcccacggaacagcacactctcccacggaacagcacacacactcccacggaacagcacacacacccacggaacggcacacactcccacggaacagcagactctcccacggaacagcacacac

SEQ ID NO: 99735 - DNA, 123 bp, Homo sapiens
  chr20:62313527-62313650
  hypo
ggcttctgaggttcctacactcgaactgaatcctggaatgcggcttccaaggcttccagctatggagaagactccacactctggaaccgaatcctggaacgcggcctcccaggcccccagcta

SEQ ID NO: 99736 - DNA, 212 bp, Homo sapiens
  chr20:62317397-62317609
  hypo
gagttactgagagacgtaggagatggcctgatggcaccgtgacctgcccagagtcacctggttggtggtggcagagccacagcccagccaggcctccctgctgggacacgctcgtttatgccgaggccgtcagcacagagcctccacagtgaggcacggctctgcctgctgcctccacgcagcgcctggccgggccaagcctcagggtcaca

SEQ ID NO: 99737 - DNA, 1414 bp, Homo sapiens
  chr20:62320891-62322305
  hypo
gtggtgtgattgtcacgggcctcccgtaccccccacgcatggacccccgggttgtcctcaagatgcagttcctggatgagatgaagggccagggtggggctgggggccaggtgagttacagcagggtggggctggggtaaggcggtctggtgactgagcccccgccccgtggccaagggagcccccgtgaccgagccgcctcgccccacagttcctctctgggcaggagtggtaccggcagcaggcgtccagggctgtgaaccaggccatcgggcgagtgatccggcaccgccaggactacggagctgtcttcctctgtgaccacaggtgcgtgcagtccggtggcaggcgcggcgccaggggacacgcccacaccccactgggcccctggactctccttccccacatgaggccccgtctcctccagagcctctccggctactcggggtcagcgtggggcccctgcagcagatgagggtcttcacttcggtgaactgaacccttgaagcggctgtgggcagggcagcagggctatggccaccccccaggttcgcctttgccgacgcaagagcccaactgccctcctgggtgcgtccccacgtcagggtgtatgacaactttggccatgtcatccgagacgtggcccagttcttccgtgttgccgagcgaactgtgagttcctgcccagggaggggatgagggtgttgtccccagaggagccagaaatgggtccacccacccccatggttctgcagatgccagcgccggccccccgggctacagcacccagtgtgcgtggagaagatgctgtcagcgaggccaagtcgcctggccccttcttctccaccaggaaagctaagagtctggacctgcatgtccccagcctgaagcagaggtcctcaggtgcggacgggcagcgctgggtgggcggtgtgggggtggcggagcgggcggcgtggggcgggcagcaccaggcgcccagggcggaggcgactcacctggctttgtgcgcttcccctcccacctccaaaggctgcctctccctcctagggcagggcccccacgggctgcaaccctcccctacaggcagagaacgccccaggcaaggatgccccccgaggctgagactccccccaatagcagggaggacacccacaggcaggaccccaagtgctgggactctcccccaagaggggctttgccacaggcagggaccccagctggggccccccgtgggcttcactgcgcactcgggtgcccctgcagggtcaccagctgccggggaccccgagagtagcctgtgtgtggagtatgagcaggagccagttcctgcccggcagaggcccagggggctgctggccgccctggagcacagcgaacagcgggcggggagccctggcgaggagcaggtaca

SEQ ID NO: 99738 - DNA, 30 bp, Homo sapiens
  chr20:62322512-62322542
  hypo
catgccctggccctccgcgggtgcccccca

SEQ ID NO: 99739 - DNA, 647 bp, Homo sapiens
  chr20:62326136-62326783
  hypo
agcagggaagcagggccagcacgccgtgagcgcctacctggctgatgcccgcagggccctggggtccgcgggctgtagccaactcttggcagcgctgacagcctataagcaagacgacgacctcgacaaggtgctggctgtgttggccgccctgaccactgcaaagccagaggacttccccctgctgcacagcaagtggccctggcgtggggaacagccggtggggtggggggcaggggacaaaatgggggctgtgccgggtctgattgaagctccccgcagggttcagcatgtttgtgcgtccacaccacaagcagcgcttctcacagacgtgcacagacctgaccggccggccctacccgggcatggagccaccgggaccccaggaggagaggcttgccgtgcctcctgtgcttacccacagggctccccaaccaggtagggcacctgcctggctgctcctggcagcgccccaaccgcacgcagccctgggagtgagcagcaaagccccaggcccccctcagactcaagtctctgtctccaggcccctcacggtccgagaagaccgggaagacccagagcaagatctcgtccttccttagacagaggccagcagggactgtgggggcgggcggtgaggatgcagg

SEQ ID NO: 99740 - DNA, 301 bp, Homo sapiens
  chr20:62329381-62329682
  hypo
ttgcctcttgcagccaaggtccgagtggccgctcctgccccctaggcctttgctccagctctctgaccgaaggctcctgccccttctccagtccccatcgttgcactgccctctccagcacggctcactgcacagggatttctctctcctgcaaaccccccgagtggggcccagaaagcagggtacctggcagcccccgccagtgtgtgtgggtgaaatgatcggaccgctgcctccccaccccactgcaggagctgaggagtgtgagcgtgccgtcatcgactttgtggctttccaggac

SEQ ID NO: 99741 - DNA, 86 bp, Homo sapiens
  chr20:62331798-62331884
  hypo
gtgatgtccctctgccgcggcggccggtgcacattccgcacgacacacttcaccatccactcgatgccctcgcgcacccctttgct

SEQ ID NO: 99742 - DNA, 1056 bp, Homo sapiens; identical to SEQ ID NO: 57515
  chr20:62383159-62384215
  hypo

SEQ ID NO: 99743 - DNA, 381 bp, Homo sapiens; identical to SEQ ID NO: 57516
  chr20:62384602-62384983
  hypo

SEQ ID NO: 99744 - DNA, 121 bp, Homo sapiens
  chr20:62392096-62392217
  hypo
accgcgccaggccgagttatatcagttttattatcttttcaacacactggctttgggcattgttcactttcggttttggggtttgcccaggctggaatgcagcagtgcaatcatagctcac

SEQ ID NO: 99745 - DNA, 30 bp, Homo sapiens
  chr20:62398204-62398234
  hypo
ggcagatggtgggacgcgtctctggcctgg

SEQ ID NO: 99746 - DNA, 244 bp, Homo sapiens
  chr20:62398760-62399004
  hypo
gccggcagaggactcgagaaatgaccacagaaaggcacacaccggctcccagtcacagctctccgcagatatccccctccgacgcggctgttcggtcacccagttcccctcctgctcccacacacttgagagctctctcgcctgggcagctgcacccagctggagcccgggacccggacgccaaagctctggccgcagcactgaggtcaaagcaaacgccggctccagcgcacagaccagaggc

SEQ ID NO: 99747 - DNA, 30 bp, Homo sapiens; identical to SEQ ID NO: 33664
  chr20:62401272-62401302
  hypo

SEQ ID NO: 99748 - DNA, 555 bp, Homo sapiens
  chr20:62406866-62407421
  hypo
tccaggctgtgacgccgcatcctcacctcccgcaacagggaggtcagcaggcggccgagcagcagggacagaccctcagcctcatctcatcttggcccgggacctgcaaccctcagccttcaaaaccacaccaaagccaagcggcccccagggcctgcacttacgggacagcgagtgggcccctctgggcaggtactcgaacagcagggagccgtcatcccccagcacgtcggccttcagcgacagcaggctgttcttactcatgagcgccgcgcgcaggttggccaccgcggtggcctgatgcagggcgtcgtccttctctggggtgaggggagggcccagatagctggcttctcctcccaggagaccctcctccacctgtgcatagagctcggccctctctcctcggctgtcggagctgctggcttcggtgacggacaggtccgcatctggggacagagggacacacgtcagaagacacgggtcgttcccagactctccaagtgggacaggcgacacatttagaaggacagcgaccagcttctgcctgagcta

SEQ ID NO: 99749 - DNA, 96 bp, Homo sapiens
  chr20:62412804-62412900
  hypo
agatatatgaatggcatcatccgccatcaaagaaatgcaaatcaaagaccatagagaagccaggtgtggcgtctcacgtctgtcatgccagcactg

SEQ ID NO: 99750 - DNA, 30 bp, Homo sapiens
  chr20:62413690-62413720
  hypo
ggagggtgacagaagcgaggatgggaaggg

SEQ ID NO: 99751 - DNA, 30 bp, Homo sapiens
  chr20:62439529-62439559
  hypo
ctggatttcaccaccggccgccttcgatgg

SEQ ID NO: 99752 - DNA, 208 bp, Homo sapiens
  chr20:62440398-62440606
  hypo
aagacctgggagctggcggctcggtgctccggtgctgcagaggcactcaaggggctctccacgttcgccttccacgttccccttcgcagggaccgcagcgcctggggcacttcgccatgggcttggccgaagtgggcactaaaggtgcagactcggtggagccaaggggggcaaggtcagcagccctgggggcgcagccctgggggcc

SEQ ID NO: 99753 - DNA, 677 bp, Homo sapiens; identical to SEQ ID NO: 57517
  chr20:62461227-62461904
  hypo

SEQ ID NO: 99754 - DNA, 31 bp, Homo sapiens; identical to SEQ ID NO: 13168
  chr20:62467675-62467706
  hypo

SEQ ID NO: 99755 - DNA, 263 bp, Homo sapiens; identical to SEQ ID NO: 33668
  chr20:62481424-62481687
  hypo

SEQ ID NO: 99756 - DNA, 31 bp, Homo sapiens
  chr20:62487799-62487830
  hypo
aatacagagaaaagcacggagccgccggcgt

SEQ ID NO: 99757 - DNA, 45 bp, Homo sapiens
  chr20:62488385-62488430
  hypo
ttgcaggcctgtgctgcgagactgcagtggcgctcaggacacacc

SEQ ID NO: 99758 - DNA, 218 bp, Homo sapiens
  chr20:62493114-62493332
  hypo
gcctccacgtggggcgcgcagccaggcgcagtgcctcttgcagcagctccgcgagctgcccggccagctcgctagctacgcgctggcccactcgctgggccgctggctcgtgtaccccggctccgtgtccctgatgacgcgcgcgctgctgccgctgctgcagcagggccaagagcgcctcgtggagcgctaccacggccggcgcgccaagctggtgg

SEQ ID NO: 99759 - DNA, 118 bp, Homo sapiens
  chr20:62494225-62494343
  hypo
aagcacctcaagaacgtggaggcgactcacttcagccctctggagcctgaggagtttcagttgccctggcggctgtaacctatatgccccagtgggggatcacgcacttgaactcctg

SEQ ID NO: 99760 - DNA, 328 bp, Homo sapiens; identical to SEQ ID NO: 13170
  chr20:62495255-62495583
  hypo

SEQ ID NO: 99761 - DNA, 16 bp, Homo sapiens
  chr20:62495814-62495830
  hypo
gacaaactagccaggc

SEQ ID NO: 99762 - DNA, 30 bp, Homo sapiens
  chr20:62510245-62510275
  hypo
ctgccccttcctcccgggctcagcttcccc

SEQ ID NO: 99763 - DNA, 30 bp, Homo sapiens
  chr20:62512778-62512808
  hypo
gctgcgctgggatgcgctgccagggcacac

SEQ ID NO: 99764 - DNA, 184 bp, Homo sapiens
  chr20:62513779-62513963
  hypo
ggttgtgagatgagaaagcagcgtcattgcagggctggggggccgagactcggcagggtcgccgagagctcagtgagcgagcaatgcacaggcggctcctcgccgcaggggcctctgggggccgaggggctctgggcctgcaccccctctgtagacacctggcgagtgtccaccccttggccca

SEQ ID NO: 99765 - DNA, 252 bp, Homo sapiens
  chr20:62520343-62520595
  hypo
gttgttgggcatggccgacctcacttttgacctggggagtctccggaatgacctggctgtctcacagttttgccatgagatcttgggatgttgttagggaccctttggaggctggccctaaccctgaggcccttccgagttaggagagcagcacaaccctctcctcttgacaccgacactcttccctctctctttaaaggaactctgcgaccttcaagtcgtttgaggaccgagttgggaccataaaggtaa

SEQ ID NO: 99766 - DNA, 30 bp, Homo sapiens
  chr20:62541917-62541947
  hypo
ttgggactgggagggcgaggcccgaggtac

SEQ ID NO: 99767 - DNA, 26 bp, Homo sapiens
  chr20:62543644-62543670
  hypo
gaatcggtctccaaaaaaaaaaaaaa

SEQ ID NO: 99768 - DNA, 43 bp, Homo sapiens
  chr20:62544236-62544279
  hypo
ggtttggccaccgtgcccggccggcagtcagtttttacatggt

SEQ ID NO: 99769 - DNA, 44 bp, Homo sapiens
  chr20:62550219-62550263
  hypo
tacaggcgtgagccaccacgcccggctgatatgttccatatatt

SEQ ID NO: 99770 - DNA, 448 bp, Homo sapiens
  chr20:62550725-62551173
  hypo
ggagaggacgcacccggctgtgtggacatgtgcccagggcccaggacagcgccacggaagaggacacacccggctgtgtggacatgtgcccagggcccgggacagcgccacggaagaggacgcacccggctgtgtgcacatgtgcccagggcccgggacagcgccacggaagaggacgcacccggctgtgtgcacatgtgcccagggcccgggacagcgccacggaagaggacgcacccggctgtgtgcacatgtgcccagggcccgggacagcgccacggaagaggacgcacccggctgtgtggacatgtgcccagggcccgggacagcgccacggaagaggacgcacaggacagcgccacggaagaggacgcacccggctgtgtgcacatgtgcccagggcccgggacagcgccacggaagaggacgcacccggctgtgtgcacat

SEQ ID NO: 99771 - DNA, 527 bp, Homo sapiens
  chr20:62551401-62551928
  hypo
ccagggcccgggacagcgccacggaagaggacgcacccggctgtgtggacatgtgcccagggcccgggacagcgccacggaagaggacgcacaggacagcgccacggaagaggacgcacccggctgtgtggcaggggaggttcccaagagcaggctcagggctctggggtctgagtgagggctctccagccagcagggagcagggcagggtgttgaagagacggcaggtgcgtcaggggctgacgtgggacccggcactctgtgctctgtgtctgcccgggaacaggtagtcctgcgtcggaccgggaagtgtggtgggtgtggtgggggaaggggctggcgtcagcagggctctcgtccgccaacgtctggtggggatgcccgccatgcgggggcctcaggctacagccagggctgtgaaggagccgaggtcatagagtggctgccctggcgtagggagggaggacacgggtccccgccatttcagaagctcagcgtccctgcacgtgtgcggtcttgtctgccta

SEQ ID NO: 99772 - DNA, 31 bp, Homo sapiens
  chr20:62560382-62560413
  hypo
gggctggccttggtgccgctgaacttagatg

SEQ ID NO: 99773 - DNA, 30 bp, Homo sapiens
  chr20:62560803-62560833
  hypo
ggtctctacgtggccgagcagtttggggaa

SEQ ID NO: 99774 - DNA, 1089 bp, Homo sapiens
  chr20:62562303-62563392
  hypo
ctgaaggcgaggagacggagttctacgtgtcccccgaggatctggaggcacagctgcagtctgacgagaggggtgagtgcccgccccagggcccgtgtgtgtgtgtggggcagagccagaatgggccctgaatggtgtcaacctgtcttgtcaaacaggagggcactgacactgtgccgcgagtgtttgtggtggcagctgggactgttgaggtgtgaacgtggaccctgaggtaaagcaggcgcatagagctgtccccgccgtgacctgcggtagccgtagatcccagggactgcgaggcggggcagggcggcaggcagttggggcggggctgagggccgagggctggcggtgacccaaggcgacggaggaaagccgtgtggggtggaggtcagcgagtagcctctcccggtggagagtttgtccaggtgcccgaaagtcgctccacaggaccagcgttgggtgcgcgccaggctgtggccctcgtgcagtgccctgtgtgcttgcttttcagaggccacagacacgccgatcgtcatacagccggcatccgccaccgagaccacccagctcacagccgactcccaccccagctaccacactgacgggttcaactaaatccaggaggagctgtggtcagaggaggagccggcgcctggccacgccaaccttagaatcatgaactgtagtcacagagatgggaaggcagcctcctgcctgccctggccttgctggggcccctcctgcctccacgcccacccagcgtcgacccttgacccacgaagtgcgtagcatgcagtatttaaagcagtgtagctacggtcttctgtttttttcccttttttaatagcatgtatggggttctgttccatgtctgtgttgtggacattccgcggcatgaccgcgtgaactgcacggtggagctgcctcagggctgtcggtcaggttggtccagtgaggggtgactgcagccggtcaggtgggcgaggagaaggggggctgcccctttcctacctgtgcttgaggggccggaggcaggtgctgcctggcagagctgtgttaccgtcttggcctcggggtctggtccac

SEQ ID NO: 99775 - DNA, 30 bp, Homo sapiens; identical to SEQ ID NO: 33676
  chr20:62564940-62564970
  hypo

SEQ ID NO: 99776 - DNA, 30 bp, Homo sapiens
  chr20:62569089-62569119
  hypo
gtacagaacagtcacgaattaatcacagtc

SEQ ID NO: 99777 - DNA, 245 bp, Homo sapiens
  chr20:62571649-62571894
  hypo
cgtcgtggtcctaccgagtgtattgggcaggtaaatcccacctctgcctgaacctgccccgcctacccagggctcactcaccaggagcacgcgcactgccatcatggccgccgcgcccgtggacacggtgcagtccatgaggatcacgtggtcatcgctgatgtccttgggcagcctcaggtagtggagctgcgggcagcaggggtcaggctgcaggtggggctccctgcgtccccttgctgtga

SEQ ID NO: 99778 - DNA, 30 bp, Homo sapiens
  chr20:62572219-62572249
  hypo
cagggtgaggactccggtgagcgcagggag

SEQ ID NO: 99779 - DNA, 46 bp, Homo sapiens
  chr20:62572478-62572524
  hypo
tgccccgtacctgcggcgtgctcttcaggacgctcagcgtccgggg

SEQ ID NO: 99780 - DNA, 126 bp, Homo sapiens
  chr20:62576161-62576287
  hypo
ctgaggccgcctggtccgtgggcctggccagagccacttccccagggcaccctggcaggtggggaggagtggggaggtgggggtgtctgcacctggtccgtgggcctggcccgagccacttcccca

SEQ ID NO: 99781 - DNA, 326 bp, Homo sapiens; identical to SEQ ID NO: 33679
  chr20:62578678-62579004
  hypo

SEQ ID NO: 99782 - DNA, 140 bp, Homo sapiens; identical to SEQ ID NO: 33680
  chr20:62581867-62582007
  hypo

SEQ ID NO: 99783 - DNA, 387 bp, Homo sapiens
  chr20:62583700-62584087
  hypo
cactgtgctggccaggcgagggacggaggagcccaggcacgcagctgtgaatggaaccaccaggccccaccctggaatcacgtcgcctcgctgcaggccacgtggtccccaacatgcccctccacggggctgctctcggccacagcagcccacggcagggaggggccgctcacggtggggaggggtagcctgccctggtcctattcactggtgttcctcccaggttctaacttcctgagctgggccggtccagagaactcccattcccacgccacccacaggtgctgatgccgcgctggggtaagcgctgcccagagcaccttctgcctaaggcttcctccttgcaggtggggctgtctgaggcccgtggtgctggaggctgcctca

SEQ ID NO: 99784 - DNA, 30 bp, Homo sapiens; identical to SEQ ID NO: 33682
  chr20:62591216-62591246
  hypo

SEQ ID NO: 99785 - DNA, 30 bp, Homo sapiens
  chr20:62595844-62595874
  hypo
tgctttgtgcgctccgggtcctcctcaggc

SEQ ID NO: 99786 - DNA, 34 bp, Homo sapiens
  chr20:62598912-62598946
  hypo
tagcaccgcctaccaccggcggctgcacaggccc

SEQ ID NO: 99787 - DNA, 1009 bp, Homo sapiens; identical to SEQ ID NO: 57524
  chr20:62600639-62601648
  hypo

SEQ ID NO: 99788 - DNA, 214 bp, Homo sapiens; identical to SEQ ID NO: 57525
  chr20:62605237-62605451
  hypo

SEQ ID NO: 99789 - DNA, 126 bp, Homo sapiens; identical to SEQ ID NO: 33685
  chr20:62608160-62608286
  hypo

SEQ ID NO: 99790 - DNA, 75 bp, Homo sapiens
  chr20:62630954-62631029
  hypo
gtgatatcaagaaggcgcgactgctcctcaagtctgttcgggagacgaaccctcatcacccgccagcctggattg

SEQ ID NO: 99791 - DNA, 121 bp, Homo sapiens; identical to SEQ ID NO: 33687
  chr20:62631470-62631591
  hypo

SEQ ID NO: 99792 - DNA, 121 bp, Homo sapiens; identical to SEQ ID NO: 33688
  chr20:62631830-62631951
  hypo

SEQ ID NO: 99793 - DNA, 42 bp, Homo sapiens
  chr20:62635238-62635280
  hypo
ccgcgcccggccagagacagcgtcttataatgaggtggccag

SEQ ID NO: 99794 - DNA, 30 bp, Homo sapiens
  chr20:62635564-62635594
  hypo
gggactgtgtttccacggctgttctctcag

SEQ ID NO: 99795 - DNA, 105 bp, Homo sapiens
  chr20:62639422-62639527
  hypo
tgtacctggcccggcctaatttcttaacatcattaaatgtctactgcattcatatttttccagctgtcatgtcagtacctgcacgggcacatgcatgcataacca

SEQ ID NO: 99796 - DNA, 31 bp, Homo sapiens; identical to SEQ ID NO: 33690
  chr20:62646173-62646204
  hypo

SEQ ID NO: 99797 - DNA, 87 bp, Homo sapiens
  chr20:62651735-62651822
  hypo
tccagcctgggtgacaaagcgagactctgtctttaaaaaaaaatcctttcagcatctgcagggcgcagaggacggtgacttgcccct

SEQ ID NO: 99798 - DNA, 30 bp, Homo sapiens
  chr20:62654792-62654822
  hypo
ggctcgtgtccccacgcaccctctgtccgt

SEQ ID NO: 99799 - DNA, 373 bp, Homo sapiens
  chr20:62662104-62662477
  hypo
aaatcacagtttatctaacaccgggcaattaagaataccacaaggcttaaaaaacaatcaggttatcagagtgtgaaattattccgtttggcaactgagacgaacccgaacagctgcccggagtggaggctcctcgtgttgtctcttgactacggtgcctctggctccagggggaggtgaccctgaggagagggtggcagcaacgcagagtcccgggcctgccagcatgctcagcagccagcgcccgccatcccttctccagcagcgggtgggggtgccatgcacacccttacctggcctctcatagcatggacctcttcgggcccggtttttcaggtgtgcatgtgtctggcaggcacggcggtgtgaatcc

SEQ ID NO: 99800 - DNA, 30 bp, Homo sapiens
  chr20:62664614-62664644
  hypo
actgtggaggtgcccgggttccccaagact

SEQ ID NO: 99801 - DNA, 30 bp, Homo sapiens
  chr20:62665557-62665587
  hypo
ctgtcttgtggtaccgatggcagggcctgt

SEQ ID NO: 99802 - DNA, 617 bp, Homo sapiens; identical to SEQ ID NO: 57530
  chr20:62694477-62695094
  hypo

SEQ ID NO: 99803 - DNA, 35 bp, Homo sapiens
  chr20:62705148-62705183
  hypo
gaagggaacccagagtcggccgtaggaggcggcgg

SEQ ID NO: 99804 - DNA, 30 bp, Homo sapiens; identical to SEQ ID NO: 33693
  chr20:62713070-62713100
  hypo

SEQ ID NO: 99805 - DNA, 1131 bp, Homo sapiens; identical to SEQ ID NO: 57531
  chr20:62714665-62715796
  hypo

SEQ ID NO: 99806 - DNA, 30 bp, Homo sapiens
  chr20:62729870-62729900
  hypo
cctgtccaggtcttcgtgctggcccaaggg

SEQ ID NO: 99807 - DNA, 682 bp, Homo sapiens; identical to SEQ ID NO: 57532
  chr20:62733447-62734129
  hypo

SEQ ID NO: 99808 - DNA, 923 bp, Homo sapiens; identical to SEQ ID NO: 33695
  chr20:62737168-62738091
  hypo

SEQ ID NO: 99809 - DNA, 63 bp, Homo sapiens
  chr20:62766380-62766443
  hypo
tccctcagttttgtgcgccacaaacacgcgcactccctcagttatgtgcgtcacaaacacaga

SEQ ID NO: 99810 - DNA, 121 bp, Homo sapiens
  chr20:62766922-62767043
  hypo
cacaaacacacacgctccttcagttttgtgcttcacaaacacacacgctccctcagttttgtgcatcacacacacattccctcagttttgtgcgccacaaacacgcgcgctccctcagttt

SEQ ID NO: 99811 - DNA, 30 bp, Homo sapiens
  chr20:62817583-62817613
  hypo
aggtgcaaagatgccgggtccctagagagg

SEQ ID NO: 99812 - DNA, 213 bp, Homo sapiens; identical to SEQ ID NO: 33696
  chr20:62839566-62839779
  hypo

SEQ ID NO: 99813 - DNA, 30 bp, Homo sapiens; identical to SEQ ID NO: 33697
  chr20:62845140-62845170
  hypo

SEQ ID NO: 99814 - DNA, 30 bp, Homo sapiens; identical to SEQ ID NO: 33698
  chr20:62845653-62845683
  hypo

SEQ ID NO: 99815 - DNA, 31 bp, Homo sapiens; identical to SEQ ID NO: 33699
  chr20:62859481-62859512
  hypo

SEQ ID NO: 99816 - DNA, 335 bp, Homo sapiens
  chr20:62899594-62899929
  hypo
cacaccattgaaagccgaggacgcacataaaagggagctcattttgccatgtgggagacttagcctatttgccgcctccactgggaggggcttacagaaagagccatcagccagagggctcctacagagtcatggggcttctgctccccagggcgccaagcgcctgctgcctcatgggtagacaaggttagagaacacattccagctaatctgctggggtgtggataggagactttccgtggaaccttacacagccgagcctttgtgtttcactatttcaggatgcaaactgagcaaggaactgataccagggccagcacgacagcaaaacctcc

SEQ ID NO: 99817 - DNA, 30 bp, Homo sapiens
  chr21:15443092-15443122
  hypo
accgatcggagccccgcggccctggagtgg

SEQ ID NO: 99818 - DNA, 413 bp, Homo sapiens
  chr21:15443741-15444154
  hypo
ctttgccagctaccaggaaaacgtccttgtgaacccggattcccattgctaccgacttcgtgtaaactcccgtcccgaggacacgagagagactcaggcctcaggcgaggattccctggattgcacccagggtgcgtgtctcgcccacaggagcaccccaaagcggcaagaagacaccgggtgatgggaacaggaagcctggctttgaagaggacgttgaggcagtccgtggaaaaacttcccagggatgacagtgccttcccgacagaccctgcggcagaatgggagggggagcgtggagtccctgtcttgcacccagggtgcttgtctcgccctcagggggcaccccatagcggcaagaattcccccagagaaaggtaacaggatgccccgcttgaaagacatgcaccctg

SEQ ID NO: 99819 - DNA, 31 bp, Homo sapiens; identical to SEQ ID NO: 33700
  chr21:15448707-15448738
  hypo

SEQ ID NO: 99820 - DNA, 31 bp, Homo sapiens; identical to SEQ ID NO: 33701
  chr21:15450034-15450065
  hypo

SEQ ID NO: 99821 - DNA, 300 bp, Homo sapiens; identical to SEQ ID NO: 33702
  chr21:15455746-15456046
  hypo

SEQ ID NO: 99822 - DNA, 710 bp, Homo sapiens; identical to SEQ ID NO: 13177
  chr21:15588288-15588998
  hypo

SEQ ID NO: 99823 - DNA, 30 bp, Homo sapiens; identical to SEQ ID NO: 13178
  chr21:16130746-16130776
  hypo

SEQ ID NO: 99824 - DNA, 39 bp, Homo sapiens
  chr21:16383776-16383815
  hypo
tgggattgcaagcgtgagccaccacgcccagagtactgg

SEQ ID NO: 99825 - DNA, 154 bp, Homo sapiens; identical to SEQ ID NO: 33705
  chr21:16408139-16408293
  hypo

SEQ ID NO: 99826 - DNA, 448 bp, Homo sapiens; identical to SEQ ID NO: 57541
  chr21:16438266-16438714
  hypo

SEQ ID NO: 99827 - DNA, 30 bp, Homo sapiens; identical to SEQ ID NO: 13180
  chr21:16488404-16488434
  hypo

SEQ ID NO: 99828 - DNA, 30 bp, Homo sapiens; identical to SEQ ID NO: 57543
  chr21:16520816-16520846
  hypo

SEQ ID NO: 99829 - DNA, 161 bp, Homo sapiens
  chr21:16580449-16580610
  hypo
ggatcttcacattccctggaacgtgcagactctgtcatcccgctccgttttccacgttctgctctttgactccaggtgttcgtcccccatgccccaatgcacgttgtgcacatctcctgcccttatgacccggaggaaacgttatcttctctgagttccaa

SEQ ID NO: 99830 - DNA, 203 bp, Homo sapiens
  chr21:16747502-16747705
  hypo
tgcaggctgccaggctcgcaaagcacctccacatctacaggaactctccaaggcaactgtccccatgtggaggctccgcattgcaggctgccaggctcgtaaagcacctccacatctacaggggcttccacagcggggaagagtgtggggagacacacaccactctacatgcctcaactcagaagggacgccctccatttctg

SEQ ID NO: 99831 - DNA, 30 bp, Homo sapiens
  chr21:17046414-17046444
  hypo
gctgtgtccggcctcacccatcttttctat

SEQ ID NO: 99832 - DNA, 31 bp, Homo sapiens
  chr21:17092853-17092884
  hypo
agccaccacgcccggccgaaaattggtttta

SEQ ID NO: 99833 - DNA, 84 bp, Homo sapiens; identical to SEQ ID NO: 57545
  chr21:17102747-17102831
  hypo

SEQ ID NO: 99834 - DNA, 30 bp, Homo sapiens
  chr21:18665435-18665465
  hypo
tttcttgtatagccccggctcttagagcca

SEQ ID NO: 99835 - DNA, 31 bp, Homo sapiens; identical to SEQ ID NO: 33707
  chr21:18824915-18824946
  hypo

SEQ ID NO: 99836 - DNA, 1362 bp, Homo sapiens; identical to SEQ ID NO: 57546
  chr21:18885046-18886408
  hypo

SEQ ID NO: 99837 - DNA, 37 bp, Homo sapiens
  chr21:18913417-18913454
  hypo
ttaggattgatgaacccgtattgacataacattacca

SEQ ID NO: 99838 - DNA, 31 bp, Homo sapiens
  chr21:18936385-18936416
  hypo
gcaaggcacaatgaaacgagtatggctgtat

SEQ ID NO: 99839 - DNA, 30 bp, Homo sapiens; identical to SEQ ID NO: 33709
  chr21:18966016-18966046
  hypo

SEQ ID NO: 99840 - DNA, 31 bp, Homo sapiens; identical to SEQ ID NO: 13184
  chr21:18985139-18985170
  hypo

SEQ ID NO: 99841 - DNA, 30 bp, Homo sapiens; identical to SEQ ID NO: 33711
  chr21:19139461-19139491
  hypo

SEQ ID NO: 99842 - DNA, 94 bp, Homo sapiens
  chr21:19274378-19274472
  hypo
catgtttttccaagtgcggcatttctaggatacagcatctggacagggaaaatgtttctgagcagtggagtagttaatttttttttgttttttt

SEQ ID NO: 99843 - DNA, 153 bp, Homo sapiens
  chr21:19274771-19274924
  hypo
cgtgagccaccgcgcccagcctggagtgtttaattttatgtgtcaacttgtctgggctgtagtactcagttacgtaaccaaacaccaatccaggtgtcactgtgaaggtatttcgtagatgcaattaacatctacggtcggttgattttaagt

SEQ ID NO: 99844 - DNA, 121 bp, Homo sapiens
  chr21:20865923-20866044
  hypo
gggagaggcgtgggcgggaaccggcgcttgccggccagcgcgagttccaggtgaacgtgggctcggcaggcccggcactcggagcggccggccggggcagtgaggggcttagcacctgggc

SEQ ID NO: 99845 - DNA, 67 bp, Homo sapiens
  chr21:21132336-21132403
  hypo
gccatctctgggaccccggggacccggtgcgcacgctgagcagcaccaaggacggggcgcacggccg

SEQ ID NO: 99846 - DNA, 38 bp, Homo sapiens
  chr21:22495684-22495722
  hypo
agcctgggagacagagcgaagagactccctctcaaaaa

SEQ ID NO: 99847 - DNA, 706 bp, Homo sapiens; identical to SEQ ID NO: 57554
  chr21:27011414-27012120
  hypo

SEQ ID NO: 99848 - DNA, 696 bp, Homo sapiens; identical to SEQ ID NO: 13189
  chr21:27012148-27012844
  hypo

SEQ ID NO: 99849 - DNA, 24 bp, Homo sapiens
  chr21:27245269-27245293
  hypo
caccgcgcccggccaggatcatct

SEQ ID NO: 99850 - DNA, 20 bp, Homo sapiens
  chr21:27341410-27341430
  hypo
gggaggcggaggctggcgga

SEQ ID NO: 99851 - DNA, 30 bp, Homo sapiens; identical to SEQ ID NO: 13190
  chr21:27403678-27403708
  hypo

SEQ ID NO: 99852 - DNA, 33 bp, Homo sapiens
  chr21:27456834-27456867
  hypo
gtgagcaccgcgcccggccgaagacaccatttt

SEQ ID NO: 99853 - DNA, 31 bp, Homo sapiens
  chr21:27783697-27783728
  hypo
ctcatctgcatacttacgtatagaacagggg

SEQ ID NO: 99854 - DNA, 98 bp, Homo sapiens
  chr21:30037460-30037558
  hypo
gccaggagtggcggcatgcacctatgggtctcagctactcaggatgtcttgagtctgggaggttgaggctgtggtgagacgtcgcgatctcatcactg

SEQ ID NO: 99855 - DNA, 30 bp, Homo sapiens
  chr21:30261509-30261539
  hypo
ctttggcataaacccgagtgagatgaggag

SEQ ID NO: 99856 - DNA, 84 bp, Homo sapiens; identical to SEQ ID NO: 33717
  chr21:30294960-30295044
  hypo

SEQ ID NO: 99857 - DNA, 30 bp, Homo sapiens
  chr21:30352358-30352388
  hypo
aatctgagtcacccacgtgcacattcccag

SEQ ID NO: 99858 - DNA, 191 bp, Homo sapiens; identical to SEQ ID NO: 33718
  chr21:30357056-30357247
  hypo

SEQ ID NO: 99859 - DNA, 43 bp, Homo sapiens; identical to SEQ ID NO: 33719
  chr21:30406900-30406943
  hypo

SEQ ID NO: 99860 - DNA, 100 bp, Homo sapiens; identical to SEQ ID NO: 33720
  chr21:30407635-30407735
  hypo

SEQ ID NO: 99861 - DNA, 30 bp, Homo sapiens; identical to SEQ ID NO: 57573
  chr21:30717721-30717751
  hypo

SEQ ID NO: 99862 - DNA, 217 bp, Homo sapiens
  chr21:30722424-30722641
  hypo
aaaacctcttacccagaccaacgtcactcctgtaaaaacccacttggcctaatacaaacctccacatacaatcgaaggtaaaatgtcacggcctctactgcaccccgtggttcacaagactcccaatcacatgcgtctcttactacccaaactctgctcttctggttttgatttttcaatgtctgtatacaatgccgccctgccaaatgttgggttt

SEQ ID NO: 99863 - DNA, 31 bp, Homo sapiens; identical to SEQ ID NO: 33722
  chr21:30936923-30936954
  hypo

SEQ ID NO: 99864 - DNA, 30 bp, Homo sapiens
  chr21:32558565-32558595
  hypo
taggttctcaactttcgcagattcttctat

SEQ ID NO: 99865 - DNA, 30 bp, Homo sapiens
  chr21:32624259-32624289
  hypo
ctcctccaggctctcgctgttggtggtgct

SEQ ID NO: 99866 - DNA, 443 bp, Homo sapiens; identical to SEQ ID NO: 57578
  chr21:32716056-32716499
  hypo

SEQ ID NO: 99867 - DNA, 27 bp, Homo sapiens
  chr21:32863450-32863477
  hypo
aagaacgaaagaaaggaagggaaggaa

SEQ ID NO: 99868 - DNA, 89 bp, Homo sapiens; identical to SEQ ID NO: 13211
  chr21:32931770-32931859
  hypo

SEQ ID NO: 99869 - DNA, 179 bp, Homo sapiens; identical to SEQ ID NO: 57580
  chr21:32932325-32932504
  hypo

SEQ ID NO: 99870 - DNA, 30 bp, Homo sapiens
  chr21:33034948-33034978
  hypo
agaaagcagtagtacgtctggttagactag

SEQ ID NO: 99871 - DNA, 151 bp, Homo sapiens; identical to SEQ ID NO: 33726
  chr21:33057408-33057559
  hypo

SEQ ID NO: 99872 - DNA, 46 bp, Homo sapiens; identical to SEQ ID NO: 13213
  chr21:33058220-33058266
  hypo

SEQ ID NO: 99873 - DNA, 33 bp, Homo sapiens; identical to SEQ ID NO: 33728
  chr21:33058552-33058585
  hypo

SEQ ID NO: 99874 - DNA, 102 bp, Homo sapiens
  chr21:33175426-33175528
  hypo
ggtctcaaaaaaaaaaaaaaaaaaaagaaatttcgcttatcggtctttcttataagcattacttacattatagatcagagcgatgcactagaacttttcaaa

SEQ ID NO: 99875 - DNA, 31 bp, Homo sapiens
  chr21:33253353-33253384
  hypo
ggggcatggcctcgtacgggacagttgctga

SEQ ID NO: 99876 - DNA, 140 bp, Homo sapiens
  chr21:33340683-33340823
  hypo
acctatcccaacaggtaatttcgtgcacccagaggaactcctcgggagagacggggcctgtcctactagccctgagcagttccggacagaaagctgtccgtgattgaaggaaaagccgcgctctctcttggctatctccc

SEQ ID NO: 99877 - DNA, 356 bp, Homo sapiens
  chr21:33371014-33371370
  hypo
atgctggacatggtgcgctccttcgagtctgtggatcgcgacgaccacgtagaagtgctgtctccctctcatcactacaggattctgaactccccggtcagcttggctcgcagaaattccagcgagaggacgctgtccccgggtctgccatccggaagcatgtcgcctctccatactcctttgcatccaactctggtctcttttgctcacgaagataagaacagccccccaaaagaggagggcctgtgttgcccacctccggttcccagcaatggccccatgcagcctctggggagccccaattgtgtgaaaagccgaggccggttccctatgatgggcatcggacagatgttaag

SEQ ID NO: 99878 - DNA, 31 bp, Homo sapiens
  chr21:33415198-33415229
  hypo
agcctcttggtggcttcgagaaaattagagt

SEQ ID NO: 99879 - DNA, 203 bp, Homo sapiens
  chr21:33416033-33416236
  hypo
acatgagtgtgtgagcatagacgtgtgtgagcatacacatgtcagtgtgtgtatgcgtgtgtacacgtgtgtgaatgtacacagctgtgagtgtaaacgtgtgtgagcatacacatgtgagtatgtgtacatacgagtgtgagcgtgtgaacgcacacgtgtgtgtacgtgtgtacatatgcgtgtgagtgtgtgtacaatga

SEQ ID NO: 99880 - DNA, 31 bp, Homo sapiens; identical to SEQ ID NO: 33730
  chr21:33523366-33523397
  hypo

SEQ ID NO: 99881 - DNA, 30 bp, Homo sapiens
  chr21:33628787-33628817
  hypo
gaggcataaaaagtacggtgacacgtgtgc

SEQ ID NO: 99882 - DNA, 34 bp, Homo sapiens; identical to SEQ ID NO: 33731
  chr21:33641297-33641331
  hypo

SEQ ID NO: 99883 - DNA, 31 bp, Homo sapiens; identical to SEQ ID NO: 33732
  chr21:33642643-33642674
  hypo

SEQ ID NO: 99884 - DNA, 31 bp, Homo sapiens; identical to SEQ ID NO: 33733
  chr21:33688988-33689019
  hypo

SEQ ID NO: 99885 - DNA, 125 bp, Homo sapiens; identical to SEQ ID NO: 33734
  chr21:33694582-33694707
  hypo

SEQ ID NO: 99886 - DNA, 812 bp, Homo sapiens
  chr21:33707627-33708439
  hypo
aaccctggcacgaatcggtcttgagcacatagggcctggctcttggtgctcctgtaagagctggtttatatcacggggcgtgagtcagctgccactttaaaaatgtctaaatttctcacagtctgttaccctcagcagatgggaagactgtatctcattcccataggttttcctgagagcaccaagcccagcgcctccaggcaatcaaggaacattatctatagagctaaatacttctaaacaaaattcttctaaatacaggttcgcttctgtgcaagtcgacaacagtcactaatgtcagaaaaggaaagaatcatcctttcaggaatgctcgctgttcaccccagtttctggcaggcagagagcccatgcgccaggcacacccggcagactgcccatcacagaccggcgggagagccgccacgtagcgtccaggatccccagctcagctccccgagctcaggcctgctccctcatctaaggacgagatgtttattttgtttgcggaaatgctctgtgccccttagagccacagtgccagtgagcggcacatccttgattcgctcttccccggcagctgaaactagactcccttcacagccagccctgtcctgtgactccctgggcagcctcgcttggcgttctctgctgtgttagaggtcgttctgcagaaatgggtagctggaacaatgctgcactgtgataaaacccgcctccgacttgctctcccctcttcctcacataagaagggctattctactccagaaaggacataactgacatagcaccagctccgacgtcaaaagagcgag

SEQ ID NO: 99887 - DNA, 172 bp, Homo sapiens; identical to SEQ ID NO: 33736
  chr21:33711060-33711232
  hypo

SEQ ID NO: 99888 - DNA, 30 bp, Homo sapiens
  chr21:33720855-33720885
  hypo
gctgaaccgattcctcgccaacgacactcc

SEQ ID NO: 99889 - DNA, 255 bp, Homo sapiens
  chr21:33721626-33721881
  hypo
actccagcgaggccacggactccatgtccaggaagaggtcggcttcggcccgggcggcctcgcatctctgctggttctgggcatccagctgctcacagtggacaaccaggcgcctgaggagatccaggaagagctgcaggaggggcgggcccacacttctgcccagctgtgaggacaagagcacgagcctcagcagggaagagacgggttcacagctaccaggcagtgacttccagggcccgtgttttcagagca

SEQ ID NO: 99890 - DNA, 30 bp, Homo sapiens
  chr21:33749971-33750001
  hypo
ctctcctcctaaatcgtcccggcagtcacg

SEQ ID NO: 99891 - DNA, 31 bp, Homo sapiens
  chr21:33754400-33754431
  hypo
cagccgggcttcaggacgggaagccctttcc

SEQ ID NO: 99892 - DNA, 103 bp, Homo sapiens
  chr21:33759537-33759640
  hypo
aactgggagccacctgtgtgccgctgcccacagaattctcctgccagaacctgttctataaaactgcctttcagagaatcacttgaacctgcctctcggagaa

SEQ ID NO: 99893 - DNA, 584 bp, Homo sapiens
  chr21:33760390-33760974
  hypo
cacatctgccggggacgcatgagcacgccattacaccaaaaacataccagaaaagaacaaaattggagccagactcctgggcacaaatccccgctcagtcacttactagctgcatggtactcagtaaggcactgaactctgagctctgggtacctcacctgtataacggaacaagaacagaacctacctgacagggtttgtatgaagcgtaaaaaggctaatttacacataaagcatccagcatcacacttaggtcaaggtaaaccctcaaaacataagcagccccccgggtgtcctcagcagcagcagtgaaaatccagtcacattcggcctctgccagcctcacaggtgttttcagatccccttttatgctgcaacattttccgcagcaaccaccgccattcctttaacagtcactgagcaagtgcatctgctatgccaggcgctgctctgagcttcggggccagactccattgctgccgtctgcagcgtggtctggtggtgattatgagcaggccatgggtgttctgaccaaggtgactgtgagttacaggagctcagtcggcacaggcaccctggagtta

SEQ ID NO: 99894 - DNA, 318 bp, Homo sapiens; identical to SEQ ID NO: 33738
  chr21:33781920-33782238
  hypo

SEQ ID NO: 99895 - DNA, 159 bp, Homo sapiens
  chr21:33791605-33791764
  hypo
agaacaattgctccctcgttacccacccctattgcctgacttgcgtactgctctccccagctccacagctgctaataaaatttagaagcaggatttgaacccagtacctattgggttttaaatatccatactgatggccgggcactgtggctcacgcct

SEQ ID NO: 99896 - DNA, 164 bp, Homo sapiens; identical to SEQ ID NO: 33739
  chr21:33812565-33812729
  hypo

SEQ ID NO: 99897 - DNA, 81 bp, Homo sapiens
  chr21:33824926-33825007
  hypo
cttgccctagtgtactcggaaaatcagatttcgcatggacttggagaaggagtgcaaggttttattgagtggaggaggtgg

SEQ ID NO: 99898 - DNA, 30 bp, Homo sapiens
  chr21:33840125-33840155
  hypo
tcctccaaggcagagcggctcccccctttc

SEQ ID NO: 99899 - DNA, 241 bp, Homo sapiens; identical to SEQ ID NO: 33740
  chr21:33844218-33844459
  hypo

SEQ ID NO: 99900 - DNA, 209 bp, Homo sapiens
  chr21:33845781-33845990
  hypo
actgttttgacctcccgtctcctacccgctatccgtccctcccttcagtcccatgggcagagcatttgccgtctgcagagaatttgcagacagtcccagggcggtcccatggtggcacctctctaatctgtccactttgctcccagcctcctccgggcatctctcccctggacatcgaagctgcctcccctcttcgcttagcagccaga

SEQ ID NO: 99901 - DNA, 66 bp, Homo sapiens; identical to SEQ ID NO: 33742
  chr21:33849055-33849121
  hypo

SEQ ID NO: 99902 - DNA, 37 bp, Homo sapiens
  chr21:33857746-33857783
  hypo
acaggcgtgagccaccgtgcctggccactcccttttt

SEQ ID NO: 99903 - DNA, 86 bp, Homo sapiens
  chr21:33870147-33870233
  hypo
aattctcattttttaaaccatcagatctcgtgagtccctttcactatcaagacaacagcccgggaaagacccgcccctaagattca

SEQ ID NO: 99904 - DNA, 90 bp, Homo sapiens; identical to SEQ ID NO: 33743
  chr21:33875250-33875340
  hypo

SEQ ID NO: 99905 - DNA, 149 bp, Homo sapiens; identical to SEQ ID NO: 33744
  chr21:33876125-33876274
  hypo

SEQ ID NO: 99906 - DNA, 121 bp, Homo sapiens
  chr21:33879875-33879996
  hypo
gtgtgcatgtgtatatgtgtgtgcatgtgtgtttctatgtgtacatgtgtgtacatgcgtatctgtgtgtgcatgggtttgcaggtgtgcctgtgtgtgcatgcatgtgtatctgtgtgca

SEQ ID NO: 99907 - DNA, 28 bp, Homo sapiens
  chr21:33880055-33880083
  hypo
gcatatgtgtttgcgtgtgtgtgcatgt

SEQ ID NO: 99908 - DNA, 21 bp, Homo sapiens
  chr21:33880311-33880332
  hypo
tgtgtacgcatgcatgtgtgt

SEQ ID NO: 99909 - DNA, 31 bp, Homo sapiens
  chr21:33884693-33884724
  hypo
gcaagtccatagttaccggctgtggcaccct

SEQ ID NO: 99910 - DNA, 30 bp, Homo sapiens; identical to SEQ ID NO: 33745
  chr21:33898149-33898179
  hypo

SEQ ID NO: 99911 - DNA, 23 bp, Homo sapiens
  chr21:33898640-33898663
  hypo
tggagtctcactctgtcgccagg

SEQ ID NO: 99912 - DNA, 24 bp, Homo sapiens
  chr21:33913567-33913591
  hypo
gttaagaagtccaggccgggcgcg

SEQ ID NO: 99913 - DNA, 117 bp, Homo sapiens; identical to SEQ ID NO: 33748
  chr21:33924143-33924260
  hypo

SEQ ID NO: 99914 - DNA, 418 bp, Homo sapiens
  chr21:33954139-33954557
  hypo
tccatttcatagggtcgtcatagagagtaagaccgtaaagctccgtacctagcccatgtaaagtccacagtaagggtttgctgctgttgtcctgagacatcatgagatgtcttagaattctggacttgagacacacggcctgggggcggcaatgcttctgtctgctggagtgccaggtgagaggcctgatgtatccagttcttattaatcattacttacgggaaatggagttgatggaaagatagcaacccctcccaccacccggagcgtgagtgataccgcgtcattcagcaataaagcccacatctttatggggacgctatttttacataacgcaaacggtacaaaaacataaatgcgcttttggtaccagagtgtgcgattcttgccccgcgtgtggggacgctgcagatttctt

SEQ ID NO: 99915 - DNA, 30 bp, Homo sapiens
  chr21:33976508-33976538
  hypo
aaacaatcatcaccgcgcctcgaagctggt

SEQ ID NO: 99916 - DNA, 30 bp, Homo sapiens
  chr21:33976874-33976904
  hypo
gaggatcgggagatacggcaggcggagcag

SEQ ID NO: 99917 - DNA, 59 bp, Homo sapiens; identical to SEQ ID NO: 33749
  chr21:34033604-34033663
  hypo

SEQ ID NO: 99918 - DNA, 14 bp, Homo sapiens
  chr21:34392153-34392167
  hypo
actcaaaaccgagt

SEQ ID NO: 99919 - DNA, 198 bp, Homo sapiens; identical to SEQ ID NO: 57589
  chr21:34392205-34392403
  hypo

SEQ ID NO: 99920 - DNA, 638 bp, Homo sapiens; identical to SEQ ID NO: 57590
  chr21:34392436-34393074
  hypo

SEQ ID NO: 99921 - DNA, 65 bp, Homo sapiens; identical to SEQ ID NO: 13222
  chr21:34442191-34442256
  hypo

SEQ ID NO: 99922 - DNA, 1768 bp, Homo sapiens; identical to SEQ ID NO: 13223
  chr21:34442594-34444362
  hypo

SEQ ID NO: 99923 - DNA, 42 bp, Homo sapiens; identical to SEQ ID NO: 57601
  chr21:34444444-34444486
  hypo

SEQ ID NO: 99924 - DNA, 27 bp, Homo sapiens
  chr21:34471072-34471099
  hypo
cgaagatttaaaaaacgcagctgggtg

SEQ ID NO: 99925 - DNA, 177 bp, Homo sapiens
  chr21:34498740-34498917
  hypo
catttaacttgttcaccgccaactcaagaaaatgcacctttccctcaaaaccagcgttccctcccttgacccataaaaccagaaaaaatgcagatatgctgagttttcaaacatctcatgtttgctgcagtcctcgttcgagggagaacagcaggagaaatccgagcaaatggcaag

SEQ ID NO: 99926 - DNA, 30 bp, Homo sapiens
  chr21:34636140-34636170
  hypo
tatttctcttctttcgttcttttttttttt

SEQ ID NO: 99927 - DNA, 93 bp, Homo sapiens
  chr21:34710939-34711032
  hypo
aagttatattatgaaacggatttcatgaagtaaatattacattagttacatattcatatttcatattctgttctgagctaattattgcatatg

SEQ ID NO: 99928 - DNA, 33 bp, Homo sapiens; identical to SEQ ID NO: 33754
  chr21:34711331-34711364
  hypo

SEQ ID NO: 99929 - DNA, 41 bp, Homo sapiens; identical to SEQ ID NO: 33755
  chr21:34745738-34745779
  hypo

SEQ ID NO: 99930 - DNA, 31 bp, Homo sapiens; identical to SEQ ID NO: 13229
  chr21:34776440-34776471
  hypo

SEQ ID NO: 99931 - DNA, 37 bp, Homo sapiens
  chr21:34921349-34921386
  hypo
gtaacttttaatttaacgtgaggtgttatactgtggg

SEQ ID NO: 99932 - DNA, 513 bp, Homo sapiens
  chr21:34927030-34927543
  hypo
tctgaacacaaatcacgcaagcgtaccagtgaatctcgttctagggcaagaaagagatcatctaagtccaagtctcatcgctctcagacacgttcacggtcacgttcaagacgcaggaggagaagcagcagatcaagatcaaagtctagaggaagaagatctgtatcaaaagagaagcgcaaaagatctccaaagcacagatccaagtctagggaaagaaaaagaaaaagatcaagctccagggataaccgaaagacagttagagctcgaagtcgaaccccaagtcgtcggagtcggagtcatactccaagtcgtcgacgaaggtctagatctgtgggtagaagaaggagctttagcatttccccaagccgccgcagccgcacccccagccgccgcagccgcacccccagccgccgcagccgcacccccagccgccgcagccgcacccccagccgccggagccgcacccctagccgtcggagccgcaccccaagccgccggagaagatcaagg

SEQ ID NO: 99933 - DNA, 37 bp, Homo sapiens
  chr21:35045296-35045333
  hypo
gaggcaccacgcctggcggaaacgatttaataagtgt

SEQ ID NO: 99934 - DNA, 82 bp, Homo sapiens
  chr21:35258841-35258923
  hypo
gacttggtgccaggattccttcggtttccctcctgagagatgaggctggctggcacaagacgaggctctgtctcccctggag

SEQ ID NO: 99935 - DNA, 79 bp, Homo sapiens
  chr21:35286344-35286423
  hypo
gtgctgggactacaggcgtgagccaccgcgcccagcccggtaccttgattttaatatcgtctcctgtaataacttcctg

SEQ ID NO: 99936 - DNA, 30 bp, Homo sapiens
  chr21:35498675-35498705
  hypo
agtcgcgtctcacatcgaggctttcttact

SEQ ID NO: 99937 - DNA, 31 bp, Homo sapiens; identical to SEQ ID NO: 33757
  chr21:35533044-35533075
  hypo

SEQ ID NO: 99938 - DNA, 31 bp, Homo sapiens
  chr21:35559282-35559313
  hypo
taggtgcaaggcacaacgctgggctgctacc

SEQ ID NO: 99939 - DNA, 30 bp, Homo sapiens
  chr21:35748395-35748425
  hypo
accgacgtcgccctccgaggcctgggcttc

SEQ ID NO: 99940 - DNA, 31 bp, Homo sapiens; identical to SEQ ID NO: 33758
  chr21:35938134-35938165
  hypo

SEQ ID NO: 99941 - DNA, 30 bp, Homo sapiens
  chr21:35954906-35954936
  hypo
ctggagagggcagagcgggccacgtcctca

SEQ ID NO: 99942 - DNA, 248 bp, Homo sapiens; identical to SEQ ID NO: 57618
  chr21:35986731-35986979
  hypo

SEQ ID NO: 99943 - DNA, 31 bp, Homo sapiens
  chr21:36026851-36026882
  hypo
tcttacgtcatgactgcgaggaattattact

SEQ ID NO: 99944 - DNA, 95 bp, Homo sapiens; identical to SEQ ID NO: 57620
  chr21:36041933-36042028
  hypo

SEQ ID NO: 99945 - DNA, 534 bp, Homo sapiens; identical to SEQ ID NO: 57621
  chr21:36042091-36042625
  hypo

SEQ ID NO: 99946 - DNA, 53 bp, Homo sapiens
  chr21:36073673-36073726
  hypo
ctcactaattgaggctcgttaaaaggcaccctgcactccgtaattgtctgctc

SEQ ID NO: 99947 - DNA, 1782 bp, Homo sapiens; identical to SEQ ID NO: 13236
  chr21:36160096-36161878
  hypo

SEQ ID NO: 99948 - DNA, 3167 bp, Homo sapiens; identical to SEQ ID NO: 57624
  chr21:36161931-36165098
  hypo

SEQ ID NO: 99949 - DNA, 163 bp, Homo sapiens; identical to SEQ ID NO: 13238
  chr21:36171596-36171759
  hypo

SEQ ID NO: 99950 - DNA, 204 bp, Homo sapiens; identical to SEQ ID NO: 13239
  chr21:36206694-36206898
  hypo

SEQ ID NO: 99951 - DNA, 78 bp, Homo sapiens
  chr21:36221022-36221100
  hypo
cgcccagccccctggttcacttttgaaacactgggctatgcctggcgagtagtgtccgagaggcgcgtgggacgtggc

SEQ ID NO: 99952 - DNA, 106 bp, Homo sapiens; identical to SEQ ID NO: 13240
  chr21:36231769-36231875
  hypo

SEQ ID NO: 99953 - DNA, 43 bp, Homo sapiens
  chr21:36242108-36242151
  hypo
gtgccagcctgtgtaacccagcgacaggacaaagggattattc

SEQ ID NO: 99954 - DNA, 180 bp, Homo sapiens; identical to SEQ ID NO: 13241
  chr21:36252844-36253024
  hypo

SEQ ID NO: 99955 - DNA, 267 bp, Homo sapiens; identical to SEQ ID NO: 13242
  chr21:36259126-36259393
  hypo

SEQ ID NO: 99956 - DNA, 40 bp, Homo sapiens; identical to SEQ ID NO: 13244
  chr21:36265220-36265260
  hypo

SEQ ID NO: 99957 - DNA, 30 bp, Homo sapiens; identical to SEQ ID NO: 57633
  chr21:36357845-36357875
  hypo

SEQ ID NO: 99958 - DNA, 30 bp, Homo sapiens
  chr21:36402117-36402147
  hypo
aagtcctacaaccacgatcctggtaatagt

SEQ ID NO: 99959 - DNA, 118 bp, Homo sapiens; identical to SEQ ID NO: 13245
  chr21:36421137-36421255
  hypo

SEQ ID NO: 99960 - DNA, 132 bp, Homo sapiens; identical to SEQ ID NO: 13246
  chr21:36421463-36421595
  hypo

SEQ ID NO: 99961 - DNA, 183 bp, Homo sapiens; identical to SEQ ID NO: 33771
  chr21:36437234-36437417
  hypo

SEQ ID NO: 99962 - DNA, 135 bp, Homo sapiens
  chr21:37259304-37259439
  hypo
tctggcgtctgggtcgttgtgtcctgacaaccgctcaggtaaccgtttcctagacagcgggtgcggctactttagccctgagcgtgctctgcggctgcctgcgggtctcagctagtgtccgacccctctcttcgc

SEQ ID NO: 99963 - DNA, 68 bp, Homo sapiens; identical to SEQ ID NO: 33773
  chr21:37405206-37405274
  hypo

SEQ ID NO: 99964 - DNA, 184 bp, Homo sapiens
  chr21:37411501-37411685
  hypo
agttacctagcaaagaaagcacgataatccgcatgctagactcaaagaaacactcagcaaagttgaagcactcaccctgagtgacagagctagtgaggcagaaagaactgaaacgccccagccagagccccacacgtgctttctccacacccactcagtaagcggtaactcaaatgcaagaaaa

SEQ ID NO: 99965 - DNA, 33 bp, Homo sapiens
  chr21:37413158-37413191
  hypo
tctaaagagtaaacagctggccgggcgcagtgc

SEQ ID NO: 99966 - DNA, 178 bp, Homo sapiens
  chr21:37417894-37418072
  hypo
atgattcagcaggtccaggtacggagcgagtgcacaggtgtccggctctgcagaaaggcattcccgctgcctgggcctcaggtacacggctctggtgttgacggtgcaccaagcccacagcagggcactgtagctgaagatgctgtcaacagcctccgcaaacagaggctgcagagaa

SEQ ID NO: 99967 - DNA, 19 bp, Homo sapiens
  chr21:37430872-37430891
  hypo
gagcatgctggctcacgcc

SEQ ID NO: 99968 - DNA, 139 bp, Homo sapiens
  chr21:37431010-37431149
  hypo
gtctcagaaaaaagaaagaaagaaagaaaagctacgtatgaacaaacaagcaatcacaaaaggatttcttttttcattactggtactaaaagaaaaaccatacctcctcttgattcagaacttccgcagagttttcgtc

SEQ ID NO: 99969 - DNA, 30 bp, Homo sapiens; identical to SEQ ID NO: 33774
  chr21:37504740-37504770
  hypo

SEQ ID NO: 99970 - DNA, 43 bp, Homo sapiens
  chr21:37514436-37514479
  hypo
atgcaatccatgggccaggtgcggtgactcacgcctgtaatcc

SEQ ID NO: 99971 - DNA, 31 bp, Homo sapiens
  chr21:37527927-37527958
  hypo
cacaagtggcccacttcgggttggctggagc

SEQ ID NO: 99972 - DNA, 374 bp, Homo sapiens; identical to SEQ ID NO: 57637
  chr21:37528251-37528625
  hypo

SEQ ID NO: 99973 - DNA, 276 bp, Homo sapiens
  chr21:37582266-37582542
  hypo
ggtggaaaaatggatgaaaagcgcctcgcacaatgatcaggacacaggcgaccccgatgaacacgtccctttcctgccccgtcagtatcccctttgtctctttctctccatcgtctcagccctgctctggcttcttgtctcttactcttggatctgactggtttcttcccatcccaaatctgctaagagatttgggatggggagaaagcctagctttgctcatatgtatcctgtgctttaaaaatgtctgacttcccggctgggtgcggtgactca

SEQ ID NO: 99974 - DNA, 58 bp, Homo sapiens
  chr21:37612231-37612289
  hypo
ctcaagcaggagaactcggccggtgagcagcctgcacaggacccgagggtgagggagg

SEQ ID NO: 99975 - DNA, 341 bp, Homo sapiens
  chr21:37617446-37617787
  hypo
agccagttcaccacagtggaccgtgaagccatttgggccgaagtggagaaggagcccgagaagtacccgctgcgaggcgagctgagcgaggaagagctgccctactacgtggagcttccagacaggacggcccacggcgccccggacagcagcgagcacaccgagtctgcagatacaagctcctgccacacggacagcgagaacacgtcctccttctcctccccttcccacgacctgcaggagctgagcaacgaagagaactgctgtgcacccatccccatggggggcagggcgtaccccaagcgctcggccctgctggcggccttccagtcagaaagctt

SEQ ID NO: 99976 - DNA, 178 bp, Homo sapiens
  chr21:37618033-37618211
  hypo
aaccaaccctaaggaattcatcgaggctgtgtccaggactagcatggataccagctccaccgcgcacctcaacctcatctccaacctcctcgctcgccaccaggaggccctcattggccagagtttctacggaaagctccagacccaggtccccaacgtgtgcccccactctctgctc

SEQ ID NO: 99977 - DNA, 30 bp, Homo sapiens
  chr21:37668466-37668496
  hypo
aaaaaagtcctacacgcgtgatgtacgtct

SEQ ID NO: 99978 - DNA, 24 bp, Homo sapiens
  chr21:37699404-37699428
  hypo
cgcgcctggcctcaaatttaaatt

SEQ ID NO: 99979 - DNA, 90 bp, Homo sapiens
  chr21:37718543-37718633
  hypo
tgaactcaagtgatccacccacgtcggcttctcagcgtgctcagattacaggcctgaggcaatgcgctcggcctagtatattaattttgt

SEQ ID NO: 99980 - DNA, 134 bp, Homo sapiens
  chr21:37750030-37750164
  hypo
caggtccagttggtgacgctgcctgtgatctcagacgcttgattcttgctgtcacatgagacgtcttaaacttgggtcatacatcattgaggaatcatttaagttctcacctctggctgcgtagtagaattact

SEQ ID NO: 99981 - DNA, 30 bp, Homo sapiens; identical to SEQ ID NO: 33778
  chr21:37756382-37756412
  hypo

SEQ ID NO: 99982 - DNA, 31 bp, Homo sapiens
  chr21:37758569-37758600
  hypo
ggcagagatagacatccgggaacactgcttg

SEQ ID NO: 99983 - DNA, 207 bp, Homo sapiens; identical to SEQ ID NO: 33779
  chr21:37775028-37775235
  hypo

SEQ ID NO: 99984 - DNA, 137 bp, Homo sapiens
  chr21:37780708-37780845
  hypo
ctgggcagctgaatctagtcacggtgcttcaatcgaggaattgcctggaggctcaacggtgccctatggcaaaggctcactatgttctcctcgcccaagatcagaaccaggtccccggggattgcccacaggtaggt

SEQ ID NO: 99985 - DNA, 20 bp, Homo sapiens
  chr21:37781582-37781602
  hypo
gccaccgcgccctgccaaaa

SEQ ID NO: 99986 - DNA, 19 bp, Homo sapiens
  chr21:37788316-37788335
  hypo
gctgcgattacaggcgtga

SEQ ID NO: 99987 - DNA, 36 bp, Homo sapiens
  chr21:37795934-37795970
  hypo
ttttttttttttgagacggagtcttgctctgttgcc

SEQ ID NO: 99988 - DNA, 31 bp, Homo sapiens
  chr21:37811705-37811736
  hypo
atcttaaactggtttacgcacagggcaatgt

SEQ ID NO: 99989 - DNA, 220 bp, Homo sapiens
  chr21:37833509-37833729
  hypo
ggccaatctcaaacttcatgccgctgggcagcagcgggttgtagaagttctgcaccacgtcgttggtggtccaggagacggccaccatgcacaggaggccggccaggatgaagagggtgccgccgaggatggcaaaggtggtcttggcgggtgtgcccttggcgcagcgcgtgcacttcatcccgatgacggcgcaggcgcaggctatgcccgagagcag

SEQ ID NO: 99990 - DNA, 207 bp, Homo sapiens
  chr21:37847274-37847481
  hypo
gatgggggaggaggtgcgggaggcttgagcacagaggaggagaccatggtcatccaggagaatgaccgcaggcctggaccaagtcaaggggtcaagtgctagtcagtgccgggtgcaggtggggcaagtggtcctgcgggtaccatagactatcacgccggacagcctttcccagcaccatcaactgcactgcgagggtcccaagtg

SEQ ID NO: 99991 - DNA, 31 bp, Homo sapiens
  chr21:37848303-37848334
  hypo
tttaaagagtccaaaacggtttaacagagag

SEQ ID NO: 99992 - DNA, 80 bp, Homo sapiens
  chr21:37855512-37855592
  hypo
gcatcagctccttgcacggccaggtggtgttgtttctgactcggggtctgcatctctctctgcgccgctgggttcaggag

SEQ ID NO: 99993 - DNA, 31 bp, Homo sapiens
  chr21:37855836-37855867
  hypo
cctcataggaaccatgcggtgaaggaaccag

SEQ ID NO: 99994 - DNA, 31 bp, Homo sapiens
  chr21:38016439-38016470
  hypo
cccggaggtgcttccccgcctcccaagacag

SEQ ID NO: 99995 - DNA, 31 bp, Homo sapiens
  chr21:38040958-38040989
  hypo
cacggctgaagcacagcgctggcaaagggga

SEQ ID NO: 99996 - DNA, 20 bp, Homo sapiens
  chr21:38089993-38090013
  hypo
tgcctcggcctaccaaagtg

SEQ ID NO: 99997 - DNA, 30 bp, Homo sapiens
  chr21:38118323-38118353
  hypo
tatgtgccccaggccgggctcagtggctca

SEQ ID NO: 99998 - DNA, 31 bp, Homo sapiens; identical to SEQ ID NO: 33782
  chr21:38140416-38140447
  hypo

SEQ ID NO: 99999 - DNA, 88 bp, Homo sapiens
  chr21:38179972-38180060
  hypo
ctggcactttatgttcatcaccgcgtttcatcctcaccacgaccctgttctgtggatccggctggacgcatccagaggtgggagtccc

SEQ ID NO: 100000 - DNA, 28 bp, Homo sapiens
  chr21:38209182-38209210
  hypo
acatataaaaactgcacggcggctgggc

SEQ ID NO: 100001 - DNA, 74 bp, Homo sapiens
  chr21:38248310-38248384
  hypo
tagcctcagccttgcacggaggcagcacccgtgccagggcatggagctgcctgccccaccgcagcagccactgt

SEQ ID NO: 100002 - DNA, 166 bp, Homo sapiens
  chr21:38299535-38299701
  hypo
gcttcctcttggtatcgtgcacagtgacactgatggagccacacatgactgggttttatagtgggaatcacacgctaccatggtgtctgggtgtcgatgaaggtctccgagcacatccttcccaaatgccaagggctgaccgtcgctgaggcgagtgttttttctc

SEQ ID NO: 100003 - DNA, 199 bp, Homo sapiens; identical to SEQ ID NO: 57663
  chr21:38362191-38362390
  hypo

SEQ ID NO: 100004 - DNA, 31 bp, Homo sapiens
  chr21:38366029-38366060
  hypo
ttgttttaaggcaccccgtttgtagtacttt

SEQ ID NO: 100005 - DNA, 19 bp, Homo sapiens
  chr21:38385170-38385189
  hypo
ttttttttttttgagacgg

SEQ ID NO: 100006 - DNA, 27 bp, Homo sapiens
  chr21:38419290-38419317
  hypo
tccagctgaactggggcgagaagcctc

SEQ ID NO: 100007 - DNA, 74 bp, Homo sapiens; identical to SEQ ID NO: 33785
  chr21:38566695-38566769
  hypo

SEQ ID NO: 100008 - DNA, 183 bp, Homo sapiens
  chr21:38567962-38568145
  hypo
gtgttcctcacaggttcatcccgagttactccctgagtcttcaggcgacgatggccaagggcttgtgacttctgcaagcgacgtgactggaaaccacgcagcacttcacagggatcctagtgtgttctctgctggtgattccccaggggaggctccttctgcgctgttgccagggccaccccc

SEQ ID NO: 100009 - DNA, 31 bp, Homo sapiens
  chr21:38603337-38603368
  hypo
cacacccagggcagagcgcctctgatgagca

SEQ ID NO: 100010 - DNA, 143 bp, Homo sapiens; identical to SEQ ID NO: 33786
  chr21:38605996-38606139
  hypo

SEQ ID NO: 100011 - DNA, 33 bp, Homo sapiens; identical to SEQ ID NO: 33787
  chr21:38638500-38638533
  hypo

SEQ ID NO: 100012 - DNA, 30 bp, Homo sapiens
  chr21:38643303-38643333
  hypo
taaaccactacgctccgcattgaatcctgc

SEQ ID NO: 100013 - DNA, 121 bp, Homo sapiens
  chr21:38673106-38673227
  hypo
ggaggtaggaggtggccgatgcttgttggatattcaagagcatctgtattcacttttttataaattcattatggttaagagtggtcttttgtaggggtttggatttcgggagaaatcattc

SEQ ID NO: 100014 - DNA, 257 bp, Homo sapiens; identical to SEQ ID NO: 33789
  chr21:38823805-38824062
  hypo

SEQ ID NO: 100015 - DNA, 129 bp, Homo sapiens
  chr21:38832685-38832814
  hypo
gggtgggggagtcttgcggcgttcacatctcagaaatgttactgcgctatgagggagactttggcctctaatccactgttagccactagcctccagtcaaagttagagaaccaccggtcttcattcttt

SEQ ID NO: 100016 - DNA, 31 bp, Homo sapiens; identical to SEQ ID NO: 33790
  chr21:38893253-38893284
  hypo

SEQ ID NO: 100017 - DNA, 363 bp, Homo sapiens
  chr21:38918381-38918744
  hypo
cgtggatatgatgagcggttatgcgggctctgcttcttgccacctacttgcaggttgaaggatgtgcctattccacatcgctgatggggcatccgagctttccttggaggtgggcagctctttcggggttggtacccatcaggtgctgtggccagaactcagattcggagtctaaattcatactcacactctatacacctggattgagatcacagtattattattttcacaatcgaactgagcaaagatacggcagccactgaagactcactgtgaggtgcgtctaagggagaaaccatgggctgttgccgaagatctgggagaaaaagtgtggaaaaggcaaaaccgcgcctgggagctcct

SEQ ID NO: 100018 - DNA, 30 bp, Homo sapiens; identical to SEQ ID NO: 33791
  chr21:38935478-38935508
  hypo

SEQ ID NO: 100019 - DNA, 30 bp, Homo sapiens
  chr21:39205185-39205215
  hypo
agacaggtaggctgtcgttccaattctgtc

SEQ ID NO: 100020 - DNA, 30 bp, Homo sapiens; identical to SEQ ID NO: 57674
  chr21:39286762-39286792
  hypo

SEQ ID NO: 100021 - DNA, 435 bp, Homo sapiens; identical to SEQ ID NO: 13268
  chr21:39288790-39289225
  hypo

SEQ ID NO: 100022 - DNA, 30 bp, Homo sapiens
  chr21:39578727-39578757
  hypo
ataagtggaactgacggggtctaaaatgtc

SEQ ID NO: 100023 - DNA, 31 bp, Homo sapiens; identical to SEQ ID NO: 33793
  chr21:39654406-39654437
  hypo

SEQ ID NO: 100024 - DNA, 143 bp, Homo sapiens; identical to SEQ ID NO: 33794
  chr21:39726164-39726307
  hypo

SEQ ID NO: 100025 - DNA, 31 bp, Homo sapiens
  chr21:39778090-39778121
  hypo
aaaaaaatcatcagtgcgcagaacctgaaaa

SEQ ID NO: 100026 - DNA, 62 bp, Homo sapiens
  chr21:39800301-39800363
  hypo
ccgggaaaaagttcccgcaaacagcttggtatgtcacctgcaccaagcgctgcccagcatag

SEQ ID NO: 100027 - DNA, 31 bp, Homo sapiens
  chr21:39959230-39959261
  hypo
ggatgggggagggggacggtgcagtagatca

SEQ ID NO: 100028 - DNA, 35 bp, Homo sapiens; identical to SEQ ID NO: 57677
  chr21:40032285-40032320
  hypo

SEQ ID NO: 100029 - DNA, 157 bp, Homo sapiens; identical to SEQ ID NO: 13270
  chr21:40032367-40032524
  hypo

SEQ ID NO: 100030 - DNA, 235 bp, Homo sapiens; identical to SEQ ID NO: 13271
  chr21:40032679-40032914
  hypo

SEQ ID NO: 100031 - DNA, 459 bp, Homo sapiens; identical to SEQ ID NO: 13272
  chr21:40032973-40033432
  hypo

SEQ ID NO: 100032 - DNA, 7 bp, Homo sapiens
  chr21:40047309-40047316
  hypo
catgacc

SEQ ID NO: 100033 - DNA, 13 bp, Homo sapiens
  chr21:40047326-40047339
  hypo
cctggacaatctt

SEQ ID NO: 100034 - DNA, 32 bp, Homo sapiens
  chr21:40047613-40047645
  hypo
gaaaaatgtacacaccgcgtctctcaactgct

SEQ ID NO: 100035 - DNA, 31 bp, Homo sapiens
  chr21:40049305-40049336
  hypo
gagtcacagaaagttcgcgagctttggccga

SEQ ID NO: 100036 - DNA, 182 bp, Homo sapiens
  chr21:40056139-40056321
  hypo
cttcttatccgaagaccgtagtcatcgttcctgtcaccttggctctagaataaagcccacaccctcatccctgacttctgtagactaatttaaaaagattaagtaacgttccttgttgtcgctatcaggatgtgaacttggggtgcagccaccccagaagggctgtgcggaatggtattgct

SEQ ID NO: 100037 - DNA, 87 bp, Homo sapiens; identical to SEQ ID NO: 33799
  chr21:40117699-40117786
  hypo

SEQ ID NO: 100038 - DNA, 31 bp, Homo sapiens; identical to SEQ ID NO: 33800
  chr21:40128612-40128643
  hypo

SEQ ID NO: 100039 - DNA, 182 bp, Homo sapiens
  chr21:40146603-40146785
  hypo
ctggcaggccactccccgccccaggccccagccagagcatcccaggctccatcccaggccccatcctaggctctgtggtacaggcagggggaggatggctagtacccttcaccccgagggcatggccgcctttctgacatcacctgggagggggcaccccggctggccgaggtttaaggtag

SEQ ID NO: 100040 - DNA, 1064 bp, Homo sapiens; identical to SEQ ID NO: 57685
  chr21:40177484-40178548
  hypo

SEQ ID NO: 100041 - DNA, 286 bp, Homo sapiens
  chr21:40189391-40189677
  hypo
cttaagtggctcacacgatcttccataggtcagcactgttagtgctagtccaggcaattcttagagcaaggagcagaacgaagtgagctgattaccgcagtcaccagtaatgttggtttagtgtagcaaacaagaggcggcaggcacagagtgcgtgaaaagcaatttgtaaactggctctgaacttgggagcttaaagagctgtcatggaatctgggtcctttcttctggttgctgatactggggagggcacagggtctggccaggccagcgagggaggggtcct

SEQ ID NO: 100042 - DNA, 139 bp, Homo sapiens; identical to SEQ ID NO: 33803
  chr21:40191658-40191797
  hypo

SEQ ID NO: 100043 - DNA, 44 bp, Homo sapiens
  chr21:40208389-40208433
  hypo
gtcagaagaagattatcggccgggcgcggtggctcatgtctgta

SEQ ID NO: 100044 - DNA, 45 bp, Homo sapiens; identical to SEQ ID NO: 33805
  chr21:40278581-40278626
  hypo

SEQ ID NO: 100045 - DNA, 31 bp, Homo sapiens
  chr21:40296633-40296664
  hypo
ttaatgggtgccagtccgggcccaaagggtt

SEQ ID NO: 100046 - DNA, 733 bp, Homo sapiens
  chr21:40316225-40316958
  hypo
ccctcgcagcctgcccgtgtctccgcctcctccccaaggtctcccctcccgcctgctcctccaacagatgggcccctggctttgcactactcctcttttcccttcctcaggactttatttttattttattttatttatttttattccggtaccacctctcagtgagacccactgtcaccccatcagcgccctctccaccctcccctgctttacttctccttatcatccagcatgcatctattcaccaatatattatttatcgcctggcttttctactaggcaaatgattctcaactggcggtgacatcgctcctcacttctcccgggggacagtgggcagtgcccggggtcacttttgattgtcacaattggaggaggcccctgacatctggtgagtggaggccagggatgctgcttaacatccttcaatgcacaggaaggcccagccacaaagcacgatccagcccaaaacgccggcagtgcctcggcagaaatgtcacctcctacaccatcaactctgtgagagcggggatttgtttgtcacgactgcgtcctggtgcccagaccaaagcctgcacatcacggtgctccgtggatgggtttgaaggagcggacctggaccagagcgtgctgtaggccacagtcagtgccggcccacccagaactggccactcagcggttacccatctctatcgctttctttcccagagtcggaaacttggaaccactttca

SEQ ID NO: 100047 - DNA, 133 bp, Homo sapiens
  chr21:40331565-40331698
  hypo
cccagctgtggcactttattacggcagcacgggaaatgcatacagcctccaaaagagaacgaagcccttctgagagcttgattccagacatgcaagaccctgagcccaccgcgcctgggtttctgcctacaga

SEQ ID NO: 100048 - DNA, 17 bp, Homo sapiens
  chr21:40335201-40335218
  hypo
ctgaagtgtagtggcac

SEQ ID NO: 100049 - DNA, 56 bp, Homo sapiens
  chr21:40340268-40340324
  hypo
ccttcttggtagaaatcgcctctctgggacttcatgacagccgcctttcctatggc

SEQ ID NO: 100050 - DNA, 114 bp, Homo sapiens
  chr21:40348677-40348791
  hypo
ccaacctgaaaacaacgtaggcatgccaatggtgcagtgggggttcaagggcgtgattgggaaagtgttatggaagtgtctcagctagactttgatgaacgcatgggattcgtg

SEQ ID NO: 100051 - DNA, 31 bp, Homo sapiens; identical to SEQ ID NO: 33808
  chr21:40352340-40352371
  hypo

SEQ ID NO: 100052 - DNA, 30 bp, Homo sapiens
  chr21:40364052-40364082
  hypo
gaaggaaaggtgtctcggcagagtgaacag

SEQ ID NO: 100053 - DNA, 31 bp, Homo sapiens
  chr21:40366395-40366426
  hypo
atgtgaaaagaaaaggcgccccacaggcttt

SEQ ID NO: 100054 - DNA, 31 bp, Homo sapiens
  chr21:40425094-40425125
  hypo
cccaaggtaatgcagacgtgaaaggctgaac

SEQ ID NO: 100055 - DNA, 41 bp, Homo sapiens
  chr21:40425339-40425380
  hypo
taagaccactcagactcggtcttggccggctttcccagccc

SEQ ID NO: 100056 - DNA, 31 bp, Homo sapiens
  chr21:40431170-40431201
  hypo
agtagactttctcccccgcaagtttctgcca

SEQ ID NO: 100057 - DNA, 55 bp, Homo sapiens
  chr21:40433690-40433745
  hypo
gggcgtcagtgtgacccgctctgagactccccagacctggcgtctcatttgacct

SEQ ID NO: 100058 - DNA, 202 bp, Homo sapiens
  chr21:40434518-40434720
  hypo
aaaggccagcggggacgcttgtaggcagctaacacagtgagagcagaaacaagcactcagccctccgggagctgccagcttcacgggaacgagatcctctccaggggatctggagcggctgcgtgttccgcacattaatcctctccatgagacctggtcacctttctccccctgagttcctgagcatcgcagctggggaatc

SEQ ID NO: 100059 - DNA, 27 bp, Homo sapiens
  chr21:40451977-40452004
  hypo
atggtaagagtaagtactggtcgggcg

SEQ ID NO: 100060 - DNA, 34 bp, Homo sapiens
  chr21:40453330-40453364
  hypo
caagtgcggtggctcacgtctataatcccagcac

SEQ ID NO: 100061 - DNA, 47 bp, Homo sapiens
  chr21:40463108-40463155
  hypo
ctctctacatcagcttcgtccctgcaaaacagcggtaacacatctgg

SEQ ID NO: 100062 - DNA, 230 bp, Homo sapiens
  chr21:40465399-40465629
  hypo
actgctgtctgatgctcgccccacagtggaaggagatgctaaattccgttacgcattagaggtcagtgaaaaggaagatgcagtttgttcccgtccaggcacaaggactcttgaatttgtccatagttaagaacggctcatccaggagcagagcgagaggccgggctgcgcgtcctcatctcctctcccagccttcgcatcctcctggctgcctcgcgtttcctccacgg

SEQ ID NO: 100063 - DNA, 137 bp, Homo sapiens
  chr21:40479890-40480027
  hypo
tgggtggtgaagaaacgaagaggatgaaggtggggccgcccacggggacccagccccaggggcgagtgctgttgatggtgtggttttccttcagaatcctggcaccaaggtgctgcggaggccgaagcaagtacagc

SEQ ID NO: 100064 - DNA, 30 bp, Homo sapiens; identical to SEQ ID NO: 33810
  chr21:40480267-40480297
  hypo

SEQ ID NO: 100065 - DNA, 149 bp, Homo sapiens; identical to SEQ ID NO: 33811
  chr21:40480500-40480649
  hypo

SEQ ID NO: 100066 - DNA, 63 bp, Homo sapiens
  chr21:40488783-40488846
  hypo
atggaccctcagtaaacgcatgctgagtggacagcacatggtctaggccgggaaggggtgagg

SEQ ID NO: 100067 - DNA, 30 bp, Homo sapiens
  chr21:40489849-40489879
  hypo
gatgtccacacaaaacggaaaacaagtacg

SEQ ID NO: 100068 - DNA, 84 bp, Homo sapiens
  chr21:40490343-40490427
  hypo
ccaaccacctcccaccaagccccgcctccgacagtggggattgcaattcaactcgagatttacaggagacgacatccaaactat

SEQ ID NO: 100069 - DNA, 349 bp, Homo sapiens; identical to SEQ ID NO: 33813
  chr21:40506195-40506544
  hypo

SEQ ID NO: 100070 - DNA, 162 bp, Homo sapiens
  chr21:40510521-40510683
  hypo
ttttcactgttccccacgagtaagtaagtgaacggcaaatgtgcaagggagttaaagtgtaaattcctcccggcccatataattgacttgctgaatttttgcagtaacaaaagactgctgttcaaaacatttccagtgacattttaagactacctataaaga

SEQ ID NO: 100071 - DNA, 42 bp, Homo sapiens
  chr21:40510982-40511024
  hypo
aaaaagaaaagaaaagttcgcgttggtcatttttgtgctgtt

SEQ ID NO: 100072 - DNA, 202 bp, Homo sapiens
  chr21:40525157-40525359
  hypo
cctctgtggctggagacgtccaagccaggtagtgtagattctcactattcatcatagtgaccgtgtagaagtcaccacggacactgaattaggaaacactgaacctctgctccacaggaaaatatgtgcgtatattcagtatacacatatctcacacacatagagtcaagattaaatcctaagacaacgcacccaagtagat

SEQ ID NO: 100073 - DNA, 28 bp, Homo sapiens
  chr21:40646951-40646979
  hypo
cagagctagactccgtctcaaaaaaaaa

SEQ ID NO: 100074 - DNA, 35 bp, Homo sapiens; identical to SEQ ID NO: 33815
  chr21:40697449-40697484
  hypo

SEQ ID NO: 100075 - DNA, 102 bp, Homo sapiens; identical to SEQ ID NO: 57690
  chr21:40751584-40751686
  hypo

SEQ ID NO: 100076 - DNA, 467 bp, Homo sapiens
  chr21:40762316-40762783
  hypo
gggctgtctgccacccgggggttggggtatggagtgtatgtgggagtttaaggactttgtcatggtggggctagtttgtaggtgtttctcagcaggatgaatctcccagtgttctccagcaacagcctttgctctttatcagtcctgggaacgttcacggccgcagtttgcattcagtcctgcagggacgcacacaactggctgggtcacagagtggtcagggcatagacagaaagtagcgggggactggggaaccctcctgtgacccgtgttggaaggtgctgatccccgttgtccgccctgccagatgtccagggtgctgcagaaggacgcggagcaggagtcacagatgagagcggagatccaggacatgaagcaggagctctccacagtcaacatgatggacgagtttgccagatatgccaggctggaaagaaagatcaacaagatgacggataagctcaaaa

SEQ ID NO: 100077 - DNA, 194 bp, Homo sapiens
  chr21:40820652-40820846
  hypo
gatgaggggttagttacgtatttttgcattattaactgctattaagtaagcagaaaccagcttcgaaaaagcatagccaacacaacttcagctggaaaatttccaactgaccccgatagactgcctgatgccagccaatggaaacattccctccctcagtatgcgcccccacccccaaacgccttgcagaccta

SEQ ID NO: 100078 - DNA, 90 bp, Homo sapiens; identical to SEQ ID NO: 33817
  chr21:40904966-40905056
  hypo

SEQ ID NO: 100079 - DNA, 71 bp, Homo sapiens; identical to SEQ ID NO: 13282
  chr21:40941232-40941303
  hypo

SEQ ID NO: 100080 - DNA, 31 bp, Homo sapiens
  chr21:40976657-40976688
  hypo
attctgcttcccagtccgccacttcctagtg

SEQ ID NO: 100081 - DNA, 31 bp, Homo sapiens
  chr21:41040611-41040642
  hypo
gcatacccttcacccccgggctctgttcgct

SEQ ID NO: 100082 - DNA, 31 bp, Homo sapiens
  chr21:41137924-41137955
  hypo
tttgcgatttatttgtcgcctccttcctccc

SEQ ID NO: 100083 - DNA, 19 bp, Homo sapiens
  chr21:41654219-41654238
  hypo
gataggtaatctaggccgg

SEQ ID NO: 100084 - DNA, 31 bp, Homo sapiens; identical to SEQ ID NO: 33819
  chr21:41753050-41753081
  hypo

SEQ ID NO: 100085 - DNA, 31 bp, Homo sapiens
  chr21:41931090-41931121
  hypo
tccagttaaagtaggccgggcacggtggctc

SEQ ID NO: 100086 - DNA, 103 bp, Homo sapiens; identical to SEQ ID NO: 57696
  chr21:42539439-42539542
  hypo

SEQ ID NO: 100087 - DNA, 315 bp, Homo sapiens; identical to SEQ ID NO: 57697
  chr21:42539583-42539898
  hypo

SEQ ID NO: 100088 - DNA, 612 bp, Homo sapiens; identical to SEQ ID NO: 57698
  chr21:42540273-42540885
  hypo

SEQ ID NO: 100089 - DNA, 212 bp, Homo sapiens; identical to SEQ ID NO: 33822
  chr21:42572213-42572425
  hypo

SEQ ID NO: 100090 - DNA, 173 bp, Homo sapiens
  chr21:42582371-42582544
  hypo
aggcaagggttgagccgcgtactctacacttagagaacggattctgttctcatggcacagcgtcttctttttctccagcagctaaaacactcaccggcccggagatcagccagattcaaatgactgcagctcatccgcccacagacgcagactgaccccgttccacagccatg

SEQ ID NO: 100091 - DNA, 40 bp, Homo sapiens; identical to SEQ ID NO: 33823
  chr21:42585676-42585716
  hypo

SEQ ID NO: 100092 - DNA, 21 bp, Homo sapiens
  chr21:42591071-42591092
  hypo
gccaccgcgcccagccaattc

SEQ ID NO: 100093 - DNA, 95 bp, Homo sapiens; identical to SEQ ID NO: 33824
  chr21:42593385-42593480
  hypo

SEQ ID NO: 100094 - DNA, 214 bp, Homo sapiens; identical to SEQ ID NO: 33825
  chr21:42593779-42593993
  hypo

SEQ ID NO: 100095 - DNA, 44 bp, Homo sapiens; identical to SEQ ID NO: 33826
  chr21:42596857-42596901
  hypo

SEQ ID NO: 100096 - DNA, 181 bp, Homo sapiens; identical to SEQ ID NO: 33827
  chr21:42608631-42608812
  hypo

SEQ ID NO: 100097 - DNA, 86 bp, Homo sapiens; identical to SEQ ID NO: 33828
  chr21:42609013-42609099
  hypo

SEQ ID NO: 100098 - DNA, 86 bp, Homo sapiens
  chr21:42609398-42609484
  hypo
aaataaaatgaatacaatatgcttttcttttctttctccaggtctagcacataccgctccaagggctttgacgtcacagtgaagta

SEQ ID NO: 100099 - DNA, 277 bp, Homo sapiens
  chr21:42613645-42613922
  hypo
aaacaccaggaatgtctgtggcgcgtggcgtctacactgggtgacccatgtctacactgtgagtcctaagcgggtgcccctctctgtcgccctcccgcagccatcaagttctctggagaccttcttcgactccctggtgacacaagcaaacatccccaacgttttctccatgcagatgtgtggagccggcttgcccgttgctggatctgggaccaacggaggtagtcttgtgggtatcttttagtcttaaaggggcgaaaaatcacagatggatggg

SEQ ID NO: 100100 - DNA, 30 bp, Homo sapiens
  chr21:42614166-42614196
  hypo
aggagcggtggggggcgtggtgagtggacc

SEQ ID NO: 100101 - DNA, 312 bp, Homo sapiens; identical to SEQ ID NO: 33830
  chr21:42617796-42618108
  hypo

SEQ ID NO: 100102 - DNA, 253 bp, Homo sapiens
  chr21:42629053-42629306
  hypo
gtttgtttgctctctcctctccgacaaacagctttacattcagcccatgatgggggccggcctgaattatgaatgttaccgattcggcatttccccatccacaaatgcgctggtgatcggtgccacggtgatggagggcttctacgtcatcttcgacagagcccagaagagggtgggcttcgcagcgagcccctgtgcaggtgagcgattctggcatcgaacagggatccccgacaagagtcctttatgtaaa

SEQ ID NO: 100103 - DNA, 308 bp, Homo sapiens
  chr21:42676098-42676406
  hypo
ctcatagactggattcgcgactgcgctgttcccgtgatccactgcgcctgcgcgggcgcctggctgggctcggcgggcatggctggggcaccctggcgccatctttttccaccgtgcgaaggcaggagcccgagactgggtgagaggacgcggggctggcgtggggaggggaaggatggacggggcaggacgctgccgcctgcatctgggaccctgagcagcccgagggagtcgcccccgaagggccccaggttgcctgcaccggcggtttcccacgtgcccaggcacctcccgttgcggctgcgcgt

SEQ ID NO: 100104 - DNA, 43 bp, Homo sapiens
  chr21:42700240-42700283
  hypo
caaatgctatattcaacgtgttttcaggcgaatacctaggtaa

SEQ ID NO: 100105 - DNA, 184 bp, Homo sapiens
  chr21:42710364-42710548
  hypo
cctacaggttactcagcggaggtggcagaagcaagtacgccaaaatctgctttgaggataacctgtaagtaccagcgtttagaaggaaaataaagcgatcctactgattcttgccccttccctgaggctgaccaagcagcagttctgcccacaggagagaaccatatgtcgttggtctcaggca

SEQ ID NO: 100106 - DNA, 31 bp, Homo sapiens
  chr21:42722012-42722043
  hypo
cacacaatagtgaagccggggcttacggtcc

SEQ ID NO: 100107 - DNA, 181 bp, Homo sapiens; identical to SEQ ID NO: 33832
  chr21:42780051-42780232
  hypo

SEQ ID NO: 100108 - DNA, 121 bp, Homo sapiens
  chr21:42896356-42896477
  hypo
acaagtctttataatcataaaataagctttttgatccttgtacatttcttttttccagctaaaatacatgcaagtaactttttaaaaataggttaagccggctgggcgtggtggctcacgc

SEQ ID NO: 100109 - DNA, 31 bp, Homo sapiens
  chr21:42896753-42896784
  hypo
aataagttaagccaaccgggcaatctcggat

SEQ ID NO: 100110 - DNA, 31 bp, Homo sapiens; identical to SEQ ID NO: 33833
  chr21:42953696-42953727
  hypo

SEQ ID NO: 100111 - DNA, 165 bp, Homo sapiens; identical to SEQ ID NO: 33834
  chr21:43021069-43021234
  hypo

SEQ ID NO: 100112 - DNA, 141 bp, Homo sapiens
  chr21:43026398-43026539
  hypo
acctgagtagggtgggcgctaagtccaaagactccggagaagcgacagacacagagacaggagaaaggcacgtgaaggtggaggcagagactgcagtgaggcagcccacgagccagggattacaggcgtgagccaccgcgc

SEQ ID NO: 100113 - DNA, 252 bp, Homo sapiens
  chr21:43033580-43033832
  hypo
catccattccgcacacgtgccttattgaatccctgctatgaccaggcacagggttagatactccatggagaccagaccagtcttagcctctgcactgatgaactcaacccagaagacacacgaaaagataagccacggtgtgacgggcggacgacagagcctgcgccgagacacgggcacttcagcttgatatgtggagagtgtcggctgcaaacctccctggtctctgccgccagacgcatgccaagatgg

SEQ ID NO: 100114 - DNA, 30 bp, Homo sapiens
  chr21:43034032-43034062
  hypo
cgatgggaactgcaacggagcagaggccac

SEQ ID NO: 100115 - DNA, 23 bp, Homo sapiens
  chr21:43038245-43038268
  hypo
cgggcgcggtggcccacgcctgt

SEQ ID NO: 100116 - DNA, 88 bp, Homo sapiens; identical to SEQ ID NO: 57704
  chr21:43067057-43067145
  hypo

SEQ ID NO: 100117 - DNA, 30 bp, Homo sapiens
  chr21:43083099-43083129
  hypo
tgcagctgctggggacggggcatggcagcc

SEQ ID NO: 100118 - DNA, 110 bp, Homo sapiens; identical to SEQ ID NO: 33836
  chr21:43088943-43089053
  hypo

SEQ ID NO: 100119 - DNA, 63 bp, Homo sapiens; identical to SEQ ID NO: 33837
  chr21:43090565-43090628
  hypo

SEQ ID NO: 100120 - DNA, 31 bp, Homo sapiens
  chr21:43098621-43098652
  hypo
ggctgtgagctctgggcgtttgcttccttcc

SEQ ID NO: 100121 - DNA, 30 bp, Homo sapiens
  chr21:43101935-43101965
  hypo
tcctcagtttacctccgtttgcactaacac

SEQ ID NO: 100122 - DNA, 31 bp, Homo sapiens; identical to SEQ ID NO: 33838
  chr21:43102335-43102366
  hypo

SEQ ID NO: 100123 - DNA, 194 bp, Homo sapiens
  chr21:43102604-43102798
  hypo
gcagcgctccagggcacgggctctgggccccaactaccttggcccaagctccagcctcgccgagcagctgaggcaagtcctttcacctcgtggtgcctctgattccttatctgcaaaatgggtacaacctctgactcagaaggctgagaggttttgtaggtctctcaccctgcctggcacgggcacacccatga

SEQ ID NO: 100124 - DNA, 30 bp, Homo sapiens
  chr21:43108240-43108270
  hypo
aagaacgtccaatgccgcaggacgtcaagg

SEQ ID NO: 100125 - DNA, 255 bp, Homo sapiens
  chr21:43109375-43109630
  hypo
accgggtcaccctgcacgggccctcgtcaccgggtcatcccccacgggccctcgtcaccgggtcaccccgcatgggccctggtcaccgggtcaccctgcacgggccctcgtcaccgggtcaccccgcacgggccctggtcaccgggtcaccccgcatgggccctggtcaccgggtcgccccccacgggccctcatcactgggtcgccctgcatgggccctcgtcaccgggtcatcccccacgggccctggtcacc

SEQ ID NO: 100126 - DNA, 31 bp, Homo sapiens
  chr21:43112993-43113024
  hypo
ttacatggacaaaagacggataaacaggaga

SEQ ID NO: 100127 - DNA, 31 bp, Homo sapiens; identical to SEQ ID NO: 33840
  chr21:43143548-43143579
  hypo

SEQ ID NO: 100128 - DNA, 31 bp, Homo sapiens
  chr21:43154177-43154208
  hypo
tccatgcaccccttcccgttcaccgtgaaga

SEQ ID NO: 100129 - DNA, 31 bp, Homo sapiens
  chr21:43160665-43160696
  hypo
agagtggatgcttccacgcctggggcttcat

SEQ ID NO: 100130 - DNA, 1193 bp, Homo sapiens
  chr21:43160961-43162154
  hypo
gccccacgtggacccccggtctccgcaggcagccagctaggtcttgcttcgccgcaggagcgtggcggcggggccatggccgccctggaacttgaggctctgcaggttgatgtgggccccatgcctgagcagagtctccaccgtctgtgcgtgccggccctgggcggccaggtgcagcgcgctgagcccctgctcgtcgaacaggtcaatgacatcggcgctgaccaactcctccaccacctccgagtgcccgtgggcggcagccaggtgcagcgccgtctggttcaggggtccccgggccagcacatcggccttctcctcgacaagcagcttgacagtggccaggtgtccgttgcgggcagccaggtgcagagcggtgtagccgtctgaggtcatggcctccttgccagcgccccgatgcaggagcagcctggcagtgctcgtgtgccccgtctccgcggccacgtgcaggggtgtctgtgccagcaggctgcagacgttgacgtcggagcacaggtcgatgaggatgcgggccacgcggtagtgcccgcgctgtgcggccaggtgcaatggcgtcctcccatccagcgtctgggcgttcacactcacccccggctgcttggccagcagcttgacgatgggcaggtggccctgccaggcagcgtagtgcagtggcagccaggcatccttgccctgcaggctcacgtccacgcctcggcgcagcaggatgcgcacgatattctcctgcccgtgctggcaggccacgtgcatgggcgtccggccctcaaagtccacctcgttgaccgaggcgttcttctccaacagcagccgtgtgctagactcgtccccgttctgggctgcaaagtggagggctgtccactggtcctcatccttggcgttgacactgatcttccgcgccagcaggagctccacgacaccccgcaccctcctctccacggccatgtgcaacggggtggagcccctacggttgctcaggttggggttggcattgttgagcagcagccacttggcgcactcctcttgcccggcctccaccgccaggtgcagcaggctggcaccgctgtccagtgccaggtccacgtcctgcggctgcaggatcttcatcagtttgctggtgtccccggacacgatggcatccacaagcttcttcttctggacgtctgtggtgccca

SEQ ID NO: 100131 - DNA, 141 bp, Homo sapiens; identical to SEQ ID NO: 33842
  chr21:43162541-43162682
  hypo

SEQ ID NO: 100132 - DNA, 645 bp, Homo sapiens
  chr21:43164043-43164688
  hypo
ctggttgaaggttcccgctcaaaggacagcgacagtgatcctctggaagagaaggcggagtccaccgaggacacccccgagagcctcttcccactgccggacgatggcagcttggactcagaggagctgcggctgagctcctcggggccctcgacagcctgggaaactccagagtccagctgtgagagcagctcggagaggctgtagtcgttatcgaaggtgggggcagaggcccgcttgagcctcgcaggcaccacctgcgaagatgcagaagagggggtgggtgaagaccctgccatagaccgcatggcccgcccatgacacaaacacagaagagcaaggtgggccacgggagggagatgggggaggaaaggacggaccctggaagcaatgcagataacctattggtcaccgagctcagaccccgcatcggcacagcactagggagctcagacgccatgtccacacagcgccgcggagctcagaccccgcgcccgcacagtgccgggcagctcagaccctgcacccgcacagcacttgggatgctcagactctgcacccgcacagcgccagggagctcaaagacttggagctacaaagacttgcgctggccccacccagcacggagacatcttaaggaaagat

SEQ ID NO: 100133 - DNA, 367 bp, Homo sapiens
  chr21:43165724-43166091
  hypo
gggcggggatgcagtcgggcaggtggacctgagcccccatgggacctacacttctaatggagttgggtgcgggatgggctcagaagagagggagagtggtccgggcggcgggggactctgcaaagaggagtggtttggaaactcctgcctggaagccgaggagacaaaagacccctgtgggaaggactcgttacctcgctcctgggctccggggggcttttcacgtccagatcatgagcagtttctttcacttcgtcatcaggcttttcacacaggtcctcggtttcagaagtaatttcttgtggggaagaaaggggacatgtcactcggatgatgacttctgcgtacacacgcgttccatataaac

SEQ ID NO: 100134 - DNA, 327 bp, Homo sapiens
  chr21:43166636-43166963
  hypo
tgtgcagggctcatttcggcccacctgttacacgccttgtttctcacccaggcctggtccctcaccctgtcctgtctgtcacctctgtctcctgtgacacccacagaatgtggcggggagaccccggggtgctcaccttggaaggtgggcctaactcgcggatccccctgccagcaccgctgcatgaggcgtatcaggtggctgcaggcgcgcggccgggctctgcacacgggcggcagctcggggcggtggcccttcaccaccttcaccatgatgtgcaggatgttcttctcatctgccaagggaaggatgcgagtcaggggctct

SEQ ID NO: 100135 - DNA, 193 bp, Homo sapiens
  chr21:43168155-43168348
  hypo
ttgacctgtcccctgcgcctagcttcgggtgtcacatctatcagacactgcctcatttcacaagccttcgggctgtaggccactgtgcgggagaacgtacagaaggcaagaaaggcgacaggcggtcagacaacacagacggacaccggccagcagaggcctggcaggacgcgttctgtgctttctactgaca

SEQ ID NO: 100136 - DNA, 31 bp, Homo sapiens
  chr21:43169650-43169681
  hypo
agctcctggggaacagcgcctgtgtgcctca

SEQ ID NO: 100137 - DNA, 31 bp, Homo sapiens
  chr21:43175335-43175366
  hypo
agaacataagcagatgcgggaaaccaccaga

SEQ ID NO: 100138 - DNA, 162 bp, Homo sapiens
  chr21:43176653-43176815
  hypo
cagctctctcgggcaccgtgcggccccccaccttgacgtggtagtgggcatccagcaggatgttcgcgggcttgaggtccaggtgcaggagtggcggggccatgcagtgcaggaagttcatgcccaccgccgtctcgtggatgattcggaaccggagatccc

SEQ ID NO: 100139 - DNA, 30 bp, Homo sapiens
  chr21:43230110-43230140
  hypo
ttgggctctgcctgcgtctgtacaacttcc

SEQ ID NO: 100140 - DNA, 30 bp, Homo sapiens
  chr21:43230654-43230684
  hypo
tcgcacacggagcacgtccactgcttgccc

SEQ ID NO: 100141 - DNA, 30 bp, Homo sapiens
  chr21:43232796-43232826
  hypo
agcccggggggaggcgtacagataatcctg

SEQ ID NO: 100142 - DNA, 506 bp, Homo sapiens
  chr21:43239692-43240198
  hypo
cacactcccagttctcgctcacatcccctcccagcgccctgcagcagctgagcggcctggctgagcctggcccgtggccctggcgcctgtacccacctttcccacactcggcccgtggccccggcccccgcccccgccacacccaccttccccacactcccagttctcgctcatgtccccttccagcaccctgcagcagggtggcctggctgagcctggcccatgtccccagcacccgtacccacctttcccacactcggcacacaggtactcgcggacattgtcgtgcacacgcatgtgctccttcagcatgtccttcctggcaaaggacttcccacactgctcgcaggcgtggctcttcacacctgagaacacaggcatctgccactcagagccgagcagctccgacctgcagtggctgcaaagaggatgcaccaaggagaggggcccagcctccccagcagctagaagcgcagtaacaggggtggggtcgcctcttcagcggc

SEQ ID NO: 100143 - DNA, 112 bp, Homo sapiens
  chr21:43245252-43245364
  hypo
tggaaggcaggacggcggggacggtgacagcgggcctcctgcgggggcctgtgctcccagctgctgaaacgctggatgagcgtcactccggggctcacgtgagctgtgtgtg

SEQ ID NO: 100144 - DNA, 196 bp, Homo sapiens
  chr21:43245661-43245857
  hypo
tcccgggacgcgcagcgtgtttgctggatgtttaggatccagcatctctgccaagcagccaggtgtctgaatcctgagctagtgccaggatggccccctcaccgtgcagccctcggatggatgtgctcccatggatgacatcaccctttcctctcttgggcagcgccgggcatccactgaacgtgcctgggagcac

SEQ ID NO: 100145 - DNA, 544 bp, Homo sapiens
  chr21:43248404-43248948
  hypo
aggagcaggcggcaccgaactgctccccaaaggccctgctgactgctccatgccgccctgccccaccccgcaggagctgcctctccccgcccgcagcaggtgcgcaggcggcctcaccttccaggtgccggcgctggtggtccagcatgacgtccttgcggtagaacatcttgctgcagacctcacaggcaaacttcttgtcgccgtgcttcttcttgtgcttggagaggttgctgttggtggagaagaatctgaaacacatctcacattggaacgtcttgtcatctgtccagagagcaaacaaacacacaacgattttgaggtaaataacatctcacgcaggcacgcacgtgtggcctgaacgtcaataaagcgcgggtgacgggcatgagagtcacggggatgcgtggccaggaagaaaacagcacctgtgtgtcatacactgtctaccccaggaactcacgatgcagagacgggaaccccggtgcttgaaaagcagacacggagctcacctttcatcaccaagcaacgccagccgcctccc

SEQ ID NO: 100146 - DNA, 105 bp, Homo sapiens
  chr21:43251937-43252042
  hypo
cacatcccaccccacctgcagcgtgacctcagcccagagccagcctcacctgggccataagaggagcaccgtgacagatgctacgctgagtcccagcctaacata

SEQ ID NO: 100147 - DNA, 119 bp, Homo sapiens
  chr21:43255596-43255715
  hypo
cacaagtgccgcagcggtacctgtactcgccgtccacctggtcagagggacacgccgtgagtgagatggcccagcgcagagtccacagatgccgagcccccgacgtgctgcccgggcga

SEQ ID NO: 100148 - DNA, 30 bp, Homo sapiens
  chr21:43256566-43256596
  hypo
gcggactcaccatgcgagcgcacgtgcctg

SEQ ID NO: 100149 - DNA, 31 bp, Homo sapiens; identical to SEQ ID NO: 33849
  chr21:43256882-43256913
  hypo

SEQ ID NO: 100150 - DNA, 31 bp, Homo sapiens
  chr21:43259319-43259350
  hypo
agataaaccacgtgggcgggtctcgaggctg

SEQ ID NO: 100151 - DNA, 42 bp, Homo sapiens
  chr21:43269376-43269418
  hypo
actcaaaagtctctaaactggcgggaacactggctcatgcct

SEQ ID NO: 100152 - DNA, 318 bp, Homo sapiens
  chr21:43271375-43271693
  hypo
tgagaactgggcaagcggccagctttctggatgtttctagcctctcttcgaaggtcttgttatctatcgagatactcatttctgagacgcaggcagcgttgggctccagtgcatagcttcagctgggtgaggtgctcgacacacactcagactctggtgggccctgggtgcattgggcgggcagggctctagaagcgccactgtgcctcgagagggacccctggcagggtcagggaggaggggctcaggggaaggagccagataggtggcagagggtgagaggcagtgtgtgtgtggcgggggcgctgacgcggctgc

SEQ ID NO: 100153 - DNA, 243 bp, Homo sapiens
  chr21:43273196-43273439
  hypo
caccctgaccgtgggcgtgtggcctccagcactgcgggaggcacatttctgacgtgaaggcactgggttgctggtgttttatgggggcagcgcagcgccgggacactcccacacagcccattgtggacctgggattagggacaaccaggggcattttacaaagcctcaatcatactgacaaacaggacagaccagaaccttccaataagttaagaatcttaagctaccgagctactaatattt

SEQ ID NO: 100154 - DNA, 30 bp, Homo sapiens
  chr21:43274611-43274641
  hypo
gaccataaccccttcggcgaggcacaaggg

SEQ ID NO: 100155 - DNA, 30 bp, Homo sapiens; identical to SEQ ID NO: 33852
  chr21:43275299-43275329
  hypo

SEQ ID NO: 100156 - DNA, 31 bp, Homo sapiens; identical to SEQ ID NO: 33853
  chr21:43282988-43283019
  hypo

SEQ ID NO: 100157 - DNA, 240 bp, Homo sapiens; identical to SEQ ID NO: 33854
  chr21:43290513-43290753
  hypo

SEQ ID NO: 100158 - DNA, 31 bp, Homo sapiens
  chr21:43296430-43296461
  hypo
cctctttctagaaatgcgagcacagagaagc

SEQ ID NO: 100159 - DNA, 30 bp, Homo sapiens
  chr21:43327808-43327838
  hypo
gacccgctggtcagcgtgaagctctgtggc

SEQ ID NO: 100160 - DNA, 40 bp, Homo sapiens
  chr21:43340737-43340777
  hypo
tcagagaagcgggaacgcctcctgccgctagcatcaatta

SEQ ID NO: 100161 - DNA, 153 bp, Homo sapiens
  chr21:43347889-43348042
  hypo
ttataagaaattctcgcaggggattgagatgaaaagggttggaaacaagatggtggccaaccccaagagctgctgtttatcctcttttgggggaagcctccaccacgtggggctcctgcgtcaacctgactccaaccccgcccccagcaacac

SEQ ID NO: 100162 - DNA, 21 bp, Homo sapiens
  chr21:43355675-43355696
  hypo
aaaagttctgacactgagggc

SEQ ID NO: 100163 - DNA, 150 bp, Homo sapiens
  chr21:43364210-43364360
  hypo
aggagcctaaagatacgctgttgccttataccagcctgggtgcagactcatgctcccctgaggcggcagatgcagtgtttaccctcttcccttgctaccttctgaattcaaaccttgaaaagagtttgcagccgggtgccacggctcacg

SEQ ID NO: 100164 - DNA, 31 bp, Homo sapiens; identical to SEQ ID NO: 13293
  chr21:43373717-43373748
  hypo

SEQ ID NO: 100165 - DNA, 226 bp, Homo sapiens; identical to SEQ ID NO: 57713
  chr21:43373882-43374108
  hypo

SEQ ID NO: 100166 - DNA, 34 bp, Homo sapiens; identical to SEQ ID NO: 57714
  chr21:43374331-43374365
  hypo

SEQ ID NO: 100167 - DNA, 84 bp, Homo sapiens
  chr21:43376404-43376488
  hypo
ccttgccagaataaccggggtgaggaatccgagggcccagtgttccccgtgccatgtgtgcacacaggccgcctgcggctgtgt

SEQ ID NO: 100168 - DNA, 61 bp, Homo sapiens; identical to SEQ ID NO: 33856
  chr21:43386122-43386183
  hypo

SEQ ID NO: 100169 - DNA, 31 bp, Homo sapiens; identical to SEQ ID NO: 33857
  chr21:43393500-43393531
  hypo

SEQ ID NO: 100170 - DNA, 31 bp, Homo sapiens; identical to SEQ ID NO: 33858
  chr21:43441079-43441110
  hypo

SEQ ID NO: 100171 - DNA, 31 bp, Homo sapiens; identical to SEQ ID NO: 33859
  chr21:43448738-43448769
  hypo

SEQ ID NO: 100172 - DNA, 66 bp, Homo sapiens; identical to SEQ ID NO: 33860
  chr21:43481097-43481163
  hypo

SEQ ID NO: 100173 - DNA, 31 bp, Homo sapiens
  chr21:43501956-43501987
  hypo
caccttccatttagtccgcatgtctgcttaa

SEQ ID NO: 100174 - DNA, 30 bp, Homo sapiens
  chr21:43524085-43524115
  hypo
accgtgcaggaccccgggtttcccatgggc

SEQ ID NO: 100175 - DNA, 147 bp, Homo sapiens; identical to SEQ ID NO: 33861
  chr21:43546528-43546675
  hypo

SEQ ID NO: 100176 - DNA, 30 bp, Homo sapiens
  chr21:43547211-43547241
  hypo
cgtgtctgccagtgacgatgtcaggatcga

SEQ ID NO: 100177 - DNA, 391 bp, Homo sapiens
  chr21:43547670-43548061
  hypo
agcctgtggaatctgcgagtgtcgtcagatgtagtcgtgagtaaactcatctgagaacaaggacagcggggctcgctgacaagcaaggagtcccatttcctctcttctcagctgccctgtgcccaacacatacaccaacgtgattgagaacggcaactccaataaggcccagttcaagctgaggatcttttcctttatcaacgactccatcgtctacctgcactgcaaactccgcgtctgcatggaatcccccggagccacgtgcaaaatcgtaagtgttttttggttttctaaacgtttggttggattcacgttccttattgttacggttcgaggctctgttaataaaaacctagggctcgagtggctcggggccaacctctgggaggag

SEQ ID NO: 100178 - DNA, 146 bp, Homo sapiens
  chr21:43573846-43573992
  hypo
ggcccttgaatgtgctcttggcggcaggaagcgttttccttattcttcagccagagaaactgagcgcagagcgaagggagcttggccaaggtcgtccgtgagcggtgtcgggcctgacctagcacgccacacctgggcaggtcacc

SEQ ID NO: 100179 - DNA, 72 bp, Homo sapiens
  chr21:43638118-43638190
  hypo
cctcccacttaaactcataaccgtgtctcctttctctccttcgatttgagcggctgaatttggttacagtca

SEQ ID NO: 100180 - DNA, 31 bp, Homo sapiens
  chr21:43707199-43707230
  hypo
tgggccttagcaagaacgttactggagtggg

SEQ ID NO: 100181 - DNA, 380 bp, Homo sapiens
  chr21:43725867-43726247
  hypo
ccctggctcggaatcgctgcaggcgccacagaccagacgcgcactgttccccactcctgcttatcggccgcgcggcatccccttgtcgcagcactccagcatccatgcagccgcgcggcaccccgtcttcggagcactccagaatccatgcagagcgcagcaccccacatccagagcgctccagaatccatgaagcacgcggcaccccctcgtcagagtgctccagaatccatgaagtgcgcagcaccccttaatcggagcgctctagaacccgtgcagcgagcagcaccccacacccggagcgctccagaatccatgaagccagcagcaccccacacccggagtgctccagaatccacgcagcacgtggcatctcctcg

SEQ ID NO: 100182 - DNA, 30 bp, Homo sapiens
  chr21:43729102-43729132
  hypo
ttcattatttgaattcgccgtgagccgctg

SEQ ID NO: 100183 - DNA, 30 bp, Homo sapiens
  chr21:43729379-43729409
  hypo
cctggatgggccacccgaggaacacaggca

SEQ ID NO: 100184 - DNA, 238 bp, Homo sapiens
  chr21:43736992-43737230
  hypo
ggtggacttggtttatcaccccgagaaatgggagcgcctggctgcttggatttagcctgcagctggggtccccggtggtgtgtgcagggcggccttgagcctccaagggtgcatccacaaactgcccttccccgagtgacccatgggagctcgatggcgtacgtgctgagcaccaggatgtgtcctgccctgtgactcccaggccccgcccttgcgctcagcacgccctttgtggatg

SEQ ID NO: 100185 - DNA, 31 bp, Homo sapiens
  chr21:43738581-43738612
  hypo
gtgtggcggtgtgggccgtcccaggagccct

SEQ ID NO: 100186 - DNA, 148 bp, Homo sapiens
  chr21:43767638-43767786
  hypo
aagttggagaagcagcacttccgagaggcgcattcctcggggctgatgcccgggtagccacagtttcttcggtctgagacctccatgacgcactgatccgactctgccatgggacaggcacagcaccgagacccagtcaggcctgctg

SEQ ID NO: 100187 - DNA, 198 bp, Homo sapiens
  chr21:43772763-43772961
  hypo
ttcaggattcctgctgcgaccacctgacccatgcaaaagagaccacttctcagcctctctcactctcctggccctggcggaagcctgtgttgtcataggcatgcttccctggaatcctgctcaggcccccacgcagggacactgagtgcccacagagttgggaaaccattacacgagatgggacgtctgcaatagagt

SEQ ID NO: 100188 - DNA, 30 bp, Homo sapiens; identical to SEQ ID NO: 57716
  chr21:43778879-43778909
  hypo

SEQ ID NO: 100189 - DNA, 51 bp, Homo sapiens
  chr21:43785261-43785312
  hypo
ggatcatggacctgagtgacccgcaaagacgctctgagccttgagccagag

SEQ ID NO: 100190 - DNA, 258 bp, Homo sapiens; identical to SEQ ID NO: 33864
  chr21:43786490-43786748
  hypo

SEQ ID NO: 100191 - DNA, 28 bp, Homo sapiens
  chr21:43787402-43787430
  hypo
cctgagcgacagattaagtctccttctg

SEQ ID NO: 100192 - DNA, 31 bp, Homo sapiens
  chr21:43790776-43790807
  hypo
catggtgacagtagggcggtaacctcgtcag

SEQ ID NO: 100193 - DNA, 551 bp, Homo sapiens
  chr21:43791371-43791922
  hypo
ccagccagagctcactccctccggccacacccttcgggtgccactcaaaacctccggccatggctcacaccgtccagccaccgctcataccatccagtcaccacttatgctctctggccaccgtgcactccctctgaccaccactcacactctccggccactgctcacacactactgccaccactgagaccctccatccaggtctcacaccctccagccaccactcacttcctccggacaccactcacacactgtggccaccactcagaccctccatccaggtctcacaccctccggccactgctaactccctctgtacagggctcactccctccggccaccactcacaccctctggccaccactcactccctccggccaccgctcactccctccggccactgctcactccctccggccaccgctcacacccactactttgcctggccttgctctacttttgagttctgtgtatgacacgagctgatgctgatctgctgagcaacctgttccgacagaagaatgccaagtccacaacgcacacaggagaga

SEQ ID NO: 100194 - DNA, 151 bp, Homo sapiens
  chr21:43815454-43815605
  hypo
caaatcatcaaggccaaaaagcgatcggaatgagaagggggcttcaacagcaggcggatcattttcccccatggtgactatttcaggacctctgacatccggctccgcctccacctctacctccttagccgaggaagaacagaaagcattt

SEQ ID NO: 100195 - DNA, 461 bp, Homo sapiens
  chr21:43825719-43826180
  hypo
tgggttcctcatggacgcccgctgtttccagtctgcattcctgataaattacctttgctatattccattctgtttcatttggtccagttctgcccaattcaatgcaatgtacttacgtcccgggttaccgtgatgaataagactcagtcctgtgttcagggagttcttggtctagcaggggagagccgtgggtgcaaggggactgtgtaagccgtaacaagtgcctgcctgggtgctttggaaagggctgtttcccagcagagaggtgtgggaggcgagcctggggatcagggtcgctgatgctggggtgaggaaagcgtgtgtccgagccaggggcacgttccgcagggtgggtccatttgatctaggcagtggggggggggggggcaggccagggagagggattgcaggagcgggcggaggtcaggtcctcagccctgagaccccgtgccaagggctga

SEQ ID NO: 100196 - DNA, 30 bp, Homo sapiens
  chr21:43826409-43826439
  hypo
tctgcaggctgaaagcgttggcagccacgg

SEQ ID NO: 100197 - DNA, 30 bp, Homo sapiens
  chr21:43867443-43867473
  hypo
cggaatatttccctccggctttcgcctttg

SEQ ID NO: 100198 - DNA, 31 bp, Homo sapiens
  chr21:43962934-43962965
  hypo
gacctgggtcacccagcgcacagcaccaaag

SEQ ID NO: 100199 - DNA, 43 bp, Homo sapiens
  chr21:43968300-43968343
  hypo
cgctcgggcctttcagcggctccaggtgcgttgatgtcgagtc

SEQ ID NO: 100200 - DNA, 94 bp, Homo sapiens
  chr21:43969267-43969361
  hypo
agactggggagaacttcgcacacaccttccgccctggaacaccttctgtcctctaagaagagcttttctcacccaggggcggccaggcctgagg

SEQ ID NO: 100201 - DNA, 214 bp, Homo sapiens; identical to SEQ ID NO: 33865
  chr21:43981534-43981748
  hypo

SEQ ID NO: 100202 - DNA, 215 bp, Homo sapiens
  chr21:43983783-43983998
  hypo
agttaactactaattgctcctcggtataaatcaagcttatgaagccagagtcccgtgcacgggtcctgttctgccatggtgtgtcgctgcgatgcgtgaaggagatcctcactgtttcacactccgttgtcatttcaatagatcaccttgatgccaaaaaggcgggggagctctccaccctgtttgacgtgggcggaatctttggtgagttcatt

SEQ ID NO: 100203 - DNA, 49 bp, Homo sapiens
  chr21:43986295-43986344
  hypo
gccttggtggggctggcggggctgcagcagcctgcgacctgccacctgc

SEQ ID NO: 100204 - DNA, 184 bp, Homo sapiens
  chr21:43988058-43988242
  hypo
tcccaggaaggccctggctgtcgaggaatccagcagacacgtggatgtgtctgggaaggaaggccggcgcagctcagggcaggggcgcgcgttgcgcaccttcacgcctctcacgctggctgctctggggcctcagggaggagcaggactgtgcggaacaaacgttttttatttgaagagaatc

SEQ ID NO: 100205 - DNA, 30 bp, Homo sapiens; identical to SEQ ID NO: 33866
  chr21:43988767-43988797
  hypo

SEQ ID NO: 100206 - DNA, 30 bp, Homo sapiens
  chr21:43991059-43991089
  hypo
tccgcggagctgccgcgcccaccttgatgg

SEQ ID NO: 100207 - DNA, 244 bp, Homo sapiens
  chr21:43991409-43991653
  hypo
tgccttctcccaagtgccacacggtttgttgacacggtgtgcgcctggggcgttcacagtgcttagaatcgcagaggttgccgtttctgtacatttcatgcagagcaattaaatagggcactgcatttttcttcaagttaatttttatttattaaagtaaaacataatgtaccttagaagctagacagtcctacaagcttattatgttgtacagcggcgttccgtccccctccccagccctctc

SEQ ID NO: 100208 - DNA, 134 bp, Homo sapiens
  chr21:44003046-44003180
  hypo
tggctctgcctgtcacgcacgtctgcgcttgccgtcctgtggaagcgtggctctgcctgtcacgcacgtctgcgcttgccgtcctgtggaagcgtggctctgcctgtcacgcacgtgtgcgcttagtgcacatc

SEQ ID NO: 100209 - DNA, 30 bp, Homo sapiens
  chr21:44007535-44007565
  hypo
aacatcaagcctgccgcgccatttatatcc

SEQ ID NO: 100210 - DNA, 31 bp, Homo sapiens; identical to SEQ ID NO: 13295
  chr21:44013673-44013704
  hypo

SEQ ID NO: 100211 - DNA, 31 bp, Homo sapiens; identical to SEQ ID NO: 33869
  chr21:44015499-44015530
  hypo

SEQ ID NO: 100212 - DNA, 224 bp, Homo sapiens
  chr21:44046312-44046536
  hypo
agcaacgagtgtgcgcgtgctcttcccaggcgtgggctccgccgcacgtggtggaaggaactctgctccacattgaggagcctggtttggacaccaacaggctaagctcccacataccccaaaaacacctggcccagggatcagcccttccaattctacaacgaggtaagtcacggaccagcacagcctcgggggcaggtccaagacaacggctgtgccttccg

SEQ ID NO: 100213 - DNA, 30 bp, Homo sapiens
  chr21:44046892-44046922
  hypo
cagagcacactaagacgcaccttggccatg

SEQ ID NO: 100214 - DNA, 29 bp, Homo sapiens
  chr21:44057376-44057405
  hypo
acacacacttacacatgcacacgcatgca

SEQ ID NO: 100215 - DNA, 148 bp, Homo sapiens; identical to SEQ ID NO: 33871
  chr21:44057644-44057792
  hypo

SEQ ID NO: 100216 - DNA, 25 bp, Homo sapiens
  chr21:44059406-44059431
  hypo
cacacacacacggaggccatatgtg

SEQ ID NO: 100217 - DNA, 31 bp, Homo sapiens; identical to SEQ ID NO: 33873
  chr21:44065442-44065473
  hypo

SEQ ID NO: 100218 - DNA, 31 bp, Homo sapiens; identical to SEQ ID NO: 33874
  chr21:44065969-44066000
  hypo

SEQ ID NO: 100219 - DNA, 299 bp, Homo sapiens
  chr21:44077993-44078292
  hypo
ggaacccaggtctgaacacatcggtggccgcttgagtttgcggggctgtttctactgtaaaccagagcagtgaatgcgcacagcccaaagggaggagccgcgctagaaagtgttcaagcgtccgcagaagtcggctcccagttcttaatagtttgccacccaccgtggctacgccacacctacgcttgcctccacccgacctatgcctgcccccttcacatgcgggagcccagggctccgtgccctgggcagctggtggggtctgcccaggccttctcgtgatgcttccacccagcctg

SEQ ID NO: 100220 - DNA, 72 bp, Homo sapiens
  chr21:44082506-44082578
  hypo
ccctccatgccccttccgactgttgcagagggatggaggactatggtacatacacacatatacacgcacaca

SEQ ID NO: 100221 - DNA, 30 bp, Homo sapiens
  chr21:44087114-44087144
  hypo
tccccactcccccccgccccaaccccagca

SEQ ID NO: 100222 - DNA, 30 bp, Homo sapiens; identical to SEQ ID NO: 57719
  chr21:44095150-44095180
  hypo

SEQ ID NO: 100223 - DNA, 31 bp, Homo sapiens
  chr21:44095687-44095718
  hypo
gcgctgtgtggatacacgggcccgaacggcg

SEQ ID NO: 100224 - DNA, 31 bp, Homo sapiens; identical to SEQ ID NO: 33876
  chr21:44109121-44109152
  hypo

SEQ ID NO: 100225 - DNA, 30 bp, Homo sapiens
  chr21:44112510-44112540
  hypo
ggccggagacatcagcggtgctgaggcgga

SEQ ID NO: 100226 - DNA, 456 bp, Homo sapiens
  chr21:44112760-44113216
  hypo
ggctggcccgggacacgccactgatgctcttctgacccaggggcttttctctcccgcttccgtccctcttccctcgccggcaggtgacgttactggccttttcttttttggccctgcctcccccttggcttctcccctcttcctctcctccactcggtgcctggtgacatgcggccatcctcagagatgtgcttcggggcccgcacgccttgctcctcgcactcttcctgcaccggagccgcggtgcgaggcctcgggaatgctcaccgtttctctcccgccccccggccgcatgctgcagccattccctcaccacatgtccaggagggagccggcatcctttgctgactttcttgctgtgactatggtgctgcgtggaaaaggggccgtgggaaggctgggcaggtggctgctcagagccccacctgacacggtgacccacggggcctggaaatt

SEQ ID NO: 100227 - DNA, 31 bp, Homo sapiens
  chr21:44123456-44123487
  hypo
ggggccaggcctgagccggacggagaccgaa

SEQ ID NO: 100228 - DNA, 35 bp, Homo sapiens
  chr21:44129778-44129813
  hypo
ttgtttgtttgtgtgtgtgtgcgtttgttttttga

SEQ ID NO: 100229 - DNA, 43 bp, Homo sapiens
  chr21:44156219-44156262
  hypo
ctcagccttccccatctcctacgccccacctggaagccagtgc

SEQ ID NO: 100230 - DNA, 37 bp, Homo sapiens
  chr21:44176711-44176748
  hypo
gcccagggctgtggcccgtgagcgtggcctgcctcta

SEQ ID NO: 100231 - DNA, 30 bp, Homo sapiens; identical to SEQ ID NO: 33878
  chr21:44184268-44184298
  hypo

SEQ ID NO: 100232 - DNA, 30 bp, Homo sapiens; identical to SEQ ID NO: 33879
  chr21:44184647-44184677
  hypo

SEQ ID NO: 100233 - DNA, 30 bp, Homo sapiens
  chr21:44189938-44189968
  hypo
ggctgtcgtggtgaccgctgtccctgttcc

SEQ ID NO: 100234 - DNA, 430 bp, Homo sapiens
  chr21:44190664-44191094
  hypo
tggaggcagcagagccggcacgagggtgtccaggagctgggactggcccagaggtttccgcacggagcacctgacacctgtttttctccgacgtttcccattgccttaagaacgagggactctgaataaatccgtgtgtctctcccagctcttccccatggttgaggagatcatgctgcagccactttgggaatcccgagatcgctacgaggagctgaagcggatagatgacgccatgaaagaggtaaaacacactgagaagagcctgccttccttgcggcaagcaggcacgctgccctccgcactcccgactccagaagcttggacgtgccaagcagggcaccactgaaggccccgtggacaggcacacgtgtaccttccatcagaaagcctggctcagtaaaattagggaatgcgatgagggaaacca

SEQ ID NO: 100235 - DNA, 31 bp, Homo sapiens; identical to SEQ ID NO: 33880
  chr21:44215220-44215251
  hypo

SEQ ID NO: 100236 - DNA, 30 bp, Homo sapiens
  chr21:44269822-44269852
  hypo
gcggacacgaagggcggtatgagaacagga

SEQ ID NO: 100237 - DNA, 30 bp, Homo sapiens
  chr21:44280695-44280725
  hypo
gccgggcccggtcccgcagccaccgccctg

SEQ ID NO: 100238 - DNA, 31 bp, Homo sapiens; identical to SEQ ID NO: 33881
  chr21:44284396-44284427
  hypo

SEQ ID NO: 100239 - DNA, 515 bp, Homo sapiens
  chr21:44338164-44338679
  hypo
catagtacacttaggcggaggtatgcggcataagggttagtggtgttcgtacagtaccaggccttttttgacaagacacaattgaggtagcttaagttagaaggagaccaggctccagggggtaaccttggccaccactcagctatggaggcattgactgttagggtttggtgacgggttttcacctacggcgcgatgggttttatcagtccacttgcgggatatgcacaccgtccctcatactgggttggtaagtgtccaggactgcgggcattcctgaggagtgaaagtgagtctggggttttgggatgcctgtaagtaagggggaatgtctatcccgtcccacagccactgttcactcataaagctcccccgcatacccaacaattggacacattcatggtaagcacaatggttctcctagatctacaaacagattttttcctggcttaggaagggatgcatctgcttatagtttttgtataaaggaatggaaatgccgcgggcgattttca

SEQ ID NO: 100240 - DNA, 45 bp, Homo sapiens
  chr21:44390975-44391020
  hypo
ttctttagaaaccacttcggtgctcaacaccgggaagagggcccc

SEQ ID NO: 100241 - DNA, 247 bp, Homo sapiens; identical to SEQ ID NO: 33883
  chr21:44440491-44440738
  hypo

SEQ ID NO: 100242 - DNA, 294 bp, Homo sapiens
  chr21:44441269-44441563
  hypo
tccacacagggttcccgtgcatgggcctcgactacaatcatttccctgtccgatccttggctgttttctccacctgcagttgtaagtacttggatatgtgagaatttcctatgctttctaatgttatttttcaactttaaaagcttcagttacagttaaaccaagatctcagcatcttgcatcaagatgatggttcatctaagaacaagaggggcgtcctgccaaagcatgccacgaacgtgatgcggtcctggctcttccagcacatcggggtaaggacggctgggccagccc

SEQ ID NO: 100243 - DNA, 117 bp, Homo sapiens; identical to SEQ ID NO: 33884
  chr21:44444711-44444828
  hypo

SEQ ID NO: 100244 - DNA, 391 bp, Homo sapiens; identical to SEQ ID NO: 33885
  chr21:44448041-44448432
  hypo

SEQ ID NO: 100245 - DNA, 47 bp, Homo sapiens
  chr21:44448695-44448742
  hypo
agtcattctttgtagcgtgcttcgtagagcagcgtgtttgttagaag

SEQ ID NO: 100246 - DNA, 204 bp, Homo sapiens
  chr21:44448963-44449167
  hypo
gcgagctcaccatgtcggaaggtacaggtggccggccaaggccagacatggtggaccatggggtggggattatgaacaagaggcctggatcaggcctgttagctgtgagcctcaggtaatgtggtgaacgagagtgcgtggttctctttctctgcaactaaaacatgaggaagctgcattctgcgtgcacgggagctctcagta

SEQ ID NO: 100247 - DNA, 30 bp, Homo sapiens
  chr21:44479402-44479432
  hypo
ggaacttggtcctgcgggatgggggagtca

SEQ ID NO: 100248 - DNA, 117 bp, Homo sapiens
  chr21:44480609-44480726
  hypo
ctgcgcggccttcacggccaccgccaccgtgctgccagcactgccacctgcagagagggccacgagtcagacgcgccagggtgagcgtgcgtgggtgcacacgtatgcatgaattgt

SEQ ID NO: 100249 - DNA, 268 bp, Homo sapiens
  chr21:44482851-44483119
  hypo
tcccttggtgaggtcaggccacgtgtgcggacatcgtcccccagtctactttgtctcgaccttcgagaccagcttctcaccatgcgtgcggggcttgcccttctgtttcagtggagaagctggttggggcccagggtcagccaggctccccagtgtgagggtgagttacaggctgcaccggcactgtggccgggctctggactcgacctaccgtcctgtccagcaccgtggggatgaagtcgtagccgatcccttccacctcgtaggt

SEQ ID NO: 100250 - DNA, 440 bp, Homo sapiens
  chr21:44483492-44483932
  hypo
cagaccaccctgcggcggagcagcagagcctttggggacaaagggcattgctgggcagtgacgtctttttcaagggcaagcaacagggagagaacgcccttgtctcatcagcgggacctttctaggcacccgtcctcagacctgctcttaaccccgagtccaggaaccctctcccaactcccacaagccccagttgaggggcagactcaggaccagaggacttagagctcctggctgatcctcagaggcccccagttggaactccgaccccccactcagcgcaggaaggttctccaagacactggccggtgagcgagcacccagccccagctccttcgggtcacgagctgctggtcccttatgtgtcaagcacccttgtcttcccaaacacctcccaggcagcgcagaaataccgcgggagacagcgtgctgagcagacc

SEQ ID NO: 100251 - DNA, 30 bp, Homo sapiens; identical to SEQ ID NO: 33888
  chr21:44486366-44486396
  hypo

SEQ ID NO: 100252 - DNA, 1085 bp, Homo sapiens; identical to SEQ ID NO: 13298
  chr21:44494940-44496025
  hypo

SEQ ID NO: 100253 - DNA, 397 bp, Homo sapiens; identical to SEQ ID NO: 57723
  chr21:44496363-44496760
  hypo

SEQ ID NO: 100254 - DNA, 111 bp, Homo sapiens; identical to SEQ ID NO: 13299
  chr21:44513218-44513329
  hypo

SEQ ID NO: 100255 - DNA, 209 bp, Homo sapiens; identical to SEQ ID NO: 13300
  chr21:44514585-44514794
  hypo

SEQ ID NO: 100256 - DNA, 30 bp, Homo sapiens
  chr21:44515464-44515494
  hypo
ctgcaccactgtctcgctttcgcctgttgg

SEQ ID NO: 100257 - DNA, 30 bp, Homo sapiens; identical to SEQ ID NO: 13301
  chr21:44515794-44515824
  hypo

SEQ ID NO: 100258 - DNA, 30 bp, Homo sapiens; identical to SEQ ID NO: 13302
  chr21:44524440-44524470
  hypo

SEQ ID NO: 100259 - DNA, 30 bp, Homo sapiens
  chr21:44561183-44561213
  hypo
ggggagcgtccgctgcgggccacaaccttg

SEQ ID NO: 100260 - DNA, 189 bp, Homo sapiens; identical to SEQ ID NO: 33894
  chr21:44601205-44601394
  hypo

SEQ ID NO: 100261 - DNA, 35 bp, Homo sapiens
  chr21:44617828-44617863
  hypo
gggcaatcaatagacaatacacggctcacgcctgt

SEQ ID NO: 100262 - DNA, 35 bp, Homo sapiens
  chr21:44618102-44618137
  hypo
aagagtgaaactccgtctcaaaaaaaaaaagaaaa

SEQ ID NO: 100263 - DNA, 536 bp, Homo sapiens
  chr21:44630079-44630615
  hypo
tgtggctcaggtctggcctcacgtgctcctgcccctgggccagcacccggctgtctgggctgcggttctgagtctgtcagtgggataaggatgtgcacctcgtccgggaagtgtctgcgcctcctgtggagcacgcactgacttagaacttctccgttgggattgcttttcgtcctgttatcaggccagtgactcagtcctgctccatcttccagaggaggagacagaagcgctacgaggttgagtcactcgtccaagttgacacagtggcctgtctgagtccagagcctgcgccgtggccccacgcagcctctctgcctcccggtgccgtgagtttgcctgggtaaagctggctgcatacgagcctctgtcgtcacgggctcctactttaaggtgccgtcctgtgcggctgccaaagggaacaacgttgtcagaacctcttcccccggggagtccggagctgcttggtgctggggggctagccagtgaccttgctccctgatcttggcacacacgaggcaaatctgagtcaccca

SEQ ID NO: 100264 - DNA, 30 bp, Homo sapiens
  chr21:44722843-44722873
  hypo
agagctcaggacagcgcggcttcgggccgg

SEQ ID NO: 100265 - DNA, 202 bp, Homo sapiens
  chr21:44799063-44799265
  hypo
tgtccaggaggggagtcggggcagggacatacagggcatctccgacctggaggaggtccccccgctgcagaggtctctggggatgaaagcggggagtccctgtcttgaccacacctgaaccctacaggaggcttcaagggcaggtgggcggtgggctgagggggtgctgagtctttggcctctgaggcggtgccccatctgt

SEQ ID NO: 100266 - DNA, 30 bp, Homo sapiens
  chr21:44813363-44813393
  hypo
tgctcggccatgtccgtggcctgcagaatt

SEQ ID NO: 100267 - DNA, 819 bp, Homo sapiens
  chr21:44816264-44817083
  hypo
ctcccagcagtgtgagggggacgcagaaccagtgtctcctcttaaaatccccgaaccctcccgctggctggccctgagcagcaaagaggacacctgcgcggccttcctctcccggcccctaactgagccacggctacatcccgctcctcccaccaaagctcttcggccagtcagccctcaggctccagcgcggctcggaggggcctgcccctggtatagcgcccatggtcactgtcggacactcttaaaacaacggccgtgtttctgttctgcgctgggccctgaagctcatgtcatcagccctgccggctgtggggctcccggattctctgaccttgacccatgctgcagccactccgcctgtttcctggggctggtttacaccccgagatgcagggaaggcccagctgcggagccccagggaggccaggagctgttcacaactccaggaagccacactgggcctcagttgacgaagaaggcgacaccttcgtgtgggccttgcctgctaatcggtgtcctcaacccaagggcacaggcgccgctcccaggccgcgcaggcagagtagagctggggtggatggcaggcttcagggacccagccccgatgagtcacttggaaggcatttgccccagagcttccctggccactgcgcctcctcccgccccaatccagccccatctgggtccgagcctctggagaggagctggcaggtcaggatgcggttcccgtgctcttgcctgtgtgtggggacccgaaagccaggctggtggccgaggatggcgagcacagccccagcccctcggcctagcgggagc

SEQ ID NO: 100268 - DNA, 404 bp, Homo sapiens; identical to SEQ ID NO: 33897
  chr21:44830889-44831293
  hypo

SEQ ID NO: 100269 - DNA, 161 bp, Homo sapiens
  chr21:44837012-44837173
  hypo
acaggtggtcactgcgccggctcgcagggttctcgggtttccgagtgcccgtgtggcagggcccgcccgaggagctgccagccgcggctgccgagggcaggtgcgtggctgatccctgaccgcgccccacctttcattctccacccggtttctcagcagct

SEQ ID NO: 100270 - DNA, 336 bp, Homo sapiens
  chr21:44840058-44840394
  hypo
gagacagctgcctagcccctgcgggtgaggccagggcaagtgtggccaggctcacctccaccgtcctctgccggtccacgcccagggtctgcatgatacccagcgcctgctcatcgtagtcgcccaggttggaggtgtagctgtgtgcggagaaggcggggcaggcgggtcccggcaagcagggctcagcccgcatccaccggtgctgccggatctgggcgatggtgatgcgcctggcggggtccaccaccagcatgcggcggatcaggctctcacagtctgtggaggggccaggaggctgagccagggcggccgggacctcggctgcgctcccac

SEQ ID NO: 100271 - DNA, 888 bp, Homo sapiens
  chr21:44840707-44841595
  hypo
tgcagcaagggcacccgtccaccctcgaaatagggcactgagaaggcatccatgggctgggtttctcccgcagcccacagtaacctgggcctgattcccagactcaacaaggactcagaagccagccacgaaggggctgcaggagacacaggcccctgcccaggcgagaccacacgactcaccttgagacatgaagaaggggatgcggaagcggccctccagcacccgctgtctcagcgtcggcaggttaggcccatcgaaggggagagaaccgcagaccaggacgtacagcaccacgcccaggctctgttgaggaccacagagccacatcagcgccagggcggtgcccccgggaacacggcgccctcggggaacgcggcctcgggaagggggtctgcgcgcacagggctcctacccagatgtccagctgggggccttcatactccttcccctcaaagacttccggggcggcatacggggggctcccacaccacgtggacagaggctctcctgacttgtagaaattcccaaatccaaaatctgagcggcaaagaaacagatggatgaggttaaacggcaaatggcaaggggctgcggtttcggcacaggggctgtggtttcggcacatgccgggaagctggggctgcttgcgggcacactcccaccccggggcctccgtgcctgccagcttgatgtccctgctcccaccccggaccctccgtgcctgccagcttgatgtccctgctcccaccccagaccctccgtgcctgccagcttgatgtccctgctcccaccccggaccctccgtgcctgccagcttgatgtccatgttgccatccagcaggaggttctcggtcttgaggtcccggtggacgatgtgatggtcgt

SEQ ID NO: 100272 - DNA, 374 bp, Homo sapiens; identical to SEQ ID NO: 57730
  chr21:44847537-44847911
  hypo

SEQ ID NO: 100273 - DNA, 144 bp, Homo sapiens; identical to SEQ ID NO: 33901
  chr21:44856358-44856502
  hypo

SEQ ID NO: 100274 - DNA, 30 bp, Homo sapiens; identical to SEQ ID NO: 33902
  chr21:44865749-44865779
  hypo

SEQ ID NO: 100275 - DNA, 349 bp, Homo sapiens
  chr21:44866610-44866959
  hypo
gccacagccggcccagcgggagccaggtcagggcctggagacacagcgccccccaccggagccactgcccggcccagcagcacctgcggagaatcccaccagctcccacgcctcccgccgcgccaccgccccggctttctgcaaatccaccttatggaagccggataaggtgaagtccacatataactaaaagcgagttactgagggttactttctttgcagagtggttcccctaaaggattcctttaaacatgatccggtcagccagtgctcacttacgttcaccaagtcacgtcggtttgtggcggcaggagcccagcgtgccaggcacctgcgggaggggaagatg

SEQ ID NO: 100276 - DNA, 480 bp, Homo sapiens
  chr21:44871640-44872120
  hypo
ttgttgtgacctggggtcccccgtggtgggcccgccccttgagcctgggatccagcctcagcgaggctccagaagtgtcgtctccgccggccaggcgtcagcgcctccacccaggatcacacactcctatctctgcacttctgccctccatcctgctccacgccgcctctgcttgttattccagcacattccagggtgatgcctgctgaagccacgcagccagtgcctccaccctaccccccatctgacccaccggccccttccgcacgctggaagcctgcccggcctgaagtgtcctcacctgtcgccctatcctcccctccactccagcccaccggtgactcagccctcacagctctctcctccccgagggagccggtgacttggctctgatggtgccgggacccagccccggcatgttcagaatccttgtcctttaacctgcgtccacatgtagtcgcctccacctccctgcctgaa

SEQ ID NO: 100277 - DNA, 30 bp, Homo sapiens; identical to SEQ ID NO: 57731
  chr21:44877374-44877404
  hypo

SEQ ID NO: 100278 - DNA, 112 bp, Homo sapiens
  chr21:44888676-44888788
  hypo
accccctgaagccacaaaccccgagctgagctaaaccactgctcgaggtgcggggtgcgcagcactccacagcccgttgcatttccacgtcgcaaatcctcagggagcattt

SEQ ID NO: 100279 - DNA, 30 bp, Homo sapiens
  chr21:44906657-44906687
  hypo
ccaagccctaggctcgggcaccagaatcac

SEQ ID NO: 100280 - DNA, 468 bp, Homo sapiens
  chr21:45078406-45078874
  hypo
gcacctcgggaggtcgcctagacaactgagcggagcaactgagataacccccgctacgtgtggagtgacctagtccattaacttgccccagcacgcccgctgagtccgcaaaatataggatggcctcgggttttagatgaacccaaagctaagatttcttccctctctggaattagcaagcagcccgccctgcccaactcccctggaagcgcgcgtgctcgccaggcctcgggacgcctgcgcgggcgcccttgcactggcaccagggctccggggtaggggcgcaccgatctgcccaagcctctgcaggcactggaggaaggcgagccctccacccgctcaacaggccccagtgccggcctttccttccagtctcaactccacccgggggcccgggggctccacagttaaaaactccacgccacggagatcgcaggtaagctgctggctcaacgaggtgtgctaaat

SEQ ID NO: 100281 - DNA, 30 bp, Homo sapiens
  chr21:45112947-45112977
  hypo
agatggccctgcttcgtcctagcaagtggg

SEQ ID NO: 100282 - DNA, 457 bp, Homo sapiens
  chr21:45114159-45114616
  hypo
gcatctggagcctgcgctccggctcagcgacctttcctctcaaatgcggaagcgtgcacttacagttcagaccgttctcctgtaagttcattacaaacacgggcggaaggcactcaggctttcgttggagaaacagaaataaggccttcttttgagcagcgattgctggatcattgatctgtttgaggaagtgtctgacctgggcctgagagctggagaaggtgcagattcaaagtgagcggctcctgaggagagccgccaaggctgctcgccttctccgtggcttccgcagctaccgtctgcacggtgagagggcacgggcacacggttcgggctggcgtgcagctctcccagccagccacgctctgctcaggcctggaagtgaaagccgcctccttcccgttatgccccccatacaggagcctcggtttttcagcaaaacgcggccagtcccctt

SEQ ID NO: 100283 - DNA, 30 bp, Homo sapiens
  chr21:45140408-45140438
  hypo
ctgttgggaaggatgcggtgcttcacaggt

SEQ ID NO: 100284 - DNA, 236 bp, Homo sapiens
  chr21:45140780-45141016
  hypo
tgtttccttctttggctcactcgggatcccccagcaatgtcctttgttctcgaactcccagtgactcgaggggtgtcctctgattgctcacctcaggtggagcctcgaaaggatggcgctgctgttcctacctcgggtctccccagtgcacggcatccttacctgtgggctccacagggttccatgcaggcattttgctcccataccccgatgtccaagcccggctggacaaggag

SEQ ID NO: 100285 - DNA, 1002 bp, Homo sapiens
  chr21:45175382-45176384
  hypo
gccctccgggctctccgtggtgggcagtccgcagcctgtcctccagggttcagcacgtgcattggcggagccggctccccggtggctcggagagcaggacggcccttgtgttccctggaaatcccctcctggcagcagtgggcacgtcgggtgttgtgagtgggccaggggcacagcaagtctgtcctccctgcaggtggcctgtgagaagaccgtgtctaccttgcaccacgttctgcagaggaccatccagtgtgcaaaaggtacggcggccgggctgcatgggctgcgtgggctcctggctcccgaagtgggtgggagagaagagctggcacgtgctggttttgaaggtgtgatcggtgtctcctgctgacctcacctctgggagtgggggcaacagcgggagcccctctgagatgggaactcagtgctctctgcctgccccgcagcccaggccggggaaggagtgaggcccagccccatgcagctggagctgcggatggtgcagagcaaaagggacatcgaggacccagagatcgtcgtccaggccacggtgctgtgagggccccgccgcttgcccgtgacacgcagcgcgttggtgtctccgtgtttgtccctgtgaaaacatgtaacgtctgccttagagccatgaccgaaacttgatatttttttctttcatgagtgtccggcatctgctggtcttcattgtgaaacgtgccagtcgtgctttgtgaaaaataacaaagtggtcacagaaatttgtgatctgaaaacccggctcccttccccacaaggctcctgggcctccgggaagacgggcccctgtttgccatctcgggggtgttccctgtgggagggtgagtgggtgaggccgagcctgctgcgtgtggagcctcgagtgggccctggctgccactaccgtacagaggccgtgtcgcgctgggctgggcctgggtggcctctgtctttgcatctctgagaaggagtcgggtggtaacggtt

SEQ ID NO: 100286 - DNA, 150 bp, Homo sapiens
  chr21:45176615-45176765
  hypo
cctctcagctacccgcgggacctcttgtaacccatcggcatcttccaggaatccgccgagtgacttgaggaagatgctaacgcagtaaggtctgtgctgggccaagagcagctttgaagctccagagaaccaccccgtcaggttccttgt

SEQ ID NO: 100287 - DNA, 53 bp, Homo sapiens
  chr21:45187177-45187230
  hypo
cacatgcaaacacatgcgtacatgcgggcgcacacacacgcacacagggatgc

SEQ ID NO: 100288 - DNA, 240 bp, Homo sapiens
  chr21:45187590-45187830
  hypo
gccccatgaccctccctgcctcggtgctacccttcctggaggcgggacacggcggctgatccctccctgagtgggagttgcgagtcctttgccttcttcccccgtctccggcttgtagccacaaaatgtgctgccctgggccctgcctcaggtttccctacggaaacggcacaggccacgctgcctcccctgctggcaccctagtctctgatggagaccgtggcctctccacccagaaag

SEQ ID NO: 100289 - DNA, 422 bp, Homo sapiens
  chr21:45188554-45188976
  hypo
ccagtgtccccaccacagctccgcaccgctccttgatctgggcctgcattagcatccccgggttatgtggctacccgtgctgcaaaggagcctgggaagtgtgtcttttccatctgtgcgaaattctatagtttttctcgcccttaagggaggtggggagaaggatctgggcagggaaggcccggcccatccctggccacctatgacactgtaagcctcttagagagcggccatgcctgcctcgctctgcaagcagacctgcagggtgcctggcacgaggacattcagatgtgggaaggagggaggagggagagacgacctggaaaggaatgagtgtgagctcagtcgatggtcagggactgtgcccaaccagggcctggctgtgccgtggggagctctccgagctctgagcatccaaatgt

SEQ ID NO: 100290 - DNA, 34 bp, Homo sapiens
  chr21:45194487-45194521
  hypo
tttcctaccagcacccgttcggggcaggccctcc

SEQ ID NO: 100291 - DNA, 167 bp, Homo sapiens
  chr21:45195122-45195289
  hypo
aggcctcagcatcgcctggacctgttcttgcttggggcatcccgtcggtcaccaaccatgacagcgaggcgggcctggcctgtgctccaccggagggggcttcttgcacagatgacctgctcatttcagcccctccagaatcttctggcaggcgcagagcaacagga

SEQ ID NO: 100292 - DNA, 31 bp, Homo sapiens; identical to SEQ ID NO: 33906
  chr21:45206422-45206453
  hypo

SEQ ID NO: 100293 - DNA, 30 bp, Homo sapiens
  chr21:45222212-45222242
  hypo
gcggcagaagaagacgaagaagcagaagcg

SEQ ID NO: 100294 - DNA, 470 bp, Homo sapiens
  chr21:45223509-45223979
  hypo
agcgggccctgctccgagatcagcccaggggccgtggccagagaggggctcgccagagaaggaggacacctcggcccctgaccagtgcccgagcaaaggcggccaatgtccaggagccggagaagaagaagaaacgcagggagtgatgtggccgggccaaggacaggcagggagggaggccaggcctcgcttgcaccgcgggacgaggctgaccgggctgttctgtagactcaggaccgtggctccagaactcctgtgccaggcgggagggaagggcggcactggagagatgggcccatcattaggggccagcatcccaggaactggacctttccccagagcctccgcctgtggctgtgatgaccttgggccagaaggtcaaactccgaagactgaaactctgcctgcagcaggactggccgcccctgctgtggggggttcagaaaataaaatgccgcgcagcccttgcc

SEQ ID NO: 100295 - DNA, 599 bp, Homo sapiens
  chr21:45224194-45224793
  hypo
tccagtaaggcctggattgcccggggtgagcgtgtgtgtggtgggaagacctggcttccgcgagagccttgttcctggaggcaggagcgccccgccatcctgggtacccgcgggtccgcaggctgcgcacctctttccctcagccaggtcaccctcagcgtcctccctgcccctctccccttcacacctgctggagcctgtgagggaggtggcgggtccccactgtggcgacggagagctgacagtagcccagggctttccacctgcatggaacaagggcctgtctgccgccagcgctgtggccacagcctgcataggtgacaaggggccgctgcgttgggttttgcccgcatcttctgttccatgggtgcccagccagccaggccgtgtgggatccagcgagaggccagggcttggagtgggcctgggaccaggaaggacctctaggctgtggctggccttgtgcagaccctggactgcatccggttccccaaagccctgctgcattcgagtgtcccccaaccccgggcaggtggcacctggtgacacctccttcagtcccactcagctgggcggccggggcaggcttagggcacagt

SEQ ID NO: 100296 - DNA, 31 bp, Homo sapiens
  chr21:45226070-45226101
  hypo
gctgagtgacatcccacggtacagacagtgc

SEQ ID NO: 100297 - DNA, 107 bp, Homo sapiens
  chr21:45233493-45233600
  hypo
agggcttatggtgccgtggcctgtctgctgcctggtctgtcctaaggccagtggccctgtccctaggctgtggggcacaggtcccattccccgggggagtgaagggc

SEQ ID NO: 100298 - DNA, 83 bp, Homo sapiens
  chr21:45268829-45268912
  hypo
cggtggcctcactctcgtgcccggtggctggctggcagtcacctggtcacagggtaggctgtgcctctcgtcacccagcaggt

SEQ ID NO: 100299 - DNA, 30 bp, Homo sapiens
  chr21:45271699-45271729
  hypo
tgtgacaattgtccacgcctggggatctgt

SEQ ID NO: 100300 - DNA, 43 bp, Homo sapiens
  chr21:45276199-45276242
  hypo
ctggtccttggtgaagtcacacgtcttgactgctcagctctac

SEQ ID NO: 100301 - DNA, 101 bp, Homo sapiens
  chr21:45276618-45276719
  hypo
tcagtgaaatattttataatcatgatctatgtctatgcctaaatcgccctgcctaagacactgaatagcctgagaaaactccctttcgtgctaactcactg

SEQ ID NO: 100302 - DNA, 31 bp, Homo sapiens
  chr21:45279018-45279049
  hypo
cctcagacccaggccccgagcaaaggctggt

SEQ ID NO: 100303 - DNA, 43 bp, Homo sapiens; identical to SEQ ID NO: 33910
  chr21:45281600-45281643
  hypo

SEQ ID NO: 100304 - DNA, 197 bp, Homo sapiens
  chr21:45289937-45290134
  hypo
tcccaactgtgactcattatgcggcacgggcgggcgggattttggattagttttaggaagcgaaccacagccgtcctccttggactccctgccgtggctggcagtgagctggtgcagggaggcgaagtgctggtgttctgggaattttcaaatgcactacagcgatcaggacacacgtgtttcagtgcacacaggtt

SEQ ID NO: 100305 - DNA, 51 bp, Homo sapiens
  chr21:45299400-45299451
  hypo
ggaagtgctgggtggccgtgggcttggaggctgggtcgtgggggtgtggcc

SEQ ID NO: 100306 - DNA, 74 bp, Homo sapiens
  chr21:45299899-45299973
  hypo
aagaacagggcagcatgactccggggcggaggacgcagccctgcatcccttgcgtccccaggcatcttaggagc

SEQ ID NO: 100307 - DNA, 16 bp, Homo sapiens
  chr21:45317974-45317990
  hypo
tcggtaacagagggag

SEQ ID NO: 100308 - DNA, 105 bp, Homo sapiens
  chr21:45318979-45319084
  hypo
tctttttctccttgaagtgcacgtacatgagaaattcctctggttagagtgtgctggtggcgaacccgccccttgtgtttgtccggaagcactagttttccctgc

SEQ ID NO: 100309 - DNA, 732 bp, Homo sapiens
  chr21:45345792-45346524
  hypo
ctctggtgtggtggccgccggcgccatgtagctgcctgcccaggagaagcggcgaggcccacgtgtgaggccctgagagctggaaataggtactggatttcagtgtccgatggagaagtctgtgatattttggatatgttggattaggtaaaacacatcgttaaagttaattccacttttctctgtgttttactgtggccactggagcattcagtggtacggtggctgcggcttgccttctcccgctgggtcagcaccagggtacaggtcatctgtagacttttgcctgagacacagacgcctgcttgggacatggactccagctcctcagccctgtcctccagcagcggtgaaatctggagtgttcttgagtaacgcactggcgccaagggggtgctgagccttcgctctgccgtccttggctgaacaagctgtttctctggggaccacgtcaggtaacacgtaggacagcggggtggtccagcagggagggcatgcgcatctgtgtggcaggactgggggtgattttatccgggatcccctggggtggcccagcgttggctcgggtgtttcattctcacagagaacaggcagcttcaggggccacgcgtgcacgagaggagcccccagcccccacggcgcgttcctgggtttccatgctgcggcatttaagaaaagagctctgtgtcgtgctgctggggtagcttccgtgagctacgctggccttttttt

SEQ ID NO: 100310 - DNA, 1048 bp, Homo sapiens
  chr21:45352874-45353922
  hypo
tgtagtggccacactgattgacgctctctctccctcacagcgtgccaggtgccttttctctgcgttctcgtcaacacctgttacattcgtctttttgataatagccaactgaacggcatgaaatgacacctccctgtggcttcgatttgcttctccctgatggttaataatgccgaacagctcttcgttaacctgctggctgtcggtgtggctccttctgaggcacagccgttcgggtcctttgctgtttgctttcttgctattgagtctgagcccctttaccctgtggatgctgggcctgcatcgggcatgtggtctgcagggttttctctcccttgcgggtcgtctctttaccctgtcgttccctttgtcatgcagaagctgtttagtttgccgtaatcccagtggtctatgtttgcttttgtcgtgtatcttttttaaagctctgccatctgttttctccatggggaaaggtttgggaatatcgatgatgtcatcatactcctggctgcttcttgacattttccatgcccagcattgttctcagtgcgccccgggggtctttggttctccatagcctgctggcgtccatgtgtttttattctttctttatggttgaggaaactgaggcacagcttggaagcggttggcactggggttaggctccagtagtctcggcatgtagcagcaaatgtgggaggggcagcacaggggaaaggtgaggggagagtcaggagagaaggacgccgcataccagatgcccagaggccccggcggcctccatccaagcacaggcccaagcaccagctgcaagagccagaggacggcactcccgcgcctgccacgagcctcacgtggagagtggacagtggcatggaaacgccagagggttagaactgagcagcaggacggggtctgtgggtgcacgagaggaggcccttggtctggaacagcctggggtccccatgtgctgtcactgtgtggactggccacacctggtgtgccgcttcctttctcagtcatggccagctgccgaatgccgtaccag

SEQ ID NO: 100311 - DNA, 79 bp, Homo sapiens
  chr21:45354854-45354933
  hypo
gccaccacgccacttacgccacccacgctactacccatgccacccatgtgccgtccaccacccacgccacccacaccac

SEQ ID NO: 100312 - DNA, 114 bp, Homo sapiens
  chr21:45355817-45355931
  hypo
tccctgatggcggctcgagtcggaagccagagtgtagaacagtagcggagcccgcccagctgttcctaagcaaggcctaggccccactgcagggtcacacggaaggctcacatg

SEQ ID NO: 100313 - DNA, 100 bp, Homo sapiens
  chr21:45358106-45358206
  hypo
ctaagttagttaacatcgctcattgggatagaaggaacgtactgaggaacgtactgaggattagaagtcagaattcttgaatctgcaaatcttttttttt

SEQ ID NO: 100314 - DNA, 257 bp, Homo sapiens; identical to SEQ ID NO: 33917
  chr21:45360446-45360703
  hypo

SEQ ID NO: 100315 - DNA, 31 bp, Homo sapiens; identical to SEQ ID NO: 33918
  chr21:45367128-45367159
  hypo

SEQ ID NO: 100316 - DNA, 46 bp, Homo sapiens; identical to SEQ ID NO: 33919
  chr21:45374889-45374935
  hypo

SEQ ID NO: 100317 - DNA, 30 bp, Homo sapiens; identical to SEQ ID NO: 57736
  chr21:45381291-45381321
  hypo

SEQ ID NO: 100318 - DNA, 39 bp, Homo sapiens; identical to SEQ ID NO: 13305
  chr21:45381602-45381641
  hypo

SEQ ID NO: 100319 - DNA, 206 bp, Homo sapiens
  chr21:45393401-45393607
  hypo
gccaagctgcacggcgcctccgcctcgggtgccacacagccccccacggagagactcctcatccgccatcctccctgccgctgcctttattttgcccgatcatattttaataaatactcgctttgaacttgtaaggcttcggctgttcaggtcactcaccgcttcgctgtttgaggagcagcagtgtccccgcgcgcccctgcagc

SEQ ID NO: 100320 - DNA, 222 bp, Homo sapiens; identical to SEQ ID NO: 33921
  chr21:45396664-45396886
  hypo

SEQ ID NO: 100321 - DNA, 54 bp, Homo sapiens; identical to SEQ ID NO: 33922
  chr21:45399854-45399908
  hypo

SEQ ID NO: 100322 - DNA, 999 bp, Homo sapiens; identical to SEQ ID NO: 33923
  chr21:45400147-45401146
  hypo

SEQ ID NO: 100323 - DNA, 30 bp, Homo sapiens
  chr21:45402470-45402500
  hypo
tcccagcatctccacgcgcgcccgtgggag

SEQ ID NO: 100324 - DNA, 767 bp, Homo sapiens
  chr21:45403453-45404220
  hypo
cagagggcagcgctcggccggtcatgctggctcccttggccttgcagcgagcccctggcccacgccgagcgagggatgcttctccctacagcatgtccactcccccggcatggccaggtggggcccctggggcaatggcagtggtagaacgctcaacttggttgcggtaccatcagcccacctgcatttggctttcgacttgcttgttctaagtcacagcgccctcatctttttagcaaggtaaaaaaaccaaaatgggtgttatctctgatatcttgaaaccagcgttctgaatagaggtaggttgagttttctaggggaaaacaaatggagaaaagaggcatgaagaaaagtaaaccgagaacataattaggcatcgggcctaagtgtcctggggagattggaggggacggcagcgttctgcatgatggaggcgctgccgggccccgggtctgtgggggccgtgctctcagggcgtgtgcgggacgccacctgtgcacacctgctcagagcacggctcctcgcaggggtgaaggggcagaccaacgaaaccagatgagaccaacgacaccatgcgagacacgcttgcagacactgttgttttggaaatgtgcttccctccatctgaaatctcatccctccacccgcccactcgggcagctgtgccgtgggcagggcatgcgctcccctggctgagcaccccagagattctcctgcaccttcctcatgccgcacgctgctcatccgtctccatgtgtgtttagatc

SEQ ID NO: 100325 - DNA, 31 bp, Homo sapiens
  chr21:45422610-45422641
  hypo
ctgagctgccatggggcgagccctgggcctc

SEQ ID NO: 100326 - DNA, 30 bp, Homo sapiens
  chr21:45429140-45429170
  hypo
aaaatcctgactttcgttctagtttgtagt

SEQ ID NO: 100327 - DNA, 136 bp, Homo sapiens
  chr21:45446229-45446365
  hypo
ttactgcctcgacattatacacgaattatagcaaatactttatgcattattgaacaggctgagatgacttcccagtttgtaatctcggatgtttttatcgtccatttgaaagcccgttttaccaaaagccattgaa

SEQ ID NO: 100328 - DNA, 31 bp, Homo sapiens; identical to SEQ ID NO: 33926
  chr21:45470786-45470817
  hypo

SEQ ID NO: 100329 - DNA, 282 bp, Homo sapiens
  chr21:45478823-45479105
  hypo
gttgacatatgcggtcgtcacattggttgttacttagcggagcgtagacattattcatagtgctgcgtgcctttctctgtcgtttaatggctacatactgtttcttctatacattgatttatgtttttgtttttttaaaaaacgtatcttgggcgaataggaggagcttgcctttgttttcgagatgctgcagcagttcgaggacgccctggtgcagtacgacgaactggacgccctcttctctcagtatgtggtcaacttcggggccgggggtgagtagtg

SEQ ID NO: 100330 - DNA, 31 bp, Homo sapiens; identical to SEQ ID NO: 33927
  chr21:45482526-45482557
  hypo

SEQ ID NO: 100331 - DNA, 134 bp, Homo sapiens
  chr21:45499831-45499965
  hypo
gcatccacttccccccgcactcctaagtatgagcctctccacgctccttacctctccgctccagctacctgcagaccagcagcctcttagccagtgaccaccacctcactgaagaggagcgcaagcacttctgc

SEQ ID NO: 100332 - DNA, 291 bp, Homo sapiens
  chr21:45508636-45508927
  hypo
ggtggcacctgtgctgtgtgccgtgttatcccactcttccctggcgctggcggcacctgtgctgtgtgccatgttatcccactcttccctgacactggcggcacctgtgctatgtgccgtgttatcctctcttccctggcgctggcggcacctgtgctgtgtgccgtgttatcccactcttctctggcgctggcggcacctgtgctgtgtgccgtgttatcctcttttccctggcactggcggcacctgtgctgtgtgccgtgttaccccgctcttccctggcgctggtgg

SEQ ID NO: 100333 - DNA, 26 bp, Homo sapiens
  chr21:45510773-45510799
  hypo
attaaaaaattatttttcagccgggc

SEQ ID NO: 100334 - DNA, 66 bp, Homo sapiens
  chr21:45511962-45512028
  hypo
tcaacagagaaccagagtgtacggaaatgatgtagtatgtgttgcgactgagcctttagatagaac

SEQ ID NO: 100335 - DNA, 326 bp, Homo sapiens
  chr21:45513668-45513994
  hypo
atgatctcatatgatataaaacttatggtatcataaaaagttaaagatttaccaattttgtacaatcttctgctgggacaaggccaggcaaagggagtcagggcagggacaggtgctgtggggcctaaagcagcatgcataggcgtgctgtgaggcggggcctgcccatggtgtctgctcagcacccttcgcatggcgtgtgtttcgctgcagtgtctgtgtcctctttgcggttatggtgctgtgtgagcagtgacccccaactctctttccagcccatctacagcaagcagtcggtgttcttcgtctgggaactcaagtggaca

SEQ ID NO: 100336 - DNA, 111 bp, Homo sapiens
  chr21:45516515-45516626
  hypo
ctggccgtcagtgctcgcgtgtctctctgaagaggctctgcggttctggtccctgtgcctgagctccaggtgccgccaggtgaggcccctgctgctcgccttgggctgtgc

SEQ ID NO: 100337 - DNA, 30 bp, Homo sapiens
  chr21:45517195-45517225
  hypo
ttacacacgctcgcgcgcacacacaacgct

SEQ ID NO: 100338 - DNA, 368 bp, Homo sapiens
  chr21:45518810-45519178
  hypo
catcattcatttttaatcagacgtctaccaaatacccaacactgaataactagcttccccagcgctcttgcaagtgaaaagggcgttctgtgaaaacagcggctatttcagctcgcagcaccgagcgctccccgtgtgctttccctgagccagctgtcattctgcagcagagacccagagaatgtcaagaacacaagcactcaagaatggaaataactcaaacgtccttcagctcgagagcggttaaactggcacatctgattcctcctcagcagtgaaacagaagggactgttgacacacgcagtgctgtggttggatctcaagggcattatactaagagaaaaacgccagtcctataaggaggtgt

SEQ ID NO: 100339 - DNA, 31 bp, Homo sapiens; identical to SEQ ID NO: 33931
  chr21:45536572-45536603
  hypo

SEQ ID NO: 100340 - DNA, 166 bp, Homo sapiens
  chr21:45546679-45546845
  hypo
gcaccccccagccagccgggagaccgcaggatgacttgcttcgtggggagagcagcctggatatgctgtccagtgatcattaacggttcttttttccccaggtgacatgagttctcggcacttcaaacctgagatcagggtgacctcactccgcttctctcccact

SEQ ID NO: 100341 - DNA, 30 bp, Homo sapiens
  chr21:45551003-45551033
  hypo
atggagttttctaacgtgaggatgaagtct

SEQ ID NO: 100342 - DNA, 64 bp, Homo sapiens; identical to SEQ ID NO: 13307
  chr21:45553435-45553499
  hypo

SEQ ID NO: 100343 - DNA, 193 bp, Homo sapiens; identical to SEQ ID NO: 33934
  chr21:45558784-45558977
  hypo

SEQ ID NO: 100344 - DNA, 30 bp, Homo sapiens
  chr21:45575743-45575773
  hypo
ctgcgcggctccgagcgagtgcacggggct

SEQ ID NO: 100345 - DNA, 102 bp, Homo sapiens
  chr21:45583676-45583778
  hypo
agggccttccaggcgcgttcccgagcgtgcactgaaggtgttagcgcgtggcaccggagacaccaggctggatgaggctggacaagcgcctccgccagaagc

SEQ ID NO: 100346 - DNA, 30 bp, Homo sapiens
  chr21:45584127-45584157
  hypo
tccacctagaacctcgggaagggacacgtc

SEQ ID NO: 100347 - DNA, 30 bp, Homo sapiens; identical to SEQ ID NO: 33936
  chr21:45584417-45584447
  hypo

SEQ ID NO: 100348 - DNA, 31 bp, Homo sapiens; identical to SEQ ID NO: 33937
  chr21:45585662-45585693
  hypo

SEQ ID NO: 100349 - DNA, 30 bp, Homo sapiens
  chr21:45586572-45586602
  hypo
cagttggcccacagcgggcccctacgaggc

SEQ ID NO: 100350 - DNA, 165 bp, Homo sapiens
  chr21:45605770-45605935
  hypo
cctgcttgcaatggtgcgtcaggcagtggcccctggtgccggctgcttccccagcagtgaccttggcttctcttctgcaagcccctgcctgccccgagatgccaagccccaggatccaccagaactgccctcgctgcctatggccccgagcgcccaccctcgggg

SEQ ID NO: 100351 - DNA, 140 bp, Homo sapiens
  chr21:45617226-45617366
  hypo
gtggaggaggtcctggcctgccgcccagggatggccggtccaggcgcagggccgattgtccacttctggcccctgaggtaccgggagggctggtgagcagcatgtctcgctctgagaccggccaggctgctggggcaggc

SEQ ID NO: 100352 - DNA, 17 bp, Homo sapiens
  chr21:45621487-45621504
  hypo
atcttgttgcccaggct

SEQ ID NO: 100353 - DNA, 76 bp, Homo sapiens
  chr21:45621743-45621819
  hypo
agcgcggccggccaggcttggaacgcttgaggcacattctcagagacacgatttcggtcacagccttggtaatatg

SEQ ID NO: 100354 - DNA, 30 bp, Homo sapiens
  chr21:45626012-45626042
  hypo
tccgacactagcacccgtgtggaaggaacg

SEQ ID NO: 100355 - DNA, 266 bp, Homo sapiens
  chr21:45628848-45629114
  hypo
cacctgcaaaaatgtccgcctgcacagatgtccacctgcatgaatgcccacctgtgtccacatgcacgaatacccacctgcacagatgcccacctgcacggatgcccacctgtacaaaggcctacctgcgtgaatgtccacctgcatggatgcccacccgcacggatgcccacctgcacagttatccatctgaacagccctctggtgcctccttttgcttgcacatgttcaaatcctcccagtcctacagtcgattgttcctagtt

SEQ ID NO: 100356 - DNA, 165 bp, Homo sapiens; identical to SEQ ID NO: 13308
  chr21:45660234-45660399
  hypo

SEQ ID NO: 100357 - DNA, 133 bp, Homo sapiens
  chr21:45678288-45678421
  hypo
cccgaggctgcagccgtggtgcccgtcggcgcgcctgcattctgcagcgggaaccgagggaaggccgtaagtcagggcctgctgctgccgggtgctgcccctccacgggctccttaccgactctcggtcgtag

SEQ ID NO: 100358 - DNA, 31 bp, Homo sapiens
  chr21:45704769-45704800
  hypo
ctccaggccatgcctgcggggccaccacagc

SEQ ID NO: 100359 - DNA, 111 bp, Homo sapiens
  chr21:45709580-45709691
  hypo
actcccagcaagttcgaagactccggcagtgggaagaacaaggcccgcagcagcagtggcccgaagcctctggttcgagccaagggagcccagggcgctgcccccgtaagc

SEQ ID NO: 100360 - DNA, 30 bp, Homo sapiens; identical to SEQ ID NO: 33942
  chr21:45712923-45712953
  hypo

SEQ ID NO: 100361 - DNA, 209 bp, Homo sapiens; identical to SEQ ID NO: 57743
  chr21:45713495-45713704
  hypo

SEQ ID NO: 100362 - DNA, 30 bp, Homo sapiens
  chr21:45730209-45730239
  hypo
cccagtgtggccggcgtggcgggacgcgga

SEQ ID NO: 100363 - DNA, 30 bp, Homo sapiens; identical to SEQ ID NO: 33944
  chr21:45730716-45730746
  hypo

SEQ ID NO: 100364 - DNA, 30 bp, Homo sapiens; identical to SEQ ID NO: 33945
  chr21:45735776-45735806
  hypo

SEQ ID NO: 100365 - DNA, 84 bp, Homo sapiens
  chr21:45736415-45736499
  hypo
ccatcaccctgccctgcgtacgtgcgtgggtaagcgtggtgtgtgggtgtgggtgtgggcagtgtgcacgcgagcatggcacgt

SEQ ID NO: 100366 - DNA, 30 bp, Homo sapiens
  chr21:45744166-45744196
  hypo
ctggggggtggggtcgcctggttgagaacc

SEQ ID NO: 100367 - DNA, 219 bp, Homo sapiens
  chr21:45744629-45744848
  hypo
gggcaggtgggacgcgtagcccagtgctcctgctggccccggatcgccggtcagcctggaattccctccccacagtcctccggctcatccgtgtccgcccctcccgcaggtcaacgtggagcacatgacggagaagatgaagacagacattcagaggggcctggtgctgcggtgaggctgccgtgggtccctggccacagctgcgcgtccaactctcgg

SEQ ID NO: 100368 - DNA, 30 bp, Homo sapiens; identical to SEQ ID NO: 33948
  chr21:45746841-45746871
  hypo

SEQ ID NO: 100369 - DNA, 31 bp, Homo sapiens; identical to SEQ ID NO: 33949
  chr21:45750373-45750404
  hypo

SEQ ID NO: 100370 - DNA, 30 bp, Homo sapiens
  chr21:45751130-45751160
  hypo
gtcaggccctgtgccggatggcagatgcct

SEQ ID NO: 100371 - DNA, 211 bp, Homo sapiens
  chr21:45751582-45751793
  hypo
gatgagaacagacactccccccggataatccctgtccctcacttcccagagacgcagctcacgggaagccccattcactccccgtgggaggaccctgggggacagggatgggctgcggagtccccgctgccctccagcctcacgttgcctcctcctcgctgtccagcgggtcccggccagtctcagcagcggagctgagggagctcagtgt

SEQ ID NO: 100372 - DNA, 30 bp, Homo sapiens
  chr21:45752445-45752475
  hypo
ctgcggtgctgggacggcccctccccacgg

SEQ ID NO: 100373 - DNA, 207 bp, Homo sapiens
  chr21:45753662-45753869
  hypo
cagcaggcctggagcggggacctgcaggctttaccctgcagcgtggggtccgtcccctccacaagcgaacacgcggagccgctcccgcaggccctcaaaggcgcggagccagggccccctgcctggagggctgcactcgcgtccggcaggcgcctcagaagggcggtcaccaggcccccatgggcagcctgccgtcctgagcccccc

SEQ ID NO: 100374 - DNA, 148 bp, Homo sapiens
  chr21:45754330-45754478
  hypo
gcctgactagtgaaacgagccccgcggcaggcacgcgcaccccccctcaacctctgggcgggcacgcgcaccccccccccccccccgctcaacctctgggcgggcacgcgcacccctgctcaacctctggactcgggctccatctcct

SEQ ID NO: 100375 - DNA, 214 bp, Homo sapiens
  chr21:45768332-45768546
  hypo
ttatgggaagaatatcgtgtaattgctactgcagcagcgtccgggcagacagacgtgcagtgtgcggttcttctctagaaaggcaggagccgctcccagggcgatgtgggcccggctgtttcatcagagatggtcagcttggtacctacttcaccttaaatgatgttcccacagaggccccgggatacttggaaacaagcgcccagcccctctc

SEQ ID NO: 100376 - DNA, 300 bp, Homo sapiens
  chr21:45768769-45769069
  hypo
ccaactcctgcagtgggtgctcgtcgagcacatctagttgcagggtggaccgggcgaggactgtaccgtccagcagggcgcagctgcgggtgtgtggggacactgtgtctagttgcagggtggaccgggcggaggactgtaccgtccagcagggcgcggctgcgggtgtgtggggacaccgtgctggccactctggagggcagcttccggccatgcttgtgcagagcacagtgtcctgaagaggtgacagtgtcctgagtgctgtcctacaccaggggctatgaccgccttcccaccact

SEQ ID NO: 100377 - DNA, 31 bp, Homo sapiens
  chr21:45787688-45787719
  hypo
tggtgagcgtgaggcacggctgcatcttttg

SEQ ID NO: 100378 - DNA, 38 bp, Homo sapiens; identical to SEQ ID NO: 33951
  chr21:45791195-45791233
  hypo

SEQ ID NO: 100379 - DNA, 31 bp, Homo sapiens
  chr21:45819155-45819186
  hypo
ggggctctcatatctccgcccaggggtcttc

SEQ ID NO: 100380 - DNA, 371 bp, Homo sapiens; identical to SEQ ID NO: 33952
  chr21:45819428-45819799
  hypo

SEQ ID NO: 100381 - DNA, 30 bp, Homo sapiens; identical to SEQ ID NO: 33953
  chr21:45820208-45820238
  hypo

SEQ ID NO: 100382 - DNA, 268 bp, Homo sapiens
  chr21:45834111-45834379
  hypo
cactctctgtggtcactgctgcgtctcttgagctggcgtgagtctgtctcttgagctggcgtgggtctgtccttgtggctgctggggacccgcggtgctgtggatccacaagggccctgctcacggtgctgctgcggaggcagcctcctcccgcagggcagggatgttggtgtcagcctcgttccttctgcgcaggcgcagcattattcatgggctcactgctctacccggggagcgtgctggggccgctgctgctcagggctgtccc

SEQ ID NO: 100383 - DNA, 30 bp, Homo sapiens; identical to SEQ ID NO: 33954
  chr21:45844752-45844782
  hypo

SEQ ID NO: 100384 - DNA, 30 bp, Homo sapiens
  chr21:45847348-45847378
  hypo
gcaggcttacctggccgggaaggtggcctc

SEQ ID NO: 100385 - DNA, 243 bp, Homo sapiens
  chr21:45847790-45848033
  hypo
tgggacgggcaagggcgggtgtttagggaggtgcatccggtggctatgggaagctgacgaggagagcagcaggtgcctggcatgggcaacaaggcgtgagcacctgctctcacgggtggctgccacacaggcaggtgtgtcaggacttggcaggacgtggtgtccatgcgggctttagtagtgcagaagagcactttctgtatgcaccatgcttctgttgtggacttgcgaatcatattttca

SEQ ID NO: 100386 - DNA, 31 bp, Homo sapiens
  chr21:45856840-45856871
  hypo
gggcctgacactgccccgccccaggcagggc

SEQ ID NO: 100387 - DNA, 154 bp, Homo sapiens
  chr21:45895238-45895392
  hypo
tttaactggtatgtgaccttccgctggaatgctcagctggcaagggaagagcacctcaagtgagcatgtgtacaatttcagggcacacattgtgcacgcagcccctcccacatgctggcaggccacggcgcgcgtgacagcccaccccaaggga

SEQ ID NO: 100388 - DNA, 431 bp, Homo sapiens
  chr21:45939559-45939990
  hypo
aacttatgctcagctctgtcccgtgccacatcaaaccaagtgacaggccgcattgcttggcttgatcccagttctgccacgggcaaagccctccaccgttctgagcctctgtgtccttgtggataacagggaccagtggcagcaagcccctctcaaggtgctgtgagggtgatgtgggcggatgcgggcagagctcttggcacaggtgctctacagagtcgaggctcagccagtgtgagccgctaccaccacctacctcctgaggctgttaccaaggccaatggctggaaggaatcttgctcacccccaatcccagtgcactgagcctcactctgcccccgtggcaggaggctcatcccgcctcttcctggctcccaggcacgctcacctgttccatccacagcactagcgagctcaaggtgtgttccttc

SEQ ID NO: 100389 - DNA, 30 bp, Homo sapiens
  chr21:45992399-45992429
  hypo
tcctgtgctaccctcgccaccccccatgct

SEQ ID NO: 100390 - DNA, 30 bp, Homo sapiens
  chr21:45999556-45999586
  hypo
gcaacctcctaacccgagtcaggaccagtt

SEQ ID NO: 100391 - DNA, 30 bp, Homo sapiens; identical to SEQ ID NO: 33956
  chr21:46032011-46032041
  hypo

SEQ ID NO: 100392 - DNA, 224 bp, Homo sapiens
  chr21:46035053-46035277
  hypo
gtgctgaaaaatctccggcgcatgtacgtaagcggcactgtttgttaccatgaaaaattagaaacaacctaaatatccatccacgagggaatggaggcgaatggagccagcgccgcaccacggggaggccctgcacgagggccgtgcgctcacccgacccgcacacacgcaggagcgcgagtgcccaggctgcggaagagagtccaggccgcacaggtgccaag

SEQ ID NO: 100393 - DNA, 30 bp, Homo sapiens
  chr21:46035996-46036026
  hypo
ctgggcagagtgcagcgtgtcggcgggcac

SEQ ID NO: 100394 - DNA, 278 bp, Homo sapiens
  chr21:46036537-46036815
  hypo
tggctttgtttacctggaacccgagaccctgccctggtcagcacccaattcgagagctctgctcagcagtgagaatgagacaccgtgacaatgcggctgcgcaccggacacctggctcagcgcaggcagcgcacggacagagtctgcggtgtgaccacaccaagcagccctaaggcagcacgtgcccgcacaagcctcagcctctgctccggtcacgcctgcccacttgggtgtattttttgtctgacttttgcttctggggccgaacaacccagcga

SEQ ID NO: 100395 - DNA, 30 bp, Homo sapiens
  chr21:46101881-46101911
  hypo
aggactggcatctcacgggcacacacacgg

SEQ ID NO: 100396 - DNA, 30 bp, Homo sapiens
  chr21:46121106-46121136
  hypo
gcggagtggtcgggccggggtgcccagagc

SEQ ID NO: 100397 - DNA, 39 bp, Homo sapiens
  chr21:46186207-46186246
  hypo
ggccttgcagattcagcgatgcatcggggcacggcgagg

SEQ ID NO: 100398 - DNA, 213 bp, Homo sapiens; identical to SEQ ID NO: 33958
  chr21:46193372-46193585
  hypo

SEQ ID NO: 100399 - DNA, 168 bp, Homo sapiens
  chr21:46199321-46199489
  hypo
cagcatgaccagcacagggaacgccaccgagggaggcacgagcatgagctcttgctactggtacaacagccgcgctggagaggacagtgcccggatgagtaccccccccggcccacactggcacccagcgcccggcagcctggggacgcctcaagcctgggttactct

SEQ ID NO: 100400 - DNA, 111 bp, Homo sapiens
  chr21:46200861-46200972
  hypo
gcaagtgggtgccctgagcttcgccggcaagcggtgttccaggaactggtgcgctcgccacttcagctgcacgcaggtgttgggaaagccgactgcttttgctgctgttct

SEQ ID NO: 100401 - DNA, 245 bp, Homo sapiens
  chr21:46206092-46206337
  hypo
gcatgagtgcaggtgcgcctgcattaacacatgaaacaagcaggttacacatcagttcatgtatatgatctcctgcttctacagaaataaaaagagctgccccgatacaagtatacagccgcacagtccactaatgaggacagcccagactgtgggactcgccatccatctcataactgccttgggggccacattacacacaaacacagattccagaaaccttcagacaccgaaaaaacatgtgc

SEQ ID NO: 100402 - DNA, 22 bp, Homo sapiens
  chr21:46206716-46206738
  hypo
aaagactgggcttggcgcggtg

SEQ ID NO: 100403 - DNA, 30 bp, Homo sapiens; identical to SEQ ID NO: 33960
  chr21:46232814-46232844
  hypo

SEQ ID NO: 100404 - DNA, 52 bp, Homo sapiens
  chr21:46238920-46238972
  hypo
catctgatggtgagcccggccgaaggcgggggaggccgcacttcaggctcag

SEQ ID NO: 100405 - DNA, 288 bp, Homo sapiens; identical to SEQ ID NO: 33961
  chr21:46256985-46257273
  hypo

SEQ ID NO: 100406 - DNA, 202 bp, Homo sapiens
  chr21:46257708-46257910
  hypo
ctgggaacctgcctgcggtgcaggcgtctgcccttcctagaggaggcgctgggtgagaccctccagggtgtttggggccaagctgtgcgcacctctgatgccagctgttctcggtttggaaagcgctcactgtgcatgtggcgctgggggctgagctgcacgttccaggccccccccccaggccccccgcacacatcgtggc

SEQ ID NO: 100407 - DNA, 30 bp, Homo sapiens
  chr21:46270003-46270033
  hypo
tatcgagctgtttgacgagttcttgaagtg

SEQ ID NO: 100408 - DNA, 198 bp, Homo sapiens
  chr21:46270476-46270674
  hypo
gactctggacacacctgcttccggggcacgtggcccagagccgggcctgtggacgggcctttctttcttcttggggtggaccccgtccccacgatccctaaatggccaccccccagacagcccaacaggcagcgagaggcctgcaggcactgaggatgccaacagggctggagagagctgcagcgtcctgccccgtcc

SEQ ID NO: 100409 - DNA, 31 bp, Homo sapiens; identical to SEQ ID NO: 33964
  chr21:46277459-46277490
  hypo

SEQ ID NO: 100410 - DNA, 43 bp, Homo sapiens
  chr21:46278608-46278651
  hypo
ccatccacttctgcagcctagcgtggggatgtcatttcacaag

SEQ ID NO: 100411 - DNA, 30 bp, Homo sapiens
  chr21:46306214-46306244
  hypo
gccatgtctcggccgcgtgatggggcagac

SEQ ID NO: 100412 - DNA, 279 bp, Homo sapiens
  chr21:46306496-46306775
  hypo
gctcacccacagcggcggacgcccagaggacaagctgcctggggaggccggggtgcagccacacacgggtgtccacggcctcccgcagcaggaggtcgcatagtgtgggacgcacgtgcccctctgcgtgggacccccaaggacggccacttacattgttccactgggacttgagcttctccttctcaaagcgcctgtactcccggaggtcgctcaggtggatcagagccttccagatgaccagcaggagaatgccgatcagcacgatgcctgccacgg

SEQ ID NO: 100413 - DNA, 945 bp, Homo sapiens
  chr21:46308563-46309508
  hypo
ccggagctctggagccggtccccgctgcaccccagcggcctcacctcggctctcatccacatagatgaggtagcggtccatcccgtcctgctgctccagcgtgtaggccacccagcagccctctgagtccctctccttgcaggtcctgcccttcacggggttgttcgacagctgcaggcccggacacgccgcgctgcagttcttcccaaaggggcccttttcgaacttcaggcactcggcgcaggagctgcggggagccaggtgtgagcatcggtgccagggtgtgcgggggctccggcaacgggggctcgggcttgggtgtgtgtccaccagggggggcaggtggggttggggcgccctcaggccaaggagggggcccaagtggggcagatgcgggtgcagcgggtgaactggaagcctgatcccagggcccgcggcaggtgcgcacaggagggaggagggacacaggggcacggcggccgcggagggcccctcagtccagacgcacccgcagagaaccccgcggtgcagaggtgctcactggggtccccgagtgagcccggctgctgggtaggtggccggggagtggggatccctgcccgccctgcctgctccgcctgcactcacatgtacttgccacagggtgaggggcagccggggcactcctggcacagaggcagctggtagcctgaatggcactcgcatacgttgcagcggcaccggccacgaccactacactcaacacgccgcgggttcaggcagccctcagtggtcctctcgcactggcacgctgagccctcaaagcccgggtggcagcggcacttcccgcagaagcagagccccctccctggaagacggggcagcacggctaagctcctgcttggcctgggaaccgagacccgcccgaaaccccactgcggttgctccctccggcccgcctgcctc

SEQ ID NO: 100414 - DNA, 30 bp, Homo sapiens
  chr21:46309732-46309762
  hypo
ccaagttcctgctgacgcccggtggctggg

SEQ ID NO: 100415 - DNA, 175 bp, Homo sapiens
  chr21:46311700-46311875
  hypo
acagggacctgcgcccgcctcacctgcagatgccgcactccaagaagcccttgccatggcagaggctgcggtctctgctctggtcccggcaccggcactcacactggggaagaacctgcacggtcactatgtccgtgaagcccagcgcccggatgacaaacgactgctcctggat

SEQ ID NO: 100416 - DNA, 31 bp, Homo sapiens
  chr21:46316854-46316885
  hypo
ctggtgaggaggggaccgtcatggccaccta

SEQ ID NO: 100417 - DNA, 31 bp, Homo sapiens; identical to SEQ ID NO: 33965
  chr21:46317320-46317351
  hypo

SEQ ID NO: 100418 - DNA, 867 bp, Homo sapiens
  chr21:46318898-46319765
  hypo
tcagacctgcagtggcgctgggtctggcctgtggctgaaacatgcccccacccaatggatgctcgggacccaacagcactcacctcgtaggtcttcaccatcctactggtcaccgcgaagatgggctggatgttgttttcagccagcttgtgcgccagctggcccaccgatgggtagtcctggagagaggaggtcctgctcagttggccccgagtccaggacaaggcttccaggtacccgcccctgtctgccccgctcagcgtcagccctgcccgtgcttcgaaccctctctggggaaggctggagaggcagaggctgccacgcaggagtgcagggcagagagctgccacgccctctgggcaatgtgtgcatagactcgggctttcagagtccaggcatgagcagcatttgaggcgtctcaccgtgggactggggatgtccacgggggcagaatcccagccttccccacacggtggacctgctttcgcactgagggacactcagtttcggtagaggccatgagtgtcaggtgcggctctccctacccgagttccgggacccgagggccgtccctcccgtctgtggctcccggcggaggacctgagtcttgtatctctaaagtcctttgcggcccccagagcctacaacgtcaggctgcaagagcgtcgcactacggccagcgaggacaagccccttgtgaccagtggttgcctctcggcccacggctgatcccagccagaagtcctggcccctctgagccattgagatgcctccgcagagaggctcatcctaacccgtgcatcctgggctccttctcgcctctgtccctccctgcatgttcctcatggtccccgcagccgctcaccc

SEQ ID NO: 100419 - DNA, 655 bp, Homo sapiens
  chr21:46320218-46320873
  hypo
tggggtggggacttacgaattcgttgctcctcttgtacaagttgtcctccaggtgacagcggccgtcgttgggggtcaggatggcgcccagcttcccgtcgcccgcgaaatggaagccgtcatcagtggcaaacaccagcagccgcgtgacgttgcgccagccgatttcctcctgagaagaaggcgtggggggcagggttacctgcctcagtttcccagacccggccctctggagcagaggagacgatgcagagctggtggggtggcccggaggctggtgtgggtccccctttcccctgggtctcagggacccagctgtgttcccccagacgccacgcccaggaggagacaacggccctcaaacaccccgtgcacatgtgaggcgcagggagtggaggcacgtgtggaaaggcaaggagagagacacggctgcggtccctgcacttcagagctgggaacaaaccctcaggaaaccatccccaaggggaaaaaccctcgcagacgtgtgggccacacgcagaacgagtgcaacatggaggaaaacgagcctgaggggcccagcaggccttgagtccaccattgacagcccctggcaggcgcatgtgggggccgtgcgtgtcctaggctgtgacctcacactcgtgagcagtgtgtc

SEQ ID NO: 100420 - DNA, 499 bp, Homo sapiens
  chr21:46323404-46323903
  hypo
tagcccttggcccgccggaaggtcacgttgaacgctgctgcctggcctgccggtggggacagaacaaaaggagccacacctcacatctcacacagggtgtctgggggcgtgtggccccgagcgggctgtgcactggcaccctctcctccagcccccaaatcctcctgacctcccctctccccgcctggcaggagagctgaggaccagacacaggacatccaggcaggctggagtttcagaggaaggacatgactcccggacgcaggcatgtgcctcgcagtgacactgaaacccgcctggggtgcttagagttgacgccagcgacattggggacgcctttcattgagagtggcagcggctcacctgggctcacacctaacccggccccatgcctgcagtcccacgggcgccctcatcagcagccacatagacaggcatcacacgaacctggcacttcccagcaaggcccacgcgggccgtccccaggaggcccctttct

SEQ ID NO: 100421 - DNA, 313 bp, Homo sapiens
  chr21:46326697-46327010
  hypo
gcccacacacccgtccgacccggacacatgccttctgggcagccctgacaccccagagcagggccggactcccagccagagccaataaccagcacagacggtgcctggcaccaccaccgaggccaagcctacctggtcgcaggtaaagcgtcactttttgtggggacagctgcttctggcccccattgtggtcttcctgggtttcagcgaggcttgtggggtccatgatgtcgtcagccgcacagcccctcatgagcagctgtggccgggtgtcgcagcgaatggagtcaggatcccccggccctgtgaagtt

SEQ ID NO: 100422 - DNA, 408 bp, Homo sapiens
  chr21:46328929-46329337
  hypo
acccttccttaggttggcagccgtgagtggcaggcggggaccagcacggcaccaatctgcagccatcgcagtgatggcggcttcaggcggggacctccgcggatgctgagcctgcgggtgcgatttgatgagggcagaacctcaccagcccacagtggctgcgaggggatcatgcagcgggatggggaggccggggggatgccgtctcagcagagccgtccacgctgacctcatcaagactgggacggggccacagcagtgcctctcatgggcacttaggacaccgtcactgaggggctcctgccaaagcacacctgagtccaggcagaggaaactccagacaagacccccgagggtcatgctacaaagctgctctcctgacttcctcagaaacgcccaaggacagga

SEQ ID NO: 100423 - DNA, 45 bp, Homo sapiens; identical to SEQ ID NO: 33971
  chr21:46330653-46330698
  hypo

SEQ ID NO: 100424 - DNA, 34 bp, Homo sapiens; identical to SEQ ID NO: 57756
  chr21:46351694-46351728
  hypo

SEQ ID NO: 100425 - DNA, 30 bp, Homo sapiens; identical to SEQ ID NO: 57757
  chr21:46352430-46352460
  hypo

SEQ ID NO: 100426 - DNA, 30 bp, Homo sapiens; identical to SEQ ID NO: 57758
  chr21:46352802-46352832
  hypo

SEQ ID NO: 100427 - DNA, 171 bp, Homo sapiens; identical to SEQ ID NO: 33972
  chr21:46353948-46354119
  hypo

SEQ ID NO: 100428 - DNA, 30 bp, Homo sapiens
  chr21:46357091-46357121
  hypo
ctcccctacagtatcgtgtacgtatatgac

SEQ ID NO: 100429 - DNA, 97 bp, Homo sapiens; identical to SEQ ID NO: 33973
  chr21:46359158-46359255
  hypo

SEQ ID NO: 100430 - DNA, 97 bp, Homo sapiens; identical to SEQ ID NO: 33974
  chr21:46368231-46368328
  hypo

SEQ ID NO: 100431 - DNA, 512 bp, Homo sapiens
  chr21:46372999-46373511
  hypo
cctggtgtgttttccagaccccgcctggcaaggcccaggccgagcctgtgcagcaggctctcctcattcactcctcagacactactcctcatgggaggtggcagcgagtgccccccggctacagggctatcccttcctctgtgggcgcgtggccggcctgtcatgttcaggggccctgggcactgtggttttctgatgtgtgcttgtctgaggtgtaggcaggtcgtggaggctgtcttgcgaggttccctaggtggggcccccagactagctgaacccaccaagagctgcgagtggctgtacctcccagagcaggacgcctctaggtgagcagcacagccactccctcgggcaccatccccggcggtggggccctgcgtccgggcctcgggagcctgtcctgcaccatccccggcggtggggccctgcatccgggcctcgggagcctgtcctgcaccatccccggcggtggggccctgcatccgggcctcgggagcctgtcctgtgttgac

SEQ ID NO: 100432 - DNA, 30 bp, Homo sapiens
  chr21:46376785-46376815
  hypo
tgaggctggtttaccgcgtctgttcccggg

SEQ ID NO: 100433 - DNA, 201 bp, Homo sapiens
  chr21:46392161-46392362
  hypo
tttaaggcccaggtcgctgtcccatgtgaacattcggccaggtgggcggctgccttggccggctgaccacaaggagtgcaggcgagctcccgaagattcccacggttaactgagggtgagaagctccgcgggcagccggagcctgcctggggtggacgtcagagatgagagtgtcctggcccgcccgtgcccttagtcaag

SEQ ID NO: 100434 - DNA, 30 bp, Homo sapiens
  chr21:46396141-46396171
  hypo
ccatctggggctgccgcgccccactctgct

SEQ ID NO: 100435 - DNA, 223 bp, Homo sapiens
  chr21:46398054-46398277
  hypo
tggcccttccctgacacgagcagacacggcatccacagagacagcccggacaccctccaaggccccggccgatgggacagacgggcgtacaggagccataggcagcagatcccacgctccctcggccggggccagcttggctgcccagccccagctccttagagaacgggcttctcgcttcagaggagctggtcacaaaccagtggtcgcgacaaaaccattc

SEQ ID NO: 100436 - DNA, 30 bp, Homo sapiens
  chr21:46422923-46422953
  hypo
aagtgccaggacagcgccccaggtccgggg

SEQ ID NO: 100437 - DNA, 334 bp, Homo sapiens
  chr21:46424433-46424767
  hypo
tgagccagccacccccggcgggagaaacaccatccccacagccggcgctcctgtgccccctcctcccagccccgggcaggcctcgcctctgtgcgtttcccatggatgaggtcatagagcgcgtggccttccgtgcctgcctcttccgggcagcagcatggtgggtgtttctgaggctcctccgtgtcgctccacccgtcagcacttcatgcctctcggggctgggccacatttcgttgcagggatgggccacgtttttaacctgtccatcagcggacggacgtttgggctgattttatcttttggctatgatgaataacgcggtgatcaacat

SEQ ID NO: 100438 - DNA, 830 bp, Homo sapiens
  chr21:46492394-46493224
  hypo
ctgtgcggtgcctcacgtccactcaggccccggccatctcaccctcctggggagatggagggaagcaccatggggatttgctttttcttgctgccgacggagcccagccaccacgggagggaggcccggccagcctgcggtgggtgggtgacatgtggcccggatctgcccggggcgcctgcctgtaagtgggcccagcagacaccccatggagccgaggcaagccgtcccagctgaaccggcttaagctgcaggcccacagagtcatgagcagtgaagagaggttttcgccctctgaggtttggggtggcctgttacacagaaatacacacaacgtcctcaggcacgtatctctttaagaatgtgtcccgagaaggcgtcccaggagtcttgatttttatttagccgtccacggttgcccctttgggtgcttcgccttcagatggggtgaagggctcacttgttagctggctggccccaaagacaggcttgttttccaccaggcagtgactgaagccggcagcctgctgcataccgcgggccttcccctgacctgtccgggactgcgggctggcggctgacacctgcggagtgcttaccgcataccaggctcccaaacttccatctgtgttcgtcttttaagttttgttgttttccagagtcggagtctcagtgttgcccgggccagagcgcagcggccatttataggcgcggacctcggcctcgcacaccacagctccagctctgagacacaagcgacccgcacccccccaccgcccagccccagcctccagactggctgagatcacagtgtgcgccaccccatccct

SEQ ID NO: 100439 - DNA, 109 bp, Homo sapiens
  chr21:46549425-46549534
  hypo
gctctgtggatactgacgagcgcccactgggcctcagatgccctctgggcatggcagggaccaggcgctcgcttggcagctctcatgtgagccgctcactggacacagc

SEQ ID NO: 100440 - DNA, 51 bp, Homo sapiens
  chr21:46549556-46549607
  hypo
ggatggcatgcagagctgtggggagggagcggtcaccagggcgtgagtgtg

SEQ ID NO: 100441 - DNA, 30 bp, Homo sapiens
  chr21:46553592-46553622
  hypo
aagaggtgtgtgcccgacggtgtgtgcgac

SEQ ID NO: 100442 - DNA, 30 bp, Homo sapiens
  chr21:46554112-46554142
  hypo
tgggtgtgtgtgcccgacagtggtgtgtgc

SEQ ID NO: 100443 - DNA, 31 bp, Homo sapiens; identical to SEQ ID NO: 33977
  chr21:46674111-46674142
  hypo

SEQ ID NO: 100444 - DNA, 68 bp, Homo sapiens
  chr21:46677808-46677876
  hypo
gtcctcgtgggaaaccgcgggggcacgtggggcggctgcagggtccgcaaagccggctgtttgcgaag

SEQ ID NO: 100445 - DNA, 30 bp, Homo sapiens; identical to SEQ ID NO: 33978
  chr21:46696611-46696641
  hypo

SEQ ID NO: 100446 - DNA, 30 bp, Homo sapiens
  chr21:46703735-46703765
  hypo
tccggccctcacgccgtggtccaggctgtt

SEQ ID NO: 100447 - DNA, 188 bp, Homo sapiens; identical to SEQ ID NO: 33979
  chr21:46748148-46748336
  hypo

SEQ ID NO: 100448 - DNA, 71 bp, Homo sapiens
  chr21:46756060-46756131
  hypo
ggagtagggagaaagcgagcccatggctggagcgcgccaggagggtgaggtgagggcggggcccctggagc

SEQ ID NO: 100449 - DNA, 256 bp, Homo sapiens; identical to SEQ ID NO: 33980
  chr21:46763203-46763459
  hypo

SEQ ID NO: 100450 - DNA, 501 bp, Homo sapiens
  chr21:46771044-46771545
  hypo
acggccccccagggccgcctcggtcccagcgccgaccgcgagtctgtcctccagctgcctcgttcactgggcttgagtcgacaagaacctgccagggagggtggcaggaccacgaggctggggggcctcagagtttgccctgcaatgacaagacccagaatgggggaagggcctccgcacacctggggctccgcggggaccaggacgtggtggcggccggatcccaggatgggggggaagggcctccgcctacctggggctcagcggggaccaggacatggtggcggccggatggaccccaaaaacagagcaagactgacggagagcgtggatcagggaggttctgcaccagctcttcgcacaatgaggaaagatcttgctgctacaaaatagaaggaactcagcaaacaacctctctgagtggtgggtaaagatgcccgcgccctggcacatgtggtactagaacctcatgctgtacaggcgttccgctccgctgagggc

SEQ ID NO: 100451 - DNA, 412 bp, Homo sapiens
  chr21:46772698-46773110
  hypo
tggtgctcacaatcagccccccgcccagcagttacctccatccaggcacacacggccctcgttcccctctctgcccgtggggcgcctccacagatggctggaggacccatgcagaccctcggcttggtagcctgctgcccattcctgtgcccacagccggggctcctgtgcccacagccggggctcctgtgcccacagccggggcggcctgacctcgcagcacagggtgtcagccgggaggatgcgggggaggcggctgcccagcctcctgtgatcccggcaggtcctggccctgcactgggcccggtttcaccacctgtcagcctcagggtaggattttatgcagagtcacgcagtttacacacaaacacacacacgctggtatacacacgtatgtgcacacacatgcaca

SEQ ID NO: 100452 - DNA, 30 bp, Homo sapiens
  chr21:46779402-46779432
  hypo
tgtcctcatgggcaccgggtgaggcctcgg

SEQ ID NO: 100453 - DNA, 132 bp, Homo sapiens
  chr21:46779895-46780027
  hypo
gtatccactcaccgccgtctccaccccctcaggcacaggtccctgtcctcatcctcatcagtgcggtcccacaactcaggtgcggcccccactccccttcccgccaacccccttccccggccctgccgccct

SEQ ID NO: 100454 - DNA, 134 bp, Homo sapiens; identical to SEQ ID NO: 33982
  chr21:46799998-46800132
  hypo

SEQ ID NO: 100455 - DNA, 518 bp, Homo sapiens; identical to SEQ ID NO: 57761
  chr21:46800405-46800923
  hypo

SEQ ID NO: 100456 - DNA, 214 bp, Homo sapiens; identical to SEQ ID NO: 57762
  chr21:46801352-46801566
  hypo

SEQ ID NO: 100457 - DNA, 544 bp, Homo sapiens; identical to SEQ ID NO: 33984
  chr21:46801865-46802409
  hypo

SEQ ID NO: 100458 - DNA, 219 bp, Homo sapiens; identical to SEQ ID NO: 33985
  chr21:46802647-46802866
  hypo

SEQ ID NO: 100459 - DNA, 90 bp, Homo sapiens; identical to SEQ ID NO: 33986
  chr21:46804100-46804190
  hypo

SEQ ID NO: 100460 - DNA, 173 bp, Homo sapiens; identical to SEQ ID NO: 33987
  chr21:46804429-46804602
  hypo

SEQ ID NO: 100461 - DNA, 347 bp, Homo sapiens
  chr21:46808692-46809039
  hypo
ggcgcagggcgaggtcgggggaatggactcccctgggtttctccctgccgatcgctgtagtggttgagtcctccactgagcacagccactcctgtaggcttaccccgctgcagctcgctctcggatcctaataaacaagtgagtcctccactgagcacggccactcctgtaggctcaccccactggagctcgctctcggactctaataaacaagtgagtcctccactgagcacggccactcctgtaggctcaccccactggagctcgctctcggactctaataaacaagtgagtcctccactgagcacggccactcctgtagcctcgccctgctgaaccactcctgt

SEQ ID NO: 100462 - DNA, 30 bp, Homo sapiens
  chr21:46811227-46811257
  hypo
acataaaaaccatccgaaacacaccactgt

SEQ ID NO: 100463 - DNA, 31 bp, Homo sapiens
  chr21:46811547-46811578
  hypo
acctactactgtaccacgcatacccggccag

SEQ ID NO: 100464 - DNA, 286 bp, Homo sapiens; identical to SEQ ID NO: 33988
  chr21:46812066-46812352
  hypo

SEQ ID NO: 100465 - DNA, 30 bp, Homo sapiens
  chr21:46812600-46812630
  hypo
gaagtgctgactccccggtccttaatggtt

SEQ ID NO: 100466 - DNA, 332 bp, Homo sapiens
  chr21:46812981-46813313
  hypo
cagggcattgctcccggcacgaggccgcccgcctgcagcaggcccgcaggggcacggtgggtccccgcccgctcctcatgccttgagcgcgtcatccttcccggggttcacggcctctgacagccagacctcaacacggccagcacggtgtgcatggtgtgcacgcctcctgcgccggggccaccagagtgggctctcaccggaggagaaagacagtcggggagagcagcgctgtctgtcacgctttgtcacgctttgccggtgtcatctgagaagtggtgcaggggacaaggggggcgtgacaggactggtcctgcggtagagaccctctg

SEQ ID NO: 100467 - DNA, 139 bp, Homo sapiens
  chr21:46827461-46827600
  hypo
gtggatttgtgtgtgcgaaacagccgtgacccccaagaggtgcttgtagtcagtgcttcagagtcagagtggagctgaggaagaggactgtgtcaccggggcagttgctgatgcccatggccacgccaggagcctggtc

SEQ ID NO: 100468 - DNA, 30 bp, Homo sapiens
  chr21:46827862-46827892
  hypo
acggcgcctaggtaacgagagaccctcccg

SEQ ID NO: 100469 - DNA, 30 bp, Homo sapiens
  chr21:46828202-46828232
  hypo
gcacattcccagtcacgcgaagtgcagggg

SEQ ID NO: 100470 - DNA, 418 bp, Homo sapiens
  chr21:46834411-46834829
  hypo
ctttcctgtcatcacaggggacgtctggcattttaacagacctgggcggcctcctgcagacaaggctcggaccctgcggccgactctgccccaggcctggcccctgctgatggccatgctccgggcatgtggcctgagggcctcacggacagccagcctcccagaccagaaaacagccctgcccgccagtgagagggcagacagatggacactaatgtccccgaacctaagaaacaaaacccaaaaccctcatttatgcttccacttccgatcacacgcatagaaggccgaatactgaccccgagctgaccaccccggcctgtgggacccgtgagtatggcctgtgtgtgggatgaggctcaggatcaggtgcagatgaccctggattatcaggtgggccccacgtcattacgagggt

SEQ ID NO: 100471 - DNA, 30 bp, Homo sapiens; identical to SEQ ID NO: 33991
  chr21:46835050-46835080
  hypo

SEQ ID NO: 100472 - DNA, 506 bp, Homo sapiens; identical to SEQ ID NO: 33992
  chr21:46835358-46835864
  hypo

SEQ ID NO: 100473 - DNA, 30 bp, Homo sapiens; identical to SEQ ID NO: 33993
  chr21:46836324-46836354
  hypo

SEQ ID NO: 100474 - DNA, 219 bp, Homo sapiens
  chr21:46837281-46837500
  hypo
ctctggattggcccccgaacgtgcctgcctgctgtgcagggatccctgggttccccggggcttggggccctttcacctgcaggttccctgtcctgcggtctgtggcttgctcagtgtcctcaggtgtcctcttccgactcgagggtctcacgggtgcccccgccctgcctggcccagctgccctctctgtggcatttctaggaccgcggtctctctggc

SEQ ID NO: 100475 - DNA, 276 bp, Homo sapiens
  chr21:46837960-46838236
  hypo
gtgccgcccccggagcgctggctgtgagtgggggcgcctggcgtggggctggacggccagggcctgctgtctagatgtgcagtgacaagacccttcccttccaggggagccggctctgactccgagctctttgtgggctgcatctgcagattgaggacagcgctgagcggagctggccgggtgctcatccctggtgggggcagaggggtctgcatcccggcccccggctgccgaagtggtagggtgggcgtgcccttcccacgcctgcccgccagc

SEQ ID NO: 100476 - DNA, 55 bp, Homo sapiens
  chr21:46838479-46838534
  hypo
cggggtgctcaccggcggttcccacctgctctgcacagcccgcctcgtgcacctg

SEQ ID NO: 100477 - DNA, 491 bp, Homo sapiens
  chr21:46839033-46839524
  hypo
ctggagctgggccctgacacacgatgccgtgtgtagtgacatgcaattccatgtagtgacgtgattccgtgtagtaaggcgatgccgtgtgtggtgacgtgcagttccgtgtagtgacgtgatgccgtgtgtggtgacatgcagttccgtgtagtgacgtgatgccgggtagtgacgtgatgccgtgtagtgacgcaatgccgtgtagttacatgatgctgtgtgtagtgatgcgcgatgccgtgtgtggtgacacgatgccgtgtgtggtgacacttaatgtcatgtagtgacacgctcgcaggatcgccaaggccaggctggctccaaaggcttgggtctggcttcctggggccactgggtgctctctgaggccgcccatcactgttcgggccctggggtgggagctgggctgcaaagtggcctggactttatgtcctgccaggtacagtgtttccctcagcagatttatcaggcgttttgggtgtaaa

SEQ ID NO: 100478 - DNA, 382 bp, Homo sapiens
  chr21:46841064-46841446
  hypo
ctcctcaaggacagacggacagacaggcactctagagaagggaccttggccagacggctttgccgcccccacccccataggtgcttgctttgagccccttgcaaaggtgaagccagatctgggatcccagggcctggtgcggctggacatgggaggagggccacggtcacgcttgcacggggcagagactcccagaaccacaggcctcaggagagctgggaagggaaggagagggcactgcggtgcctggagagccagagtccgcccgtgtggaagtgttgggggctgtgttgcagtgacagccctggcgtctcaggagcggagcaggacaccgcgtttctggctgtgcaaggctccacgcgggtcagcagcccatcctggc

SEQ ID NO: 100479 - DNA, 57 bp, Homo sapiens
  chr21:46841889-46841946
  hypo
caacacactcacacagacacacgctcgggccgatacgcacacatggctgtcacacac

SEQ ID NO: 100480 - DNA, 30 bp, Homo sapiens
  chr21:46844057-46844087
  hypo
ggccaccccacctcccgcagtgcccggtcc

SEQ ID NO: 100481 - DNA, 873 bp, Homo sapiens
  chr21:46844399-46845272
  hypo
gacccccagggcagccgtgcctgagcctgcgtggtcacctcccacagtgccaaggcgctcccccaaggcccctgcggcccacctgaccagtggagaactcgcgagcactcggccagtggtgcctccaatttgcagcctccaatccctggtcagaggtgtgacctgaccctggaccagagcgctgggccaggtcctggtggcttctgcccttcagcttggaagctcctgaaaaccggctcccttccggggcagcccttggcccccactgaccctccctcagtcctaggtgtgcagtggcgtggggaccctgggaggcccgtggcgcagccccttcccgcctcctgcccgtcggtttccattgctcaggcactgcctcgcccgcgcctctttctcccagacctgagccaccgctgccaggatccttccccagctggttttccttctctttgatgtgtttccactgagggtccaaaccggtccaggcgcgggttccagaactttcttcagatctctcgcacctgaaaatttcctctgtagccattcgcaggaggtttctcagatgccccgggctcgggggccagtcagtctcatgaggacggggtgggtctgacttgtggcatcgcggcctctccatcggtgctgctgggcctgtgagccaatgggtgggcagcaccacccaccgcctccttcctcacaccagtcttgggctgcgcagagccccagccatgtgtgtgctgagtgcagtgtgaccgcgtccgcccgtctccccggacacgcctgttggagccccggccgtgtgtgtgtgtgtgctgtgagtgcagtgtgaccgcgtccacctgtctccctggacacgcctgtcagagccccagactg

SEQ ID NO: 100482 - DNA, 30 bp, Homo sapiens
  chr21:46845709-46845739
  hypo
agcgccaagggctctcgggattcacgagat

SEQ ID NO: 100483 - DNA, 290 bp, Homo sapiens
  chr21:46846291-46846581
  hypo
ttacaggtgtgagccaccgagcctggcctggagttattttgggagagggcagcccctggttcagcgtggcgaggctgcgcttgctctcccgggcgggcgtccacaccctcctcgccgagatggagaagcccaaacccctgcagcgctcccccatcacgtccggccctggaagcccccggaaaccctgccacgccctgagtgggagagcgcaggtccctttccggccctggaagcccccagaaacccttgggtgccaggcctggccgggacagcagcgacactgcatgctc

SEQ ID NO: 100484 - DNA, 30 bp, Homo sapiens
  chr21:46846999-46847029
  hypo
tgcagtttaaaaagccgggctctctccgga

SEQ ID NO: 100485 - DNA, 22 bp, Homo sapiens
  chr21:46848190-46848212
  hypo
cgctctgaggaaggtggggcca

SEQ ID NO: 100486 - DNA, 324 bp, Homo sapiens; identical to SEQ ID NO: 33999
  chr21:46848490-46848814
  hypo

SEQ ID NO: 100487 - DNA, 23 bp, Homo sapiens
  chr21:46849113-46849136
  hypo
ccgagactacagctttctttaac

SEQ ID NO: 100488 - DNA, 629 bp, Homo sapiens; identical to SEQ ID NO: 34001
  chr21:46849578-46850207
  hypo

SEQ ID NO: 100489 - DNA, 33 bp, Homo sapiens
  chr21:46855681-46855714
  hypo
ccttggacgtccccccggcgctccctggcacag

SEQ ID NO: 100490 - DNA, 30 bp, Homo sapiens; identical to SEQ ID NO: 34002
  chr21:46859968-46859998
  hypo

SEQ ID NO: 100491 - DNA, 30 bp, Homo sapiens; identical to SEQ ID NO: 34003
  chr21:46860944-46860974
  hypo

SEQ ID NO: 100492 - DNA, 810 bp, Homo sapiens; identical to SEQ ID NO: 34004
  chr21:46861362-46862172
  hypo

SEQ ID NO: 100493 - DNA, 30 bp, Homo sapiens; identical to SEQ ID NO: 34005
  chr21:46862420-46862450
  hypo

SEQ ID NO: 100494 - DNA, 427 bp, Homo sapiens; identical to SEQ ID NO: 34006
  chr21:46863355-46863782
  hypo

SEQ ID NO: 100495 - DNA, 382 bp, Homo sapiens; identical to SEQ ID NO: 34007
  chr21:46864061-46864443
  hypo

SEQ ID NO: 100496 - DNA, 30 bp, Homo sapiens
  chr21:46865016-46865046
  hypo
gagaagcctttccgccgccctccctccctc

SEQ ID NO: 100497 - DNA, 30 bp, Homo sapiens
  chr21:46868261-46868291
  hypo
atgcacctccacatgcgtacatatccgcac

SEQ ID NO: 100498 - DNA, 30 bp, Homo sapiens
  chr21:46868668-46868698
  hypo
tgccccactggcctgcgtatcttttgggca

SEQ ID NO: 100499 - DNA, 313 bp, Homo sapiens
  chr21:46870762-46871075
  hypo
ggagcccgtggctggcgtggcagtggtgagccctcgatggctgtgcggacaccagaggctgagggaggacacacactccatggtgggacagcacccccgggtccaccaaggccaggtggacgcttaggctccagggccctcgtggctgctccggcggtgccatcacctctggagacagggcccgactctgcaggacggcaccagtgggggacagcaggtcctctggggggtgtgaggttctgagctgttagcctcaggctcctcaggagcgggcaggtcatgataacaagagtggctgcgtgcgggtagccca

SEQ ID NO: 100500 - DNA, 30 bp, Homo sapiens
  chr21:46885375-46885405
  hypo
ccgggcacttcactgcgtaagtgctatggt

SEQ ID NO: 100501 - DNA, 349 bp, Homo sapiens
  chr21:46885700-46886049
  hypo
gcacctgatgctgagcacaggcgggcgtccgtggagtgcacgtgtctgagggtctctgaggggtttgcccttttcttcggagccacggtggccgtgagggatgcaggacattgggtgtggccctcgaggactggcctgtctggagcccactcccccgtgggtgaacgcggctcttggtggagagcccagtttggggagaagggacggtcttgtcctgggaggtgtcagacaaagccgagcatgggactcacaggagacccccagtcaggccgtgtcagggtgaggctgggagtgagggtcctggaaagtccggcttctgggagagggcgctttggctcagaggctgcca

SEQ ID NO: 100502 - DNA, 269 bp, Homo sapiens; identical to SEQ ID NO: 34009
  chr21:46886385-46886654
  hypo

SEQ ID NO: 100503 - DNA, 242 bp, Homo sapiens
  chr21:46893643-46893885
  hypo
taccatgaggcataccgcacccccagggaggctgcccgagaccccttccctctccgagactctcctgccctttgtgggccccccgaaatctggagctcaagcagcaccggggttgccactgccacctcaggaccgctggtgacccctttctctgtctgcatttagggggtgatcgctgagctgaaggtgcgcagggacccccaggtgagccccatgcactgcctggacgaggaaggcgatga

SEQ ID NO: 100504 - DNA, 1846 bp, Homo sapiens
  chr21:46894479-46896325
  hypo
ctgtgtgttgtgtggcgtgtgtgttggtggggtgtgtggaatcacgtggtacccaaggggagaatcccccagccccaggtgtgaggaacagcagggaattctcactcaggggcccagatcacaacatgccccacgtgaacatggacccacagcctcgctcctgggggcgtgggcaggagacgccgtggacgtggacccacagcctcgctcctgggggcgtgggcaggagacaccgtggctggactgtgggcagtgtgtgaacatccatgttactttcatgctttttctttattttgcccaataagcccgttgtttttgcctggaacatgccagaagacgccagatcgttcacatggcggccatgacaaggctgcgccctgggacagcttgctgggtgcggggggtcgccgaggcgccgcacccctcccctggcctgtcttgccctcaggggtcagtagcggtccctgaggatgtttctcctccgggttttcctgaagtttaaaacatccagccgccttggcgcgtgttcggcccagccgggcgtgcgctggggaaacctgtgcggggagcatctgcggtgcggcctcctccagggcagggctctggccagaagagaggagcgcgttccccctcccgcctccgcatgtctgaccaccggccgaggcaggttcagaagcgtcactgtcctcgacccgattggacacgacttactgaagctcagatggtgcctgggcagggaaggccagcgtgcccaccccagcggccccccggagagcaccagagagggctggacgaggcgagagggggcctggaggaggcgagagcagcgtcctttgcttcccaggcctgccgggctcggggcctggcctggctgccatctctccagcctttcccttttcaaactcctcaggcatccggagactctggcagcgggctcggggacgcccgggagcttctcagggaggagacggtgagtagccggacggggcccagcccacgctgcagggtcccgggagagcccctcccagcagtggggtgacacatgtgcacacgcaggtgtggctccaagagctccctctatgccacgaagacatattcctggctggggacagggatgctgggctgggcagacgctcggagcctgggcacaggccccgctccggccctgcctggccgccgcgtgtctctggtgagaggatattcctttaaaacgaggtcctgccctgcacactccttggtcttcgaggcaaccttggccttcccttcgccccatccctccgttagctcgtgcgtggccatcagggaatgaacgcgtgtgtgagcctgacgaccaggaggagaaggcggcgcagggagcgcgcggaaggctttccccagctcgggccacctgagaaaacacaggaggggcggggagtggggaggccccagccgcgggactgaggcgcggtgctgtccgtgagagacgggtgcgggaacgtgttccctgcggggaccctctgcagattcacatcagcttcccagcatggcctgtcgggcgccgggaggcctctgtggtgacggcaggcgcggtcctgggtcctggggagccggggagcccacaggcggccacacccctgcggcccacggaaggaagcccctcgcgcacggccctggagcaccctcctgtttcagaggatttttctttatctttcttgcgatcttaagtatttcatttcacaaaccaagcaagtctccaccgggcatctgccggccgaataacaggccacctcccctctcgtcctccagggcgcggccctaaaacccaggctccccgcgccaccccccgtcaccacgccacccttggctg

SEQ ID NO: 100505 - DNA, 827 bp, Homo sapiens; identical to SEQ ID NO: 34011
  chr21:46900339-46901166
  hypo

SEQ ID NO: 100506 - DNA, 30 bp, Homo sapiens; identical to SEQ ID NO: 34012
  chr21:46901457-46901487
  hypo

SEQ ID NO: 100507 - DNA, 183 bp, Homo sapiens
  chr21:46905926-46906109
  hypo
tgggccacgtcacagcgggacccctgcctcagggcctccctccctcacgccccccacaccgggctctcacctcacactccaggtggctggggccttgggtcaccgatggctccagcacatgcctccgggctcgcctgcttctcacggctttcggactaatagagtcaccgcaatgcctgtgtc

SEQ ID NO: 100508 - DNA, 1263 bp, Homo sapiens
  chr21:46906440-46907703
  hypo
ctccccttgcctgcccgggagccagggctggaggtaacgagggtgccctgtgcacctcccgctgtgcatgtgggcctccccctgtgcatgtgggcccaaccccgaccaagttcgggctccgtggctctctcctcagttgtgtttctgtgtggctgaaatcgtgtcgtaaagttagaagaaaggctgctgtggggcctgcgttgcttggcagaatgttccttaccttttgatttgcagggtttagaaagcatcataagaaaacgtgtctacgctggggttgcagggccagcgggggctgggctgggtcctgacacgctctcctcaccccacgcaggggagcaagggagcccccggtcctgctggtgctcgtggggagagcggcctggcaggagcccccggacctgctggaccaccaggcccccctgggccccctgggcccccaggaccaggactccccgctggatttgtgagtaccgcctacacctgaccccctggagagccgggggctgccgttgccccagccctactacccctggcatctcactcacagagcagcacgtcctgggcggtggccttgctggcactgcctcatcctgggattccatattccgcatggtggggctcgagtctctcgcccgtcgcccgtgccccacggtgctgatggggatcttggcccagccatgccccagcacccgtgccctgaccaagagcgaatgagctgacccgagacgggctgccccgggggggctccacccaggccctgccaccaggtagacagtccccatctgagaacggcggctccccaggccaccgtggccccaaagcatgtcccaccctcctctcgggcagtgccaccccagggaggggtccttccctaagaagggacacaggcccctacgtgtctcgtgtgtctcttccaggatgacatggaaggctccggggggcccttctggtcaacagcccgaagcgctgatgggccacaggtagtgttgtgagctgggcgtggccggctctgaggggtaagggggtgttgcctggggcaggagagtgtccctgagagccaccggccttgcatgggatcggaagccgccctgcagagccgtgaggaccacgtgtggcgggcgctgtgccccgcgggccacccttgttcttcggagatgccccttcattgaactaaagtcacggggtgagggcctggtctgcaaagtgggagacactgtgagtggtcaagacaaaggaacacggggccgcatgccccctgaa

SEQ ID NO: 100509 - DNA, 31 bp, Homo sapiens
  chr21:46908632-46908663
  hypo
attctcagacttgggccgaaaagaggggcat

SEQ ID NO: 100510 - DNA, 30 bp, Homo sapiens
  chr21:46908951-46908981
  hypo
ggggccaagggcgcacggggcccaccctgg

SEQ ID NO: 100511 - DNA, 263 bp, Homo sapiens
  chr21:46909182-46909445
  hypo
gttccgcagccgtcccggccgggtgccttcagccagcctgggcccacggggtccctgcacaagttgctcagtgtccctgggacccctcggctctgggctgggggagggcggtgagatgcatcctgggtaactcacccttcccttcacccggggtggacgctgcctgaggactgggctggccccagcaggtgctcacggagccccttttttcacttagggggatcctggcgtgcctgggctgccgggggcgaaggtaagcgctg

SEQ ID NO: 100512 - DNA, 105 bp, Homo sapiens
  chr21:46910556-46910661
  hypo
tccgtgtgcccactcccggagcgccaggagttaagtataagtctccgtcagggctcttggtggctgcctccctcccaggccccagccggtcgggaaataaagaac

SEQ ID NO: 100513 - DNA, 636 bp, Homo sapiens; identical to SEQ ID NO: 34015
  chr21:46911011-46911647
  hypo

SEQ ID NO: 100514 - DNA, 1588 bp, Homo sapiens
  chr21:46912094-46913682
  hypo
aggccacagggacctcggcgtgacggtcaagacatcagaacatcagaaaagcctcccgtaggccgagccacctccgccggcaagcaagggagcgtctagcagaggcaggagcattttaaaacaaaatggaagtaaaaaccatggcccttagggcgtctggagtctgcatccagctgctctgagctgaggggcgtctgtgctgcaggagggatgccccaggcccaggaagactggaaagcaacattttccttgaatttcctggtttggtgttttgttgatctgtaagtcgctcgagtccagttgaattttaaacgcggctctttgtttccgatttttccttttgctcgtggacagggatccgtcctgagcgtgccgggacctgaggtatgtgcctgcccagcttctaagagacgggcctgcggggacctgggtacaaggctgggtggggtccgggcaggcgcgagggtgcgtgatgaccccagctgacgccgtccctctttccccagggccggccgggtttcgcaggctttcccgtgagtaacctggtgccagagctgcatgctgcccggctggggaggggtctccacctggtagcacagagcagcccggtcgagctggggtgggccttgtcaggcccgagggatagcgacagtcactgcccccaaggaaatgatgggagtgggatgtgggcgagagccgctggcaggccctgtgctgggtgggcacccgtgagggtgaggcagctccttgcacctgcagaggcctgcagtgtccagagtgaggctggggccgggaggtgtcctggtgggggtcacctgcggaggcctgcagtgtccagagtgaggctggggccgcgaggggccctggtcgggctgtcgaggcaggcatattgcggggggcagctgtcgggggagatggagcagccgtcggggatgggggagatgccagccgctcgggcctcacggcctggcctccattccagggacctgcaggacccaagggcaacctgggctctaagggcgaacgaggctccccgggacccaaggtaaggggctcaggtgctgtccctcaaccccctttgtgacccaggggtggctccagcctgcccagatgaccactgttgggagggacctgggaccccccggctgctgctgtgacacgtgaggggtacatccctgctcgggccgtccctgtggtcacctcccgtgaaaggacccagcctgcgaggcccagtcacagcggccctgccttcggggctctgggtgaggctttgtggggaaggagctggccctgactctgctggacctcctgccattccagggtgagaagggtgaaccgggcagcatcttcagccccgacggcggtgccctgggccctgcccagaaaggagccaaggtgagggccgggcagcctccttccggcaggcgtgggggctcctggggctgtggagacagcctggggagggtcttcctgagggtctggctcctgatgcacgagcctctcccaagcagggctctaccatccaggcctggccctggtggcccctcctttctcgcacccatgtcggcggttccgccggcccctcgtc

SEQ ID NO: 100515 - DNA, 30 bp, Homo sapiens; identical to SEQ ID NO: 34018
  chr21:46913901-46913931
  hypo

SEQ ID NO: 100516 - DNA, 30 bp, Homo sapiens; identical to SEQ ID NO: 34019
  chr21:46914210-46914240
  hypo

SEQ ID NO: 100517 - DNA, 477 bp, Homo sapiens; identical to SEQ ID NO: 34020
  chr21:46914468-46914945
  hypo

SEQ ID NO: 100518 - DNA, 118 bp, Homo sapiens
  chr21:46915160-46915278
  hypo
ctgagcgtgggccggccgggcctggcgtggggctaacggcaggcaccctgcgggaaggtgtctggtaatcatcagtgcccagcagtccccaccccctgtgctccgccccagggtcgcc

SEQ ID NO: 100519 - DNA, 133 bp, Homo sapiens
  chr21:46915603-46915736
  hypo
acatgcccatacacacgcgcacacatacacgcacacacacatccacacgtgctcatgtgtgtacacatgcccatacactccacataggtgcacatatacacatgtattcatgcatatacgagcctgtccacgt

SEQ ID NO: 100520 - DNA, 49 bp, Homo sapiens
  chr21:46916178-46916227
  hypo
actcctcccgagggacgtctgtgcacgactccagcgtgggatgaggtgg

SEQ ID NO: 100521 - DNA, 30 bp, Homo sapiens
  chr21:46916913-46916943
  hypo
tccatttcagaacatcgccctcagcagccg

SEQ ID NO: 100522 - DNA, 30 bp, Homo sapiens
  chr21:46917281-46917311
  hypo
tcctgttggtcagcacgtgccctgcaggtg

SEQ ID NO: 100523 - DNA, 102 bp, Homo sapiens
  chr21:46917526-46917628
  hypo
ccaggacccaagggcgccaaaggagaagtgggcccccccggaccaccaggtgagcaactctggacatcccaggcaggagagccatggcgtggccagcactga

SEQ ID NO: 100524 - DNA, 30 bp, Homo sapiens
  chr21:46917902-46917932
  hypo
cacggggccgggggtcggcactggaggacc

SEQ ID NO: 100525 - DNA, 412 bp, Homo sapiens; identical to SEQ ID NO: 34021
  chr21:46918203-46918615
  hypo

SEQ ID NO: 100526 - DNA, 487 bp, Homo sapiens
  chr21:46918885-46919372
  hypo
ccagaacgagggctccgagggctctagagggaacagtgtttgcaggcggaatggctgatgctcttccaaagccaaggaaggctcagagcattcccctcattcgaaggatcaacaattagagtgacgagatttctcaacaaaacgggagaagccagaagaccataaatggtttccaaaatatccaagaaagtcaattgccagtgtagactccgacagccagtggtactcccgtggccttcagaacgaggatgacatgcaggccagccactccagacccgagctgtgtcggcagtggagggtatttcagggggaagacaaggccaagggaaaggagtgcagagatggggagagacaacgctggcaggaaccggcgtcccagcgacagggaggtcagaggctccctcgggaaccagcgtgggctgccccacatggcatcccaggaacagtggggtcagaggctcccgcgggaacccgtgtgggctgcccc

SEQ ID NO: 100527 - DNA, 408 bp, Homo sapiens
  chr21:46925557-46925965
  hypo
cattgtccacggaggcgcaggagctggcggcaggcaggggtccccatggtgctcatgggggcagccgcctcagtccacacctgtccaaagccctgcggcccctgcccagcaccctgaaacgggcattccttccttccgcccctgccccccgccctccccgccaagccccacacctctgcatttggtcccagcaggtgaggctctgggctacacgccaggccatgctgggccaggtgcacgaggttcccgagggctggctcatcttcgtggccgagcaggaggagctctacgtccgcgtgcagaacgggttccggaaggtccaggtgagcgctctgtgtgacgggttctggacccgtggaagggccgaagccgcctcctggggcttaaggaaggcgagaggctcaggcc

SEQ ID NO: 100528 - DNA, 250 bp, Homo sapiens
  chr21:46926239-46926489
  hypo
gtgacgtccacagcacggccccggctggggggcaggctgtcccgtggctctgcaccccgcgttataaacaccaaggtgggatgaaatgcatcctctctgcttagcacgggccttgctcaccagcctggctcctcagacacacctgggattgccccttccaggacaggccagcccctttcctgctttcccaaaatggtctgggtggcaggagtggccgctctgatccaggtgggtgcggccatgcttgcag

SEQ ID NO: 100529 - DNA, 248 bp, Homo sapiens
  chr21:46929726-46929974
  hypo
catccttgaggaaccggcgtacctccgcctacagcggcagctgggggcacccacgtggcccggggctgctctgacctggcagcgtatgggggctgctgcctgggcccctcagtgtgtcacttgcgcgcctcccgctcagcgcccctcggccgtgcctgtccacacaggtgcggggccggggtggtgcgcccggggcctgggtgcagggggcagcgtgggacacagcccgtgacgcgcccctctccccg

SEQ ID NO: 100530 - DNA, 30 bp, Homo sapiens
  chr21:46931486-46931516
  hypo
ggcaacacggagtccgagcatgtgtgccct

SEQ ID NO: 100531 - DNA, 30 bp, Homo sapiens
  chr21:46932067-46932097
  hypo
ctgggtttgactgacggcccggcgcgtctt

SEQ ID NO: 100532 - DNA, 31 bp, Homo sapiens
  chr21:46934129-46934160
  hypo
catcctgctagatctacgagcccaggaaatg

SEQ ID NO: 100533 - DNA, 668 bp, Homo sapiens; identical to SEQ ID NO: 34024
  chr21:46935334-46936002
  hypo

SEQ ID NO: 100534 - DNA, 51 bp, Homo sapiens; identical to SEQ ID NO: 34025
  chr21:46937009-46937060
  hypo

SEQ ID NO: 100535 - DNA, 105 bp, Homo sapiens; identical to SEQ ID NO: 57765
  chr21:46950777-46950882
  hypo

SEQ ID NO: 100536 - DNA, 31 bp, Homo sapiens
  chr21:46951699-46951730
  hypo
cgtggagaaggagactcggcccacagtgacc

SEQ ID NO: 100537 - DNA, 30 bp, Homo sapiens
  chr21:46952270-46952300
  hypo
ggagcgttcgcctgcggaaagctggcagtg

SEQ ID NO: 100538 - DNA, 30 bp, Homo sapiens
  chr21:46966074-46966104
  hypo
ctcagaggctgagccgggccaccgtcctca

SEQ ID NO: 100539 - DNA, 89 bp, Homo sapiens
  chr21:46998315-46998404
  hypo
gcccgtccttagccacgggggctcctgtgtgggtagctgtcgcaggcccactcctcctttccgaaccccagaatcgatttcctggtgga

SEQ ID NO: 100540 - DNA, 30 bp, Homo sapiens
  chr21:46999133-46999163
  hypo
cgggcgcccctgggacgtgggcggccctgg

SEQ ID NO: 100541 - DNA, 30 bp, Homo sapiens
  chr21:47013188-47013218
  hypo
tcgccccacggcctcgtcgccccacagccc

SEQ ID NO: 100542 - DNA, 181 bp, Homo sapiens
  chr21:47026082-47026263
  hypo
tacagtcgcctgcggtattcagtgcagtcacactctgcacgggcgtttagatacacaagtgccaccgcattacagtggcctgcagtattcagtgcagtcccacgctgcatgggcgtttagctacacaaatgccaccgcgttacagtcgcctgcagtattcagtgcagtcacactctgcacg

SEQ ID NO: 100543 - DNA, 421 bp, Homo sapiens
  chr21:47026382-47026803
  hypo
agtgcagtcacacgctgcacgggcgtctggctacacaaatgccaccgcgttacagtcgcctgcagtattcagtgcagtcacacgctgcacgggtgtttagatacacaaatgccaccccgttacagtcgcctggagtattcagtgcagtcacactctgcacgggcgtttagctacacaaatgccacggcgtcacagtcgcctgcagtattcagtgcagtcacgctctgcacgggcatttagctacacaaatgccaccccgttacagtcgcctggagtattcagtgcagtcacactctgcacgggcgtttagctacacaaatgccatggcgtcacagtcgcctgcagtattcagtgcagtcacatgctgcacgggcgtttacacaaatgccaccgcgttacagttgcctgcagtattcagtgc

SEQ ID NO: 100544 - DNA, 25 bp, Homo sapiens
  chr21:47026982-47027007
  hypo
ccacgttacagtggcctgcagtatt

SEQ ID NO: 100545 - DNA, 200 bp, Homo sapiens; identical to SEQ ID NO: 57769
  chr21:47062752-47062952
  hypo

SEQ ID NO: 100546 - DNA, 993 bp, Homo sapiens; identical to SEQ ID NO: 57770
  chr21:47063438-47064431
  hypo

SEQ ID NO: 100547 - DNA, 47 bp, Homo sapiens
  chr21:47167568-47167615
  hypo
cagtcacagaggctgcggtcttgcccttaccccgctcctcgccagcc

SEQ ID NO: 100548 - DNA, 171 bp, Homo sapiens
  chr21:47209071-47209242
  hypo
aggagtgaatgtgtgtgcacacgtgcgtgtgcatgtgtgtgtctgcacatgcaaatgtgcatgcatgtttgtgcatacatagtgtgtgcacgtgtgtgtgtgattgcatgtatgtgtgtgattgtgcacgtagtgtacccgcatgtgtgcgagggtgagtgtgtgcatgtg

SEQ ID NO: 100549 - DNA, 321 bp, Homo sapiens
  chr21:47254671-47254992
  hypo
ttaaaaggacaaagcagacttcggagctgcctctagaggagagcagcaggtgagttccgagttcacctggcacgcttttcggcagagcccaggaatgcccacttctgagcgctgagtgcacaacccagctcgggaggcctgcggcagcaggaatggggaggcaccgtgagtccctcaaagcgctgctggaaatgtcactctgcgcggtgtccacccgtgctcggggtgggcagcgccactgaatgacgcgggcagcttgggaggccggttcgcgaacgccgcagcagcctctgctgacacgggggctgctccccactcaca

SEQ ID NO: 100550 - DNA, 30 bp, Homo sapiens; identical to SEQ ID NO: 34031
  chr21:47269612-47269642
  hypo

SEQ ID NO: 100551 - DNA, 185 bp, Homo sapiens
  chr21:47285212-47285397
  hypo
atgtttaaaaaattacaaaatcgtagcccacccccagtcgcctttaggggagaatgcgtaccgctatctccaggaacaaagcatgccctgcgcggccggtgctactggatggatattccttcgcttctatcagtggaagatatcgctgttcctgcagaaataacgaaatggaacaatgcagaagc

SEQ ID NO: 100552 - DNA, 611 bp, Homo sapiens
  chr21:47286940-47287551
  hypo
agactattcagtgaaagacatcggtcattgaggtatctattcaaaaacacggtttagtactctgccacacaccgaacgcaacgccacagcagccatagaagcgtgtgtggctgtttaacgtggtctttttggggagggcatcctaggcagagcaggcgtggaagggaaggcggcggacggaacaaaacgcgggcacgcaacggctgctgcgccggatctgaggcagggccagcctgtgggagcagcaacatcgctcgcaggacagcgatggagcccccacgaatccgcgtgaaagcagcaaccacctagaaatgaacgtacagctgcttagaaacagaatacggatgacccgaaagacttcccgatggtagtcaccagcatacaggacctgacacgggcgtgcgggcagggtgtgccgctacggggtccctggcgcacctgctacccctgctacccgcattcaccgcacgcggagggtgcgggccgtgaaggttatacatgcaaatatccttccaccagccagttctccttccaggaatctgccacccgacccttgtgttgtgcacagacatggtccaggtgtttgcgacgtgattgtttatcagagagag

SEQ ID NO: 100553 - DNA, 43 bp, Homo sapiens
  chr21:47287869-47287912
  hypo
aaaaagctggacaaaaaaaggcgcaagccagatggtgctgaag

SEQ ID NO: 100554 - DNA, 210 bp, Homo sapiens
  chr21:47330899-47331109
  hypo
gccatcatccagtgcgtcaagcagatctgtgtggtcatgctggaggtaccgtctgcgcgccagggccagcccacgtcagtgctggatttggcctcccagcactgcaggcaaaggcttggaagccccggtcgccccaaggactcacacagttggggctgtggggggctcctgaccccaagtcagcctgagcgagagcggtgccggtatggg

SEQ ID NO: 100555 - DNA, 511 bp, Homo sapiens
  chr21:47369908-47370419
  hypo
tgcaccagcccctcccggtgccctgtgtcgtcacatgatgcttgttgaggagcccaggcgtccacccccgcgcctcctggcatgacgccgacctcactccttggcccccggaattcccacaggtgggaggtggtcacagaagctttgtcgattccgttctctttttggcaaggacacttccaggtgcctctgcacgggcactgacccacaggtgggcacagggccatgctcccagcctgggcctgacgggccggggtgcaaccaccgccagcatctaccatgctgtgagtgggcggcggtgacgcacccacctgggaatggcagcgagtgcccggagtgccggattccccccgagctttcacgtctaaggattacgaggaagacctggactacgtgcctttatgagatgcctcctgtgggtccctgaggccgtcaggtgccacctcacccctgcgtgtcctgcggaaactgtgacctgtgactccggggcggggtggccttgggggcacca

SEQ ID NO: 100556 - DNA, 128 bp, Homo sapiens
  chr21:47403600-47403728
  hypo
ggggaggggcggccgcgtggcccagcgtcccccgagtcgcccttgttgcctttactcagtctccccatgactcagtttcccacctgtgaaatggggcggagtcatccccatgtcgctgccactggatt

SEQ ID NO: 100557 - DNA, 266 bp, Homo sapiens
  chr21:47404059-47404325
  hypo
gctgtgtgtcagccacggccagggtggggcagcctgtccatctgggtgacgtcgcgccctgggacgggtagcgatggcgccaggggccgcccgcctcacgcccgccgtgcctgttcctggcaggtactaccgctgtgaccgaaacctggtgtggaacgcaggcgcgctgcactacagtgacgaggtggagatcatccaaggcctcacgcgcatgcctggcggccgcgacgcactcaaaagcagcgtggacgcggtcaagtactttg

SEQ ID NO: 100558 - DNA, 30 bp, Homo sapiens
  chr21:47406791-47406821
  hypo
gtgggaagcggccccggccgtcaggggtcc

SEQ ID NO: 100559 - DNA, 30 bp, Homo sapiens
  chr21:47411185-47411215
  hypo
ggccttcaggcctccgccattctgtccccc

SEQ ID NO: 100560 - DNA, 30 bp, Homo sapiens
  chr21:47412964-47412994
  hypo
accaggcggcttccacgtttctgcatccga

SEQ ID NO: 100561 - DNA, 30 bp, Homo sapiens
  chr21:47413405-47413435
  hypo
cagaggcagcgcccccgggtgcccccttgt

SEQ ID NO: 100562 - DNA, 51 bp, Homo sapiens
  chr21:47414105-47414156
  hypo
agggaagagaaggccccgttggtgtccctggagacccggtaggaagcgctg

SEQ ID NO: 100563 - DNA, 758 bp, Homo sapiens; identical to SEQ ID NO: 34037
  chr21:47417618-47418376
  hypo

SEQ ID NO: 100564 - DNA, 30 bp, Homo sapiens
  chr21:47420616-47420646
  hypo
gacgtgcgcaggacgcggccctgactggtc

SEQ ID NO: 100565 - DNA, 266 bp, Homo sapiens
  chr21:47421136-47421402
  hypo
gtgctctgctgacaccgcccccgcctgcagaatgcaagtgcggccccatcgacctcctgttcgtgctggacagctcagagagcattggcctgcagaacttcgagattgccaaggacttcgtcgtcaaggtcatcgaccggctgagccgggacgagctggtcaaggtgaggcctcgccccgcccggctttctcaagcccaggtgcaccccgaccctgccggccgcccctgcccgcgccagacctcagcctcccgaggccaccgctgc

SEQ ID NO: 100566 - DNA, 30 bp, Homo sapiens
  chr21:47422143-47422173
  hypo
cctgcagtggatggcgggcggcaccttcac

SEQ ID NO: 100567 - DNA, 30 bp, Homo sapiens; identical to SEQ ID NO: 34038
  chr21:47422522-47422552
  hypo

SEQ ID NO: 100568 - DNA, 30 bp, Homo sapiens; identical to SEQ ID NO: 34039
  chr21:47423059-47423089
  hypo

SEQ ID NO: 100569 - DNA, 358 bp, Homo sapiens; identical to SEQ ID NO: 34040
  chr21:47425490-47425848
  hypo

SEQ ID NO: 100570 - DNA, 289 bp, Homo sapiens
  chr21:47426357-47426646
  hypo
tctcagctgcctcatgggattcgcactgcagctgcggccctggcgcgacaagggctggacttggccagcgggacggtccctcacggcgctgaggcccacactctgcgtggagcctccccgtgcccaggctaccctgcaaggtcctcggagaggcttcctccagccccagcccccacacagctccggcccaggcccgctcttccccatcccagttgctttgcgctgtatacggccaggtgaccccgagccggccctgagccctcgtcccggcttcctcccctgtaagctg

SEQ ID NO: 100571 - DNA, 31 bp, Homo sapiens
  chr21:47455820-47455851
  hypo
cactctacagggcccccgggaagtgactgcc

SEQ ID NO: 100572 - DNA, 31 bp, Homo sapiens
  chr21:47456092-47456123
  hypo
tcccggaggggtgaggcggcccagcctgcgg

SEQ ID NO: 100573 - DNA, 30 bp, Homo sapiens
  chr21:47457173-47457203
  hypo
cgtgtccacgtcagcgccctacatccacac

SEQ ID NO: 100574 - DNA, 31 bp, Homo sapiens
  chr21:47457652-47457683
  hypo
gcacgtggcgcccacacgggcagaacacgcc

SEQ ID NO: 100575 - DNA, 30 bp, Homo sapiens; identical to SEQ ID NO: 34041
  chr21:47459985-47460015
  hypo

SEQ ID NO: 100576 - DNA, 30 bp, Homo sapiens; identical to SEQ ID NO: 34042
  chr21:47460475-47460505
  hypo

SEQ ID NO: 100577 - DNA, 25 bp, Homo sapiens
  chr21:47499833-47499858
  hypo
cgcacacacacgcacacgcacatcg

SEQ ID NO: 100578 - DNA, 85 bp, Homo sapiens
  chr21:47501021-47501106
  hypo
ggccaagtgcgccaacgcagacactgcgtagccccagaggcctcggggacaacgggatgaggagggcactcgaaggcgcccggca

SEQ ID NO: 100579 - DNA, 30 bp, Homo sapiens
  chr21:47501326-47501356
  hypo
tgtcatgtacaggaacggccgaggtcgttt

SEQ ID NO: 100580 - DNA, 484 bp, Homo sapiens
  chr21:47503499-47503983
  hypo
agggcttgatttgtccgacaatttaaaattttcttcctgccggaaagcggctccttcaaagggaagagaggcttctctgcggccgacgtcgctgagtcttccaagacctcagcccacagagcgggaggggcccagagggcagcgtgagtgcctcagaccacgggagggagctgcccaggagccaggaggaccagtgcccccaaagaaacgcaacagggcacgcagccccaccacgccccactcctcccgacctcaaggaacagagcaggcaggagtgggagggaggcgcagacaaggcctgtgtcctgggcctgtaggggagaagctggggagagcaggccctgtaccctgaggatgtggaatgggcgccccaccgcagatggctcctagggtcccttccaggcggtattcctaatttctgggcatgtgtcatccctgtggctcggctgcacgggctgtgagctgctcccgatgcctgtggaac

SEQ ID NO: 100581 - DNA, 252 bp, Homo sapiens
  chr21:47531930-47532182
  hypo
gacacctcggagagcgtcaccatgcagtcccccacggacatcctgctcttccacatgaagcagttcgtgccgcagttcatcagccagctgcagaacgagttctacctggaccaggtggcgctgagctggcgctacggcggcctgcacttctctgaccaggtggaggtgttcagcccaccgggcagcgaccgggcctccttcatcaagaacctgcagggcatcagctccttccgccgcggcaccttcaccgac

SEQ ID NO: 100582 - DNA, 30 bp, Homo sapiens
  chr21:47536632-47536662
  hypo
cagggcagaaggaccggggctaatggagtt

SEQ ID NO: 100583 - DNA, 30 bp, Homo sapiens
  chr21:47537236-47537266
  hypo
gggctgtgtcttggtcgttggcacacatgg

SEQ ID NO: 100584 - DNA, 30 bp, Homo sapiens
  chr21:47537506-47537536
  hypo
agcattctgccgggtcggagtcatgtgagg

SEQ ID NO: 100585 - DNA, 30 bp, Homo sapiens
  chr21:47537814-47537844
  hypo
gggagtccaggggagcgaggagaccaaggc

SEQ ID NO: 100586 - DNA, 158 bp, Homo sapiens; identical to SEQ ID NO: 34043
  chr21:47538428-47538586
  hypo

SEQ ID NO: 100587 - DNA, 66 bp, Homo sapiens
  chr21:47545573-47545639
  hypo
cggggcgtgggaggcgatgagatgggagaagtccagacgcgtccctccaacgagggcctctgcatg

SEQ ID NO: 100588 - DNA, 31 bp, Homo sapiens
  chr21:47557369-47557400
  hypo
gcgcagcccccgctttcgccccacagagggc

SEQ ID NO: 100589 - DNA, 156 bp, Homo sapiens
  chr21:47565102-47565258
  hypo
gtggggtcaccctggccgaaccctcaaaccctgctgggcccaagcacttgccggggtgagggcggtgctggtggtcaaggtccagacagcggccagtggtgacgccctcaggcccctcctggtccccagcccctccccagccggaggctgacccgc

SEQ ID NO: 100590 - DNA, 31 bp, Homo sapiens; identical to SEQ ID NO: 34044
  chr21:47569329-47569360
  hypo

SEQ ID NO: 100591 - DNA, 31 bp, Homo sapiens
  chr21:47602646-47602677
  hypo
attctccttcaggaggcgcacctgcttcttc

SEQ ID NO: 100592 - DNA, 31 bp, Homo sapiens
  chr21:47602891-47602922
  hypo
caccctgcctgcccccgcgatggctcatggc

SEQ ID NO: 100593 - DNA, 172 bp, Homo sapiens
  chr21:47627574-47627746
  hypo
cccaccacagagcacccggtcagggcaggggcccagccaccaaaggtgtgggtgcagccagggccccaagctgggtacatccagacagacctccagcttccagcacagggaccctcaggggtgcagctcacaccctcaacacctgcagatctcacgacggacaggatggggc

SEQ ID NO: 100594 - DNA, 108 bp, Homo sapiens
  chr21:47634459-47634567
  hypo
agccaacccactacaccgcagcagctacgcgcacagctatggcagcagctgcagcacagcccagggcctgctgactctgtcaggaggcggccacgcaccagcacagcc

SEQ ID NO: 100595 - DNA, 318 bp, Homo sapiens
  chr21:47640129-47640447
  hypo
aggcaaagtgcagcctaaacacgttccttcaccaggcaggcgccaggagtgtggtgggaaccggacagcagccttggggacgcagcatcaacgacaccaaaggctgacagtgaactgaggacaatagtgacaagctcaccaagaaagaaggcaggatctcatgagaatgcgtaacaggacactccacctggcacggtaggtcaggaagaggtcctcaaagaaggaacacgtaaagtgtgagccagcggggcaggagtggaaggtaagaggctccaggcgaaggaggcagtgcatggcgagccctgggataataagggt

SEQ ID NO: 100596 - DNA, 293 bp, Homo sapiens; identical to SEQ ID NO: 34046
  chr21:47689550-47689843
  hypo

SEQ ID NO: 100597 - DNA, 82 bp, Homo sapiens
  chr21:47710423-47710505
  hypo
acaattttcacaatggaaacaatttagggcacttgtgtacggttggctgggcaacccacccgccacaggcccagctgccact

SEQ ID NO: 100598 - DNA, 108 bp, Homo sapiens; identical to SEQ ID NO: 57778
  chr21:47717278-47717386
  hypo

SEQ ID NO: 100599 - DNA, 239 bp, Homo sapiens; identical to SEQ ID NO: 13322
  chr21:47717433-47717672
  hypo

SEQ ID NO: 100600 - DNA, 162 bp, Homo sapiens; identical to SEQ ID NO: 57780
  chr21:47717748-47717910
  hypo

SEQ ID NO: 100601 - DNA, 30 bp, Homo sapiens
  chr21:47720539-47720569
  hypo
tgttcacacctgcccgtccatgtcagcacc

SEQ ID NO: 100602 - DNA, 136 bp, Homo sapiens
  chr21:47737836-47737972
  hypo
tctgcacctgcagggctgtctcgaagagtccctccaacgccacagcctgcgagttgttaaaaacaggagcatcccgggctctgcctcacctgtcccaagagcttcagcgtcagtcgggtcacttgctctgctgctg

SEQ ID NO: 100603 - DNA, 221 bp, Homo sapiens
  chr21:47746264-47746485
  hypo
tactacttatctacatttttgcgcagcttgctcacttccgacagagaaaaacaaaaggtgacagttcgcattcggagaaaaagacggcgaagaggaagggctcggctgtcgatgcgtctgtccaggaggagagtccggtaaccaaggaggacagcgcactctgtggaggaggggacatttgcaaaagcacatcatgtgacgacacccctgatggggcagga

SEQ ID NO: 100604 - DNA, 30 bp, Homo sapiens
  chr21:47754563-47754593
  hypo
tcagtgaccaccaaccggaacagcgtggga

SEQ ID NO: 100605 - DNA, 30 bp, Homo sapiens
  chr21:47754841-47754871
  hypo
ggccccacgtgctgccgcctgcacgttctt

SEQ ID NO: 100606 - DNA, 155 bp, Homo sapiens
  chr21:47771656-47771811
  hypo
gtcagtgcagcagtgacgtgcacctgtgtgtccctcaaggccaagagcaacacttgcagggggtgccttcatgtctaaggaaagcttaccagtggtgctgagcgtttgcctcggaaggacggttgagtgctgtccaagtgcgggctcacctggtg

SEQ ID NO: 100607 - DNA, 99 bp, Homo sapiens; identical to SEQ ID NO: 34051
  chr21:47773780-47773879
  hypo

SEQ ID NO: 100608 - DNA, 559 bp, Homo sapiens
  chr21:47774496-47775055
  hypo
gatgtgcagcatgagcaagcccggtgtcgggctccgggggacacacgggagggcagggaggagacgcaggggcagcaccgcgtggcttgttgcacggtggaaccagtggaggggaactcggggcatctgggctcagcggccaggagccctcactctggagcagggtccctgggcctgctggaggccacagggtgtccaggcagggtggcagcgggctgtgtgccagtttgagttccctgcaaagcggaccccaacacagaatttgctgcacaagaggctatgggggaaatgccagagaagggcaagggcccggctggaacaggcagccaggaccttcccacgagcaggccttgcaccagagagaacccaggaagggctggggtgggtagccccaccaggcattcgtgtatcacctgagagccaacccctgcctctgcgcgtgggtgtgacgaggacccagctgttagtgggcagtggtcacaggaggctggccttgagagcccagccctgagatgtgaggccaccaggggagacgcgaggggcacgtgccctaccgacc

SEQ ID NO: 100609 - DNA, 327 bp, Homo sapiens
  chr21:47775408-47775735
  hypo
aggcaccagctggaagcgctggagtctcccctctgcatccagcacgaggggcatgtctcagacagatgctgcgtagagacttcagcattgggacacgagtggcgtctggaaccctctgaagggcacagccaaggtgggcccctcccgcctcgccatggtgtcggcaggtcccgggtctgggggacgttctcggggagcctgggtgcctgggttcgatccaagtcctccgtgaagcagctgagtgctccgacctcttcttctggggctgacacctcaacagagtgtgtcctgatgagggtttggcgttagaggcggggtcactggctg

SEQ ID NO: 100610 - DNA, 129 bp, Homo sapiens; identical to SEQ ID NO: 34054
  chr21:47797822-47797951
  hypo

SEQ ID NO: 100611 - DNA, 63 bp, Homo sapiens; identical to SEQ ID NO: 57784
  chr21:47799181-47799244
  hypo

SEQ ID NO: 100612 - DNA, 71 bp, Homo sapiens
  chr21:47805855-47805926
  hypo
tctccatgctcaaggccgacgtcaacctgtcccacagcgaaaggtcagtgtgtcctcggcaccgaggctgc

SEQ ID NO: 100613 - DNA, 265 bp, Homo sapiens; identical to SEQ ID NO: 34056
  chr21:47811197-47811462
  hypo

SEQ ID NO: 100614 - DNA, 30 bp, Homo sapiens
  chr21:47824060-47824090
  hypo
tggtgcccacgtggcgcgtgctcggtgaat

SEQ ID NO: 100615 - DNA, 30 bp, Homo sapiens
  chr21:47824379-47824409
  hypo
caggtttacctcggcgaggtacgccactcc

SEQ ID NO: 100616 - DNA, 21 bp, Homo sapiens
  chr21:47825322-47825343
  hypo
cttttatggccaggagcggtg

SEQ ID NO: 100617 - DNA, 30 bp, Homo sapiens
  chr21:47830937-47830967
  hypo
gtgtggagtgcatccggcaccagcagtttg

SEQ ID NO: 100618 - DNA, 30 bp, Homo sapiens; identical to SEQ ID NO: 34058
  chr21:47831519-47831549
  hypo

SEQ ID NO: 100619 - DNA, 30 bp, Homo sapiens
  chr21:47831912-47831942
  hypo
gcccaggtcaccggcgacgtggaggcctcc

SEQ ID NO: 100620 - DNA, 754 bp, Homo sapiens; identical to SEQ ID NO: 34059
  chr21:47832835-47833589
  hypo

SEQ ID NO: 100621 - DNA, 30 bp, Homo sapiens
  chr21:47848201-47848231
  hypo
cagcaggcttgtcccggcggagctggtttt

SEQ ID NO: 100622 - DNA, 227 bp, Homo sapiens
  chr21:47851530-47851757
  hypo
tgcagaaggagctgcgtatcgagcactcacgctgcgaggccttgctggctcaggagcggagccagctctctgagctccagaaggaccttgcggctgagaagagccgcaccctggagctgtcagaggccttgcggcacgagcggctcctgaccgagcagctgagccagaggacacaggaggcttgcgtgcaccaggacacacaggcccatcacgctctgctgcagaag

SEQ ID NO: 100623 - DNA, 30 bp, Homo sapiens
  chr21:47855034-47855064
  hypo
aggggctgcctgcccgagggcctgtttctg

SEQ ID NO: 100624 - DNA, 225 bp, Homo sapiens
  chr21:47856005-47856230
  hypo
cggctgctctctgccgcccggcttctcaccagcttcaccagccaggccgtggacaggtgtgcacccacgccacctggcgctcactggtcccttgcagccacccctctgtcccagacccggcccgagggctggggcgcgtctggtgtgaggcccctgctcctttgcacttaacgctctagtcctctttctgagactttgctgagggattccggattggcaagatgg

SEQ ID NO: 100625 - DNA, 30 bp, Homo sapiens; identical to SEQ ID NO: 34060
  chr21:47859911-47859941
  hypo

SEQ ID NO: 100626 - DNA, 89 bp, Homo sapiens
  chr21:47872855-47872944
  hypo
tcacctggtggcttacggtcaggcgttccatctctgtcagagacaagtggcataccagaagacagatctacacccgcccgccccccaaa

SEQ ID NO: 100627 - DNA, 48 bp, Homo sapiens
  chr21:47897026-47897074
  hypo
tgtgggcacctccagtaggaccggtccgattgtttgggtaaatctagc

SEQ ID NO: 100628 - DNA, 30 bp, Homo sapiens
  chr21:47918565-47918595
  hypo
agccattccagcgtcgagccctggctcgac

SEQ ID NO: 100629 - DNA, 337 bp, Homo sapiens; identical to SEQ ID NO: 34061
  chr21:47965679-47966016
  hypo

SEQ ID NO: 100630 - DNA, 31 bp, Homo sapiens
  chr21:48018213-48018244
  hypo
ccgcgttttttgcttgcgttgccttttgatg

SEQ ID NO: 100631 - DNA, 31 bp, Homo sapiens
  chr21:48018510-48018541
  hypo
tcggcctcccaagctgcgctctttttattga

SEQ ID NO: 100632 - DNA, 31 bp, Homo sapiens; identical to SEQ ID NO: 34062
  chr21:48044003-48044034
  hypo

SEQ ID NO: 100633 - DNA, 30 bp, Homo sapiens; identical to SEQ ID NO: 34063
  chr21:48069214-48069244
  hypo

SEQ ID NO: 100634 - DNA, 30 bp, Homo sapiens
  chr21:48083299-48083329
  hypo
cacactggaagcagacgctgttcatgatgg

SEQ ID NO: 100635 - DNA, 73 bp, Homo sapiens
  chr21:48083838-48083911
  hypo
agcagttagtctaggcgtgtcgtctgtgatgcgtgttctgactggcagccttcggatccgtgtgtgaattcat

SEQ ID NO: 100636 - DNA, 1115 bp, Homo sapiens; identical to SEQ ID NO: 57786
  chr21:48087088-48088203
  hypo

SEQ ID NO: 100637 - DNA, 79 bp, Homo sapiens
  chr22:16216477-16216556
  hypo
agagtacagtgggacccgcgacccgccctggcctcaggcactggaggacccctgcaacgccatgcgctagactatgcta

SEQ ID NO: 100638 - DNA, 30 bp, Homo sapiens
  chr22:17589496-17589526
  hypo
cgcctgtgcggctgcgctgcgaccacggaa

SEQ ID NO: 100639 - DNA, 49 bp, Homo sapiens; identical to SEQ ID NO: 57790
  chr22:17601084-17601133
  hypo

SEQ ID NO: 100640 - DNA, 137 bp, Homo sapiens; identical to SEQ ID NO: 57791
  chr22:17601259-17601396
  hypo

SEQ ID NO: 100641 - DNA, 31 bp, Homo sapiens; identical to SEQ ID NO: 34066
  chr22:17619493-17619524
  hypo

SEQ ID NO: 100642 - DNA, 33 bp, Homo sapiens
  chr22:17674260-17674293
  hypo
aaaaaaaaaaaaaaaggacagcgcggtggctca

SEQ ID NO: 100643 - DNA, 42 bp, Homo sapiens
  chr22:17735249-17735291
  hypo
tgagatggagtctctctcaggcgtgatctcggctcactgcaa

SEQ ID NO: 100644 - DNA, 1482 bp, Homo sapiens; identical to SEQ ID NO: 57793
  chr22:17849501-17850983
  hypo

SEQ ID NO: 100645 - DNA, 73 bp, Homo sapiens
  chr22:17882971-17883044
  hypo
ttcctgcattccacctgacatcgcatgtctccttaagtctgttgtcatcagcgtggactcattgatacttatc

SEQ ID NO: 100646 - DNA, 409 bp, Homo sapiens
  chr22:17897963-17898372
  hypo
atcctggactggtggagccagcgagaggctggagctggagcctatcggctgggccccgcctcgcctcaggggacactgctcggagacaaagcccggggccctggccaagggcaccgcggaggcgccttcccagacgcggatgacgtggctgtcctgactgacgggaaggaaaatggctgctcgcccagctccatcaccagcagcggcttgtggacaactcgcccacgcatccctggtggcggtccctgaagcccccgcggggtcaggagcacgagcacttgccaggggacgcctggggcgcccctcctcccagaagctcccgcggaagactggagcaggccacctggctgcggataatgggaaccacagagtgagagaactccacatcggcctgaaggaagagcatgtg

SEQ ID NO: 100647 - DNA, 31 bp, Homo sapiens
  chr22:17970197-17970228
  hypo
gctttgaacatttgtgcgcaagtctttgtgt

SEQ ID NO: 100648 - DNA, 30 bp, Homo sapiens
  chr22:18070414-18070444
  hypo
acagaacgcatttcccgcctcggacttgcc

SEQ ID NO: 100649 - DNA, 92 bp, Homo sapiens
  chr22:18070744-18070836
  hypo
ggggttcaacgagctcgccggtaaggcgtcctttgcacattccttcgtgtcaggctgtgtggcaggttccatagctgcggtcgcagtgacgc

SEQ ID NO: 100650 - DNA, 36 bp, Homo sapiens; identical to SEQ ID NO: 34068
  chr22:18074667-18074703
  hypo

SEQ ID NO: 100651 - DNA, 162 bp, Homo sapiens; identical to SEQ ID NO: 34069
  chr22:18081584-18081746
  hypo

SEQ ID NO: 100652 - DNA, 92 bp, Homo sapiens
  chr22:18084185-18084277
  hypo
catcagttcagaaaccgacacaagtgactgacatggaaagatgcgcgcgatgtaactttgaaaagcaagctattaaacggttatacaagatt

SEQ ID NO: 100653 - DNA, 95 bp, Homo sapiens
  chr22:18110594-18110689
  hypo
aaaagaaaaaaagaaaaaaacacagttcataaagtgaacgaccttgtcaaaacactggttggaagcaggtctcttccctccgcactgtttcctat

SEQ ID NO: 100654 - DNA, 17 bp, Homo sapiens
  chr22:18191697-18191714
  hypo
cattaattattaagaga

SEQ ID NO: 100655 - DNA, 344 bp, Homo sapiens
  chr22:18265396-18265740
  hypo
gcactgagacccaggtgtcatcgtgaagttcatgccagccagaggagccactgtggcgtttccggccataggcctgggcaggagccgctcccaggcgtgccgtgggcagggccgggtcagccttcagggaagagatgcctgtatgggaccaactcaggcagccacagagggatggcccagcaccccacaaaacccaaagtgctcagcgtctaggatctgtttacggggcagagaagtggatgttcttttcctggttcaaaggtagaaacaggcttggagagccgcacccggcatcagccagccaggcagacgcctggtctagcgcttggttctcacaggcatgt

SEQ ID NO: 100656 - DNA, 30 bp, Homo sapiens
  chr22:18272318-18272348
  hypo
ggtgaggcaggcaccgggtggaggagggga

SEQ ID NO: 100657 - DNA, 30 bp, Homo sapiens
  chr22:18275665-18275695
  hypo
ccatgcattgctttcggagcgtctctgcac

SEQ ID NO: 100658 - DNA, 330 bp, Homo sapiens; identical to SEQ ID NO: 34071
  chr22:18286546-18286876
  hypo

SEQ ID NO: 100659 - DNA, 97 bp, Homo sapiens; identical to SEQ ID NO: 34072
  chr22:18291184-18291281
  hypo

SEQ ID NO: 100660 - DNA, 269 bp, Homo sapiens
  chr22:18291579-18291848
  hypo
agcagagcttaggagggagcccggcagtacctgcttcgccccggagcgccttctccacagccacgcccctttcctccagccgccgctgcctctcctccacctgctgcagctgccgctggatgatctatgacagacagcacagactgagcacccggctctccagccctgcttcaggaggacacacaactccacacccacacgaggggaaacacaggagttgccgctctggaaagggctctagtctgtgggcggtgcgctcagggtgtggc

SEQ ID NO: 100661 - DNA, 86 bp, Homo sapiens
  chr22:18295720-18295806
  hypo
ttcctgctgaatgctccgggggagtagaagtggggtgcgggaggaaagggggtcctgctctcagagacagacgcagcaaaactggg

SEQ ID NO: 100662 - DNA, 31 bp, Homo sapiens
  chr22:18301739-18301770
  hypo
ggtcactggctgtgatcggatgggagagtgc

SEQ ID NO: 100663 - DNA, 31 bp, Homo sapiens
  chr22:18301995-18302026
  hypo
tgctgcaggacttccccgtccttccagctgt

SEQ ID NO: 100664 - DNA, 31 bp, Homo sapiens; identical to SEQ ID NO: 34075
  chr22:18316174-18316205
  hypo

SEQ ID NO: 100665 - DNA, 247 bp, Homo sapiens; identical to SEQ ID NO: 34076
  chr22:18328028-18328275
  hypo

SEQ ID NO: 100666 - DNA, 99 bp, Homo sapiens; identical to SEQ ID NO: 34077
  chr22:18329914-18330013
  hypo

SEQ ID NO: 100667 - DNA, 610 bp, Homo sapiens; identical to SEQ ID NO: 34078
  chr22:18340816-18341426
  hypo

SEQ ID NO: 100668 - DNA, 45 bp, Homo sapiens
  chr22:18345291-18345336
  hypo
ctgggattacaggcatgagccatcgtgcctggccacacctgagct

SEQ ID NO: 100669 - DNA, 300 bp, Homo sapiens
  chr22:18348547-18348847
  hypo
actgccactgcatttcgggccctccccgttcccaggagaggcaaggacgcaggggcatttgcaggttggccgcccccggcccatagccacactgctgcaacacccactgcttctcccccacttacaggagagtcaccattacctttccagacaggggagccactgccggtctcttcctttgtgcgtagccagagagtcgatagcagtagtgtggcttacagtagaatttacctgcagacagcaagaggcagggacagaggcgatgagccaggcacggatcctgaacgtgcctccctggtc

SEQ ID NO: 100670 - DNA, 30 bp, Homo sapiens
  chr22:18349191-18349221
  hypo
gcaggggtggggcatcgcctggcattggct

SEQ ID NO: 100671 - DNA, 48 bp, Homo sapiens; identical to SEQ ID NO: 34079
  chr22:18352968-18353016
  hypo

SEQ ID NO: 100672 - DNA, 212 bp, Homo sapiens; identical to SEQ ID NO: 34080
  chr22:18353508-18353720
  hypo

SEQ ID NO: 100673 - DNA, 411 bp, Homo sapiens
  chr22:18354731-18355142
  hypo
agaagtagcatgtgtcgctgcctcccaggttctgcgggaactccttcttcatggagccctgcaggaggtggcggtcgggaggaaggggagcacctcagggagtgccacacaggccctcctagaggcacagccttgcgagagcaaagccaaccctcactaaggggtctgctttgagacagacttctaactggctacggtcaactgtgctcttggctctgccacagagtgacggcaccgccacagtcactgcctccacgcactgacagagaacacttggcacaaccgcgaaagcctgggccagcctgctgctgacgagggagccagcatcacagtgcttcacaccagacttgagtaatgctatgatacagcctggcgacgccgggaaatatcgacaagaaagagtcttagaga

SEQ ID NO: 100674 - DNA, 280 bp, Homo sapiens
  chr22:18355584-18355864
  hypo
tgagctcactccgcccgtgtacatctttatatacttctatcggttgaagattacaaaatgaccagaatgaagggaaatgagaaggaaaaaaatacataaattaagaagacacggggaaaaaaagaaatctttgggaagtgcaatttgaatacaaggtgcagcagcaaaccatgccaacacagtgctcacaggcagggaaaccgggtggaagaaaaacatcgcgtcagtgtccacgcaggggtaccggcacaggcaggacggctgcaggggaagtgtcttc

SEQ ID NO: 100675 - DNA, 83 bp, Homo sapiens; identical to SEQ ID NO: 34083
  chr22:18358158-18358241
  hypo

SEQ ID NO: 100676 - DNA, 147 bp, Homo sapiens; identical to SEQ ID NO: 34084
  chr22:18363712-18363859
  hypo

SEQ ID NO: 100677 - DNA, 63 bp, Homo sapiens
  chr22:18371271-18371334
  hypo
agaggagacaagataattccacgaaaagggacatcgttctccggtgctcaacaatgcagaaaa

SEQ ID NO: 100678 - DNA, 106 bp, Homo sapiens; identical to SEQ ID NO: 34086
  chr22:18400897-18401003
  hypo

SEQ ID NO: 100679 - DNA, 181 bp, Homo sapiens
  chr22:18427240-18427421
  hypo
tattacattaagtcccgaacaatgaagtcggaggcagggagagcagagccgacccagcctccgctttgctaatggcacaagggcaacattccatgcaaagtttcggtgtgcaggcctcctgagaacccagcagtgccaggcagcagtgagcacacgcacccactgacgataggactgtggg

SEQ ID NO: 100680 - DNA, 30 bp, Homo sapiens; identical to SEQ ID NO: 34088
  chr22:18434476-18434506
  hypo

SEQ ID NO: 100681 - DNA, 30 bp, Homo sapiens; identical to SEQ ID NO: 34089
  chr22:18434745-18434775
  hypo

SEQ ID NO: 100682 - DNA, 135 bp, Homo sapiens
  chr22:18442885-18443020
  hypo
cctccaggctgagcgcggctgtggctccctgccccagcatggctagctcactcccattcctacagtagcttccgcatctcttcatgggtgctgttctcactacactgttgctacgggctccgtgctaggcagtga

SEQ ID NO: 100683 - DNA, 566 bp, Homo sapiens
  chr22:18443244-18443810
  hypo
acaggtaccacacatgcgaacccagcatatgggaaggaaacatgcaccctggaacaccccgcccaggagtgtgtgtgggaaggagactccaggagctctgcgaactgttctggaactggacctgttcaggattggcaaggggctccgggaacagatcctgtgggtgtgagactgtgtccccgtccgcttagggaaggaccatgggggtgagagggtggggggaaggaggcagatttggaaacagacacccgccccggggtcagatttgacccaggggggcccgcaaagtggggaaggaggagaggaagcactaagctgtgccagggagattctgaggcgagcaggagcagagcaaggaccgaaggagccagcacggggtcactgggagtcctccaggcatggaaagagcacgagctcagcaggaggtgctgggtcatgaggtgagcagggcaacgagacggtgcgggacctggtaggccacctggcagctttggcattgactggggtgcgaggggaaccactgcaggagtctgagcagggaagaatgacatcgctaccgtgtgtta

SEQ ID NO: 100684 - DNA, 202 bp, Homo sapiens
  chr22:18451006-18451208
  hypo
tagcgtgcccagtgccgagccctgcctctgtggaagcgttgggggagggagaaaagcctagcaaccttgccagagctcagacccgccctactgaggggacactcacaggtgagcaggtgttcacaggtgaggacactccacgggggagcagcacaggagccgggagctgctctgggaagagctgaggcgccagagctccaca

SEQ ID NO: 100685 - DNA, 31 bp, Homo sapiens
  chr22:18530298-18530329
  hypo
aagataggaacttgaacgaattgaacttcag

SEQ ID NO: 100686 - DNA, 122 bp, Homo sapiens
  chr22:18553828-18553950
  hypo
catcctcagtgagggacgataagagactggggctggggggatgggcagaatctttgctgttgccacaaactgggagtgtccgcagaaaactgaatgtgtctggacttcgccatcaaaaccca

SEQ ID NO: 100687 - DNA, 136 bp, Homo sapiens
  chr22:18616596-18616732
  hypo
atcctctttcacactccaccccgatttctcaaatgcgtttcttggctctctctcgtttgagagtgtgggtatccacacgcaccccctgctccagttccaaattctcagcaagagcgacacacctccagtcttctga

SEQ ID NO: 100688 - DNA, 451 bp, Homo sapiens; identical to SEQ ID NO: 34092
  chr22:18619402-18619853
  hypo

SEQ ID NO: 100689 - DNA, 31 bp, Homo sapiens
  chr22:18620943-18620974
  hypo
ctccctcctacctcagcgtccagtgtgagcc

SEQ ID NO: 100690 - DNA, 39 bp, Homo sapiens
  chr22:18641800-18641839
  hypo
aaacttttcttgttatcgaactttttgtgtgtgtgtgtg

SEQ ID NO: 100691 - DNA, 98 bp, Homo sapiens
  chr22:18951682-18951780
  hypo
ccagggcctggctcctcgggactcagccagtcctgccggtggagtgcgcaggcgtgacgctgagtgctggactctgtttccacgcgaggccttggggt

SEQ ID NO: 100692 - DNA, 31 bp, Homo sapiens; identical to SEQ ID NO: 34093
  chr22:18977078-18977109
  hypo

SEQ ID NO: 100693 - DNA, 31 bp, Homo sapiens; identical to SEQ ID NO: 34094
  chr22:18977348-18977379
  hypo

SEQ ID NO: 100694 - DNA, 30 bp, Homo sapiens
  chr22:19004073-19004103
  hypo
gcgaaacttgagcccggcactgaggatagg

SEQ ID NO: 100695 - DNA, 153 bp, Homo sapiens
  chr22:19020511-19020664
  hypo
ctccgtgggagcactccggccaccccaccttgttcccgagtctacctccatagcctggcgctgcctgtccaggctgtgctccgagtctgctcgcctcgggcccccccaccgccggcagttgaagtgcagctgcagtgcgcggtagacaggcaa

SEQ ID NO: 100696 - DNA, 76 bp, Homo sapiens; identical to SEQ ID NO: 34095
  chr22:19039217-19039293
  hypo

SEQ ID NO: 100697 - DNA, 194 bp, Homo sapiens; identical to SEQ ID NO: 34096
  chr22:19053068-19053262
  hypo

SEQ ID NO: 100698 - DNA, 29 bp, Homo sapiens
  chr22:19088602-19088631
  hypo
atcacagcgaaaccctgtctcaaaaaaaa

SEQ ID NO: 100699 - DNA, 30 bp, Homo sapiens
  chr22:19113940-19113970
  hypo
gtcattctctagcccgggagaaataggagg

SEQ ID NO: 100700 - DNA, 92 bp, Homo sapiens
  chr22:19120093-19120185
  hypo
aggtgcaagtaaaattcgtcaattaaaccactattttgattacgttccattagctttcttccacttagcagcaaagacgttccttactgacc

SEQ ID NO: 100701 - DNA, 34 bp, Homo sapiens; identical to SEQ ID NO: 34097
  chr22:19130727-19130761
  hypo

SEQ ID NO: 100702 - DNA, 30 bp, Homo sapiens
  chr22:19132814-19132844
  hypo
accgcacccggccaaaacaatctttttttt

SEQ ID NO: 100703 - DNA, 30 bp, Homo sapiens
  chr22:19346882-19346912
  hypo
cggctggtgagtaccgtctcccactccttc

SEQ ID NO: 100704 - DNA, 37 bp, Homo sapiens
  chr22:19584222-19584259
  hypo
gaggctgggttcctgccgccagcgagtgggacccctg

SEQ ID NO: 100705 - DNA, 99 bp, Homo sapiens
  chr22:19605267-19605366
  hypo
gccctttgcacagcccgcgaagggcacgtgggaatcctgctccattccaggtcccgggccagtagctccaggccgcgccagggtcggtgcagagcggca

SEQ ID NO: 100706 - DNA, 220 bp, Homo sapiens; identical to SEQ ID NO: 34098
  chr22:19620237-19620457
  hypo

SEQ ID NO: 100707 - DNA, 68 bp, Homo sapiens; identical to SEQ ID NO: 34099
  chr22:19621108-19621176
  hypo

SEQ ID NO: 100708 - DNA, 31 bp, Homo sapiens
  chr22:19624102-19624133
  hypo
gcacagaaaacagttccggacccttcctcta

SEQ ID NO: 100709 - DNA, 232 bp, Homo sapiens
  chr22:19644022-19644254
  hypo
tttcttggagggcccgcggcctcagcccggctccctccctcagctctggtgcgtggccgcagatgacccgagcggcctgggcttgggcttctggtgccctcgaggagccgccctgtgtgctcacacaggctcctggcggcgggcagcacagcactctcacttttggtcaccggtcctttcccgagggcagtctggcggggcacggctccagggccccgagtccagcacctcc

SEQ ID NO: 100710 - DNA, 31 bp, Homo sapiens
  chr22:19683861-19683892
  hypo
atcatccagctggtcacgccgatgcctcccc

SEQ ID NO: 100711 - DNA, 31 bp, Homo sapiens
  chr22:19697756-19697787
  hypo
aggccagcatagggcacggtgggcctggagg

SEQ ID NO: 100712 - DNA, 665 bp, Homo sapiens; identical to SEQ ID NO: 57809
  chr22:19706042-19706707
  hypo

SEQ ID NO: 100713 - DNA, 17 bp, Homo sapiens
  chr22:19713505-19713522
  hypo
tggacgcggcgagggag

SEQ ID NO: 100714 - DNA, 121 bp, Homo sapiens
  chr22:19713941-19714062
  hypo
tgaggacgctgtggggacggtgaggacgctgtggacgcggtgaggacgctgtggacgcggcgagggagctgtcagggcggtgaggacgctgtggacgcggtgaggacgctgtggacgcggc

SEQ ID NO: 100715 - DNA, 121 bp, Homo sapiens
  chr22:19714361-19714482
  hypo
tgaggacgctgtcggggcggtgagggcgctgcggacgttgaggacgctgtggacgcagtgaggacactgtggggacagtgaggacgctgtggacgccgtgaggacgctgtcggggtggtga

SEQ ID NO: 100716 - DNA, 17 bp, Homo sapiens
  chr22:19714721-19714738
  hypo
gacgctgtgggggcggt

SEQ ID NO: 100717 - DNA, 37 bp, Homo sapiens
  chr22:19725675-19725712
  hypo
caggaggagtggcttccgggtccggctgtgggctcag

SEQ ID NO: 100718 - DNA, 545 bp, Homo sapiens; identical to SEQ ID NO: 57815
  chr22:19748363-19748908
  hypo

SEQ ID NO: 100719 - DNA, 50 bp, Homo sapiens; identical to SEQ ID NO: 13337
  chr22:19748960-19749010
  hypo

SEQ ID NO: 100720 - DNA, 43 bp, Homo sapiens
  chr22:19771664-19771707
  hypo
taagcatttctaaagaacccccggagggttgtttttctttgtg

SEQ ID NO: 100721 - DNA, 30 bp, Homo sapiens
  chr22:19777094-19777124
  hypo
gggggcaacgtccccggctgggttctgaga

SEQ ID NO: 100722 - DNA, 356 bp, Homo sapiens
  chr22:19787000-19787356
  hypo
tctctggccaccagtggctctcgtagcgcatgacctcaggtgccaggaatgcgtggtgcggcgaagccaccatctggttccgattacccatgctctgctccaggaacctcattcgcgtctctactcccagcacccgccggggggagactgatctgggctcatcagaggcttcggcaggagggtgtgagggggacacagccgtgcccacgtggctctcagccaaggagtcacagtgcaggcggtgggtgaggacacctgtgggtgctgaggaccttcggtcaccttgcttgctcccgggtggcaagaacgctctcaggcagctcacctccgaaagcgcccccacaggctttccctga

SEQ ID NO: 100723 - DNA, 40 bp, Homo sapiens; identical to SEQ ID NO: 34103
  chr22:19798778-19798818
  hypo

SEQ ID NO: 100724 - DNA, 93 bp, Homo sapiens
  chr22:19827947-19828040
  hypo
acacctgacagataccacctccgccaggtgatgacgctcagcatcagcagggctaggtcatgctgaccacacgtcccactgacatgatagaaa

SEQ ID NO: 100725 - DNA, 76 bp, Homo sapiens
  chr22:19839317-19839393
  hypo
ggggctgcccaggcctgggctcggcctgttaggcgcctgaggatctcgcagacacggctgatgttgtcctgatagt

SEQ ID NO: 100726 - DNA, 412 bp, Homo sapiens
  chr22:19839603-19840015
  hypo
tcgttcgcacacacacggtgtccccacagcagggccgctcaatccagggatccacaaggggggtgtatgccaccccaggagacgccttgtccatctgctgccatggatgtgcgttggcataattggcggctgcccagatgggaatgcgagggccctgctgacggcaccggccacgaggcatgctgggagcacaggggagaagagaggagagccagcactggtgggtggtgggggtgtggacagatgtggcttgcacgacacaacaggacagggatggctgaacagggcgtggcagacccgcactggtccaggcaagtgctgaggatcagggagctgacagctgcagcctcaggagagctgagaagagctgagagactgtcagtcgcaggccatcatccgaggcaatctgtcc

SEQ ID NO: 100727 - DNA, 150 bp, Homo sapiens
  chr22:19856432-19856582
  hypo
cactgggggcccccaccgtggtggctgtctggtcctcacggcggccctccgcgggtggggtgggatcagagcttgtctgagctggtgaaggcgggactcatccctgctgtgtctgggcctcctggtgcggtcttccgccctgacatgcct

SEQ ID NO: 100728 - DNA, 30 bp, Homo sapiens; identical to SEQ ID NO: 34105
  chr22:19867650-19867680
  hypo

SEQ ID NO: 100729 - DNA, 133 bp, Homo sapiens
  chr22:19870366-19870499
  hypo
agcaaaggacctgccccggtgtgatgcccagagaggcaagccagaggatactgaggcggggagggcggggccaggtgggcccgaactagacctgcctctcaaccctgtggggacaggacggccccaaggccat

SEQ ID NO: 100730 - DNA, 56 bp, Homo sapiens
  chr22:19870814-19870870
  hypo
gcaggggccctggtcccgggacgcatgccgtacctccaccacgtcaccaatggcgt

SEQ ID NO: 100731 - DNA, 335 bp, Homo sapiens
  chr22:19872850-19873185
  hypo
ccggtatgcgggtggcgcccacctaagcatctggaagctgaagctcccgtgagagggaacccttaagtctccagctgctgtcccggggcaggagtcaaaacataccaacttggctaagccagcttgcgggaggccggctccagcctctgtgctctgctcagccgcaggaattgggtgccgggagggctggcaccggtcggggatcagcccagacacaggggatgccagcccacatcagaggaaggagctgggccccatgggcagggctggggcacgaaggaggggctgtggtccctgcaggccgggggctcacgctcagccgtctggtccctctc

SEQ ID NO: 100732 - DNA, 30 bp, Homo sapiens
  chr22:19875071-19875101
  hypo
gctggacgtcggcagcgtcctccctgcagg

SEQ ID NO: 100733 - DNA, 30 bp, Homo sapiens
  chr22:19880244-19880274
  hypo
aggagggctagggcgcggtgggagggagaa

SEQ ID NO: 100734 - DNA, 30 bp, Homo sapiens
  chr22:19880497-19880527
  hypo
caagagccctgcgtgcgctcaggcatctca

SEQ ID NO: 100735 - DNA, 135 bp, Homo sapiens; identical to SEQ ID NO: 34107
  chr22:19882798-19882933
  hypo

SEQ ID NO: 100736 - DNA, 30 bp, Homo sapiens
  chr22:19890116-19890146
  hypo
gcttggctggaaccccgccgccccacccaa

SEQ ID NO: 100737 - DNA, 115 bp, Homo sapiens
  chr22:19891184-19891299
  hypo
aggcccctctgggcctcgggctcctcttggctgcacttggatcccgacccccagtgcctgcctctgtaaaggagctccccggtgtgggctcaccatcctcgccttccacattcct

SEQ ID NO: 100738 - DNA, 340 bp, Homo sapiens
  chr22:19892351-19892691
  hypo
accaggtagaaatgtcccacccgactacgggaggcactcaggggccaggggagcagccccggggtccatattaatttcagctccattttaaaggcgagttaaaataaacatggggaatatttataaggcaaataaatctggcagaaacagcccctccaagtgtgagtggaggcctcccctcagccccagcccaagctgataaaatacagaaatgctactgtagaccctccgggcttattttgactgcagcagaggaatgtaacatgtaaacactgactcccatattacactgttacaacttgcattaacagcgccggacaaaagccgcattttcacagaa

SEQ ID NO: 100739 - DNA, 30 bp, Homo sapiens
  chr22:19893016-19893046
  hypo
gggcacccagagcaccgggccccctcccca

SEQ ID NO: 100740 - DNA, 371 bp, Homo sapiens
  chr22:19899689-19900060
  hypo
tgaacgtccccttagcggccatgagaacaagatgtgctggtggaggaagcggatctcaaacagtttatgcttccaactggcaaaaaaaaataaagtcaggaatttctcaggtttactcaaggaaaaccgaaaggtctggcaatcaaagggactaaaacgcaagcaagccttggcagacaccctgggagggcgtggcagggagagcgaagcagccctgagctgcctgcctcctaaggaccaggagcgcctgctggatcccctgtgagcccaaagagccgtcagcagctgcccgtgaggtgcagagcagggccgggccaggccagggcccctgtgcagtgctccctggtgcggatgcacgtgcagctctgcct

SEQ ID NO: 100741 - DNA, 30 bp, Homo sapiens
  chr22:19900330-19900360
  hypo
tgtgctcctcggggccgctcctttccctgt

SEQ ID NO: 100742 - DNA, 28 bp, Homo sapiens
  chr22:19923946-19923974
  hypo
cttgtagctcctgcggccccaactcaga

SEQ ID NO: 100743 - DNA, 103 bp, Homo sapiens; identical to SEQ ID NO: 34111
  chr22:19924378-19924481
  hypo

SEQ ID NO: 100744 - DNA, 143 bp, Homo sapiens
  chr22:19945257-19945400
  hypo
tggagaggtaagaccatcagccgtttcacagaggagggaatgtggacctcacgggggtctcatgagcttgcgagccgatggccaggcagccggtgcagaaggttcatccattttgatgaaccgtgaattcatctgtactttat

SEQ ID NO: 100745 - DNA, 30 bp, Homo sapiens
  chr22:19960510-19960540
  hypo
cactgtctgcagcacgtgtgacgccgcctt

SEQ ID NO: 100746 - DNA, 249 bp, Homo sapiens
  chr22:19960817-19961066
  hypo
aagctcagccatggcgtagctccctgaggggcaggactaggtgtcagaacacacctctgccccacctctccaggaaggagcagggatcccgcgagggcgaggggcactgccaggagagcccctggagaccgcctgtgtgcaggcggtcacaggagcccctgtgagcagggcgctgagcttcagagacagggccggggggactggagctacctccagttgggacagcgcccaagcgagagggccggggcc

SEQ ID NO: 100747 - DNA, 31 bp, Homo sapiens; identical to SEQ ID NO: 34112
  chr22:19963989-19964020
  hypo

SEQ ID NO: 100748 - DNA, 30 bp, Homo sapiens; identical to SEQ ID NO: 34113
  chr22:19965519-19965549
  hypo

SEQ ID NO: 100749 - DNA, 301 bp, Homo sapiens
  chr22:19966358-19966659
  hypo
tgggaccacgaggacggggcctggtgtgcatgtgggctttagcaccaggtctggtccacacctcaggcagcccgacgtgttcttgaagacagttgtccactcggcgtcccgtggcttggagtcctcgttgggctcacgctcccatcctgagtggggcacgatcacctcgtgggtcagcgtctgcaggccatggtcaatgatgaccatcttcaggggctcataggatgacaggttccacagggtgcctgtggggtgcgattggccaatctgtgctgaccatatgcaccgcctgcctacctcc

SEQ ID NO: 100750 - DNA, 311 bp, Homo sapiens
  chr22:19967263-19967574
  hypo
accagtgacaagctcacggacctcgttgtcccgggcagccctcagcaggcgcaccagggcaggcacaccaccgcagtcccggatggcggccttgttgtcagtgtcgcggccataggagaggttgcgcagtgccccacaggcccggcgccgcacctcagcccgcgggtggtccagcagtgccacaagcagcggcagcccccgcaactgccgtacacgccgcttgacaccctcgttctcaaagcacagatgctgcaggtaggcggccgcattggccttcacggggtccacggggtgccgcagcatggccagca

SEQ ID NO: 100751 - DNA, 417 bp, Homo sapiens
  chr22:19968733-19969150
  hypo
ctggtatgaaggccccgcccacactcaggcctcctccttgtggccgtgccatagtcaggctccagctcagggccaccctcgtcatcagcggccaggctgcgcgtgtcatcctccaagccatacggctctgcctggaagcgctcgggcagggagcggccacctggtggcccaggctcaggacccaccgggaaggcttcccggtggccaggcagtgtgaagcagccatcaccagggcctgggccaagggggccagcacgtgggggccgcatgcccagccctcgggacaggctgccatagctggggctgtcccggggctcggggccttcgggaaagccacccccactgctgaggtaggctcgagagagtgtggccactgggccaccaccacgcagcaggaaatgccggtccagggcacca

SEQ ID NO: 100752 - DNA, 31 bp, Homo sapiens
  chr22:19970585-19970616
  hypo
actcacagcctgccccgggcctctgactgca
